United States Patent Application Publication US 2011/0183924 A1 - sequence listing, part 50

SEQ ID NO: 139262 - DNA, 195 bp, Homo sapiens
cccataaacaaagtgtacaccggctcactattctcacgtttgtaaggtctcaaagagcccacagaccccaggccaagaggccttgatccaggactgtggggaagacttcctgctctgagaagaggctcagagaaggtgcactgcccaaagctcagggaagacagagcgaggcttgcaggtggcccttccatggtg

SEQ ID NO: 139263 - DNA, 367 bp, Homo sapiens
caggctgagtcccacctgtccagctgacgtcacagcctcttgcttgaattggcatgggcggtgggtgtgagcccctctggtgaggacagcgttggcagctgctaggcactgtcccccttgggcagctgtgggagcagagggaagagagactgggggtacccgccttcccagatggagcgggctgctcatgggacttagctggagtttccaaggagactgaggtttgggggtttctgtgagctggccggatgttgctgaagtgcctctgccctctctggcctctgtgcccttattatgtgtaattctgttctgcaccgccctgctgtgtaaacttggcaagttctggtcccctctcctgcttgtagtt

SEQ ID NO: 139264 - DNA, 185 bp, Homo sapiens
aggtccgtaggaaatgagctcattctctcaggctcctgcttgctttgctgcttcaagacaagggacagtgtgtgcataagtcggggctattcctctgcaggtctgttccctgcactctgggggaggagtccgttctagcttgcccctctgcctccattccccagaagtcagggctggcacccctc

SEQ ID NO: 139265 - DNA, 119 bp, Homo sapiens
agtctattagatgtctatcaccaagcaccattggcacctcaaatttttcatgttcaaaaccaaataaattcattatctatcttcaaaattttcttcttgtactcttaataaattggatt

SEQ ID NO: 139266 - DNA, 388 bp, Homo sapiens
cgacggtctttaccctgaaaaattgtgatgccagacagtaatttaaatccacacagaataacaaagagttccagtaaaagtaattatgtaagtaattaattacaaaagatggtataactgtagagttcttctccttccttctctgaactgatttataaagcaattatatagaacaatatgtatataattacattattcggtttataacatacagaaataaaatatatttggaaaaacagcagtccctccatatcaggagggaggggatacattccaagactaccagtggatgcctgaaatcagacacagtaccaaaccatatataccacgttttttttgatgtgataaccaagatgcctactaagtgactaatgggtgttgcctatat

SEQ ID NO: 139267 - DNA, 476 bp, Homo sapiens
cttaatttaactcaaaatgtaaggattttcttttacctacaggatacagcttagtgtttaaatttgcaggccctggagacagaaaataagggtctaaatctatgctttgtcatttactagctaggggacttgaacatattacctactggaagcttcagttacttcatttgaaaatggagacaaggttgcaaggtgtggtggctcacgcctgtaatcccagcactttgggaggccaagaagggcagatcaggaggtcaggagattgagaccatcctggttaacacggtgaaaccccgtctctactaaaaatacaaaaaaaaaaaaaaatgagctgggcgtggtggcgggtacctgtagtcccagctactcgggaggctgaggcaggagaatggcatgaacctgggaggcggagcttgcagtgagccgaggtcctgccactgcactccagcctgggcgacagagcgagacttcgtctc

SEQ ID NO: 139268 - DNA, 389 bp, Homo sapiens
atttacaagatacactatgcgttggagaatgcacagtggaagggcactggcctaggagtcagaagaccaaaggactcttctcccacttacgctaccttatcaccgtacttgaacaagccccttcgctctctgcacctcggcttcttcatcaatctgatggtttaattcatcccccaaacctctgtgaactcccacatgtgccagatgtggttctaagaaagaaatgactaagagtaatggataagaggctgcgcccatccctcagtagccctgcaccaattccactccacccagcccactaagcactaacggagagaatgcacaaagaacagttttcaaacaagtatgaaacagagagggtccttgagggaatacatgcttcacaaaag

SEQ ID NO: 139269 - DNA, 380 bp, Homo sapiens
ggaccagactttgaatgacaggccaaatttggaaagtatattatgctcctttgactccttgggatcatagaatctttgatctggaaggactctcaaaggtcatccggtttcattctctacttggttctggaggaggcccctatctctaattaatggaaactgaggattctccttattggctgcattttaaaacagattttgctcccacttgtaggtggtaaaaaggaaatatctggattaggagggcaaacttctgcttttaggcagtaccctgcattgagggatgtccaaatcaccttgtctttatttacacatccatacacaatggaatgctatgtagctgttaagatgaagggggtagagcaataaaaacaataacc

SEQ ID NO: 139270 - DNA, 512 bp, Homo sapiens
cgcacgcctgtaatcccatctactggggagaccaaggcaggagaatctcttgaaactgggaggcagaggttgcagtgaaccaggattatgccactgcactccagcctggactacagagtgagactctgtctcacaaaaaaaaaagaaaaagaaaaaagaaagaaaaaccataatattcccctgaaaccaggggaaaagttctctcccatagttcttgagaacgaggatatagtcaaatagtaaatgctattctctgcatcatatgcatgtttaatttcacaacattatagggcagttgcttgctaaagtccctcaggttaatctgtcgaattataacaaaacacatgtcagtttaatctgttctccagcagatgagagaaaacagtcctggtttctagctctctcatcctttagctaaccaaaatcagtttttatattatatggaggagtggatgaaattgcataacttcagctaattctccataaatattactcctctggccaagttgttt

SEQ ID NO: 139271 - DNA, 260 bp, Homo sapiens
tgtgtatgtagctatatcccctccaacacctaaggcaatgcatttcacatcttgctgagagcagataactcaatacctggaactagaaaattagaatctaaaagacggaaggcatctaaagaccagttcccatcatgccacagctgagaaattggagacccaggtggttaaatcagatattgagttaatgtcagctggaatgcagatgttcctactctgagttgagtgccctttcctctgtcaggttgcttgttccgctg

SEQ ID NO: 139272 - DNA, 400 bp, Homo sapiens
ttttataggggacttccttcagctaaaaactaatttttctttgttaaacatggattttctcattttggttttgagaattactcctatttctcccaagtggactcataaaatctctgggccaaattagtctaacagttccgatctatttttataatccaaatctataaactcacaaaataaagttatcttaccaaggaaaaacttctgggctggaagaaaaatagccactatgatatagggaagctagatttatctcagacaatggaatactctattctagagaataatatattgaaatacctgaaaaataatgggacaaactgacatcaggtgcttcttggcaagatgcaatgaggacacaggatctcttttttttgagacagggtctcactctgttgcc

SEQ ID NO: 139273 - DNA, 348 bp, Homo sapiens
ttttataggggacttccttcagctaaaaactaatttttctttgttaaacatggattttctcattttggttttgagaattactcctatttctcccaagtggactcataaaatctctgggccaaattagtctaacagttccgatctatttttataatccaaatctataaactcacaaaataaagttatcttaccaaggaaaaacttctgggctggaagaaaaatagccactatgatatagggaagctagatttatctcagacaatggaatactctattctagagaataatatattgaaagttatcagcaatattaagatccatttatattatacataagatgccctttac

SEQ ID NO: 139274 - DNA, 227 bp, Homo sapiens
tagaataagcatgtggcttccaaaatggaataattaatgataaggacataagaaaactcctcatctttccacatggagatatgtcttctgagtgcgtcaaataaaaaacagaatttccaactgttgatttattggtttgccattatgactaacccagcatgtttttataacagcccctaccttgacatacctatagtttggtgtatatccattcatcaatcctcatg

SEQ ID NO: 139275 - DNA, 137 bp, Homo sapiens
cagcacgcaagtcaatcgtagttgagtttgctagtgtttttggaatgaatgaatgaatgagttcttttgctttggagtctttcactctggctgtctctgtgggagacctgtgggcagtaaacagttatctacaaaaa

SEQ ID NO: 139276 - DNA, 322 bp, Homo sapiens
cctgccaccatcctgggcaacttgagaatccacctggaaagtgaacacctaaccgaaaattccttccacaggcccttcagtcattccacttctccaggagcctggtcccatagctgctccctgggcctcatcatctcccagaattgttacatctcgagttgcaaactcctgtgtcctgtgtcctgaccagtgcctcttccctttctccccctctcttcctgtcatttagttttgttgaagcttccagttccctggaccctttcttagttttctcccagtttccctcctggcttcacctctccgtcctgcccagattgcatga

SEQ ID NO: 139277 - DNA, 298 bp, Homo sapiens
acacctcatttcagttcatatttttctgatgcttcaacatcccacaatcaactccagcctgggcagcagagggacagtgagactgtctcgaaaaaaaaaaagtgttataattttattcaatgcacaaaacaaccttgtatattagcatgataggccatgcttttatatgtgtttatgaatgtgtgtatgtgtgagtgtgtgtatacacatttgtgtatacgagtgtaagaatacacacacaggagtttttattttttattatttctctttctattttaaattaaatttttaacaaaaa

SEQ ID NO: 139278 - DNA, 259 bp, Homo sapiens
ctccttctggacaaagagcagggcctggggcacccgctatgtgctttgcaaatgactaatgcacaaaaataaacatgtccttgattttcctggtaagtcctggcttcaatgatcgtacttcgctctactcaaactttttaaaacaccagaaacataactgtctggcaaactgcctgtcagactgggaacggcccaaaaatcccttttagccagtgtgtctaggtcagggacgggttgtcatcactgaatgtattacaga

SEQ ID NO: 139279 - DNA, 288 bp, Homo sapiens
ctcaaagaaacttacagcaataaattgtgaataagatttgggaaggggtcacggtaatgatggtggttcataaggctacaaagggaagaccatgcaagtcttataaatgaatatatttggtctatctactactaatgtgaagatgctaacagattttatgcaaagcaggtgaaacggtagatttttatttggaaatatattcacaataattgactgcttcctttgggaaccacaggtactttgggaatcttttttgttttttggttgagacagtctcactctatcacc

SEQ ID NO: 139280 - DNA, 168 bp, Homo sapiens
gaagatagctgtacttcaccatgatacagtaagaggaactaaactaaattctttacaaaacaaacaaacaaaaaacaaaaaaacacacacacaaataaaaactaactgcagacaaaatataatcaacagtgattttttaaccattgacaagaagctgaggatgctgat

SEQ ID NO: 139281 - DNA, 390 bp, Homo sapiens
tggcacatgtctgtaggcccagctacttgggaggcttaagtgggaggatcacttgaggccaggagttcaaggccatagtgcactatgatcatgcctatgaatagccactgcactgctacctgggcaatacggtgagactctatcttgtaattttttttaattaatgcctttttaagagttaaaatcatgtactggttaatttcactaaaaccagaaattagtggaaggcttgattaagggaggctttatttgatgttaacttaccattccatagactataaagaacattataaaaaaaccctctaaagtgacacatgccccaaatgaccaagacataagcaaaccttttaaattactcatctttcatatgtgtgtttgttcccctactat

SEQ ID NO: 139282 - DNA, 356 bp, Homo sapiens
gaaaaccaaaatatttacaatagcattttcccaaaaagttaccaataaataccatttctgaaaccaaatttctaaaaggtgcatgattttaaggtagtttattcttgttaaaaacatagtaacagattaaaatttaagaataaaaaataagtgagaacacggtttttgatataaaagaattttttgagtgtttgaaaccgtttttaatccaaaacctgaaatacatagattacatgaacacccaggatgctttattcttacaataatgcaatgtaaatatttagatatctgaaacgaagtatagctagattatctagtataattagatatacctagtcttatgcaagtagtaagcc

SEQ ID NO: 139283 - DNA, 554 bp, Homo sapiens
gcttctgggtaaacacatacaaacagtggcaaagaccaagtacagtctctcgcctgtgctgtctcatgggactcaatggtggtgaagaaatctcaatcggacaccagaggtgggggcaactctgcaagctcacctgctggacgtgagaatgttggaacgttccagttggaaggttcctatgcctagcctgtgtgccatttcatggcagatatgtaagaaaggaaatggccctactgtagacagcttatggggcccagaaaggcactgggctttaaagagcgaaatgagtgtgtcatttccacatgaaggagaggcaaggaaaagccccacaaaattcctgttacccgctgaactccaagctcaccaaccagattcatgagctttctcacattttccatttccaaataactgttgtgttgaatcagctgtgttaatgcctttattctttgttttttttttttagacggagtctcgctctgtcacgaggctggagtgcagtggccccatctcggctcactgcaacctccgcctcccaggttcaagcgattctcctg

SEQ ID NO: 139284 - DNA, 436 bp, Homo sapiens
tctcagtctcaaccacggatgcaaacaagttttatctgtctactgcgactttcagcccttgtcaaaaatgccacaatcacgggttcccatgccacatgtcatcatctccgcttctgcacctggatgctcagttaaggctcagtcctgaaaataaactgtttgtgaatgaggaaatcatctccgcataattggggctgctgaagagcgtgagatatcattccaattgaacagtcttctgaatttttaccctgtgatctgaggagtggtgcatctaatcaatcacctaaataatgattcaatctcttgttgatgtacccatctatgggccttctatagacattttctccaggcctccagtgttttccctatctcctggaagaacatcagcacttcctcaggagtgaatcaagtaagtcatcagcaccagctctagcac

SEQ ID NO: 139285 - DNA, 692 bp, Homo sapiens
ggacataatatagtctaagtccatctaggatcttctgttttaagagacaggtgtaaagatttactctcaaactgcaggatgggtggaaagtattccagatcaaggttccagttctccctgggagcacccacatttcttttaaggtttctagcagagatgtaatgatgaaattactcacaaaagggattagatgcaggctggtagttgcagttactgggttactataaatttcgtgtattgatgttctacatatgtggtaagaatttatttactgtgtagtatgtttaaacatttgtaagttttatgagctagttcctcctgtgtaagctgacaattcaagttgttcactgttttcctgtgacagttattatctggttataaaattatcagataaaaataagagaaggttattactttttcaaatacaacatgaaagtataaaaaagcagactttcctttgtaattgcataacattgagataaatacttcagagtaatttcatctgatacttattaaaaatcattttcatgacgattaaaaaaaaaagggttcccaaccctttggtagatcaattcagaccaaaattagtttcttgaaaattaagcacaataaatatttaaagcacaaagaaaaatattaggtaaagaaatcatgaagtacttagtaattttccaagtagaagaacagtaaac

SEQ ID NO: 139286 - DNA, 413 bp, Homo sapiens
cacggcagcttagtctgtctctgccaccctttgatattccagatgcaagggcctagagggaaggacccacttccagttttctgttcttacagcattaactatcatctcttcttctcctctttgcaccatttttgaagcttgggatacccctacctcttctgttacagaataagattggttgaggggggccatggctaagtggatgggacaggaatgaatttgtgtgatagacatagcagaggcttggggattggaacagcattagtggacaaagtgaacacagggagcagtgctcacagatccatctgcagacagcaggcaaagggcacagaaaccagtggaagttggtatcatggtaactgggcttcctgggaagaaatatgacctgtgttgatttgggaggggagatacag

SEQ ID NO: 139287 - DNA, 313 bp, Homo sapiens
gaatggcaccaggactgcagctgtgtgcagaggaagggttagacctggacaggtcgtgtttggaggtatgacacgggggacctgcaatggctgtgtgcgtggggtgtgtggggataaggcacagtcaaggaggacccctcagctgtttggccgtacagagaaatggtgggctgttttctgagatcagtccttccaagtgcttttgaggcattcttaaggtaattagtcaaccaacagtggttgtagtgaaaaaaagtgattttaaaaatgcattagttgatgactgatattcatacctgagggtagagggaga

SEQ ID NO: 139288 - DNA, 221 bp, Homo sapiens
tccaaagctacacactgagactaggatgacaacgagctacctactcaggattttgcaaggaccaaaaatcttttcttactttacaatactctcaaacagaaactattttaaactacatggttaattcaaccttgtggactggatggtcatcaaaatgattatataattatttcaacatagttgcatttctttctttttctttgtgtgtgtgtgtgtgtgtg

SEQ ID NO: 139289 - DNA, 442 bp, Homo sapiens
taagctatgcatcctttgattttcaaattgattataaaatccttagtctcatctcttacaatccctggtctaaattttaaatgtgggggatcattttgtctgtgataagtaccatcattaaggttaatagaggtgctggaggaacatctgagtcataaaggtaaggacatttgggggatacttcacagagagatgattgtgcaagtggtatatgaatgctcaactggaatgttttccagtctaaatagataaatagaagtagaggaagattctctaggtagagggaacatcttgtactaacacaagggcataagcttttctgggaatgataagaatccctgcacagctctcagacagaatttatgaaggacgtttaaggatgcaactagaaagatagattaaggtcacactgggaaattccaataaataatattaaatcagc

SEQ ID NO: 139290 - DNA, 397 bp, Homo sapiens
cagaggatcctgtgagccttaaccctgctctggcacctcagctctaggttcttgaggcatcctgttccttcttctccaacctctgatcttcctacccaccctgttcttctctttcatattccccctcccctctgaatcacagttattcatggactcctctatagttttctatctttccttacaacccacaccctcagaacctcacctgtaagctcacaagctatttgctgatttgggaattttcttgaataaagactacccactccggccgggtgcggtggttcacgcctataatcccagcacttgggaagtccgacaagggtggatcacttgaggataggaattcgagaccagcctggcctacatggcaaaaccccatctccagggtaccgagctc

SEQ ID NO: 139291 - DNA, 402 bp, Homo sapiens
tttctctcaggggcattggtccattggtcatttttaagttcatatttttgtggttgaaggggagtccagggcttcctattttgccattttaatgttatcactcctggttctaggttttatatatggtgatattgaagatcagtttgtgattgtaagtgctgagactaaatgagactgttatcatcatcctttgattgtgaccactttattaggactatcgcttttcccttaagcctttttgtttcccagatgaatcccattaattgacttttggggtttaccttttgggtaaatcttcttactccaagactctgtgtctatgtaccatgctgattaatattatactagaaagtggtttgctgttttatttgactacagcttaactaaaaatcttttgacttt

SEQ ID NO: 139292 - DNA, 214 bp, Homo sapiens
gcataggaggtacgtacctgtggtcccagctaggcaggaggctgaggcgtgaggattgcttgaacctgggagttggaggctgcagtgagctagtatcacactcactgcagtgagtgaataagccgagtgtttggggcacaaggagagctgggagtttatcggacaaaagtggctatgagtggtttgattggatgatgaaaactttgggtcaaag

SEQ ID NO: 139293 - DNA, 346 bp, Homo sapiens
gccggtgcgactcgtagaggaatccccgtccaaaccgtatcagaactattaatagaagaggctccagggatcgtgtggccccaaacccctcattttatacggaaggaattaagatgatgaggagctttctgagaccaaaacttaggtctctctgcctccctgcactgtgctttttttttttttttaaaccagaacaagcatggggaagagggcaaaaagcatttagcacaaaatctcattaagaaattgacattcatggccacctgatagtgtatgaaacactctttaaaattcaactgcttccccatgtttgttctgatacggttttgagggatcctctagatca

SEQ ID NO: 139294 - DNA, 374 bp, Homo sapiens
caacaaaagaaacctattggcctatgttcttgataaataaagacgtaaaagtcctcaaaaaaatactaacaaaccaaatctcctaaacccagcagcacattgaaaaaaattattcaccatgatcaagtgggattcatccgagggatgcaaggatgaatcaatatacacatattaataaatgtgatacattaataaatgtgatacatcacatcaacaggatggaggacaaaaaccctatgatcatctcaatatatgcagaaaaagcatttgataaaattcaacatctttttgtgacaaaaactctcaccaaataaggtatggaaggaatgtacctcaacacagtaaaggccatacaagacaaacccgcacccaat

SEQ ID NO: 139295 - DNA, 235 bp, Homo sapiens
agttcctgcctgaggccctctagccaacttccccttgtaatctctgtgatagggatctcatttcactccaggcaggggctgcccactgcatgagctagcagcctgcttttccttatttgctgttttatcctattgtaattttcatccacctatagaaccgtgctcccgggcgtggtggtcacacccgtaatcccagcagtttgaaaggccaaggcgggcagatcacttgaggtca

SEQ ID NO: 139296 - DNA, 475 bp, Homo sapiens
tgacagcacagggaaagaacatgatagaaatagactttcagaaggaagggccttccataacaaggaatgccatctgtaatccagactttttcctcctcaggaatccagtcataggcaaatctctatgaatcacagataaatggaaagaagggtgggagtgtgtcaggagtaggatgctgaaaatgtgagtagcctgttcattaattggtcccttggaaactgagaaggcaacgtggcatacatgcaatttccatggaatgatggaagactggttgtagttagtatgatactataatgctcagatcacaacggggtcacccttattcatgattgagcattccttcttattagtatcccaatgtgaaattgtttctcaaaaaaggagggggcgggtaatttttgtacaaaaggcttttactccaaaataaagtggcttctactgtatttctcctctggagccttgccgctggctcca

SEQ ID NO: 139297 - DNA, 427 bp, Homo sapiens
gggggccctgggcccggtcagtcctcagcggctaggctgaggagctgcgggaatgcaagcggttcttcactttttgtcttgttaaaggggtggtggctctgaggagcaggcttgtctgtctgttgagaggacagtcggacttccagtggcctgtctgctggcacactggacaaggactctttggcactcaagggttaggatacacccatgcccagtggccttctttgccacacttaaaacaaggcccggagggttgctgctatcgggtcttttgtgcccttgggtgatacggctgggttgatggacagccgctgctagaagctggtatttagcacgatctctttgggctttatctaatttattttgctcatccctgttattaaagactttgaaagccaagttaaggaggtctcgttgtggggtctga

SEQ ID NO: 139298 - DNA, 281 bp, Homo sapiens
tcagaggagaggagaatggcgtgaatggggagaaagaacagaacaccgcagaaaagacgctggagctcatctctgtggccccaacgacactaactggcccaggtcacactggctggaggctggtctggtttctacagaggctgaaagcagcacacagtcacctcagtctagaaacagaagcagacaaaaaggcagaggtgggaatcctctccaacaggacgaagtagcggtcaggaatagaaacacagggacacagctccccggcaagagctcaaatccac

SEQ ID NO: 139299 - DNA, 412 bp, Homo sapiens
atttgtcttttctctctggaggctttgagagtctctctttggaggtttgcattttgaagttgcactacaatctgtctgggtgtggatttatttttgtcactcatggtgatttttcaatcccagaactcatgtctttcttcaattatgggaaaatctgcattcaatatcttagcaaatattgcttctccttcattccctccattctcttcttctggaactctgcttggcatatactggaatctttccatctatttcctgtgtctcttaactaatctttcataatttttattcattgccccgggttgggtctctcatgaattcctcagcactggcttttaattcactaattcttcaattatgtccagtatcaagtcaatgtcatctattgaggttttagtaataaatctaaaac

SEQ ID NO: 139300 - DNA, 298 bp, Homo sapiens
tgaactggctttctctgcagctgccaggagatatcacctctaagtgtgttaccgacaacttggaacgtatcacaacatcctcagacagctccttcgcttctctcaatgagccatgaggatacagaaaggagggtcagcaacatgaggctgaagctcttgggtcatcataatgtagggaagaccagtgcatgtcaccccccaggtggcaatgaggaattgattgctggtctcattgcactgacaaaacctcaggcagtacgtttttgcacaatccatgtatccatccatccaatcattc

SEQ ID NO: 139301 - DNA, 788 bp, Homo sapiens
ggaggcgtcggtggcagatagaacagtgagatgtgcttgttttgagaatgtatatccataatgggaaagaaatgaggggttctaaaagacaggtgagaggttgtgtcctacatggaagtggtcatgaaaggaagaaaggatagagtgggcttgtgaggcagggagaaggaattttccatggtctaagaaccacttgccttgagttggaaaggactggtagaacaggttttcagaagaagaataggtgggagtgatagatgagaaagacaagtattggctgtctggagcggagactggaacgtgtgcaggcgctgaggctgcctcttttgctgttttgtgggcgcagacgtttccttgggcaatggggtcagatgttttttggtgccctttgcagtggattactctggctttggctgtaaggagggcagttttaaggagagcctttattagacccagctggtgcctgctgcttgttggtgggagaaacccccacgcctttggtcacaggagccttctgctttgattgttgtggtatgagagcagaggaaaaacacagcttgagagctttccccaaaacaaatatacttctagttgtttttttccagtagaaattttatagaaattagggtgcttagagaatttaagaaccatgagtaagtcccccaaatgcatcctactagctttttggagaaaacttctatttttcccctttgaaagacacaaaggtatggaataacaggtttgtttatttaggcttagttataaaatttatcaaaatagctacactt

SEQ ID NO: 139302 - DNA, 146 bp, Homo sapiens
tcccactcctggagaggtaggcagcgagggacactggcgttgcagggcccctgggacaggctccactcctcccttcttgctctggaggtgacacagtctagggatctagtgaggaatgggacctggggccagcgtgcttggacaag

SEQ ID NO: 139303 - DNA, 167 bp, Homo sapiens
ggcattcgagatacagagaagaggattaggaaagagggaaagaggtgagtttgtgcaagagcaggaagtgcccttctcttacccccagaccacagtgtgggggtttggaggggaaagagatggagggacgagctggggccaatgatcaagggccatgtgtactacac

SEQ ID NO: 139304 - DNA, 182 bp, Homo sapiens
cttgatccagagtatacaaggtgttcttccttgtttggtacatgtctatgctttggtaaataataccaagtaagggtattcagtctgtgttctttccaatgctgagttctgttcattcctttttttctttttttaacaagcttttcaccagagtgagatgatgaacatatccaatcaacaaa

SEQ ID NO: 139305 - DNA, 1082 bp, Homo sapiens
ggaggcagcaaacatgctgtcctgaagtggacataggggcccgggttggaggaagaagactagctgagctctcggacccctggaagatgccatgacagggggctggaagagctagcacagactagagaggtaaggggggtaggggagctgcccaaatgaaaggagtgagaggtgacccgaatccacaggagaacggggtgtccaggcaaagaaagcaagaggatggagaggtggctaaagccagggagacggggtactttggggttgtccagaaaaacggtgatgatgcaggcctacaagaaggggaggcgggacgcaagggagacatccgtcggagaaggccatcctaagaaacgagagatggcacaggccccagaaggagaaggaaaagggaacccagcgagtgaagacggcatggggttgggtgagggaggagagatgcccggagaggacccagacacggggaggatccgctcagaggacatcacgtggtgcagcgccgagaaggaagtgctccggaaagagcatccttgggcagcaacacagcagagagcaaggggaagagggagtggaggaagacggaacctgaaggaggcggcagggaaggatctgggccagccgtagaggtgacccaggccacaagctgcagacagaaagcggcacaggcccaggggagagaatgcaggtcagagaaagcaggacctgcctgggaaggggaaacagtgggccagaggcggcgcagaagccagtagagctcaaagtggtccggactcaggagagagacggcagcgttagagggcagagttccggcggcacagcaagggcactcgggggcgagaggagggcagcgcaaagtgacaatggccagggccaggcagatagaccagactgagctatgggagctggctcaggttcaggagagggcagggcagggaaggagacaaagtccaggaccggctggaggggctcaacatcggaagaggggaagtcgagggagggatggtaaggaggactgcatgggtcagcacaggctgccaaagccagggccagttaaagcgactccaatgcggaagagagtaggt

SEQ ID NO: 139306 - DNA, 265 bp, Homo sapiens
gctttgagtaagacccaaaagggcttttgctagggctacagagaatggggcaaaatcagggaagtagtgatgaaacgagatacccagaagcaggcccctgaacagaaattttccttggctgcagcatcccctttgcttaccttgatgcctgggactgaaatagaggagatttcagccttggaatcctgaattcattatctttttcctacttactaacatacttagtctttcatgctttcattcaacaaccacttactgagcaaca

SEQ ID NO: 139307 - DNA, 492 bp, Homo sapiens
agatcgagctcggtaccaccgtatatgtacgtatgtaggaatgcagaaaatcaaagtttttaaatttagagcctcaatagttataataaagtatgtggatgagaactttgcgtggctttcctaagaatgtacttgagtctgggtaatcttccttgtgctattgcttttgctggaaaccatcgactgaactccctaagatacagtaaggctcatccttagaagtagaaatgcaacaattacatgtggaatgcaatcgtgactttaaaattagtcaacctgttccctaacgcttccctacaaacacactccttcatgtagcacttttaggatagattagaagtgaaggatctcattatttttttccaaaactgctgtggaatagcagctctgtggacatataaccaattttctctgagaaatagtaattctgatgcaagtcctctcctctcttcctttttactccagggatcattgtcacaacattctgaaact

SEQ ID NO: 139308 - DNA, 290 bp, Homo sapiens
tgttgcccagcctggtctccaactcctgagctcaagcaattggcccacgtcagcctcccaaagtaaagtgctgggattacaggtgtgagccactgtgcctgaccagaacagcagtcttctgaatctatatttcacatggggcctagtctgtccctgcaatgctgtgagggacagaggtaaagggtaagtcctcctggggcaggtgaggccattctgctccattggtcaccaccctgcccagcttggtgtcctgcccaacccatctacggataaatgggcacacaaatgtg

SEQ ID NO: 139309 - DNA, 294 bp, Homo sapiens
ctgacatctgaaatcacaagtcttcaggcagctccatacctctcttgtgtctcattagtatattattttatctaagttgccattaacttgaatttcactttttttttttttttgaggcagagtctcgctccattgcccaggctggagtgcagtggcatgatctaggcttactgcaacctatgcctcccaggctcaagcgattctcttgcctcagcctcctgagtagctggtattacaggtgcacaccactactgaccggctaattttttgtatttttagtagagacggggtttc

SEQ ID NO: 139310 - DNA, 193 bp, Homo sapiens
ctcccctccccagccaaaggctacacatgaagatgaagtgtgttcagacatggaaaaggcttaaacaggccctggctcgcagtgagcctccgatgaaagtcggctatttctgatgcctcttaccacagcctgtgaggcagaaattctcaggcttctttttagagctgagaccaagggggttcagagagggtga

SEQ ID NO: 139311 - DNA, 305 bp, Homo sapiens
cttccttggtagtcctgagtgacttcctttatgtgacagttacgaggaatacctgaaattatagtggtttggttaaattactgttagtcaccaggcctattctaaattagaaaaataaagtgcaactctaaattatccttgagtactggtagattaggaaaaataattgaatgaaaaccactcataatcatcaaatttgttataaaataatttctgtcactataaaataatttgaattaagagtttacttgccaaatattttcctttttctggacttctgaggatgctgtggaaaaataattgtc

SEQ ID NO: 139312 - DNA, 255 bp, Homo sapiens
gtgtgtctgggactgtgtgtgtgatgtgtgtaggcctggcatgatcccacatatatgtacccatgtctactaaagtgtcagctccacgagggcacggatttttgtctgtcttgttccatactctgtccccagcacttaaaacagggactggtgcacagtcagggcccataagtcctgaatgaatgagcgcatgaaagtgtgtgctcatgcctgtgtgtgcccacgtgccaatgcctgtgtagacgtgtgactgtt

SEQ ID NO: 139313 - DNA, 288 bp, Homo sapiens
cgaacacacacacacacacacacacacggcacactttcaaaagtagccagcacgtagtcggccttaagccatgcatgttacctccaacctcagattttctctctgtctgagtgtctgtttgcagataacttaaaatcacccatctgcatccccactcaccctccagaaagcaaacgtggagagctcactctgcagaataaaatcaagaacaccacggttgtagctgctgtggactcggcggtctgagcagcctccccgagagccgtagttgctagtagaagtaagatt

SEQ ID NO: 139314 - DNA, 153 bp, Homo sapiens
ccaacctggcagccctagaaggtatatcctactcccaagaggagatatttgtgattctatctcctaaggagagaacagcaaacagctaggaaaaaacccagattagctgcctctgacaaattatcaagggcattctggctgggtcagttgagt

SEQ ID NO: 139315 - DNA, 967 bp, Homo sapiens
ttacaggcgtctgccaccacgcccagctaatatttgtattttagtagatacagggtttcaccttgttggccaggctggtctcaaactcctgacttcggttgatccacccgcctcggcctcccaaagtgttgggattacacatgtgagccaccacgcccagccaaaaatgcattttaatataacctcaataaacctgttgtaaaggtgaaaaatcattggtggaccattttaaattagcggctgtctactattttgcactcactagttggcaaagcgttaattttaggaagtgttaacatgccattgttgggagtgactatcagagctttgaaattatagttgggtggggggttgtacaaaggatttctgtaagataactttcattaatcatatacttgaggaaatactggaaacttttatatccatgagttattaaacagtttttaggataactttattaataaaagagaatctcagcttaatactttcaaattgtttgttaacactctgttcagcagtaaagagccattctaccatgaaaaaaagttaatcttgttcattgctgaatttctatcccctagatggggactctgcacctgaggtatataataatgtttgttgaacaggtagctgcaggtgtaaacacaaacattattctggtgttagaatgttatccaggttgtaagtgaaaaccactcacctgtttcttgagcagaggttttaacattgaaatgtgcagagcctcgctgataggaatggatgtaggtctgctaaaatttaaccttgcttacattgctgttgaaattgggatgcaagctgtccaagcacattgtgttaaacttttaagtttatagtcatttatccgttattcacttttttttttttttttttgagacggagtcttgctctgttgcccaggccggagtgcagttgtgcagtctcggctcactgcaacctccatctcctg

SEQ ID NO: 139316 - DNA, 346 bp, Homo sapiens
tcctggcacagagcacaggaggcacctctgcctgcactcaccgtccagggccctcctccgtctctgcgatgccaccctcatttcacagacgaggacgctgagggtcaaagctgtgagccacatccctcgacaaggctgtgagcccattccctgtcttcctgcctccctgttaccaccttccaggcccccgctctctggtgcctggaatgagcattctggagttgtcagaacattccttgaccttccaataaaaggggtacaatctaaatacaaagtaacatccggggctacaaaagcgaccactgtggccatcacctatgaacctctaagaccccaaatcaacaca

SEQ ID NO: 139317 - DNA, 319 bp, Homo sapiens
ttggtcctctctgggtctcactttctcctgtctaatggatgtggagggcaggtggcttaaggaaccctcagggaccctctgggctgcaaggaccctggcagggtgggaaggacagggaaggactgaacatccagactggggtgggggtcaggggacaggaggcagaggaccaggggggtcagttctgctaggggagagactggctgaggtagattgtgtcacagaaagaaaaacaaaacagctccaaggggatggacccctccctcatctgactcctctatcccagtgaaatgaagggacaagccagtggagcaggggg

SEQ ID NO: 139318 - DNA, 330 bp, Homo sapiens
ttggggcctgcgctagggcgggagcggcgcgggctggaaggagagcactccttcctgtgtgccctggggctcctttagtgtgcgggagcctacgctggaactcgcccaccacccactgctgcgagctctcaccctgccgaggagctcagtctggtaggagacaagcgttgtaaagcgggaaagttgaatttccagggccctagtgggttccttcctggaaagacttactgatatactgtgtgaaaaacccccattctttccctaagtagttcacaattcaagagtgggagaaagaatcgtagacgaggaaagggcaaatttcaagtctcc

SEQ ID NO: 139319 - DNA, 511 bp, Homo sapiens
cttcgtgggctcaagcggtcctcctgcctcagtcttccaagtagctgagactacaggtgcgtgccaccccactacacattaaatttggggaagcactgctttaactctgtctcactgcagtccaacgtcactacacccccaagtcaggacaatggactctttcaaggcagctctcccactaagaaagggccatcactcttgcaatgtcctgaaaatacttgtctaatgttatatctggcccaggacaatattccagatgagtcccaagtccctcactcctttcagcatcagcacaaaatccacgcctccccctggctggaaatatgtgatctatgaccacagtcaaacataattcctccgtggatcacttgaggtcgggagtttgagaccagcctggccaaaatggtgaaacctcgcctctacgaaaatacaaaaattagccaggtatgatggcgggtgcctgttatcccagctattcaggaggctgaggtgggagaattgcttgaaccca

SEQ ID NO: 139320 - DNA, 744 bp, Homo sapiens
atctcctcttcttcaaagactgtgtgtctttgaatgcgagctcaccaggctcccccaggcttcagtcatgctaactgattcagagcgaggacatggctcttttgaggttgtaaataatacatcaagtcttgaaggcttatctgcttgtctcccttgactttttcaagaagcagctttattgataataatttacataccataaaattcacccatttacagtgtgcaatccagtgaattttagtgaattgactgagttacaaccatcaccgcagatgagttttaagatattcctgtcactccagaaataccccatgctgctgtttccagtcaatatctgtttccaccaccagctccaggcaaccactaatctgttttttatccgtatagctcctcccttgactctccctgccacttcctcagaattggagtgttttctggactaatgtgtgtgctatttgcctaaggaacttttcttccgattcagttacgtaactttgtgatcttctctttcactcattctccccatgttcaagtttctcttggttttctttgttgtgtgaacctagtctctgttcaccgagttggcctttggcttattaagaaaactgagctttttcccctctttcagaatatggaaaacttgaatagtgtcatgtacaaatattgtagtgtcatgtacaaaccagatgctgaatgttatctaccgaatgaaggaatctgagccctgctaaggcatgggaaatc

SEQ ID NO: 139321 - DNA, 880 bp, Homo sapiens
gatctttgcaaggacctattgtgttataatacagtctatgaaaaatatcaatatttgcatttgatcacatttaaaaaaatcacattcttttgtttgaatatcaaagctaatatgtgagtgatttccctgccaaatagcacaagtagcctttcctgggtgtttatgggcatttatctggttaatgattcccatcatagtgctgtcacccatgccattgctaaacttatacagtaacttttttgttttcacctcagcatatgttgagagtaggaaatagataggactatgccctcaaattttacgtttatatgatgttaatcctaaaggtccttgtgacttctgaagtaaaaactcagtgttgtcattttacttactgaattgttagctgagtttagagttgagtttacaatggagtaaacaaggtgtttagtttgatgtatgcttttagtctttcagaaaaaaatgtttatacttggaaagaatagtttatttacccatctggcctagtttagacaaaaacacagagtcaaatgtcaacagaattctgaagttataaaaatgacagtgtggctttttttttttttaaccttccacctggtgcttatgcccaagtgcctagctttctttagctctcaactaataaaggtaatgtttagataacatttaacgttaagttgcattgtgtttatgatcacatatctcaaatattggtacacgaaactgtacaacaaccttttttattagattttcctacgaaattccttattatattccctaagatagctttttcccaccttcttcttccttctcccttctcaggtgctccaataattccaacccctgcagccagtgactttattatatctttttttaaaaatct

SEQ ID NO: 139322 - DNA, 509 bp, Homo sapiens
tggcctttgatgaatgatgttaggttaacctgagataaaggaaatccccaatccttctaatctgcccctctccacctggacccaccacctccacccaggcttggggagttaaggctgatgtagatggaggatcaattggccaaaagaggtgaattctctcctcaagttgccattcccttactacaagaacctctgatcccacacagtctactggatctctgggtatcaaggaaatgtcataaatctgaactcactttacaatgtcaccatacagaaccaagtctgacagattacgaaggcatgaagaagtggcttgggtggctttagccccttaatctgtttcagtgtcccctgaaactataccaagtaaatacacaattgagacttttttggttaaaaaaggtgtactatgtaaatgcagcttcaagcagttatgtgcagagtttgcaaggaaataattatgactcagtaaatccatacccaggaaaagtactgttcacactcgggag

SEQ ID NO: 139323 - DNA, 570 bp, Homo sapiens
aatgttctcaagtcccatgctcccctcttctttctctctccaccctccttccattctcttccagtaaaaaagtgataaccaccaagtgtctgccttgaacaaaaagttatgacacagatgctcccagtgttggaccatcaagccgaaagcacgtgcacaaagcagctgatgcaagcaccttaattggacggccaccggtgcggactgagctgggctcatgaaccttccaggcagccaactttgcaatatggtgctcgacctttctccattcgagcttctgccgagcagttccttaggtctcagatccctttcaccttccacagacgatgctatggaacagaaaaactgctgctcaaatcctaaataagaatggaaagtgcacagtatggccccatagatctttctttcccttcctgccatgaagccaacctgaaaacaaagacatgatgactcttgtgtaaccacccgaagaggctgacaattaccaactacgtgaggtagtaggcaattgtcacatgctgggctgcagagatcgtgcttaacttgtttattctcatagcgggacagtta

SEQ ID NO: 139324 - DNA, 275 bp, Homo sapiens
cttggtctcctttccagcagcagcaccagaatgtcacttccacctgcttaaaacctttcagtgcgcttaggacacaatccaagctgctccatcagctctctgggccccacaggatctggcttctccctgcctggctgtgactgcttctcccacctcttcccagccgcactggccttctttctggtcttcacacataagctcactcccacctccgggattttgcacttgctggtcccttagtctggaatgttcttccactacagcaagacctgttc

SEQ ID NO: 139325 - DNA, 717 bp, Homo sapiens
actggagaaattcaatgaacccaaaagtttgttttttaaaaggatcaataaaattgacaaacctttaactagatggtttaggaaaaaaagagaaaagactcacataactaaaatcagaactgggtgtgtgaagacattattactgcttctacagaaataaaaaaggattataagacagtactgtgaacaactgtactccagtaaattggataactgagatgaaatagacaaattcctagaaacacaaactaccaagactctgtctcaaaaaaaaaaaaaaaaaaaagagacatacatttaaaaaacaattactagtttaaaagctggtattgtaatttagtttgtaaattctaacattttgttttctatataatttaagctactcatgtattactagttttactcatgaattactggcttgtgttttagggcactcaatacataaagatgtgattttgtgatatgagcaactgaaaaggatggggacagagctgtaaaggggcagggtttttatgttattgaagttaaacttaatataatcaagttataacattatatagagaattggaaaactggagaaaatcaatgaaaccaaaagtttgttttttaaaaagatcaataaaattgacaaacctttaactagatggactaggaaaaaaagagaaaagactcacataactaaaatcagaactgggtgtgtgaagacattattactgc

SEQ ID NO: 139326 - DNA, 446 bp, Homo sapiens
tctctctctccctgtgtttccttctctctctctctttctctctctctgtctgtcccctgccaaaggcattaaaaagagatgggaaccactccaccaagcatgtgtgtgtggggtgagggggtcctaacccacggcactgctttgctggggaaacagcttttgaacaagacccctggcacaaatgagatgaggttagtgatcgcagtttaattctcaatagggcacagcgtgctctgtggatatgaaatatacaatatggggggaaatggagtcctttctagaattagtttttcctcttggttaatgagggtcagaggagaatgaaggcataaactgcgagctaagtaaaacccaacaggccgagccctccagggagagactgctggagaggggccagggctgccttggctttcccacagggtgaccagatcacaggaggttagaga

SEQ ID NO: 139327 - DNA, 205 bp, Homo sapiens
gataaatcgggcttcctctttgtcctataaccgataattacctggtcagaagaaacatgcgatacttgacctgcaatgaaagtccacttgtctggccttcctggccctagctgggtttttcaaaggagctcccatactggtttggcctcagtcagctgttaaagaattgagggacttctgagttgcgcaaccctgagtcaatgtg

SEQ ID NO: 139328 - DNA, 462 bp, Homo sapiens
gccacttgggaggatcctgcaatgtggaggaatggtcaggacctgggtttcaatcctgactctctgctggcttggtgatttggggctgtgccttagttctcccatcggcaaaagcatcacgatgatagtaatctagctcacagttgtaacgatcaaataaagtaatagtaatctagctcacagttgtgaagatctagataacatgtgtgaagtgctcagaacagtgactggcacccaacaggggctttgagtgttgatgccaattaccaatcttccagtctgtaaaaaggttgtaccaaatgacccaagctagtcacaatgggaagacagtgacaagtccccagtccctgcacttaaatgccatgtactcaagttattgataagtaataagtactgataaccgtcctttattggccatctactgtatttgagaggctgaacaccccaattccagcgcttatg

SEQ ID NO: 139329 - DNA, 500 bp, Homo sapiens
ttgccctttatctactcttcacaaatctctacaagctaagtatcattatcctcatcatatagcaggaaaaaatgatttacaaaaacagcaaattacttggatattttacatagctagtaagtggcagagctatgatatgaagcctagtctatctgactctaaaacatggattctttccacatgtgcctctgttcatattgattcgtttgctagtatcaggaggcctacaatttacaagaaggagcaggtcctaaaatgaatatatgatctgtttatgctataggcacatttcacaatgctaggggaaacatcaactgatgtctgtataaggaataagagacagtcagagagtcattaaaaaaagaaagaaaaaaagaacacttgaatttataacttcacatctcccaagcaaaataatcaggccccgatggtttcactggagcaattctcacaaacctttaaaaataaattaacactaattctacacaatctcttctagc

SEQ ID NO: 139330 - DNA, 535 bp, Homo sapiens
attagtcactggcttggtttgctggtatttgttgttgagatttggggcttagctgccatttggagcagatggaaggaagataagctgaaaagggtggcaggggaggcattagtgggaaatcctgcccacgcttcttgaatgctgtatttgccaatagtgtagatgctggatttaagccaatgagtccacctagctgctttgtgtaaaatactttctgttgttgctcattgtgtttgggggcaatggctacctgcctgcttcacaggcttgctgtgaggttgactgaggcaacacaaagtcttttgagctccttggagaaaattcaccatgcaagtgcaaagtatcaccattgtatcatggtaatgagactcccaccagcttaaaccagttaccaaggagagatggggcatcaaacaagagaagccaaagctgtcccagtctcaatccaggcaaatgatgcttcctcactcaatactaatcctgccctggaggtaggtgtcagtagtcacagatgggtggtccatttggcccccag

SEQ ID NO: 139331 - DNA, 472 bp, Homo sapiens
agagcatgccccgtttccccagggggaaaccgaggctcaggaagctgaggcatatccccttatgtgacctagtctgagctgtttcagacacacatccccatgttcactcaggatcagccatctcaggtggccacacccagcgggggcggggggatgctggcagaggcctgtgtgtttccaaggctgtcctctcctgacatggatgggggtaccaggcctggccccccatcactgtcagaaaggggtaggcgcggcctagcagacacagctgcacttctgacgacgaccaccctgaggtccccagggtgacgtccacaccacggaacaagcaaacagccacttcgcatgaggtgtacaaagaacagtcagtgatgtgacaaggtattctccacctgcgcatgtaaaaagagttgggatcaaaaatggtaggaatatcacgtggcaaaatgtgtttttgaaaacggatgtcttg

SEQ ID NO: 139332 - DNA, 431 bp, Homo sapiens
gagtgagactctgtctcaaaaaaaaagaaaaaaagagagaaagaaactccatgtcctttagctgtaccccttatctccacatcccaccaggacccaagtaaccactaatcttccaaccattaatcttttgtatttcttttacattgcataagtacttggcaaagtgctagatatatttattaagagattaatatgtataaacagttgcatcatctaacttaatccttatcataactgtgaggtctgagtgtttattgttatctcaaagctgaggatattgaaacttaagataggttaaaaaacttgtaacataaccagtaaatgatgaaactagcattgtatccttgtactatcatttaaaaactcatgctcttaacctttctaccatatctattgtagtaaactgaattttcgaagctatgcaatatcta

SEQ ID NO: 139333 - DNA, 474 bp, Homo sapiens
accctcatcccgggcttcagcctccagagcatgggaggccacatatctgtgtttttagatgcccccacctatagtgctttgtgacagaagtcccagccaactaacccactgagtctccaggttatcacccctgccaaatccacacccgtggcctggcactcaaggcctggctccctggtagctttccctatcaccgttaggcactctttcccctgctgccccaggagcccagttctcccgcctggagaaggagctgctccgccttaaaggcccctcctctccatcatcctagcagcccagctgccataactctcctgcctggagttttccagacctctcgggacgttgccggcaccctgtagcccctgtggccctgcctccttcccattcccaacacccaagccagggctgccctggctgagcacccccggccctcagtacaaatcccaggccccactgcacctgcatccggct

SEQ ID NO: 139334 - DNA, 295 bp, Homo sapiens
tgaatacaaccaatgtattgtatcctagaaccaaagtgtttacaacatattcaacccaggtggatctaccattatggggaaaaaaatatgtaaaaagtttaacactctatagcttatatgtaagcaccaaaaaaacaaacaataaaaaccaagcatggtatagagttctcaatgctaaatcatccatgtgggatgtcacatgtccatctctgattatctttggtgcacagttcttaaataagaccaatctattccacatccttgctagtaacctttgcatgcgtaacagattttg

SEQ ID NO: 139335 - DNA, 186 bp, Homo sapiens
tcacctatccccaggtgtacccattgacttgtctttggtccttatagagtagtttgaattttcttgctttctttcttgtcattatagattaatttgcatgtctttttgtaagtgaactcacatagtttgtgcttttcttatgtggtctcttttactctgcataattattttgagatttgtctgtat

SEQ ID NO: 139336 - DNA, 237 bp, Homo sapiens
gggtcagcttctgctgtggggctcagtggagtcacagggcctccccagctgcttagggtgcctggggtggggacctcactataagaccatgctaggcacagcgctgccaccgggggctcccaagggtgctgctgaatctgagtgtgtcccgggcagcaccacctggcttaggactccaggacactggggctgatggcagcgtaggggggaagctcccttgtccctcttggtgaccgt

SEQ ID NO: 139337 - DNA, 575 bp, Homo sapiens
ctcctcacgttattactgtcacatattttaataagtgggacagtactttcaagccccaaatacattattattgtttttacagccaacattcatagactttccatttccagtgcattctttcctatatttccatgttaaagcagaaagcaaaaattgcttgccctacttaaaatactttcatgacagagtaaggaagaataactgggaatgagagttgggagactcaggtcctgggaaaaagcccatctgccatgaacatcaggcaaatcccatttaataggggggccagttgcacatccaacaatgcttctagttcctaccgggtcctgatgaaagctttagagccctctaaggagaccccaagaacccctgtcttggcctttaaactttaaacaacttcaaacgtttcaggcttataagcagggttgcaacgtaacagaatgtcccagcagctggtcagccagagttcaggggactggctgagagccaatggctgtgtgtttgcgccatctggtggctatttctgctctggttcactaaggaatttcctggcttgttggggccagggatgcctc

SEQ ID NO: 139338 - DNA, 174 bp, Homo sapiens
attagcaaaacacattggcaataattgcataagataacaagcagactgtaaaaagcacacagtatgacgatgtccttgggacaaactgtcatttaaaattcatgtttttgtcttttgagtttgtctattgttcctctccagcagtgaagtatcaaggctattttacctcctcat

SEQ ID NO: 139339 - DNA, 308 bp, Homo sapiens
tgtggggggtggagtctgtgatattcttaaataggcatcccattcacaacttgatagtaatatgcactggttgataaatggtgctttcttttcatcttgaccacaaactctgagacttctttgggaaaattgtgatctgtggaaattggctgtaatatccataaacatagtttgcagagtgttcacatctactcagctgttggctcatgtattaaattttaaaatgtgtacttatttttctaggcattatcttttgtccaggttttgacagtgctttcaggtccatctaaataaaatttgaaacctac

SEQ ID NO: 139340 - DNA, 292 bp, Homo sapiens
aagtggtcttcatggctctcatctttaacacggggtagcctaggacccctctaggaccaccttgttactgcttttcatgtattatctcattgcgtcttccaggacggagaagtgggtcctggctctgctggccgtcattcctcccagagggatgggcagcaggaacctgtcgtccgtggtacctgccgggttccaaccttggtctgtctgactccagcccccccacagtgtgaccgtccgtggtacctgccgggttccaaccttggtctgtctgactccagccccccccaca

SEQ ID NO: 139341 - DNA, 495 bp, Homo sapiens
tttcaaagtcacagaaggacaaaaacatgccctgctaagacggcaggtgaactttagagaataccacggaggagaactagtatcggtactggactttcagccccaggtccaccaagccagtaaagccaaatgacttacaacaaaaccctacaacaactacaaagatactactctaaagccctgtctacagtcagattcttgactataaatttgacttagaacagaagagccccaaatataccagctagtccctttacagtgacaggtaaaagctacttactacacttactacctgccagacactgtagtaagcacttgacacaaatggtcttatttactcttctccgtaaactcacaagctagaaaataccatcatccccctttacagacgggaaaactgaggcttagagagtttaggtcacacagctaagtagcaatggccctgatatttgagaacctaggcagtctggtttttaaccactgggcctacactgc

SEQ ID NO: 139342 - DNA, 138 bp, Homo sapiens
tggcggtcctgtacctcaacggggaacattcataaagaaagaatgtgaccatcagcattatcacaaagaggcactcattagttggttacatggttgtcactcaaatgccagctcttttctccgttctctatgcaaatt

SEQ ID NO: 139343 - DNA, 521 bp, Homo sapiens
gttaatatgacaaagattgtcaagtggaattaaaaatgagtttattatttatatgagaaacagcttaaacttaaggataatgaaatgttgatagtaaaaggatgagaaaatagatcagcaaacttactgttggacaaaatagactttttggcagaaggagataaagcgggctacttcataataacaagattgtgctcactaggaagataaaacagttctaactttacatgtatctaatgacatattctcaaaatacacagaaataaaagttgagagaactataagaagaaacagtttggccattagagggagttgtaattgtctgggtaaaagataaggacctatggccgggcgcagtggctcacacttctaatcccaacactttgggaggccaaggcgggcagatcatctgaggtcaggagttcgagaccagcctgaccaacatgctgaaatcccatctctactaaaagtacaaaatcaccctggggtggtggcacatgcctgtaatcccagctactcga

SEQ ID NO: 139344 - DNA, 394 bp, Homo sapiens
cgcagcagtcagggcccctagccgaggctgcgcaacaagtaaatggagggtaggggctgagatacggccgactgcaggcagcgcctggcagggacccccactcatgccccgggctccttagagtagcaggtgggcgttactcagcctagtcaggtgggtcacttaattaatgagaaaaggaaccagatgaacaccccggggagtagttcccacggcctggggttgttcaccgggtaagtgagttcttatttgtaaagcacgtaggtgaaggccacacaggcagggcgaagtaaatgtttgcagaatggtcttgccacccatcacctggtaaggttttgaagctgttcatctttgacatggggtcaaggcatttctgcagacctgagtatcccgc

SEQ ID NO: 139345 - DNA, 297 bp, Homo sapiens
agttcttgtcggtcttgccattcctgctcccaaagtgctccatggcttccacgatattcatgccctgtttccccttgccaaagatcacatggttgccatccaaccactcaatcttggcagtgcagatgaaaaactaggaaccatttgcgttgggtccagcattttccatgaacaagatgccaggacctgtatgcttcaggatgaagttctcatcatcaaatttctccccatagttggaattgccatcaactattaaggcatgtgaagtcaccaccctgacacataaactctgggata

SEQ ID NO: 139346 - DNA, 437 bp, Homo sapiens
gcactgattctgatgacaggaagaggatgatgttgtaaaacgactgctgctgagtcatatgccagggctgctatgaatcacctgtcagtttgttgacagtatgctttgaaggtggctcagttatctagcatgctctccacctcaaccaaatctaatccagttggtcaccagatgcaaggaaaccaaaatgcaagaggaatcgccaccatagtctcagccacctgaattagtatctgtggatcctgggagaccaccacatggagacaaagggtgggaaattgaggggttggtgacactagtttgcatttttaaaaaactgaaaacaatgagagagactcacgccatacttactgaatcataatctgtcttttaacaagatcccaggtgattgatctgcaaattaaattttgagaagcatggatctgtgattcattggc

SEQ ID NO: 139347 - DNA, 420 bp, Homo sapiens
ctgggccatgagcagaaccacagggcctgggatctgtggccagcaccacccccctagcccgtccttggaaggagagtcccctcctgtcttgggatcctgtctctccgtggcagagttgagagctgtttgtcacaagagggaggtgagcaagccaggagcatgacggcgatgctctctctggcctcctacatctgttccacttcaccccagacaaacccagccaggatccagcccgaaagagatggcaatggtgccttctgcccgagaaacaaggaaacctcgggctccctgctcatggcttatattgttgctaggattactggaagcaaaaaagacagttcatccctggagccagtgactgaagaatggatgacaaaatgaggtcatctttctctctagtcaagtccctatgctcaagac

SEQ ID NO: 139348 - DNA, 1147 bp, Homo sapiens
tctgggcgacagtgaaactccatctcaaaaaaaaaaaaaaaagggtctaccgttagtggacacctttagtcttccaacgagatacttccacctcccaccttgtggttaaaaaatgcttaactttgggctgggtgcggtggctcatgcctgtaatcccaacactttgggaggcagaggcaggcggatcatgaggtcaggagttcgagaccagcctggccaatatagtgaaaccctgcctctattaaaaatacaaaaattagctgggcatggtggcaggcgcctgaatttccagctactcgggaggctgaggcaggagaattgcttgaacccaggaggcagaggttgcagtgagccgagatcatgccactacactccagcctgggtgacagaacgagacttcgtcccccccaaaaaaacaaaaagcttaactttgaagagatttggtcttctcagatgcctcctataaaaagaaacaaatgtgagaaaaggtagaaaaggccttttttgtagggagcaattttttctaaaaaggcttttcagccaagaccctctctcttacaattctgacaccatatcaacttttaagactacttttttcttagaatgcttcttttttgccatttattgcacaaacaataatttggggggggactttaaaaaatcataatcaggccaggcacagtggctcaatgcctgtaatcccagcactttgggaggccgaggcaggtggaccacatgaggtcaggaattcgagaccagcctggccaacatggcaaaaccccatctccactaaaaatgaaaaaattagctgaaataacacagctacttgggaggctaaagcaggagaatcacttgaacccaggaggtggaggctgcagtgagccaagatcacgccattgcactccaccctgggcaacagagcaagacgccatctcaaaaaaacaaacaaaaaatcacaatcagtgagattaatgtttaatgaacatactgttattttttatttttttaagagacaagtctccatctgtctcctaagcagagtgtagtggcgcaatcatagctcattgtaacattggactcctgggctcaagtgatcctcccacctcagtctcccatgcatgccaccacaattttttggatacagggt

SEQ ID NO: 139349 - DNA, 439 bp, Homo sapiens
cagggaatctgccactcataactccatcagtcacctgctgcttccgcttccatctcaacattcagtggccaattcccaccttcatatcccatctactcagggcaggaaagagacaggcaacgtcgcctatgactgcaccccaacgggttctgagacacacacaggagtgcccccgcaccccggtgtaaaagccccttctggacagagcacaagatggcagagaggagctgcagtaaccacaccaaactctgaagtgagaggcactgacggccactgggagccgtcccaacctgggatgtgctcagggacccttgctcactgcccttggcgaagctgcaggttgaccagtcctttccaaaacagcttcacttgctgggcgcagtggctcatgcctgtaattccagggctttgagaggccaaggaaggaggactgcttgag

SEQ ID NO: 139350 - DNA, 468 bp, Homo sapiens
gacagggagactcctgcagggtcagaaatattctatatgttcatctaggtggtgattacacaagatctatacgtatgtaagaaaatatcatgcagtccacataaggtctgtgctctttatgttaattataccttaactacaaataaaacttaggatggaggactttcaaaagatatggattcaattgacaataccaagcactggcaagcatgcagagtaattaggaattttcatatactgccagtaggaaagcaaaatgacatagcccttctggaaaacagtttggccgttttttataaagttaaatatacacttataatgtgaccctgtaatctcacccccaggtgccctaaagaaataaaaacacgtttgtacaaaaacccatccacagggctgggtacgggtggctcaaacctgtagtcctagaactttgggaggctaaggcaggcagatcacctgaggtcagga

SEQ ID NO: 139351 - DNA, 672 bp, Homo sapiens
aatgggcatgtaaggaagaaaagcatgtcagaacacatgtgcaattgtgagagcatcatgaagagctgtgaaggtaacagcttgatgaaggagagaaaagaaccaaagatggctgctgttttgaatccagctgactcagagactattggtacaataaatcgcattagggaggtctgtgtgcgtgcgtgcgtgcatgtgtgtgcgcgtgcatgtgcgaggtaatgaatgcagaagactgaagtacaaatagaaggttgattaggcagctagctggaaatagatgtgaacatgttcaggcaattagaatgtggtgccacagctcaggttgtgttagggattcagaaagaagagaggtcagaaccttggctttcatattaatttaaggcacagaaggaaaacaaggagcaatagaaagaaacagagacacaaccattcaaaatagataacagccaggaaagtgtgttaccaaaccaagaggtgagaatttccagatatcatatcttgctgtataataattaaaatttatctatctctatgtaaaaatggtattatacataggacagaaatcaccaattaagatgaataagagtaccatatttaatcaagtgcatacatctgttaatatccattttcagaatgtaaacagcttaaaataaaagctgacagaagtcc

SEQ ID NO: 139352 - DNA, 1585 bp, Homo sapiens
tttgactggccgtagagtctgcgcagttggtgaatggcgttggtggcgggaaagttgagtctctcctgcgccgagccttcggggcgatgtgtagtgccttccatagggctgagtctgggaccgagctccttgcccgacttgaaggtagaagttccttgaaagaaatagaaccaaatctgtttgctgatgaagattcacctgtgcatggtgatattcttgaatttcatggcccagaaggaacaggaaaaacagaaatgctttatcacctaacagcacgatgtatacttcccaaatcagaaggtggcctggaagtagaagtcttatttattgatacagattaccactttgatatgctccggctagttacaattcttgagcacagactatcccaaagctctgaagaaataatcaaatactgcctgggaagattttttttggtgtactgcagtagtagcacccacttacttcttacactttactcactagaaagtatgttttgtagtcacccatctctctgccttttgattttggatagcctgtcagctttttactggatagaccgcgtcaatggaggagaaagtgtgaacttacaggagtctactctgaggaaatgttctcagtgcttagagaagcttgtaaatgactatcgcctggttctttttgcaacgacacaaactataatgcagaaagcctcgagctcatcagaagaaccttctcatgcctctcgacgactgtgtgatgtggacatagactacagaccttatctctgtaaggcatggcagcaactggtgaagcacaggatgtttttctccaaacaagatgattctcaaagcagcaaccaattttcattagtttcacgttgtttaaaaagtaacagtttaaaaaaacatttttttattattggagaaagtggggttgaattttgttgatatacatcataaaatagtcttttgcagggtactacgcaagccttaaaatttttcttaagacagagtcttgctctgtctcccaggctggagtgcagtggcacaatcatggctcactgcagccttgaactcctggcctcaagggatcctcctatgtgtgcctcctagagtgcagggattacaggcgtgagccactgctcgtggccaaaagttttctttttttttttttttctttttgaaacagtcttactctgtctcccaggctgctggagtgcagtggcacaatctcggcccgctgcagcctctgcctcttgggttcaagtgattcttccacctcagcctcccaggtagctgggattacaggcacccaccaccacgcctggctaatttttgtatttttaatagagacggggtttcaccatgttggccaggctggtctcgaactcctgacctcaagtgatccacccacctcggcctcccaaagtgctaggattacaggcccgtgcccagccctaaagttttaaactctaggggaattaacagtatttctttacagaatggatttgttaaactagcacagtaaaagtaaagactattctgtttctaggctgttgaatcaaagtgattttagcaattaaactttgtattaatttaccacc

SEQ ID NO: 139353 - DNA, 4194 bp, Homo sapiens
  misc_feature (3911)..(3911): n is a, c, g, or t
  misc_feature (3914)..(3914): n is a, c, g, or t
tttgactggccgtagagtctgcgcagttggtgaatggcgttggtggcgggaaagttgagtctctcctgcgccgagccttcggggcgatgtgtagtgccttccatagggctgagtctgggaccgagctccttgcccgacttgaaggtagaagttccttgaaagaaatagaaccaaatctgtttgctgatgaagattcacctgtgcatggtgatattcttgaatttcatggcccagaaggaacaggaaaaacagaaatgctttatcacctaacagcacgatgtatacttcccaaatcagaaggtggcctggaagtagaagtcttatttattgatacagattaccactttgatatgctccggctagttacaattcttgagcacagactatcccaaagctctgaagaaataatcaaatactgcctgggaagattttttttggtgtactgcagtagtagcacccacttacttcttacactttactcactagaaagtatgttttgtagtcacccatctctctgccttttgattttggatagcctgtcagctttttactggatagaccgcgtcaatggaggagaaagtgtgaacttacaggagtctactctgaggaaatgttctcagtgcttagagaagcttgtaaatgactatcgcctggttctttttgcaacgacacaaactataatgcagaaagcctcgagctcatcagaagaaccttctcatgcctctcgacgactgtgtgatgtggacatagactacagaccttatctctgtaaggcatggcagcaactggtgaagcacaggatgtttttctccaaacaagatgattctcaaagcagcaaccaattttcattagtttcacgttgtttaaaaagtaacagtttaaaaaaacatttttttattattggagaaagtggggttgaattttgttgatatacatcataaaatagtcttttgcagggtactacgcaagccttaaaatttttcttaagacagagtcttgctctgtctcccaggctggagtgcagtggcacaatcatggctcactgcagccttgaactcctggcctcaagggatcctcctatgtgtgcctcctagagtgcagggattacaggcgtgagccactgctcgtggccaaaagttttctttttttttttttttctttttgaaacagtcttactctgtctcccaggctgctggagtgcagtggcacaatctcggcccgctgcagcctctgcctcttgggttcaagtgattcttccacctcagcctcccaggtagctgggattacaggcacccaccaccacgcctggctaatttttgtatttttaatagagacggggtttcaccatgttggccaggctggtctcgaactcctgacctcaagtgatccacccacctcggcctcccaaagtgctaggattacaggcccgtgcccagccctaaagttttaaactctaggggaattaacagtatttctttacagaatggatttgttaaactagcacagtaaaagtaaagactattctgtttctaggctgttgaatcaaagtgattttagcaattaaactttgtattaatttaccaccaatatttcttcacaaaggaacttttaaaagattatctcagaaagtaaatctgagaggtaagaagtaataatgagtaaatggtaagtacttgagtaaatctaaagaaatattgatagtaaggcaatcctaagcaaaaagaacaaagctggaggcatcacgctacccagcttcaaactatactacaaggctacagtaaccaaaacagcatagtactggcacaaaaacacacgtagactgatggaacagaatagagaatttagaaatgagaccacacacctataatttttttgatcttcgatgaacctgacaaaaacaagcaatgggcaatggattctctattcaataaatcgtgctgggataactggccagccatatggaaaagattgaaaatggacgccttccttatgccatatacaaaaattaactcaagatggattaaagacttaatgtaaaacccaaaacagtaaaaatcctggaagacaacccaggcagtaccattcaggacataggcacaggcaaagatttcatgacgaagacgccaaaaacaattgcaacagaagcaaaaattcacaaatgggatctaattaaactaaagagctgcacagcaaaagaaactatcaagagagtaaacagacagcttacagaatgggagaaaattgttgcaaactatgcatctgagaaaggtctgaaatccagcatctatacgtaatttaaacaaatttagaagaaaaaaccaccccattaaaaagtgggcaaaggacatgaacagacacttttcaaaagaagacatctgtggccaacaatcctatggaaaaaagcccagcatcactgatcattagagaaatgcaaatcgaaacaacaacgagataccatctcacaccagtccaaatggctattataaaaatgtcagaaaataacagatgctggtgaggttgtggagaaaaagatatgcttatacactgttggtggaaatgtaaattaaattagttcagccattgtggaagacagtgtggggataaagacagagataccattcaacccagcaatctcattactgggtatatacccaaaggaatagaaatcattgttataaagacacatgcacgcgtatgttcgttgcagcactgcccatcagtgacagactggattaaaaaaatgtggtacatacacaccagggaatactatacagccataaaaaggaacaagactgactgggcgtggtggctcatgcctgtgatcctagcactttgcgaggccgaggtgggtggattgcccgcgctcaggaggtcaagaccagcctgggcaacacggtgaaaccccatctctattaaaatacaaaaaattagctgggcatggtggtgcgtgcctgtagtgccagctactcaggaggccgaggcaggagaattgctggaacccaggaggtggaggttgcagtgagctgagatcgcgccattgcactcccgcctgggcgactccatctctaaaaaataaaaaataaaatataaggaacaagatcatacctttgccagggacatggatggagctggacgctattatccttagcaaactaacataggaacagaaaaccagatactgcatgttttcacttataagtgggagctaaatgatgagaactcctggatacaaagaagggaacaacacacacacacacacacacacacaccctctcacagacttagaatacgtggcaagaaaagcatataatttgacattaggagcagaagaattagtgtgctaaggtccttgcattgtccgggagaaggggaaaagtatcaacattagacattgataaagggtctgcaccttttgatttcttaaccactcaaggatagaaaaggggcataactttaaaatgaaacaggaaaatggtgggctgatttttaaatttaaaagaaccgaatacagcaggacagatccaaagcacagaggagatggtgtatttaactccatccacaccaatcattacattacatgcaaagggactgaggactccagttaaaatgacagttttaggctggtttttaaaatacatatttgctgttttatttttggagacaaggtctcgctccgttgcccaggctggagtgcagtggcatcataactcactgcagcctcgaactcctgggttccagtgagcctccacctcagcctccaaagtagctgtgattacaggtgtgtgccaccttgcctagctgagtcccttgaattgataaaaggtatatacaaaaatccctcagtaaacattagttaatagtgaaatattagaagtgtctcttttaaaatcaagaacaaaaaaaaaaaaaanaanaaaaaaaaaaaaacgtgtggtcgcagcgactgaggccacgaaaaaaacacttataagaccaatcgatggggaccggggccccaaagagaaggacacagggaacacaggggtgcccagagaaacacacgggcaaaggaaaaagcatcttgggatatcccagaaaaagaaaaagcgcgggaggggaaaccaaagcgttcagaaacaaatccaaacgaggagtaccaggggaacaaacgggagaactacaagagagagatacaagaaaacgtagcatacaagt

SEQ ID NO: 139354 - DNA, 4803 bp, Homo sapiens
tttgactggccgtagagtctgcgcagttggtgaatggcgttggtggcgggaaagttgagtctctcctgcgccgagccttcggggcgatgtgtagtgccttccatagggctgagtctgggaccgagctccttgcccgacttgaaggtagaagttccttgaaagaaatagaaccaaatctgtttgctgatgaagattcacctgtgcatggtgatattcttgaatttcatggcccagaaggaacaggaaaaacagaaatgctttatcacctaacagcacgatgtatacttcccaaatcagaaggtggcctggaagtagaagtcttatttattgatacagattaccactttgatatgctccggctagttacaattcttgagcacagactatcccaaagctctgaagaaataatcaaatactgcctgggaagattttttttggtgtactgcagtagtagcacccacttacttcttacactttactcactagaaagtatgttttgtagtcacccatctctctgccttttgattttggatagcctgtcagctttttactggatagaccgcgtcaatggaggagaaagtgtgaacttacaggagtctactctgaggaaatgttctcagtgcttagagaagcttgtaaatgactatcgcctggttctttttgcaacgacacaaactataatgcagaaagcctcgagctcatcagaagaaccttctcatgcctctcgacgactgtgtgatgtggacatagactacagaccttatctctgtaaggcatggcagcaactggtgaagcacaggatgtttttctccaaacaagatgattctcaaagcagcaaccaattttcattagtttcacgttgtttaaaaagtaacagtttaaaaaaacatttttttattattggagaaagtggggttgaattttgttgatatacatcataaaatagtcttttgcagggtactacgcaagccttaaaatttttcttaagacagagtcttgctctgtctcccaggctggagtgcagtggcacaatcatggctcactgcagccttgaactcctggcctcaagggatcctcctatgtgtgcctcctagagtgcagggattacaggcgtgagccactgctcgtggccaaaagttttctttttttttttttttctttttgaaacagtcttactctgtctcccaggctgctggagtgcagtggcacaatctcggcccgctgcagcctctgcctcttgggttcaagtgattcttccacctcagcctcccaggtagctgggattacaggcacccaccaccacgcctggctaatttttgtatttttaatagagacggggtttcaccatgttggccaggctggtctcgaactcctgacctcaagtgatccacccacctcggcctcccaaagtgctaggattacaggcccgtgcccagccctaaagttttaaactctaggggaattaacagtatttctttacagaatggatttgttaaactagcacagtaaaagtaaagactattctgtttctaggctgttgaatcaaagtgattttagcaattaaactttgtattaatttaccaccaatatttcttcacaaaggaacttttaaaagattatctcagaaagtaaatctgagaggtaagaagtaataatgagtaaatggtaagtacttgagtaaatctaaagaaatattgatagtaaggcaatcctaagcaaaaagaacaaagctggaggcatcacgctacccagcttcaaactatactacaaggctacagtaaccaaaacagcatagtactggcacaaaaacacacgtagactgatggaacagaatagagaatttagaaatgagaccacacacctataatttttttgatcttcgatgaacctgacaaaaacaagcaatgggcaatggattctctattcaataaatcgtgctgggataactggccagccatatggaaaagattgaaaatggacgccttccttatgccatatacaaaaattaactcaagatggattaaagacttaatgtaaaacccaaaacagtaaaaatcctggaagacaacccaggcagtaccattcaggacataggcacaggcaaagatttcatgacgaagacgccaaaaacaattgcaacagaagcaaaaattcacaaatgggatctaattaaactaaagagctgcacagcaaaagaaactatcaagagagtaaacagacagcttacagaatgggagaaaattgttgcaaactatgcatctgagaaaggtctgaaatccagcatctatacgtaatttaaacaaatttagaagaaaaaaccaccccattaaaaagtgggcaaaggacatgaacagacacttttcaaaagaagacatctgtggccaacaatcctatggaaaaaagcccagcatcactgatcattagagaaatgcaaatcgaaacaacaacgagataccatctcacaccagtccaaatggctattataaaaatgtcagaaaataacagatgctggtgaggttgtggagaaaaagatatgcttatacactgttggtggaaatgtaaattaaattagttcagccattgtggaagacagtgtggggataaagacagagataccattcaacccagcaatctcattactgggtatatacccaaaggaatagaaatcattgttataaagacacatgcacgcgtatgttcgttgcagcactgcccatcagtgacagactggattaaaaaaatgtggtacatacacaccagggaatactatacagccataaaaaggaacaagactgactgggcgtggtggctcatgcctgtgatcctagcactttgcgaggccgaggtgggtggattgcccgcgctcaggaggtcaagaccagcctgggcaacacggtgaaaccccatctctattaaaatacaaaaaattagctgggcatggtggtgcgtgcctgtagtgccagctactcaggaggccgaggcaggagaattgctggaacccaggaggtggaggttgcagtgagctgagatcgcgccattgcactcccgcctgggcgactccatctctaaaaaataaaaaataaaatataaggaacaagatcatacctttgccagggacatggatggagctggacgctattatccttagcaaactaacataggaacagaaaaccagatactgcatgttttcacttataagtgggagctaaatgatgagaactcctggatacaaagaagggaacaacacacacacacacacacacacacaccctctcacagacttagaatacgtggcaagaaaagcatataatttgacattaggagcagaagaattagtgtgctaaggtccttgcattgtccgggagaaggggaaaagtatcaacattagacattgataaagggtctgcaccttttgatttcttaaccactcaaggatagaaaaggggcataactttaaaatgaaacaggaaaatggtgggctgatttttaaatttaaaagaaccgaatacagcaggacagatccaaagcacagaggagatggtgtatttaactccatccacaccaatcattacattacatgcaaagggactgaggactccagttaaaatgacagttttaggctggtttttaaaatacatatttgctgttttatttttggagacaaggtctcgctccgttgcccaggctggagtgcagtggcatcataactcactgcagcctcgaactcctgggttccagtgagcctccacctcagcctccaaagtagctgtgattacaggtgtgtgccaccttgcctagctgagtcccttgaattgataaaaggtatatacaaaaatccctcagtaaacattagttaatagtgaaatattagaagtgtctcttttaaaatcaagaacaagagtgcctgctattactacttgtattcaacattgtactgaaagtgtcaacacagtaaagcaaggaaaatgaaaaagcatgaaaaaaaggcatatggaagaaacaaaactgtcattctttaaaggttagatgattgtatgtatggaaatccaatatcatctataagcagattattagaattaagagtttagcaaatttgcgagctaaaacatcaacatttaagtttttctaagtaccagcaacagaattaaaaaatagaattttaggctgagtgcagtggctcacaactgtaatcccagcactttgggaggccaaggagggaggattgcttgagtcctaggagttcaagaccagcctgggcaacatagtgtaagaccctgtctctataaaaataaattttaaaaaagaaaatggaattttaaatatatataatatttaatcataactaaaaatataaagtttctagaaataaatctaataaaaatatgcaagacctttttggagaaaattacaaagctttattgtaagaagcagagtttaacccttttcccatttagaaaaaaaaagtgcagctcactgccagcgctcatttaattttacgtaaacacactcttggaggctgaagcaaatcttactgattttcaatgtgaaaataaaatataaaaactattcttggagttatttctaaacagaactaacatcagaatcatctgaatcatcagaatcatctctttcagaaaaatcggactcatcgaatgaatcttcggctaactgttgagaacgatgttaacatcacgtgtaggaatactacattttccaggatttgacattttcagcgatcgagaattactatgttttgtaaatggaaataccactactaaagacagaatgctataaatagaatga

SEQ ID NO: 139355 - DNA, 211 bp, Homo sapiens
tttttttgtatgagtacttgttggttattttggaattttcaggacattgagatattcctctgcttccttctgcacagatactgataattcatatggtcttgtagttgtcagtgacttcttcctacccacttgcattttgggcctcatggagatactccatcacctggttttcttgtagctattgtaaatgggttttggtttgacccttcct

SEQ ID NO: 139356 - DNA, 289 bp, Homo sapiens
  misc_feature (31)..(32): n is a, c, g, or t
  misc_feature (53)..(53): n is a, c, g, or t
  misc_feature (66)..(66): n is a, c, g, or t
ggtatagagtggccatgtgatgtcagagaanngatggagtaggtagcttcaanggcccatccttcnacagaaacaaaacaacaaagccaaaaatccaatctgtccccatcccctattctacctccagatccagacaaacaaggggtagggaaaggctatgttgccttctgaacttagagcagaaaggaaagaaaatgtcccctgctctcacagtgaccacagacagcatctcatgtgtgcccatcttcacatggccactcaattaccgggataccgatgctcagaattc

SEQ ID NO: 139357 - DNA, 488 bp, Homo sapiens
ttttttttttttttttttttgctttttgcttttttgagacagggtcttgctctgttacccacgctggagtgcagtggtgagatcagggctcactgcagcctccacctcatgggctgaagccatcctcccacctcagcctcccgagtagctgggactacaggtgtgtgcaaccacatctggctagtttctgtatgttttgtgaagatggggtcccactatgtggcccaagttggtcttgaacacttggggtcaagtagtcctcctgctttagcttcctaaagtgctgggatgacaggcctgagccccgcgcccggccagcctcctgtgcgaggttgtgtgggactctgtcatggaacccagtatgccttcatgtgctggcttgtttgttgactctgtagttaatgggctgccccacgtggacaggcactgggtcatccatgtctctgtgtacaggcagaggctgctgcgggtacatctgtgcacatggc

SEQ ID NO: 139358 - DNA, 345 bp, Homo sapiens
tgcatgcttcagtcacacctatccaatgaagtctccataaaaggcctaagaagacagggtgaggagagcttctggacagctgaacaggaggtggctgctaggaaggtacaaaagaactctgaaaaggtggcgcaccccaattccacgggaacagaagctcctgtgcttgggactcttccaaccctagtcctacatatctcttcatctggctgttcattagtatcctttaaaatatcctttgtaataaactggtatatgtgtttccctgaattctgagtcaatcaaatacactaatagaagccaaagagtataagaaccccaacctgtagagggttggcaagatgt

SEQ ID NO: 139359 - DNA, 176 bp, Homo sapiens
caactgggggcatgagaagagagacctccagaggtgagtaagagacatatagtagggaaaaagagtgtacaagagcaaactttagctgtttcaaaatttcatacaaaagaaatttcatactaagtcaccagttttcaaccctaacagactcaactcaattccttttttttttttaa

SEQ ID NO: 139360 - DNA, 369 bp, Homo sapiens
cttgttgcccaggctgctctcgaactcctgggtccaagtgatttcacccacctcagcctcctgaagtattgggattacaggtatgagccaccacgcctggcccctgaagattaaattctttattggatcatctgcaaattcaaaattcttttttcttttcttcttgtttttttttttcaaatagggacggggtctcaccatgttgcccaggctggtctcgaactcctgagcttaagcagcccacctgccttggcttcccaaactgctaggattatagacatgagccaccattcccagcccaaattcaaaattatttatttctaactataggttatagtacaaagtaagaattagttcagtaatttaaat

SEQ ID NO: 139361 - DNA, 298 bp, Homo sapiens
gactatctctaactgcacggaaactggcgtttccttatcctcatctgtataatggcaacatttctctgctgcttcaaaaaatggtattaattctaggcagggaaataagaacacccaaatgttcttcagtgtctctctctttctttgacacacacacactacccacagggacacagcaaagccctggaaacatatcgtacacatacggcctttactctccaccacttcctctccactgacagaggcagccatgctgccaaggtagcaacccccacatgaaatacaaaagagtggaggc

SEQ ID NO: 139362 - DNA, 296 bp, Homo sapiens
gttcaagggattctcatgcctcagtcccccaagtagctgggaccacaggcatgtgccaccacaccctgctaatttttgtattttagtagagacaaggtttcaccatgttggccaggctggtctcgaactcctggccgcaagttatctgcccatctcagtttcccaaagtgctaggattacaagcatgagccagcacgtccagccattgtaaggagaattgtgttcttaactccactttcagagaaagtgactttttacttcactggaagcaactggagtcctctgctggttgctgt

SEQ ID NO: 139363 - DNA, 202 bp, Homo sapiens
gtgtggcccatggtccctcccacttctcaaaccttctccaaagtagagcagaataagcacacatggaggaatgtgcacaaggaggaatgtgcgtatactgtagacacattaaaggatgaaggagaaggacagaggaggcgggaggaggaggaggagagagaggtctgggtgaatgtgcgtatactgtagacacattaaagga

SEQ ID NO: 139364 - DNA, 595 bp, Homo sapiens
tgggtgatctagcaggatccatggagaccaggctgaggatgaacagtaactgaggaaggagagcagtgccacctggtaagtgtagggctgcccccctcaggaggccccctttacattcagcagctatggctttgttttctcttgttgctgttgttttttgttgttgtttttgttttctattgattttttttctaaaactttctattgaagtatattaggttgaacctaggctcctgtcctcactgctatagccagaggggctttgggaaggaggcagctgtgaacaggtgggtatttcaaggggtgaggcagggcctttggaggacctgggcccttgccagggccctttccactgtccccaccacactggagatgtcctggcggtcagtgttcttctgtggccctgctgctccgctgcccgaagactcagtaggagaggttcagtcaagacccagaactgtaaccctgacaccaacgcgggtgaggaagctccctgcccaagccccagagcatgtggcacaggcacagctgtacatggacaaggtccttgggcgcatgtggtcctgaatggcaggcgcatcagggtctggatgcg

SEQ ID NO: 139365 - DNA, 301 bp, Homo sapiens
tcggccagattttctatgaaaaacaaggatgcgtatcttataaactagtgtaattattttcttattttatatatcaccaaattgttctgttatataggatactaaagatggctctgaatataaaatgtgcatatcagggtactacaaaagagtgtaatgtactgagtgcccaatgaatgtctttattcttaaagatttcatagaagtaaatattcttttcttatcatacattatactgaaactaatccttactttcatttaagaactcttagcaaagcaaaaggaccatacgcatagaaaa

SEQ ID NO: 139366 - DNA, 426 bp, Homo sapiens
agactgtacggggtgaaggagggtgtcttaggaagccactgaggcatcgccagagcccgcacgggcagcgtcaggcaccccaggaggtcatttcacatgttctacaaggacatgttttcagctctccagttttctagtggaggaaaccaaacctcccaggtggtcaacacaggcgtttgccccacatgccaccaccaggtagccacgggtctcatgggtgactgggaatgggaggggaaggaagaagctcttcttttgtggaatctgatcacagggaaccctctcccgcccggggctcagaatctgatcacagggaaccctttcccgcctggggctcagaatctgatcacagggaacgctctcccgcccgaggctcagaatctgatcacagggaaccctctcccacctggagctcaagatggtttc

SEQ ID NO: 139367 - DNA, 558 bp, Homo sapiens
attatgtagtctatttggtcatctgtgcactctcagaacgcagcaaagggtaagtccacaagggtgcggaaaaagcttagagggaaaaaatatatgctgtagtttttgcgttgtgcttttccgtatgaatgagtaatagcattacacaaagaacccctacaaagaaagagctgaggtaattgcctcatgacattagtaaatgatttcagcacataaagggaactggatggcagtaattcaagcagtctaaaagactctgaaaaaggccacaagcactaaaagaaccatagattgctaccaatttagagaatttaaattttctaattcacaagatagaaattagtgtacataattcaataagcaaattttagggtgactgacatcttatcaggtgatttgtgaacaaaagacaaattatttcccatgccaactatttaccatattttccagactatatgatactataaataaagccaaaatatctgacatattttactccttaatcctttttattaaatccctcaaaaagagcagctctaaattttcatcagttcagta

SEQ ID NO: 139368 - DNA, 266 bp, Homo sapiens
cgacggtctttacccttctctaaagaggatttttgaaaaaccctgaacagcttaaagaaaaaataattactggctcaatgatggaaatgtaacacaacatagaattattaattgctgttcttgttacaagctactctgtcgttcaattgttaaaaagagtaagcagtcctgctctcctgatcatttttattttatttttttttttaaaaaagagtctcattctgtcacccaggctggagtgcagtggcatgctcttggctcactga

SEQ ID NO: 139369 - DNA, 223 bp, Homo sapiens
aatataaccgtggctcactgtgatggcttgactccttggagccttaaagacactcgggcccatgactgtaccaagatctcttaacccatctccatttaactgcctctccagattaaccaacgccctctactcctgctgtcaaacacactgatggccactcatggcaggaagaacgctcagagattgtaggctactttccagcctccctctgcctctgccccca

SEQ ID NO: 139370 - DNA, 158 bp, Homo sapiens
cagagataagtaatcttatctgtgcccagggcttcagctgtcatggctgtgcacgtggttccctagtctgtatctgtagccctgacttgcctctgctctagacattccattggttcccccatgctaacttggtaagtctaaaacaactctgtttcaac

SEQ ID NO: 139371 - DNA, 476 bp, Homo sapiens
gcttcagggcttggggaggcagcgttgttttagactggctggaaagtcatgctgagcagcaagaggacagatctcttttagaggagacagccccacctggctgcaccctccaaggaggccacagggcatatcatccaggtgggtcaggtggcactggggctcacagtcaagccatcatcaggttactgcctctgtttcatcactgtgaaagttaagccatgatccaggtctctgggtcttcctgagcaagtcaatgcagagccaaagcctgtgcacaaatgaataacctcacaaggatgagagctgtgtgtgattgatggctctacacaaaccatctcagcaaaggagttcagtaagagccttgtgagcatatgacactctccagctctactaaagtgatagatgggttcacacggaagctactaaatgggcctcattgcaaaggcatggcttcaaccatagctggacttcaggga

SEQ ID NO: 139372 - DNA, 434 bp, Homo sapiens
  misc_feature (301)..(301): n is a, c, g, or t
  misc_feature (365)..(365): n is a, c, g, or t
tacattttctcaaagggtcagataagctattttctagtagccctgtttatctccctgtatgacaacaacattagatttttggatattggcagcttcccagcccttcctcagtcacatccagtgcacatctgggcataccatgtgctttctgtcttggcagcagaaggacattcaaactggtctccctgggctcaggagcactgcccagggcagatagagtctcccatgcctgccccacttgcaccacagctgaggactcagcagtgagctctgggttttagatgtggtggacacgccctgngctagtgtggcaggacaccccctctaggagggatgggaatgaggccagggctgtcctgggcagnttctctttagctcaaggtgttgcattctctcggaggaatagaaaccaagcttgggcactttcaggcagt

SEQ ID NO: 139373 - DNA, 493 bp, Homo sapiens
cccctctcctctctgcagccaaacccgtaacctcacagcaatacagcctcacatttaggattccccagcacggagaaaagaactagaaatctcaaatatggcaagtgactccaaaggccagaaaatccaaagggcctacggcatatgattcacgtaacaatctctgcccaagagactttcatcttccctcttaatctcctgttccagctgtatttactctgatatggatttttttcatttattcatattttcccatttccttctacggattcacaggaaacctctaataatctaaggaaggcaagggggcttaaatccaatgatctcaagaaccccatcccctaataatcatgatagtaatactaacagctaccatttattgagtacctactatgtaccaggtacagatgaggatactgaagttcagagaagtgatgacatttgcctaaagtcacccagcaaaggagtgtcaaagccagaattctgtcctgga

SEQ ID NO: 139374 - DNA, 303 bp, Homo sapiens
tggtgtctgacccggagagggctgagcaggtcggaacgctggagaggccatgaaggggatgccgagaggtggcagcagtctggggagcagcgggagggagggagacctctggatggggcagatgcacttcaaggagggacggcaacaccccatccagcagtccttagaaaacaatgtcaggatgggggcaaaaactctgtctccatgggttaagagggaaaagaggattaagcaaggcaaaccagttagacttttttaaaagctcagagacgaagggaaaaaaggggagctatctcatgctgg

SEQ ID NO: 139375 - DNA, 222 bp, Homo sapiens
gctcaagagcaggcagagaaagcgaacccagcagggagactgagaagtgattaatgaggttggcagagaagcaagtcaacagggaatggatatgcagggaagtaggggcaacatcagggtacaaggaaaagtgtgacccaaaacccagcaaagaggacacacaggcatcaagccagccagggacaggcaggagttcagttttgctgaagtggagtggaggga

SEQ ID NO: 139376 - DNA, 290 bp, Homo sapiens
gcagaaaggcatcctcagatgcagaggctcagaaaatctcctaatatctttctgaataaagttcctgcagtacacagtccctagtacacagaaatgaaatgcaattaagaacccaagaagaggccaagtgcattggcttatgactgtaatctcagcactttgggaggccgaggctggtggatcacttgggcccagaagttcgagaccagcctggggaaaacgatgaaacccagtctttacaaaaaacataaaaacttggccaggcatggttcctggggagggtgaggtgg

SEQ ID NO: 139377 - DNA, 393 bp, Homo sapiens
tattctccagaaatctcaatgtcataaaagacaaagaaagaaaggatggggaactgttccagattaaaggagactaaagagacatgccaactaaatgttaacaggtgatcctagactgatcctgtcctggacaaaaaaatgaagtcatagaaaacattatgggtcagttgaaaaaattagaatggccgggcacggtggctcacgcctgtaatcccagcacttcaggaggctgaggcaggcaaatcacgaggtcaggagatcgagaccatcctggctaacatggtgaaaccctgtctctactaaaaatacaaaaacaaaattagccaggcgtggtggcaggtacctgtagtcccacctgggcgacacagtgagactccgtttccaaaaaaaaaa

SEQ ID NO: 139378 - DNA, 440 bp, Homo sapiens
aaccatgagccaattaaacctcttttctttatgaattacccagtcttaggtattcctttgtagcaaagcaaaaagcctaatacaagagtggtctgtagaattattttcctctcatgaaaactctacctgcacatcataattgctagggtgtaccaggcaatcttgcagcctggcacaagctattgagtaactatcgctataggcatttttaagtacgattctcttgttttccataaatttaaaaagaactgtttatctgctgagaaatggtatatcatttgtgtggtggcctattttctatgcatgcagccaccttccaatttgactttagggtcaagttgcttttctgattcatttagctgagtagacttaagagcaaattgagaagagaaacccatttaaatattgtatcatgtgaaaagggtgaaatctgtcactga

SEQ ID NO: 139379 - DNA, 188 bp, Homo sapiens
agcaaaattgtctgaagagcttgttaaatgtgggtttccaggctccacagtaacccattgaatatcagatcttagttcagcactatttttcctgcctgtttgctcagacactccatgctccccactcttattcactgaaattaaagtgaaaagggaaatgggtgcatttttgacaagccctctggtga

SEQ ID NO: 139380 - DNA, 337 bp, Homo sapiens
ttagggatcagaacaggcaatcacacatactaatgctgaaataaaatcatatttccaggtctgctagtgttgtctccttcaccactgccctccatcatagtcctccattcagagctgacctctacccccagctggtcatattgcttttccttgctgccccagtacaatgagcaaccatgggaatacagtctcaggatacccaggttttcactatactgaagagtttacatgcaaagctcatcatcttctctcatacagcaggtccccatttctaactttgatagcattctcattcaggagggaagtcttggatggttgttcactcctgattcttttt

SEQ ID NO: 139381 - DNA, 598 bp, Homo sapiens
gctccaagtcgcctacactgactgctccacctgcagccgtccatgctgggaacaggtccagttttgccaaggctgatggaggagccctgtggggctgtgatcagagcccagcgtcccagtgcacctgccgatgccctctccagcctctggcttccttccgttggctgtccttggagggctgtgcttcgtgggcaggcgtttggtgtcctgagcatgcagactgcccttggagtggtgggcaggattgttttagcctaaaggggttccacatctgcacgggagctcttgctgatgggtcactctggcaaagttcccccggcgggttccctgtgagaaggcacctcacggtcagttctgggtctggtgagtgttctcctgcaggctccacgcttgagccaggttctgccggaagaggcggcgttgggttcccttggtggatgagaggcgccgagggtcttggtggctccatgtgcccccaagggcagcactttgcatttcttgggagacttgaagatgactgatgtcattttagtgagcacggtaaaacagcacctgttagcggcttataccttgagctctgtctctcttcttggaggtg

SEQ ID NO: 139382 - DNA, 591 bp, Homo sapiens
ggtaaaaacagactgctcccaaaacagcaggccatgaggtgaccaggtccagcccagcccagcctgcagaggaggagccctgtggggctgtgatcagagcccagcgtcccagtgcacctgccgatgccctctccagcctctggcttccttccgttggctgtccttggagggctgtgcttcgtgggcaggcgtttggtgtcctgagcatgcagactgcccttggagtggtgggcaggattgttttagcctaaaggggttccacatctgcacgggagctcttgctgatgggtcactctggcaaagttcccccggcgggttccctgtgagaaggcacctcacggtcagttctgggtctggtgagtgttctcctgcaggctccacgcttgagccaggttctgccggaagaggcggcgttgggttcccttggtggatgagaggcgccgagggtcttggtggctccatgtgcccccaagggcagcactttgcatttcttgggagacttgaagatgactgatgtcattttagtgagcacggtaaaacagcacctgttagcggcttataccttgagctctgtctctcttcttggaggtg

SEQ ID NO: 139383 - DNA, 293 bp, Homo sapiens
catttccctgtgatgagcccaagaagtccaggttaccaggatgcttatgagaaagccaagggtcagtccttgtctcctgggctactggaaccatctcagatgcatgcctggaggctgtggggctcctcagcccctgccatgcccagggggtcccagaccgctgccagaggcagagggactggggcttggacagccaggaaagtccttccacacactgtagctgcagttgaaattccacagccccatttgagccccagagcttgtcctggtcactctcaccttctctctccact

SEQ ID NO: 139384 - DNA, 259 bp, Homo sapiens
ggacattaggcgcgtctggtattaggcgcgtgctggtgccatcatgaaaatacagctcatatatacagctcctgtggcgtgcaggacgttaccatgtggtattgccaatatgggacattgcactcatgtgtatacacacacatgcacagacacacatgcacaggcacatgcacacacacagatgcacatacagacatggacacagacatacacacagacatggacagatacacagacacacacgcagaacgcgcctaat

SEQ ID NO: 139385 - DNA, 285 bp, Homo sapiens
aaggctacagtttacccaactaaacttgactcctgcattctaatcatgtgttctttctcctccatccctggacttaggataactagttgctggtgatgacttcgtgtcaagaacagcagtgaacctgggttgcttcccaaattgtggacgaggccttctgggatgggcagaagtggagaatggtgattaacacacctgtgatccctccctcgctcactcctctcagtttccctccacccaacacacttggtgtggactcccctgcaccccaccactgactcgtgg

SEQ ID NO: 139386 - DNA, 256 bp, Homo sapiens
gtgagagtctctgtctcgttctctctctctctctctgtctcgctctgtctcctctctctctctccctctccctctttctctctctttctctcacccgtctcctcctctctctttggagtttttagccctggctcttaacctggttaccctctgttctttcctttaattatgcttatctggttgtcatctggttacttaatattagggatgccctcaaccaagaaactttttttcttcccatctcctcctttgttca

SEQ ID NO: 139387 - DNA, 604 bp, Homo sapiens
ccgctttccacccaccccatgggaggagcatgaagacctaggtctgtcttgaagattaggtagaatttggataggcagatgagtatggggcattccatttgaggtgaattgcgtaagtaaaatgagaaggcagcaataaacagagtgtgcaggccaggactggtgagccagttccttccagggctggatctggagctctgttagcagaaaggagatgaggaccaggcctgggctggtgttgggaagtttaggggcaggccttcctgagtcatgttgtgatggaatctttgggttgccttggggccatgggagcagtgcatgcctcttctggcacatgagaagctgctcagggcatctccatcattagccctccaaccagaagcctagctctagtgtgagcatcaagtgggtggttggaggaggccatgatttgtcttctataatattgacctcaaagcctcccctgctagcccttagtaaatcaggcatgtgtgaatgtgcccaaatcactctgatatatgtttctttttggcctgtaccacttctcagggtaataaacgccatgtctgagtctcctagtgcatggagtgggagctggaagagg

SEQ ID NO: 139388 - DNA, 887 bp, Homo sapiens
ttccctcccaaattcaggtgctatgctgtacggtgaggttacaaagaggcattagatggaccctgcactcaggatgtcctaaaatgatttgtttaagcaatataagatgatttatgttaatggatgtccaagctgcctttacaatgttgccatcttgttaggaagtcacaaccaactcagataaaacattgagcaaacaatggaagattgatagtaattaagtgagagtgagtaagggtaaatagatcttgtgtgttgggaatagttagggaagtgattagtggagattagagggaggtttattggaggagcatgaagacctaggtctgtcttgaagattaggtagaatttggataggcagatgagtatggggcattccatttgaggtgaattgcgtaagtaaaatgagaaggcagcaataaacagagtgtgcaggccaggactggtgagccagttccttccagggctggatctggagctctgttagcagaaaggagatgaggaccaggcctgggctggtgttgggaagtttaggggcaggccttcctgagtcatgttgtgatggaatctttgggttgccttggggccatgggagcagtgcatgcctcttctggcacatgagaagctgctcagggcatctccatcattagccctccaaccagaagcctagctctagtgtgagcatcaagtgggtggttggaggaggccatgatttgtcttctataatattgacctcaaagcctcccctgctagcccttagtaaatcaggcatgtgtgaatgtgcccaaatcactctgatatatgtttctttttggcctgtaccacttctcagggtaataaacgccatgtctgagtctcctagtgcatggagtgggagctggaagagg

SEQ ID NO: 139389 - DNA, 413 bp, Homo sapiens
tgtttttcatcttcctctctctgctcttcctggattttgaactctcttgaagctactcacatggatgtgaactgtgatagatgactgactcctagttcaaaactttgatatgatgcagtgactatgattcagttgcactgagcaggttatatcaggtagagagcacccacaaaatctcatgatagacaatactataatgaaaagagaagggttctccagaggaaggtatttttatgctagtaaccacagaacttttttgataaggccaagaaatttactgagcttttttgataaggtcaagacatttgccagaaaagaggcttgtctcggcacatagtcctggagtcttgatggttttcatttgtagttgttgcagatgaggaattatttgttgcttagctgtttttttcttg

SEQ ID NO: 139390 - DNA, 501 bp, Homo sapiens
tataatgtgtgatgacaccttagtgaaatcactttctccttttggaacaagaatatctatagtgaatatgttatgctgtcttatcataaagtgtgggtaatcagaagacagataaattatctctttatttcacaggccacaaggaactgtactcaaagagctgtacttaaggaactacacatcagttgtcttccctgcacttgggcttgatttaaataatgagattttgggctttgggctgatgctgcaatgggatgagacttttggaggctttaagagacactgagtatattttgcatatggaaaggatgtgtattattggaggctaaaggccaaattgtgttgtggactgtttgggataattgttatgtgttaataggtaattacatactgcttaattcaggtcttcacacttccgttgagtgatttttctaaaatacaaattggatttcaaagctacctaaggctacttactatagaagaaaatgttcaaattctgca

SEQ ID NO: 139391 - DNA, 462 bp, Homo sapiens
agacaagacatattctctttgttaaaagatgtgagaccaagaattcaatattacctgtaaatattttttcaagtttaaattgagacagaaaaggaaagcaaggcttaacctcaggaaaattagagatttgcaggtgtctataactagtctttgaaaatgtcattcttcagttatttcttccatgaataatttgtaatattttccagaacttttgctaatataagaaaatggagatatgtgaggtttttgtattcatgaacagatacaatagggaacatttggaaaagatagttggatcaccagattagtttagctgctatgctatctctcttacagtaactatttcccgaggcattatgtactgttcaaaataattatcagtgaagaggtctgggagcatctctcccagtcatttttcttccaaagaaataaagttctatatatttttagtaaaccgtatgt

SEQ ID NO: 139392 - DNA, 792 bp, Homo sapiens
ctgaccatccacgtgttcattcatttgttggacagaaattaaacatgcatctagcacatgcaatgtgccaagcttctctgtaggccctggggtgccacagtgaacaagacaaatgggaaccctgtttacagggaggttactggttattgtgggggagaaactgtcttccttcttgtgcttttttgatgtcgtttcctggaagtgttccccacactcgctccactccagccactctggcttccttgctgctctttgaacacacctatttaaatgtgagcctctctgcctccaaactacagcctccatgctattccgttttccaccttattctcctccagcacttttaagtaccatctgaccaactacagtttggttcattttcttttaatttccctgtgtctttccatgaggatataagttcctcaaaggtagtaatttttttctgtcaatttcactgctgtctatggccataccaccctgaatgcacccaatctcatctgaatttcactgctttatcccccatacctggaatcatgcctggcctgtattaggcactaagtatttgttgttgaataaaataaataattttggaagataagtgtttcgaagacagtgatatagagcagcatttctcatggttgctcgtgggaaattttacaacccatgggacaccggcaatgtctggagacatttttcttgtcacagccaggaggttctacgggcacttagtgggtagaggccagggatgccactagtacaccagacagtccccccataacaaagattcatctg

SEQ ID NO: 139393 - DNA, 425 bp, Homo sapiens
ccccaaagccaggggacctcttccttcctaccagccatggactccccaccccccagtgccactccgtgcagcccaggaagctgtcctccttggggctttctctgtctcccagcccgaggggagcatgtgaggccacactgaccccggctggccctaggcctgaggtctggcccagggaggccctgctcctggggctgggggtcctccatggtgggaccattctggggcagaagacccctatctctgccaggaggtggggggggcttgctttccctctgccttttcaacatactgccagccccggaggacagccacaggggcccatttccttttcctgcagttcccagagaaacacagaaaaacctgtaggctgtgccctgggctttggtggggattggcggggtggaggagctgagttgatgggc

SEQ ID NO: 139394 - DNA, 121 bp, Homo sapiens
tgctaggattacagccgtgagccactttgcccagccagcatcctgtgttctaagcacctattgtctttacccaaagccaaatgacctctctgctcagggcagctcagaactaaaaggaaaa

SEQ ID NO: 139395 - DNA, 531 bp, Homo sapiens
attctcctgcctcagcctcctgagtaactgggattacaggcgcgcaccaccacacccggctaatttttgtagttttagtagagacggggtttcaccatgttgaccaggctggtctcgaactcctaaccttgtgatccgcccacctcagcctcctaaagtgctggaattacaggtgcgagccacctctccttgcctgagaattctatttcaaacacagaaggttgaatatttatagaaaggaaaaaaccctttagtttaagaaaagtaatttctaattgtccacagctttttgtcagagtaaagatattatttggaccagggtcacaacatctgtaattgtgagtgctctgtttttcctatcaagaatacctgtcaggtgtcctgggctctcttgtcccctggaatccctatctaggttctacagcaaatacgtaaactctcttgcttcttgactttctacccaacctatgctggtgtctttagatgtctacttgttagaggacatacatgtgcagttcttcagttttggta

SEQ ID NO: 139396 - DNA, 239 bp, Homo sapiens
agttcagataaggattgtggatctgtataacaaagttcaaactcatggaaacaccttcactggaaggttttctctgtctcttaaaagtgattttttctaaataaaaatctaaaattactggccaggtgcaggggctcacacctataatccccagcactttgggaggtaaaggtaggcagattgcttaagcccaggtattcaagaccagcatgggtaatacagtgagaccccatctcttc

SEQ ID NO: 139397 - DNA, 270 bp, Homo sapiens
agttcagataaggattgtggatctgtataacaaagttcaaactcatggaaacaccttcactggaaggttttctctgtctcttaaaagtgattttttctaaataaaaatctaaaattactggccaggtgcaggggctcacacctataatccccagcactttgggaggtaaaggtaggcagattgcttaagcccaggtattcaagaccagcatgggtaatacagtgagaccccatctcttcaaaaaatagaaaaaaaaaaaattagcagggg

SEQ ID NO: 139398 - DNA, 388 bp, Homo sapiens
cacatatataggtgtactacataaaaattgaaacaaataacatatagttcttccaatttcccttgtatgacctctttctttagttgttacagtgcttagttcccagtggtggataaataattttgccaaaacaattgaccaaacatgtcatgccaacaaagggtatcaaatgattatctgggtagtgccttagaattccaaatatgaacagacgtaaagaaaaaataaggacactaacaaaacagtattggctttattcataaatttgttaggatgtccaccaacacacacaatcacaaatagattactaatctttggtaatcttaattttctcaagaattgaagggtgtttagatacagaggacaatgaggggaggtggatttaaga

SEQ ID NO: 139399 - DNA, 861 bp, Homo sapiens
ctcaaactttctggtctcaggacttcttgtacccttcacaaattattgaacacccaaagagctttagttatgtagattatgaatattaactgtatcaaaaattgaaatgacattttaaatgaaaaatacccatatttttaacaaattgataagtattgttttatcagttttgcaaatcactttacatctagctggatttttgtatctgtttctgccttcactttattgcaaagtgttgttttcggttgaacgtctgaagaaaacctggcctcataaataggtgattggaacaaggggggagtgttttacgtagccttttagatcgttgtgggtgttctttgatactacaaccaaaaatcaagtggtagtttcttaaaggctagttgcaatgtgggatcaaactttttgtaccatgtggatcagtgaactttttgcactctgttatgttagaattcgttaatctatcttgtactttgaatggatcttttacccgtgaatgatttttgtaatatgctattgtagtttggaaaatactggttcaccgagttctgcagatcttctagatgttctcattttattatgcagtattttaaaaatcaccactaatctcagaaaagtttttaagttttgggtatcgatcaagttgaagttggaagatacaagttttccaaaattctaattatcacttgaaagacaaaattttattgttggcgataaatactgtcgttttacttgaagtgacagtctcatttttttcattttcaagaaaatatctgcagatacccacttctggataatagtttgtctttatttacagtaaactgtttacagtactttcaagtaaaaatgttttccatgaaa

SEQ ID NO: 139400 - DNA, 344 bp, Homo sapiens
aagagcctgtcatgcagtggggagtgggggcagtgtggtggcacctaagcaaaggggcagagacctccatgtgggaaaaggcttggagcattcgaggaatgaatgcaggccaaggtggcttgagctcctgggagaggaagagcaaatgtaacagaaagagacagtagcatctaagaactggttatttctacctccccgactttctgcactgctagaatacacctggtcaaaatcaaaggggtccaggggagggaatgcagagacttggttaagctttttagcaggaaaagaaaacaaaaaaacagaagaaaaaatagaagtaaaaataaacaaatgtcaccatg

SEQ ID NO: 139401 - DNA, 384 bp, Homo sapiens
tccatctccacacttcagccagagggattatcaaaaccctttgataacatataacagacatcctcatgctgtataacaaacatccccttaaaactgccattggctatgtttgtaaacatgagatttggacaggactcagtggagcaactcccgtctgctccaggatgcctaggacctctgctgggtagacaccaatggccagtagacagaaatctctttctcctcgcggcaaatctgacttgggatttgtagaggtcattgtcattcatgagctgatatttgcttctcttcagctcattgccaagtgtcccatccacatgctatctctagcatggtgctttctgggtagtcacacttcagggcttcaagagaatgttctcccaa

SEQ ID NO: 139402 - DNA, 165 bp, Homo sapiens
ttcttcattagtgttatgttatattaatgtcctaagtcagttaactgtagcaacaacttataagttttttattggcaccagttttcatttatgttcctgggaattaaattgactgaaaaactcataagttgttgctacagttaactgactttaggacattaatat

SEQ ID NO: 139403 - DNA, 331 bp, Homo sapiens
ctacttcagcgtcctgagtagctaggactacaggtgtacgccaccacgcccagccaatttttttgtattttttcgtagagacggggtctcatcatgctgcccaggctggtctccaagtcctaggatcaagtgatgcacccacttcagcctcccaaagtgctgagatttcaggtgaatcattgtcactttgatttcatacttgttagcaggaaagtgcggaggctgcttctgctggtactgtgttgattttttgtatacattggcgaggtgagctagtccctggttgtgagctgaggctgccatgttcccatgtgtgcccagacctttgaag

SEQ ID NO: 139404 - DNA, 125 bp, Homo sapiens
aagtttgttccacaggtcctctgggcactaatccctagccagctttcctacattaccaggatatccccttaaggacttccttcattcaaaataggcagaactctgatggtttactagacccaagg

SEQ ID NO: 139405 - DNA, 482 bp, Homo sapiens
gtgcagtatgccgtggggttccgataccccaactctggaagtgcagagaggacacagggaaaccaagggctccatcttcgcagaattggccatggagtatcagcacagggatcccttcacaaccctagacctgtgcacccccagtggttaggagcaggttctctactgatcaggcttcaggttctgactctgtgcagggaggctgttagtgaatcccccctgttgatagcaaaaggccagaagggccaaaactatccccctcttcccttcttcttacatcttttaatgtgttaaccatcaaatcactggtggacagtgcttcccagaaaccactctttgacctgattttccccaggctgtgagaaaattaaggactttgaatgagcttttcagaaggtgaacatattccactttaaggcctttctatttatttttagtttatgtccttcctacttttttggcattgaaaattccgttcatga

SEQ ID NO: 139406 - DNA, 283 bp, Homo sapiens
tcgcaccattgcactccagccccggcatcagtgcaagactctgtatgggggaaaaaaaaatgcagattcagactataaagaactgtctaatcactaagaagtggattgttttagggtgtattaattcttcattagaagtctcatagcaggggctctgagtcagggcaggcacaaagatattgttttactgggtagatggtagaagtaggtcgtcctccaactacaagaatgtgtgactggcaattcataactctttatattttactgcactattaaaatactt

SEQ ID NO: 139407 - DNA, 447 bp, Homo sapiens
ctgacaccctttgtctcgctctgaaggcagcaaggcacctatgttcagtggttcaagtacactcatcctcctcttcttcagcccaggatatcttctatcctgacttcacccagccatttattgttaaagccactgcctccatctcagctgtaaaagtcttactgtctggtcaacaggagtaccagaatttattctagtacacagcaccttttcctcccatagtgcattagaatcagaatgcagtcatttgtgtttttaaaaactttttttttaagcacagagatacctacttcagatctaagccattaaaatgagaaatacttctgtgatggaaaaacacaaacataaataaataaaacataaattctaccatgcctagatggaccttattcatttgtaacattggaatttccagtggttccatgcgggcacctagaacagaaaata

SEQ ID NO: 139408 - DNA, 390 bp, Homo sapiens
gagagagagagagagtggcgggaggtgggggggagagagagaaagagagaaggagtgggggagaaaaagagaaactggaaaaaagataaacagttatagaagagagaatggatacatgaagacagacaaaactgaaaactggaagcaaaactgaggaagccagaaatgttgacagatctagaaatagactatttccttgcctatttgtcactgctttctcataaatgcccatttatttttcaccactggtaatggaaagtatttaggaagagagggaatgatcagtcagggaaattcatctatagacattcattacgtttccttgcaatttgtcactttcccatttcatggaatctcaaaacaagatgctaaaatcatctctatactact

SEQ ID NO: 139409 - DNA, 166 bp, Homo sapiens
ctatgcactggcatttccaaagcaacaccatagatcttttacaagcttccttttgaagattcttatggcaccatatttttatctgaagaagacaaatagtaaaagtaaagaaacagcatcattggcaagggtggggaaaatgcattctcatatactacctgtacaa

SEQ ID NO: 139410 - DNA, 551 bp, Homo sapiens
  misc_feature (143)..(143): n is a, c, g, or t
  misc_feature (149)..(149): n is a, c, g, or t
agaagcatgccttggaagatagtcttctaaactaaagatgtagttagagaaagttcctaagaggagacaatgcccagccttggtaggctggccacaggggcagaagagggctagggactgcctaaaagagggtcaaaatattntattgncattttgcaattatatattttttgaatgcttttcctggtaaaataagttttcaaaaaatatcatcctgtagtaacagggatactttttaaataaaattcaaaagtaagttaaaataaccaattttactttctttttcacttatttgaatataaaaagttagcaaattctttttggatgacatcaatatttattttcccctatgcttcaggctggcctacacactctccatcaaaggagaaaccgcgagaacaattttattgcttctgtttcattggaagttttggtcctaaattagccttataaccttcttatgatattattcaaaaaagtgtttaggattcaaaccttgtctcagcagagtccctcaaactgtgaactacacaagttccaagggtttattt

SEQ ID NO: 139411 - DNA, 419 bp, Homo sapiens
cctgcctgcacttaggcaattgaatgtagtgctttaaatgtataccaaaaccctcaacagggcatcaacaatgtctggcagtgcagctgcttcttcactttcccaattaaaaatgcgtttgctggctgggcgcagtggctcatgtgtgtaatcccagcactttgggaggccgaggcaggtggatcacttgaggccaggagttcaagaccaggctggccaacatggtgaaaccccgtttctactaaaaatacaaaaattagctgggtgtggtggcgtgtgcctgtaatctcagctacttgggaggctgaggcaggagaatcgtttgagcccaggacgcggagtctgcggtgaaccaacatcgcactactgctctctggcctgggcaacagaatgagactctgtctcagaaaaaaaaaaaa

SEQ ID NO: 139412 - DNA, 279 bp, Homo sapiens
agacatacaaaactccttgaagagacagaatggttcctaggcttcctgctaaataagactctaatgaggccaaagataattatcctacccccccaaaaaaaaatttaaatcagaagtttgttaggttaaatacacacatattaactttaatatgtacaagtactggatactaggagtccaaaggtagtaccctttggactactttaaaatacatatatatttcagcagggcgagatagctcacgcctataatcccaggaatttgggaggccaaagtggg

SEQ ID NO: 139413 - DNA, 130 bp, Homo sapiens
tgagggttggcacctcccatcccactatcttgctgatgtcattctctagatagaattttatttgtctttttacccttagcacaaagcacaggatttggtacataaatatttaatatacatatgttgatgg

SEQ ID NO: 139414 - DNA, 491 bp, Homo sapiens
tgcatctcagtttcgggacgagagaggagtcctttgggccgggcacgtgggctgcctgaatggctgctctgttcccagcctgacagctgtgcagccgggtgcccgccttcccccacaggcccggagtggggcttgggcttggggtggcggcagctctcacagctccagggccaccagggctggggcaggcagctgtgtcccatgcaggccttggcctcagcagcccatgggactcggtgtagccagggaggcttcctggaggaggggtccttggttcatactttgttccatgagccctatcacctctctgtccctggctctgagctgggtgaccccagggtccccaaaagagccccgtcccagaccctgccttcagagtcttgttcttggccaggggagcggatagaggagcagagccagacataaacgttcccgttgctgtgtgtgtcttggggaggaggaagagaagctgtggggtggggctttggagg

SEQ ID NO: 139415 - DNA, 288 bp, Homo sapiens
ccctgcagacctatttgtggatcaagcttttgatccgactcacaagggatcccatcaacaagaagcttcttggtggtgtgtcctttcactgggatgtcactgttgtctctttgtcactcgttatgtatgtcaccacgcattgaggcacccatgaactctatccttcaggacagctgaggtggcatgaagctgccatttcttgttctttttctccatctggttcttcttcctcttcctcctcttcctctttctttctcttttcttttcttttctttctttctttccacc

SEQ ID NO: 139416 - DNA, 275 bp, Homo sapiens
aaagatatggatgaggtgggactatcatcatgtacaaagatatctcatttggcacttgatcaggtgaagaattattttttgtctttcttcctgttgtgtatgcaaaagacatcttaaatgacttaacttgaactaggagttgatcaattgattttaaaaacttggttatagtaaaaagcattaaaaattgatgacttaaacattttactttaatcaaaatatatagacatacatgcatttgttagttatttggttacagggcagtggttttcaac

SEQ ID NO: 139417 - DNA, 125 bp, Homo sapiens
tagggaaggtacagtgaaaatacagcattataatcttacgggacccccttcatatatggcgtccatcactgactaaaacgtccatggtagggatttgtgtatctagacatagagaaggtacagtg

SEQ ID NO: 139418 - DNA, 180 bp, Homo sapiens
gtattgtgccttcatggatacacattcaacaactcctcccactttgaattacccactggtgcagatgaaattctggttcagagtcctgtaggtggtaatggtatgagggtcaagggcatgtgacttctctctcctctttatctgcactctttctttatttgacactccataggaaactat

SEQ ID NO: 139419 - DNA, 453 bp, Homo sapiens
ccgttctgtcccatttcaagaggaagacgtagcagtcgcgtgtagaagtggccaaactcctctcaatttgggctcagtggcaggtttaatggcatgggtagatcaaactttccgagcctgtggacttgattgattgaggttgtgacatttatttccaaagcatccttcaaaaagttggttatagactaaaccaccagtttcaaatctggggtccccctgactctaatagtctttgaaaggagtgatgggcagggagaggagggggctgagagagaaacgaagtgttttgaaaactctaatggagattctacttagcaaaactaaggctgaatgtgctagctaaaaaggtcaggtttttctggcttaaaatcaatcagtaatacctgcaggatgacatcctgaccatggcctctgagcctcagcttggtgtggctaccattagcctctcctctg

SEQ ID NO: 139420 - DNA, 634 bp, Homo sapiens
cacagtcacacctcagggtgagccagctctgcaataggatgcactgctttgtctgcagcctcacagacctgaaatgcactctcatgtcctgtgcctcagtgctggctgggccttggtcctattacatcttgaactcaaggtaatacatcagtggccgggattcacactcagaaccaccttgaaagtctgtgctgttaccaccatgtcgcagaggtagaagtagatgtctgtataaacaacctttgggtagcaggtggtcagttaggcaggaaaaatagttctgctacattatatatatcaggagtatattgacaggaacatgtgtgttgggaatatatatgtcagtaacagcatgaagaaagaaaggctttgacagttctgagcaagctacatcacacatcttgctaaagtttttgctatatggaattggtcattctagagatgtcagttacctagcacaagaattgcaaagaacaaggttggcaatggaaacccttcctaaggcagagaactatgtgtttaagaacaggggctcagcagcagatgcctaagctacacaggctagggcaagccactgccctcttgcgtctgttttctcatctacaaaatatgaaaaataactgaattttcttca

SEQ ID NO: 139421 - DNA, 491 bp, Homo sapiens
tgggtacccaaggctgcccgtgactggcctggtacatccacctaatctcagcttcatatcagaaagctaatgctgccccacaactaagctgcattctccaagactgtatcaggagtaaaggtgatattctcatctccaccttctttacactgtgcctctcttaagtggttccgaaatctgaaaaacaggtgtgctgtttaaactccaatcataagcacctcaggacatttaaaagaacaactaacgtttacccagagcttttattagcccactggaacttcctaataacctaacacagtcagttaattagcaaatgatgcctaagcacctattattaagcactcacagccgcgcaccacaccaggcaatggggggcggtctgtatcattagcaccattttacagttgggaaggcaatcagagtcagtcactctgcggtaggccacaccaccaggacacggcatgcaagcgtgccacccaggtcttctgact

SEQ ID NO: 139422 - DNA, 667 bp, Homo sapiens
ggcagctcacccagcagtccccaggagggggcctccggtcagctctcacataggcttaatgcagagcccttttgtaacaatgagttgaggttagggtacccttcaaagccctgggaccgttttaatgttgaactgaatatagaacagaaacgatgaaaaatgtggtgccggcagctgacacagtgtttaccaaagcaccagtcatgtggcagtagatgcttctgggtgcctactgtgtgcaaggcatcattctcagtgctgagaacataaagatgagcaagccatgttctttgccccagaaggagagaaagaattgtctgtagtaaagagaggagagccacaattacctcgaaatgtaaaaccagtttcgggttagccatgtccgttgcacacatgcatgcatgtgtgttcttgtgcgcgtgtgttttctgtttagcagagaatgcgctagagagcgtgatcatcctgtgctattcatataataaagatgaagtgagagaacattagaggaaccaaggccatgtgatggtacacgtctgacgttttttcctttcggttacatgcccgtatctcctctttcccctttttcccctttgtcttcatttggttcccctccctatagggagtttaggacaagaagaggctaaagtttcactgatgagccttt

SEQ ID NO: 139423 - DNA, 728 bp, Homo sapiens
ctttatgccagtaccacactgtctgcgttactgaccctttgaagtaattttgaaatcaggaaatgtaagtccttcaactttgtgcttttttgcatcatttgtttttggctattctgggtcccttgaattagaatggattttagcatcagcttgtcaatttctctaaaaaaaaaaaaggagctggaatttaataaggattgccttgaatctgtagatcaatttggggagtatgacctccttaacaatattgtcttttaatccatgaacatgggatttctttttatttatttagcaggccttctttaatttctttcaacagcattttgtagttttcaatgtaacaaacttatgtactttttttgttaaacgtattcctatttgttttattctttctggtgttgttataagtggaattctttaatttcattttcaaattattgattgccagtttagaaatacacttgattttttgcatattgatattattatatcctgcaaccttgctgagctcatttattagctttaatatgtgtatgtgtgtgtattctctaggattttctgtatacaaagtcatgtcatctgcaaatagagatagttcttcctttccaatctagatgcctcttccttttctatcctggcagacatctttaggaactatcttggttcttctagggaaacgtgaaaaaactggtggccatttgggcattgggaatttcatttctatgctg

SEQ ID NO: 139424 - DNA, 223 bp, Homo sapiens
atgagacaggcaggggtgctcaatcaatgtcctgggtggggccttttcattatccacagtgatcagtttattctgaaggtctcaggtcagcttcctgcttcaaaatatcacaggcccttatagggtatataaaaattattataggatatccacagtttgtcatactttactaaagtagtctaataattagatgaagttctgaatttaatattcagttgtatta

SEQ ID NO: 139425 - DNA, 620 bp, Homo sapiens
gtgggaaacagtgtttccaggcagagagaacagcacgtacaaaggagactgttgggagggttaaatgaaataattcatgtaaggtacttagtaccacacatgaatttcacaagcagcagctggaatggtggtgatggtgatggtgatgatgaggactcacaggccataatgcctcatggtattagccaattattgtatcctctactgaaaaaacagccattggaagaagggacagagcaggctttctgcctgggccagtgtggcctacagagatgctccaaaacaactggtgattaactagcaccactgggtcccccaatttgagaataagggagcagcgatgactgaggaaaagccaagtgcgctcaacatggcaggggcaggaaagcagatgggcccagcaccgcctggattcttaacagcttgctcaatctaggccataatttgcttctctgtttgcaatcagaggagaccaaccggcatactttcatttgacagtcaggcttggaaagaaaatgactcaatgtcacagggccaccctgtggcactgctcagagcagagcccaggcctctgaacttagattcatcccttccgcttctccagtggtccacttcctcat

SEQ ID NO: 139426 - DNA, 224 bp, Homo sapiens
atctgttatcttaaggagtatgccaaaatctgattagtaaaacataacaaaggtagatttatttttcatttctggctgttgtacaaattgtcagtataaaatactctaaaattgttgtggatttaattcatttttttcttaacctcaaaatttttgccagtacctctttaatcattgtattctttctttctgcttgtcatctcataattttctgttatttgcct

SEQ ID NO: 139427 - DNA, 740 bp, Homo sapiens
ctgaatgttcctttgtcttgtaaaacttaaataaatttgtatgcttttctctgctttttattataagtgcctcagcgtgaagcttgagacaagtgaggaaaggctattatgaccttttctctcctgcagctccaaaaccaccacccacagggaatggaggaccacagtagcattttgtctgtgtgccctgagaggggagagagttgcagagaagcagccttcacccccatcccagtggatagagtttcctgaggttcggtgacaccaggaatggcaactagttggggcatcctgcaggggaccccaaccgggtgaaagaccaagcaggaaccggtccacgacagctaggaactgtgctgtgggtcagcccacaagaccactgatgaactcatcacaagttccaaaacattcttaaagtctgctgcaggcagtggctagagaaaaacgaaatctaaataatttcaaatttatattctacccagttctgactgttaaatcttcaaatcagtaagtcagaatgttcatcaattataagcgctttttttaaaccaaacagaccacagtaatgatgttcacaggcagtgaaaatcaaggcttccattatatataccaagtcatatggaactctatccatcaacatatcaacattatatttccttcctaaaatgtcttcaggaaaaaatagagcaagggagtaaacgggagcctatcgtttaggagtgtgcatgaattttgcaaag

SEQ ID NO: 139428 - DNA, 360 bp, Homo sapiens
attgtgctgcccagtgactgtctgtgtgctgctcccattcagcaatctgtgccaggcaaggtgctagtgctgcctggctgcaggaaggctaactggacctgacgtggtctctacctcaggggctcatggtatacagaagacagacacctacgtaggcatacatcagtgctgaggactcttctgggtaaccatcagccagagaatccgcagaagaaatccagctctgcttgagcaactggataaaatgatgcctaaggtcccctgaggttctaagcaccgaccaagggagatctgggatgggaccacagacagaagaatgcccaccagaatggcccctgcccatcctgtaacatggttttc

SEQ ID NO: 139429 - DNA, 126 bp, Homo sapiens
acagctgttgtaaagggcttgatttcttaatttgactctcagcatggttgttgctggtttatggcagaaatcaatttctgtacattgattttgtaacctgatactttactgaatttgtttatcaaa

SEQ ID NO: 139430 - DNA, 297 bp, Homo sapiens
actagcaactagtttactcatactttcagttctgtaaaattaaattatttaatatgtgcagcaattgctgttttatttatttatttatttttgagacagagtcttgctctgtcacccaggctggagtgcagtggtgctgtctcagcttactgcaacttctgcctcccaggttcaagtgattctcctgccttagcctcctgagtagctgggtgtggtggcaggtgcctatagttacgaggctgagccaagatcacaccactgcactccagcctgggcgacagagaaagacttcatctc

SEQ ID NO: 139431 - DNA, 523 bp, Homo sapiens
aaggaaataaggtaagaccctaatcttaaatgatgcatatacaaatagcggtagcatttagttatttttatggataaaatagctttttaagttaattttctttaactttgatgctgatggcacaatagcatgatggcacctctgtgtcattataaaatgtctatcatctccttacggactaaaagcaggaaagaaaaaaaaaagtagtcctgtttcaggctccaaagtgaggcaccgatttagcacttgtcttctcttctgaatttgcagctggagataagctaagaattgggcatgaagaggaaaaggaaggaaaactcaagttgaaataacgataagcaaatgctcagagttgttgatgtcatcctagacattgttagagaggcaaagacagtatcagtcattttgacaagccccttctgttcactgttactgctttcccagggaggctttctttcacatttaagatgagaaatcatattcctctccacccacaatttcccctttctttttttcactttgt

SEQ ID NO: 139432 - DNA, 263 bp, Homo sapiens
cactagtgaacccctgctgctccggctccacacttctcatgctggtccttcctcagtgctcctggggacacctcttgcctgtcactgtctgttggaatcctggacattcttcaaagcctctctcagatgcctcttcttttttcctttttatttattttttttgggatggagtctcattctgtggcccaggctggagtgcagtggcgcaatatcagctcactgcaacctccacctcccaggtttaagtgattctcctgcctcag

SEQ ID NO: 139433 - DNA, 395 bp, Homo sapiens
tttagttcaggggagcttctcattatgtctggttagtttgctaaggaaatgggtccctgttcatctgtccccccaccatgtgatgaaagcagctcactgctgttaaaaccccatggctccctgaaccccagggacgcctttcgattctggcccatgtccaggtctccccttttattcctctttctcctcatccctgacttctcccctagtcctgagaaggagacctgtcattaggcaggacccacgaggagctggttctgcaaacagagtctagtctcttctttctgtgcgctgtcatatcttcctaaggctgctgctatagaaggagcccctatctagaaggtgggagggaaggagaatgggtaggggaaagatgcaggagcagtgacttggat

SEQ ID NO: 139434 - DNA, 449 bp, Homo sapiens
ggtgtgttcctgtactgtcatgactccatttaccctaattaacgcacctgtcttctcccttgtagttcagtgttcttgcagcccttatgataatcgttgtgctctatactattaccgccggtgcataagaagccgtagaatccctctgaaaaatactcatgcctaggcctcaattcattgctaaacattttttaacaagtatctcacatttaacaaaaaaagatcagtcatatggcagcaaaatacaatgtcatatgaccaaaacatgaaagactgtgaaaatgaatctggaggtgacccaagcattgaattcaacaatccaggctgggtgcggtggctcacactgggaggctgagattacaggcctgagctgtgtaatttcatgccacgtgatacagcccagtaaaaaggaagaaaccccacgggtccagcgtctactcacagagatg

SEQ ID NO: 139435 - DNA, 459 bp, Homo sapiens
gaaggcagggctggggaaggaacagtgcgctaggcagagggaatagcagatgcaaaggccgagaggtaagacagatcaggcacatctgaacaatggaaactacagcagctggagcacagggttctgctaggtgatgaagcacaaggctgaagagattggcagatcctatgcttaaacacctcacaaaacacatcaagaagtttcagctcacatcaatgcattgctggctggcaggctgtaaattggtgccactttcaaaaactgtttggcagcatccacaaaaaataaaacatgctgaccctttgattccacaattccacccctgtgtataagccagaagaaacaagcgcttgtgtccaccaaaagacatgcccaagagtgttcttcacagcacattcataatagccaaaaactgggatcaatccacttgtccatcaacaggagaacagacatggtaca

SEQ ID NO: 139436 - DNA, 806 bp, Homo sapiens
agaatccttcatttttagtatacttttaaaattgaacacacacaacactttggttcctaaagtaatgataacaagaaattaaaatcaaggtacagtatcatttatatgtagtagtacagagtaaccatgacttactaggtgttatgatgaaggtgtatgtgtgtgtatatgtgtgcatgcatgtagataagtgtgtgcatttgcacacataagagttttaagctgctcctgtcatttattgatggtcaaaggtttcttttggctattgctggactcttaagattgtcttgtaattgtctttttgttgttgttgaaaattaagggtgtatattaaaggtagtttttacccagatcttatatgtgtaatagctcacatctgtaatcagaaacttactgtttaatggccacccaattgccattagcttcctagagggtgatttaataaactatcttctttaaaactcatttaaaattagagacatgtttgcatacaatggattaatgacgttttcatactaacccacaaaagtctgctgcactttcttttgtaggcctaacattcatttcatatgcattgattattattgttgaacttgcattaattacatcgtgcatatatggacatacaatgtcatctgcagaatttaggattttttattgttaatttttatagtgactgtggattgaggaattaaaattagcatgcttcatttataatagtatttctagtgtttcattagccctaaaaatgtgataagatcaggaataagattggaatgaaaatttctccttaaaatggtacgtct

SEQ ID NO: 139437 - DNA, 802 bp, Homo sapiens
aaaatgagctgcctgcctggcagttttgttgtggctgggccttcacggcaaggacctaggcacggagtcctggttgagctggtttactccatgaaaacgaacttcagttctttggcttgccccctgagaatccctgtacaacacaaccaatctatttccattgccctaactggagagggaaccagcattgctgaatgggggtattgggggaagcatggtgggggaagggagaaggacttaggaaattaagtccttgtgagcaatgaaggtcctaaaagagcaatggaaagacactgctcttagtttaaaacaagtttgtacattattcttaattttcatcacatttgagtatctgatagacatgggtgttttgctgggtaggagaaaggaatgggacttacataccacatttacctctcactcttgagagaaaattaaatcttatcaagcatttggcatatatacttttgtattgaatgcccacaatatgaggtattcagctaagcaggaatttttgagaaggaatgagatttttttgggaaggttaaattgggagtatagtagaataaatatttgtcagaatatgtcagttgttttcctaagttgataacttacctagtctatttggaggaagggaggcgagtgttcttgagacaaggaatgaagtgcaggctatttctggagtagtggagtaagggcttggggtggaaagtggaggagggcagtcactgctgtttactttgcatccactttggaatgatgagaaactcagtttcttagaagaaatagtaatgaagagatg

SEQ ID NO: 139438 - DNA, 422 bp, Homo sapiens
tatggccgttacaggaggagagcggctagcataattggttgcatcacttttattaggttgatctgcaaatacattcagcaaggaattgttctggtgtgtggaaaagcaggacaaagcgctcccatcaatctgctctgacagccctgaggtttgctatgtcacctatgctagattcaaactcccgtgctcaagtgccaccacacctggctggcttctgtaactagtctcatgcagtctatggccacctctcctggcaacaactttctgagtaatacttgctttcatgaacattacccccccttccctccaagtcagccaaaataccagtgccagccccattagaaatctagccttcaccactgcatgtgaaacctgcaatgtggacaactgatttcccttttatatttaacccgagcgctgct

SEQ ID NO: 139439 - DNA, 551 bp, Homo sapiens
acatcactgaggaagaggcattcgagcccaggcttgaatgccgtgagagaacagtttatatgaatatggggaaatgaactgcccaggcagttcatgctgaggaagtgctgtggccctggactgtaatgaacccagtacatcattttatatttaacacatgagaaactggacactaaaaggttacacagcaagtgagcagagagcttggaatgcacacagtatgatttcagagcttaagcctttgaaggttatgctcttctgcttttctttttttttttttttttttgagacagagtctcactctgtcacccaggctggagtgcagtggcgcgatctcggctcactgcaacctctgccgccagggttcaagagattctcctgcctcagcctcccaagtagctgggattacaagcacctgccactgcacccagctgatttttgtatttttagtagagatggggtttcaccatcttggtcaggctgatcttgaactcctgacctcaagtgatccacccgcctcggcctctcaaagtgctgagattacacgcatg

SEQ ID NO: 139440 - DNA, 336 bp, Homo sapiens
caaaagattggacacccctgctttatagagtgatgtgtcttgaattgggcctcaggaatatggtggaacttagcttgcatagaggagagggaaggcagtctcaacaggaagaatggcaaaagcaggggcggagaacctggtgtgttaaagggacagtgagggagatgtggtgcagagggcttatactggtttatagtagttagcaagtgtaaagagatttgctagcttggaatggcagactctggattttgagattattttcttagcagtaggaagttattgaaggcttatgaacaggagagtaatagagaaaatgtatggggaaagtcagtgtat

SEQ ID NO: 139441 - DNA, 420 bp, Homo sapiens
ctgcctctctctctctctctcactctcacgctctgtctcgctttcacgctctctctctgtctcttgtcctggagtcagcagccaaaattaacagctgcatactgattctcctctgcgtggaggaaatccaaagcatttgttaaaatactgatacaaaagggaaaataagcattagtcaaacaaaacatcacagaaatcttccaaatctaccgcatcctacaggatttgctataaatattcatttttataaatagatcaaagaaaccagtaaatagaatgacttgttcatttgtcagattggctttgggttagtgctgctctgggcatgctggtgcacagggcagagacgggtctgaaacccaagtcttccatcttcagacctgtgctcttctaaacccacaaacactctacaggatcaaa

SEQ ID NO: 139442 - DNA, 197 bp, Homo sapiens
tttgggctacacacatgaggtgcacccatacatgagtgggaaggtggcaacaaagatggaggagctccgtggtccttatgctgcttctcctctttcttctacaatcacagaagtggaaatgttggactgaagcaaagattccagtgcccagtccctgactttgttaatgttgagaactaacaacaacaaaaaaaata

SEQ ID NO: 139443 - DNA, 226 bp, Homo sapiens
ctttgcctgtaaagtgaagacaagaatatcaatcgcgtaaagctatagtgaggatgaaatgaggtcatgtactatgttagtattatttttgtagtaatacaatagcagagcaaattgatacttgcccaggacctcctaatttctgccttaacctggcatctagcttagaacacattaacatagttaataacttatattatccaaatttaactcagccaagacccca

SEQ ID NO: 139444 - DNA, 423 bp, Homo sapiens
agagacttctagggccctgggaccctgacactgaggaggagcaaactgaaggggagagtgggcacattccttgttggctgctgtggtgagcagcagctggtcgttgtcagtcaagctccggaccactctgatgatgctcactgcattttgatggagtaagccagggacattaccactgtgtttgagccatctgaagtattcctgggtgggtctgcagttggcagcccgtgatcctttttccattcaaggatgatgcaaaggtaaggggccaaggctgagctctgtagatgcctgtgagagcctcctggtctcaagaggtcataccaagggccttggccaccaaggtttcgtgaggaccttgaggtggtttcgccatcacaatgtcagacgtgtcacacaccatctggtatgtcctcactgtat

SEQ ID NO: 139445 - DNA, 503 bp, Homo sapiens
cttgatttcttcaattgtccatgttttgaaataggagaaatggcttaaaattccccctcattcttttttccagttcaaatgacttgctggggtgaatatgatgaagttttagatggaaagtggacatttagcttttgaaaatgatccttcataacaactgaactatctgtatacagtattgtgattcaccaaaccatatataggacaatgcttactcttctgcaaagggttcattctagagtcctagttttggtggccctactctttgatgggaggtcagatattgttgggaggctggtaaaatgcacaaattagaaggccttgaagggaaactcaggactaggaagattcagaagtagatatgaccaagcaggtggaatacgtcttggttattactcagcagcaaaatgatgctaagatgttatccccaaaaagactgttttacttctataggaaaaggaccctattttctcaccaaaagaaaaaaactacaagctaaaaaa

SEQ ID NO: 139446 - DNA, 472 bp, Homo sapiens
ctggccctatcctgctcctttctatctcggtgcttttgtttctcctgttctgcctgccttggatggtccccttttcagctctccatagtctaactcacagtctccttcaagcattggccaaatgacacctctttgagaatgtcagtcccgcttctgagctgcagtgcctgtttctttgcaggcacttgaaacagtctgccgcttagcttggttatttctggttcagtcttgctttcccttagggtgggtatgcagtggttaaaatcacagattccctagacaaggacagcctgggtttctgtctgtcttctgtggttttctagcttatgatttctgtgagcttcagagggagatgggcatattagctctccccgggtggcagtgaggactgtgagtttctgtatgtgaggcatttgaaacaagtgctgtgtaggggaggatccatatctgattaatcttttttttttttttt

SEQ ID NO: 139447 - DNA, 234 bp, Homo sapiens
acagtagcagcatcagctcacagacttctgaggggtatcttcaactgtgctgcccgtttttctcatacactttttcttgactagtttaaatcccctttgattacctcctctgacagctcttcatccaggcactgacccagctctgggcctcagcttccccatctctaaaccgaaggggtttgcctgggatttctctaaagctatttccctcccaaattgtcagttacattttcc

SEQ ID NO: 139448 - DNA, 334 bp, Homo sapiens
ttcaaaatgcattagaatatctccccagcactctatgtgccactcaaatagcttaactgcatgtcaaagaagcctaatgctgacaatagatcaaatcaacccgcgagcactaagagatttgccacacaaaatctgaaacaactgcaatttgccaattaatttgggacaccactttcttctaatctccattaaaagtgagttcataaaagtcattcctttttcccaaggatacatttcattctggcacttatcaataccaccacgtctaccccccacataatcaccaagtccacacaaccctcattatctactcggcctcagtatcacttctctt

SEQ ID NO: 139449 - DNA, 364 bp, Homo sapiens
gttgttttacctttttaaacacggcaactagaaaattctaaattacattggcagctaaaatctatggctcacataatgctgctctacaatgctggtgtgaactatcacgacactgttatactattattctttgttttatctctgcctcactcactagacagggaacttaaggagaataggaagagtaccttccactgctacgagagatgcttggtacattacaaatattccgtaaatacttgttgagggaatgaagctatgaccaaaaaaaaaactaaaaatattcaatgattctgaaatatttaaaaaatcactcaaaatcatgtgctatattgacttgcccacaacactagtctgtttggtg

SEQ ID NO: 139450 - DNA, 186 bp, Homo sapiens
tcctgggaactgggctgtatcttttgaagacatgtgggaagaagaagaagaagatgatgaatataggaagaggtagagaattgcaggagaaccatggggtcgatgatggtgtcaaccaatatgaagatctcaggcagcaagtgtttccgaagggcaaggacaaggtaagggctggggcactgccca

SEQ ID NO: 139451 - DNA, 311 bp, Homo sapiens
ctcagtgatcctcccgctcaaacgtacaaagtgctaggattatagatgtgagatactatgttaggatttttgtattcattagtggggttggactgtagtgtgtgtgtgtgtgtgtgtgtgtgtgtgtgtgtgtgtgtgccatctttggtcaggtgtcattgatgatttttttgttccatagaaagaatttagaattttttcttttctgtgctgtggaacaattgaatagtattggaatacccactctgcctgtctagtagaagtccttgtgattgtcagtgcttggtgcttgtggagggtagctctttgac

SEQ ID NO: 139452 - DNA, 254 bp, Homo sapiens
ggctagcacagaagctggggacaggactagaacagaccctccctcacaggcctcaggaggaaccaaccctgccgacaccctgacctgaacttcagccttcagaaccaagagacaacgaatgcctgcagaaaccttcaccctggctcttgggtttgggcaggtccagcctgcagaggggagcggatctcctcctgggccctggcctgccctccctggctggcatgtggactaggggcctgggggctcactggatg

SEQ ID NO: 139453 - DNA, 415 bp, Homo sapiens
ggcaaaccctggggacgggaggcagggagtggcctggggtcaggatgccaagtccagggctctgggtcctgctggactcagtaacctgggaggcatgtagttctcctccagtctcaggcatctttagggacctggtttccacactccaaacctcctccctttgtgtctggtccccaaattacccaaataagggcaagaacccagtcatccagggaccctgggttggtaccagtctgatcccctaccttggcatagctcccccaggctcagcatccagaggtggagttgggagggactggcttcctgcacccatgacagtgaggaggaatggggaggggcacccgcctccaacagcgttagtcctctcactgcccccagccagccctaggaggtctctagtctcttgtaccctgcg

SEQ ID NO: 139454 - DNA, 438 bp, Homo sapiens
ttatgttttgtatgcaatcatcttttcaacagtattttatgtaatcttttagaaaatcctaagcaacttcaaatcacataggaggtgcccaataataaaaaagaatttactaaaataatttctataaaaacaatgccttcaacacttctaatatataccacaaatatccctgacatatcttcccaatacacactcacagttgcacagttggggaggggtgggtaatggctcttcacatctgtaaagatgatccacacttaaggagatcactcctcccttctaattcccagccccaggggaaggtgaggatcaagtgctaagagtgcctttccaacctcatccgcatgcttcggcgacaccgtagcctctgctagtccctaaagatgacatgtaattttcatgtctccatgccttcactcgtaacaggatgcttgccta

SEQ ID NO: 139455 - DNA, 394 bp, Homo sapiens
cctatctcacaataatgtaatatgtaaatttcatcatcattctgcttaattaacagtagttactactgttgtcattatttttagaaccagaagtatagcagcagcagactaacatggcagttaagagaaaggacttcagagttcttgccaaacctgaaatctggatcaaccacttattagatgaatgagttaacctctctgagctttgctttcttatctgttaaatgtagataataagcacctcacagggcttcaagaatagctaattagataaagcatataaagtgcttagcacagtgccttgcatgtagaaagtatgcaataaacggtactaatcatgacaatgaggaagagggggagaggcaaggggaatacactgactttgggacagaca

SEQ ID NO: 139456 - DNA, 247 bp, Homo sapiens
attaaacttacccaacctattgccaatcactgaccccaccacttcttacatggaggtgtaagattatattcacagcaggctatgcacagtggctcacgcctgtaatctcagcactttggaaggccaaggcgggtggatcataaggtcaggagttcaaaaatcagcctggccaacatagtgaaacctcatctctactaaaaatacaaaaattagccaggcatggtggtgcacacccctagtcccagct

SEQ ID NO: 139457 - DNA, 527 bp, Homo sapiens
ggcaggaacaagagcagatgcctggggtgtgtgtggcgaggaagaaaaggacacagagattcacagggcagtgcagggatgcaggtggaggatgggaccatctccgctgagcactctccttccatggggaccagtgtggccagccctgtgctcccgggagggaattcacagaaacacgggtcatggtgtgtgagtgctacccacattttcctactgagcttaataaaaacagcaaagaaatgaaataacgatgaaaacccttccttattgatgatgagaccatagttctataagagggtttttctttgcttttgttattgaaaagatcaaaaaaatggaatgctccaagtttgttttgttcttattagtaaggatgccctgagtatttttacctcaaggcttaagatctgaatgtttttctttctgctacagaaagtctatagaggaagtgggcaggcagcagctgtccagcccatcataccccacagcagaggggaggctggggcgtgggcactggtccgcctacc

SEQ ID NO: 139458 - DNA, 387 bp, Homo sapiens
agttgaagagaatctgaaatgactttaatattcaccaggtctattcatttataaactggttttatacattcataaaaaaactgaaatcaaagatagaaaagcatttactgttctaaaggggaagagaaaatactgggacatgacaacaatttacttcaaaatgatgaccaacatttcaaggaccctgatgacctgacataactacttccagtaactttgttcttctggccaggcttttcccaggacaatataaaacgtgagaaaagagtgctaaacaagacatctactttggtctggcaaaatcaggcttgcttaaatgcataacattacctaagtaggggaaaaaaatgttactgtgctagttatttatattcagatccctttaag

SEQ ID NO: 139459 - DNA, 123 bp, Homo sapiens
taaaaacatcaatttagcctacccttaaatagtaacgcatttgtcacccccagcccaaagtggtaaaagggcatacacatcacaaaacacagaactgggagagaagttactgccctggggaag

SEQ ID NO: 139460 - DNA, 322 bp, Homo sapiens
gtaatttttaagagtgtaagggtgtctgagtccagaaagtttgagaattgctcttagacaaaaaggtataaacaagtgcctgttgtcagatacactttctttttctcaatgggtaaactcttcccagcttctgcctgcatttggtctctctccagagcattgaaaaatggtgtttttgtccagattttataggaaagtttatctgacaaagctgctttgccattaccagaacccaaagtgctgggaaatgattttaaaagggaaggaaatggcaattattgagcaccagctatggtattggtatcatgcactatagttggga

SEQ ID NO: 139461 - DNA, 349 bp, Homo sapiens
aaagctcaggaagggaggggagacagggaaatcagttagaggctgactaggattttgctttgtcttccgtctggattgcaggagctccttgcctgcacctctattatggttcttcccacagtgcattataattgatcatttgcatagctgtatctccattcactccttgagggcaggggccaagtcttgtgcatctcttcatgaccagagcctggcacacaggagtgctcaagaaacattggtatcatgtgaatgagtgaataaatgaatcaataggtgctgagcaagtgcaactccagtttgccccaagtaacctctctgatgggtatatcagagataaatcctactc

SEQ ID NO: 139462 - DNA, 660 bp, Homo sapiens
ttttcccagtttgtgacgtatgttttcaccccctcttcacgtggtgtctcagagatgttctgaatttggaggaggagacactgactggttatttttacagcggtgtttctggtgtcatatctaagaattcatttctgaatccaaagccacgaagattttcctctgcgatgttttgcgttttggtctggggtcctcttgagtaaccttccctgtggggtgtgaagcttggattgaggttccccttgtggtatgtgggtgtccgggtgtccgactgtcccagcatcagctttgcaggcgcgcagcgttgcctcagcgtcgtgactgtgccgtgtgcgggctccgttctggaaccttcctccgtcccactgctgcacgtgtctgtccgttcccgcggcagagctggctgcggtgagaagcctccgacttgggcgccgtgtggaactgtcggggccattctggtgttgggctgcctgtgtgtgaatcttagactcagcctgtccttgctctgccgtcctgtgggaacgtgtcttggactctgacgtggtggtgagcgctggtcccgggaccacgtggactgtggcccccaccggcctcccgtggtgcacgctggagcgacgtggtcacttttgccatcccgtgctgagcttctcagttgtgctt

SEQ ID NO: 139463 - DNA, 304 bp, Homo sapiens
aaatgctataaatcaaggctttcctctcctctgccatcctacctcccctgtgcccccagcccagagcttcttgtcaaaccttcaccagcattcccctgatcaggcccccacagagcttgaccaaaccctgcttgactcagcgaaccctcttttgtgtctcccaccatctcccctcttccatcttagacatcaatttcacggccgccctacctacagccaagaagcctatggacagggtcatgtgtaggtccctcaggggctgaaagcacacccatcctgagtgtactgttcacagtgcagctga

SEQ ID NO: 139464 - DNA, 263 bp, Homo sapiens
cggggttttaccatattggccaggctggtctcgaactcctgaccttgtgacccacccacctcggcctcccaaattgctgggattacaggcaagagccaccgcgccctgccgagaatttgcatttctaacaagttcccaggtgatgctgacactgctggctcatggaaccactgctgtagtattttccaaattatcctgattctaagaaccacctatgacctgtgctgttttttcagtggttactggctcatgtcacataaatt

SEQ ID NO: 139465 - DNA, 345 bp, Homo sapiens
gtattcattcatgtatttgatcctcaccaaagtgttataaagtggtctcatgtgacagataaggaaactggggcatacaattgactgggatcacatagctagtaaataacaatgctgggatttcaacctagacagccaggctttaagaactggaggtagctgggcacagtggctcacgcctataatccagcactttgggaggcggaggcgggtggatcacctgaggtcaggagttcgaggccagcctgaccaacacggagaaaccccgtctctaccaaaaatacaaaattagccgggcgtggtggtacatgcctgtaatcccagctactcgggaggctgaggcag

SEQ ID NO: 139466 - DNA, 252 bp, Homo sapiens
tgcccattttgctcaaaatctctctctcctcactcctacaccccccttcagcaacttgctgggattttttcggcgtaacgtagtgggtctgggcaatccccagaacaggaaccctcccagcagcccaccacccctagtctataatcacagtcgacttcaaccacaaacacctggagcacggaaagcgctgccccacccaccaggaaactccgcatccctccacatgaggacccatcctgcacccgggagcag

SEQ ID NO: 139467 - DNA, 352 bp, Homo sapiens
gcgtcttctcttttctaaggcagtaaacatgaacagtcatttaacacatttattgtgcaattattatgtccaaagtatgttgctagatgttgtttgagtataatttgggaagattttcatcaaggctagtaaaacttatttttgagttttagttttcaggaacatttgttcatccacagttcattctccccagtgagagaaggcattagaagcactgcaagacgtttggtgactaggcactgattattcctgaatattgctaacatttaacaagtagctcaaggtggggaagaagggggtaagatgaaaatgaaaagaaaaaatagtgaaatgtttaaataaatcatatata

SEQ ID NO: 139468 - DNA, 303 bp, Homo sapiens
tcagccggcccgtttcatctatggtcacttctgtgctggtcatgggtgtaacctttattttatgactgatgaggcttccggagggagacgaaataaatttgtggtcaatctattatatttaatccaaatttaggacctgtgtttaaatcaaagtctaatttgagtataattaatgatattaagccagagaattttttaaattaatgtatctataataagcatattacacttttctcctaaggccttgtttaatattttcattcaaagtttatccactgccatatacttcccattacttcacaa

SEQ ID NO: 139469 - DNA, 367 bp, Homo sapiens
ctaagaaaagcctcctttcacatctcctggcatctgcttccaaattccctgccagcccagagctgtctgggcgatgaccagaatggagagtgaggagcagaagatggagatggggccacacatgccccaagctccccccaccacacccaacccattcatcaagactagcttcatggatctgctagttttccactgtgggcactgggcaaggcaggccagtaggagaggggccatctccacgcaaaacctaatacctggcagatggtggtgagggcagaagatgccattctccggggagactgcgaaaggaggaggcagccctggggctttcattggaggccagaagagatgagggagggaagtcagg

SEQ ID NO: 139470 - DNA, 247 bp, Homo sapiens
gcaaacctatgagaagtgctgttctctggaaatcattttggtaaagatgaacagtagaaaaaaaggagaaaaagcttagaactatgcagactggtgctggttctaccatagtagtccgagtttagcaaataatactattagtcgagatctgcttaggtgtttccccttaattccctcatctgcttactttctcggtctctgtgctaactgcagtgtccttaagaacactgtgaatctccctccctgg

SEQ ID NO: 139471 - DNA, 219 bp, Homo sapiens
ggcccacagggtttctcccatccatccatcagtgcagccaggatactgcagctccaaccgagctctgccactaacctggcctgtggcctcaggctagtcccatcccttctctcatcctcagtttccccgcttgtgaaaggaggactgggctagatgttgtctcagtgccttctggctctggggtctgctctgccctttcccaattcaccatggtcttgg

SEQ ID NO: 139472 - DNA, 370 bp, Homo sapiens
ctttatgggaagtttattaattatggacttaatttctttaatacataagtgaatagtcagatcttctgtttattcttatatcagttttggtaaattgtgttttctaggaattttcctgtttcatctaaatttccaaatctgttggcataaagtcattcataatattctctcattatatttttaatatctgtaggatctgcagttatataccctttttcattcctactattggttatttgtgccttctttcttttttcttcacattattgacggaggtttatcatttttacaagtcttttcaaagaagcatttctttgcctttgttgattccactttgcatttatattctttatttttttatttttatttt

SEQ ID NO: 139473 - DNA, 163 bp, Homo sapiens
tgggctacaagagtgaaactctgtctcaaaaaaaaagaaaaaacaattgctggccatggtgttgcccgcttttggtctcagctattcaggagcctgaggtgagaggatctcttgagtccaagaggtcaaggctgtagtgagccatgtttgcgccactgcactg

SEQ ID NO: 139474 - DNA, 378 bp, Homo sapiens
cgcgccactgcaacagcctgggagacagagtgagaccccgtctccaaacaaacaaacaaaaaacaagtctttaggcatcactgaggaacacctaaaatggatacagcactaactagacaccctcgaccctgactccctaataaaagcgtcagtcttttgctcaatatcctgacctgacagcaaaccaataaagacacggcataaccaaactccacaaatttttggccaaataaaagaaacacacgcaacgctaacattaaaccttttctatggccgcttcacgataagtattacaaaatccccagaaagagtttattcacctagctccgactgtcgccatacaaggttaatgttagtgtgcagtgtgctccgaaccag

SEQ ID NO: 139475 - DNA, 219 bp, Homo sapiens
agagcaggttcgctgactgtaagaaacgtaccccctggtgggtgcggatgctgggggaggtgacggtgaggtgggtaggggatatatatagcctctcaattctgatgtgaaccagaatctcctctaaaaaaagaactttttttttttctaaaaagtgaaaaaataaggagaaacagacaaattcatcatcagagggggagttttgttttggttcttgtt

SEQ ID NO: 139476 - DNA, 380 bp, Homo sapiens
ccgtaatggtcagttctgaaggttgctggggttgaacagccttccgttcactgtctgggtttgggattccagcgaaagccttcataccctcaagagaatggtggtgtgtggccgggggctcctgggcctcatgctggaggctggagagttagagaattggggcatgaccagctcatgttgttcagacctggtctggtgtttgtgcctcgtgtggtgtggcgggttttggcatcagaaagcctgtatttaggctgtacttcccccttcccagtgtgcctttgtgggccacttacctcacttccccgttgctcataaacgttagctcacttcccagttgctaaatagttgccaataaacaacagcaactattattattcata

SEQ ID NO: 139477 - DNA, 447 bp, Homo sapiens
cttgcagctttacaagacactaggaggaagtgtcctgtccttgctgtcttttcccttgtattttagatgggaagctaaaactggaggggggcaaaaaccaggcccactaaggctaagcctgaggacagggcagaggaaagcacaacagatttactttcattcttagaagacagtggatggaaaagtggatttccaccaacaaaagacctggcctttttccctgagcaggaaatactgagctgctgtggtcttgccctccctgcagagccggcctaatggtttacccatggtaaaagcgttgcagccaaagagagcagaagagaaaactgggaagctggtgtcagattttctactcgggcatatctttggcctaggcccccgcagcagtcacgggggaaggcctggaaagccgcagtctaacaagatgcctgacattgtgaaatgcct

SEQ ID NO: 139478 - DNA, 396 bp, Homo sapiens
taagctctgctgccctgggcctactgactcctgtcctctcactgtccttactgctgtcctctcctgggctgatggccgaaaacgcctccctcacgggctcctcaccctaagtaggtaggtctctcccaccttccatctaattttcacagtcccatcagaattttctttataaaggctggtatggctacctaagttcccgttattgcccagaagataatcccaaactgcctaatatggtattgatagctctcaaaatggggccatcgagtaccccccttacactatctcccattcgtttatcccatctacaccgagattcagtcaacctgctttgcttttcccaaatagtcaaagatgacgcatgtttcccatcctctgttctgtgctgttcattca

SEQ ID NO: 139479 - DNA, 541 bp, Homo sapiens
tctcaaaatatgcacagatcattggcatagggagcgcaattatttctgctgagttcagcagcaactgacaacttcactcaggactcccagttatcagaagccaaggcatttaaatggtttcacttgggaattctaacaagttttttcccaacaatcttaagtctacggaaaaaaattagaacaagacattcttatttagggcctgcctaaagggagcattagtattaaaatatgctgccatgcatgagaaccttgctaaaactgcctttgagtttcttgtttctctggcttaggagactgccccataagttacatgaacaaaaggctcacggcaaatgtctaatccagctggctttctcctggtcgccagcaagcctcaagcctgccactttctttggccataatcagcatgtgcttaaggaatgctgactaattccaacgtttgtccaggcaggacacagggaggtaaatccactgccaaaaataaaaatgcattccaaagtcgagtattaggtcactctgagatgatgtactattttat

SEQ ID NO: 139480 - DNA, 433 bp, Homo sapiens
gttttctaggtgggtgatcatattaaactacaaacaatgatactttagtctcctttccaatatttatatctatatttaaaatcttactatgttgacaaaataatagtaaatattggtgatgatcaacaattgttccttttcttactactttctttactacaaatatctctattgctttgccactgagtatgaggctggctattgttttgacatagctatttttcactaggttaatcaagaatctttctatatatggtttaatacaatctttaaaaattaataatacatatttgaatatcatttccttcatgtactctctaagatttttttttcttgttcattcccaatccagttccacattatgtggtgtttattgtctactatttatgtacttaaatggcaataaatctactttagtgaggcagagagttag

SEQ ID NO: 139481 - DNA, 316 bp, Homo sapiens
atatagcgcgacacatttaagaacgaaaacagaaacaaaaataagaaacagtacggagatctatgctgcaaagtcgcaatggggcagctttgcaggcaactcccactcaagcaagagactgaagagatctcaaaatagctgctagcgctggccacacgcagccctccaacgaggcacggatgctcccgcacgtgagttttggtcttgaggtcagcattgccattacccccctcatttccaaactattatgacgtcaagtatatgtgtctgttgctagaatggagaagatgagggactgttacaaagtatccacatg

SEQ ID NO: 139482 - DNA, 291 bp, Homo sapiens
ctcagttgattcaacatcagactgttcatactggcaggaaactctatgaatgtaaggaatgtgggaaggcttttaatcaaggctcaactcttatacgacatcagagaattcataccggtgagaaaccctatgagtgcaaagtatgtggaaaggcctttagagtgagctcacaactcaagcaacatcagagaattcacactggagagaaaccctaccaatgtaaggtatgtggtagggccttcaaacgggtctcacatcttactgtacattacagaattcatacaggtgaaa

SEQ ID NO: 139483 - DNA, 203 bp, Homo sapiens
tatattctgcctcggtatcttttctggaagtttgtattctttccaaatctcagaagtcatatttgcttattgtaagtaaatttaaatgtaaatctatattctaaaagtttctaaacggtcttttgccttttatctctatttctcctgggataacaaaatcgacagtagtgggatttttatttggcttctcaattataccaatg

SEQ ID NO: 139484 - DNA, 105 bp, Homo sapiens
ccatagcacccccattcattctgcctccacagtggccagtgcacagctcccagaccccctatctgagcagctcctcccctgctcgaagcctctgatgagtcctta

SEQ ID NO: 139485 - DNA, 830 bp, Homo sapiens
gaaacaaggtacatctgggcaggaatgcgcggcgcagacaggttgccgcctgagatcccgaagtgtacccagatcccgaattccttagagctctttagccgagcactgtggcaggagcgcggcgcccggaatacaagttcatggttccgagccggcgggcgaagggcagcgcgatcccccgccacctttgctctaaggcgcctaggggaacctgggggctgccgcggtgagagctccgctcccactgggaacattggagtcccagttgcgaaagcgacccgcctagcttccgagggacttctctgcgagcaccgcaggcgtgtgcatttcttcgaatctgagaattccagcgaactcgggctctaccagagtttaagtcggcccctggggcgtctgtttgtttattggctcttaagggaaaaaagtttgaagatctttaaccagcctcagacctggcgcgggcggaaatcccggaatctccccaagcaaaagtgatataacttcaagtcgttatataagtggggggctccttcttcccctccctacgccgagccttctcattatcattccgggagtaaaatgtgtctcgctcaacatagttttaaaatcgttattattattttcctgagcctgaagccgggccaaggcgcaggcagcgcccagggtgcgtggtggccccacccgcgcacagtcccacgcaaagggtcccggggcccgggtaccgccagagccgggcctgcaagcgcgccttcggtcccacggtccgccactccacgtggtcaagatcaacagtttgttgagctcatcagtgacaccttgaacttttcata

SEQ ID NO: 139486 - DNA, 153 bp, Homo sapiens
ggataccatgagccataggagctgcttaagatgcactgttctgaaggatgcactgttctccaccaagggcccaaaggacaaagaggcctggcttctgatcctaatcctaccacgtgctagctgtgtcccctctgccagcctgtttttccatct

SEQ ID NO: 139487 - DNA, 340 bp, Homo sapiens
gtgcctcccacgtgcatgtgtagaacagcattcagccagagatgcttgggaagtggatgagaacagcattcagccagagatgcttgggaagtggatgatgtctaccattctacggatcacttgcgatgcttatttcccagggaacagaaatgaagtggggccaggccatctcctgtctctgttgtctgtattacagaaggaagggagcggtgctggagcagggggcccaggagcatcacaggcggcaggccaaggagagagatgtaggtggcaggaccctccagggactcgggagagacacatgcgtgagcttttgcgatacggggtgagacagcaaggg

SEQ ID NO: 139488 - DNA, 503 bp, Homo sapiens
agtctaagatcgaggtgacagcagtttcgttttttcctgatgcttctctccttagctcacagatggctgccttctagttgtgtcctcatactgtcttcccttggtcagtgttgtctgtgtcctcgtctcctcttcttaaagggacaccagtcatattaggttaagaattgcccattagacctcattttaccttaattacctctttaaaggccccacgtctaaatacagtcatattctaaactactgggggttagggcttcactgagtgaattttggtggaaagtggggcaggggacacaattcagcctacaaaaactggaaacaaagtgaaaatcctatgtgtttctgtgctcagaagacaggaagtagtcatacccaagagtcaataattaaactggtttctcaccagcaatttgggagactggaagtcggaagacacagagcagtgcctaccacattcaaaagagaaaagaggccgggcatggtggctcacgcctgtaatc

SEQ ID NO: 139489 - DNA, 1921 bp, Homo sapiens
acagtcaaagtgctaggaaacctgataggatacttccctttggcacaaaaacaccctgggtgctacatacaggagtatgacctttggtgaatatgtggcactaattttttttaccttaatcatattcttgtcaagtaggcaacccattgccccttggagaccacaccagccctgtaagttctcaccagcagcatggagattaggaagaggggctgctgtgaccaggagatacacacggctttaagtaactgagagcctaaagaaagtaacccagggagtccggtccagttttaatatttgtggatttgttgtcacacacattgtttagtcctgaaactaaaacctattttataaatagtagggttaattcctcgaaacaatttctttattaataaatgtcctgtgggtttagaaatatcaggtaaatatttgaatacagaatgatgattgcaattactgttacaagcgtgaaacacaaacttcagatcaaatctagagttgcttcatttaatgcatgctagcaacagccttaactttggattcagttatttgaaacacttttccggcatctttccctttctaatgttgtggggtggaaaccggatggcaaatcactgtgagccggatacctcagcacagtccaccttgtgtgtgacttcacaaatgggggacttcacaaatggggtaactgaatgttattactttcaaattttgacatggagcattatgatcaaggaaatggagctgccttatacattaaacccgtgatttaatcctattgacattttcatagccatgcctccagattttatctttttggcaaaattctgattccacagtttggtctgattgaaataaatattccctggacgtctggctaaaaattttgctaacaatcccagaggtgccattttcttattaataaatttcattggagccttatttcttactatattcaatttcgtttcaaacctgcaagtccctgggatggtcccacgactagggcctgcacatttcttacaatggcaaagcattttttaaaatttagggtcaggttgaaaaattctaggactaattctgtagagaggagggactgttaactaacgtgagtggggacagaggagtaggttaccacatttggagcagtaatagatgcaaacgatgtaaatttgaaatttgcccctttagttaaagaaggagcctgcaaagtccatttctctgttttcagccctgtcagtcacccatttaggatgttggcaaagtactgcttgagcagaatgtgtaagaaagtaataatgaaagcaaaagtatgtcagacagttacttcttccacatggttagaggcatgtgattttcagcactgtgtgttacagaaatgtcaggaatggtgtattataacgtgtgcaagataatgtcagtgtgcacagagggtcttttttccttatctgattagtactgttaatgttcaaagaataaaaatggttttacagtttagattctgagatagcaaaacctgatttttcaaccatgacctgcatgagagaagcatcctaggaagtcttagatcatacttttgagtttttaattttaatttatatagtgtttttttatgtcttaatatttttgtgaactggtgtaaattgttaatgcatataagcttgtgtatttttgtaaatagttttgtgatttatttcttgccccatatgtaaatatttagagtctcatttcttgcaaacttatttgaagctgagttgtgggtttgggttttgtttgtttctttggttgcagggtggggtggggggtggcaggggagggaggaagggatttttgtacctggagatggagatatcttgtggtttaaagcaaatgtcccactgaaagtgattcaaatatcaacagaattatttcaggttaaaacaga

SEQ ID NO: 139490 - DNA, 1868 bp, Homo sapiens
acagtcaaagtgctaggaaacctgataggatacttccctttggcacaaaaacaccctgggtgctacatacaggagtatgacctttggtgaatatgtggcactaattttttttaccttaatcatattcttgtcaagtaggcaacccattgccccttggagaccacaccagccctgtaagttctcaccagcagcatggagattaggaagaggggctgctgtgaccaggagatacacacggctttaagtaactgagagcctaaagaaagtaacccagggagtccggtccagttttaatatttgtggatttgttgtcacacacattgtttagtcctgaaactaaaacctattttataaatagtagggttaattcctcgaaacaatttctttattaataaatgtcctgtgggtttagaaatatcaggtaaatatttgaatacagaatgatgattgcaattactgttacaagcgtgaaacacaaacttcagatcaaatctagagttgcttcatttaatgcatgctagcaacagccttaactttggattcagttatttgaaacacttttccggcatctttccctttctaatgttgtggggtggaaaccggatggcaaatcactgtgagccggatacctcagcacagtccaccttgtgtgtgacttcacaaatgggggacttcacaaatggggtaactgaatgttattactttcaaattttgacatggagcattatgatcaaggaaatggagctgccttatacattaaacccgtgatttaatcctattgacattttcatagccatgcctccagattttatctttttggcaaaattctgattccacagtttggtctgattgaaataaatattccctggacgtctggctaaaaattttgctaacaatcccagaggtgccattttcttattaataaatttcattggagccttatttcttactatattcaatttcgtttcaaacctgcaagtccctgggatggtcccacgactagggcctgcacatttcttacaatggcaaagcattttttaaaatttagggtcaggtttggggacagaggagtaggttaccacatttggagcagtaatagatgcaaacgatgtaaatttgaaatttgcccctttagttaaagaaggagcctgcaaagtccatttctctgttttcagccctgtcagtcacccatttaggatgttggcaaagtactgcttgagcagaatgtgtaagaaagtaataatgaaagcaaaagtatgtcagacagttacttcttccacatggttagaggcatgtgattttcagcactgtgtgttacagaaatgtcaggaatggtgtattataacgtgtgcaagataatgtcagtgtgcacagagggtcttttttccttatctgattagtactgttaatgttcaaagaataaaaatggttttacagtttagattctgagatagcaaaacctgatttttcaaccatgacctgcatgagagaagcatcctaggaagtcttagatcatacttttgagtttttaattttaatttatatagtgtttttttatgtcttaatatttttgtgaactggtgtaaattgttaatgcatataagcttgtgtatttttgtaaatagttttgtgatttatttcttgccccatatgtaaatatttagagtctcatttcttgcaaacttatttgaagctgagttgtgggtttgggttttgtttgtttctttggttgcagggtggggtggggggtggcaggggagggaggaagggatttttgtacctggagatggagatatcttgtggtttaaagcaaatgtcccactgaaagtgattcaaatatcaacagaattatttcaggttaaaacaga

SEQ ID NO: 139491 - DNA, 589 bp, Homo sapiens
gtaaggtaccttgaggatccccgtggggccttacctggggccaggagaggtagaaagtgatctgagcgccgatgaggagcctgctttaaggggcgggcctttggagactttggtggatccaagagggggctggtcctgggaaaccgtccagggccgggaagtggaaactaaaggggctgggtaagggagactgaatcggcccttgcccgtggccatttggagaaggagaggctagaaaagacggggcgatgcctggaaaagccaaagggggaggggttatgtccttaagggcacagagaatcaacctggctgattgaagcaagaggccgaccaaagccagtcagtacctgggattggccgtctcaagagctagggcctagacgagcagagagctaggactggaacacttaagaggcacgcaattaaggggtaaggacccctttctaccccgtatgagtagcattgggaaattccaggggcagagataaaagggaggagtagaatacagagacaaagccacggttagtcacacctcaggccacaagtccacccaggccactgagcaggacgcagcaattgaagagtactg

SEQ ID NO: 139492 - DNA, 262 bp, Homo sapiens
tagttgctggtctgtgggggtggtctggagtgggggggcgggcttcttgtgagaggggctggggtggccagaacagcatgagacacttggataagtgattctttccatcgtggtgtggaagtattttgatattttaataaccagcacagccacattagtgtgtaccagccaaatatgagcccagcctgttcgtgtctttgtgtctgtatggaggaggaaggagctgtgtatagaggcttttactagaggactggactctgct

SEQ ID NO: 139493 - DNA, 276 bp, Homo sapiens
ctgccattgcagaggtctcccggcgggggagtgcagggggcctttgaggaattgaaggaagacaggtaggtcggttcttgggttggtctggattccagtcttgacagctgcttgggcctctctctgcctcagtgtcttcctctctagaaggtggctgcttcaggtgttcctggacattcctgaagttctgctcctaacacacttatcctggtgcctgatacataaatataaatgtgattgtttatttttttccaacaaatttggtggagtgctgac

SEQ ID NO: 139494 - DNA, 326 bp, Homo sapiens
tggttgtgtaacttcactcaggctatgttttccttagtggagtccaagatttggaatcattgtaagaggagaaaatggcaggtaatctcaggaatggaaaagaccagttatgtttctccaggagagggtttcttggggtgggagaaggtgaggaaagtggtaagtgaccagtgttcatagataagtaagtaaatcaaaggaagacttgaatgtatatggattcttgttcccagagaatataatagattatctgggaaagaagccaggacaagagagacctctcagcagaggcaggtgcccacccatgtgggtacatagtgtggtat

SEQ ID NO: 139495 - DNA, 345 bp, Homo sapiens
attgacagattacaaaacacactgtcagattagaacacacatctcacatctggaagcatgaatccagcacaatgcaggtgctcgacagaatgttagctggccaaatgaaggaccagacaggcagcgctttctcagctcctcatatactgaaaatgctcacagacttccaaacagcttaggactttgtctaggaacatggaaatcttagggagactctccctctgttgaggagcactgcaagcagcacctgagtggaaggacagggcctgccgtcttccgtttgatgccgtaactgtcagcagttcaggagcatttgcagagatggctggtaatgttaattttgct

SEQ ID NO: 139496 - DNA, 227 bp, Homo sapiens
agcaaatgaaacccccttctccagagtcacaggacagcagcttcccctgttaggaattaagtcaggagtcaaacctgagatgggctaacctcgctgcaggtggagcaaatgaaaccccctcccccagagttacaggacagcagcttcccctgttaggaattaagtcaggagtcaaacctgagatgggctaacagacctcactgcaggtggagcaaatgaaaccccct

SEQ ID NO: 139497 - DNA, 348 bp, Homo sapiens
agggaagagatgaggcaggagtctacctcacccagaaggtgagatacaggccacagatatttcatacctctgcctcctgattccttcttccttccaggatagcttgcttttgttactgtatcgagtgtctgaatatactttgatctgaagaaagaattctatgattgaagcaagggatggtccatgtggttatagtagcccagatgggatgggggtccttcagtaggacagtaactggagtaactgggaaaatgaaggggagatgacagatagcgaggacctttagagataggactgctaggacttggtcgccattggctgttagagaggcaggaggctaggcctggg

SEQ ID NO: 139498 - DNA, 441 bp, Homo sapiens
cggtcgcctccttaatgtgtgcccattacaaatataggaaggacttatgccaatgtaaatattagtgaaaataagcaagtgtgaaccaacgtgtgttaatggaagtaattccagatgaaagcaaacagccttattttgctaggaatccacgttaatgctttttatgagtgaggggggaagagctaaacaatggctcatttaatgaacacaagaatcccacaggtttggaatcaaggtagagataataaaccctgtaattaaacttacacagaaccttctagtatggaatctatttttgaaatctcacttcaaaacacaggacacttggaacatgtgctgtctcaatttcctctcaactaaaatatattttggctccattttttagggttttttccctctcaagttcctgtacagcagatgactcagtcatcaactcttcat

SEQ ID NO: 139499 - DNA, 485 bp, Homo sapiens
atgggcggggaccggaagggaccgggccttgactgattgatgttccacctcctagaaggagacagttcggcaggactgggtgctcccactaaagatcccaggcgcctgcccttcactcgtcacttctacgtcccttggagggtggccaggttctctattctcatgccccagtggcactgttcctgtagctgcctcctgccctgaaactctctggtccatgatgccaatgacctcatctcaggtacagacctctggttctcacatgggggtcccaggttgaagaatcaccccccaccatgttaccagtagagggtcttgactgcaagttgtccaggttcttggcgttttgaacaaagaattggacaaagcgcacagcaaagcaagaaaagaatgaagcaacaaaagaacgaaagcagggatttattgaaaatagaagtacactccacagtgtgggagcaggcccaagcagtattcaacggtcccgc

SEQ ID NO: 139500 - DNA, 292 bp, Homo sapiens
aaataacagcaccactgttataaatgttaatcaaaggacttgatttttggaggaaaggggagaattatgggtatgtgttctcttccagcatgcttttccttttcacgggacccagaatgtcatgttaagatgttctcagtccttgcatagactgttttgaaatccccgagcagcccatggtattattgtggatgacacaggacccataaaaggggcagagagagaaactcgttccccctgtgggtcctgctgcctttcccaccctctcgcgcacagggcctacccaaggtcc

SEQ ID NO: 139501 - DNA, 607 bp, Homo sapiens
gctgagtcactctagagatcccgcgtatccgtaccaggctggagccaccgcgcccggcctagaaaaggagcattttaagtgtgctttccttcagtgatttattttgtcagatgtatactcatatcttttgtagtgtatttttcaggtaatagtgtttctttggaagcgtaggatgtgctttctgccacagagttgagttataccactgaaaatacatgtatttaggcagatgttttcaacctctgcctaaaaagttttatggactaaatccaatctgcagatatattttctttggctcatacagtgttgtacatttgaattagttgtcaacatttaaaaaggagattttgtgtaaaaatgtggattcaggctgcttttgaaaaagcagatctggcagccatggatctgcttttctgttttgcagcaaccatcttttatagttggggcatgtcatttccaatttgccctagaccctgccaacagtctgacatgtagccctgacctggacagagtgttagttggtatttactattttatacctttctattacttgtctattttccatcttttattacctgttctggatatatcatagaggtctctgata

SEQ ID NO: 139502 - DNA, 272 bp, Homo sapiens
  misc_feature (213)..(213): n is a, c, g, or t
tcgggagttcaagactagtctgggcaacataacaagaccctgtctctacaagacacacacacacacaaaatctgaaggatttcttatctcactcagagtaaaagccagatccttacagtggcctacaagacctttgctcttgaactcacatttctctcccctccttcactgtgtcagccacatgggcacacattatggagaaaagtgtatatnaacttggacaaagaaacaaaaaccggcacatgcggttactgtgggcacacattatggag

SEQ ID NO: 139503 - DNA, 2347 bp, Homo sapiens
  misc_feature (114)..(114): n is a, c, g, or t
  misc_feature (881)..(881): n is a, c, g, or t
  misc_feature (965)..(965): n is a, c, g, or t
cagagtctaaaaaaacaatgtcctcaggaatacttcagaaatagaaggtatgcaatcccttagtggggggcaaacacatttcagatttcgtctttatttaaaaggatcttcagnctacaacatttgcttttttcgtgctttggaaaatatccttgtgcagataagttcttctgtttgaaacaagcatgaaacattggtccaataacctaagaatgtggagatttcttgatattctgtattaattaaagttctctacatgtctcaaatggagatcacaaaacatgaaaaggaagaaatgaaatatcttttcttctgggatgagtgtcaattttaatgtataattgtcataatcaatcagccaaaagttacaatctgtccctcagagacattgggggaagctgatggatttccagtaaggaactgtggtgggttcaaactcaggctgccacaaatacattgatatggtaggtaggaagtaggactaaatttgaaagaaacttatgggataaagttcacaattttaaaaaggttgccctccagtttttttgtttgtttataaactagagtgatttttaagtaacccttatatttaaggctgcaaaaaatgtacaagagtatgttttcaagtaaagggaacataattcttcaaaaagctgttgaactggagttatgataggttatgacagagagcatgatcagtgctgatactgacaagtacttttttaccttaaaatcaacttctatggaactacaagatcaatctagctcccgagtgacattttccattgtctgtaataatgccctcggatgagttgtgtctaaaattaagttcatctttatttatatgcgaacttaactgccatagtccctaatgtattgcntttgtaacctgatcgtattatgtttacagctgaaagatttcatctagacatgtctttcgtccttattattcaaagtgtaattgnaagagatatttagtattaagacatgttccccaattgagaattttccagaatattctacttaagaagaagaagagcaattaactgcctttagtgtaagggcgagagtgcatagaaatatgcaatgtaaaatgtttgcatgaattatttcacatcatgtaagctttcccatattcataagatgaacactatagaagtctcatttctctgtgatcttctgtccattaggaaagtaaggagattgttatctatatctagtctcctttccatattgaactgcatggctctaatcctcagtgtatttttatcccttctcgagttatttaaaatttgccctatttaagctgaagcctggataaactgctgagccagattattcctgtgattggagtttaattgctgtagaacacttgttgagaacacattttttactttttttctttcagaattattcctcaatcattgttctctaatgaaaacaccgagaagtaaatctggtgcttcttagtgtaaatatgtttttctttttaaaaagtcattttaaaacaaagatgagagaactataaagtaaggggaaatatcattttatttaaaaataattattcaatgatagataatggagatacagaatgaatcattgggttcataggtatgatttgtgcagccagtcttagaggaaatacatcattttaacattattcccacaaaatgttaaagctcaatggtttgactatgagagtcaaacaattactatttgaaaatctcttatgacatttttataatctactctgtttttatttgcatgattatgcttatgtgatgaaccatccatgattctgatattgtatttctttccagtattaacatgtgtattgtgtggccaactctgatttgtacaccgtattattgttgtaatgattcaactgttcctacatttaattgcagtttaattattatgccttttggggttaaatgatgtgaagtgtttccacctactgataaatagcatatgaaaacatgactaaaagactgatttaagaaacttgttatttttaaaaatatgaatttcaaaagaaatgttctcaaagacacatgcatttattttaaattcaaaaaattcttatgaatttattattgcttgtactttaactttttttattgtagacaatcctaagtgaataatgtctcatgggagaacacatgatatgtgcttgtatttgtgtaatctgatcatgcactcaatggttggaaaaggcactccagtgctaagaaaataaccagaagccaatatatcgattcttatatctcggtttatgttaccaactgaatatggtgtaatgcataactttttccagtaaataaactggttattttttgttcatttc

SEQ ID NO: 139504 - DNA, 445 bp, Homo sapiens
ctggcacgcggtcagtgctcaataaatatttgtggggtgttattgaaggtagttctcccctttggtaggtgttttgctattatagacagtgctgccctgaacttcgtagaacagaacatctttgtggccacctgcgtgttttttttatagaatccaggaaatggaattactgggtcaaaaagcacatgtatttgaaattttgttagatatatttgtaaaaagttattgaagatactcagccctacgcctaggtacatgcccctggagaaagtcacacatgtatacacatacatcgtgaagattcagagcagaacttaggaacagaaggttggaaaccacctgtccatcaataggagactggtgtactcatactgcagagaaaatgaacccgtgacacctacccatgttaatgtggataaaattcacgaagcaaaatgaagtaaag

SEQ ID NO: 139505 - DNA, 249 bp, Homo sapiens
tccttttccttgtggaaccatcctctctgatctaaatcaaatgtcttctctgtgagacctcctcagcaagagttcctaccccagagagacttcagcatctctctacaatggtggtttcttctgttgaaggatgcagcttgggatttagcagatcaaagcatggcccctgctagtccttctaattacctttgtgcattaacaggaagcatttgaggaaggactcccacgccagcaccattacactatttt

SEQ ID NO: 139506 - DNA, 244 bp, Homo sapiens
aaccacaaaagaagaaagaacttaagaaccttttggaaagttgggagcaatttctatttctccatggtagaacctggaatttacctttgagacagactgtccttctgttctgaaaaatcagattattcttgcaatcctccatcaagggtgaaattcccaaaggtgtggaaaactaagtactaattttaaaaatccaaataactacaatcttagatttgagattattctcaaattccacatttgg

SEQ ID NO: 139507 - DNA, 632 bp, Homo sapiens
cgatacccaggggaacaatcacttctattttatatttaatgcctttatttaaatttggctcaaaaatataaaatagaagtgatttttcttttctttcatatctaaagatttactgttgtaaaaaggcccctccagaagtgtaagtccaggggatttggaacacatccatccagttgccgatcccatcggtgtgtcttctggatctattctttttttttttttttttttttttaaatcctgaattaagggtcttaggcatggctgccatgtttttctcagaaaacacgttaacattgagcagtccatggtttttcattgtcattgcctagcagcctatgcttgcttgcctgaacatctggagacttaccccatccatatgaggagatgagcacagagcatggatgaatcttctgcagagataccctgaattgcatggcctggcttgggtaaaagtcagcatggtgggggatctagaggtccatttctggtccacagggtcccagggtgctcccttcctttcaaccaaatatttattcagccagcgtttattgggcacctgtgtgctgagtatgtagagacaaattttttaaaaggataaaaatttccagatcaaaagtgatgtactacttaga

SEQ ID NO: 139508 - DNA, 298 bp, Homo sapiens
gaaaaaaaaaaagattttgcctcaggccaaacctgcttggctttggataagacatggcagtcttctttggttaggaatacttcaagataaccacattgatgaggtgggtgagactgagaactgaacaagttttcttcccagctattccacagcttcccctctctgggggtccctccgtgttttttcttcatagcttgctatggttctctcttccttctcttcctggagaaagcagtatgtgtgaaaagaaagtagtgatcaggtgaaatgaattcaacatgacatgcaggcagggttg

SEQ ID NO: 139509 - DNA, 181 bp, Homo sapiens
atctacccatgaaagatttgcttttcagcagggtccccacgtcacagtcttccagcatgaggggtacacagtggtagtagaggcttgttacttattttcagaatgataaaactgaaacccataaagggtaagggatttgccgaaggtcacacggctaatgacagagctggtggcaccagaa

SEQ ID NO: 139510 - DNA, 308 bp, Homo sapiens
atgagaaaagcttgggagtagactactcagggaaaacaaacagcgcttaatgagagctaaaagaagctcaaaacgaaatttacaaagtccagagaagcagaaagaaatgaacactaaggcattttctggtatgagattaccttaaactataggcattatgcagagaaaactgtgagaaaggtgatacaactaatcacacaaataagcttattatttggcctgtcaaagcagtttggaaacactcccatttcataagtaaagaagagagtcatattaaccagactctaaaatagtagtaagcaattcta

SEQ ID NO: 139511 - DNA, 269 bp, Homo sapiens
caacaaccagcggccaggtggagagaaggccacagctgtctttgggtagggagcctgtgtgtgcatgctgtgtgcatgtgctggagagactaaggcatagagaagggcccaagcaatgaggtaaagtgagtctcctggctgcgctagtcccttctttccaggcacaaagaagttgaacttgttattcatgtaggcccccttcctctcacctcagcttttagtaagcagtgtgtgtgtgcacgagtagctgtgtgtgacagagtaagtcc

SEQ ID NO: 139512 - DNA, 1023 bp, Homo sapiens
agactctctcaaaaagaaaaaagaagacacaagagaggtggctttgagtgggtttcctttcctcccctattcccggggcccggacgacttctgcttgggaactgccaacgcttctgcttgggaattgcgtgcagcagagcctagaggagctgttccttccttcacagatacttaagacctccaccatgtctgattcgagttctccctgggagggtttagaagaaacgcaggaacattctgggtggcgtcgaaggagcctttcccgatcatcatgtgtgacttctgcgaggtccagatcactgaattcatgtttacattctcgtgcaagcagggacctcttgcttctgagaaatggggaagagaccttttagccaaaatgcccttcttaaaaagagagacctttttttttaatgttcggttaaaaatgtgacagatgagtacaaaaatgcagacacttaacaaaaagcaaacagaaaaaaaagtgtggaatgtgttgtattttcgacaggttgctgccagagagcctgcttcctgctgcctgccgaaatttcactttgcggagttggtccttaaaactgggcggtggccgggcgtggtggctcacgctgaggtcaggagttcgagaccagcctggccaaccaacatggtgaaacctcgtgtctactaaaaatacaagaaactagccagatgcggtggcacccgcctgtaatcccagctactcgggaggctgaggcggaagattcgcttgagcccaggaggtggaggttgcagtgagccaagactacgccactgcactccagcctggaggccagagtgagactccgtctcaaaacaaaacaaaagtgggtggctcacgggtccggaggttatgtcttcggtgtctcagccctaaaagtccagttcccccgtgcggccagcttttccacataaggtgtttttgatttgattaccggaaaggactcttgattcttctcttttaaactgaataccataggggaaatgaattttaaaatattgcccccg

SEQ ID NO: 139513 - DNA, 418 bp, Homo sapiens
ggcacaggagttcccagtagacagtgggtcataataatatagttattatcatacactaaaccagtgcttactagttactattccgatcatgtcacttgtattgacctttaattttcgcaaaaatcattcagggtaggtacttttcttcacaatttacaaatgaagcaactgaggcacaaagatgaaataactttcccaagatgacacatctagtaataacggagacagaattgcaaacacgggtggtctggatccatggtctgcgctctcaacaactactctacgcacaacagcttctccacacaaagtgctgcgtgcttggctgcaaccgctgcctaacgtcattttaaggtttgccaaatgtatttgtctaaagaatgcattttaagttgtaatacatcgatgaaaagtcaacaag

SEQ ID NO: 139514 - DNA, 454 bp, Homo sapiens
aggtcgtaggggtgtagcaaagaggagtaaattaatgaactactaactgactatgtaacagccaaagtgttacaaagggtgtaacaggcaccctcctgaacattcagaagagaaactgccatgagaaatgagaactgggctttcattgtgacgagggaatcatccttagccatggcaccaagggcaattctgggtggtcctttcatgggtcagtttcaaagcttagaaacatactcccaacctgcctactctcttttaaaaactcatggatttatataaactctgcttttctttgtaaaatctattttgagtttgtggatcttcattaactctttctatctttttttttgctggccagacatgcccataccacttaacaaaactcagcttctctcaggaagagaacaaaagccagaatcttcttctatcttttccctttttaaattacagtgtt

SEQ ID NO: 139515 - DNA, 339 bp, Homo sapiens
agacattgatatctcatggactttttttttacagttggacatttccctttaaaaatttattggtggcaaaaggaaatggtccactgagaaatcttttcttcctcgtggagaaaaacttagtaagtccttatccatattgaggggatgagaggaatgaaaaaatggcatggactaaaatctccaggagaacttttcaaatactaaagatctaaagccatagagaaactgcctagatgacttttgtatttctgattggtcctcctgtcctctcctgcctgcttagactttgaaaatttaaacacttggtctactcagttgctgtcttgtgtattaattaaa

SEQ ID NO: 139516 - DNA, 642 bp, Homo sapiens
gaagatagggtttacctcctggctaacacagtcagagactagctctacaaaaaaaaattaaaaattagctggctgtggcagtgcacacctgtagtcccaaattctggggtggctgaagtggaaggatcccttgaacccctgagttcaaggttgcagtgacctgtgataaagccaccacactccagcctgggtgatagagtgagatcctgtctcttatttaaaaaaaaataaaaataaataaaaaataaaaagctaccggctaataggccaatactttaaaaaatccaattatttcaaaataaggcaggaaaggagcaaaagaacaacaaaaaaaccaaaggaatacaaggaaacatgtagacttaaacccaatgatatcaataattagatataatggactagtacaccaattaaaaggcagagattgtcaatccagataaaatggcaagacccagtgaagtagagtctcccagagacagacacaaattggttgaaagtaaatggatgggggccaggtacagcggctcactcttgtaatacctacattttgggaggcccaggcaggaggatcacttgcgctcaggcgtttgagaccagcttgggaaacatagcaagaccccatctctactaaaaattaaaaaa

SEQ ID NO: 139517 - DNA, 361 bp, Homo sapiens
ttatttgagtggcatgtgatgcactgatagtttactccaccaactatgattgcactgactataaaatgtaatacaagggcatattagggggagaatgcctttgttttttcttttgttgttattttgtttttaagagagtctggtattacactggaggatcacaaactgtattttcttgttataaatggctcctctatcttggacttaatggttaggataaatatttgaatgtagaatgcgttaggagttttaactatttttgaaattaggaaaatggagagacactttttttttttttaagagacatttttttttaaagtatataataagcatgtggcactcggaaagctctgccagtgtt

SEQ ID NO: 139518 - DNA, 358 bp, Homo sapiens
ctccctgaccaagtctttgtgttcagataaccaggttttcataagatgggtaagttacattttaggcttgaggatacactgagccagcttcccctgctggatcatttccccaaactctgcagcaaacatcccagggtggatgcccccaaagctgctgcacctccactaatcccattatcactgctcttaatctcattatcagataaaaacaaacacaatccctctttcaagcacctcttccactggtctccactcagagctcacttggaagacgtggcacctctggaaggcacctggtgggctgtagtgtcacccagtaccatgccctggatcagctggtgcacctcctggctgtcag

SEQ ID NO: 139519 - DNA, 465 bp, Homo sapiens
tagaggactcccattctggtcgatgacggtgtgaagcgtctctcgtgccataggtatgggattatgcacctcctacgccggtcagcttcggtttgtccactgtcttaggttccgctgcagcatggcgcgttggcctggccttctttgataagcactcggttgttgaatccccgcttgaggatacactgagccagcttcccctgctggatcatttccccaaactctgcagcaaacatcccagggtggatgcccccaaagctgctgcacctccactaatcccattatcactgctcttaatctcattatcagataaaaacaaacacaatccctctttcaagcacctcttccactggtctccactcagagctcacttggaagacgtggcacctctggaaggcacctggtgggctgtagtgtcacccagtaccatgccctggatcagctggtgcacctcctggctgtcag

SEQ ID NO: 139520 - DNA, 396 bp, Homo sapiens
cttgatgggggagagtgggaggagggagtgggcagaaaagatcactattgggtaccaggcttaataactgggtgatgaaataatatgtacaaaaaaaccccatgatacatgtttacctatgtaacaaaccacatgtactctcaaaactaaaatttaaaaaaattaaaatacagtgggaaaaaaaaagtgtagcagttggaggatggaaaattttaaaagaataataaaaacatggggtaaagtggagaaagcagagggtttaaaaagagagaacaagggagctaaacaaaaaaaatggaatggttacaaaactaaagagaaaggcaaaaacaataataatcataatcaagagggttagcaaaagagagaaaaatggagggaaaatgcacaaggaaa

SEQ ID NO: 139521 - DNA, 421 bp, Homo sapiens
taacgtttatcaaacctttgctttgtgccaggcactgtgctaaaagctttgtttatattatctcattgaatactaaggatggccttatgaaataagtgatgttattattgttttatagatgaggaaattgagacataagttaagtggatttctttagcccaaaatctaggaaactggggaagaagaattctaatccaggctgtctaactctagaactcatgcttctgtttgtcatacttatataacttattaacagacatggagcacaagaatgcttgtttggcatttttccaaaactagcaatcatcaggcaaacaataaacctacgagaaaaaaaataaagagaaaattcatgcttgtcaacagacaaaatagatgtaattctaaaacagattaaggaattaaactttgaaataaaggc

SEQ ID NO: 139522 - DNA, 631 bp, Homo sapiens
gagtcacattgggagcagagactagggagggaccgatgtgtaaaagaatgcctggatgtctagaacctcagaccatttgcccatttttgacaaaagtcatccaggtcttgtaagatggagaaatcaaaagtgccattttctggccatttggaaccattgtcaagtttgtattggggccaggcagtgttgcagaagaaaataaggcatttaggttttaggtcaggtgtgagttgaaaaggttttaagttcttgagaacacaggctaagggagaagaagggggaatggagggtggaaggtaacccatagtgaagtttgaagagaagggtagagatgtggagaagggtgtggggtgagcagccctgggctgtaacatgggtgagcagccaaagcaggcatccccacaattgtcttgccagcaagggaatgtgggtgaatgaccaaggcaggcatccctgcggtgatcagacaccaatggaatgtgggtgatcaggacaggcatccctacgatgatcagacaccaatggaatgtgggtgaataatcagggcaggcatccccatgatgatcagacactaagggaagactgtcttcctgagtccatgactggtgccagagttttgggttcatggata

SEQ ID NO: 139523 - DNA, 380 bp, Homo sapiens
cactctagcctgagtgacagaggaagactccgtctcaaaaaataataataataataatcctggactctagctgagtattaggataaaattttaaaaatattactgccttcacatacagatgaactcaaaagaagaggttaaaatgcagttattacatttagttggttctttcctccaataggagagtattcaggaagattgcccaaaaacttggtaattgagctttccaaagggggttcaggtgatcctcagtgacagttcaggctgtgccaggtatgcacactggagccacgtcagaccccagtcttaatatgtttctctaaggtgaccttccaaacagtgttctacgtgcttggtttggagccaagttggttttgtgt

SEQ ID NO: 139524 - DNA, 161 bp, Homo sapiens
actagtcacggttggctagtataaacagacagtctttgcaaaacaatctggcaatagatagcaagataatttttaaagttcggtagttgctctcctagaaatttccttaaaaaataaaaatatacgctgggattacaggcgtgagccaaccgtggactagt

SEQ ID NO: 139525 - DNA, 315 bp, Homo sapiens
agtgtagctgataaggtcagatgggtggagagcggtcagttataaaacctgtaaagagcaatgggaaccatggaggggtttgcccatgtgtgggaaggcctgtatttcttttatggaatattcatcatctttttgcccaaagtctccaaacaattagactttccttgactatcaagataaacagatattcctatgtgtagatcactgtaaacactttaagtgctaggaattcatactaggcctcgtaaactctaaattttagaattagaagtgatccctgaagatcatttattttgatattgttctgcattctct

SEQ ID NO: 139526 - DNA, 507 bp, Homo sapiens
actggttctgtgtcatacgggagggtctctggtgtatcagccaggacctttatctccaagggtcagaacctgggtcacgctagcttaaataacaaagagaacgtactgcccctcttgactgaaaaatccaggaagattcaggtctggctggatccaggcactccaataacatcaccagggctctctccttccccatctgtcagctctgtttcctccatgttggcttcattcccaggggagccctcttcacactgtggccccccgcagctccagaccacatcctgcccgctctccccagtggaaagagaccctctctagttcagaagttccaggaaaatcctagaatctgtctcttatgagaataactgggtcacatgggtatcagcagagcctggtggtggggtcagcccatcccaagatacatagcttgggaatggggtaggggctttacccaaagggaaatcagggaactgtcacagaaaggatgggggatggatgtatccagaa

SEQ ID NO: 139527 - DNA, 542 bp, Homo sapiens
gttgttagggcaaagataagatttcctccaaacggagagtgagtgctgatggaaaaaagggttcattggcagacagccaagaagatatcacatgtttatggccaagaagtgtttggaattcagccatgcatggagattttaatagtatatctagacactaatatctctaccctgaagttgttgctatgttattgttatcactatgtagtggtaaagggctcatattctgaaatcacagaggcctaagcctgaattccaactctgccccacagtagctgtgactttgggagagtaaattactactatcacactgcaagtctcagtttcctcatcagaaatatggcggtgatgttaatactgaccttataggattgatatgaaaattgaaggatatgacatattcaaaagagctgaatgcaaggccggactcatgaagttttattacctagattaggcccctaggggtttttgtgcattatttcatgtaatcttacaactatttgacataattaatatcgagccccctcactcaccctttacaa

SEQ ID NO: 139528 - DNA, 374 bp, Homo sapiens
ctccctttgttgcccaggctagtcttaaactcctgggctctaatggccccacaaagtgctggtattataggcatgagccgctgcacccagccttgattaattagtttttaatattatttttagaagtagggaaatctcattatttctctattttgtcctttacatttcttctcattcttcaaaactataagtggaatttttcaaaattaaaacactgctaccagaaaaaaacattggtatgaagttgccttttaagcatattcgctgccatattatgctctgcaaagtgaaaaaggtttacactagagcttgcaaattgttggctttctggtgagtctcaacatacagatgtgttttgatgggctcacaaagtg

SEQ ID NO: 139529 - DNA, 429 bp, Homo sapiens
gatattcagtgttattccatttctcttcaataggttcggttctctggaataacttaaccttcttttttgggttctttttgagttttgttccaataaggcctgatgactacctacattaagttgcacttattttcttatattaaagtctctcaagattttgcttagtttattccctacattcttaacttcagaatgtaagtaactgaggccacaagtaacgtccttgaacacatccttcttcccagtatttactactacataatcatgggcaccttgtcaactgccttatatcatctattttatgtgataacctccatcatatccagttttagaattttactgatatttttctgtcttctccaacattttgtgaataaaatcttgatctgatgatcaagttaccaggtgaataaattcttttaattcctg

SEQ ID NO: 139530 - DNA, 421 bp, Homo sapiens
ttggtggaggtggagtgatagttatcagcccatttaacaaaacctgagacagccaggacagctgtaatgtgcatctctatgctgtgtttttgttaaaatgccacatggctaatactttggaaatcataaatccactgcaagaaaacatctttataggggatattttagttttatgctgtttgtgttacacacctaaaaccatcagtacttcaagctccataaagagcaaggaacatagagcagattaaaatgtttctgtaagtttggtttattttcatctgttttatttgctgcaataaggctatatagaggatgctttgaagacagtgctgtagctgacaatttaatcttcacctaagccactctctccctaagggccttaaggagaagtgggaatcgtgcaagtctgggccaactgcaa

SEQ ID NO: 139531 - DNA, 345 bp, Homo sapiens
gttgactagatagaggatcttgagaaggtgaggtgtaaagtcaggttaggatcaggtggttgaagagcctgaatgccagaccagagtctaaacattctccctataggctgtggtgagtactagcagaagtagtaaagcagtaaagaggcagagggagtaaagagtaaggattactctggaaggatgatctaaggtgaaataattagagggaagaagtcaggaaaaacagttcagaaaatattatgctgggcatgtaaccacccaatgggttcattttgccccctgcctagatagagctcctttaccaagacaggggaattacaatagagaaagagcttaatatac

SEQ ID NO: 139532 - DNA, 398 bp, Homo sapiens
gtctttgccaatttaaacaattacttttcaacatcctccaaatgttttctgtgtcatactgcattaaaagaaaaattacttctaaacactaaaattataccacaggaaaaaaaaaggcttttttaaaaacccatttttataacacttcttttgctacatctagctcaagtcagcaaaatgtggctctagtaaatgccttggagtctgtggtaggcacaacaagggaccttcaaacatacccacgtcctaatccccagaatcagtctgtgaattcgtggtaaaagcgatttcacagatgtgatgacattaaggatctggagatggggagatgatacaggtgggtccaatgtaatcgcaaggaagtttaaaagtctgagaaggaggaagaagtgtcagag

SEQ ID NO: 139533 - DNA, 382 bp, Homo sapiens
agccagccaagctgactccttttaggttcatgtagagcatgggaaagtgaactctttcccctcctcccactcttgcttcagctgggactgagataaatgcctttggtctttgaagcagcctgcaggaggccaggtggcagggagaggggaagtctgttttggcagtggactctttctgtctgccttctgacttctctggagattgccgcttcagagaagcatcggggccaggccagggcgctgtggatactccatattgagcctctcctcttgttcctggtctttcctcttaggaaatggcgtacctccagcatatcagcttcctgatgtctcttccgccttaacgaaaaatctaaaaattgaccactgctcttccttcccc

SEQ ID NO: 139534 - DNA, 329 bp, Homo sapiens
gatgtaagatattaatattaggacaaggtagatgaagggtatacaggaactcttggtactatctttgaaactcttgtgtaaatctacaactatttcgggccaggcacagtgtctcacacctgtaatcccagcactttgggaggcagagacggatggatcacctgaggtcgggagttcgagaccagcctgacccacatggagaaaccccatctctactaaaaatacaaaattagctggttatggtggcgtatgcctgtagtcccaggaggctggggcaggagaattgcttgaacccgggggatggaggctgcagtgagccgagatcacac

SEQ ID NO: 139535 - DNA, 341 bp, Homo sapiens
gatagcttgagcccggaaggtcgaggctgcggtaagttatgattgcgccactacactccagccaggacaacagagcacgactctgtctcaaaaaaaaaaattaaaaaggtctctctggtctcagccacagaagtgagatgaccgtttggaaagtgttgcaataggacacacacattgtgccaccgctgtggcgtgaaggcctaccaccttcagaagttgacctgtggcaaatgtggctaccccgccaagtgcaggaggacgtataactggagtgccaaggctaaaagacaaaatgccaccaggactggccgaacgaggcacctaaaaattgtacaccacag

SEQ ID NO: 139536 - DNA, 272 bp, Homo sapiens
tggtttccagcttcatccctgtccctacaaaggacatgaactcatcatttttttatggctgcatagtattccatggtgtatacgtgccacgttttcttaatccagtctatcattgttggacatttgggtgggtgtttttataactgccaatcttctctggcatatagatacacagacaacagctcaataaatagcttagtgattgattagaagcatcctttagcatataataatgtagggataaagctaatgtttgcacataaaatatgaaa

SEQ ID NO: 139537 - DNA, 473 bp, Homo sapiens
tagaattaaagatgtacagggggaaaaaaaaagcaagaaaatggcctcttttaactgaatattggtttgaatcagctaatatgtcaattgacacacaatatgtagaataaatataattaataagtagcagtgatcattccagttagaattttttttttttttttgagatggagtctcgctctgtctcccaggctggtgtgcagtggtgtgatctgggctcactgcaagctccgcctcccaggttcacaccattctcctgcctcagcctcccaagtagctgggactacaggcacccgccaccacacctggctaatttttttgtatttttaatagagacggggtttcaccgtgttagccaggatggtctcgatctcctgacctcagctgatctgcccacctcagccttccaaagtgctgggattacaggcgtgaaccactgcacccgggcctctccagttggattttcaatgtgt

SEQ ID NO: 139538 - DNA, 462 bp, Homo sapiens
tgggaaagtcattcaacctctctgagcttcactttctccatttgtaaaatgaagagagcaacagggtatgaccttgaagactgcagtaaggtttgaatgagccaaaaagtaccaaaaatatagagcacaaaacctgacatggcatgtaacacatatggtggctgctattattttactattgttgttaacatttaaaacataactgaactgtcaccttacctgtaaaatcattcctgctttccctagtaatatagaactttgcgcatatctccaccgtagcattttatattataacctcaatgacataacttttgagcactcctgtacagtcaggaaatgtgccaatatcaccacttagtttaattcctacaaactctacatggtaagcattattattccaacttcgtagttcaggaaactgaaacacagagaggttatgtgacttgcacaaactcacacagc

SEQ ID NO: 139539 - DNA, 149 bp, Homo sapiens
gctagtcctccttgccccttggctgttgtgacagccccttaccagtctgccctgggtttggtttaaatcccctaaatccagtcacctctagcatgacctacaaagtgcacacatctagctagtttcctgatttgctccagcctgtcctt

SEQ ID NO: 139540 - DNA, 241 bp, Homo sapiens
tgtctgtcaatgagtaatgagggcccaagaggggctacacaaatacccttccagtccagcagacccaggagagtcagaggagagctggatcacaggtgccaggcaaagccaaggccaggatctgcccgaggaagaaaagaacgtgacccgtgaccctgggacctgggagggcagtgggcagaggcatcttcagtaatccgacaccacttgagaactgttcaacagcccctgggggactgag

SEQ ID NO: 139541 - DNA, 269 bp, Homo sapiens
acactttccgtcaaaacccatgaactggcagactgaagaaagaatccaggcagcgataagtacaactatgacatacgtagcccacactttcatctggacctatagcccagagaaacagaaccccttttgatctggggccagccaaactagatatttcataaatacagatgcaaattcaacacccgtcccacatgctctttactgtgactagaaataaataagagcagcaacagcaggtgatgtctataaacattttatatgtgatctca

SEQ ID NO: 139542 - DNA, 301 bp, Homo sapiens
aatactatattatcataaatctcaatttcctcacctcttaaatggagaatagtaatagcaaccttattggttgttgtgacaattaagtaagatgtatagaaggaacttagcaggacacctagcatgtaacagcgttccaaaggatttctttaaatcactgccagaagccagaaaatcattctggctcagtgttactatgcaccaaagacttttcactgatattaataccctctaaaaatcctccttgacccacattgaatggggctcagaggtgaatgaaggtaaagaattggacccctgg

SEQ ID NO: 139543 - DNA, 191 bp, Homo sapiens
aactccttaaaatagcttttaaaaaattcaactgcattcaagtttaatatttagactggcagaaattattctttccatttccaaactgttaagcagagtgagttctgctgggtgtcatacacatggcgtgtttcagtgccagtgtctacagttgtttgtttcagaacctctaattagctgccttatcttct

SEQ ID NO: 139544 - DNA, 409 bp, Homo sapiens
tgaacgtaagggaaatgagcagttactgcagagaggattttataggagtgaaaaattctgcatcagagcagcaagaaggattgttatgtgaatgatcaaactgcttctgctgactcctcagagcccgcctaagagcaggggccttcatctgacactcactccacttccggggaactttgctttcctatttgttttaaccctgattaacagcgcagagctatgggttaggtccggccagccactgagagtccatctttgtgttttcaaaagccaggcctggttactgtcagaaataagagaaacaactggaaaagacaggcaaggtacgcagtattttacgggctctgattgtcatttagatttcgcatccaagaggggttagagacttggggttctgttagctccatgt

SEQ ID NO: 139545 - DNA, 544 bp, Homo sapiens
agcaagactccatctcaacaacaacaacaacaaatacaagcgtatacaaatctgatttttaaaccagcccaaatgcctgcaagcctgcatctgcacgggatgttcacacagctcaggcaggcaggtcctcctcaccaaaccaacttcattagcaggtgagttctaagcacacaatcagcaaagggggaaggaaatattgcacaggaatgcatgtatcatgctgtggtcacctgatgcgttgatctttctctgcactggagaggcaggcactcattcaaattttctgtgcgagtctaactgtcacagagttgaacaatggacaaggacagagttcccatcctcacagagcttacagaacgtctaactccggaagccccttccctgacaggagagcgacagctgacactgctctcctgggtaggaaaccagctaaccacgtgctaagtcagtgccacttctctgtgatccggttaccactcgtttccgctaatacaattgttttccttccaccatgcacacctttcctgaacatccagttctcctg

SEQ ID NO: 139546 - DNA, 346 bp, Homo sapiens
tgctgccctgttccatgtatgcatttatttttgttttttattttcattgtaattatgtgtaccagactgggctacaggcagtgtgacactgacaaattggaaagcatatcgaacatagagagaaagagaatggaaattctaagatgggttagccagcctctcttgagttgatatattcatgacattattttctttgagctttgcactatcttttcaggaatcttcctattagaaaataacttaacaaacctgagtttattttgaacttggcagtggttctgattagagatgttgcaaaataaccattcagcccaacatggccctaaagactcagagtttccaagat

SEQ ID NO: 139547 - DNA, 404 bp, Homo sapiens
atggcagagtccctcaggatgagcttgctctcttttccttgaattgattctacgggctggaagactgactaacctcttcattagctcattgatcagtctcagcctctgactgcagagacagaatgtgattcctcacccagcattcctccaggctcattctccatggaaatcatctcttaaacagggtggaagatctcctcgaccatgtttgggatccattcctgttcctgttctaggacatttagagaagacatagtaatgagaaaatttagtcaagtgctaaaactgttgcgggaaatatggagaattttttctttatattctgagagacactattgcataaagggttaaaagtgcaagtctggagcaagactctctgagttcaggttccatttaaagcactt

SEQ ID NO: 139548 - DNA, 261 bp, Homo sapiens
ccactgtctgctcagtgtcaatgtattgattacctgtccaacagaatctattttatctctgaggttagggaattagtagaaattgatatcctactaatggaatagaacagagagtccagaaggagaaccaggcacattaagacatggtatgaggtcgatgtggccaatggtcagatttgtggggaaacaagggactcataataaatagaggtagggatcaaaagtaaaaaggtcatccacaggtggaaggagatgaaatca

SEQ ID NO: 139549 - DNA, 815 bp, Homo sapiens
tctaaattgctatggtaaagcctataatatggtagcaatatggggcgttttatgctaaaatacacgcaaacattagagacgagcctaactgcttttcttactttcctgaatatggtaggacctgatcgctgcaaaatgaacccgtgccttaacggaggcacctgttatcctactgaaacttcctacgtatgcacctgtgtgccaggatacagcggagaccagtgtgaacttgattttgatgaatgtcactctaatccctgtcgtaatggagccacttgtgttgatggttttaacacattcaggtgcctctgccttccaagttatgttggtgcactttgtgagcaagataccgagacatgtgactatggctggcacaaattccaagggcagtgctacaaatactttgcccatcgacgcacatgggatgcagctgaacgggaatgccgtctgcagggtgcccatctcacaagcatcctgtctcacgaagaacaaatgtttgttaatcgtgtgggccatgattatcagtggataggcctcaatgacaagatgtttgagcatgacttccgttggactgatggcagcacactgcaatacgagaatggagacccaaccagcagacagcttcttttctgctggagaagactgtgttgtaatcatttgggcatgagaatgggcagtggaatgatgttcccttggcattaccattctcacactatacgtggcagaaacgggacacggtgcttgtggacaagcccctgtggttaaatgcccagaacttggaagattgaaaccggttttgagattaatcccgataa

SEQ ID NO: 139550 - DNA, 320 bp, Homo sapiens
ctacaggtcaaatctgaattttctacttcctcttaaacatgggagagtcccacaaagactttaaatctaacatggaaatgtatctttgccccttttaactttgctctttttcttttgctaagtttctcatcccagctttctcttccgcctgtctccctttaccatctgtactgcccttgctggggaaggcgggcacgccccttcccaggatggagcatgtcttctcttcctgtcaggtgtgtgagaccaggacagacagcagagaatcttttcattcagagcctcaccctctgtcccgggcaacagcaggtcgagaactc

SEQ ID NO: 139551 - DNA, 794 bp, Homo sapiens
ggggagtgagactgtctgctggtatattttaaatgcctcttcaggcttgataatttaaaggtactggcattctgcagattaaaacttttctttttctttctcacagcttattgaggttttgagttactgttcttccataaaccacaccaaacattttccacagtttgcacattgaaattcttttcagtgcagcaagaacttagaggtacttgcaaaacaatttgagtttagaatctttctagacttttatacctttttccctcaaacacttaatttaagagcagatttttaggctatttccttttcattaaaatctaagaccccatgaaatggaggatgcattcttatttttctagatgtcatcatgtgagaaaatacaaatcttggaccgaaggaatatggtagctttgatagaaacaactcttttcctttgcatagtcattcttcactttacaaagtattaaattatgtaacttttattttttttcctcccgagacagagtcttgctctgttgcccaggctggagtgcagtggcgtgatctcggatcactgcaacctccgcctcccgggtttaagctattctcctgcctcagcctccggagtagctgggattacaggtgcgcaccaccatgcccaactaattttttgtatttttagtagagatggggtttcaccatgttggccaggctggtctcgaactcctgacctcgtgatctgcctgcctccgcctcccaaagtgctgggattacaggtgtgagccaccatgcccagccctaaattacgtaactattaa

SEQ ID NO: 139552 - DNA, 284 bp, Homo sapiens
tcaccacagggtcctcacgtgcatgagtaagtcatcctccttcctgaaagggaggttttattcaccttatcaccatagaggatgtttcagatgtggcaattcctttaagtcactgcaattttgactcaccctaggatttctgggtttaattgctcccctttcttgttggttttatgaccagtgttgcaggaaagacaatacttgaaagtctgtggaagccccttctttttatatttttctttgcagtgacgatgattgcttaacaataataaacatagaggttt

SEQ ID NO: 139553 - DNA, 405 bp, Homo sapiens
atttcataatttcagattaaaaaaaaccaacggcaatatcagccagttgcattagtcagctttattattttctcattttataatctacaataaggattataatatataaaccttcaaaaaatgttaaaacaaaggctgcattaatgtaaggaatctttgaaaggaagtcatttgtagatatgtggtctgagttactactagtcggaacttacttaaatttgttttgtattaattttctttctaaggcaagcaatatatttacaccaaacaatgtatttataatgtatttggaggaataaaacataatgtctttgtccaacttctcctgcttcttctctgtcttaaaacagcagctgctttcaacaaaagaagcttctttatagataactcattttccttttcaag

SEQ ID NO: 139554 - DNA, 164 bp, Homo sapiens
acagagaagggtgtgtgtgtgctgtgtgatgcagagggacctgagctggggtcacagcagtgacagagaaaaccccaggccccgtctttggggggcccccggtatggtggtggagacagacacattctcatctagtgacagctcaggatggtgatggggataca

SEQ ID NO: 139555 - DNA, 171 bp, Homo sapiens
catgcagtgtcctggaatgccagggccactgtctatggtcagtccttcaccacctaaaagcaagctgatccacaaggcacctggctgcatccaggcctgtcatctacggccaccatcctcagcttcagagcttatgatctggctcagggaacacagacaagtactgccatc

SEQ ID NO: 139556 - DNA, 217 bp, Homo sapiens
gctgacactgatgagcatggagaacctggggccaaggcagccacggggctctgagctgaccagctcccttggccttcgcttcctctttgtgtcatccttccctgttcaacctgctgatgcttgactttttccagtttgtcttttctgttttgtctcctcgttctgggatcacttctcactcaccagccacgaaactccccaaaatgacctccaggtc

SEQ ID NO: 139557 - DNA, 204 bp, Homo sapiens
aaaattttaaaatttttaaatgagtataaacctgtcttcttagcttaaaaattgacaaaattacaaaagatattaataaacccaccaatatagtatgggaaattttaactcagctctcgtataaactgataaatcagtcagacaaacattagtaagactatccaggattttaacaaataagagataccagtcaaaggacacaaa

SEQ ID NO: 139558 - DNA, 395 bp, Homo sapiens
gtctgttggcatcttttgtattttttgttgacttccccaaaaccaaccaaatcgaagaaaatcaagtgcataaaaaatgaagcagagctatcattgaaactgacattacacaattttttgtttttttttttgagatggaattttgctgttgttgcccaggctgcaatggcgcgatctcagctcaccgcaacctctgcctcccgggttcaagcaatctcctgcctcagcctcctaagtagctgggattacaggcatgcaccatcacgcccatcttattttgtatttttagtagagacagggtttctccatgttggtcaggctggtcttgaactcctgacctcaaatgatccgcccgcctcagcctcccaaagtgctgggattacaggcgtgagcca

SEQ ID NO: 139559 - DNA, 620 bp, Homo sapiens
caagaattctaggcttcatataatatattgctttagtattaacaataaaataataaaataatctttggcagattggtaggttactctgtatggcttatgaaataagcttgaagttttttgaaagtttatttgaaaaattaatgtatatgtctaacacctagctagtagatagtgtatgatctgaccatcttgaagagttaaaaacctgttgctaagatacatttatgaaacagataattgagtaataaaaggtatttaatatgtcagaacttattaagacactatgagaagtcaggaggaggaaagactgggtacatgtgtgtatggaggcatgggttttagaggataaataggctttggagaagttaaaaggacttgagacactctttgttgtctagtttagggaatgtgtaagaactggcctgactagaaggtcaagtacatgctgggaaatgatggaatcagattatggagatttgactattgagcaacggagtttgttgagtgatttaataaccatattgggtttttgtacagggaagtaatttaatggaaatagtgtaagaaaattagtttttcatcaatatacgggaagaattaaagtggaaaaacgctgaaaa

SEQ ID NO: 139560 - DNA, 282 bp, Homo sapiens
catgctatgaaataatcaatttttttcaggtagttgcaaattacatttttaaaatgtgcaataatgtatttatttaagtccccattgactgagtatgtatgtagtttccaatcttctgctgcagcaaatatccttctacataaaccagcctacacgcataagagactctgtagcattaatatccagaaacagaactgttggggtcaagggaatgtgtatttgtaagtttgctaaacattgccaattggcctccataaagcctgctgtaatttatactcctac

SEQ ID NO: 139561 - DNA, 302 bp, Homo sapiens
atttctttcagtgttttgaagatgtcatttcatagtatttggtcatttctgttgtgaagtcagctgttagtcttatttttgctcctttgaaggttatgtgttcttttccagattttaggatacttttctttgtctttgatttttagcaattgtactataatgagcctaggtgtagttttctttaatttatcctgaggtttggggttcagtgagctgcttgaatctatctatgttttggtatctttcatcactttgaaaatttctcagcaactatttcttcaaatattacttttgccccacta

SEQ ID NO: 139562 - DNA, 256 bp, Homo sapiens
ctcttacctggacataggtgtgtaaaccaaaaatgaaactctaagctccctaaccaactgaatgaactcctcctctcagccaaggacacaccaaaatcaacctgaaatacaatacagtccatgatcggaacggatgattggacatgccttaacttaccctcttccctttaaaattcaggcagaactgaccagcttttaatatgaagacagagaccttgagactgacaaagaaaactctttatagcaataagatacc

SEQ ID NO: 139563 - DNA, 351 bp, Homo sapiens
agcttgtgtgtccattctctaagttggtcttcacaaccaccctggcaagggcacagagttggtaagtgcagaaaatttgataaatccagagcccaaatctaacccaggatttccctatgccaggctgctttcctgcaatcgcctggggcatacagaaaaatacctatattgaggtaaaaggtttgatttaaaaattaaatataaacattttcttttaaagcccaatttgcatatttttgcattgtgcagatttggatctgtgcttcatcctctcccacctgcaacaacatttaaatgcctcagcctgggcactaaaaaagggagcaaatgcaggtctactagctggccatg

SEQ ID NO: 139564 - DNA, 760 bp, Homo sapiens
gcagcagttctcaaactttttgatcttagaatttctttatacttttaaaatgtattgagaacttcaaagggtttttgtttataatagctatcaatatttactattttagaaaacaattttcaacaaaggttattcattttaaaataaactcattatatgttaacatagatagcatttctgtaaaggatattttccaaaatgaaaaattattgagaatggcattgttttacattgttacaaatctctttaatgtctggctgaataaaagacagctagattttcgtaacttctaccttcattctcttacaatatcaatcatcatgtaacttttagaaaattgtgccatattgtgtgagaatgtgagtgaaaaagggatatgtcctaatattatgtaaattgttttgaaacagtgtcagggacacccaggagttcctgcaccacacttttgagaattacactgaattacggtgattgtcatgccagtaaaagaaatatgagtttgatttgtaaatcaataaacctatatgcacattaaaaatgcagatgcccaggcatcccctagagatcccaattcaataagtctgtggggtcaagaaatctgcatctttaacaagcaccacaaattaatttgatataaatggtctgaaaattacagagtgagaaaaccagtcaaatgattctctagagtgttctgcctactaaaactcaagataggtgtctttcttatcttcacctctctccatcaatagtttccagagcc

SEQ ID NO: 139565 - DNA, 367 bp, Homo sapiens
aggctggagtgcagtggcatgatttcagctcactgcaacctccatctcctgggttcaagtgattctcctgcttcagcctgctgaatagctggaattacaggtgcctgccaccacgcccagctaattttttgtattttagtagaggggggtttcaccatgttggccaggctggtcttgaactcctgacctcaggtgacccacctgcctcggcctcccaaagtgctgggattataggcttgagccaccgtgcctggccagaagtaacattttagatgtacaaatagcaatagagatggaccttacagctttaatgagagtgaggagggggagttaaaaaaaaaaaaacaaaaacagcatgagacgatta

SEQ ID NO: 139566 - DNA, 436 bp, Homo sapiens
accagttaagtttgttataatggcagccttctgaagatctagatggatggagtttctggaaaacctcatagaagatgctatttcagtgtcacgaacttgatgataatagcatcaatgacttaaaaaaattattctttcatgtgtgcttgaggaattgtaaatatgtttagtgcattcagaccataagccaacccatacataaatagcagtattcaagccaatagctttgtggttattacacagggttgccagtccttgacaatccattcaacaaaatagtgtcattatgttcctttccaagaaagagaaaatgatatggattttgtagcataaatccatagcgaaaggcagctgggaaataaatgtttttaaactgatggtccattcacatcatttcccctctatttctagtatcccctgtcctttgaccttgcca

SEQ ID NO: 139567 - DNA, 263 bp, Homo sapiens
gtgattggttcacaccatgagttaacagtggggcaaggcctcatacccagtctcctgatagctggtccaggattcctgtgagcctgaatggggggtcaggagctcatcagatgcccagtggaagagcggggtgcgtactcacgtgggaggggagccggtttctctggttccattgtagctcttagctggattttcaactccatggctggttacttgagtctatgtttaatcacctgctagactgagaagcccctaaaggacag

SEQ ID NO: 139568 - DNA, 274 bp, Homo sapiens
gactcttggatgctgcagcaggtcacagagcgagtttgcaggggcctggctggagccgcagaggagactgtccagtcgagagcaaacagaaggctccggttgtgtcctggtgaatgacccccaggcccaacatgcaaggttgcccacaattctgtgtgcacttttcacgtggacttgccgtggactatctgggctgtacagtgtttgctatgaaacatctcagccccatgctgaggcaagtgggcgtgcctggattttaatcatgctcttgaca

SEQ ID NO: 139569 - DNA, 346 bp, Homo sapiens
ccctgaggacacactcgggcagcgacttgaaaacaatacaagaaaaaacggccaaaagttctttcggtacaaaaggcacccacgccctcaggcacaattagcaactgcgtctgcaaacatcccattccctcctactttgcagatcggaaaagcaacccgtacccccaagtcatttactaacagtggtggtaaggtgtcctgatgctgcttcctctcctctaacctacattttcttcttcacaatcatcaactttgtgagcacggaagggctttgtacgaattgcgcaaggaaaagatggcaaattactcaaaagtacagaaaacggagtcctggagcgtccgtggt

SEQ ID NO: 139570 - DNA, 745 bp, Homo sapiens
aggtaagtgactttcccagagtcacacagccaggagatgccaagccgagatttgaactcacatctatctgagtcaaaattctctgctttcctttttgatcgtttaagcctcttctcttccaccataccattctccaggggtattgaattaggtgacagctaagcactcttactatgtgcactttgcatgtattacttaaatcctcgcaacaacctgatgaggttgctaataacctcctccattttaccgaggcacagagagtttaacttgcgtgaggtcacacagctaacaatggaaaagctgggagtcagagaacctgggcagtgtggctctagactccccacttaaaggatcaaagaaacactgtaaaaagtagaaatcactttaggaatataaatcagaattattgttgattctcacagaatccctgcaaagtcctctcccctccccactgcttctggcattccaagacagtaccctagtttcagatatgtctacacagggacactggcctcctcagtccagctccttgaggctactgcttcttgccataaatttctaggactgttcattgccttctgaggtcctttgagctgatgctgatctgaaagcatttttttggatatggtcccatacccaggtgatggggataggataccgatttgcctgcaggataagaattagaggtcatacagactgctgagacagttacaacctagaggtcaagggcctgacatgggagaca

SEQ ID NO: 139571 - DNA, 410 bp, Homo sapiens
agcaaaaaattttatattgtgctgttttaagatactttcatcaaacacagaaacaaagcaaaggcattatcttttggaaactttattctgcccatcaacatgtaaacatgtaaaacttttatcttagaatttgaaatatttcaaaattatatacattttatcagaaactgttaacaactacaaactttctacttcagactttggtggaatttgtctccacttgtaatccgatttgcatctttaatgatggtctcaccatgaccccagttggaatctcttgaacatcagatttttctggaaataggatattttatccttagaaatagtttatgacctctcatctccagtgatctttcctaaagctgtacttctcagtaaagtcttttttctacgttaaagtacagaggggt

SEQ ID NO: 139572 - DNA, 271 bp, Homo sapiens
ccaggatcttgctatcatactttgcctgcaatacctagagatttggatgaattctccttttgttaagattctccaaatatcctgatgttcctggtcctgtcaggaagtgacaattcttactcacctgtaaggaaaggaacccttttaaaccaggacaatttttcatgtctgagtgtgtttctgttcctaaaaaccatgaagaaaataaaacagtgatattacattcaacatggtaactctaaatccttgttctaccagtagaaatataata

SEQ ID NO: 139573 - DNA, 574 bp, Homo sapiens
cttcgatgtataaaaaaaaggggaatggttataattcctctccattacataagttatgtacattaattataggaaatcctaaaaccacaaaaaagcacaaggaagaaatttaagatcactgataatcctaccaccacttgaacattgttataaatttttttaattttatacacaacacacacccctatatacgtacacatttatttgtaaaattgggataatacttttttacaacccttctttatgtaagaatatatcacggccttttccctcatcattaaatattctgccacattttaaaaattactgcataacattccattatctaaatacatcataatttaaccaggccactctcgttggatttttagattattttcggtttgttactattataattagcatatagggagataattttttgcaatttgtgatggtttccttagattaaaatttaaattcctggaagtgcagtttctgggtgagacaatcaatataagtatattttaaggctcttgatttgtaatgccaacttgccctcaagaaagttaaacaaacttaaattttatggaaa

SEQ ID NO: 139574 - DNA, 414 bp, Homo sapiens
aggcagatattgaaactaagagctgctatagtcactttccatctaaatggtatattggaatgacccataggttaccatatgggtcaacatgtataagtgggtttctgtgtatcagcataggagatgggggctggccaaacggctggatggaacaatcatattccccactcccacatatcctagcagaatggaaagggtgtcttggactggacagagtgggaaacccccatcattttgagggacagtgctggtgtgagtaatgcaaacatttccctaagctttctctacttcagacatccaaatgaatttcaggaactctgcatgaagacattgccaccctgctggcatatgcctcagcaatggtctctttcccagaattgcggtcggggcagatgtgggtagccatagtgacct

SEQ ID NO: 139575 - DNA, 274 bp, Homo sapiens
cgagaattttccagtaaagccacctggcgctggagtccctctgttggaggcagtagggtgtgagtgggggtgaggtggcatttttaggatggccccaggcctatatcactcctggactctgtgtctcccggccaggtgggtgggccctggaatgaaatgggcccagagtgcagaattgagcatcctggttccacccgcagtgaaagcttctagtccacagaacctcctttcttcccgaagcacatacacctcacgcccccaacgagtctgtctc

SEQ ID NO: 139576 - DNA, 197 bp, Homo sapiens
cgtatccttcccaggccagatcttctcatctcactcagtctttcccacagcaggccctcatctacagggcagacctgactggctagccaatgtctcctgacgtggggagcttggcctggactgactgggtggcttgggaggtaagtcaagagagcaaacagggcatgggcgtctggggttcacatggccactcaata

SEQ ID NO: 139577 - DNA, 579 bp, Homo sapiens
gacaaagtcatttacacagctatatttatcccctgaggtgttactaataaaggagcatttgcccactaaagggaaccaggaccaaatgacaatgtataacctaaatgaatgactttccaatgataacttttttttgagacagggtctcgctctgtcgccctgagtgcagtggtgcaatgctagctcactccagcctcaaactcctgggcttaagcgatcctcctgcctcagcctcctgactgggtaggactgtgatgaaattttaaatactaaaaagagatataactatcacttcccacgagcgtttctctgttcccatttagggccagccctctgttgcagtgctcctttgctgggagcacagaatgaggatgactgaaattcacagttaacctgcaaacgttggtattgcaatagcctaacaagcttggacccagaagataggtcagctccctcatttcacagcctaagaaatggaaactgtaggatttacaaaccatagtttcagctgggtattttactggatgctgctaattttttaaaatgaatgttcagttatttttttccattctcctctct

SEQ ID NO: 139578 - DNA, 305 bp, Homo sapiens
ctccgcgctcttgtgatccctgcggttctacctgagtcacgtctcctctctgctgtatgacctgaacgtggggtcacatgccaggcagacagtcgtcacaattcctgttgctttgatttctaggtacctcttaaattgatcctcttcctccattcccacaattattaccttggtttatgccatcctatcctacctgaattaaaacaactttctaacctgactgcctgcctctagcctcagagtcctgtattagtccattctcaagctctatgtagaactacccataagactgggtaatttataaa

SEQ ID NO: 139579 - DNA, 186 bp, Homo sapiens
ggcaaaaccccatcgcttaaaagatagaggagaatgagttttaatgcagtagggaggatgacaacatctaaaggttaattgtgcttcttagtcctggaagagccaggtcaggacacaatggatgggggctcggtgcagggagtagagaaacagatatgtcagggaaaaatgagagtaaaagaggca

SEQ ID NO: 139580 - DNA, 364 bp, Homo sapiens
gtcacactcttactcttttacttggaggaagtaggttattctgaccttcagttttttcatgtataaaattgggatataaataccctctgtatagatttataattaggatttagtgagatattgtatatgtgtgttaagtctgtgaagcacatactaggtatgtaatacatgaaagtgtggtaatgttattctaattatgccactcattggacaccagtaattgaaaatgtgattttctggtgctgtggtcatatacaattggagtggttactattgagatatcagaattcagaaagagggaattagtacacagtaggaaacaattttgaagtcaatcacattctgtactcagcttatcatttta

SEQ ID NO: 139581 - DNA, 383 bp, Homo sapiens
caccccgaacgactagtgcagggaggcgagcttctccagacacattctgtgcggtggctgcggggcagggagcacaggcccaagacttggagaccagctgagggctcctcactggctcccaccctctgccctctcaccagggagctgacatcctctgtctggctggatgtttaattgcttagcgcctcagttttcacttctgtgaaatggcactaataccaatacctaaaggcaccaaaggagagtcctgagtatgtagtaattgccatcatgacccaggaatttgctaagcgcttacaaacatctggttaggtactggtaaaacctcgtgaagaactgagcccagggcactgtcctggtaaaagcatttgctaaatgttggc

SEQ ID NO: 139582 - DNA, 180 bp, Homo sapiens
gcttattggttcactgcttattgtctgttacccactctagaatgtgtgcttcatggaggccagaatctatttggttcactgatgtattctaaaagcccaaaacagtgcctgagacataatgggtgctcagtaaagacttaaaacctagcttcactatccactgcgtggtcaccaaagaac

SEQ ID NO: 139583 - DNA, 891 bp, Homo sapiens
aatgtatacaatgttgtatacaagttaggaagcataataaatgaagccctaaacttaccactagtcttaaagttgagtatcattggatccacctgcgtgtttttccatcatatcccctgcctcataccttagaggtgtcctttctcctgagttgtctctcatttcctttataagaaatctttacatatatatatatatatatgactgttttgctttgttttgagtttcataaaaatagtatcatgggggccggtcacggtggctcacgcctgtaattccagcactttgggaggctgagacgggcagatcacaaggtcaggagatcgagaccatcctggctaacacagggaaaccctgtctctactaaaaatacaaaaaaattagctgggcatggtggcaggcacctgtagccccagctgctggggaggctgaggcaggagaatgacgtgaacccgggaggcggagcttgcagtgagccgagatcgcgccactgcactccagcctgggcgacagagggagactctgtctcaaaaaaaaaaaaaaaaaaatagtatcatgctgataattgtgcttgctttatttagcattgtttctctcacccatccttgatggtcatggctgtagttagtccatataccacaaaatatttatgttttcctgttgtgaacattttctgctgtcaacatgtttctggtttttgtaactgggaactttcttgcacatctctagtacacacgtagaaggatttctctagagtatgtaaccaggagtaattcccgtgggtcataggtactgcaaatattggacacaaggaatacaaactgttttttaaagtctttgtaccaatttgtaccccatcagcagtgtataaaagttcccattgattcactt

SEQ ID NO: 139584 - DNA, 117 bp, Homo sapiens
cccttccttggcctgtaatcttgcctctgagtcccccaaactcttcctcattaatcacaagccctgggcaatcaatcaggaagagcatctgctcctcctccatctccgatgtcctca

SEQ ID NO: 139585 - DNA, 297 bp, Homo sapiens
ttctcctgcctcagcctccaagtagctgggattacaggcgtgtaccaccaggcctggctaatttttgtatttttggtagagatggggttttgccatgttggccaggctggtcttgaactcttgacctcaggtgatctgcctgcctcagcttcccaaagtgctgggattataggtgtgagcctctgcgccaggcctcttcacctttctgagcctgttttgctcctcctggccacaggcataaagcttagcacatggcgtgtctttgtgcctctcgagctgcaggcgcggcgccctcaa

SEQ ID NO: 139586 - DNA, 449 bp, Homo sapiens
acccacagtgacaaaggtgggcgattagagtggtgccttggggcaggtgaaaggaggactagagaaggtcgagagattctgcttccagaggctggctcctaaggcctgacacacccaacattataacaaaagactgtaacaagggctatgggagttgtgagccaggaaccttagacaaaaaccagtatgtatcataagaccacagttgccaacagctgaaaactcggatatttgaaaataaaaattctggacttctagatcatttagatactctgtcaacacgaagcctgaatttttacgtgctagctatgggctggggttgagtagtagctatctcctttacacaggtaggctctgcagcccctcaggtcctgttaccacccaaaaaacccagggttcattcacctggatagtaacagatatctgactctccacaaggacacgaggtt

SEQ ID NO: 139587 - DNA, 324 bp, Homo sapiens
ttaattgggttctctcacattcattctgtgttctgaattgataatccaaaacgttcttttttataatagggtaaatgaaaataaactcaacgaaccagagttctttaataattttattcattaaagattttggatagatttttgttttgaatggaatattcatgtgtcacactgaggatcaggtattgggcagttcccttgacagggtttcctttagcctaataataataattcacaagagaggtaaaaaaaattctaggccgggcacggtggcttacacctgtaatcccagcactttgggaggccgagggaggcggatcacga

SEQ ID NO: 139588 - DNA, 202 bp, Homo sapiens
cctcctccaagctgaccaattccatactggccggtgacaaagcaccccacgtatttatgctgctgcctcgctctcataaattatatcagtttcccagacgaaggccccttggctgtgaaggaggatgccattttatttatgctgcacttacacacctgcatactgaactctatatttaaatcagacaacaaatcaatggtac

SEQ ID NO: 139589 - DNA, 557 bp, Homo sapiens
ctttcccaacagagccaggctcctgccaccaccaccaggtcgccaccagggagttccccaaggactgctgtgggcagtggtggcctcggcctcaggtggggcagggcagctccagcatgcccggtcacctttgagtctaatctgctcacgggaaaaacacggatcagagaatcgcctcagagagctgctgaggacactgcaggggcaggagcaataccgggcccttcaaggccagggtcacaagcccagtggtctacccaagactgattgcctgggttcaaatcccagctctgcaatcagctcgcgaccctgggcaagtccctgaaccactcgatgtcctcatctgtaaagcagcaatgggccgggcatgcggtggctcatgcctttcatcccaacactttgagaggccaatgtgggtggatcagctgaggtcaggagttcaagaccagcctggccaacatggtgaaacctcatctctactactaataaaaaaaaattagccgggcatagtggcgggtgcctgtaatcccagctacttgggaggctgaggcaggaga

SEQ ID NO: 139590 - DNA, 158 bp, Homo sapiens
tatttccacaggggatcgttttttcactttgggctaattgaagggatgacgacagaaagaaaattcggaagttactataaagactatgtattttatcctgagtgagttgggaagccctgaagagttttgagcatagtaggctttcttctgactgagta

SEQ ID NO: 139591 - DNA, 487 bp, Homo sapiens
cacacattctctctcacacaaacacacatgcacacacagtctctcacacacacacatacacaaactgtcactcacacacacacacatacacacatacacacacacatactctgtctctctctgtctctctctctctccttggaagtcccctacatttattcacatgttcattttgcaacatttactgtgcgcttgctgtgactcaggctctactctgaccctggaggtgcgatgctgagcaagccagtgcagccctacccttgcagagctgacatcctggtggagacacccctttttgtctgtacctatcctaaaccatctctggcagagcagcaaaacacatcccttttctaagtcttagtttccttactgtctgatgggggcaaaatctaacctatcaggctggaagccccagggccaaatatgagatctgagaaattattttggaaaggagaggccccatagtgtctctagcctgtcccttttc

SEQ ID NO: 139592 - DNA, 355 bp, Homo sapiens
  misc_feature (199)..(199): n is a, c, g, or t
  misc_feature (240)..(240): n is a, c, g, or t
acagaggcaggttgttagctgggcccctgggaggaagtcaacaagctccaccacatctgacaacacctactgcttgcagcccttcccccaggtcaggcagctgcacacctcatgcttccaactgagggggaatgaatgggtaccaagagtaggtgagtctacttctttcccaggggtgagtagcgggtgaagaaatcangcatgtagtggacatttacatgtgccggatacctcatatantgcagtgtggtatcattatcctcactgtgcagatgaagacactgaggctcagggacttgttcaagacacacatctggtcaatagggagccaggattcaaaatcacgtcagtctgg

SEQ ID NO: 139593 - DNA, 160 bp, Homo sapiens
accctggggatgaacatggcttaccagcacaatccttaagacaaagcacaatcaaagcaatggctaccacgaggtggaagtggtccatgccacagcaacagtggaccagtcaggagtcaggagcaaaggtcatggcaacagttagtggggaatgctcaag

SEQ ID NO: 139594 - DNA, 411 bp, Homo sapiens
ttgtaaggacagatccccaggctctatcctcagagattttaattcaccaggtcctgcatgagttcgaggaatttaggtagtccataatatttctaatgaccagccttaaactagacaaccactgaagaacctggctatgagctgagaaactcagggttttttatggctggtcattaacgacaagcggggctgtaccactgtgctggtcacttgaagttctctgagtcacctgaaaatgagggagtaattggagccaaaagaggtattcataggcagccaatctaaaattctagaatcctccaaatttaatttaatatcacatactatactgggtttactcaaaacagtgtcattctggctggcggcagtggctcacgcctataatcccaacactttcgaaggccaacgcaa

SEQ ID NO: 139595 - DNA, 344 bp, Homo sapiens
aagttcctaagcgaacactctggatggaatagataccaccctttccatgaaagttcccctctgcacttggcagaaaatccctgatctagcccaagtctctaatgttataagtgaagaaactgaagtctcagagtggaaaaggaagtcatcagggatgactcaagtcagagctcctggttcctgaaccctggggctctttcctcccctctaagagctgatctgtctgtagctggtcatgtttccatttcagagggtggagggaacatccaggatgtctcaaaaggtctgctttcctcattgtctcagcttcccctctgaagctcactcccccccaccgctttctt

SEQ ID NO: 139596 - DNA, 320 bp, Homo sapiens
tgtatcagctcccaagtagctgggactacaggtgtctgccaccttgcctggctaatttttgtatttttagtagagatggagtttcaccgtattggccaggctggtctcgtcctggcagactcgtgtgtgtgggctttgtgctttggaagagaagctgtgatctgtgggttccccagtcccttctttcttcccaaaggtgaccggtttccctccgagtcttccaaagatgtgggcagcagggtctcaaatccaccaccctatcccctcatcctaactcctcctagggctggcagcaaatctcttggttttcagagccttcc

SEQ ID NO: 139597 - DNA, 261 bp, Homo sapiens
gtgtcacagctgccttgcagctctgaggatcagaaaggttaatggacataaaagaaacttcaaagctcaacctcctaatgggaagctgcccttggttttaggctgtctttgcttactgaccgacttaattcatgctttgggttatgactgtaggagagattttcctgtgtctttggagtatgctgaacttgtgtttctttttgttgttgcatattagacagtcagtgttgaaactaaagtgacctaaagtgacagagctca

SEQ ID NO: 139598 - DNA, 549 bp, Homo sapiens
gacccaggtggcaagagtttgcaggacggaatgccagaggggaagagcagcacagacagactttggagacttgtagaaggtctccttccagcattcggctgaagtaccaacctgcacattggtacaacgacctgaagctgagaaagaaccaccagaaaggattagaggtacccaggaatggtacctattcccccttagccagaacagaaaatctcatgactcacaagccctgtggtaggagtaccaaatgggtcttgccttatttgtggggattaactggccctaaaatgagaactgcttgggtcttacctaacacatttaaaaagtgagacctgaaaaaaacaaactatttccaaataactgcatcctagaacaaagctcacaatgtctggcatccaaagaaagttcccaggattgcaaagaagcaggaagatatactcataataaagagaaaaatcattcaatcaaaaccaatccagaactgactcaaatgttagaacctgcaaagacattaaacactatgtttcatacgttcagaaagtagagaca

SEQ ID NO: 139599 - DNA, 315 bp, Homo sapiens
agggctcgtgggtaccagcgtttgttaagaagattacatgggttgtctgaggattttctggcaggagttttcttgttttgtgtgtttgaattaaactcttgaacgtgtctagaatgcttttaacatgaaataatatgcttggggtgggggagggcaattttgtttccttccagtgtgccagcactaattagtcaataatccgtcctttgaccaatgaattgaatgacagctctgtggtctgttagggtctcatgtaaactgggttccgtctggggatcctccatcccactcgctggcctgcttgtctcttcacgt

SEQ ID NO: 139600 - DNA, 399 bp, Homo sapiens
atggagtgattccccatttggtgtcctgaggctccagggatactgccaagaggccaggaggtgcagtggttgaactcagactttaggtgcaggctagcatctgaagcctagatccactatttgcaagctgtgagaccctgacacacacaagtccctttaccttgctgaacttcaactgctctgatggaaaataagactaatattaaatacacatagattgttgtgacaattaaaagagataccacatgtagagagcacttaggagaggatctgacatacactaaatgctcaatagatgtaaattatatcattattgttgttgttgtcattagtattatcaaatggtgcaactgtattttttaagtatttcacaattctcccattaaaaacggtatgccc

SEQ ID NO: 139601 - DNA, 278 bp, Homo sapiens
tctagggcataattatttctctttattcttagaatgaggtggttcaaaacctccaactgttaaccttttaatagctttcagtcacctggaaaggtgattgcttcagagatgttcttttctctgttttcaaatataagaagttacctagttagtgttgccagaaataaacttctccctttcatgcagctagggaggagatgttaaaacatgggattcatttttccccagagaaataatttataaaggtgggtaggtttggttgaagcagtgtgttaata

SEQ ID NO: 139602 - DNA, 345 bp, Homo sapiens
aagcattaatggccagtgtgtgcttaatttaacaacactacaaattcatgtagagatgtctgatcctctagagaggaaactgtcattccttagctgcagtcccctcttcaactgaagaattacatttcaccactaggtgtccacaggggaacaaaggatatcttacacttgcccattccaagtccctttcacacacactgcactccataaacaacttgtcctaggtcaatttataaaaaccttaaatcttattttatgttgtactactacagcttaggtcttcatttactttaacttataagatatcctggccggacgcagtggctcacacctgtaatcccagca

SEQ ID NO: 139603 - DNA, 239 bp, Homo sapiens
ctgccttgatttgttgtcatgatttcaattccaaactctcaggagaagaaatctgactggcctggcttgagtcagtttgtatcctgggttcatggtaagcacatatgccagagtccatatgtttctggagatatggaatgcaatgtggaggtatggtctttgagaaagagggttcttgcaagctgattcattcaccccaaaaatgcaagtattatgatatataatggtgaagactttta

SEQ ID NO: 139604 - DNA, 102 bp, Homo sapiens
ggtgatgagatcaagaaaagtccgaggccgtaaatgagattgcagataaaaatcatgttatttaggccaggcatggtagcagttacacctgtaatcccagtg

SEQ ID NO: 139605 - DNA, 485 bp, Homo sapiens
tctgccctcctgaacatctactccccacctaacacataagtacacaggtgcagacagacgccacccccatagaagtcaagggggagtgtgtggggctgctccttcgaagctccctgtgtgtgagaatccctctctcgtctcttgggctctgcctcctgtaatgttaggcttttctatacctaaagcctcacattccatcaatttcttccctctctcacccagtcatccaaggcaaagcttcatttactatcttaagtatttggagttttttctgatcaaggaatgtctcaggtgtcactggtgctcagccttctgctaacagtagtgaaccccattctgcatactgggaaaataaccccacaaattcagaaacaccaaagaggcattttgagcataatttgatgacctagttttattttaaaatagaaataagccatagactttgcatattagaaccaatgccttctttttatttcagtaaattc

SEQ ID NO: 139606 - DNA, 468 bp, Homo sapiens
tccagtccttttcacctccaaaatatatcccaaatcccagcctccagatggataagctcactccccagcctctcggttctggtcctcttcaccgccaccctcttctctccatcctcactgccaccgccctaagataaaccaccagcagcatctcctacctgcctaccttgacagcttctgcttaaaaccctttactgccttcccaagactgagacaaaaagacagattctttgccacagcctttaaagcctgtctaacctctgcaggtaaataggacgcttagggctggggagggacagggctgacagatgggttggtacagatggaggaggagcctgcctgagccaatatctaaactgcagaggttgggttttgttttatttcattacttttcaactggtattatatgcctaaggtataaatcaaaagatatggctgggtgcagtggctcacacctgtaatctcagc

SEQ ID NO: 139607 - DNA, 467 bp, Homo sapiens
tgatcgtctgcctcggcctcccaaagtgctgggattacaggtgtgagctgccacacccagccttgcttggttctctgtgagctttttccctgagtcctctgtctcctgatgggcagccgtagaaatctcttgctgtacctgtttgagcggagctggagaatggcttcctcagaaagccccccattcttctaacgggagttctgtgtactccacctagctttcactttattgaggactattccagacattccctgtggatttggttaagatccatctggctggttttgggtggcgcagcaacagacagaattctatttgtatgagttaggtcttacctacttcttttagtacaaaaatatcctaaaggatggtaatttttttttatcacctatactggatgaaatgaaaagttgactctatgtgggtccctagaaatgacttggaaaggtcttctggagttacttgag

SEQ ID NO: 139608 - DNA, 274 bp, Homo sapiens
ttcaggtgatgggtggtgttcaggtgattggtgttcaggtgatgggtggtgttcaggtgatggctgctgtaacaaaaatcctctagactgtgtggctcaaacaacagaagtgtttctcagccctctggaggctggaaagtcctttatggtctgcagacagcagcctttgtgccatgtgctcgcattggggggcgaggggtactggcgtctattctcgcaaagacactaatcaccagagcccaccctcatgacctcctccaaccctaatcacctc

SEQ ID NO: 139609 - DNA, 711 bp, Homo sapiens
acacctaccaacgaaaaagttaaatggagagagggaggcacccacccacataatctttccattcaaagaggcattattccaagctgctatggaatttataattaacagacaagcttaaccaacaacagaaatttctggaatctcttgtaatttacactacagcctgccttattccaaatttagatcacaagcatgggctggattccgaggctgaatcccaaagccttcttggcacacctctagcttgggattcttgcagtcactcagccctgtggggagggcgtctgcaggatgactgagggccagctgacccagtatgcagacagacgcagtgcggctgctttgccagagctcactcacatccagaggcccagcaacacctaccattagctccttggagctgcatcaggaggctgtgctagagaaatgtctcgttgcactcagatgtattcattatgatgccttctacagatctttgctatcattgttctgcgaggtttttgcttcctttcccagctgctaccccagggtgaatcctctcccccaagttccaagaccaaggtgtgcactgaggcatatctgagcaactgactctgcagtgaggctgcctgatagaagaccaagccacagagaagacagacaaggagggtgggaagagggtggccatcactggctaccgtcagaggcgtgtgaaccagagcaactccatct

SEQ ID NO: 139610 - DNA, 165 bp, Homo sapiens
caacccaggcttctccagacctagtaatgctgatgccacacacccaactaccactcccctgggggaagctgctccccaactcccaagctcagagagaaaggaagaaggggcagtggatgagaagaggatgtgatgaggggagcttcctaaagacccacaaggtgt

SEQ ID NO: 139611 - DNA, 2739 bp, Homo sapiens
cagaagggcaaaaacattgactgcctcaaggtctcaagcaccagtcttcaccgcggaaagcatgttgtggctgttccaatcgctcctgtttgtcttctgctttggcccagggaatgtagtttcacaaagcagcttaaccccattgatggtgaacgggattctgggggagtcagtaactcttcccctggagtttcctgcaggagagaaggtcaacttcatcacttggcttttcaatgaaacatctcttgccttcatagtaccccatgaaaccaaaagtccagaaatccacgtgactaatccgaaacagggaaagcgactgaacttcacccagtcctactccctgcaactcagcaacctgaagatggaagacacaggctcttacagagcccagatatccacaaagacctctgcaaagctgtccagttacactctgaggatattaagacaactgaggaacatacaagttaccaatcacagtcagctatttcagaatatgacctgtgagctccatctgacttgctctgtggaggatgcagatgacaatgtctcattcagatgggaggccttgggaaacacactttcaagtcagccaaacctcactgtctcctgggaccccaggatttccagtgaacaggactacacctgcatagcagagaatgctgtcagtaatttatccttctctgtctctgcccagaagctttgcgaagatgttaaaattcaatatacagataccaaaatgattctgtttatggtttctgggatatgcatagtcttcggtttcatcatactgctgttacttgttttgaggaaaagaagagattccctatctttgtctactcagcgaacacagggccccgcagagtccgcaaggaacctagagtatgtttcagtgtctccaacgaacaacactgtgtatgcttcagtcactcattcaaacagggaaacagaaatctggacacctagagaaaatgatactatcacaatttactccacaattaatcattccaaagagagtaaacccactttttccagggcaactgcccttgacaatgtcgtgtaagttgctgaaaggcctcagaggaattcgggaatgacacgtcttctgatcccatgagacagaacaaagaacaggaagcttggttcctgttgttcctggcaacagaatttgaatatctaggataggatgatcacctccagtccttcggacttaaacctgcctacctgagtcaaacacctaaggataacatcatttccagcatgtggttcaaataatattttccaatccacttcaggccaaaacatgctaaagataacacaccagcacattgactctctctttgataactaagcaaatggaattatggttgacagagagtttatgatccagaagacaaccacttctctccttttagaaagcagcaggattgacttattgagaaataatgcagtgtgttggttacatgtgtagtctctggagttggatgggcccatcctgatacaagttgagcatcccttgtctgaaatgcttgggattagaaatgtttcagatttcaattttttttcagattttggaatatttgcattatatttagcggttgagtatccaaatccaaaaatccaaaattcaaaatgctccaataagcatttcccttgagtttcattgatgtcgatgcagtgctcaaaatctcagattttggagcattttggatattggatttttggatttgggatgctcaacttgtacaatgtttattagacacatctcctgggacatactgcctaaccttttggagccttagtctcccagactgaaaaaggaagaggatggtattacatcagctccattgtttgagccaagaatctaagtcatccctgactccagtgtctttgtcaccaggccctttggactctacctcagaaatatttcttggaccttccacttctcctccaactccttgaccaccatcctgtatccaaccatcaccacctctaacctgaatcctaccttaagatcagaacagttgtcctcacttttgttcttgtccctctccaacccactctccacaagatggccagagtaatgtttttaatataaattggatccttcagtttcctgcttaaaaccctgcaggtttcccaatgcactcagaaagaaatccagtttccatggccctggatggtctggcccacctccagcctcagctagcattacccttctgacactctctatgtagcctccctgatcttctttcagctcctctattaaaggaaaagttctttatgttaattatttacatcttcctgcaggcccttcctctgcctgctggggtcctcctattctttaggtttaattttaaatatgtcacctcctaagagaaaccttcccagaccactctttctaaaatgaatcttctaggctgggcatggtggctcacacctgtaatcccagtactttgggaggccaaggggggagatcacttgaggtcaggagttcaagaccagcctggccaacttggtgaaaccccgtctttactaaaaatacaaaaaaattagccaggcgtggtggtgcacccctaaaatcccagctacttgagagactgaggcaggagaatcgcttgaacccaggaggtggaggttccagtgagccaaaatcatgccaatgtattccagtctgggtgacagagtgagactctgtctcaaaaaataaataaataaaataaaatgaaatagatcttatta

SEQ ID NO: 139612 - DNA, 409 bp, Homo sapiens
cccagtgaaagggatcatcccttgtcacccagcaagtccagggcacaggcaggattagagcatccaaggcacaaaaccaaactgtctgactgcatcattactgttcagccagggtctgggcaatggatagacacagtggaaagagaaaacatgatatagaaacacaaacacaggctctggactcagattggctttgggtctcatttcatgcatgagtgatgcatgacatcacttgcagaggaaaaggcataaggtttgaagtcagaagacgtgcatttgagttgctgtttcatcactgtctgtatggctttgcacaagtcagttaagttttctgagcctccagttcctcatctccaaaataatcaaatccgctgtagagacctctgaaaagcttaataatatcccaaat

SEQ ID NO: 139613 - DNA, 1026 bp, Homo sapiens
cagaagggcaaaaacattgactgcctcaaggtctcaagcaccagtcttcaccgcggaaagcatgttgtggctgttccaatcgctcctgtttgtcttctgctttggcccagggaatgtagtttcacaaagcagcttaaccccattgatggtgaacgggattctgggggagtcagtaactcttcccctggagtttcctgcaggagagaaggtcaacttcatcacttggcttttcaatgaaacatctcttgccttcatagtaccccatgaaaccaaaagtccagaaatccacgtgactaatccgaaacagggaaagcgactgaacttcacccagtcctactccctgcaactcagcaacctgaagatggaagacacaggctcttacagagcccagatatccacaaagacctctgcaaagctgtccagttacactctgaggatattaagacaactgaggaacatacaagttaccaatcacagtcagctatttcagaatatgacctgtgagctccatctgacttgctctgtggaggatgcagatgacaatgtctcattcagatgggaggccttgggaaacacactttcaagtcagccaaacctcactgtctcctgggaccccaggatttccagtgaacaggactacacctgcatagcagagaatgctgtcagtaatttatccttctctgtctctgcccagaagctttgcgaagatgttaaaattcaatatacagataccaaaatgattctgtttatggtttctgggatatgcatagtcttcggtttcatcatactgctgttacttgttttgaggaaaagaagaggcaggtttcctttcttcctacttgtctcttctccaaggttccagtgattgagagtttggggcctctgattcccaaggatctcttgtggaagacaggaggagggagggaggctgcaaaccctggctcagctagtccactgagataatccctgggtgtgatcttgcacctgctaatatcctgagagaaatgtcctactgggaaaagtggg

SEQ ID NO: 139614 - DNA, 338 bp, Homo sapiens
cacatttcaattttctggttttatttttcagattccctatctttgtctactcagcgaacacagggccccggtgagcattcagactcttaactctccatcataaagcagatgggaagagccaaatggaagagagagggggatggcagagggctggataatgacagaggaaggagtcagaatgtcattactcagaccacatgctgtgaggggagatgatctgtaatcatgggtcctacatggttcacaggcataggcatgtgaaccagtcactcacacagtttctcttggtgatatcaggttcattcaccaccctgctgatggagaaactaagtcccagt

SEQ ID NO: 139615 - DNA, 2406 bp, Homo sapiens
cagaagggcaaaaacattgactgcctcaaggtctcaagcaccagtcttcaccgcggaaagcatgttgtggctgttccaatcgctcctgtttgtcttctgctttggcccaggacaactgaggaacatacaagttaccaatcacagtcagctatttcagaatatgacctgtgagctccatctgacttgctctgtggaggatgcagatgacaatgtctcattcagatgggaggccttgggaaacacactttcaagtcagccaaacctcactgtctcctgggaccccaggatttccagtgaacaggactacacctgcatagcagagaatgctgtcagtaatttatccttctctgtctctgcccagaagctttgcgaagatgttaaaattcaatatacagataccaaaatgattctgtttatggtttctgggatatgcatagtcttcggtttcatcatactgctgttacttgttttgaggaaaagaagagattccctatctttgtctactcagcgaacacagggccccgcagagtccgcaaggaacctagagtatgtttcagtgtctccaacgaacaacactgtgtatgcttcagtcactcattcaaacagggaaacagaaatctggacacctagagaaaatgatactatcacaatttactccacaattaatcattccaaagagagtaaacccactttttccagggcaactgcccttgacaatgtcgtgtaagttgctgaaaggcctcagaggaattcgggaatgacacgtcttctgatcccatgagacagaacaaagaacaggaagcttggttcctgttgttcctggcaacagaatttgaatatctaggataggatgatcacctccagtccttcggacttaaacctgcctacctgagtcaaacacctaaggataacatcatttccagcatgtggttcaaataatattttccaatccacttcaggccaaaacatgctaaagataacacaccagcacattgactctctctttgataactaagcaaatggaattatggttgacagagagtttatgatccagaagacaaccacttctctccttttagaaagcagcaggattgacttattgagaaataatgcagtgtgttggttacatgtgtagtctctggagttggatgggcccatcctgatacaagttgagcatcccttgtctgaaatgcttgggattagaaatgtttcagatttcaattttttttcagattttggaatatttgcattatatttagcggttgagtatccaaatccaaaaatccaaaattcaaaatgctccaataagcatttcccttgagtttcattgatgtcgatgcagtgctcaaaatctcagattttggagcattttggatattggatttttggatttgggatgctcaacttgtacaatgtttattagacacatctcctgggacatactgcctaaccttttggagccttagtctcccagactgaaaaaggaagaggatggtattacatcagctccattgtttgagccaagaatctaagtcatccctgactccagtgtctttgtcaccaggccctttggactctacctcagaaatatttcttggaccttccacttctcctccaactccttgaccaccatcctgtatccaaccatcaccacctctaacctgaatcctaccttaagatcagaacagttgtcctcacttttgttcttgtccctctccaacccactctccacaagatggccagagtaatgtttttaatataaattggatccttcagtttcctgcttaaaaccctgcaggtttcccaatgcactcagaaagaaatccagtttccatggccctggatggtctggcccacctccagcctcagctagcattacccttctgacactctctatgtagcctccctgatcttctttcagctcctctattaaaggaaaagttctttatgttaattatttacatcttcctgcaggcccttcctctgcctgctggggtcctcctattctttaggtttaattttaaatatgtcacctcctaagagaaaccttcccagaccactctttctaaaatgaatcttctaggctgggcatggtggctcacacctgtaatcccagtactttgggaggccaaggggggagatcacttgaggtcaggagttcaagaccagcctggccaacttggtgaaaccccgtctttactaaaaatacaaaaaaattagccaggcgtggtggtgcacccctaaaatcccagctacttgagagactgaggcaggagaatcgcttgaacccaggaggtggaggttccagtgagccaaaatcatgccaatgtattccagtctgggtgacagagtgagactctgtctcaaaaaataaataaataaaataaaatgaaatagatcttatta

SEQ ID NO: 139616 - DNA, 397 bp, Homo sapiens
tgatctcattaagtctcttgaatttttttttacatgaaagtttctggtaagctgtgaagttatgagaaagaagcaagcgaacctcttaggaactgctagtgacttttttgtgtccttgccattttttttctttttttatattagtatattcttgaggaagcagtatatggacacttttctatatgcattatggtgattgaataagacagtctttttgtacattttatgctgactgaaaatgtatacccattttcatgtgcacaaagttccagacatttttaggctagggaaatgagtattttagaaaaacatgtatgctgctaaattacttgtgaaatacaccaatagaaaatagaaagcactgtacttacaattgaggaaggaaaacagaatgaaa

SEQ ID NO: 139617 - DNA, 569 bp, Homo sapiens
tggatgttttctaagagagccgtgagctggcttctctcatgcactacgagagatgagagatgaatcccaaagtcgccttctgggcccatattgctacacctcctaatcatcaccatggctgggcaaacactccaattcaaacccaagtgggagtgggaaagacctgagagggttggagatttttatgagggtgaaataatttcctagtttgtaagtcaaaattcccaaggactgtgggatctacaacctagaaattcagatgatttcagttcttctgtcctggaaaataccacttcactatcctaaggcaaagatggccatgtactcttataaaaagttattgcaaaatgacctgctcttaaactctgaagtcaccatactcttttaccgcacctggctggacttcagggttttacagacatcgtgtgtgagcttcatcacaaaccaaggccagcacggtacagacttccaagaattcaactgcatttccatattcttcagggaactttaatcttctaccccaagactgagttaaaaagaaaaatctgagcaacaacaggagagtctct

SEQ ID NO: 139618 - DNA, 307 bp, Homo sapiens
atttgtacaccatcataccattagtaagttgccaagctgggattcaattccctccaaagcgcatactgtatttaactacctaccagaagagatgggatactcactccagtcatgccaacattgctccaaaatgacttctaaactttttttttttctttgagacagtcacactctgtcgcccacgctggagtgcagtggtgtgatctcggctcactgcaacctccacctcctgggtacaagcaattctcctgcttcagcctcctgagtagctgggactacaggtgcgtgccaccacacctggctaatt

SEQ ID NO: 139619 - DNA, 386 bp, Homo sapiens
tgggcggtggcaggggcaatgcagggagcctgagagccattcaggagacagtgagacaggcttgggggagcacgggagcaggaggaggcgatggtgacctctaggcctccagctctgccactaaggtagacaggggtctcttcttgtagacagggacccacacgaggaggaggtttcagcaaaagatgattagtccagctgataaatgtgcagcttgagtgactgaaatgtgagtgactcaaatgtgtagtttgagtggcttcctagaaggactggagggcttttctttttccctccaatagagagaggtgtgagtggttccaatgctgatgagcaggagccagtacagattccccgagacagagccatgctggtgtgcagccctt

SEQ ID NO: 139620 - DNA, 1135 bp, Homo sapiens
tcgatctagaggatctctcagtgatcctccaattgtgctatcttcatagcaattgctcctccttgccttccaccatgattgtgaggcctcccctgccatgtggaactgtaactccattgaacctcttttgtccgttgcccagtcttgggtatgtctttatcagcagcatgaaaacggacgaatacattggggacctgaaagccaggtttcctgtattctatgacaaagccattgccaagtagcaagctggcaatttgattcatgaccagatgtaaacagaggtaaagactgagaccattccaaggtaaagcttttaatacattgttggatatatcctgcctaaaatatctcctaggaatagatgattctaggctttgctattacagtgctcttaatgacagacaagcaaactacttcttgcagaggaagaaagtcctgccatttgataacatcatggagaatgcccccaagccattttcatgaattacccaaaagaccaaatggaacaggagctattatccctattttattcacgaagaaactgaggccctgagaaattaagacatttgacagatacaaacagtaatttaggcaattagtaaatgtttgaatcagagttcaaatccaggtctgtttgattccagagcccctacatcacccctccagactatctctctgctcacatcttcagcaagttacaaaattttgttgagtggatgaatatttttacatatatttcccagctgggcacagtggctcatgcccataatcccagcactttgggaggcagaggtaggaggattgcttgagcccaggagttcgagaccggccggggaaacagagagagacccatgtctttaaaaaaataaaaattaaaaattagcctggtgtgcatgcatcagtagtcccagctactgggaaggctgaggcatgaggatcatttgagcccaggagttccaggctgcaatgaaatatgatcatgccactgcactacagcctgggtgacagagtgagaccctgtctctctctctctctctctctctctctctctctctctctctctctcaaaagaaagaaaaaaaaaagccaggtgtggtggctcactcctgtaatcccagcactttgggaggctgag

SEQ ID NO: 139621 - DNA, 360 bp, Homo sapiens
ctccaagcccacagaggctctgccctggttttctatgacttctttcatccccacctcagtcccatcttcaatgaacacatcccacgctgtcatcatggtcatcatcaccatcaccgccccctccatggaaccacaactgtcacctccaccattacctttacctccgccatcagtatcatctccaccaccatcacctccactatcacatcacctccaccaccatcacctccacccccaccatcacctccactattacactccaccagcatcaccaccatcacctccacttttacctccacctccactaccaccatcaccacctcctccacctccaccagtgccagacctaagcaagccagg

SEQ ID NO: 139622 - DNA, 178 bp, Homo sapiens
ttgcccaaagtcttactgttacagcatagcagctgaattgagagcaaaattaagactcctgatacctagtcataatactgttgttattcttgtttaaaacagcatatatattattttgttccttttggtgaaggccaatcagggccaggggtggtggctcatgcctgtaatcctaaca

SEQ ID NO: 139623 - DNA, 310 bp, Homo sapiens
tacttagagataaatggaaagggtaaaacatgagtccctgtcttccaggagctcacactcgggtgtgggagaaagccttttaagcacacgattgccattgaacgtgatcagacttctcaaagatctgggccaagtactatgggaaatcagtcaaaggagggacaaagtacctgcaggcattggaaaaggtggctcagagaaggcaatgaagtttatgctctgggtcacaaaagatgagcatgcggcaaaggccagtacacaggccaaggacactttatttatttattttagagacatgggtcttgctctg

SEQ ID NO: 139624 - DNA, 689 bp, Homo sapiens
gtgaaaatgaccatacaccaaaagcaatctagaaattcaatgcaatttccatcaaaatactgtcatcattcttcacagaattagaaaaacaattctaaaattcatatggaaccaaataagagcccatatagccaaagcaagagtaagcaaaaagaacaaatatggaggaaacacattacctgatttcaaacaataaggttatagtcaccaaagcagcacggtattggtataaaaataggcacatagaccaatggaacagaatagagaacccagaaataaacccaaatacttttagccatctgatctttgacaaaacaaacaagaacataaagtggggaatggacactcttttcaacaaatggtgctgggataattggctagccacatgtaggaggacagtggatcctcatctttcactttataccaaaatcaactcaagatggattaattacttaaatctaagacctgaaactataaaaattctagaagaaaactttggaaaaacccttctagacactgtcgtagcaaggatttcaagaccaaaaacccaaaagcaaatgcaacaaaaacaaagataaatagctggaacttaattaaatgaaacagcttttgcatggcaaaaggaacagtcagtagagtaaatagacaactcacagagtgggaggaaatcttcacaatctatacatctg

SEQ ID NO: 139625 - DNA, 927 bp, Homo sapiens
taacaaaaattctgtttacatagaatttttcaaagggcacccagtacgtgaggccatagctggaccaaaacacagacctacgtattcagactcggtcctttaatgactaccaatgctagctccaaaatgcaaggattgcggaagaattacaggatctcaacttgtactccccatcaccttctctgcccttatcccaatttatttatcttcacacgacttaccggcacctcacatatgtgtgtttgtctgtgtccaccctgaacactcattagacctggacttccccccctggaaagacttggacttggctttcataagtgccatatccccaatggcttaccacacagtaggtgcacaataaacaattctcaaatgttgggggaaaatgggagaaagagaggtcatcagatagttctcttgtctcacgtcacttgtaaattcaaactgcttcggcggctctaccccagcctctggtgtcatgtcggggtgcagtgggcctccagaagggagagttggggggtatgataggaacacaatacaaaatcagagctctggcccttgcggaaaaaacttttgggggagaagggtgagacagacatttatcaaaggatacacaactaaatgtcgaaaggtaactggggacgatttccggcaacctaggagaggtatttacggtaacaccttgaagagggtacaccgggaagacttttccgtgtgcggagactgacggatgcttggggtttgactctgtgaaggccccaaaccctacctggcaccgcgtggtgccaggtgaggcggggggtgcctccccctggcacccggacaccagggattcgaaccagtctctgaggaggccgagcggcgccgcccgcggcccgggcggcggggggcgcctgtgaacccgggctgcggttcagacgcggccgc

SEQ ID NO: 139626 - DNA, 322 bp, Homo sapiens
aaaatctctcacctaatatgaatcaaggtcacacctgtgtacagtcgctgccttcttctgaccagcagccgcagaagtcccaggacctatgtgttcgtgtagttcatacacggatcattgagagtgtgagttagtacagaagtgtttggaatgttctgagtaaagaagtgtgagcattaacagtcctggatgatggagcagagcctcccagctttgttttctgtcagccattggaaagagttcttggttctttggaattcagcggggtagtggtgatcccaaaagcaggggacatgtcagaaggtactgcttaataaataca

SEQ ID NO: 139627 - DNA, 653 bp, Homo sapiens
acaatccaactgattgccccaagtgttctgaaaaccctgattcatgaagtcatgtagcagcaaagagaaccagaattcccagtactttgatacttgttctttacagaatcaatgaacttctctgcaatagaaaataacctcataatcctctcctatttctcaagagaagttcttgacaaggcagtgattcaaagccctgactaggttaaaatgtgactttagagaccttagacaagacttctttcacgatctttggcagagtctttgatgccaatgtaaaagcaatgattcatagtggctcgtggagcttctcccttcaccaaagcagcaaaaccagatgtgctgtcaggtactcaatcagttttgctggcaagccacttttcactgttttacgtctcaatggtctttccagtttccaaaatgtgttcacaaaacagtaattatttgatggcattagcatgctgttaaacgacaaaaaagagaagctagcttcactaagatacatcagaatttcatttgggccaggcaagggtggctcatgtctgtaatcccaacactttgggaggccaaggcaggcagattacctgaggtcaggaattcgagaccagtctggccaacatggtgaaaccctgtctctaacaaaagtacaaaac

SEQ ID NO: 139628 - DNA, 356 bp, Homo sapiens
ataggttcgcagagcaggtactgcctacaacatggaactcagccgagcatggagacagagtaagggtggtgggctttttgggcgctagaaagagtaccaggccttcacctcttcacctcttccctcactcatgatcaggtctggatttaagagcaagagaccccaggataattcagaagtcctctctctcctcctgttcaagactcttggtctgggattcaataataagtagcagacctgacataagaaagatcagataggtccaattgccagtgactattgggagccataatttggcagctggagactggtaggctcaggcctgattaacactggctaggatcagcagcaaataa

SEQ ID NO: 139629 - DNA, 134 bp, Homo sapiens
acttgtaattctgcccacacttctgtagaatttctgtagaagatcccatagtctggtcagaggagtataagcaagtctaaataaccaaagtggggggatctcaaccaaatcatttgactctgggctctgtgctc

SEQ ID NO: 139630 - DNA, 173 bp, Homo sapiens
tcaactttctcagtgagggattataaaatccatttatcattggcaaagtgatcaccttttcattatcttgaggtttcggctgagagttcgagggcaaagtcaaaactccatgataaattttgctggcttccgtctttgataattctcttgctagcacttttaaccctatctgc

SEQ ID NO: 139631 - DNA, 412 bp, Homo sapiens
ttcaagcagttctcctgcctcagcctcctgagtagctgggactacaggcacatgccactgcacccggccaatttgtgtatttttagtagagacggggtttccccatattgaccaggctggtcttgaactcctgacctcaagtgatctgcccaccttggcttcccaaattgctaggattacaggtgtgagccaccacacccggccttcagcttcattataattttatgataccactgacatatatgcgatccattgttggctaaaaaaatgttaggcagtggccaggcgtggtgggtcacgcctgtaatcccagcactttgggaggctgaggtggacagatcacgaggtcaggagatcaagaccatcctggctaacatgttgaaaacccatctctactaaaaatacaaaaaat

SEQ ID NO: 139632 - DNA, 177 bp, Homo sapiens
tcaccccaacgtggtaccatcctcaagggctaccccaccttcagcatcccctttgggatcagctgaggcctatcttgtgatcggacaccacagcccaatttctcccttggcccaattgtgcttcctcctattccacaagtgtgaatcctaaaatctccttaacaaacttcctacatg

SEQ ID NO: 139633 - DNA, 203 bp, Homo sapiens
tgaagccaggtccttgttagtgggatgaaggtgacacagccagatgagttttatctctgcagctggggatcaccagctgcagcagacctctcagcggctccatcctttacttcttttaaagctgattatttcagttaacaagaagaagattccctgtttattttttgcatttactagtattttatttctaaaatactaatctg

SEQ ID NO: 139634 - DNA, 200 bp, Homo sapiens
cttggtaaattggccttcccgaaagggaaactgacagcttctactccaccaggcgaaaatgggcaaagcaggtggaaagctgtatcaagttactaaagcaaattggatctacgtgggtgcacgtgcccctattttagttcgtttcatgaaaacatctcttctcaaggcaaggagtcatggcctcatctctctggaaagct

SEQ ID NO: 139635 - DNA, 127 bp, Homo sapiens
caggttttcaccactgtcaatactttaaatttaaaatacataaattagttgaaatgactgtaagctattctcacagtctcttggtctagaacatcttaaaaataagacttacagaccaacttaatta

SEQ ID NO: 139636 - DNA, 562 bp, Homo sapiens
actgctggtgggaatttaaaatggtgctgccgctatggaaaactgtatggtggtttgatacgatctggctgtgtccctacccatatctgatcttgaattcccatgtgttgtgggagggactgggtaggaggtaattgaatcatgagggcaagtctttcccatgctgttcttgtgatattgaataagtctcacgagatataatggttttaaaaaggggaattcccctgcacaagctgtcttttctcttgtctgctgccatgtgaaatgtgtctttcaccttccgccatgattgtgaggtcttcccagccacatggaactgtaagtccaataaacctctttcttttgtaaattgcccaatcttgggtatgtctttatcagcagcgtaaaaatggactaatacatggttcctcaaaaattgttaaatagaattgccatatgatccagcagctccacttctaagtatatacccaaaagaaccaaaagcagggtttcaaacaggtgtacactcatgtccacagcagcataattcacaacagccaaaaggtggaaacaacgcaaatgt

SEQ ID NO: 139637 - DNA, 459 bp, Homo sapiens
gtgtggcacagaggctttggcttttctctgtagcccaataccggtgagacacctcctctttactgtgaggcttcactctttttcttcctttttcctgctgccttggcttgctgtgggaggtggatgttgtcagcatgtatgacctgggccatcgcagctgtggctgaaccagaggtgggccgggggatgtgatgcagatcaccaagagcatctgccacaccccctgaacactttcgggaagagaaacatcagttcccttgaagggctgctctgtccatctgcccagcttggatgtactaaatgctatttgtttgtatacctaaaaatggttaattttggctgggcatggtggctcaggtctgtaatcccagcactttagaaggccaaggtgggtggataacttgaggccaggagtttgagactggcctggccaacatggcgaaaccccatctctactaa

SEQ ID NO: 139638 - DNA, 200 bp, Homo sapiens
gatctgcccgcctcagcctccaaaagtgctgggactacagacgtgagccactggtgcccggcctgacatatatcttgagtaaaagagcctgtgctgggctctggggatgcagctgtgaatgtaatcactgctgaagtcccgtgggggagatagacaccaaacacacccaccagaaaatgaacacaatcatatcagaggag

SEQ ID NO: 139639 - DNA, 394 bp, Homo sapiens
ggtgaagagggctgccgttcctcagtgtccacggggtttgtggccagaggagaactcctgccttgctgctgaggggatagctgcaatggtgactgatcttcctgcccacttcctcctgagcaagctgcattgaagacacgacccattcccactctaacggatggagttagtcaagagcggagagcagagagggctggactaaatgtccctttccttcctacctgctggtgaagtactgtgttgaatacaatgaaatcctagaagtatatagaaatagcagaaaatttaatccaaagctaattctgcttcacctttttaaaaatttggaaatcctgtaatatatttctgtaataaattaaatagcacagacagtgactttcaggcaaaattctgc

SEQ ID NO: 139640 - DNA, 683 bp, Homo sapiens
tgatgagtgcctataatatgccagccagtggaaatacctggaaggttactgaaaggcaacaatcagacaaaaaataaagaataccgtaggtaaatgctacagtagagctgagaacaaggtacaatgatgtcagaaaaaaggtataatcaaatctctttgtggaattggggaaggttatacaaaggagaagactgaactgggtgctggaataatttttcttgatgcttaggtaggggtagggagacagggaagtaacagaggtactggacatgccaggcagaagaaacagcagtacaggacatggaagcaaacaacatggcaagtctggggctctataaatatttcagtatggcttggtaagtagacttggcaatgggaaaggcgtaatgggagatagagtaggaaaggcctaatcacagaaggccttctattcctgataaggactttgatcttgattctatgggcaaattagaagctactctgtaaatattattacaatgaattgaatttaggttaaggagattagccttggtagtatgggtatgcttcatccaatcagttgaaggcctcaagagcaaaaactgaggtttcctggagaagaaaccctgcctgagtttccagcccgttggcctgctttacaggtatcagacttgccagcctgccagcccctacaatcacgagtg

SEQ ID NO: 139641 - DNA, 512 bp, Homo sapiens
tgctgcaaccctgcaacctccgcctcccaggttcaagtgattctcctggctcagcttccagagtagttggaattacaggcacgtaatttggatttggaggcagggtaagagtatggcatcactaccgggtttctagttagattatctggtagatagtaactattcactgataaagaagtgcaggaacaggcctaggcccaagagaggtgactaagaaatttgagcacaattagatgtgtctcgagttactggaaagttggatttggaaatctgtccatgtacatgtattctgaagctccagtgagaggtcaaggcaatagattaaactccaagaaagttgggaaacaggaacaacaacgataaatccacaggagagaagattcaaggaggggaatggttcacagtaccagatacagcagagtgtgagacaggtgattgagatgtgtccccagtattttgcaatatgatggtcctttgccaggcaatttcaaaggaaccatggaggggaacat

SEQ ID NO: 139642 - DNA, 530 bp, Homo sapiens
ttggtgcttggtgatcaagatttttacaagatttagtcaagtagagtgagtcttcatgtatactctaatagtgcttatttttgatgtgtatatgtatagtggatcctaattgcatgttatgtgtacatacgtactcctatgtatgtcttgagagagcagggagggaagagtgtatctgtgtatgttgggattttaaagaaggagaaaggatttgggggagggaaaaggaaccagtttgttgtacattgttttaccagcaggctcagtttactttgtttttgtgtgtgtgtgtgttgatcaaggagattcaaagaatgaggaaaaataggatgttctttcttagattctagtaaacaagtatacaccagatatactagtgtatacttgtctattcttagtttgcaaaatctcctttggaatatggttttactgcgtttatccaaggacttacagtaagacactttcagaaccaagtgaaggaggttgtttcacatacaagaataaggcagtgcagcagaggccagaatcag

SEQ ID NO: 139643 - DNA, 281 bp, Homo sapiens
ggattcctctggaccttgtctaccccttcctcatgcagggctgtgtcttgatttgcctccgtggtcccactgtccagcacaacagctggcctggaggaaaggctggcagattaagtggacccgaggcccctggcttcatatccatgactgaggtgaggcaacggaggtccattttatggatgggcaaactgactttccacatgcttcctgcttgggggcctagctgctttcaaaagccctatctcctgaggccacctttgccccagaagatgtcctggggg

SEQ ID NO: 139644 - DNA, 429 bp, Homo sapiens
aaaaagacagaggttcacttgctgcttcttttttctctttatcaattatttgatttagtcaaattttctattcaagaaaatcccatgtatacagttacagcggggttttctaaatgtgtaattatgtgtcaaagtagactagtcctgctatctaaacaacggttctggagaatgttctcataatgtttgttcattaatcaacctaattctcactctcagtcttccaagtggcatatgagctgggaaactaattcagccatataccatgtgaacttctgaaccagatcaacataaagaaattgctaaagaaataagttttagattctagattctttttactatagtcatttagagatgaattacatttatttaatgatagaatgggaatacaatgggagggaagcaatgactgagatgagccacaaaaac

SEQ ID NO: 139645 - DNA, 340 bp, Homo sapiens
gtctgagctgagatgtgtgggaagggcagaattaactaggtgaggaggtggaggaagagagacccgtggagagggagcagcctgtgcagggttctgaacgcacagggttgccaggacctgaggcaaaatgaggaaggtggtgtcctcctgtcctgggctgtggtcagaggggactgatgagcacggtgtctttttgggagaggatgggagtcattttaccgacggagaaactgaggccaagagaaaggaagagcctttcctgggcttcaggcagagctgagactagaaactgaggctcaggatacttagcctggaggatgtgtgtgtgtatttgtacgtg

SEQ ID NO: 139646 - DNA, 600 bp, Homo sapiens
gctttaacgaaataatgacctatgaaaattaagcgtaagacaatataaggaagggtaagaagggagatccaaagaagaaagcaaattgttaacatgtgaatgttttcactgggagtaatgtttccaaaaaagttttttgaatttgatttattaggttggtgcaaaattaattgcggtttttgaaggtagggaattttcagcaaattaggatattatttcttgcagatgacatttatttgtttcatattacaatatttttatgaatagtaatgatcactaattctaatgaagatgacacggatgaagtgcttggcatatttcaaaatagtaaaggtgaaaactggaatctgtaaatggaaacatttaaaaaccatcctctgtccaatttgttgaagttgaaaagacaaacaatatgacaagactatatataagatgcactaggtgtgggttttggtggatggggggcatagaaaccaaatggaaaactcagggatagaaggaaagaactctgatcaaagacaagggaaaaggtgacaatattgaaaagggttactttgccttttcccagtgttatagtggctttccaattctcttctctga

SEQ ID NO: 139647 - DNA, 162 bp, Homo sapiens
gtttgcaccttttcatgtgtttattgcctgtctgatttcctcttctactacctgttgatatccgctgtccaatttgaaactggacatgagtttttaatttttcttatcagtttgtagagttcttaaaaatatataagaacattaagtcattgatgtcacatg

SEQ ID NO: 139648 - DNA, 177 bp, Homo sapiens
tagaggggcttccatattccaatttcaaaggattccaacaaagaccaaagtctaaggtcataaaaatgacatattccttaatagaatcaaaatacatcattacacagcaatgaaaatgctaaacagcaaagcctgagtttattctacacatcaaagctttcatgcaggttttttttt

SEQ ID NO: 139649 - DNA, 268 bp, Homo sapiens
gtggcacgcgcctgtaatctcagctactctggaggctaaggcaggagaattgcttaaacctggggaggacagaggttgcagtgagccaagatggtgccagtgcacttcaacctgggtgacagagcaaagactccgtctggtggagggggaaaaaaagccattctaccctgactcctaaagctttatttgacccttcctgttagtcaatgttagttcttttcccatcccctctttaaaaaaagaacagctttcaccacctttgcgggat

SEQ ID NO: 139650 - DNA, 381 bp, Homo sapiens
catcatcagtgtctgtgaaatttattacagcaatatgtagagaatggtgcaattattattataggtcttactgtattaccaaacccagtaagattgtacgcgaggaacggtgagctcacgtgtggtgtccgtgttcatctcctccaacaagaatgtgtgttgagaaaagagccaccttagcaggaagcatcacaggcttctctattgatcgggctctgtttaagcaataagagaatgtcttctttcagtgacaaataaaattcttgaagagaggagaatatgatgtgaactctgaggggttagtgaagctgcctgtcttgtgtgcctgtggcctaattaaaagttagaaaaatacagccaaggaaattaaattttaaagca

SEQ ID NO: 139651 - DNA, 753 bp, Homo sapiens
caacaacaacaacaaaaacttgtggtgcaggttctaagacccagggtgtcttccagataagaatccacaagtgactcgttgacttgcaccgtcctctgaggttatcagctcattacttccattagtaatgtgcccaggagtgaaggctgaagtcaccattgcagatgcttaggtcaactattttaattcattgattactagttgttaaaaaaatcatagcagccacctcctagtgctgttgttaggattaaacaatcccatggacaaggtttcaaacagccccaggcacaggctatgggctcaatgatcatcagctgctggagtccctgcaacacggtgggccacaggatagagcattaaagggcctggtagaaactggaaagacctgggtctccttggcgtagcagatggcctaggggcaggaccaggtccttgcagcaggtgtggcaggtgccgcgtgcatactggaggaagaaaggactacgtctttgcaccacagcatacttccacgttcagccacaggcattcacgcttttgacaagccatcaaatggcttttctatagcaagcttcattaaaatggaagcacattgctctagtatgcagatggggccactttattactttttaatttgtttacggaaagcccatgtttggtgtacaccatctttgcaaatagtaacaaatgggcatgtttgctgcctccaaagctgtggtgtccctggataaatagaccgaaaccatgttggagcac

SEQ ID NO: 139652 - DNA, 271 bp, Homo sapiens
aaacctctaccaatgtctgcatataattactcaggaaagaaatgacaaggttgcagcgaagctaaccaatttcccagcaaaactcaacttgagaccatgtttaccaatcttcagtctgtcaagtaaattctaagtatccttcctggggatcccatccaagtcacttctggactctgtggtctatatagccagtaaaaacactgcagacatacataaacactgcctggatattctttgcaaatgtttgtaaaggctcctagacaaagaaact

SEQ ID NO: 139653 - DNA, 1527 bp, Homo sapiens
cagagatccccttacttctatatacttcactgttctatatatttccatccttaaagtgcaccaaatcaaagaagacgacattcccagatagaaaaggaagcaaacgttttttgagaatggagacaaaaactattttgcacatcataatttttccattagcaagcacaatgccagaaacactgtaagttctaaagaaattaataatgaatggtgatatagcaccatcacacaagaaactaagatctagaaaagttaagtgactttaatgaattttaaaaattgtgatacacaaacacaacgcacacacacacaaatagaatattattcagcctctgtaaaggacatactgccatttgtgacaatacagatgaacctggaggatattatgctaagtgaaataagccagacactgaaagacaaagactgtatgatctcagtcatatgcagaatcttaaatgtaaaagttgaataactagaaacagagagtaggatagtgattcagtgggagggagaggaggaaataggaagaagcaggctaaagggtatacaaatttgcagttagataggctgcataagtctagggatataatatacagaatgaggattatagttagtaatattgtattgtgtactgaaaatttgtcaagagagtagatttctacagtttttatcacacacacccatgaatatgttaatttgtttgactgctataatcatttcactatgtatatgtatatcaaaacatcatgtataccttcaaacatcttgtaccccttaaattgatacaatataaaatttttttaaagttaggtgacttgcttataattcattagtttattcaacagtatttgttgagcatgtactgtgtgctgtgtacgctgagttaggttgcagtgggtagagcaatgaataagatacactagatccctgatccctgcctcgttaatatgctagacacaaaaggacaaatattgtagcgttccatttatataagtatctacaaaaagcaaactcatggagtcagaaagccacattagagggctgggggaataggagagctatattgcttaatgattacagtttccgttggggtgatgaaaaagttttggaaataggtggtgacaaccattatatatcattgtgtatgtaatcaatgtcactgaattttacacttaaacatggtttaaatggcaaatttgagttgtacactttaaatgggtgaattgtatgttatgtgaatcatatctcaataaagctgttttaataaaagaaaaagaaagatccctgtctcgttaagcttataacctgatgggaagagacatacaataaacagagaaagtcattttagattgcaataagtgctgtgatggaaattaattaggtgatataatagaaaataagtggaaaaggacctactttagattaaattgtcaaataacccttattgaggaagtgactgttgagcttagatatgaatgatgacaaggaactagccatgcaaccagctaaggaacagaaagttcctga

SEQ ID NO: 139654 - DNA, 202 bp, Homo sapiens
caactggttagatactactactgtcaaaaatttcacaagtgaggaaataaccaatatacttaattactggttttagtaccaccatcacttaatactttaaaatgaaaagttaaaaaactaaaattgagtaaatgtattttgagaaaatatgagcaatagtgattcaaattaacagtcacatttattatatacatctctctac

SEQ ID NO: 139655 - DNA, 452 bp, Homo sapiens
ctccaccctcaagcacagggagagactttctctggaatttccttacctgaccaagaaggcttctttccaaaagaaactcggaaatctcattatctatcccacaaaagaagactgaggacagcaatcacacctggacagacttgtgcacaagataatgccttcctcattcaggctccaaagagaatcatttgcaagttaatttctgtccattctttctcccaaataatcatttgctgccccgtcaaaagaactgtctacatcccctatctccctctcccctgtgaaatagggtacataaccttctgtgttgcattaggctactgggtcatctttctcctgctatttattccccggtgctatgcacgtcaaaattttaatgtcttttctcctgttgacagctgattttcagggaaacttcaaagggtgaaagggaagctttcccttggccccta

SEQ ID NO: 139656 - DNA, 431 bp, Homo sapiens
gttctataagcctctacatttcactttctctttttcaaagatacttaagcctaaactgggtgcagtggctcatgcctataatcccaacactttgggaggctaaggtgggaggatcactgtaggccaggagttcgaaaccagcccaggcaacacaaggagaccccaactctataaaaaatttttaaaaatagccaggtgtggtagtagtcccagctactcagtaggttgaggctggaagatcacttgagcctgggaggtagaggctgcagcgggccatgaatgtgctaccgcactctagcctgggtgacagagactctatacccgtaaaaacaacagtaaggccaggagcggtggctcacgcctgtaatcccagcactttgggaggccaaggtggatggatcacctgaggtgaggagttcgaaaccagcctg

SEQ ID NO: 139657 - DNA, 447 bp, Homo sapiens
ggaatccgtgaggataactagaaaatgtccttgattcagggcaggggactgtcagatttcctgagcgggagcctggcctgagcaggagctgggccccaccccttctgggctctgcagggatcccagtgtggaccagcttcgagcaggaggcacagcaggggcttggcctacttttactccctgaaaaatataaacatctcctggagagctacagatacctgatgaaagcaagaaggactcagggtgctgcactgaaaggagggcaccagtcttatcccctgacatcgggggccgcctttgagcagagacctcagggcgtctctgaaggcgaaaggccaagtcacagaaaccacggctttccagagatagttggagctacaaatcacagaccgcctcagtgtgcacacagctccctcccctgtgccatcaggcacagaaatcattatc

SEQ ID NO: 139658 - DNA, 253 bp, Homo sapiens
cttctgacctactgactataagttgggattcccacaaatacctgtttgggttccattaatttgccacagtgactcacagaactcaggggaaaatgattaccagtttacttaaaaggatatcacaaaggatacagatgaaaagggcaaggtacagaggaaggggtatagagcttccatgccagtactttgcttccttggcctctgggcacgggcccaggatttggacagcaataataatcgccggtcacgagat

SEQ ID NO: 139659 - DNA, 291 bp, Homo sapiens
cgtgcaggtgtctgtgtgtgagtgtgggtagagaagagtgtgtgtgtggcgggtgaaggtgtgaggaggatgagaagaaccaaccttcagcgctcactgcatgtcagtgcttgtcactgtcatcttgtaatcccacattttacagatttacattttataggaaactgaggcacaaagaggctactcagccagcaggtgatagagatgggatttacacccaggtggtttggctccagtgtgtacacacttaacactaggccacgccataagctatgtgtgtgagtgtgcaag

SEQ ID NO: 139660 - DNA, 514 bp, Homo sapiens
tttttctacaatgataatccttaagtagatagctaacattgtccttagattaaaccagttttttcatatgtggttcttacataccacctccttcagaattataggggagcttatttaaaaattaattatccacttcatgaataactttaaggtggcatccacacatccacattcttacagatactgaggtctgatgaccaaattaattcatctttcttaaatttcagatacccgagtaatgctttggcaagtattcccagttatgacgggattctaggttcagcctaaagtcctgatgaagttggtgttctataaataacagaagtacaggaagcagagttgacattcagttgaagaacttttcactgtagaagggattttgtttttccttagaacacaaacaaaaatgctctcagtcttccaaatgcctcctttatgcatccagaaaagttttcagttgtgacccaaaaagttgacattagaaagcaagaatggggagtgaggttagcaaaaa

SEQ ID NO: 139661 - DNA, 133 bp, Homo sapiens
atgaatggaaaaaggtctcaagatagtgggatttaaggctggacacactggctcatgcctgtaatcccaacactttgggaggcaaggacaggaggattgttcaaccccaggagaccagcctgagcaacacagt

SEQ ID NO: 139662 - DNA, 106 bp, Homo sapiens
ggaaaaaaaatcatgtaggcactccataaattttgaatggctggctggcaagacaaatggataaatgacaaattatgcaacttggggttgcttacaacacaacagg

SEQ ID NO: 139663 - DNA, 455 bp, Homo sapiens
gcccaccgtccacgagagaatcacagactaaatgctatcgatatcacaggttgcttcatctgctcagcaaaggagcgcaggcatacagagagttaaccttcgtggcaaacatgctttatctataggaactagattataatatgactatactatctccctcaaagttcttccactcgagtgggtggggcgataggcacggaaaccttcctcttctcgtgaggtttatgtcacgagaatgtatgattatctagattaaggtcgtgactaatgtagctagggtcatctttcaaggtataaaaggtagtctgaggccaggtgcagtggctcatgcctgtaatcccagcactttgggaggccaaggcaggtgcatcacttgagctgaggagttcaagaccagcctcggcaacatggcgaaaccccatctctaccaaaaaataaaaaaaattagctgggca

SEQ ID NO: 139664 - DNA, 394 bp, Homo sapiens
aactgtgtatgtttgatagtttaaatttatttcccacacataatatcttgatgaaattattctttttcagtttttgtacagtgaacttgtgtggtaacctttctcttttttcggataggtcaaagacttttccctcataaaatctgaaaacttgaacaagctagggttaggtatgtagaattgtttagaaagcagaacttcttttcttaaaaatatttttagagcgctggtgcttaattggcattatattgccacccttaataatacagatggggaggccaggcacagtgactcaatgcctgtaatcccagtcctttgggaggccgagatgggaggattgcttcagcccaggaattcgagcccagccctggcaacatagggagaacccatctct

SEQ ID NO: 139665 - DNA, 292 bp, Homo sapiens
tcggataggagaaccagagcaggagatggaggagacccttgcagtgagctggaggaagaggaggagtgggctctggaagtgaagatgctccaagaaagatcatggaacagagcaggaaagaggcacaaaaggcagcttctcaaaccctgagcttttatccactgaaagaaggcaaaggctccttccactttctgcttctacttgggatgtgggctgacaagcacctgacccctggaactcctgcactcaccatagtgtacatcccacattagtgcatctgatacagtattca

SEQ ID NO: 139666 - DNA, 1150 bp, Homo sapiens
gttagtttcgctcttttatatcttgctgatgctgttaggtttctctgtttcaaaggtcagcattctgctaattaacagaagaatgtttttattaaggtgaatgaacagttttattttacagttttgaatagagcttaattgtggacacaaatattcagattctgcttgcctacttttttaaattaaaaaatgtatatccatttattttatgggataggtggtaggttccagaatggagtgataagggcatacaatttattcatcagggattttacattatatcatcacagccagatactgaaagcatttaaaattttactcttttttaagatgctttaatttttcttcatttatatttgctatttgattttctatacatcatgaggcctcagatgttactcaaaggctaataatgttttaaacattctatatcttaatttaactgtgaatgatttactttaatttcatatttaaccaccaaataagagtgttgttaaggtataatttttttgtgtgtgttagagcttgtcaaaatataaatatcattttcaacttttaagttacctgatcgtatctctctgtaactggcaagtattttattggaaagtatctttaattccaccttgaatttgtgattaaaaaatacaaccctgttgagtacttttgagaagaattgaattttatcttgagcatgtctttctatactcagtttaatttgtttttataaaatatacaatttattaacttgtttaatattcactataccaaagaggtatctaatacccatgggttatgtagtcatgatggggatacaaatactttcttgcactattttagtatagattatatatttgagcatatttgaatatgcactaagcaacttaaaaaattcatttgcagatcacgattaagtcttagaattatttttctaacttcctaatttttgagtaggttgtattttggtagacagcatattgtaattgtatgtaaatttgtacacaattgtgtgtaaattgtgtataaatcttatatgctttgtctttttagcagtattgtaatacattttcagtgttggtgtttatgaagcgatagtgtattattgcaaatggttaactatttggatgcaataaatttttgtaaaccttttttc

SEQ ID NO: 139667 - DNA, 315 bp, Homo sapiens
ttaaacttttgccaagtaagtaggtagcatctgcatttggtttgcaaagtatctgttggaggtagataagagttgttcctatagaaaaactgtactaatgccagaactttaccatagccaagtgaggtagttgtgccaattaacccgaaaggtaatttggaatacaagcatcaaatgtattataacttgatataatagttttgctgttttagaagttataaggcacgttaagcagtcttcacataggtcctgtcctccacctcttgcccattcttacctcatctaacatcccccaagaagccgcagattttttgc

SEQ ID NO: 139668 - DNA, 297 bp, Homo sapiens
tcattgtattcattttttttctcccttcttcaaagaactaagttcatctcaaactatcattgattccacatctaaggaagtcttccctaccatgtcaagctataaaatataaggcacattaacaagaagcctctcaaagtccactgatcttccccattaaaagtaccaccactctgccaatttgtttttcataactttctagatccactgccagtaccttattcaggaccaaagtcccaaagggaatcttttgtaaggaaaagaaccttacaaaaaggaccaattttgaagtcttcc

SEQ ID NO: 139669 - DNA, 236 bp, Homo sapiens
atataagcgcgggtcattccgttcacttcagggtctgacttcctgaaatttcccctctcttccctcgaactaactcaaaatgccgctcacttgcaccactgggcatctctcttgtcccctgtcatgtgtcgtgtctcatcattgtgcatttccagataacccttcttctgcctaaacggctcaagcacagacttttctgctgtccccatcactgacttatttttgagtacagatcc

SEQ ID NO: 139670 - DNA, 453 bp, Homo sapiens
ctgttgcctacaagaaacaaacttcacctacacggacacatatagacggagaataaagagatggaaaaagatattccatgccaactgaaacaagaaaacaaacaaaaaagagcaggaatagctatacttatagtggaaaaatagacttcaagacagaaaactctgagagacaaagaaagtcaccatataatgataaagggatcaattcggcaaaaagatacaacaattttaaatatatctgccctcaacactggaacatcaagatatacaaagcaaatattattagagctaaagagaaagataaaccccaacacaataataccttcaaacccccactgtgagcactggacagaccttctagacaaaaaaatcaacaaagaaacatcagacttaatctgcatcatagacctaatggacctcatagatatttacagaatatttcatccaatggct

SEQ ID NO: 139671 - DNA, 423 bp, Homo sapiens
cattcgctggtgtgttattttcccccgtcaaattctatcacagtagtacacaatacacagggggagaaactggcagattaatctgtgagaggaaaagctgagtactgtggctattcaataagtcttcatcaacataccacataaatccaaactgcggcccaccaaaaaggccctcgaccattaggaaaatcatactctaatatatgcaaatacaagacacatactgacttaattagaactgtttttccacatgtacgtaaaggtaacatgcacatatacgtgtctatttgtatatacatgcacacatagccatctccgacactggggtcatactttttccacttgtttttatgtttctgagtataacagactacgtggaattaaatcaatgctttgaattaagagctgtgattaaaacacagt

SEQ ID NO: 139672 - DNA, 361 bp, Homo sapiens
acaatacctaaatgctagtaaaaaggggaaaaggtgcgtaacctcattagtaatcagggaagtacaaaacacctacatacatacacacacagacacaatgagatgccattatgcacctatcagaatggctgaagtaataaaatagattgacaatacctagtgttcactgacaaggatgtaaaggaaatgaaactctcatacactgctagtgggagaaagatcagcacagccacttcagaaaatgggccatacctactaaagttaaatatatgcaatttgtttcatagggatatacccaacagaaatgcattctgatatgcatcaaaagacacacacaagaacatttgcagcagcattattc

SEQ ID NO: 139673 - DNA, 686 bp, Homo sapiens
tctgacaatgcttcagaagttgtagtccaagcacacacaaatagtgccaggagtcgagtttccaataacttctggctaaaagcctcagagtcagtcagcctttcccagtttctcatgcaaaacgtttaaaattaacaaaagccacctcaaactacaattttcagaatctgggaactcttatatccaagagcaagatggatacacttggattgaaaaatgcagccaagacccacaaatgccaagtccttgccacagaacaagctgtccagctggaagaaactagaggaatccccaaaccatttgtcctctgactcaagaacaccagaattataccaagacaaaactgtgcagctatcactgttctgcacaggtgtaccgccttgtgaagtgatccgggagacttctgtgttaccaaaccctcctcacatacactcactcccactaaaacatctccttctatacaaattagaaactgaggctcccagaaaacaacttgaaaggaatgtagagaaacttatgattgtcagatttagcaaataaaaatacaaggatgcccagttgaacttgaatttcatacaaactacaagtaatttttaatataagtatgtcccaagtcttaaaagaggactacaaataatttgttagtgtgagtgtgcccgtaagtatttgggacatactcacactaa

SEQ ID NO: 139674 - DNA, 304 bp, Homo sapiens
agcaacccgtgtctttcatattctccaggcactcaactataagccagcgtctctcacgtcccttcagtccactgctgattcagccacggcagagtagaagttctgtgtcccacacactgccttcgcgtgcactgttttgctctgagatgacctgaatgtagacaaaggcacaatgggacctcatgagggcggctgcctggcttggtagccactggtgggcacctgtggcacacaccgcagcttccccactcgtatcctctgggctgcctgggttcacctgcatagaattatgggcggctcccgg

SEQ ID NO: 139675 - DNA, 481 bp, Homo sapiens
  misc_feature (438)..(438): n is a, c, g, or t
aaggagaaggtaggctacagttgggcaaagacctcagggagagaaagaatgatatctgagggaaaagagtactgggcagaaagaagagcaagtacaaaggatttgaatcaatgatgcccacatgccacatccaagaggctagcaaaaacaatgacctctccaattcctgtcttttaggatgaagcctgaggcaattctttttgagttcagtattctaacacgtctgaagaagaaaagttgcagccgctagcccatattgtgtctctgtgtgagttggaaaaaaggcaaatcttcctccaggtgaatggttccctattcaaggcacacagctagacgaatggaatgtgggctgaatttcaggccccactcactgccttaagccaggtggacttgcagagggcacaacttgcatggcattatgcaaaagccccaggcaancgtggactagtagccaaccgtggactagtagccaaccgtggac

SEQ ID NO: 139676 - DNA, 201 bp, Homo sapiens
gagaaaacttgggagtcaagtaacagcgtttgtgggaacagaaaagtttcatgatggccaagtactagtagagaagagccgatgtcaggatctcgaaaaactactaactactcagcatatgtcaaaatgaacagaaagacgggggatgggaggacagatatcaacgaattgtctctgttaatcaatcagtaatcgatctgt

SEQ ID NO: 139677 - DNA, 322 bp, Homo sapiens
attatcatattttctaatgacagaagaaaaaatgtaaagtgttatggtagatattttttgacacatgtaatggctgaaaattttaatatgaatttcaaaaccaaacattttcacatcaagaatatttcaaaattaaaatcatgctttatttctgacaaacatacatgcactatggggcagtcaccttgcagagcatatcaaacgcacgtggtgagcagcatccaatacaggtgaatacagatagtcaggcctggagctgggccaccagagacaccctccctgcttccttgtcctctcattgtaagtgggttgcaccttgtgg

SEQ ID NO: 139678 - DNA, 324 bp, Homo sapiens
gtccactctataggatcccccacaccacctgagtccgtgaaacacattttccttgaaagggtggttagttagttttgctttgggtatgtaattgtaacttttctcattaattgggacaagaaccctgataagaagagcacattaaattgctctgatcatattttctggtgtgactgaagccttgctgtgatgcagggctatttagaaggcaaggacatagatggaatttaaagtactcaaaaatgtacttgattagaattaatgagaatgaaaagagaattgagttaaatagcttcactagctattggacttgaatttctgtaa

SEQ ID NO: 139679 - DNA, 293 bp, Homo sapiens
gcagggaccctgagggaaggcacgttcctgtccccagaaggtgcatgtgaaattgttcggcacatgcatttggggaccccgttccggaatgccctgcgagaggcctttccgcagagctcaatactctcatcagagatgagaccccccgcacctgccagagaggaagatggggcggcacatacacaggggaactcctccatccccaccaagggatgtgcttgcagaaacacacagcagccatgagggcaagcccaggcacaggtgaactcagactaacacaacacggtgggctc

SEQ ID NO: 139680 - DNA, 177 bp, Homo sapiens
ctgaccttaagtgatccgcccgcctcagcctcctaaagtgctgggattacaggtgtgagccaccatgcctgatcaaaagtatttaaatcagaacaaagacatattatatgtacttttaacataaatatattgttgaacattatcattggtcagtagcatgggtattgaaataagcag

SEQ ID NO: 139681 - DNA, 165 bp, Homo sapiens
ctaaaaatttgcctctcctatacgtagttttatatttaaatactctattttcttgacagctacaaacctgggaaaattatggaagtggtcagaatttatttatggttattataaagattatctagatatatgtgcaagaataaaaaccttattgtttttgttctt

SEQ ID NO: 139682 - DNA, 302 bp, Homo sapiens
agtttctccacatgtctccagtgccatctctctcataaatcaagttctcacatcagtgtgcgcttattcatagatcacatatttgtgccaatgttaaagctgccagtatcccactaatatcttaattactacatattcagaatgatttttgatatgtgatgaatctttatgttctgtcccacttcagaaacatcttggtaattcctgggccattgctttaccataaaaattttggaatcagcttgtcaaattctacaaatgttgactttttttggtactgcatttaatctatagatcaattt

SEQ ID NO: 139683 - DNA, 390 bp, Homo sapiens
ttctgggatccagaatttgtttcagcacctccagagtctgtcctgttctatgaagaaagtggcattaggcccatttcataggttgggaaactgaggcagcagggagtgggctttgatcaggtggtcctttttctgtgatcccctttttgggactgtggtgaattccctgtcttggccacaccaagcctcaaaccctgtgggttgtttctgattacacaggtttgggggtcacacctgggtgcatgcagtgtggggtacaggttctgttactctgtgcagaaatcgtcctcataaaggaagagttgaagtggggctggcagcaggggatggacccctaggatgaccctggaggtgatgggcaactgggtcagctgtgtgggttaaagtcct

SEQ ID NO: 139684 - DNA, 289 bp, Homo sapiens
gttagatttggctgcaagtaaaacttcaaattactgtgactcaaaaaggttggaggttgtaggtgcagatctttctaccttgttgctccaccacatctgactttcattttaaaaccacctcaacaaccaagatggctgctggagcgctagtcatccgttccagccagaaggaaagagtgagcaagagggagaagaaagtatgtctctttttaaggatatcacttggaatttgcacccctcattcccacttacattccttaggatggaacacatttacagagccacagct

SEQ ID NO: 139685 - DNA, 421 bp, Homo sapiens
ataaacaaaaagctcattgatagctccagtcatctttggaggattgtctgaagaatatggagcttatctgtttttctaaatgtatttaagatttcctcttggattaagtctgtcagagaggccaggtatggtggctcatgcctgtaacccctgtacttattgggagtccaaggcaggaggatcacttagcctaggagttcaagaccagcctagggaacatagtgggaccctgtgtctacaaaaatcaaaataattagcgaagcttggtggcacatgcctgtagtcctggctacccaggaggctaaggttggaggattgcttgaggccaggaggttgaggctgcagtgagccatgattacatgactccactccagcctggatgacagagtgagaccttaaagaaaaaaaaaaaaagcaacac

SEQ ID NO: 139686 - DNA, 209 bp, Homo sapiens
atctacattccttctacctagcctttgctgccccctggtccttcttggagtcctgtgctgggtcacctgtgttctggtggccaaagagagagatgagagtgtgggtgggggattacatcggatgttttggggaccgcatctgaaatggcacacatcattttggtccatattttactggctagaagtagtcctggattcgaggagctggg

SEQ ID NO: 139687 - DNA, 550 bp, Homo sapiens
cttgaaaatctgaagtgcagagtctcgtttaaatatctaaatcgggtatgggtgagactcaagttatgattcaccttgaggcaaattgctctccagctgtgaacctgtgagatcaaacaggttatgtgctcatatatataaggcactcattaaccatttgctgaaagaatggaacctcatggcaaactaatctaactgacttttaagattacagtaaaatattggtctcagcattcaataattatcaacagttggtagtactgatgatttttggtgtacacaaggaaagccctaaatggattctagatttacctgcaacttctggtagtgaattcttgttctctctaacagaaatggctttagccttatccttatatttgagtgcttctgggctgttactttgaagggcagaggtgatttgattcatcaaagcactaacgtaatgagtgggagaggatgaatcagcagacagtgtgctggagaaatactctgccaggcaaaccaaaatcttgcttctctgctccttcactccctccttgatgctggactt

SEQ ID NO: 139688 - DNA, 177 bp, Homo sapiens
gtattattccatttatgtcaaatgtctagaataggcaaatagagagtgacagaatgtacatttgtagttgcttgggactgggctagggagttactgctaaggcatgtgaggttttagaatggacaaacattttctaaagttaaattgtgatggttgcacaaccctataaatacacta

SEQ ID NO: 139689 - DNA, 254 bp, Homo sapiens
tattatatttacagacaaagatagtaacatttgttccaggagaagatgccaagaagcaaaaaactattgccaagagaagtaattgcttattcctagttagtaaaagtgacatattctgagttgatgctttaacttttccacacccctagataagaagagcttcaggtgctggacttatgcaggggggctggtcaggattgaagaagaaccaagcagatacttagctgaaggggttgggcagaggacagagtgca

SEQ ID NO: 139690 - DNA, 181 bp, Homo sapiens
agatagcaatgtcaaaattccccacctcccttcactatgcttccatgccctccaagcagtcttccaagggctaattcaactttccaggtacctcagtactggaaaggtggtgtggtaaatagagaacagaatgatccttgccacagggaagtggtaaattgacatttcaaaatcaatcttg

SEQ ID NO: 139691 - DNA, 373 bp, Homo sapiens
tgaaggtgacgtgggcggctctctcaacaggtaatcctgggggtattttagctagagcaaagcctgtgtctggccactagtgggcacaaactgctcagtaagtggaaggaatcttcatgtcaaggtattccagctaactttgatacagttattcaatgaactgcattcctaattaagaggctttgtggcaggcacagagctagtttgtcagggtctagttctgcactttgacatccatattcttgctctgctagtgagtttttggacttctaaagggaataacacgcagccactgaggtacctgaggttactggataatagtaagctgtctgaggcttttttatacccttgttggaaaactctagaaacaggg

SEQ ID NO: 139692 - DNA, 301 bp, Homo sapiens
agagcctacgttaggttattatgaccattctaagaagaacacagtatttgcacaattgcttttgttttttctgacccttttttcctccttctcacacagcgtgccttagaagacagcaaaggccaggaagaaatgtaccctggacaggagaaaagtagaaagaaggtggaacaacttgctgaggggcatcagctcctgggtggcctggcactgaaccccaggctgcctttcagataaatccaggtgggccctatgcacccccaatacaagtatgtgtagtgcatctttaccatctgaaatg

SEQ ID NO: 139693 - DNA, 396 bp, Homo sapiens
cctgcaaccccctcctaccttaagtatggacccttctcttgcacctctgggtgcaatgtggggagcagctggggactgggaggatgaagcctgaaagcctgaggcttggaaccagtaggaaggcctgggcagggtttgggaaagaactggcaaaatttcatacagatgaggtcaggtggtggggacaagggataatgctggactgggcaccagcgtgcgtgtgacactgttaacatgatagggggagactgcttggggaaaatagttgcttggggaaacaccagaggaagatacccctcaagcactaaatggaggccaagcaaggtggctcatgcctgtaatcccagcacttggggaggtcaaggtgggcagattacttgaggccaagagttcaag

SEQ ID NO: 139694 - DNA, 221 bp, Homo sapiens
tgagaggcctgcctttctccatctcttgggaccaaggagctgacaaacagtactttactaaacagcaccgccaccctccacacacacgcatgcacacacaacatgctcattcacgcgggtcatgctcatcaccgcgtgatgagcatgcaagggatcttgtggaaggatgacggagtgcgtgcttcataagaacgctccaacgagtacccagctgattgact

SEQ ID NO: 139695 - DNA, 153 bp, Homo sapiens
tgtgaggtgatctacaggacttatgaattctcctgctgctctcctgctgtagggtctcttgttttcagcctattcagtcacccagcagatgtgggggacccagagtaaagcccaggttctcaccaccctgttttcaaggagcccccatcttgt

SEQ ID NO: 139696 - DNA, 436 bp, Homo sapiens
caagaaccttgagataaggagattacctggattatccaggtgagccctaaatctaatgacagttgtcctgcaagaggcacagaaggggaagcaacgtgactatggaggcagaaattggagtgttacaaccacaagccttggaatgctgataaccactagaagttataagaggcaaggaacagaatctcttctagtgcctctggagggagtgtggccctcccaacatgttgattttgggcttctggtcttcaaaactatgagagaataaatttttgttaagttaccaagttttttagtaatttgttgcaccagccataggaaacttaaatacctttgtcctctggagtaaaaaggatactctgttttaatctcttatttagaactagtcattgctaaaataatgtaagagggatgctgccaatgttagttttctgcg

SEQ ID NO: 139697 - DNA, 189 bp, Homo sapiens
gccagggaatcggtgatgttctgagctagttctttctgcacttagaacttgattctagaaagagattgttaaaattggaaaatctggccgggtgcagtgatttatgcgtgtaatcccagcactttgggaggccgagtcaggaggatcacttgaggctagacgggatggctcacgcctgtaatcccagca

SEQ ID NO: 139698 - DNA, 528 bp, Homo sapiens
agttttttttcctttccttttacataatgcagtgccaatgtcctcttacctggaacagtgcctggcacacagcaagcatcgtaactatttgttgaataattagtgaatacatgactggccgaatgagtgagggccatgcagtgcctctcccattatgtcaggactcttcttggaatgctgactgtgttttgtagagtgcagccctaggaagatgggagacccaggaactggccctgtctctgctgatagctccgtcagcttgaatgaggtctaagccccacggacactctgcataaagaagcatgcatgttgtgtaggtaacggggttggaactgttgtggtcattgcttcatgagggaaactagatagggatagcaccagggatggcaggctggagcctggggagggcggatcacagagaagctctgtgacgtcgtctggggttaggaacccatgaaaagactgaacttcctattaggcagggagaaaatggggagggtctggcttgatgtctcttggagaaatctg

SEQ ID NO: 139699 - DNA, 213 bp, Homo sapiens
gatacctaacacttaacataaaatatacaggtcatgtatgaagaacactgtgctaagttgaataattataaacacatgccatgtttatgataaggaagttcagaaattgtcaagatattaaatctctcagaatctatttgcaattaccttgcaattcaaatacagttcaaatggattttatttttagaccttttggattgctctaaagttcat

SEQ ID NO: 139700 - DNA, 105 bp, Homo sapiens
actttgttcttggttgtccttttcatatcctttcttgtagttcagcatctagagtttttatggttttcctgtgctgtgtaagtttatcataggatttcttggcca

SEQ ID NO: 139701 - DNA, 979 bp, Homo sapiens
ctgctggccaacggcatggaggtggcgctgcagactgagccccacttgctggctggcaccgtcaaccccaccgtgggcaagaggaatgtcacgctgcccatcgacaacggcctcaacctggtggagtggcgccagcgcaaagagcaggctcggggccaggtcactgtctttgggcgccggctgcgggttcacaaccgaaatctcctatctctggactttgatcgcgtaacacgcacagagaagatctatgatgaccaccgcaagttcacccttcggattctgtacgaccaggcggggcggcccagcctctggtcacccagcagcaggctgaatggtgtcaacgtgacatactcccctgggggttacattgctggcatccagaggggcatcatgtctgaaagaatggaatacgaccaggcgggccgcatcacatccaggatcttcgctgatgggaagacatggagctacacatacttagagaagtccatggtgctgctactacacagccagaggcagtatatctttgagttcgacaagaatgaccgcctctcttctgtgacgatgcccaacgtggcgcggcagacactagagaccatccgctcagtgggctactacagaaacatctatcagccccctgagggcaatgcctcagtcatacaggacttcactgaggatgggcacctccttcacaccttctacctgggcactggccgcagggtgatatacaagtatggcaaactgtcaaagctggcagagacgctctatgacaccaccaaggtcagtttcacctatgacgagacggcaggcatgctgaagaccatcaacctacagaatgagggcttcacctgcaccatccgctaccgtcagattgggcccctgattgaccgacagatcttccgcttcactgaggaaggcatggtcaacgcccgttttgactacaactatgacaacagcttccgggtgaccagcatgcaggctg

SEQ ID NO: 139702 - DNA, 357 bp, Homo sapiens
cctcatgctgtcttttttccctccaagtatttgccagttgttggtcatgggaggcgggaagatgagattctgggcagaaggcctaggcagaaagctgctgctaagaagagagatgcctgctgaaatgttggcaatcttaaaggactagaaagacagaaattggagtttagggctaataagtctttggaatttggagtggaagggagcagaaatcctggtcacaagggaggcacagcacatttttgcccaacaaaccgctctttgtctttctagggatttgttgactttttgaattcttaaactgcttttgaagcaaagcagaaaactcccaatgggtaaagcagagttttcttcctt

SEQ ID NO: 139703 - DNA, 251 bp, Homo sapiens
gttatactccttttcctggctataatatttcacttactcccagtcctctggccctagaataaaaatgtgagccacctttagctctcatgcctgcattgacaaatcccaggtttcacctggatatccttacctccccaccaagcttgttttagtttcagacttgccgatctgcacctcaaaccccaaattctcataaatgatagcttttctgcctgcttttcttttgatgcttttccttgaccccaggtgag

SEQ ID NO: 139704 - DNA, 274 bp, Homo sapiens
tgagtgatgacagcaccaataaacactgagactcacctttctgcttggataccaaacctcttcccaccggaatcccgccaagccttcaactctccatccaaaccattcattctttctttcaataaacacggtgccaagtatttactaataagaggtgtcgaacgtgttaagtaagaaggacacaaggaggaaagacagtttctctgccctcaggaaaccatcgggtctcgtggaacagaacagtggtcaccgtcttctggccttttcctctgtg

SEQ ID NO: 139705 - DNA, 297 bp, Homo sapiens
aacatactaggtgcaaagtaaaggtaaggagcaagatttatcaagcaaatggaaaacaaaaaagaacaaaggttgctagtcttatattagatacaacagactataacaatggtcaaaaaggacaaagaagggcattacataatgataaagggttcaattcatccagaagacttaactatcctaaagatacatgcacccaacattggagcatctagattaggaaaacaagttcttagagacctacaaagagacttagataactacataatggaagacttcaacaccccactgatagtg

SEQ ID NO: 139706 - DNA, 402 bp, Homo sapiens
aagaagtggtggccaggcgcggcaccccagccagcttgaagaccctgccctcctgcagccggcaggggcagtcactcccggacttgtccttttagaagttccagctttaccacttgctggtggagcccaaccactgccgcagggtcctcatcgccaacacgcctggcagatccaagaggagatggcccaggatgagacgtggcacacacaggcacccgagagtgtggggttggcgttgttccactgcctggtttctgcagagatcctgtgcctgtggcctgtgcccgccatgtggaagccagagggggtgtgccatgccccccgctttggacactgctgcgtgaaggggccagttttcagacctttgctctgtcacctcagcactggcgccaggagccctga

SEQ ID NO: 139707 - DNA, 402 bp, Homo sapiens
tagcagacacagggtcagtttcacagggctggtttttacattatgcagctcaataaaagtagtgggcttctaagtgtagggtggctctttgatcctcctgcaggtgttaagagctgggtctgagacttctggaagaatgcaggagctgtgactttatgcagacctccctacatgttttcactccagatcaacatgctggtaagtattggagtgaggagcttgggatttctccctgacagtttctggaaggcagtgtttttgagctatgagtttagttcagatacgtgtacttagcagccagttaagctgggctagaaccgacctcttttgtaaatggagggacctggtatgaatatcttctcggtacaccaagtgcctatgtcttggcttctaaagaccatt

SEQ ID NO: 139708 - DNA, 400 bp, Homo sapiens
gtcttgaactcctggactcaagcaatctgactgccgtgtctcccaaagtgctaggattacaggcgtgagccaccgtgcccagcctcattttttaaattagaatactgatccatttgaaatttgctctgacatacggttcgaggagtgtatccagttttatcttttgctaatggctagctggttgtccaataccagttattaagctatttttcctgctggttttatgtatgactgttgtcatgtacaggatcaccatgggcttgggtctgtttctggatcttctcccctgttccattgttcatggggaagaaccacttgattcttgttttttgatatgtgtttttttgtgtgtgtgacagggtctcactctgtcacccaggcaggaatgcagtggcacgtg

SEQ ID NO: 139709 - DNA, 176 bp, Homo sapiens
aataaaatactagcagaccaaatccggcaatatataaaaagaattatataccatctctactaaaaatacaaaagttatttaccatctctactaaaactagttactctggctggacgtggtggcccgtgcctgtaattccagcactttgggaggcctaggagggaggatcacttgag

SEQ ID NO: 139710 - DNA, 356 bp, Homo sapiens
cgcgatctgatggatcccacgcgtcagagtaaccaatggttacataaaagcagaaataacggaaataataggcccttcccaggcaatgcttaatgtcagcatcttgctcattcccccaaattctgataagctttcctgagtgagaaaaaaattagtgacttttaagagcagacatgcctgtaagtcctttttttttttttttttgagatgagagtgtctcattctgttgcccagactagagtgctgtggcatgatctcagctcactgcaacctctgcctcccgggttcaagcaattctcctgcctcagcctcccaagtagtgggattacaggcactcaccaccacgcccggctaat

SEQ ID NO: 139711 - DNA, 290 bp, Homo sapiens
ctgttggtcacacagaccagtcctggtggagtatgggaggagattacacaagattgtgaatatcaggaagtagagatcattgagggccatcttggctggctaccaaattaaatataacacaaattcagaaaactgcataaaacaaatgttcgtcttaatgaatgactatgactatcagaaaatattagagacttcctccttgtgacctactctctgtcatagtcctttggttcttctcataatcactatgtggatttttagtttttttaagtgatgaggtaaaatttatt

SEQ ID NO: 139712 - DNA, 324 bp, Homo sapiens
gagaggcctggatttgcttcgtggagtgacgggaagccgttggagggcgtgtcaggaggagaatgacatagtgtaacttgaaggacctctctgaagggtggaccaccaggaggccagggtggaagcacacagcagtccgcgggaggatgtcacagagccggcaaggacacagctggctccgcaggagggccaggaatggagatgcacggatgtgtcctggagttagaatggacaggacttctggatggattggctttgaagagtgaggggaaggaggaagcaaggagaaccccagggtgcttggcttgagcggctgaggggacg

SEQ ID NO: 139713 - DNA, 139 bp, Homo sapiens
tgtaccatgtcagtacatcgctacttccttttcctttcttcctaggtagtataatacttcctagtattgcatcgttttggagatatcagagtgtgccagttatcaattagctgcataacagattactccataacatagt

SEQ ID NO: 139714 - DNA, 359 bp, Homo sapiens
ggctcccgggacaccgcggaccaacttctagtctctttttctctcctcgaagcgcttatctgcgcgcagccttatctccgagttatctcggcgcaaaggggcgggagccggtagttaggcaggcagagaaacttctttcttgctatctagccaggtctgtgtgtgggcattaattttagtgtggtaatctccgatgagccgaggcgatttggaagagcagcctggaggaggccagcccggctgcatttcacctccctcccccactcgctccgagtctccctgtcattcttcctgctctcccatttggggtcgcctcggctctggggcggtctcacgctcccccctccccagcccgttgc

SEQ ID NO: 139715 - DNA, 587 bp, Homo sapiens
ttggaagcccagggatgattcacagatgatatactggatacattttgcaaccaattttttaaaggtagctaattctactgatacaaccttattttcacatattagaaacaagcacgttgggtaaacatgtggtagcttaaatctgcatgcaatatttgaaatgagaagacaaagcaggaaagattttcttttcttgtcaaaacttgcactttgcaagctgttccgtaaaactgtataaaaccattggctctacagtgtgaaacagtgtatcaaagggaaacaacagaagctcaaatgaatatagtcttttgttaagccacctcaatttttttttttttttgagacagagtctcactctctctcccagcctagagtgcgagtgcagtggcgcgatctcggctcactgcaagccccgccttcagggttcacaccattctcctgcctcagcctccctagtagctgggactacaggcacccgccaccacgcctggctaattttttgtattttttagtagggacggggtttcaccatgttagccaggatggtctcgatctcctgaccttgtgatccgcctgcctcagcctcc

SEQ ID NO: 139716 - DNA, 467 bp, Homo sapiens
ttggaagcccagggatgattcacagatgatatactggatacattttgcaaccaattttttaaaggtagctaattctactgatacaaccttattttcacatattagaaacaagcacgttgggtaaacatgtggtagcttaaatctgcatgcaatatttgaaatgagaagacaaagcaggaaagattttcttttcttgtcaaaacttgcactttgcaagctgttccgtaaaactgtataaaaccattggctctacagtgtgaaacagtgtatcaaagggaaacaacagaagctcaaatgaatatagtcttttgttaagccacctcaaggaaaaagataaagcagttatttttgatccagattctacacaactcctattttctttctttttttttttttttttcctctggggaagaggcctctgggctgtcccccccgggaaaaaaaccggggccaaacccccgcccccg

SEQ ID NO: 139717 - DNA, 339 bp, Homo sapiens
agttgaaggactgacctatcccactttaaaacctactgtaatactacagtaatcaagatattgtggtattggcaaaagaatagacaaatagatcagtggaacagaatagagagcccagaaatcaatccacattaatataacctgatctataataaaggagcaaagataatcttttgaacaaatggtgctggaacaactggacgtgcatacaccaaaaaaattaatctggacacagaccttataccctttacaaatattaactcaaaatggatcacagacctaaatgtaaaatgcaaaactataaacatcctggaaggtaacataggagaaaacctaaat

SEQ ID NO: 139718 - DNA, 587 bp, Homo sapiens
tgctaagtgttactcagaatatagttacaaatatggtacttaaatatctatttgttttttgtttgtcccatgagcttctcacatgagtctactgggcaattttatgtgagttttggtcaaaattggtaatctcttttatcttagttttgcataatttattgttgccattttatcaaatgagtaggaagtagtgaagtatttcaagaagattgctcagtggggtttgatacaagaactgcccagtagctgggcgacattcagagctctctctctgaggtatataagaagagccctgggagctcctcactgagcctcctgtgagtcaggacatagccttgcagtctgccactgaagcagcctcaccaaagcaaagattccctgctttggaagggtggtgggcaagataaagtcctccaaagtagttatagattattctttttctggagtaaaacttacctgctcagagttgttacacagctgtataaagtccttaatgcttttaattctcaggtggttttgagggaaggagaagagcctgtgattttccttctgtgtatctttttagtgcttagaaattacttgccaaa

SEQ ID NO: 139719 - DNA, 425 bp, Homo sapiens
gcactgacttatgaaggagaccaggccggttgacttgtagaagtctcacactggattggttaggttgtttcctcctaataatgattaacttattcgtctatcctgcatttcctataacctgaaattttgaatcaagggcttgattagactcaagttgaacatttttgcaagaataaaggtcatgttgtatgttgtatagggcgtcaaattggaaagtatttgtggttctcctgctgtcttaagtttggtcactagatcaaagagatgaaagtcaaaaatcttcattgtagagtaactttccctcacaactgacacataatccatggggagataccgtggcagcatgtgagtgcccagttctccatctgtcgtccacctaagtgctgtagcttcagtttttcaatccttgcctgaatcacttattt

SEQ ID NO: 139720 - DNA, 200 bp, Homo sapiens
gctctctcttcctccccacccctcccttttttaaactgggggaggggagagggaagagactgtctttgatctcagcggaggaaaaaagtctgttcaggcttttggctaacacaacaaacagtgtttaaaatttaactttgcttaattaattagtaattctgtttaatgctgtctgatctccctccaaaaggtattttgaa

SEQ ID NO: 139721 - DNA, 398 bp, Homo sapiens
cggagccccggcactggtggaggtctgtgcatggctgatgtggatggagccctgggcagggctctggaaaaggagagccctgaatgcctaaaccctgaatgcttgcctgcttgtcaatcctaagcgcccacccctcagcatggctgcaggacctctgtgctcaggggaagcctgtgaccctgcctctcttagggcagggaaggccctggcatagtcactggtcctgggttggagttgatgctgggcggacagagatcttggtttcacataggcaactctcatgccaggcagggagaagttctgtttctccacactcttcccaagacctggcacccaaccaggcctgggaagggctgggcagagaacctcactcatccctccttgtagagctggtcccc

SEQ ID NO: 139722 - DNA, 468 bp, Homo sapiens
ccaccacgcccggctaatttttttgtgttttaagtagagacggggttttaccgtgttagccaggatggtctcaatctcctgacctcgtgatccacctgcctcggcatcccaaagtgctgggattacagatgtgagccatcgcccctggccaaaaaataacaaagtttttaaaattgacacttgtacatatttatggggtaaattagacatttcaatatatgctgtgtatatgttgtataatgatcaaatcagggtagttagcatatccatcacctcatgcatttatcatttgtttgtgacaggaacattcaaaagcctctcttccggctattttatatatacaataccttactgttaaccataaccaccctaccgtgcaatagaacaccacaacttattcctcctatcccaccgtaactttgtacccattgacgaacctcttcccgtcttccttttcttccttccttt

SEQ ID NO: 139723 - DNA, 437 bp, Homo sapiens
ccaccacgcccggctaatttttttgtgttttaagtagagacggggttttaccgtgttagccaggatggtctcaatctcctgacctcgtgatccacctgcctcggcatcccaaagtgctgggattacagatgtgagccatcgcccctggccaaaaaataacaaagtttttaaaattgacacttgtacatatttatggggtaaattagacatttcaatatatgctgtgtatatgttgtataatgatcaaatcagggtagttagcatatccatcacctcatgcatttatcatttgtttgtgacaggaacattcaaaagcctctcttccggctattttatatatacaataccttactgttaaccataaccaccctaccgtgcctggttaatttttgtatttttgatagagacggggttttgccatgttggccagctggtct

SEQ ID NO: 139724 - DNA, 567 bp, Homo sapiens
cattgagtcagttcctttttattttggtctgattttcagaagcaatgatttacatagaagccagcaaactgaaggaacttccagatagtgcccaggtaaacagtgtggatagttaagaatccagcctattcttctatgcctggactactatccaggcacagtagtcttaaataaaacaatcataattagaagaaatcagctttgtcttaggaaattaaacataagactcttgaggaagagggatcagaggtaaactgataaaacaacagaaggtgaaaagggaactgacagaacagaaaaaaaaaaagaaaggataaataatgattttgtagaacttcaaaccatgttgatagcagaaagaaatagagcaggcattacagaaaataggtctggaagacaggaaaaggacaaagaagtaagtagcaactggtaaacatggaggacaaattaagagactggatgcaaaccaaacatattcttaacaactaaaggatcttgaggtaattaatatccaaatgacatttcaaaagagaaagttaagtgcttagaataaagcctagtggaact

SEQ ID NO: 139725 - DNA, 615 bp, Homo sapiens
tagtgttattattgttgtctttgttagaagaagaaaaaatgtggaaggaaaggggattggaatctctctcacctgtcctccttagcccttttttgggaaacatccagaaacacttcctcagtcatgtccagctgctgtattaaaatggcatagactgggtagcttaaaccggaagtccccaacctttctggcaccagggactggtttcatggaagatcatttttccaccgactggggtcggggaggggatggttttgggatgattcaagtgcattacatttattgtgcaccttatttctgttattattacattgtaatatgtaatgaaataattttacaactcactataatgtagaatcagtgggagctctgagcttgttttcctgcaactagacagtctcatctggggttgatgggagacagtgacagatcatcaagcattagattctcataaggagtgggcaacctagatccctcatatgtgcagttcacagtagggtttgcgcttctatgagactctagtgctgccattgatctgacaggaggcagagctcaggcagcaatgctcacttgtaccccacagctcacctcctgctgtgccacccagttcctaac

SEQ ID NO: 139726 - DNA, 440 bp, Homo sapiens
acaggcaaagtggacactgtggtgtagtggaaataatatgagctctataactcgctagacacattctcctagagcctttaaaaactttctgtggctcggtttaccctttctgtaaaatagatacaatagctagccctaaaacacaccactttggttcataacatagaatttctagcctgctcttccacagaaggaaaggagcccaaggaaatctgatatattcctacatccatatgtgtgtgattttactatttaatgtcttcaactgtgtttcttcttcctgacatatcgattttcctcattcccgtgtatccgaaacctacgtctttttcatgtcctagtttaactaccctgtctaaaatgaaactttaccaatttccatcaaacagaagtaatttccctctcctctgtgtttcagccactcttggggatgctcgatg

SEQ ID NO: 139727 - DNA, 817 bp, Homo sapiens
ggcagtgtttcttctgaaattctcaggcagtcagactgtcttaggcaaatcttgataaaatagcccttatccaggtttttatctaaggaatcccaagaagactggggaatggagagacagtcaagggttatgtcagaaaaggatgagtatcagtttcaacatcagggagcggtggagctgcttgtcttcaattttttgctcatccttaccattttgacaatctggttatttaaaaatcatcgattccgcttcttgcatgaaactggaggagcaatggtgtatggccttataatgggactaattttacgatatgctacagcaccaactgatattgaaagtggaactgtctatgactgtgtaaaactaactttcagtccatcaactctgctggttaatatcactgaccaagtttatgaatataaatacaaaagagaaataagtcagcacaacatcaatcctcatcaaggaaatgctatacttgaaaagatgacatttgatccagaaatcttcttcaatgttttactgccaccaattatatttcatgcaggatatagtctaaagaagagacacttttttcaaaacttaggatctattttaacgtatgccttcttgggaactgccatctcctgcatcgtcatagggttaattatgtaatgggtgttggtgacaggctatgatacaatggctggccagctgcaacaaatggagcactttcattttcactgactgtttatattggggtctcactgaatgtctggctaccagattccagtgacacgtgcttaggccattttccatggactggcaagatggaccc

SEQ ID NO: 139728 - DNA, 452 bp, Homo sapiens
ctgcttcttgacttttccctccagtcctttgcaatgataatcagttaagtccctattagcacaataaggccaggaacgaggctccaaaaccaaaatttgcctaaacagtgaggggtctgtgaactgcatacatttatttttattttcttttgcactaagaaaaaattctgatgtactctattaaatatctttttttctccccagagacacttttttcaaaacttaggatctattttaacgtatgccttcttgggaactgccatctcctgcatcgtcatagggtaagtgacattcggagctcaagttgcaggtggctgtggggtctgtgatctgtgtgagggatctaacacttccaggattcttgctggctgggaaaattgtcttttttttagtatatcacatatttgtatgttttttctgacttaattccacggcttctgacaaatacaagg

SEQ ID NO: 139729 - DNA, 684 bp, Homo sapiens
ggcagtgtttcttctgaaattctcaggcagtcagactgtcttaggcaaatcttgataaaatagcccttatccaggtttttatctaaggaatcccaagaagactggggaatggagagacagtcaagggttatgtcagaaaaggatgagtatcagtttcaacatcagggagcggtggagctgcttgtcttcaattttttgctcatccttaccattttgacaatctggttatttaaaaatcatcgattccgcttcttgcatgaaactggaggagcaatggtgtatgacaagccgccgaaatttgccatgtcacgagagcaaatgtcacagtcatgttctcacacggcacataatgcaagtctgttgacagatgcgggtccattgtcatgtggggagtcgagggcgagctgtttgtttttgtaatgatgttgggaagtgatggctctgcagtcacaaagagcagccttctctcactggctgcaccgatgaacattacgaagttctagaaaaaacatcacttcaaaatgcctggagtaattcctcttatatcaactaatttcaagaagaaaacttgcagaaactaaccccacccctcttaagagaatattgtgtccaagtcctttttatttatacgaacagtgtcttattttcttataataaaaagttataaataaacgagagtttctt

SEQ ID NO: 139730 - DNA, 620 bp, Homo sapiens
  misc_feature (599)..(599): n is a, c, g, or t
tttcctgtaaatattgcatagactttagtccagattttagtacattatcctgtgtaataaatttctatcttttataaattaacttttggtatttagaaatacatattttggggtgaagtcaattctatggtatttcctagcttactatcttcctcatggagaaatagaaaacacaaataatccttagttgaaatataaacatttcagttttagtgaagtgtactatcaccaacttgtaatggtgttacaagtcatcattctgcatacaccagagtgacccaaaatgctccacagtctaggtaaactgcaggagtaagcttaaggttatttaacttccaaaccccagatctctgctctgatggtcacttgaaattctacaatttcaaacacctctgaagacattcagttaaggcctctggcctctagatggccctctatcttttgggaatgccttaaagtccatttcatgagggaaagttgaagccagtgatctttctgggatagcacaagttaccctgtatctttgctcaaggaattctttctgtaggcttcctagagtataccagaattaaatttttctcccctttgatgagtctctncaaagcaaggagtaatacctg

SEQ ID NO: 139731 - DNA, 312 bp, Homo sapiens
ggaaaggaagtaaaatcatctattcacaggtgacatgaatttgagtacagaaaatcctgaagaatccacagaaagctaacaaatgagttcagcaaggttacagggtgcaaaatcaatatacaaaaatcaactgtatttctacacactagcaatgaactccagcctgtgcgactcaaaaaaaaaaaaaaaaaggaaaaaagaagaatgcagttttaaaaagaaaacttaaaggaaaggtaaggcgggccccctttttttgggaggttcccggggggggaaccgaaaagggcccggcccccgcccccaatttgg

SEQ ID NO: 139732 - DNA, 457 bp, Homo sapiens
tcacggagatgaggcttcattcttgagattcaggcctggcccagagaagtccaagccagggaatcgaagcttcttggtcccaaggtttatggactgccctggggaaacagtaccccatcggaaaacctgctctctgctctatgaaaaggaccttcaccatgttgtggggtttcactgaaaagtattctggggaccagcataagaagcaaagccccttgtatgaccttcctttggtctgtcaagctgtgtgagaaccagcagggagcccctggggtgggaagctcaaagccccaggcagaacacaccttccctttgcaaggcactttctagatggaatccctggggagaagcctaatagctcagtgcaagaggcgtgtggggtttcatccccattctacaggtgagagcacctagatgcagctagaatacttggccagagtcttgtggctaagacagt

SEQ ID NO: 139733 - DNA, 247 bp, Homo sapiens
tatagcagctcggaccatctgttaatctctctacactgaaaataaaaccatcttccacccaccccaagcattgtttatattccatttctcttttgaaaccttttgttgccatttccatcagcttctaagatttaacaattttatatttcctcttttctgttttcttcggagaatattttctccaattatgaaccccaaagcccaggggatatctttctttcctttatttatttgacactaattagtg

SEQ ID NO: 139734 - DNA, 437 bp, Homo sapiens
cccggcaagcagctgttataaataaaatacatgctgagcctgcaatttgctcttaatgaaggccacttgtcagtagacggtgctgctaatgcgtgtcctgcagcaaagataacccagacgggatcattttttaattgcccagcagaactttaaccagttgtgcatcttaacctgctttttgtttgttcgtttgtttgttttgagacagtctggccctgtcgcccaggctggagtgccatggcgcgatctcggttcactgcagcctccacctcccgagcacaggcgatcctcccgcctcagcctccagagcacctgggaccacaggtgtccacgcgcagccactaaccgctttcttatctgacactttaagtgcttcttcgtacccagctcctctaacgccttttgaagcagctccatcatctttgaagggcagttca

SEQ ID NO: 139735 - DNA, 313 bp, Homo sapiens
tgactagaggatcccggcagcagacaacagcagttgtgcatcttaacctgctttttgtttgttcgtttgtttgttttgagacagtctggccctgtcgcccaggctggagtgccatggcgcgatctcggttcactgcagcctccacctcccgagcacaggcgatcctcccgcctcagcctccagagcacctgggaccacaggtgtccacgcgcagccactaaccgctttcttatctgacactttaagtgcttcttcgtacccagctcctctaacgccttttgaagcagctccatcatctttgaagggcagttca

SEQ ID NO: 139736 - DNA, 325 bp, Homo sapiens
tccagtcggtgggatatgcccctgggccagccagggtgtatctcagccagacagccacaagatgcagtgctggacaccccagtcctgagttgatggagctgctgactttctgggtttcagctgtatcatcagtaagagtgctgtatctattcaggcagaggagatggtctctccagctccactagagatcttagatctgtgatgcacaggtaattactcctaaaattacctgagacgatttctgaaatcatgagggagtggcttcctgaggagcgatgattacacaaacccgggaggacctggaggtcctgcttctgtcactggc

SEQ ID NO: 139737 - DNA, 448 bp, Homo sapiens
cctgtaatcccagtagtttgggaggccaaggcagaaggatcatttgaggccaggagtttcagtacagcctggacaacatagcaagaccccatctctattaaaaaaaaaaacccagcaagtataggaagtgcaaaggccccaaggcaggaccacactggagcattctgaggagtgacagaaagagcaggagagtagtgggtgccacagagccacaggccctggagtccaagaggcaggcaggcccagtgagaccggagaagttcgcaaatcacatggggagccactagggcctctaagcattcatccctctgctctgggaggcgggcttgaggagccactaaaatggacctgtttgagaacagaagcccagcagtctatttcccagcagcttccctgcctccaagcctaagcggccgtgagccacagagggagtccatctccctatttc

SEQ ID NO: 139738 - DNA, 368 bp, Homo sapiens
gaggaagttggctggatgtgcagttaggactggtctaggaatttgtctgtgtgaccctgggggagtcatctgatgtctctgaacaagaccagagagacctgctaagagtaacctgggttctgactgatccccctttccgcctgcacagccccgggtctgacagttcccatcagccgacccccaaatgaggcagcaggagggaagaaatcaggctgcgaaaagagaaaaacgagcaacggaagaaaccggcttccaggcctgagggggccggtgaaccagggcaacccccgggcaggcagaggcagaatgtgcctgagcgccatctgccgctcatccccaggtcccacgcactttcaccacatcccacg

SEQ ID NO: 139739 - DNA, 404 bp, Homo sapiens
cttcaatgtgcccacaaggctgcagactgcctaagtactgtatctgaagctcagtggtttcgatggtatctttagagcccaaattgattgaatactcactctcaataaaataggaataaaaatttgccttgtaaatttgttgtaaaaataatgcctgatgcgaagtgcttattaagtagcacttgctattattattcagcattcttcagactagaacatagtaaaaaattttttttattatactttaagttccagggtacatgttcacaatgtgcaggtttgttacatatgtatacatgtgctgcaccagttaactcatcacttgttggtgtgctgcatccattaactcgtcatttacattaggtatttctcctaatgctttcccttcccccgccaccaacccc

SEQ ID NO: 139740 - DNA, 627 bp, Homo sapiens
tcccctgagatagagtcttgctctgtcgcccaggctggagtgcagtggtgcaatcttgactcactgcaacctctgtctcctgggttcaagtgattcttgtgcctcggactcccgagaagctgggattacaggtgcacatcaccacactcaagataatttttgtattttttagtacagttggggtttcaccatgttggctaggctggtctcaaattcctgacctcaggtgatccatccgcttcggcctcccaaagtgctgggattacaggcatgagccaccatgcccagccttatttagggtctttatgctaggtgtgtgttcacttgacttgtagcccactggtcaacagttaaactggagggaagagggcacagaaaaagctcataaagtttggatgggaagctgggaatgtggagagattataagatgtgctcacagcttcatcaaagggtagaatagaccctgcagggaatgatatctcctctcagaccatgtggtccaggatgtctttgagaaatttctcctatctcaggcatgataataagtgtggtagtaataatggcacctcttcactgagcatgcatttacgtgctatgcactctataatgaacaggaagattctcatt

SEQ ID NO: 139741 - DNA, 442 bp, Homo sapiens
cctgtctcagcctcccaagcagctaggactacaggtgcatgccaccacgcctaactaatattttctatttataaagcagcctcttttaaagagtttaaactggtgttaatctcttccttttagagagtacccgactatgggcctcaactgaactcaatggctaggaatcagtaagttttcccatatgcaaagagcagagaatctaaacctaaggttctgattacttggcactaccttctcatcaccacaaaagcctccaggaaggcacgtattgagaagagtccagaaactcaacacaggcaatggaactgtaaatatgagtacattctaaccattccaggctctatccagaagatggagctctgagaagtctggccacacaagccttttctctaggtctatgcagactggttgacactagtctactgaaaagaccttttga

SEQ ID NO: 139742 - DNA, 559 bp, Homo sapiens
tatatagtgtggggaatttaaaacttattctatggctttgttggtgatgattaactgcttttatttgctgttgaatcgtaaacaaaataaacatacacagaatttacatctatttggtaaactatataatgaggtggcgactaatgtccaggttggcaaacaaaaatcctggtgtacagcatgtgtgtcttgtccccagcaacataaagaacatataatgttacaatatacttctttattacagaagaatatatggttgtgttttgaaaatattatttctttgtagatggttctcaggggtaggtaaaaaaaaatcttgtctgggaaaaagtggagaaagtggaacatcttgttgctgttcattttattggtttggtcagaaattgtgaaaggggggtcttccatccttaactgtgctttgacctcagtgcttttcttcttttctccatctgtggcagaattgattcttcatatctttctcaaggtccatttcagcagttgatgaagctttttgaagaaaaattagttctatttttaatcattttatcaaaaatatttg

SEQ ID NO: 139743 - DNA, 582 bp, Homo sapiens
taaacgccacagctgtgcaggaagttggaagtcttatggtccagactgtggctgggctatgcatggtggtggcatctctgtgggccccagggcagcttatgtcaagtgccagactaatggtaagtaggaacaagagtaccaaccacagaccaaggagcaggcccctgacctatttttctgactctgtataagaaacagaggctaaaataagccatctggtcaaccaggtagaaccagatttagaacaagagcactgttactgccaatcccacgggattgcttctaagcaatcataatgccaatcacattgcaaaatgtttgtggattgcagaagctccaccaagaatggagactgaagcaaatgggagaagggagatagtggaaatgggagaactaatcaagccttcagtcatcagggacacatcatctctgcttatcccagagaacatcatcctttgtggccatttttctagggtcaacaagaaaaaaatcataccttttcattttcatatacacttagaacagtaaatgtattcacagaaatataagaggcatactagaaagttacaaaaccataaatgt

SEQ ID NO: 139744 - DNA, 296 bp, Homo sapiens
aaaggatgatgtccacaaatcatacaaatcattctgtttatcttcctcccactgacacttcactttactaaagttatccattctcatactaccgttgttttgaacctcacccacacaactctccaatattacctattactaattttttcccattaaaaaaatttaaaagttagctttacccactcaggaagcccatatattctgtaatgcaagcacctacatctaccacagattctcaggttttaagagaccttcggacgggcatggtggctcacgcctgtaatcccagcactttg

SEQ ID NO: 139745 - DNA, 130 bp, Homo sapiens
tttctcattgaattaaccttgatcaaatctgagaactctgcttagtaatgactccaggtatactatacccacttttgtagcttattcaacaccctcttcaatcctggttccacttcctgtgactgaaatg

SEQ ID NO: 139746 - DNA, 134 bp, Homo sapiens
agatcccccttccatcccctctgtctctctctcccttcccctatctgttctctggggtcagcgatcctgggatgctgcattgggaagtgttattcctggtggcctcacaagtaggcaccgagaatttagaggat

SEQ ID NO: 139747 - DNA, 301 bp, Homo sapiens
gaaaggtagggcctcgcctgggtaggaaggtgggggctcactggggtggaagtgggtttctgaagcagcaggtggggccggtggactccaggcaggatctgcgatcactgagcctgaggctgcccctttactcctcccggctcccgggaacagcctctctgttcttacaagccctccatagcagccttacctgacaggctttgctctgagagccccaccatcttgacctgaggactacccatgtcactcatccatctcccagcgcccgagaaggcgctctttgagccgagtgctccagtga

SEQ ID NO: 139748 - DNA, 293 bp, Homo sapiens
gatcaaagaagaaataacaggggaactgtacaagtatttcgaaataaatgaaaactaaatcacaacatgccaaaatttatgagacatagaaaaagcagcgctaagagagaaatgtatagctataaatgcttacatttaaaagtaagaaatattttcttttaatttagaaaaagacatatctcaaatcaaccactttacaacttaaaccagaaaaacaaactgaaggcaagaagaagaaagaagataataaagactagagcagagatagacaaaatagatgatagaaaaacaat

SEQ ID NO: 139749 - DNA, 410 bp, Homo sapiens
ttaaatgaaatttttaaaaatgcaacaacaagatgagaaaatcaacaaagagatagaatgataaaaaaaagaaagaagcggaaatttttgagctgaagaatatagcaactgaattgaaaaattcactaaaagagttcaaaagcagacctgatcaaacaaaacagtggactaaacaacaggtcatttgaatctttgagtcagggagcaaaaagaagaaaaaatgaagaaaagtgaggatagcctaagagattaatgggacatcatcaagcagatcaacatacacattaaaggcattccagaaagagaagaaagagaacttatttaaagaaataatggctgaaaacgtcccaaatctgacaaaggaagtggacatccaaattcaacaatctcaaaacaaatattagtaaatt

SEQ ID NO: 139750 - DNA, 463 bp, Homo sapiens
gcgagaaggctggcgggttgcgcgcatcagatagccaggaaagattaggaggggaacgtgatttggtaaaaacaaatttcggtagggaaagcaaagagctttgttcgacttgaatacataataggtttataattccgttagctgttgaaagcgtcctcccaccgtgctccccccagcaattccattctgatattgatcaatggaatggaaagaaggaaaaaggttacaggacagagatagttaataaggattcttaggaagatatatttagagagatggctataagctatacaaggaagaatgatttctattgtactgactttatcttttcccccaactatctttttttagtctaacttttccttgctttgtatttcacttactctcaccctaggatataggtttccttccaaaggcaaggagctcagttcaaggtatcccctagcaaagagccaccttaatg

SEQ ID NO: 139751 - DNA, 547 bp, Homo sapiens
gtgaatgaatatatagaataatattcctgaaaattccacatattttaattcttggactgctaaatttttcatatgtggccatatatctatacaggtgtttgggtgtttatgtaaatttgccaggcttggtgtgtatgtgggtatgcttctgtaagtatctgtgtatgtgtataaaccatcaacagtaaagtatagtatttgtgatacagccttataagttactggctcttgtggaattatacataaaatcttcatgtaataaagtgttactctgtgacatattagttggggcatgtttaaattaaaaagcagtttgctcaactggtatggcaaatggttcaaaatattcagatatactgatttataaaaaaattgaaattcagctaaatccaatattgtgttaactattaaatataagtaacattaatgtttatattgatatatctttgttttcaattattaacaagatcgaatactatgatttttttctattgtgtgtgtatggatggcttgtagtggttgccaatcactatactctaaaaaaatg

SEQ ID NO: 139752 - DNA, 590 bp, Homo sapiens
cttgtaattctttcatgtgtttgaaataaaggaacaaaataaaatgttgaaaaaactaacaaaaccataaaaaccctagaagaaaacctaggcaataccattcaggacataggcatgggcaaggacttcatgtctaaaacatcaaaagcaatggcaacaaaagacaaaattgacaaatggggtctaattaaactaaagagcttctgcacagcaaagcaaactaccatcagagtgaacaggcaacctacagaataggagaaaatttttgcaatctactcatctgacaaagggctaatatccagaatctacaaagaactcaaacaaatttacaagaaaaaaacaaacaaccccatcaacaagtgggcgaaggatatgaacaggcacttcttaaaagaagacatttatgcagccaacagacacatgaaaaaatgctcatcatcactggccatcagagaaatgcaaatcaaaaccacaatgagataccatcttacaccagttagaatggcgatcattaaaaagtcaggaaacaacaggtgctggagaggatgtggagaaataggaacacttttacactgttggtgggactgtaa

SEQ ID NO: 139753 - DNA, 363 bp, Homo sapiens
ctactttgttctctctcctactcacccagtgtgctctcccagacaatcttactcacttgtctttctgcctcaatgaggaggactctcaaatctgtgtttagacctgacttgtcttctaggctctgcaaccctgtttgtaacttcccaatgagtgtctgtaccaggatatccaatagattttctcaaatttaacacttgtgaaaataaatgaattatcttttccacctgctcattctgtattccttatcatattgaatggtgacatcatcttttcagtcacccaagctaggatcctgttatcttcaagtcctctttattttccatcaatcactcaagttctatctataccttctaaatgcctta

SEQ ID NO: 139754 - DNA, 599 bp, Homo sapiens
atcccatttccctgaatccaactgccagtaggtactggccctacatacgcgtcctttaacaagccccgttctcaaaaggctgggggtatttatataagaacttattccaaagtgactctaagatccacgttcccaagatctagtacgggctactcatgtgttctgaggcatgtccagcatgcacgcaaacttaatctgttcaaattgaggtaaaacagacaaaaaacacttaatattaacagaagctacataattaaaactaaccttttgctgcttatttaagctaattatgtattcttgcaaaacagagaccctcaagtcaataattttttattttagtcacccccaaattaagcctcttctttaaagcgcactgtcatatttcatctgtagcactcaacaccaaactatactataagtatcaatgcatacacatttccatcattcattttgtaagtactatttgtgccaagcctatttcagagacacaagggaaatagagataagtagcacactatcccctggcctatactgtctcgatccaatgaatgagagaggatttgggtgtgacacagcactagagtacaactacagcagtc

SEQ ID NO: 139755 - DNA, 358 bp, Homo sapiens
ttttccaagttaggaaattgaagatgatgtggaggattggagaaggagttcatgagtctggttatgaacatgtacaggtagtaatgagatatccagctggactgtttttgatcattttggtatacaggtctgatgtctaagagatatctaagggcagaagatacaggtttgagtatcattcttttatggatactagttaaagttttggccatggatttgattgctgagggagatggtgtagactaagaaaagaggagcttgcagaaaaatttcagactaccagcacttaacgaaaaagtagataagagagatcctgtggaaaatatgatctgccaattgctgcctcattaaacagagc

SEQ ID NO: 139756 - DNA, 235 bp, Homo sapiens
ttcaattttgaaaaggtgactgtagtggcagtgtggagaatgaattgcaggggtgggtatggcagaagcagagaaaccaggtggaagctttggtcatagttgcatcaagatgctaaggcttaggcttgcttgggcttatgcggtgagcaccaagtctcctgtagggatcaacccttgtgtggttactatgacgttggcttacttttaaaggtctctaggtgctgttctgcctggt

SEQ ID NO: 139757 - DNA, 349 bp, Homo sapiens
aggcaggattaattctgcccacaatcttgaggacgctgaacgtgttttggttcataatttgacaaaaatgacatttttttaggttacagtagaggggggaagcccgtcttgctggtcaagggtgactgaaactttgctgaaagacttactgcctggcttgtacagccaccgcttgtgtaataaggccatcccctcggactcaggtggttaaacatcaggccctgctgcccaagtgtgtccccaacccaaggtgcaccctgggggcgctgaaagaccaggggtcgctggggtgagtgcgggttgctcctggagttgggcgctccaaacgtcctcggagtcctaactccaa

SEQ ID NO: 139758 - DNA, 171 bp, Homo sapiens
aaaaaatacagtcaaggtacactgactaataacagcagctaatatctaccaagtgtttctgtgccgggcacttaaagcactttatgtgcactgactcactgaatcctcccaacagccctgtgaggcagggaccacgaccctccccactttacagatgaggaaactgagggt

SEQ ID NO: 139759 - DNA, 229 bp, Homo sapiens
gactgaacatgatgggcaggtggtcgtgcaggacccacaggcatggggggtgtgcttggtgtagctggagaggagaggcaggggcaattatgacattgttggcaatgggggcagggggcactgcattcctgctgaggaattgatcctatctgtgacgggctgggaaaataattactagttgatgatatggtactgctccctacaagttcatgaacattctctctttacc

SEQ ID NO: 139760 - DNA, 519 bp, Homo sapiens
tttgattacttcttcttgcctctagaaaaagtttgaacaatttaccgtgacgtaataaagctgttcccagttgggctctggccttctttcctggtcttgggccccacctctatataccaaatcatgattttaccacttcctaaatacagcatgctcttccacgttgcgaatatttgggaaatctttttttccttggaaagctgttaactttttctccctgtcagactcctagtaatccttcaagactcaggttttgttggttgaactgaagctcatgcaaatgatcacttaagaggtgctgagattggcatacttctccagagtgcctggctttagtgtagtggaaattctcttcagccacgagcgtcccacaagggagcctagtttgttcatgtctttacttgctctgctaaattatgttttattaatgtgtgtgcttgtactgttgctcaggctactgtgctaatgactgataattgccttaatgagctatttgtaagaaatacagtaataccagta

SEQ ID NO: 139761 - DNA, 481 bp, Homo sapiens
atcgacgatgagcccactgtgatgggagaacctttcacagtcaaccctgcctgactccagccaaggacaagaaaaagaaagacaaaaaaaagaaggaatcttcaaaggaacttgaaagtcctctgacccctgggaaggtgtgtcgagcagaggaaggcaaaagcccattcagggaatcttcaggagatgggatgaaaatggaggggctcctaaatggctcatcagacccccaccaaagccgactggctagcatcaaggctgaagccgacaagatctacagtttcacgggcaatgcccccagcccttccattggaggcagtagccgccttgaaaacactacccctactcagcccctgactcccttacatgtggtgacccagaatggagctgaagccagctcagtcgaacggactgcagtccgttcgactgagccaagggtgtgtggctaacttgtctcaacttcattttaaatgccggttgg

SEQ ID NO: 139762 - DNA, 178 bp, Homo sapiens
ttttcagttaaaataaaaggagtgcaatgagacaaaatctctgggtgaggcatgaactgataattctaaaaggaaagttcccagaatgctttgaataatgtcaacatcattgtaatgagtttataacactccaaattttctacttggaaatgtacagcactcttttggatgtgtatgt

SEQ ID NO: 139763 - DNA, 457 bp, Homo sapiens
tgtggacagctgccttcttgctgtgccctcatatggcctttccttggtgcatgcaagaagaaagaaagtgggagctccctggtgtctcttcttataaggacaccaatcctgttggattagggccccatccacaaaactttatttaacctgaaggcctcatctccaaatattggaggctaagacttcaacatatgaactggggagatacagcaaaatttagtctgtaaaaatgagttaacctctatgccaagccacctttacagccacagcagggtttttgagtagcaatgagtgcctccatttgagactcaggcttggaaaattgatctctgggcccatgtggctacaaggaaggagcacaacgaggttggcccccagccctgtgcactcccagtggccatgccagcctcctgtgcagaacttcccttcccctttcttatcagctgtctctcagctt

SEQ ID NO: 139764 - DNA, 204 bp, Homo sapiens
ctgctgatctatttatagaagctctttccactggcctctacttccttcctcccagtctttcctgcgtacaaagctcaccactgcacacaataactcttcctaaagggacaagcagtatcgttgggcctgcagttgccttagagccagatgagccaacagctgagagctttagacactgatgtctgagggacaactagtcactgg

SEQ ID NO: 139765 - DNA, 650 bp, Homo sapiens
ttagatggagtctccctctgtcgctcaggctggggtgcagtggcgagatcttggctcactgcaacctctgcctcctgagttcaagcgattctcctgccttagcctctcaagtagctgggattacagatgcatgccaccatacccggctaatctttgtatttttggtagagacgggctttcaccatattggtcaggctggtctcaaacgcctgacctcgtgatccgcctgcctcagcctccccaagtgctgggattacaggcatgagccactacacccagctgggaccaccgtcttatatgcagtctgttgtggactaaaatgtcattatatggcacatgactgtattttaattgggaaatacattactaggcttgatgagacaaactagggagatttcagtaagctctgcctaacttaagggaccattcaaaggtaaaatttctttgtaagaaataagttggctgggcgtggtgactcaccctctgaatcccagcactttggtaggccaaggtgggaagatctgttgagcccaggagtttgagaccatcctgggcaacgtagggagaccccatctctacaaaaaaatttaacaattagctgggtatggttgtgcagcctgtggccccagttactggggaggctgaggtgg

SEQ ID NO: 139766 - DNA, 406 bp, Homo sapiens
caaagacgccatctcagctcactgtaacctctacccccagcttcaggcaattttcctacctcagcctcccaagaagctgggagtacaggcacatgactgtattttaattgggaaatacattactaggcttgatgagacaaactagggagatttcagtaagctctgcctaacttaagggaccattcaaaggtaaaatttctttgtaagaaataagttggctgggcgtggtgactcaccctctgaatcccagcactttggtaggccaaggtgggaagatctgttgagcccaggagtttgagaccatcctgggcaacgtagggagaccccatctctacaaaaaaatttaacaattagctgggtatggttgtgcagcctgtggccccagttactggggaggctgaggtgg

SEQ ID NO: 139767 - DNA, 295 bp, Homo sapiens
tgtgtctggggtgtgtgtgtgatggaggccctctctgggacttggtaatccggggaacttggcagggccgtgttggtgggtctggaagcagatccgaatgtgaatgggtcgtgggttggctcaggcaagcctctcgtgagtgacaggtctttttgccctttggccctctccttgtagcttgtgaccgctgatcagtgatcactctttttacgtgattatttccttttttaaaagttggtttttcttgttgctgtttgattgtttttttgagacagggtcttgctttgtcacctag

SEQ ID NO: 139768 - DNA, 453 bp, Homo sapiens
ctgccctcagccacagctctttctaggcgggagtgtcccttgacccctggagccataccagccctcttcaccctcacaggccttgccctgctggaaagaccagcttccagggcacacccagctgtggacacgtctccacccctggcaggctctgcacccgcctcaggagggcagcctctatggactgtccccatcctaaggcctttctggaggaatggcattcatctgacagacagcaaggggttcttccctagcccatttgctctggtaaacaggagaacttcctctgtgttactggcttcagggctccaaggtctgaggtctctgaccctggatgtatggcctgagttggatttcatcaaaatattgtgccttggacttctgacaactccctactccccattgccctagtcagacccacctccctctcattccttcctctctcttccactc

SEQ ID NO: 139769 - DNA, 271 bp, Homo sapiens
ctgactccttctcccaaacctgctttcccctgagtttcctgcacagtggacatcctgaccccatagctcaagccaggcccatctgtcgactcctctcatctctttgcttgatgtgctccagccacttccgttttaacttccagaaactgaccatgccctctcctgcctcagggtcttggcccatgccttttccctctcctagtaatgctttttcttttcctttaagaccagtttcgggcgggcgcggtagctcacgcctgtaatcccagca

SEQ ID NO: 139770 - DNA, 149 bp, Homo sapiens
cctgtctagtcattgacatggtctcagtatacaatttagtgtctggcttgtagctatcaataaatattggtcaaatgaatgaaattatattaatccatcaatggctaagatactctgttctttgtgaccttgttttatttttaattaag

SEQ ID NO: 139771 - DNA, 554 bp, Homo sapiens
cagcaaatgacacaaattacattttgaaggtgtacacaacagaaaattctctcatcttttagcttcatgtgtaaatttcttaattgttcacatgtatagatcatgttgtgaaaactacattgagccatactagcattgttttcagaacagcatctcttccattgaacttgattgcagtttgtatgcattaagatgtcattgttgattacaaacacaaagcgaacaaccaatttagggctgcccactggcctagattttaattttcaatcaaagcgtgctttttctttcatgtgaaaaaagaattttatctgtgaagctctgctgtgtttccttgccctacttagtttttgttgttgtttctgcttttttgtggcaggacacaggcagttcatggataaggcttccctcttaaacccagatacccgtacctctttgtctttgcttactcagcaagtcctcttttttttgctacatttttcatgttgctccatgcctcttcccagcaatagaactatggtagatttaatatcaagacatttgtatttcctttacat

SEQ ID NO: 139772 - DNA, 819 bp, Homo sapiens
caggtgtgagccaccgcgcccagcctgttttttggatgtctaatggaaccagaactggcggtcccttctgtttatggacccgtgcacacagcaggaaggagaggctccagaggccctggactcgggggacaaccctcgcttcatcacctcctgagggtccaccgcagccagccctgggccttctgcccctttcactccaagatctctgggctgaccttcatcagccccttccacccgcctcaggaggtagggacaaggctgggggtggcctttgcagaccctgagaatgaatattgtcctgcatacacagcccagtggccacgagaggccgacgaagatactgaaggtcacagagggccagaggcggggccagggcttgagccaccctctctccaggcccgtctataccattgggctgcccccttcagacctccgggcaggaaaagaaggtagaggggatattcactgagcccccgcctcgagcctgggcccgacctggggtgtttgccttactggccgctccagccagtgtgagaggctgcactatcatgcaccccactgacaggtgaggaaggcgctgtgaccaccagaggagtgagcagactggaatttgagcccaggtctgctcagctcctacacccggcactgagcttccggtctgacctggctcttgggcagggccctgcaggccgcctccctatgtggccccagagtccagagagcagcaaggagagtaggtttctacggtgacctgggcaaatgaagacactaacctgtgcctcagtttccccagcccttcccactcacagcaaaaaaaaa

SEQ ID NO: 139773 - DNA, 304 bp, Homo sapiens
ctgggcagcgttgggacttcaggttctcctctaggcctgcttcaattctgccctagttagatggggaatgcatgtctcattactgccaggctgggtggtgacagaagtccaggctccccacatgctgtccactgatggtgatgggggatgttgtcaccacctggtggggattagcaccccagctcctcacagccttctctgacaccgtggggtggggatgattggggtgcctgttacagcctggcaagggtggaaatctaagctctccacctggcccttgctggtgaggggtggggctgggctg

SEQ ID NO: 139774 - DNA, 322 bp, Homo sapiens
gctgaacggccagaccagcttagctcgtcacctgggcatgctggtcactgtggagcctggctcatggtggggtcgtgctcttcagcatggttgcaacataaaaggacaaaaagcaggcactgtgactgccagtcatggcctccaaggcaggtggcataggaatggcatggtcttctgaaagcagctggaaaactaaatttgctgccggtgtaaatcccttctctaagcatgccctcatgcctgtgaagggcatcatacatcttaccctcagtgctttgtcctaatgccttgccccctgctgccctggaggggctgacaacct

SEQ ID NO: 139775 - DNA, 479 bp, Homo sapiens
tggactctatcctctcaaaccctgctgctgctttatcaactaagcttatgtaatattctaaatcctttgttgccatttcaacaatgttcacagcgtcttcaccgtaagtagattccatctcaagaaaccacttactttgttcatccataagaagaaactaatctgttcaagttttatcatggaatcgcagcaattcagtcacatcttcaggctctacttctaattctagttctcttgccatttccaccacatctgcagttacttcctctactgaagtcttaaacccctcaaagtcattcatgaaggttggggtcaactgcttacaaacacctgttaatgttgatattttgagttttgtatggtagatgcacctgacagtgataatgcgacctgagtataccctgagaatgaccccgtatggcagagcacctcaatgtgtactcagaagtggccaacccagagatccattccttgtctat

SEQ ID NO: 139776 - DNA, 509 bp, Homo sapiens
gtgtgtcatgctctggggccctacacatctaaatatttaacaggattgctttatatgctcttttgctgattttgccgatatgtgatttggtttttgcccagtgggtccctgggcttttcatcatccagtgcatatattggctgcagagtgcctgggcagcaagaatagaggggttgctgaggcatccaatgcaatcagaatgttatttagaaaagctggcttgctagccaagccttgcacgcatcttttattacactgtatctttgtgacatattatttctgcttcacaaggtcacctgaccctgaatgggacctgtggtccattaataacacagctgggtgatggctgcagcatgagttaggactagacacagagaaggatgagtcttcaaaagtcccagctcacctgggctgagttctcacattccttttctattccttagctccccctgttccctgttaattggtgtgcgaggagagaaagaatgggcaggggatggtataatcaa

SEQ ID NO: 139777 - DNA, 435 bp, Homo sapiens
ttcaaggtcatggtgatatgcgctacagctgagcaagattgttcccagcatcagattggaagttgaaagaaaggctaagtcacaagaacccaagagctgggtgaatgcacagctgtgccctaggcccaccagcaaggaccacatttattaggctcagcctcccacacaaacggtgccagaaagtctaagagaagaaggggaacagaggaagggagggaaagtcctttaaatcaacatggtttcattgagcttctgcaccatgcaggggcctgtgggattgagaaggagaatataatcctagtccttgctctcaggaagcttatcatctgtgtagagcccaagagtgagcagctgggtgaacaagaagtggtgcaagggggaagagttaccacagatggtataacagtttgctcaggctgcctgaaacaacagaaa

SEQ ID NO: 139778 - DNA, 582 bp, Homo sapiens
cacctaaagtatatttacagttgtatgttatactgtatataaatttgatatataaatttctaacttataaaacaggtaagctaggaggtgattatgattataatcattttccaaatgattcaggtcaagattccattcatcaatagccatttttctttggctcatataaatgaagtcatttcatatcacgttagccaatggatgatgccagaaacactctttttcattaggccacagtatcttcagtatcaggagagaaaaaacaatgcttaaactttcaaagtgttttttagcttatattttaactgttatctgtgttcatattcatatgaagttgatatataggccaaaatgaagtaaataaaaataagattttccatttggttttggaaaaactatatgtatatatttcaaatttatcttttaaattatgaatttcttaatttcttagcataaactaactggccaggggtgaactagccctagaaggatataataaaaggagagagaagataaagttaggtaagaattaaatatctactatgattaatgcaaataaaaagaattcctcagatttattta

SEQ ID NO: 139779 - DNA, 117 bp, Homo sapiens
aagaaggggtggtcagaattaaagaatgttatggtttaagtcaaacatgcttgtaaagtatgtgaaagaaatggaatatgtaatttttaaataaattgaggggtaaaagtaaataca

SEQ ID NO: 139780 - DNA, 645 bp, Homo sapiens
atccactcgtacacgcatggaatgtaacaagctccacactttggctcctgcctcgcacacgtatgtaatgtaacaagctccacactttggctcctgcctcgcacaagtatgtaatgtcacaagctccacactttggcccctgtctcgcacacgtatgtagtgtcacaagctccacactttggctcctgcctcgcacacgtatgtaatgtaacaagctccacactttggctcctgcctcgcacacgtatgtaatgtaacaagctccacactttggctcctgcctcgcacatgtatgtaatgtcacaagctccacactttggctcctgcctcacacacatatgtagtgtcacaagctccacactttggcccctgcctcgcacacgtatgtagtgtcacaagctccacactttcgctcctgcgtcgcacacgtatgtaatgtcacaagctctgcactttggctcctgccttaaaaacaaacttggaggacagaaaccaggaaaagctcaagcatcttacacccaggaccttccaccaaagttaaatgtttttaatgacgaccaaatatcaccagagagcttcctcgtaaaattaaccaattcatgcatctttccagggctacagctctggcaagcaagggaatgacag

SEQ ID NO: 139781 - DNA, 562 bp, Homo sapiens
atctttgctatgacttaaaagagataaatgggctctggagttattgtggcagattaaaaaacaaaacaattatattttagacctgcatattttggctgttttggactacagttgttcatcccttgagttccaaatgtaaaaatgttacattcagtaatatctaattgtgaaatcttgtttgttactgctgttcttgttctttttttattcagaatcttaagtagtatttttgttataatactaatacaaatcagtgataaaggaggcatcaacaaatcagcaggaggattatttaagaaatggtattagtgcagttggttagctgtttaaacaggcagagagagagaataaattagcctcaacccctaacagttatcaacagaattccagatgaatacatagttaaatgcaaacaacagtgggatgattttcaaaaagtaggacaaaatagaaatgaacttctgatagaatgaaaagttttctctattaagtagaagacatctcagaacaaacaagtgaaaatagaagttactacttataatgaaaacccccaaaaaaactt

SEQ ID NO: 139782 - DNA, 316 bp, Homo sapiens
ggcaagtctaggccctttgccagagttgctcccagattgttttcaggttgggcctgcattcacagctcagccagctgaagggtgacagcattagactcgtgacccaaatcttaaacccacacattccattttaacattgatacctgtgatcatcagccagtatagcccatcccatgtgccaggcggaggcatcaataagctggtctgtagcagctttaatcacagctggggagccaggagctaaggaatgctagactcctttgtaaacaatttaagtagggggtacttagcctggactctatgtgcttctcatcca

SEQ ID NO: 139783 - DNA, 379 bp, Homo sapiens
actgctctgcaccaagaggcaaaccacaggaaaaagaaacccgaacaagcaaggagaatagaagttccccaaagcatgccttcttgtttttctcagaggacagtcttttcattcatgttttacagattggtccaacaagtgcagttcttctagtctcctatctagataagcaggatattagaaggaataggagaggcctgcaaaaagctatgatagggtggaaataggataggagaaactgaaaaaaggggaggcgtgcgctccaacacctccatagcccttggggacgggcttagtttctaatgagaatacagaaggcccatgtctcaataggccccgaaaaatattaatccagcccaatatgaacagtctgctaatt

SEQ ID NO: 139784 - DNA, 571 bp, Homo sapiens
tactccacagggggctgggaagcaggtagggatgaagacaagttgattcatgggcataaaaattcagtcagatagaaggaatacgttttagtttttgtttgcacagtagggtgactagagtcaacaataacttagtgtatattttaaaatagctagaacatttgttatcttcccaatacaaaaagaaaaggataaacatctgagatgatggataccctaattaacctgatttgatcattacacactgtatgaatctatcaaaatattacatgtacccttataaatatgtacactctaccttaaggaaacagtgaaaaaagaaggtgtggaacaacgaccacaacaaaatcaaagaggaaactctttgtgaacttgggtttgtcaggccaggaatcagcaaaccatggccaatccactacctgtttttgtaataatcaaaacaatataattgataatttgtaaattatgtgaaattcaaactgcagtattcataaagttttattggaacagctattattcatttacatattgtctatgggtgctttcattgctacaatggcagagctgcaac

SEQ ID NO: 139785 - DNA, 339 bp, Homo sapiens
tacccttccaaagggaacagactgtgtccgctttgcttatttttggtaactttaaataagactttggatgggtcgtcttcccaactcatttaccaatttaaccactggacgcaggactgagcgccccacagctttcggccggagtataacacgcgcttccccactcggttccccctgtctgccacaaacaaaccagatgtaatagctgaagaatgacgacactaaaatcaacctagagattcacatctaaaagggccgcaacacgaaataaacttctctctcttcagaggcagcggggaagaaaaagaaaaaaaagcctaggtgggttcggtttgatcc

SEQ ID NO: 139786 - DNA, 286 bp, Homo sapiens
tggctcagatgattatactggtaaattctgtcaaacatttatggggcaaaataaattcaacctcacaaaaatttgcagaaaataggagcgagaacttaacttgtttgtatcaggctagcaataaccctgatgtcaaaactggaccaaagacattacaaaacaacaaaactatagactattaccctgtatgaacataggtacaaaaatcctcaacagaatattagcaaatcaatccagcaatatataaaaaggtgaatatgtaaatcatgaccaagttggagttatc

SEQ ID NO: 139787 - DNA, 473 bp, Homo sapiens
gagcacagggctgtgttccaactctacttgttattcgttatatgagtctgaacatgttatttgaacttcagctctttcatcaacaaacatgccattagcacttaaacatgcaattagcacttgccttaccaaactatgatgaaagatttggccaaataattcaaagtgtaaacagccaaacataaaaatgtacaacttcattaataatcacagagccaaattaatacatgttgccatttatgaaatgtgaaaacagtaaagcggagtcagtacatattgggactgtgaatcaaagattttggcaaaatgtaccatggaccttaataacagtcacatcctttaacctactaattcccttctaaggactcatgccaagggagtaattaaaattgcttacaagatggttcaataaagtaaaaagatacgacctaaatgttctgcaatagggtaaatatattattgtatattcataa

SEQ ID NO: 139788 - DNA, 122 bp, Homo sapiens
gttcattccctactatttactatggtacttaatgtgttgacattttttcatctcccccactggactatgaacccctcagacatagcagccgggcacagtggcttatgcctataatttcagca

SEQ ID NO: 139789 - DNA, 207 bp, Homo sapiens
tccacttacatctgaacccaatcagctgggtcccctaaaagttgcatcatgggatgaggaaggagcggttctgggatacagagagaaggattgaaagtatccatagagctgggcacagtggctcacacctgtaatcccagcactttgggaggccgaggcaggtagatcacctgaggttgggagttcgagaccagcctgaccaacatg

SEQ ID NO: 139790 - DNA, 426 bp, Homo sapiens
tcctcctttgccttctgccatgacggtgaggcctccccagccatgtggaactgtgagtccattaaacctcttttccttataaattacccagtctcgggtatgtctttattagcggctaagagagtcacaacacagtcttagtgaattgactaatacagtcacaaatatgtataaggctgtccacaagcccagatagtcccaagaagttcctaagctcaccctatgactgaccctacagctcggtgaaagcagagatgaaggctaaggcagagatgaagctagttgcctgagtgttgatcatgtgcttgaacttgcaaacttctgttcttaggaaagactaggaaacttattgcttctgtacttttaaggaaatctctctctaataattagctgactactaaactagctgagcagagacttcagtgg

SEQ ID NO: 139791 - DNA, 398 bp, Homo sapiens
gatcctaccataagttcgcagagttgcttcctccttcacagaaaagtgtctcaactgtaacctggaattatttgcttattattatcaggggtagatgtcttacttctcccttggccaactaagtgaaactctaggaatgctctgtcatttctaggctgttgataaacgacctgcagatgcccttgaatcctcgataggggatgagatagaaaattgtgttctctgtgctgtcccaaggagggcccacactgtcaacaacagaggcacacaacattggggtaagtgaacagacattaaatgtgagaaataaggagatagcaggcatcccacctgcaaccagtagatgctttttagtggcttgtggatggttgctgctctaaagtccacagcagcactaa

SEQ ID NO: 139792 - DNA, 154 bp, Homo sapiens
attcaaccctttttcaaagataaataagaggagagctttatggcttgtttttttcttatacattttatacacattgagaagtaaaaatcatttcatatttctgatttgactataggatcttgtactgattttacttgtggtaagtgatgttcaa

SEQ ID NO: 139793 - DNA, 262 bp, Homo sapiens
tcacctcagcctctggagtagctgggactataggcacatgccaccatattcagcaggacatatacttttaaaagtgtgggatctgctgtcaccttgaggatgtactaactgggttgacttcatgtagggcatgggtagatctgagcagggcaaagtagactgcaggagatgttcgggatgccccacaccatgtcatgccctttgccactgttgatttcagccatagctgcagtgggtagttccatgcaaactcacgctcgag

SEQ ID NO: 139794 - DNA, 170 bp, Homo sapiens
ccacctcggcctcttgggattataggcatgagccactgcacctgactgatgatgttgagcaagtttctctatttctctgtgcctttgtttatgtcataggcaaaataccagggatgagtattctgaggtgctctccggctctgtaaataaacaaccacatgctgtaggct

SEQ ID NO: 139795 - DNA, 329 bp, Homo sapiens
tatatcatgcttgttggctgactacacaggaaagagtctgcattattttagatttgagaggagaaaaattacttggtcccacattctgaccaacagaatccagaggatcagagaaacaaggtcatccgcaatttatgttgactcttaatacttccaaataggtgcttgtcaacatttgtagaactgctgaatcatggaatttcagtgcaaaaggaaactgattcattcacctccttcagtccccaattccaacacttgaatccctagatcgctgctttaattttgcagatggtatcctctgagttaatttagcaatgtatgatattgct

SEQ ID NO: 139796 - DNA, 280 bp, Homo sapiens
aaaaaatccctctgttttcatcattttctgcccaactgatttctccccctctattttcccatgcaagcatcctctgggctaggtttggtggccactccattataatgccagtgcagcttttggggactgtggcaggtgcctggcccatctttacgtggaaacagcggtatctaaataaacctgacacatggaggaagaaatgaacctaaatgcaaatgctattaacatttctgcaagtcatacctatccccaagaagcatagctctcatgtttcttagtc

SEQ ID NO: 139797 - DNA, 406 bp, Homo sapiens
gtccttataggagggagggaagagactcggagtcagaggatgagacgtgatgatggaagcagaggttggaattgtgccatttctggaagggaacgcaagccaaggaatgtgggtggcctctagaaaaggtaagaaacagattgtcccctagagcctccagaaggaaggcagccctgctgacacctcgatttcagccccggaagacctgctgttcagaatgttgacatctagaagtataagataataaatgtgtgccattttaggccaggaaatttgtggtaatttgttacagcagcaataagaaacactagatcagcaaggataagaaacgcctggttaatcccagatggaaggagtagactgtagccaaaagcttgggtgacaggggccctctcggatgtttctg

SEQ ID NO: 139798 - DNA, 157 bp, Homo sapiens
gcagattttattgcttcaatgtaaggttctaaatataggaatttagagttactgatggagcagctttttccttttaaaaaatctgggcctgtggtagtagattgaaagtccagattaaacctgtgtgaggtggggttttttccctttagaatgtttg

SEQ ID NO: 139799 - DNA, 501 bp, Homo sapiens
gacggggttttgctatgttggccaggctggtcttgaactcctggcctcaagtgcccacccacctcagccttccaaagtgctgggattacaggcatgtgccactgcacccagccttctcagcacttttctacgtgaaaagttattatacacattttaagtgaaggttgttgaagatgcgaggtgttttgtttttgttttttctcttgtggctagcaaaaggtatgtgagatactgagaagcagcgaggagtcctaaggactcaagggttaatccgacaatcaggagagaaatcccacatttaacaaatactagataaacaccgatcataggtggaaacttgggctaggtgtcagggacttaaggatgaatgaagacagtgcccatcctcccatttaaaacatgtactatactatactattaggtgattaaagccgctacattgaaaaaatacattcttgctatgggggctcagaggaagaagcaatcgattcttatttgagc

SEQ ID NO: 139800 - DNA, 330 bp, Homo sapiens
tttaattaaaggtttccccctttgatatctacacattctaggggtagctgacatctgtgttcttaataacaacaaacagttcttgccaccaaaaagaagcaaataacatctagtacctgtgggcagttggctaagaggctgtggtattttttgtgtgtatttgctttctacctggggatcagagcaggcctggaataaatgtcgttggtgttgtccactgcaaggcttcaggaggacatagacaaagatcagcctactgagcagagagtggtccaggtattgaatggactcaatatcctagaaggactcacattctagcaggcacttttt

SEQ ID NO: 139801 - DNA, 238 bp, Homo sapiens
tactcaggaggctgaagcaggagaatcacttgaaacaggaaggcggaggttgcagtgagccgagatagcaccaccgcactccaggctgggcgaaagagtgaaactccatgttaaaaaaaaaaaaaaaatcagcctgctgtccataatcatgtaattaaaaaatagggcttacggaaaaagtaggattggggtacaaaatcaaaaatgttgtcagtggctcagtgaaaaaagggatggt

SEQ ID NO: 139802 - DNA, 486 bp, Homo sapiens
ggtgtcaaaagtgtgtatgggaggctgctattaatattgtaggtaatccattccttactgtgtaggaccatcatgtccttctgcaagacatcgagcatacctactaaatgctgatagcatccagcagttcagtgtgtcaccccaaaatgtccccaagaattcccaaatgccctctggggtgtgggtggtatcactctggttgagaaccactgctttagggatttattcttttattcacataaagtaattggcttttcctgtgcatttcatttgagatgaatcttcgtgtgcagcattggttccatctcacctgaaacagaccatgggatcttccaggacatctgtttcctctgttacacattgctgcaagaagcaaaacttgtttctgctttggagcctttgagtaaggtctaagcagcttttgctcttctgttgcaagattggaagggtaacgattttggtgcacaattaattagatgcctggaa

SEQ ID NO: 139803 - DNA, 205 bp, Homo sapiens
gtgggagcaggcacatcacatggcgaaagcagaagcaagagacagaaagtgagatgccgttcctttaaacagccagatctccagagaaccactcactatatggtgaagacagcactaacagcatggtgctaaagcattcgtgagaaaccctcccacgtgatccagtcacctgccaccaggctcctcctctgacaccgagtatcac

SEQ ID NO: 139804 - DNA, 277 bp, Homo sapiens
agatctgtggggaatagtatgactgtatatgctggtattaaggaattggggaggttaagagggaggagagagagatggaatttagaggctgattcctactctttgcatctttggtcttaacttcattgcctagtataggaagcacaagtccaaccttaaaatattaacacgtatcctggccaaattgagaagtgggtagagttggccttctagtacctcctatagggctggtacctctccactctgccactgaatgtcaggcatcatgtatttctgg

SEQ ID NO: 139805 - DNA, 125 bp, Homo sapiens
agatccccttcctcccccaaaataaaaggaaaagtggaaggattatattcacccaatttagagagagaatagttgttcattacctattgatttgttcattcctcatttagcgatgagacttaata

SEQ ID NO: 139806 - DNA, 360 bp, Homo sapiens
  misc_feature (357)..(357): n is a, c, g, or t
tctatttgtgaccaacatctaatatctataaagagttttactatagggctcaatgtaacaaattctaaacgtattctaccatttttgtttcttttcagggaatttgaacaagagatcagattcatggcagaagaatcacctcccaggttttattctgcttgaaccccgtggaaagctaatgattttgacatgaatcttctcctgtcttggatagccttataagattcttttccttttaaagtaaagtgcttttgattacagatgcccgccaccacacccatttttgtatttttagtagagacgggggtttcaccatgttggccagggtggtctgaaactcctgacctcgtgatccgnctg

SEQ ID NO: 139807 - DNA, 104 bp, Homo sapiens
  misc_feature (97)..(97): n is a, c, g, or t
aatgtttgttttggagaacctctactggcacatggagtcttcgagtacagcaaagaaagaaatatcagtatctccagagaaacaaaggagccataanaatccag

SEQ ID NO: 139808 - DNA, 436 bp, Homo sapiens
ttccatagccactcagctatgggctgctcatcctccctggatgaccaagtccagaactctatgtgggtataacatggagcaacccatgttagatggtggtgccccaggggcctgagcacgtatggatgtgtaggccgtggatctaagaggagtttgtggagccagcattctggggcattttcaggttaatacctgagagttagcagtctgatcttagatcacaaatcaaaatgggacaagcaagaaggggcatcaaaatttgaagccaggaggaggcagagccaagggaaactgctgtgaagggaaggttgatagcaatgtttgggagatatgtcctagaagtgtttcctaatggtcaacattctacttgataagcctagagatttcatcctaaacctagtaaatcagaatttgcaaaagagcagcttgggaacct

SEQ ID NO: 139809 - DNA, 724 bp, Homo sapiens
agttattcaaaatgtcttctggtttccaatatcttccttcttcaatccaaactctatattgctgctagagttatctaacatgtgagtttcatcaatcaccctccttaatatcttttagtgacttccagcggctaaacagactttgaataaaatccagacatcttgtggtggtaaacaaagcctttctttttttctttttttttttttttgagacggagtctctctctgtcacccaggctggagcacaatggcactatctcagctcaccacaccctccacctcccaggttcaagcaattttcctgcctcagcctcctgagtagctgggattacaggcatgcaccaccatgcccagctaaatttttttgtattttcagtagagacagggtttcaccatgtcagccaggctggtcttgaacttctgacctcgaatgatccacctgcctcaacctcccaaagtgctgggattacaggcatgagccaccacatccggcccgggcatggctttctataagtacctagagcatattatctagctagaggtatgtacttcttcagaggttagtcaaaaatgaaataatacttggtctttggttgctcttgtagacacagctattctgttgtctcctaaatgtgtatagctaataacctcaaatatggttccttttggtgtaactatgtaagctattagaaatactatcatggacgtagattagccacacctg

SEQ ID NO: 139810 - DNA, 329 bp, Homo sapiens
gaaaattggcactaggttcttttatacattttaactgtactggactacagcgtaagtttcagaaattttacttctattttttgaaggtacatagtgtaactgcttaagatcaatttggatttcattttcatcgtaaaaatgtcttgataaattccatacactgtagaataagcctttcactaaggctggcatcaacataaatgcagttattgcatatctggcaaaaagaggtcattaacagaaaaaaatgactagccattcaatgagacaaataaaaatacaaaaagttataatctcatttggtaacacattatttactatgaacagaa

SEQ ID NO: 139811 - DNA, 771 bp, Homo sapiens
tccaaaatgtttttgacttctctgagaaacttctgcccacatccacttttgtatcagtcattcttcctggctgcctttagtagatcattatacagataaaatgctaaagtatagaggacattcagggtaggaacaaatatggcggatatttactgaaatccagttatgtgccagatgttatgctataggttttaattgattttgtagatttttctatttttacaacagttaggttattttaacataatattaatatcaattattagcacctacaatgtgttggacatagtgctgttttatatttatacatgttatataattaccacaagtaatctgtaatgtattattcttattttataaataagaaacaagatttcagaaaagttaaataatgtatttaagttacatgataatttttaaattactgaggacaaaagctagaatgtgcaaacttttaaaggtttggatgtctacagaatgattatctataacactacaattaagtaatcacaagaagacatttagtgactgtagatctattggttacatggttgtattattattgttctttttgttttttgagacagggtctatctctgttgcccaggttagagtgcagtggcgtgatcttggctcactgcaacctctgcctccaaggctcaagcaatcctaccacgtcagcctccccagtagctgggactacaggcacacgccaccacacctagctaacttttgtattttttagagagacagagtttccgccatgttgcc

SEQ ID NO: 139812 - DNA, 254 bp, Homo sapiens
taatacataatgataggataatacgtaactcttaagtaacagctgacaaagtttttaagaattctcaaatatttaagataaaacaaatatgttaaaaggataacgatatgaataaaactaacttcaaaatatatattttgaggaaaataattcaagaggatgttcaagtctcatataataagcaaaaaaaaaaaaagaaagaaaatggggagtccataatatgaaaggaagaagagaaaaacaagtgtcatcaa

SEQ ID NO: 139813 - DNA, 1018 bp, Homo sapiens
actctgtcgcccaggctggagtgcagtggcgcgatctcagctcactgcaacctctgcctcccgggttcaggagatactcctgcctcagcctccagagtagtgggattacaggcatgagccaccgcgcccggccgacactcacttctgaaatggaaacactcagccccaactgggaaggtaaaacagaacagcacagaacgtgtttacttatgtaattaggaagtcagaagggtgctaccttcaggtgtaagcagttccaggagctcaggtgcaatcattagggctccgctttcatctacctctctgccctgttttcccaaactgggttcattctcaggctgggtcctccagagactggcaagacagccctatgagctctgggtccccatcttgctaccttcagaactagggagagaagagtttctctttctcagcagttctcataaatcctcttctactgagttttgctggttccagatgcccatccctgaattacctgctgggttgggaggccgatgttctgactggccaggcctgggccatgtgctctctcctggagcctgtggccaggcctaaccctgcttctagccacatttcatggactgagtgtggcagagggatgggtaccgcaaaaaactatggggatgttaaccagaaggggaatggctgcctgattggcaaaaacagcagaaagcctccatccggccagctggttccattcgaggccacagggccaaggttgcttggaggcttgcagtgcctccgttggctcaccctctgctcccggaaaaagcatctcaaagcacagatccaactgagggcctgctggagacaccctgatgtgcaaagagtagccagggactccaagggaagactgggattgtatctcgtccacctggcagaaatgccccatgcacagtgcatcaagacagctgcatagaaaacagtatggcagttcctcaaaaaattaaacatcgaattaccatatggtccagcaattccacttctggggtatata

SEQ ID NO: 139814 - DNA, 959 bp, Homo sapiens
ttagaggtgcccgccactgcgcccagctaatttttgcagtttgagaccagcctggtcaacatggtgaaaccccatctctactaaaaatacaaaaattacctgggtgcggtggcaggtgcctataatcccagctactcgggaggctcaggcaggagaattgcttgaacgtgggaggcagaggttgcagtgagccaagattgtgccactgcactccagcctgagtgacagagcaagactctgtctcggaaaaaaagaaagaaagagaaagagagagagaaaagaaaggaagaaaaggaagaaagaatgaaagaacaaacaaaagaaagacaggagggaaaataggcactacagattgttcacaattccctaactccatttaatataaggattttgatttctccttttcactgaaaaactatcctactgttctttggtggccaatgataacaaacttagtttatagctactataactgaggtttgggaaatcttcaatacttcacatatgtatagatgctggcagtgtatcaaattctagtttctagtctttagttctttaaaaactctttagtcactttgttattcttacatttcatttgtgataattgattaacatgtttgtatttgaagacattaatcacaatttagaatatataaggagcacacagatactactctgtatcttttagatttccttatacctatgaaagatgttattcagaattcaatatgttcatttaagtttgatataaatatttttctgaaaagaaagaattgagccataaatgaattgttgtgggatatgctgtttggtcctttgggctcaaggcttaatattaataagactcctgaactgagccaggaatccccaggtctagccctaattggctttgtaaccatgagcaaattcatttatctttgcatccttataaaatgtcctacacaaaaaatgttattttt

SEQ ID NO: 139815 - DNA, 182 bp, Homo sapiens
ctagaggatccccattgaccggcttccatttcaccggctatgtgctattaaataagtagcaccttgcgaataatagtctgcttccattatttttgtatattagtaatcaagcagattaaatacttcctaggaattatggttatttgttttacttcaaaaacaatgttgatttaaagtacact

SEQ ID NO: 139816 - DNA, 367 bp, Homo sapiens
ttcaccctcatgggatctgatctcaacttggcttccctgtgagaagaaaaacatggcagcaaaaacaagtatgatcttgtataccagcaatgggcacatcaagaaattatatagggcctaagcaggtacctgaactgaggtttgctccacaatgcagtcacagtaagggagaatgagggctcctcagtctctcaccttcccataaggaaatgtacccttctctaatcctaaagaggatttggttcacacagcttcatcctcatgctgcaaaggagtccaagaactcaagcagctgcactaagtgagattcaccacagccaagggtactctcattcaccacatgggagacttaagcatgcatgtgttc

SEQ ID NO: 139817 - DNA, 229 bp, Homo sapiens
cgtgatgcatagccgtcgtcatctgaaaggccggagtataaggaatcagaatgcataagctgaggtgagtgccagccccctgtttcacgtcatgcttatccgaggggcctgccaaagagtgcagatttgtacccaggtgaccaggctccaacgacatcctgcatactcggcggcacctccgcacctggcgagccttgcttccctgctgtccagacctcagactaccctt

SEQ ID NO: 139818 - DNA, 293 bp, Homo sapiens
tccttatctgtcctttttctgttgtgtcccacatctgatcagttaccaactattatcatgtctacttctaaatttcactctaatccattcctttctctctgtcctcagtgttctgattcttacactctgttggtctaacagtctcctgtgttacccaatgtttgtgaaatctctgtgttgatagagctgagaaacacagagatgtgctgcctcaccatccaccctttcctccccagtccattctcacattctagccagagagaaatttctaaaggcaaatcttgaccatgcta

SEQ ID NO: 139819 - DNA, 116 bp, Homo sapiens
ggccagagggagggaggagccaggagccccagatcctcattagctctttgctaagcaatccagaaagaacaaaaagatcagttggccaaatttggtaatccaggtgagatcatgat

SEQ ID NO: 139820 - DNA, 532 bp, Homo sapiens
tgttgcacctgttctactaaaacaaagaaatgagtcaacggcctcttttagctttaacattctctctgtctatacatttttatagaataatttttagttattgcagcaggtttcaccagtcagccaacgggtgtgtataacattaatcactagcactacacctcagaagtcttgcttattaagagcactcagcttaagtgaagaaattaaagaattttggtaggcctttgggacagttcaagtttaggttgtttgcgctcgggttgagagagtaaaaaactaacatttcttaacctaaccctttttctttctttctcacaggtaacaactatccaatagcttacctttaaaatgtcccctctattgttcctccctcagacatttttgatcacttgtcccagtttccatgagtcctgtatcacagctgtcacaatgcttgagctatttaggtggaggtaactttcagaaatgaactgctgaagggtgcagagtgctcaagaattagattaacaaagaaagtacacctaaattt

SEQ ID NO: 139821 - DNA, 422 bp, Homo sapiens
  misc_feature (411)..(411): n is a, c, g, or t
tgttgcacctgttctactaaaacaaagaaatgagtcaacggcctcttttagctttaacattctctctgtctatacatttttatagaataatttttagttattgcagcaggtttcaccagtcagccaacgggtgtgtataacattaatcactagcactacacctcagaagtcttgcttattaagagcactcagcttaagtgaagaaattaaagaattttggtaggcctttgggacagttcaagtttaggttgtttgcgctcgggttgagagagtaaaaaactaacatttcttaacctaaccctttttctttctttctcacaggtaacaactatccaatagcttacctttaaaatgtcccctctattgttcctccctcagacatttttgatcactaacccgagcgcaccaggnccgagcgtgac

SEQ ID NO: 139822 - DNA, 418 bp, Homo sapiens
tgtcgggcacaggggatatgtgaccttatagcatcttcctgacagcccaggtaaggaaagcattattatagaaaaggaagctgagttataggaaatttaagcaatttgtccatggcccacagctgttacatggtggctgagctaccaaatacctgattccagggcccaaactctccctgcccctcattttgctttctcattctcttcctctccccatttctgttctcttaggcctgtgaatgggcattccttcctcctcaaagcttagctgggctcttacaccaaggttgctagccctggacctgataggagtgaggtggtctaagagctagagaaggacattttgatagtttatgacttcagaaaagtccctgagtgacccttggacgtgttctaccccaagtcagcagtatttcct

SEQ ID NO: 139823 - DNA, 161 bp, Homo sapiens
gggcttctaggtgatattcatttttttcctcttagagaataggggatgtaaagaccatatcagaacctctgcaggtgcacataaatgtttttgttcaaataaataaaggtaataatggcagataagaaattcaaacattttgttttaagcaagatggtatt

SEQ ID NO: 139824 - DNA, 662 bp, Homo sapiens
ttcttgtcttttccataatgctccatatactacccattaaagactgccaaattccatgtaatagattttcctcagacaatttctgcttcccactggtgtggcaggtgccccaacctcagaatcgtcgccctggttttaccacttggagctgttgtagactaattcactgagggagagaaaaattggattccttcaggctaatcccttcatggaaattaaaacttggcactcagaaagaggatttatatttttctaccagcttcaaggttcactaccaaagggatttccctctccttccttcattttcctcaaaatctctagccttgtctgtcacttatttctgtttcataagtagcatgagacaaagggccagtgacaagtttttccttccctgctcatcctcctagagctacagagtccacacagggaggcagagagagagaacccaaacacgcacagacctaccaaccaatctccactcaccacatctgcctccaggccatttatttcattatagcacaggatgctcaagagaactcagggagggggacaatttcatttttcctacactttggaaattaaaattatttccaaaaaataatgtgctttgttcttcaagaaagctgaggagaagagaaaagaggtcaaaggagtaagaggta

SEQ ID NO: 139825 - DNA, 333 bp, Homo sapiens
cccacagaaccatacaacacagaaagtaaatcctaatgtaatctgtggactttagctaatgataaagtaccaatattggtttctcaactgtaaattgtatcactaatgaaagttggtaatagagaaaactgtggtatgggggcacacataggaactctctatactttctgtgcaattttctctgtaaatgtgaacacattcttaaaaaataaaacctatttaagaaaataaacacatcatttccctttccagggactggcttaaaaatggtctaatgaaatgtcaaaagagttctcctgtggagcttcggagaagtttccttaccctttaaaa

SEQ ID NO: 139826 - DNA, 392 bp, Homo sapiens
taactgcaactggggaagagtcagcgtaggcccttctctaaatgggccttagcccagggaagtcatagggtcccaaactatcacactgtgtggcagggcacatcaccaacaacgtcaaggtagaaaggaggctttttccctcagagggtgtgtgtgtgtgtgtgtgtgtgtgtgtgtgtgtgtgtgtgttgcggggtgggctggaagacattcctcaatcaactattgttcttccctacctatgcagaaaagacccacaaccatggtcgtgaacaaagcaaacacctctacactctacagccattggtgtgcatattacgaacatgattgcctagctttctacatcatttgcaatgcagggcaaaaagtacttgttagtttttttcatctag

SEQ ID NO: 139827 - DNA, 287 bp, Homo sapiens
gaggcctgctctattcagctggagtcttctatcaccctcacgaccaccctgcctattcattccttctcatcaggcccagcctttagtgcccttggtcattgccagagctcccgcctggccagcactcccccagtgagacccaagtccccagaatcaatcctcaagtgacactgaatctttgcaccagctgatgctgactcatggccctagctttgactagacagctgctctgtttcaagccctaacacccgccgggtgtcccacgtcttatgctacagggtcccgca

SEQ ID NO: 139828 - DNA, 218 bp, Homo sapiens
gaaaaacaagaaatagaaaaaaaggaagaaggctgaactaaagcactaattttataggtttagttttgtcagaatttaggacatttggaatcctaacattaaaagggaatttatagatgtctgttcataccttgtacaggaattctttgtacagcatccctgtggaagggcattttaacccacattcaattccttcagtcctaagaaccagctccaag

SEQ ID NO: 139829 - DNA, 303 bp, Homo sapiens
cagaaccaaggctggggctaagccttacatttcacatcagaatagatccaacggaaccagacacagacacaagagaaaaataaaagcatgagctcatttgtaaacatatgtgcttcagggagagatctcaggatggcactaaactgagagtcttttaaagaaagatggatacatctgcttatgtaaaaattaaaaatacggctgggcgtggtggctcatgcctgtagccccagcactttgggaggccaaggcggtaagatcactcgagccaggagtttgagacctgcctgggcaacaaagtga

SEQ ID NO: 139830 - DNA, 394 bp, Homo sapiens
ttgatccatcggcaaattctgatgcctcaacactcaaaatatacccagaatctggccatttctcaccactccactgctatcatccagtcaaagccaccatcacaccttaccctggactacggcaacagccttctaactcatctttttcactgtcttcaatctattcccatcaatagctacagtgatccaattaaaaagtaaattgaaacatatttctccactcaaaactcttcaagagcttctcttctcatttagagtaaaagccaagccctctggatgacctagaagacatataactagtgtcacatttcctttctgacctcaattcctactactcttcttgctcatttcaccccactcatatcaactccctgctattcttcaaacatgccag

SEQ ID NO: 139831 - DNA, 508 bp, Homo sapiens
ccacaagacatttacaaccaactgaagattgaaccaaggaatagacacagccctgttgcatgttcaacgaaagacaccttcatgacggaactcttgaacagagttgataagaaagcagctccacagacagaaagtggatcaagtaatgcttcctgcaggaatgtgttaaagggcagttctcagggctcctgtctcatcggcagctctatcagtactcaaggaaaccacaagaaaaacatgaaaatcaaagccgatatggaagtaccaaaagactccctgaatccaactgccagatgagaacattggacagtgggatcggaacctttccactcccagactcgggaaatcgctcgacaggacgctacctatgccagccagactccccagaggacgctgagcctctcctgcctctccagtcagccctttctgcagtttcttccatgagagcccaaacccttgaacgtgaagtgccttcctccacagacggccagcgccctgcagatagcgc

SEQ ID NO: 139832 - DNA, 282 bp, Homo sapiens
agaggatgaagacgatgcagttgcagattctgtatttcagagccacatcatagaatccaactgccagatgagaacattggacagtgggatcggaacctttccactcccagactcgggaaatcgctcgacaggacgctacctatgccagccagactccccagaggacgctgagcctctcctgcctctccagtcagccctttctgcagtttcttccatgagagcccaaacccttgaacgtgaagtgccttcctccacagacggccagcgccctgcagatagcgc

SEQ ID NO: 139833 - DNA, 303 bp, Homo sapiens
tgcttcctcaattttcttttttcaaattggcctattttctttgcctttttattctaccttcttggagatttacttgatttatcttccaattcttctattaaatgttttattttacttatcatgttgctaatttcaagtttttttcattgaaaatttttttctggttctcaatcataagagtcttttctggatatctcaattattttttgtttgtttgtctttagtctccctagttccctacactagctttgtctcctctaagccctctgttctgtgtggttttttttggtccctgatattcag

SEQ ID NO: 139834 - DNA, 138 bp, Homo sapiens
tacaccatgctctgaaactcagccatggttttgcacgtgttcccattccctggggtgctctcctcactgctctttctggcaaacccttgcccaacatacaagtctcatattaagagttaactgtttaatggggccctc

SEQ ID NO: 139835 - DNA, 192 bp, Homo sapiens
cctaggttttcagttcatggaaaggattggaggaaggtgggacaaaaaccagagaccaatttggaagctgtggtctaggacaaagatgatgataaactaaacatggtggtaccagtggagatgagaaggggttagattggagatctattttgtatttagaacaaaaattgcacagggattcaagatgagaag

SEQ ID NO: 139836 - DNA, 395 bp, Homo sapiens
tagacagatgacccttaaggacataatgttgagagaataaagcaagttgcaaagaatgcatacagtttggttctgtttataagaaatttgaaacattcaaaactaaatgatagtcaaggaacataaatatatgtgataaaactaaaaagggaaataataaactcagcaataagaatagtgttcaggggaaaggggatgggatcaggaaaggacgcaaaatttaaatttaaaaacaaagcagggtgcagtggcttgctcctgtaatcccagctactctggaagctgaggtgagaggattgttaagagtctgagaccagcatgggcaacacggtgagaccctgtctctaaaaattagctagtgtagtggcatgtacctgtagcctcaggtatttagg

SEQ ID NO: 139837 - DNA, 253 bp, Homo sapiens
cattgttttgtcatcatagcccttgtcgtcatttgtttctgaagtcaccataactaatgacctcagagaggctcctcctagtttatttttaagaggcgaggaagtagttccagcagtatgacaggtcctcagtgaccgatcacagtgaacagcaaactcttggagccctcttgggcctgtgctttgaggcccctgcctgccctggcatttctgggaccctgtgggttatcaggcctgaggcttctggacatcc

SEQ ID NO: 139838 - DNA, 367 bp, Homo sapiens
cgacaagtgcattctctgcacctgggtcctgggtggagaaggccaggggtggctggattccaggtgtgtctgctgccaggcaggccagagtcccagcgaggccagtgtgtgaggagaggccacctctgagagtggccctgaccctgggattgctgtgtagaccagggcaggcctgcgagccaaggcagcacagctcacccatgggccggaaagcagggccaggtatgagtcaggctgtggtttcggtgacaagggctgtctcggttgcccccacactgcaccccacaagtacttccggatgtggaacaggatgtgaaggagctgaggcacgcaaggactgtcgggctctgtcccagagatgtgcacg

SEQ ID NO: 139839 - DNA, 242 bp, Homo sapiens
ttaagtaaaaccttattatgaaaagagaagtctactcagcatagtcctgttttaggatagaatacttaattttcatttagctgactttatttcattttggctctactagcctttgtccgttatcagttaacacactcaaacatgtatactggaattaaacagaatttggcatgaagcataactgcttagaattcactccatgggcttttaatattaaaagtacaaaagcaactcactgtaac

SEQ ID NO: 139840 - DNA, 503 bp, Homo sapiens
ggtaaccctagttgagaagttcaatagcagaaattttctatatgtaatatcaataaaaaccctttaaaaaaaacaccacatatctgataaaggattcatatcaaggtatataaggaaagcttacaacttaataagacaatcaggctgggtgtgatggctcatgcctgtaattccagcactttgggaggtggaggcaggcggatcacttgaggccagaccagcctggccaacatggcgaaagcctgtctgtactacaaatacaaaaatgagctgggcatggtgccgtgcgcctgtaaccccagctactctggaggctgaagaggagaattacttgaacctgggaagctgaggttgcagtgagccgaggtcacaccactccatcttgggcgacagagtgagattccgtctcggggccggcggagggaggaaggttttgagactaagaataaactgtttctttccccaccaaccaggcaaatgctagctgatactgtaagcttaga

SEQ ID NO: 139841 - DNA, 308 bp, Homo sapiens
cagcatccctgacagcaagtgttgttaaacatccacgtgggttgctaaggaaggttagggaatctccctttcccagaagtctttaaaaataggataacatctgtttggatgggataatggtggtactgcttgacttggcagcttcttaagcaaacctatggtttggtaattctaccatttctatttctgatttgaaaagtaacaaataacttcagttcacctagaaaattgggccttataatgacttgtaatattgtcttataaaactattttcattgtcattaatagtgcaaaggtagataattgag

SEQ ID NO: 139842 - DNA, 276 bp, Homo sapiens
ccttagatgccaggtagacggccagtcaaggtacagtgtcctcatcctcccgttttcaatgcctcctttctccttaagagcttgtctctaccagagtgcaggaacttgagaagtaggtgtttagaaaacccacaatgaatattcctcctgggagcagagatgaggcacagtttgtttggttctgttgtggcctttacatgcacaaggatgctgggacagagctgctgtctgtggtgtttccagttctctgtcactgaatccctgtcactcagggcc

SEQ ID NO: 139843 - DNA, 439 bp, Homo sapiens
ctgacctcaggtgatctactcacctcggcctcccagagtgctgggattacaggtgtgagccaccatgctggcaagaggtcatttattaactgccaaagaccattctggtgttagcaatgtttggaacaggtgcttggagttgagggtatctgccatctcctgtacacttgtgctggtcaaatgcaatgagctcagcctttctctggtgtagggtgtaccgagtcccagtttaaaggacctcatttctggggtctcccatacgcgcatgattccatccttcacacccagagaaggcagggtatttccatggctttggtgcacactcagtggccagaagctttgagtatcctttatcacactaaagttggcctcaatctcaatctctctctctctctcaatctctctctctctctctctctctcacacacacacacacaca

SEQ ID NO: 139844 - DNA, 234 bp, Homo sapiens
gatgaggtccccactctaatggcctcatttgaacttaatcgcctctttgaagaccttatctctaaatagcactacagtctgtgctactggggattggttcttcaacatgtgaattttggaggggaacacagttcagccattaacagttggtaattaagaaggaaaacaagtgatttgtaagaattacttttttctcttttatttaataaggtttgtgtagaagtgcaattgtta

SEQ ID NO: 139845 - DNA, 205 bp, Homo sapiens
aggggatagcacctatgaaagctcttatgggaggactgatgggttagggaaatccacctgggccttagaagggattggagctggggattggagccttcttaaggttagaaggttaaagaaagtagtgctaataaatttcagatcctgaaatgttagaactggaaggggccttaatgattatcccgcacaaccccccatgttatta

SEQ ID NO: 139846 - DNA, 209 bp, Homo sapiens
cctgggttaagccagttaattatgtcatgaggcagctttaaggaaacggccatatgttgaggaacttagccccaccagcaaccatgtgagcaaatttggaagctgatctctccacctgtaattgaaccttcagatgaaactgtagcccctgctaagagcttgactacaattcatgagcgacctcgagccagaggcacccagctaagcaa

SEQ ID NO: 139847 - DNA, 407 bp, Homo sapiens
gattatatatccaggcttgacactatcttggttcaggcatcaggggggggtcttagaatgtattctcctgaggataaaggagaaccactgtatctaagaagcataacagttttaaagtcagctaatacaagaggagtaaaataaaaatggattcatttaaaatcagataaaattcagagcagaaaaaaatttgtttgattttgtctcagttatttgagtttgagatttccagtaaaaaatgacctagaatcctatgactatttctattggtccacaatccaaatttccagattgttcagtctactaagcttcaaccaaatcatattacctctcagagcagtagaaaccagatcaattaggacaaattctagaggaaacctcatcacacttccctcgaaaaaaaaaaa

SEQ ID NO: 139848 - DNA, 1003 bp, Homo sapiens
tagttaggaagctataatccaaatgagaagtgggaagggccaaactaaagtgataggtagggaaggaaagtaaacagataaaagctggacttggtaagtggcaaggaaacatagagggatgacttccagatccaagtgggtggatggttcgtgccttcatcaaggagagaaccaaaggaaaaggcacttactcgatgactgggaagaggataagtttttgggggcatggagtctgtgagattttaagataatgttggggcctccgctcatgaagtgctaagaccagcatgaaaaattttggtttgggtattcattatagagtttgacaaggcagataaagcacagcagcatatttattgattagaaattagcaaaaatgaaaaactgcctgcagatcatcttttttttcaagatcagaaaacagaggcaagtttagtattgatattttaacatccttggcaaaatcaatcttaacttctctgtttggaaactttagaagtgagtttcagtacaataaaatgtaattattttccttgaagtttcaaaaagcatttatagtttttaataacatttccattgcgtgttgccctttgagccaccacttttcttttcaattaactgttgttgttagtttttctccccctacatacccatatcctaaagttggtatctaccatttccctaaatgtttttatatttctatcacatgtgcacatatccctgaaattatatataaatttgttgaagtatcatgctgtacatatccttctccaacttgcttcattcacctcagtgtttttttaagatagatctatgttgaaacatgcaaaatatagtacagtagtcctcattatttgtgtcttctatatttgtgaatttgcctacgcgctcaaatgtactggtaaccccaaagtcaatactttaaacaagttcctttttggcaagtccattttggtggaaaccattgcccaagggaggggcaaaaacaaattacacggtttaa

SEQ ID NO: 139849 - DNA, 717 bp, Homo sapiens
ctcgggcccgcacgccgttgttcgcgtcacccccacccagctcccttccgcgtgtgctcggagggcgcggcgcaccgcctacgcaggccggagcggcttccccttccctcacgtgctctccgtccgcggcctgcgcacacacccatcctggggcccgcgccccgggcctgccctggagcgccccgcgcttcagactcacccacgtgtgcggcggcggcggcgactgcgtggccccgcacccgggcggtggagagaaacgggctgtcaggtggccgcggcggccggcgtgcgagggaccggatgcccaagccgggcggatttggaacccggatagctggtaatcgtggcttgttttgcttcgttttcttttccagcaacgaaggttttgggaacagtaaaatggttcagtgtaaggaacggatatggtttcatcaacaggaatgacaccaaggaagatgtatttgtacaccagactgccataaagaagaataaccccaggaagtaccttcgcagtgtaggacgatggagagactgtggagtttgatgttgttgaaggagaaaagggtgcggaggcagcaaatgttacaggtcctggtggtgttccagttcaaggcagtaacatatgcagcagaccgtaaccattatagacgctatccacgtcgtagggtcctccacgcaattaccagcaaaattaccagaatagtgagagtggggaaa

SEQ ID NO: 139850 - DNA, 406 bp, Homo sapiens
gaagcggtggcccgggcggcctcacatcggcggcgcctgccggcggggacaagaaggtcatcgcaacgaaggttttgggaacagtaaaatggttcagtgtaaggaacggatatggtttcatcaacaggaatgacaccaaggaagatgtatttgtacaccagactgccataaagaagaataaccccaggaagtaccttcgcagtgtaggacgatggagagactgtggagtttgatgttgttgaaggagaaaagggtgcggaggcagcaaatgttacaggtcctggtggtgttccagttcaaggcagtaacatatgcagcagaccgtaaccattatagacgctatccacgtcgtagggtcctccacgcaattaccagcaaaattaccagaatagtgagagtggggaaa

SEQ ID NO: 139851 - DNA, 364 bp, Homo sapiens
gatttatactcttcctggtgaactgaaccttttattattatgaaattttccttttaaagactttttgactaaaagtctgtattttctgatatatattgtttttctttaatttttttctgaatacagaatgtgagggcatctttgcttaatttttacatggctttttttcttccttttatttgtaatcattttacatcatttatggtgcatttctctttttgagacggagtctatctgtcgccaggctggagtgcagtggcgcaatctcagctcactgcaacctccgtctccagggttcaagcaattctgtctcagccttcctagtagctgggattacaggcgcatgccaccacgcccggctaat

SEQ ID NO: 139852 - DNA, 530 bp, Homo sapiens
ccaataaacgttggttgaattaaattgttagaatttccaagatggcccccagtgagccccacttcctgatattcacagccttgtgtaatgccctccctgtcagtgtgggctgacgcttctgatgaattgagtaagggggaataaactaggttacaaaaggcagtgtggccacttatgatctctttctgtctggactactcacgctgggagaagccagttctacattgtgagcaaccctatggagaagcccttaagttgctgaagcctccagccaacagccatgtcgctgattttggaaggcgattttggaagcttatctcccagaccaaatcaagcctcaggtgactgcagccccagctgaaacattgattgcattcttatgagaaaccctaaaaccagagccatcagctcccaaattcctgacccacagaaactgtgaaataataatgtttgttgttttaacctgttcatttttggaggtaatttgttacccggcattaggtaatgaatatactggccaattaccacat

SEQ ID NO: 139853 - DNA, 479 bp, Homo sapiens
tgctagatgacaagttagtgggtgcagcgcaccagcatggcacatgtatacatatgttagccacatttcaagtgttcaatagccacatgtgctgagtggctaccatactgaacagcacagattagaaaatttccatttccatcatcacagagacctctattggacagtgctgtcttagagcaagtttgtatggcatgtataggtgaggttggcttggaatcagaactggggtttaagtgccaactacactcttcactaatttgtgatactggataaatcacaaccttgttgatgctcacttgccttatctataaaactgtgctactacctttcctatccatttcacaagattgttgggaagaacaaaaaagacaatgtatgagaaactaatgtgagaactacaaaatatattcacaagacagaattataagtttagagggatttttgattaaagtacaaattggtctcttcctacaaaa

SEQ ID NO: 139854 - DNA, 574 bp, Homo sapiens
gttattaatgtggaacagagttcttgccagctttgatccagccccccaagtctcggagttatggggcagggttgggggccagtgctacactgtaaaaaactcccagagtgctggggttataggcatgagccactgcgcctggctgtgatgatcttttaaattaataacagggtctcctccagttaaatcaggatctctgtgagtagggcccaggtattggtatttttttaaatgcttccaggattattctaatatgaatcaagggttaagaacactggtttgggctggggacagtggtgcacacctgtaatcccagcactttgggaggctgaggcgggaggatcgcttaagctcaggaattcaagaccagcctgggcaacaaagcaaaactctgtctctacaaaaaaaaaaaaaaaaaaaaaaattagccaagggggtggtgtactcctatagtcccagctactcgggaagcagagatgggacgatcacttgagcccagaaggttgaggctgtagtgagccaggactatgccactgcactccagcctgggtgacagaatgagaccctgtctcaa

SEQ ID NO: 139855 - DNA, 359 bp, Homo sapiens
gagtttcagagagctccactcctcaacacaggcagtcagcctttatggacagaaaacagaagtgaggtagggaagcaccttgattagttacagatcagccttgcctcgttggaacagtacctgatcccttggccgcctgggattatctgaagctgagctgccgtgattggctgagactcagcaacctgttacagactcacattcccaagttaggctttcacttagttcacatactaaattaggctgtagtttgttaactaaggactcagtcacagaggcatcctcaggccaaatatagttaaatttaacaacactatctacagcagtaccttctggccgcttctattctctcagatgga

SEQ ID NO: 139856 - DNA, 406 bp, Homo sapiens
tgggtgtgccttgccttcgggaggagggctcctgtttgctgggtgctgaggttgtgcacagagccaaaaactgtttgctaagtaagcaatggattgatgcttacataaacagattcagcctgcttttaagacacggtaccaccctgcaagagttaggactaagataagcgcgtgaaggattataacaaaacccctagtggggaaggaccacaaaacagagatacgcagggtgcagtggacttaaagacgcacacagtggagcagggaactgagtactgtgtgggtgatttcaggagaaactttataaggagcgtggttttgaacttattgttgaaggataggcacgtttttcacagaagaagataaagaacaggctttttatttaaatgaggtagcataagaaatg

SEQ ID NO: 139857 - DNA, 551 bp, Homo sapiens
cccgtctctgcttcctcaatggcaccttcaactctgtatcctcatatggcagaagggatagaagagcaaaagggggatgaacgctgtgtgctcacatggcggaagtgcagaagagcgaagaggtctgaacttgttccctccagccgtcttgtaaggcactaatccattcataagggtggacttaatcatccatgacaatcacttcccaaaagaccctacctcttaataccaccacaatgagaattaagttgcaacgttaattctagcgggacatattcaaaccatagcagtactcatattattacaactacactactagttgaactagtagttgtgggaatagcaatgattggatggggaaaacaagagtaaatggccaataccaacagatacatgagccaccgtgtctggcggtaaaactttttaaaaattttttaactctacattttagtgtgctcttgagaggtaggaacatttgatgttttatcccaaaaggggattcacaaaattaattttctctatatatgttttttaattgaggtaaaattcat

SEQ ID NO: 139858 - DNA, 521 bp, Homo sapiens
cccgtctctgcttcctcaatggcaccttcaactctgtatcctcatatggcagaagggatagaagagcaaaagggggatgaacgctgtgtgctcacatggcggaagtgcagaagagcgaagaggtctgaacttgttccctccagccgtcttgtaaggcactaatccattcataagggtggacttaatcatccatgacaatcacttcccaaaagaccctacctcttaataccaccacaatgagaattaagttgcaacgttaattctagcgggacatattcaaaccatagcagtactcatattattacaactacactactagttgaactagtagttgtgggaatagcaatgattggatggggaaaacaagagtaaatggccaataccaacagatacatgaaaaaatgctcagtctggacatggtggctcatgcctgtaatcccagcactttgggaggctgaggcaggcagattgcttgaggccaggagtttcagaccagcctggccaacatggtgaaaccccgt

SEQ ID NO: 139859 - DNA, 134 bp, Homo sapiens
gatgaccaagagtccagtgtgcacaatcctggctgtctccagaggcaaccctcgcatgtcatagcaatggaacatgaagaggtggagatcttttggagtgatcagagaaaggattaaaacattttaaaatgagt

SEQ ID NO: 139860 - DNA, 610 bp, Homo sapiens
ccatctttgatatcccagccagatgttctattcgataaatgaaactaatttactctgcaagcagcaggcaacagctgaatctgagacttcccagtcctcatccccttcccggtgggatggggccaggtggggggaatatgtgcatctggttacctgcccactcaaattaggtaaacaggttgcatagctgcacggagaggcaaaatatagacagactgatcaagagtgtgggttctggagccagacagcatgggttcaaatcttgccttttctacctgttactgtggactttggataagttacattttagagtaagtaaatggttgaacaaaacaagatttttttttgacatactaactctgtgccaaacacagtttgtggtactagggatacatccgtgaacaaaacagataataatccctgtctcggtggagcttagattgtctgagttcttcagctgtaaaaatgagatgacaatatattttatattttaggttgtggtgaggactaaacttgacagactcctagaacagtacctggtacccagtcaatgctcagtaaacactactaattactgttttactgtacacgtgatcatcattggatgtgt

SEQ ID NO: 139861 - DNA, 283 bp, Homo sapiens
tttcagccttggatcaaatgctgcatgagagacatgtaagagttttaatcatggagtgcagtagactagctgggacgtctgtgacagcttgatttcttccacatctcagatttccacagtgtaccccggtgttttctcaccttcagtcactcataggcatcttaggtgaggaagctgagaaccagatagattcatccagtgtcctaggacacacaggatagaacgcaaggatctcacttagcccagtggatggcagtcaattaatggagcgagtggcttagtc

SEQ ID NO: 139862 - DNA, 565 bp, Homo sapiens
cctccttggcctcccatagtgctgagattacaggcatgagccactgtacctgacccctttcaccttgtttagcctgacaacccatcttctccctctcaggtctttccatctcagtcttctgcactccaggcttctgcgtcttcttcctctgctcagcctttaattgtcgatgtttctggttctatagcttcatcttcttgtgtgcagtctctgtgaatgtaccctgtggctttattacctttgacattcttctgtcttctaaatcatctcctgaatagagtgttttctcctgtcctgggtgtcccgcagcccatagaagcagccatgctgtgggacaccctgagtggggtttgtgttacctgttgtgcctaccatgcccttccccgccgtggatgcacaggtgccccaccttagctgccccagatgctgtttatccttgatagtcaccttttaagccttatacaggtctatcaagttgagtcaccattaccacttggtgtgtgctgtgccttgtgtaatactgcagttccgggagtcatccaacctggaatgcatgctttgcggg

SEQ ID NO: 139863 - DNA, 391 bp, Homo sapiens
ccatccatatgtgtagccaatggaatccagcttaggcagcatatggagacccgacatctaaaaaaattttatctttatttttatattatttatctctgagatggagtttcgctcttgttgcccaggctggagtacagtggcgcaatctcggctcactgcaacctccgcctcctgggttcaagcgattctcctgttttagcctccgaagtagctgggattataggcgcacgccaccacgcccggctaaccctagcagttttcatgtcgtagcaccccgctgccccactcaccatcctgtttgagtgtaaaatctagtggttatgtttaatttatccctttgtctcatcctccctcactgtacgctcagccaatccttgagcacactctaaat

SEQ ID NO: 139864 - DNA, 127 bp, Homo sapiens
atcctggaaacctgtacaaaaggttgagattgggcaaaagagagccagtgaagatacaacttcaggttcaccacccaagaaatcttcagcaggaccaaaaagagatgccaggcagatttataaccct

SEQ ID NO: 139865 - DNA, 178 bp, Homo sapiens
ccactaattagttttgctcttagacaaagagaaagcaaggctcaaagaccagagttttcagctgtctagcttaaattgactacctctacatgttcagtgtttatttttactcttatcttctatttacaacacatgacaatgactttccatttacagtcatgacacacagtttcttttt

SEQ ID NO: 139866 - DNA, 257 bp, Homo sapiens
ctgctattcagaaacactccaaagagaggcacttacttcctgattacacattcaaataaatgcataacatgcatttcaacttggaatcactttcttaagaaattaactagtagaaatcatgttactgcaacatcatggttgaagtcatgccaaaactaaaattttaatacctaaaataacttcctcagctacactgactgtacaaatatattaaggcagtaatattacccactgtaactcataaatattattatcct

SEQ ID NO: 139867 - DNA, 443 bp, Homo sapiens
aaaacagacttggaacagggaacggggaaggccttgaatgttactaaagcatttactttgttttctaaaggtagcagggttctgaagtagggaggtaagtgattaaaactaagaagagtataaagttaggcggtaagtgacaaactagatagggaaaacactagttatctattataatgatcctagggaaagatgacaaaggtcagaactagggcagtagagatggaatagaggaagcagatataataagagatgctgcaaaggtagaatgacaggacttggcaaatgattagacacaaggagggaaagtacagggataagattacgatgtcaccaaagattttaggaagggtttctaggagaaagactgtactttttaaaagcttccttttctgtccccatttgatttttggaaacagttcaaataagtaacaatcttctct

SEQ ID NO: 139868 - DNA, 801 bp, Homo sapiens
aaaaaaaaaaaagagttgattgatattgcaaaccaaaagcctctgttaagacagtataggaaactagtggtcaaattggggcctagcaatacattcagaagtcaaatgctacttttcattctttggcttgaaacaccatttcttccaggattgcagctaaagttttcatgcatttcttggggtgtcgggaatgcctccaagtgcatctttttgtagaaagtgatcatggaaaagccaggctctgacacactttgagtcctgtggattggagagaaacttcaaaattactcctcaacctgacgaccctagtgtataacttgctcagccacaggacaggcagtctttcttgattttatgtacatctttacaggggaattggattattcgttgtaaaaattcattgcagttttagcatttcactcaccatggagttcctggttttatcctactccactttttccagttgattgctttcttgagtccctagtaagtagttcgaatgcaaaagaagttggaaattttaagctaaaaacaagtaattttgaagaagaaaaaatcctgagaatttcattagaagtagttcttcaccagtagacaaccaatcaactgtaagttcaggcaggcggtcctgctgcatcagaaatgtttaaaggcctgtattcccagctactggggaagatggtttgaatccaggaattcaaggctgcagtgagctatgatcatgccactgcactccagtctgggcaacagagcaagacctctctaaaaacaaaaacaaaacacaaaacacacacaaaaaaa

SEQ ID NO: 139869 - DNA, 166 bp, Homo sapiens
ctggatccaattaacatgactcttgtggagtaatgataacagggcttgagtagcctggattacaccctgccccagaaatccaataacagaaggcgtgaagacaggaggtcatggacagtctagaggagcggaagagtctgtctgggggatgacttgggtgcttgtg

SEQ ID NO: 139870 - DNA, 340 bp, Homo sapiens
gggccagcggacactagtggaaggtggattcaggagagtatggagacagggacaccagctagggaggctactggtgatggggaagaaatcttaacccttcatctcatcgtagtacaatcaagtcatccctcagcaattactcctatgttaaatgtgatgaatacaacgtgttaaagacaaggcacctgtcctcaacggagctttaatctctactattagcctttactaacaaattacagtgcagtgcccttagcagcaaaattttctcgccaaagattcagtattgttagcttatttcataatgacctgtagtaagtcattagtactactggtcccctcc

SEQ ID NO: 139871 - DNA, 119 bp, Homo sapiens
tcattctttccacacacaagatttccccactgcccagttactctcacctttttattttcttgactgttatgttttacttgacgctggaatcttaccttgtactctcacatttacatgga

SEQ ID NO: 139872 - DNA, 519 bp, Homo sapiens
taggagccatatatcatgtccaggatgctttttttctctggggccagccccattctttttgccactggttggtttataagataaaaatttcagaagctcatcactccctgaataatatctgtgaccaagaataataaggaaggcatggtttgttactgtctttctttagaagaaaccctctttgcctcttttggctcagatattagaacattggttcaaataatggaaaaaaagagctcaccaaatcaaaggaggaaattaaatcaaggatagttataagtatccactgataagttatttttgatctgtggtcctttgccatttatttcctgccattgctggtggtgcgaggtcagttactctaaagggatagtaggctttagtttgttgtaaatcatggaaaacctcctagagggcagcaatcagtaggatatgagctgagttcttgctatttactgtggcatttacctcagtgagattccttacagagacagcattcatcaggacatattttccatt

SEQ ID NO: 139873 - DNA, 273 bp, Homo sapiens
taaggtatggagctagaggactaataccttactcgtacaactgtgtacgagtaagaactgaaactggcaacggtaaggaagaggcttttcaggaaagaggcccaaggaagtttagtatgactcagacaacaatatatgcagagcgcaggggacaaggtcaggcatgtattccatataattcatcaatttctacttcttaggtctaggctagcccttacccatgctctagggcccagcttaaaggacgacttcctgaccatccccttgccctcc

SEQ ID NO: 139874 - DNA, 470 bp, Homo sapiens
aggttcttttcactaaatttaatactatttccttagttctccaaactgatttattaacagcctatccaaaacactataataaaatgaactgctttaaatttggaggcaaggtaggggtgggatactgagtttcaataatcaggtttcttcattattcttttacctgaatgggctggccaccaggccacaattgtataaaaatcagattttaaatgatggaaaagcttttctgtgtggctactgaagggagaaaggaagacaactgagacatgccccaccttgctggctgggggctggtgacatctgtgggcctcagtgttggactccagatgcaacaaagcctaaagttttgaatatgtatgaaggtcaatgtgatgttttccaaaaacagtcataaaagatggctgtgaaaaaccccctagtataacaactgtatgtaacaagagcatataggtagctgcagatgaatg

SEQ ID NO: 139875 - DNA, 391 bp, Homo sapiens
attgtaatgatttgaaaagtgataatgagagaaaaactgtttcgaagtttaatagggaaggaaaggggaatgatggcaccttagcttgaagggaagggtttagttggtgtgcctttttaaaaaaccctttcttttttttagatagaagattctagcatcttattaggggatcaagaaaaaagtcaagggtcagggaggaactcgaaagatgcaagggtataggaatagagttagatcttagaggaactgagatgggatattaagaataaagacagttggtgagccttggacaggagtaaggatgtctgccacctcctttcaggtggttggtaagtttatattggatagcatcttctcagggaagtggcaggaaagctctgctagagtgaga

SEQ ID NO: 139876 - DNA, 404 bp, Homo sapiens
tcgctgaaatcgctccggaaagttaatgagatgttccctctgaattgatcattcctcccatttggaaggaagataattttctgggtggatgagcattgagtagtttcagtttacctcagtttactgatttgctagaggatggcatattgaactttgattatgtactttcaaaagtgaaaatgccacagtattgtactgaaaatggccctccttagccttggaaggatggtcatggtgggaagcgtttgctgtattgctggtgcacagaccatggaaagaaatcccttttcacgtttcaaagtctatcattgtagccataataaaattggcagaattgaatgtttgctaaaatgctgtgatatagctgatagggttttaattttttaaaaagacaatttaccttt

SEQ ID NO: 139877 - DNA, 747 bp, Homo sapiens
gtggtatctcattgtggtgttgctgtgcatttatttattgattagtgatgttaagcatcgtttcatatgcttattggccacttctgtatcacctctagagaaatgtctattcaagccctttgaccattttttaatcaggttactcgatgtttttagttgctgaattgtaggagtcctttatatattctgaatattaatccattataagatatatgatttgcaaagattttctcccattccatacacatagtaccatttgtctatttttgcttttgttcactgctttttggtgtcatatccaagaaatcattaccaagtctactgtccagcttttcctccatgttttcttctaggagttttatagtcttagtcttactaggtctttaatccatttgagttaatttttggatatgggataaggccccagcttcactttggaatatgcatatctgtttggttatcccagtactgtttgttgaagagactgttctttccccattgagtggtcttggcagtcttgtcaaaaatcatttgactatttatgtgaaggtttatttttgggctctctattctattccactggtctatttgtctttacggcagtactaagctgtttcaattactgcagctttgtaattggggagtgtgagttctccaattttgttcttcttcaaaattgttttggctagtcagtgtctatgagattccatatgaattttaaggtgattttttttatttcctaaaaaa

SEQ ID NO: 139878 - DNA, 350 bp, Homo sapiens
gcagagacactgtcccttttgaccttcaccgtgacctcatggggaagagaggacagaaggagaccgaccctattaagtttggggccttgaccaaggtcgcacagccagggatacagcagggccctctgatccccaggtggtcttttcaaccagagtacatggccccacttccagctgaatgtgccgtaaaggcatcagatgtcccaaaagtttctctccaacagtccaaggtcatcatcacctcaggctttagcaaatcccagagcagggatcacggggaaggatggtgcattttcaggtacacctcctcttcccagttcaaaggaccctgccgcacaggccacatgtca

SEQ ID NO: 139879 - DNA, 236 bp, Homo sapiens
ggagacagagttgagaattcagggaggccaaggcagctagaattggcagagggagagtatcagagaggagggaccttcacagagaaagaactttagaaagctgcagaaagtccctttgagtctttaggtgagtattgaaacagtttatgtgtgtgaggaaactagtcggtattctgggaaaaataattacctgaaacgatcaagtgaacgaatcctcgattatcacaaaggacaag

SEQ ID NO: 139880 - DNA, 176 bp, Homo sapiens
catcaggttccagctgaccaaatgtaaacttatttaagtatgtttgtagatcttgagctcttagccacaaacatcactttaaatgatgagtaaaaatagataagtacttcaaacattggcaaacactcaaagattcaaaaccaaatgtttcttcctagtttaccttgtttaaaaag

SEQ ID NO: 139881 - DNA, 128 bp, Homo sapiens
taattcccagggtctaacacgtaagaggagctcacacaatgtggaataaatgacagggccctctgcaggagggtttgctcagggattttttgttttggtgaggaaacagaaaattgctcttggtggag

SEQ ID NO: 139882 - DNA, 536 bp, Homo sapiens
catctgcacagggaaagttttggttctgggcagggattatagcattgcccccccagaactcagatgcctggatctgatggcatcttacaatgaataaaatccatataaacaagatgatgtccagaaaatactaatgcaaatatccgtgaatgcaaaggattaaaatcacactaaaaagtattaatagtatttttttccatatcagccaaggaggaataatcagcaatgatataatttttcatttcattaggaagttaatacagatatgatttatcctctgggaatctttttttacaacccctctgaaacaaagactcccagcaagggaagaattatacctcctttaagagttttcaccaaaaaaggcctgaaagcaacagaacggcatctcagaattactgacccttgcccggacacgcattaattccagaacagctgcaatgccctcagtttgctgacccctgaactaaaaaagcctctatttatttgttactctttacttctttgaatcctgcatttttctttttaagtgaaac

SEQ ID NO: 139883 - DNA, 229 bp, Homo sapiens
caaccctgaagagcattgcacggagcccagcagaaaccccagtaagcagacatcaccacccctatgttacatgttacaggttggtaacatagggatggtgatgaggaaatgaggatttggtgggcggacgtgttggaatcccacagttaagctgcagtagcaccttctgacaccaaaactctgttctccttccatctcctggctttcaggtggtccacaccctctcctg

SEQ ID NO: 139884 - DNA, 644 bp, Homo sapiens
cagtgtggtatattttaaagcaaagtaatattttcctttaaaaaaaaatctgtattgtcatgctatcaggtggaaatggggaagagaagaaaatgaaagcaagtggttcttgataatattttattttgcaattccgaagaaggattacttctttgggaaatccattctttgtcttgcctttatttctccttcctaaaacttgaggaggaggttgaacagggctgccaggccatgctttgttttagaaccattgtgttcccttccttcataaatcttgctttgctaattctgcttgaatgttcaccctgaaaagttgataggctctagttccagggtgctgttaaaatacatttttaaaacacattaccattatattttcagtaatgaaagaccctaaaaagaggttctgtagagttatttcccttaatttgcttcatgttatttggtactaaaaataattgaagtaagttatttagggctaatttttaaaatactggcttttcagtaggttctgttacaagttgttatatgttaatacatgggtttgttatctttaaaaatctaggtctgtttatgtggtaatgtcagatttattcatttttatgtgggccagtcatccccactttttgccaagataataggct

SEQ ID NO: 139885 - DNA, 182 bp, Homo sapiens
tcaacgatacacaaattctcaggtttttagactttttgtccctttcttcaaccctgttctaagccctgacatccttcctagtcctttggttctattttctatcttgtttctttgaagtttaatttctatgtggaaagtgagaaaggaacactaacttcaggtggagcgcacagcaggacagg

SEQ ID NO: 139886 - DNA, 369 bp, Homo sapiens
cattctatctaattaactatatttttgtacccattaactatccccctttcctttcctccccagcctctgataactatcattttactctctatctccatgagttcaattgttttaatttttggctcctacaaatgagtgaaaacatgaaatttgtctttctgtgcctggcttatttcacttaacatggaacctctagttctatttatatttttgcaaatgtcaggatctcattcttttttatgcctgaacagtactgcattgtgtatatggactacattttctttaccatttgatattgtttggctgtgtccctacccaaatctcatcttgtggttcccataaacccatgtattgagggagggacccaga

SEQ ID NO: 139887 - DNA, 481 bp, Homo sapiens
agggaactgatgagaaatataatactgttttgtcccactgcatcactaaagtcaacatttatgttgaacttcatagaactaaaggcaggcaagtgatgtgcctattaaaaggaagctaaaagctcaccaagaaaacctgttctagaaatgtttattatgttcaaaagaatccagctgttaggagccagggtccactagacatgctgaacaatgaactcctttagcagagacttcccatttgggaagccccagtggcagtaaacagctcatcaacaggccccttcggctggcagtttccaaaagggcagctgttgagccagcataggttcctgtattgctacacaaaggatatttctctaaaatcgttctcaccctggaggtggctctgacagcctaaacacaatcttactatgttagttctagtgtgtgtcttccaggagctaatccataaaatcctcttgcccagttccaagaccactga

SEQ ID NO: 139888 - DNA, 413 bp, Homo sapiens
cctgaaaccgtgaattcaaggccacatttgttttaaccaaaaccagaaggaaaacactgaaagaccacactagtacagatttcgggatcccaagatgactctccctgaccccgtgacagctgctcttggagtgcagcgtccccgcgtggagggcaaccagcagcaccacctccccctgcagcagtcagccctgcaaactcaccccacggcacgcaagtcgacccccacaaccccacagcctgtcactactaggggagaaaaactatttcaaaagaaaactataaaaatgtaacacttaaatgtttccatgataaatatgtaaagaaaacttaggttctatcaggggccaagttgtaggctctgtgggccacactgcccaataggccatgctgggacaccagccttggatgatg

SEQ ID NO: 139889 - DNA, 474 bp, Homo sapiens
agcctgtgacatgtagatgcaggggctagatataaattacacaattggaatatccatcccaaactgagcaacgagctcaaaaagaccctcaaacctcagggcctgagcaaaagcaaattctccttgggatcatttctccacttcagggcacaggggactccctagagaacacccacaaaggtgaaccctgagaaagaactataaaaccacaactggatccaccacaaggaattgtcaatggatgaaactcaagccaatttaggtgatgttttcagcaatacaacatgaattatcaggatttaggatgcttggaaatcattttgtagcaacttgacaccaggacattagcttttcccaatgctggttgaggaatttctaaatgggaaggaggggcttatggatggcaatctggtggatgggttgggctagaggacctgtcttgaaatgatatcatcatgcaatgcataacgacat

SEQ ID NO: 139890 - DNA, 351 bp, Homo sapiens
ttatgtctcttctctcttgccctctatctttgggactctgtgtctctttatgtgtgtgtctttctctttcatatacatacaaaggattcattctatctttaggtcagttcacattaaaccatcactgccatctttcactcctacttctgttgtctaaaaaaagtaccattcaagttcagaaggcagaagtgaaatccagatctggctgattccaaagcttgtgatgttaggagctgcctcaatttccttcttccttaccttccacatctaaatctatttccagtccctgcaaatttcatgctctaaatatttcttgaacattaattctacctcccaatccttactactaat

SEQ ID NO: 139891 - DNA, 729 bp, Homo sapiens
cggggcactggcgccggtgcagccctgacccgggtcccccggggcccggctgcccgccggctttccggaactggccccggggccggccccgagggtggagctgccgggagcagacagggcgctccgcagcccacctgagcgcgccgggcccgtctcggccccccggccgtggctggtacttttccgcgtggggccagggcgagccctctgacctcaggaagcgcctgcggggcccctgctgggggcgggatggggagaaaattccgcaggcgccgggtgctccagcctccccgccgccaccggggctgccgccggctcgcccactccgcggccgaggagggcctgcgttccgcccggggaggggaggagcggccgggggcgaggcgggggctccttcgcttgggcctcgcccccgcacgcacacctgtgcggccaggactcgggtgcgggatccgcgggcgccggcggccggcgcaggtaggtccctgggctgccttctgccgcggcctggccgaggcccctgtgcccccgctgtgtggctggaccaaggggcggcctgcttgccagacaggtctgacggcagtcacttgtctggtcagaacccgctttcccatcatcctctaccccctggcccctggggtgcagaccctcatccaccggagagtgttgggattcctattctgacttgggaagtgcgaggagaacccgggtgatatggcctggtgaggg

SEQ ID NO: 139892 - DNA, 2155 bp, Homo sapiens
gatttggggagttatgcgccagtgccccagtgaccgcgggacacggagaggggaagtctgcgttgtacataaggacctagggactccgagcttggcctgagaacccttggacgccgagtgcttgccttacgggctgcactcctcaactctgctccaaagcagccgctgagctcaactcctgcgtccagggcgttcgctgcgcgccaggacgcgcttagtacccagttcctgggctctctcttcagtagctgctttgaaagctcccacgcacgtcccgcaggctagcctggcaacaaaactggggtaaaccgtgttatcttaggtcttgtcccccagaacatgacctagaggtacctgcgcatgcagatggccgatgcagccacgatagccaccatgaataaggcagcaggcggggacaagctagcagaactcttcagtctggtcccggaccttctggaggcggccaacacgagtggtaacgcgtcgctgcagcttccggacttgtggtgggagctggggctggagttgccggacggcgcgccgccaggacatcccccgggcagcggcggggcagagagcgcggacacagaggcccgggtgcggattctcatcagcgtggtgtactgggtggtgtgcgccctggggttggcgggcaacctgctggttctctacctgatgaagagcatgcagggctggcgcaagtcctctatcaacctcttcgtcaccaacctggcgctgacggactttcagtttgtgctcaccctgcccttctgggcggtggagaacgctcttgacttcaaatggcccttcggcaaggccatgtgtaagatcgtgtccatggtgacgtccatgaacatgtacgccagcgtgttcttcctcactgccatgagtgtgacgcgctaccattcggtggcctcggctctgaagagccaccggacccgaggacacggccggggcgactgctgcggccggagcctgggggacagctgctgcttctcggccaaggcgctgtgtgtgtggatctgggctttggccgcgctggcctcgctgcccagtgccattttctccaccacggtcaaggtgatgggcgaggagctgtgcctggtgcgtttcccggacaagttgctgggccgcgacaggcagttctggctgggcctctaccactcgcagaaggtgctgttgggcttcgtgctgccgctgggcatcattatcttgtgctacctgctgctggtgcgcttcatcgccgaccgccgcgcggcggggaccaaaggaggggccgcggtagccggaggacgcccgaccggagccagcgcccggagactgtcgaaggtcaccaaatcagtgaccatcgttgtcctgtccttcttcctgtgttggctgcccaaccaggcgctcaccacctggagcatcctcatcaagttcaacgcggtgcccttcagccaggagtatttcctgtgccaggtatacgcgttccctgtgagcgtgtgcctagcgcactccaacagctgcctcaaccccgtcctctactgcctcgtgcgccgcgagttccgcaaggcgctcaagagcctgctgtggcgcatcgcgtctccttcgatcaccagcatgcgccccttcaccgccactaccaagccggagcacgaggatcaggggctgcaggccccggcgccgccccacgcggccgcggagccggacctgctctactacccacctggcgtcgtggtctacagcggggggcgctacgacctgctgcccagcagctctgcctactgacgcaggcctcaggcccagggcgcgccgtcggggcaaggtggccttccccgggcggtaaagaggtgaaaggatgaaggagggctggggggggccccatttaagaagtaggtgggaggaggatgggcagagcatggaggaggagcctgtggataggccgaggaccttctctggagaggagatgcttcgaaatcgggtggagagaggaaattggcaaagggatagagacgagccccacgggccagacagccaacctccgctccgcaccccacagcctctccttactcttcccacgctgagtagtgtgggggcgcccagaagcgaagacaagcagcaaaaatgtagagaaattggcacggggagcggggcttagccaaatgatgcacag

SEQ ID NO: 139893 - DNA, 390 bp, Homo sapiens
tgagggcaatatgtggagaaagtaagcaaatgtatctcaggtagaacaaaagtatatacaatgtcctcaaagtatcttcaaacatggcgcatttagggaaccacaagaaatttggcatggtgggagcataagattctatggcagcagtggccagtggagaggctggagagagaggcaggggtctagtcatttcatgtcaaagggtctggttttattaaggaggaaactcagtcagatatattttttttttttttgagatggaatcttgctctgttgcccaggctagagcgcagtggagtgatctcggctcactgcaacctctgcctccccagttcaagagattctcctgcctcagcctcctgagtagctgggactacagacgcgcaccac

SEQ ID NO: 139894 - DNA, 340 bp, Homo sapiens
tttagtttatgttttcataaagatgcagtggaagccttttcttttttataagtaaaagtgtttttcatgtacataacctaatatttttaagtccttcacaaaaatgaagtaactctatgtggataacttcagtagtaacaaaaagaaacaaaacaaccatcctgtcccccacttgccccaccaacctggatttctccttgggattatgaaagcagtatgatggaagagaaggtacagctggctttggaggcagatagatctggacttttaatgttgttgggaggatttgagataattacatagaatccttaatatagtagtgctaggctcataataggtg

SEQ ID NO: 139895 - DNA, 903 bp, Homo sapiens
  misc_feature (1)..(1): n is a, c, g, or t
  misc_feature (7)..(7): n is a, c, g, or t
nctagcngcagagctccacgctgaggccaacgaggccagtaatttattttcagaatgagctagaaaattaattcattaacactttatcctcagcctcccaggaccaaatgttggactgaagcactggtgcaaaacataaagacaaacatttctccttaagtattgatctttttagcctacgagcttcggcgacaggtgtcttgctggttaacctatttccatctcattactttggcttctgcaaatacaatgccgggaaagattaaatactgtaagctgtatccagtcagctctccattatctgcattaatcgaggccagtactgagtgggataatccacagaagtgcctagtccccagatcatatttaattgatttggggtggcaattgatggtgagtgtgtgtacatgtgcgcacacacacacacatatgcttttggtgagggtgaggatcgaacttactcatctttgatgtggcatcaggatcccattttggaggcagtctcatttgggggcacaccaagggaatcccagaagcctgctagaggagacaacagggcttctagtctcccgactttttgtagggaagaagaggcaaagtgagagtccaggtgtcctctgagggtgaggggggcaggtcctggtggcattctccctgcaacaatgcctcccacctggagcaggtcaggcgatttccgggtgagctaccaaacccactcatttgttctctcttttggccgggtgtagtggctcatgcctataatcccaacactttgggaggtcaaggcggcaagaacgcatgaggcccggagttcaagaccagcctgagcaacataagtggaccctgtctctacaaaaaattttaaaactagccaggcatggtgatgcatgtgtgtggtcctag

SEQ ID NO: 139896 - DNA, 1090 bp, Homo sapiens
gagaaggaaaatgagtgttgccgcagcaggagagattgaagttagacactagaaggacgttccaactctcaggaacctgggagttgttagcttccccagggccagtcaagaacagactctgcttctatgtgtgcagaatgacaaccttgctccaaagtggaggtgtgcgtggactgaccaagaaggctcatcagacctcggtacacaaggaactcaaagaaatgggtaatttattttcagaatgagctagaaaattaattcattaacactttatcctcagcctcccaggaccaaatgttggactgaagcactggtgcaaaacataaagacaaacatttctccttaagtattgatctttttagcctacgagcttcggcgacaggtgtcttgctggttaacctatttccatctcattactttggcttctgcaaatacaatgccgggaaagattaaatactgtaagctgtatccagtcagctctccattatctgcattaatcgaggccagtactgagtgggataatccacagaagtgcctagtccccagatcatatttaattgatttggggtggcaattgatggtgagtgtgtgtacatgtgcgcacacacacacacatatgcttttggtgagggtgaggatcgaacttactcatctttgatgtggcatcaggatcccattttggaggcagtctcatttgggggcacaccaagggaatcccagaagcctgctagaggagacaacagggcttctagtctcccgactttttgtagggaagaagaggcaaagtgagagtccaggtgtcctctgagggtgaggggggcaggtcctggtggcattctccctgcaacaatgcctcccacctggagcaggtcaggcgatttccgggtgagctaccaaacccactcatttgttctctcttttggccgggtgtagtggctcatgcctataatcccaacactttgggaggtcaaggcggcaagaacgcatgaggcccggagttcaagaccagcctgagcaacataagtggaccctgtctctacaaaaaattttaaaactagccaggcatggtgatgcatgtgtgtggtcctag

SEQ ID NO: 139897 - DNA, 416 bp, Homo sapiens
cctgacctcagatgatccacccacctctgcctcccaaagtgctaggattacagatgtgagccactgcacccagcctcgttccttttaggaaaacaggatatattccttgtttttcctctctgccagttttcagagtaaagggttggggtaataatcaatgccattggtggtaaatgggtttttttttcctttctcttttgttactatcactgttaacttgtgggggttttttactcaatattacatagtcaattatagtcattctttttcttctcactgatgttcgtaatatctgaaatttggtcagcaggagacttgaagttgtttcttgcgtccccgtgactccatgagcatttccttgctctgtgccccagcaaatgacctaggcttaatttactctgtcccgtatctggtat

SEQ ID NO: 139898 - DNA, 478 bp, Homo sapiens
caggatcctgggggaggccgttggctcgagcctggggtgcagagagcactccttggactgtctctgacatgcgtgtaaaaataactgcatttgtttttctgatctctgggcagaagctcgagcctgcgtgtccagctgtgtctgtcttgccaccttgctctcgtcagggagaccatctttgttagacaggcagcctccagagggatgggatcgtgtgtgtgctctctcctcatgacgggaggcacctggggttcctgtcctgctgcctcgtgtgtgactggactctgagaagcgcgtgttcctcgcgtcctcgtcactggcaggtgacggattcagacccacggcaggaggggcgctgcctagcaggagccgtgtggacaggagccgccgtgagcctgctgggtggcttggcctgctcgtgcctgtccacattcacagtcccgcggagacagaccttttactcttctatacctgccac

SEQ ID NO: 139899 - DNA, 301 bp, Homo sapiens
gttgttctagaaaagagtcacacagacgtaagataatggaagaaagggaacagacaacagcatctctagatatggtagaatcatgtggctcggtcactcagtctcttagggtagaaagagaagagtgaagatgatgttcagatctccaacttgcggggctcaggagcagctgctgtggcaacttagtacacaaggaagggaaaggtgatggtggactgtttcatcaggatggtgggaattgggctaaaatgtaactaagcaacatgcacagtgtcctagaagactgaagagaaagtcaggg

SEQ ID NO: 139900 - DNA, 343 bp, Homo sapiens
acttccctatactttgaagggaacttgaaatagttccatcttaatgttattccaaagtttccatttaaacttatttatagctacattttctgttgtaacttggccctccagttcacctactatttctgccttcataattacttcaaaagtataaagtacttgatctcatagttaacttttcccccaacttactcatccttcaccctctgatttctccctatcacctactcattaaaacttttaacagtttccactgtagcctctggaatccctattctgataccaataactttttttgcaatctcaacatttttttaatgcctctccccctgctgaaaactgc

SEQ ID NO: 139901 - DNA, 381 bp, Homo sapiens
ctcaggtctcaggaagcgctgatgttcatttgagtctgaagacagaaaaaaaaaaaagtcctagcttgaaggtggtcaggcagaaggaattctcttttattaaacctttgggttctagttcagacctgagtaaggcagggataattccaacatctaagtctcatgtggttgcattcctacttcagctttttcctttgctttggttatattatcttgtctatccgtatgcttgtgtattagtccaggtttgccagagaaacaaccaatgggatgtatgcacatggaaagaggtttattataaggaattggctcacatgtttatgggggttgacaaatcccaagatctgtagtcagcaaactgcagacctaggaaagccaatg

SEQ ID NO: 139902 - DNA, 314 bp, Homo sapiens
gcttgtataggaagaagtagagggtgaaaagagaggacaaccaaaggattcccaaaacacacagatagcttgggagcagcctgaaggaggtggccacgagaattgaagggctggcctgaagattaatgagggagtctggagaggaaagcttcccgtagcagatgagcttggagggccacgcagtggggccgaccagcccggagagcccgaatataggaggaggggaggtgggctctggtggttcagaggttaacagctatcttcccagaaccttttcaggggagcagtggggagagattcgtttaattagcaga

SEQ ID NO: 139903 - DNA, 355 bp, Homo sapiens
agggtttccttatgttgcccaggctggccttgaactcctggcctcaagcgatcctcccgccttggcctcctgattacaggtgtgagacactgcgcctgctctcccagcaacttctgaagtaggcactattattatcctgattttaccccaggggtaaactgaggcactgagtggcaaagtcacttgcccaaggtcacacagaggaaggggaaccacgttcattagggtgaacttgggtcctttacaaaggaggatgggaaactgaggcatggagatggcaggtaactgcctgaggtcaccagcacctgagctttggtatctgtcatgctccccgctcaccagacccctccccaag

SEQ ID NO: 139904 - DNA, 313 bp, Homo sapiens
tccatatacttcaggcccccaagtctttatccacctctgtcactgaagcatatgacaaaagaagaatgaggataactatctaacttctgagctcccaatttagtggaaaacggtaagtaattatacggcaacgtgataggtaaagttccgagtacagaggaattcaatactgccaacgtgagtcagaaagaatttgtaagagatatgacacatgaatcatctcgaagtatgagccgataaggagagtgtggaggagagcagtaaagggaaaggcatttctcactaagggaaggacatctgctaaggcaacaaa

SEQ ID NO: 139905 - DNA, 259 bp, Homo sapiens
aaacgaaaattaaatccacagtgaaaggccactgtgtaccactaaaataactaaaattttaaaaactggacattgcaagtgttggtgaggatatggaataaccagaactcttataaaagtttctggtggaagcctgaaatgtgtaatcactttagagaactcttaggtggctccttacattgttaaatacacatttaccacatgaactggcaattcctatcctaggtaattacccaagagaaataaaacattttttctt

SEQ ID NO: 139906 - DNA, 220 bp, Homo sapiens
gactgtgtctcagagtttctggatagccctgggccatgctagcaccctatcccaaagttctagacaaaaaagaggttttacaataggatatattcacgtagaacagaggcttcctccatccagcatctcattgccttttgaggagaggggaatgaggagagaggagagggagaggtcatcttctgctgtctccctggcataccagaagcagaggagaact

SEQ ID NO: 139907 - DNA, 251 bp, Homo sapiens
cctgatctctaggggtagtgggtagagcatagtgaacttgtgtgttgtaagggctggatgataatgaccaccagaagcatagtaagcatagtaccaggtggtcagttcattcatagcagtcagtattccagctgacaactagaggactaaaagaaggaagcactccacctcacttctttggtgttcttgctccagggaagagtatacacgttgtttgcaggtgctggagcacatgaaggaccaggtcacta

SEQ ID NO: 139908 - DNA, 731 bp, Homo sapiens
ctcaacatttcaggggctgagggagtctctgctctaggagtaaaaggtccttggagagaaaattttgacaagtcctaactttaaaaaagaaaaattggttcctggtcaatatttgtactcactgtaaatgtgatggttggtaatgatactctgtataaaagtaaaaatcatattttatgtcctttgcaaacaaatatatttgtacctgaggtacagattagaggtgctagtaattccttgaagattctgaaaatgatctttttttccaaaatgctttcttggtttttattaaactttctattttcttaaaactctcacatcaggtatttccagtgttttcaagcatgtataaatattttaatgtataaatgttgtttaaaatcccctcaatcggtatctcctgattgagaaaatacacagtgaccaatagctaataggaattcagtattgctttcaaagaaatgtgcatattaatcactgtagcatctgcatacatttgaaacacggagtaatacaggtctgtgcaagaattagcagcttgttccttgctaataatgacttgtgtcatctggaaggcccccaagagcccatggtctacaggtggaatgaccaccacttgggagtgagctgatggagagcacccagcaggtctcctccatcttcctggttcctgtgctcagcatagggctggtgtacattgggccattaataaacgtttgttgaacaaatta

SEQ ID NO: 139909 - DNA, 1320 bp, Homo sapiens
ctcaacatttcaggggctgagggagtctctgctctaggagtaaaaggtccttggagagaaaattttgacaagtcctaactttaaaaaagaaaaattggttcctggtcaatatttgtactcactgtaaatgtgatggttggtaatgatactctgtataaaagtaaaaatcatattttatgtcctttgcaaacaaatatatttgtacctgaggtacagattagaggtgctagtaattccttgaagattctgaaaatgatctttttttccaaaatgctttcttggtttttattaaactttctattttcttaaaactctcacatcaggtatttccagtgttttcaagcatgtataaatattttaatgtataaatgttgtttaaaatcccctcaatcggtatctcctgattgagaaaatacacagtgaccaatagctaataggaattcagtattgctttcaaagaaatgtgcatattaatcactgtagcatctgcatacatttgaaacacggagtaatacaggtctgtgcaagaattagcagcttgttccttgctaataatgacttgtgtcatctggaaggcccccaagagcccatggtctacaggtggaatgaccaccacttgggagtgagctgatggagagcacccagcaggtctcctccatcttcctggttcctgtgctcagcatagggctggtgtacattgggccattaataaacgtttgttgaacaaattaatttggaattaatgtgttccctttttagctatcgatttattactaagagattatattgaaactcttccgtctatactggagtcatgtggtaagcagtatccaagtttctgttgtgtgcagaagatggcactagatatataataaaggggggcattaaaaattacaaaccttggtttctgttctcaacatgtctgggtgacagaataataagtgcaacatgttatataatatggcgggtttctgtatggtatcagtagtgttgggttgtttaggagaatgtagggttttgttcgggtaatgataaaaatgacaccatatctagtaattcttgtatttttaaaattgttggctgggtgtggtggctcacatccataatcccagctctttgggaggctgaggcggacagatcacctcacgtcaggagttcgagaccaacctggccaacatggcgaaaccccatctctactaaaaaaaaatacaaaaattagccaggcatagtggtgtgcgcctgtaatcccagctactggagaggcagaggcaggagaatcacttgaacccaagaggcagaggttacaatgagctgacattg

SEQ ID NO: 139910 - DNA, 365 bp, Homo sapiens
  misc_feature (14)..(14): n is a, c, g, or t
tctagaggatctcncggagccttaccacgggagccttaacctgggcgaggaaggcagaggtcacaggacacaaacctgtcgctgctctcaggagaagcatcctccttccttctggaagggattggaaaatgagaccagcctctctgtccagtcccctggcagtgggttcagctttccatggccagcctgagagcttccaggtgacttgttggagggggaggagcccagaggtttccctgctgagctgtgaaagggcttcctgagggcgctgagagattgagcaaaaggcagacagggaggaaggggaaacactgggtgcccagggggatagcatctgtacatctcaggccctggagggctgggcc

SEQ ID NO: 139911 - DNA, 899 bp, Homo sapiens
ctctttctccccagctgggttgcctctaagacatctcgttgtgactgccccacacaccccctcaagttcagcaaacaccaaaaggaactgatgacctacctccagtccctaatgtcttgtgctctactatcttcttagttgctgaagtcagaaactagtatccttctccccacactgctttgtttccagagctccccatgttacttgtgcctcccacgtggttctccaatgagtccacgtctctccgtcactgttctgaggtcagacaattgccagcgcttgccaggagaatatcaacagccccctgactgctcccctgcctctggcacctcacctgccgtccactttctacatggcacccagtgacttcctaaagtgaacatctgaccacttcattcctttgcttaaatcttctctttgcccgttaaccccagaaaaagaccaaactctttaacatggcttacaagatttgtcaggatctggtcactgattatcttttgccaaactcttctcccccaacccccttgcaacactccatctcaaaaaaaaaaaataataataataaaataaaatgaccttcactatggtccctcttgccctgtgcacagcgctattcctctgtatgaaacattcttccccacctttggatccttcccatttcatcttggctaccctttcctcatgacccaacttgggttggtgcctcctggatgctctcctttcatagcattagcatgttataattattgcttatctgtctctctcctccactagacccaaagcaacatgagggcagggaatgtgtccttctttcctctactgttttccctgttcctagcacagtgcccaggtacattgtagatgctcaataaatatgttgaataatcaaaaaaaaaatg

SEQ ID NO: 139912 - DNA, 509 bp, Homo sapiens
ttttttttttgagactgagtctcattctgtcactcacgctggagtgtagtggcacaatctcaaatcacctgaacctgggaggcagaggttgcagtgagcctaggttgcaccactgcactctagcctgggtgacagagcaagactccatctcaaaaaaaaaaaataataataataaaataaaatgaccttcactatggtccctcttgccctgtgcacagcgctattcctctgtatgaaacattcttccccacctttggatccttcccatttcatcttggctaccctttcctcatgacccaacttgggttggtgcctcctggatgctctcctttcatagcattagcatgttataattattgcttatctgtctctctcctccactagacccaaagcaacatgagggcagggaatgtgtccttctttcctctactgttttccctgttcctagcacagtgcccaggtacattgtagatgctcaataaatatgttgaataatcaaaaaaaaaatg

SEQ ID NO: 139913 - DNA, 326 bp, Homo sapiens
ctccgtcactgttctgaggtcagacaattgccagcgcttgccaggagaatatcaacagccccctgactgctcccctgcctctggcacctcacctgccgtccactttctacatggcacccagtgacttcctaaagtgaacatctgaccacttcattcctttgcttaaatcttctctttgcccgttaaccccagaaaaagaccaaactctttaacatggcttacaagatttgtcaggatctggtcactgattatcttttgccaaactcttctcccccaacccccttgcaacctccactctgcccaagttttttgctccagccacttaa

SEQ ID NO: 139914 - DNA, 488 bp, Homo sapiens
gagtgcaggggtgtgatctcggctcactgcaagttccgcctcctgggttcatgccattctcctgcctcagcctcccaagtagctgggactataggcgcccagcaccacgcctaattttttgtgtgtgtgtgtgtgtatttttagtagagatggggtttcaccgtgttagccaggatggtctcaatctcctgacctcgggatccgcctgcttcggcctcccaaagagctggaattacagacgtgagccaccacgcccggccatatcttactactattatttttcaatctgcctttctccatccagcacaaaaggtaagcttttggctgccttgttaatcactacacccttgacttgatgggcacattcacacttttactgagtaaactatgctgcactttcacaccccaatgcctctcatccaagctaaacaagagaagtgaatagatgccttaccccaaaggttctcaaagtatagccctgagaccag

SEQ ID NO: 139915 - DNA, 425 bp, Homo sapiens
agacatctccaccaggaagcaaaacaagccctctctttatggtgcttcctgtttcttatttttaaagcaacttcttttcaccaaatccaaaaatcccaccttacctcaaggcagctataattaaaagcctgtctgtcaaagattttgctattcagaatttcacatgccttctgaaaaactaaaactcctgaaaattgttatcattgaatacaaaaatagaatgatccctttgactaaagcttaaaattatctgaatatgaaagtgatacttttttgtataaaacttacaaaacataggaaagggaaaagatcatccagcccccaaaacaataatttttaatattttagagtatatgcttagacacatacagttatttgcacatctgtacttactcagaactgaaaataaaatcatactctacata

SEQ ID NO: 139916 - DNA, 358 bp, Homo sapiens
catcctcccacctcagcctgccaagtagctgggactacaggcatgcaccaccacgcccggctaatttctgtattttttgtagagatggggttttacctggttgcccaggctggtcttgaacttgtgagctcaagcagtcctcccgcttaggtctcccaaagtgttgggattataggcgtgggctaccacacctagcctctaacctactttttaatgtatgtatttattttatggcctgtctccctggttgagtgcaagctccatgagggcagatatttgtgtcagttttgtttactgctgtatctccaatacctagagaggtgcttgtcatgcagtagtcactttgtaagcatttatt

SEQ ID NO: 139917 - DNA, 334 bp, Homo sapiens
tatctgtggccaggctgctggtggatcacgcctgtgatcccagcactttgggaggacaagtgtaggtggtcggagttcgagtatactaaaaatacataaaacctgggagggagaggttgcagtgagccgagatcactccactgcactccagcctgggctccacagcaagactctgtctcaaaagaaaaaaaagaaaagaaaatggaggaagggaccatcagccaggaatgtgggcagcctccggaagctggaaaaggcaaggaaatggacccccttgccccagagcctccaggagaaaggcagcactcttgacactttgattttagcccggtga

SEQ ID NO: 139918 - DNA, 257 bp, Homo sapiens
agtgtggggttgcaggtgtgagccgtcgtgcccggcagctctgtctttttaaattgcttcaaagttctttgaagaatcctgagtcttcctcatagtgtctttaaaagttctgttttggaggattgcttgaggctaggagtttcagaccagcctggtcaacatagcaagaccccacctctacaaaaaaattaaaaaattagctgagcatggtggcttgtgtctctagtcccagctacttgggaggctgaggtaggagg

SEQ ID NO: 139919 - DNA, 406 bp, Homo sapiens
cagttttcaaaataggcagaaaaaactgagtgttgagtaagttatttgaatagtaaatatgttgtagacagacttaatttcttttttttcctattatgtcatgctgtgataattctttgaattattgacctttttgaaccatgtctttcctttagtagagagagtattatactttagataatgataactattattagggccaagttgtcatcttcagaaaactctcattaagatgtagatgttaccagacggttagggtagagataattatacactgcacatgatagcttaccagctgatttgtctttaaaccatattttaatagaaaagaactctacttttagggtttggcaaatgtagatttataaaatttttaacatgggggttaactgagaacatctaactc

SEQ ID NO: 139920 - DNA, 332 bp, Homo sapiens
tcctctaccgcaaacctgcactcctcccacctcgtgcaccatctccccttctagctccatctggcaatgtgtacttttcctcaagtcctgtgtcaaacgatgtgaagactgaggtcttcttctggtcggggcagcattatagcatcatgacaaaaagcccaggtgctgcctgcactggaagtcaagtcaattactggtcatgagatcttgagcaagttacttaatttcagttgccacatccataaaatgggatcatagcaggactactggtgtcacagagttacgtgaggtttaaataagttaccttaaaggacttagtacagtacctggta

SEQ ID NO: 139921 - DNA, 609 bp, Homo sapiens
catctcctgacttggaattctagcccgggttctagctgtggtcttccagcagcagtgcgcaggaaccttagcttctgaaactggtgttcttcctcctatgtggccaggaaattttgtgcttgagtgttaatcactttctatcgcttatgctttttctttataaatttaagaagtacagcaaacaatgagatggattgcttttctcttctgtttgcataaacgtcttaaaggtcctggaaaacaatttacataattgatttcaaagaaaaattagaatggcatgctgtagcatgtggcataagtaatgttttgggggtttttttgtttgtttgtttgtttgttttttcattttttaaaaagcaaagtagagacaaggtcaaataatggatgtttaaaacatttaaggatcagcctggtcaacatggcaaaaccccatctctactaaaaatacagaattagctgggtgtggtggcaggcgcctgttgtcccagctacatgggaggctgaggcaggagatcacttgaacctgggaggcagaggttgcagtgagccaagattgtgccactgcactccagcctgggcaacagagtgagactgcctcaaaaaaaa

SEQ ID NO: 139922 - DNA, 184 bp, Homo sapiens
ataaatgacagtactgtagctagctaaatattctcatatatatatgttattaacatggtgaagggaaccttcccataccatttttagattatatttttatggttcaatagtctttctgtatattgtaacttaacctttcctatcttcacctgtgcctacagtagcagaaactcacatccagcaa

SEQ ID NO: 139923 - DNA, 376 bp, Homo sapiens
tggttctacatacaaaatatatccagaatcttagcatttctcagcactgattggtgcttaccttgagccatcttcatctttcatctggatgactgctgtagcctccttactagtctctttgcttcttcctcttttgtttctttgcagtcttctccacgtagcagccagaatgagtcttgacaaaatactttacagcatggttcttctctggtgcagacctttcagtggttacctggtatagctgctgttatcgttgctatgggcctacaaggttctgaatgtgatgggactctccattagtattctgacttcttccgcagctctctccctttctggttctgtttcggccgtacaggcctccttgctattgaacgtt

SEQ ID NO: 139924 - DNA, 453 bp, Homo sapiens
gctgggattacaggcatgacccactgcgcccggttgtctctttcaaactcagcctgttctctacagcagatcatagcttatcctacctattcatgctcctgtgtctcctcccagcatccagcaggtatcaaggagatgtaagttgtcatctttttggatgctctttaacttttctgtccccaaaagttgaacagggaacttttttttttcaaagttgaacttagtgccttcacagaaaaatgatgagtaacaaaattagaattaggtctaagaatacctagcactgttttatagttcctggtgtttcttctcacgtctcagctccccagaatgtatatagtgtagattttcctctgtggtgtactggtggtcatgagcaaggagaacttaagagcagggaaataacaggatgaaaggaggattttaacaagacaattcagacaaagggaaaca

SEQ ID NO: 139925 - DNA, 481 bp, Homo sapiens
gactcttcacttcttgggaaatattaagtaagtgtccaccaatgctatccaacagaattttcttcactgagggaaatgttctgtatctgctatttagtacagtagtcacatgtggctaatgatcacttgaaatgtgactactgtgactaaaaaatggaattttaaattttatttaattttaatctatttacatttaaacagctacatatggccagtggctaccaaattggaaatagcaggtgtaaaccaattgatttccactttgtgctgacatcatttccctatttgctcatccatatgagctaattcacgtgctagatagaggtggtgtataaccagtatgctctgttcctttcctgagataaaattggaactagcttacatctatatgctgctagcatagatcaactttgtaatgacaacacaaagggttataataggttataacccttttaaatagaagcctgctcatccctgaaca

SEQ ID NO: 139926 - DNA, 502 bp, Homo sapiens
  misc_feature (6)..(6): n is a, c, g, or t
tatgangtacccaggttaaatgagtgttaagtgaaagaacttggtcatacacctgggttttcttttttctttttgtagacgggtctcgctatgtttcccaagctggtctcaaatgcctgggttcaagcaatcctcccaccttggcctcccaaagtgctgggattacaggcatgtgccaccacatgcctataatattaagtccagtgtttatccttttccacccggatttttttaactagtcacaaattttggcatgcattgttctttataaatggttttaattgagacggtgtctcgctctgtcacccaggctggtctcaaactcctggcctacagtccattttggaaattaagacatgcattctcaagctagtgaacaagatgatgcaagttattcatagaatatttttgtggcattgaaaagcagagaattaaaacattattttgacatttgctgagtgcttaccatgtgctaaagcctgggttttgaaagataatgaaa

SEQ ID NO: 139927 - DNA, 533 bp, Homo sapiens
gcttgtgagctctccaagagcaggaactatgtgctgttcatttctgcatccccacacttatacctcgcacagagtagaaacttgaaaactgattagggaatacatggaagggtgaggaaattaatattaatatatgaccattacctaacccttacgcagaaagtcatttcccctgatcattccatttggcttacaaatgagtaaggcatttccctgctctggggctcagctccttcatctgggaaatgggaaggctggactagatcaccagctcaaaaaaactccatgacttaatatcattttatagtaatggcctactatgtgcagagctgtgaaatagaggaaaagattagacatatccccttccattaagatgctgagggtctagagtagaattctttgttttttaagggggaatagatccctttgagggcctctcctcagaaagatgcccctgccctcaaaatgctgtgtgcagttttcggggatctatcagtggattcgctagagaaaggtatccagaggcccgctgc

SEQ ID NO: 139928 - DNA, 338 bp, Homo sapiens
gtttatgtggtaaaattattatctatgtcaatattcagcagtcatggttttaaataaaaatttctttttttaacaaagttaaaaaccaaaatgaatacattaaataaaaactaataaattgatagtttgctatttcagatgttgtcaatgttcatattctttttttaaggctgtttgttaaaagttatagtttttacttatgcttaatgacactgattcattgtatgagtcagttatgtaccagtttagtattttagtcagtgacattgtttggtttatattctcatgttcattattaaaaacctgtatagtagatgcttgataaacttttgagttga

SEQ ID NO: 139929 - DNA, 398 bp, Homo sapiens
cagatctctctgtatcctcacgcttcccttttggatgcaccttaattttaaaatacctctttttctcattaattagatcacttcaagttaaatacaaaacatggcaagatggatttaaatttagagggatataagtatacataagagaagaccaatctctacttttaaaaatgcagttaattaacaataaagtaaaatatagtgaaggtactatatgcttatttgaactttgctgttgttaaggacttgcattcctctattaactttttttaaaaaactcgttttgaaaactagcattggatgtgggtttccaatgatctagaaacatgtaaactacaacataatcgtttcaagaatttaaaataattttgcagtagagaatgttaatgttttcacca

SEQ ID NO: 139930 - DNA, 354 bp, Homo sapiens
tatgattattggtaataaagtatagctttgcaacgtggattttatttaaatccgtatttagttttattaatgatctccagattataaagtgttttattctgggtgttttactgtttctttgtcttaattaagcttgtacaaagccaaagccctgtcctgactctgctgcaggtggactggcctccttgatgccccatgagcaagccaggatgctcccaccacagggtctttcaccgaggctccctctgtctggaacactcttcctgcacatatccccatagctcgctgcttcttctttaggtctttgctcagatatcattttctggtgagttatttcctgaacctgtggcaaga

SEQ ID NO: 139931 - DNA, 230 bp, Homo sapiens
cgggagtcacctcccctttctgtaaagggacagacagcagcatgctcggttctgggagccaggtggtccctgttgcaacgacttggctctggctctgccgtggcggcacacaggcagctggtgccaatgagccacactcacaaacccaggcgggggccgtcaggccctgggccgcactgtgcagacctgagctatagcactcaggaagtgctgtgtaagcaccagcggct

SEQ ID NO: 139932 - DNA, 426 bp, Homo sapiens
tagctgggactacaggcgcctgccatcacgcccggctaatttttttgtatttttagtagagatggggtttcaccatgttagccaggatggtctcgatctcctgacctcgtgatccgcccgcctcggcctcccaaagtgctgggattacaggcatgaaccaccgtgcccagcctcagtgagtttttaaaacactaaagtttacacagctctctacttaggttgtagtgagtgatggatgacgtagacacactgagagaatgaggttccatgtattttgttattttttaaatatgtagttcttgatccattgtattacttattactagtttttatttagattttgggaaatgaagactgtacctaatgaatgaaattatttcataataattttctaaataatggacacataaccatttggttctcttt

SEQ ID NO: 139933 - DNA, 293 bp, Homo sapiens
gatttgcaggtgatctagaggatcacagatccctattacatcaaaaggcattaacatctgcaatttagaaataactgcaatgtttaatgcttctaagatgtgccaatttaaaatatgctattggacaactatagaggactaagttaatgaccccaatcaacagcgtctctgcatccttgccctctactccgtaaccttgcaatccctttcccctggctctggtctcaactgtgttgttttggccaactggatgttagcaaatgggatgacacagaagctcagaatgtatggac

SEQ ID NO: 139934 - DNA, 312 bp, Homo sapiens
tcctgagtcggcagtgcagtcactacaatcgtacagaagaaaggaacagaggaagggctgaagtttaaaaataattctgcaacagtgaatgacagactgaaagcatgagaacctttaggaagaaatgatcctggacagatataaggacctacatggtagaggtgctgaaggagatgaaaatgatccattgaggggctcagaaaacaagaaagggctttaattatctacggcttgggagcatccaataaaaccaaacaaaagtcaggttaaagcgggtggggcacagcaacctgattcttgaggtggttaaaa

SEQ ID NO: 139935 - DNA, 167 bp, Homo sapiens
agatcatctctttgtacttttacatgtttttacatgtacctatttcaacaaatatgttataagctctttataagttgtaagttgaaattcccgtcttatactttcttatatgttccataataaaatactctcagtaaatattttgcaaatttattaattagtaaata

SEQ ID NO: 139936 - DNA, 374 bp, Homo sapiens
aaaagtgacggaagacaatctaaatttttaatattaaatgactcctatggccttcaagggggttcagacaactgaggctctacacttcacactgggaacctaaattctccttccagtcagactggaagggaaatggaagaggcctcccctgttccacagcctaacagctggcccctaggaaaagttgacaactgactgagttccacagctcccaactgggcaaagtagggaattctggtctgagtgacaaggaattgttacaggtcacacagagcagcagctggagaagacacagaagatatacacatatgttctgtgtgactgagcagttaaaatacatgtctgcagaggactctctggggaggagatgctat

SEQ ID NO: 139937 - DNA, 830 bp, Homo sapiens
ctcccgagtagctgggactacaggtgcccaccaccacgccccggctaattttttgtatttttagtagagatggggttcaccatgttagccaagatggtcatgatctcctgacctcgtgatttgcccccctcggcctccccaagtgctgggattacaggcgtgagccactgcgcctggcgcaaagaagatttttaatggctgtataatattctctcattaggcatcagttactcacctcccttgcagaggcacgttgggtggtttaaggggttttgctatcataactaatgctgtggtgaacattcttgcacgattctttgcccccatccctgatccttttcgtcagcggttttctagaaatggaaattagcagtccagccatgtaaaccttcaaacaacctatcagttcttgaaacttcaggtgcagagcaatccaaatactagccttacactttgcattttcagtgatagacatttagaaagctggggttttttcctttcctaatgaagtttgatgtttttgccggcgtccagggaagtgatcctgagctgaggctgtcagtaaaaaagccatttctcagccaggccctgaggcttagcagcctcttccagcagcacagcctccaggaggcagagtctggtgttacataaagggtgccatctgcttggagcaactcgagagcagagtgaggaagtgtggcgttggccgttgcttttcaaaatatttgccatcttcaaaaaccctgtcattcttcccatcagccacaaaagccagtgtttcttaaaatctggctctgagttcagcatggaggccctgggcctggcatgga

SEQ ID NO: 139938 - DNA, 516 bp, Homo sapiens
gagtgtacagctacgggggaggtacagctacgggtgaggtacagctacgggtgaggtcaactgagatatactaacttgaaaaatgtcaactcatatatatcactggtctctggagtaggagctttgggaggtacagagaggaatcggatgtgaatcctgcctctcgagtatcttactggcaagaggaaagagaggcaagtacacaaggaactatactcccaaatggcaagctgctatcttcttaggcaaaggaagataaagagatggtaccattgacaggatagcacaatctagacagtcactctttgcttcacttagcaaagttcaagggaaatattttatttgagcctaatgactctggacacttcccttaaaatgacatatgagaatataagtcagtttttctcctgttgagaggtggcaggctttggaatcaaccacacccttgtgaattctcttgggcacagttttgtttatgcttatatgtcacttaatggttacatatctgttacaggc

SEQ ID NO: 139939 - DNA, 433 bp, Homo sapiens
catcttgtaatgtaccatctggaatgcattgcctccccgcctccccagcccatgatggggaagacaacaatgaagggcaactcatctgcaataaaatgttttggcctggtagaccattaactgtagggatcaaagaacaaaaatcctccatgggcagaagcagagatgaagcaggcatgtgggtgagcactataattctacactgaaggagaaaaataaaaatcatctatcccctaccttgagataacctctgcttgctgtcttctgcctggcctcactggccttccttatcgccagccttatgtttgggttggtgggaattactcctgcttctggcagatcactgataattcttggttatgttctacctttgcgcctcttttgtcagattttatcagtgtataaataaaacaggaaaggacaaatcaagaat

SEQ ID NO: 139940 - DNA, 162 bp, Homo sapiens
tgttctccataaaaagaaaaaataaagacaaaaagaatacaataatcttttatccacagagcatatgttggacctctgatggatgcctgaaactgcgataggactgagctctagatataccatgttttttcctatacaccaatgggcagatagcatatacag

SEQ ID NO: 139941 - DNA, 354 bp, Homo sapiens
tttctgctgcaatatgagagacagacaaaggttaggaccagagtgaatgggccgggctggaagacacagctttgatgtccaatggttatggcttttcctttgtgacaggcaactttcaggagtatactgcaagccaggtacacacacctgcccacagtgctcccctcacctccgaaccatgggtgatcacgggcaggcagcagggagaagatggctttggtagaagcaaaagtgctctgtggaggacaggcagtagcactcttcccccagaaggaagaagactctaaaaaacaggcgtctcagtacatgaagttatcccagacagacaaaggccaggaaattccaggacaaagc

SEQ ID NO: 139942 - DNA, 212 bp, Homo sapiens
gggcctcaggctgatgcacaggaggctgcaggaactaagggagcctggtcaccccccttggctctagccgggtccaggcgcttcctggaactccatctagtgggagtggtgactgcagtcagcagtggggatcctggaacaccccagcctttcatactttctacaaccccaaggcaagaagaatgaacaccgagctttccagatggaacctc

SEQ ID NO: 139943 - DNA, 392 bp, Homo sapiens
ttcagctaagatggcacctctcagaggctcagtcatacctggagcaggggctgaagccatgcaccccactgtgggcccaaggcagcccaggtcctgtctcctgtctgctatggggctcctcttccactcagttgcactgagtaataagagaagccccgtctgtccgccctcctgtcacggagctctgctgcacagtgcctgagccagtgtgtttctgcttctaatgaaggatttatttaggtcactgctgccttctgtgcacagcaatgcagattaaacatgttgagaagtaacttctcctcttccttcactggggcctgcctcaccactgcacacacctggctgctcatcattcgttcaggagccctttatgaaggacccacagccactgc

SEQ ID NO: 139944 - DNA, 416 bp, Homo sapiens
acctctcttagtcacttggccaaaatacttccagggatagcatcagagcaggccagcctactacttacacatttttttcagctgtcattttcattgactacccaaagtgaaatgaagatgcactctgctttggattggagagtggttgtggttggggggatgggcagagagatcacagcaactttctctaaatccaaggctaacttccacttttgcccttgttcacaggcagttctgagctactccaatcattcaaaacacaatgtataaaggaatttttttgttttgcttttgtttcagggtctttttcgtctagttttcctcagatattaggcaagcctagctcctatttcatatttttaataatcacagttatactgatcatataccatacgtatgtgtgtatatattcataa

SEQ ID NO: 139945 - DNA, 317 bp, Homo sapiens
gggagtgaccctgtctgggacaagaggaaggtaaagactctggacaaagtcctattcaatggaggagctgaagtttatgaggcagagaagcggctgggagggagagcagcgtgggtggagggcagagcacgagcaagggtcctgggcaggcagcgtttcatgctggaattaggaacatcttcacacgtggcgcgtcatatggcggaaggcgaaggcttctggtggccgtgagtgggtcgcaggagggagggtctcacagagggaaattcagcgcacgctgctgagctgctgcggccactgtgggtgcactgctggac

SEQ ID NO: 139946 - DNA, 197 bp, Homo sapiens
taatgaaagatagcacaggagagaaaggctggtggtgtcatttggccatggagtggcaggaacacagatggtgccggcgtttcagactcctggacaggccgactgccccggcatccccatccacagcagcttaggggatttgtattgagcggctttgcaattgcttttccttaattaaaaaaagcacctgtgtgcac

SEQ ID NO: 139947 - DNA, 878 bp, Homo sapiens
tactggtacagagactttatctttcacacagacttcaaatatctttgggaatttgtgctccttatttactgagtgcttgagaagaaaagacaaagccagtggaatggtccgagtgtggcatccgctgcatttataaagaataagagctgcagtgggtgtgattcttggacagagtggcgctcatccttgttcctgcaatgaaggacatgccagcctccaggctctttgacagatgattggaactgtgcaaatattatggaagataccccgtgtcaagaagctgacagcacacacgtttgggaaggatttagtggctgaagcacttctagaaggtacatacatgattgactcactctcactttgaaatgaagctatttacttcttttaccttgagaaatgccaaaacctagggggaaagacttattattgggtgcaatgcaaagtcttcacaattataattaaaaagtaaagttttcatgattgttattaatttactaagtgataatcataacagaaaataaaatatatctgaatattatatcataagatataatcgtaaaaaaaaacaaagacagaaaaatttttggggggcctggggccccgaagaaggtttgtagacccattgtgtagagagcacgggcccacatagggtagatgacacacacggggccaccaagacgaggccccaaaggagaacaccggcggcacagacaaagtgtcgggggtttccccacccctaaaaaaagaaggcccgggaggcaaccaaggagcgttctccgacaaaaatcccagggggggtccagcgaagcaccaacggggcgctctacaacagggggtgccacgcggactcgattagaataagccggcgggggagtcgc

SEQ ID NO: 139948 - DNA, 694 bp, Homo sapiens
tactggtacagagactttatctttcacacagacttcaaatatctttgggaatttgtgctccttatttactgagtgcttgagaagaaaagacaaagccagtggaatggtccgagtgtggcatccgctgcatttataaagaataagagctgcagtgggtgtgattcttggacagagtggcgctcatccttgttcctgcaatgaaggacatgccagcctccaggctctttgacagatgattggaactgtgcaaatattatggaagataccccgtgtcaagaagctgacagcacacacgtttgggaaggatttagtggctgaagcacttctagaagacatcaccaaaatgaaacagtctactatcagcaaagaatgccagagcaagagtgtgaaacagagagcacagagccgtgatgctgccccctgccggtggtgcaggagaaaggacgcaacctcagtctacgactcctgccaagattatcagccacgctagaaactaaagggtgaaaacagggtttctctgctgcaattccatctcttcctctagaaacttgtcgtaggaatgactccctgtaacttcccacacctgcctcttctttctgtaagtgttggctaacagaatcccctccttcctcggtccttgctaagtgactgaattcagaaactcctggacaatattacaaccatccgtattact

SEQ ID NO: 139949 - DNA, 208 bp, Homo sapiens
ctgcagaatggttatgataacactgactttgcaggatcattctgaggtttaaatgaactaataatacagggtaggtgctcagtgaatgttcttctccctcttaaagactggagcagctcgtggttctatcttttcattttctacttcccatctttggctataatgatgagtgtcagtgaggcccagcccctgtcggcaggaatgaacc

SEQ ID NO: 139950 - DNA, 275 bp, Homo sapiens
tgctcctgggtccctgcttgcttcaagctgaggagaagctgggagctacccttcaccaaacacttacccatgtgcccagccctgtgccaagcactgtcttcttaaccctcaacaaccttccatgaggaaggcaccctgattattcttgtgaagattaggaaactgaggcccagagaggtgaagaagcttgcctgtggtcacacggccagtcggtgacagagccacatttgaacctaatcacactccatgcaatcatgcctctgattaccctaaga

SEQ ID NO: 139951 - DNA, 313 bp, Homo sapiens
ccagtgacagtcctccattataaaccagagtcctgggcctcatcctagaaactttatctccttccagcacaccggtcctgtggcccgtatacaaagccctgcacatgaagcctctcaagttcccccagtcttccccatttcctcacgaccccgccctggtggagcccagtccaggcgtccttggatcctgccatggctgcgcccttgggctcctgcctccagggttcaacctcccctcatttgtcagccagaggtatattcctaaaaagcagataggtccatattcttccctgcttgaaaccctccatgcttc

SEQ ID NO: 139952 - DNA, 443 bp, Homo sapiens
agctgggactataggcatggaccactacacctggctaattttttattttttagaaatgaggtcccactgtcttgcccaggctggtctcaaacacctgggctcaaacagttctcctgcctttgctaccaaagcgctgagtcacacctggccacacagctcaactttaactctcctgtttttcccctttaagttttttctttaaattagggttgacaaactttcactaaaggacttgaaagtattttagacattgtaggccataagatctcagttgccactaatcagctctgcccttgtagtgaaaaagcagccataggtaatatgcaacttcatgcatttgtctgggtttcaataaaactcttatttatggacactgaactttaaatctcatttttccacatttgtatgtcttcctttgatcccctcctcccccattgcactat

SEQ ID NO: 139953 - DNA, 267 bp, Homo sapiens
gatggcgcttctgtccctgcccaccctccaaacacttgatgcagttgcagatgtctcaattctccctgaatcttcaattccctccattaacaatcaaagcccgagtcaggagcatccaggtagctggtttgagatcaggtgcccacatcctagctccccagaagtaggagggaagaccacctgggccctttggatttcctggcactctcacagggcagacctcctcctcccaataacccagctccacctttcccaccccaagaatcc

SEQ ID NO: 139954 - DNA, 274 bp, Homo sapiens
cacgtgggggagctcaagacccgctcccgccacaggtgtggatccccctacctctccttcccctcccctctcccatactgtctgaaccagggcccaaatctctgaaaccatttcccatctggaccctgccctatccaccctccgcgggctgagaacagggggccaagtcccttccacactctaagccaccagtcagagcaaggcagaacaaggccaaggaaggaggaaagggcaccggcccaggaaaaggtcagtggcgaagctcctgcctccc

SEQ ID NO: 139955 - DNA, 339 bp, Homo sapiens
cagggataatctcttaagaaaatgatttatctgagacctgaagagttggaataagccaggtgtgagcactggggtggggccaggaggaggaaaaggagtgtacctggcaagggaatagcatttgtgcagtttgtaattgaaaggtcagtaaggttggaaaataaagtgtgagaggaaaactggtaacagataaggcaggagagttattcaggcccaacacggatgccttataaggcactgtaaggagttttgactttattgctaagggtgatgggacgccattggagcattttacatagtggagtgctaaattttggttttaaaaagtacacttcttag

SEQ ID NO: 139956 - DNA, 346 bp, Homo sapiens
gatgatagagtcagggttgtcaagcatgtggatttaaattaataaatagtttttaattagtgagagtagttctctcagattgtaaaagccaatctagaaaatgtgcctggaattaaatagtgaaattttgtattgatagttttacaatttatatcttccataattttcatgtttacaagttacatcttccataattactgcatttttctctgggaccttttgaacactctgatataatgcattaagattctcttttttttttttattcttctaaaactttaattttaggttcaggagtataggtacaggcttgttatataggtaaactcctgagacaggcatatca

SEQ ID NO: 139957 - DNA, 1028 bp, Homo sapiens
aatggagtcttgctcttgttgcctaggctggagtacaatcgcacaattttggctcactgcaaactccacctcctgtgttcaagagaatcgctggaacccgggaggcagaggctgcagtgagctgagatcgtgccactgcactccaccctgggcgacagagcaagactccatctcaaaaataaaaataaaaaaaaaattagtgtggtgatgtgcgcctgtagtcccaggtactccggaggctgtggcagattgtgggcttattgaacacaggcagtttgtggccattcagcaaggagcataatgcccctgttggtggtgatagtgaataagcactcagtgcagtcaataagtatataatttgagttaatgcatgtttaatgattcctgtttcttgttgaatgtggatttctctatctcattcccaatacatttcctacaagccagtgccattcccttgaattgctttatagcaatctggaatgttttcccattggattttctcacttgcagctcaagtctgtgaacaccatgaggtttaatcaacatgaggtttaagccaactttataggcttcctatatctcccttcctggtcagcaatatagcccattctctggagcttcccgtggggatttttcttcccagtgaattcttcctattagttatctaagtggtttaactgttgaaatgttttccgtcatctttagatccttttgaaaccactttctctacctgcttcagttccatttgatgaccgccatcatctttgagattcccatccagaaccatgcatacctcttaggttctcacagccaggagctatttcctaagttgtctttctggtggaaagctcagctcctactaagcagtccttgcttcaaaatggctttgatgaatgacccaaaggagccaggccagtccctgagtcatcacagagcaccctaggtgagaaaccctgaagtgttctctgctgttgctccacccctaccctatatgaacagattaaatcgtttcgtttggcacagttctg

SEQ ID NO: 139958 - DNA, 426 bp, Homo sapiens
agttggtgggggctcgtggcccaccccacccctctctggccacctttgctccccgcgccttctgtcttcacacgggtctgaagctcctcactgcttaggcctcatatgaggacaggggtctgcagtgccgcagggtcttgccagaggaaatacagggtgagaagccacacatctgattaattgctcacctaataaggacttctgaccacagcatataacagctgtgtggtgccagggctgcttcggccaccccacagtggcaggtccctgggcggccggctctgccttgccctgctggtagcaagacggctgcagctgcaccaggcaccatttctagcatgactgtgttcaacactggaagtgagggtaggaaggcacacctgcccttctgtgtgctctctccacacgaaggatgacagatagggg

SEQ ID NO: 139959 - DNA, 467 bp, Homo sapiens
agttggtgggggctcgtggcccaccccacccctctctggccacctttgctccccgcgccttctgtcttcacacgggtctgaagctcctcactgcttaggcctcatatgaggacaggggtctgcagtgccgcagggtcttgccagaggaaatacagggtgagaagccacacatctgattaattgctcacctaataaggacttctgaccacagcatataacagctgtgtggtgccagggctgcttcggccaccccacagtggcaggtccctgggcggccggctctgccttgccctgctggtagcaagacggctgcagctgcaccaggcaccatttctagcatgactgtgttcaacactggaagtgagggtaggaacaaaaggaatttcctcgtgtgagtctctgtcttgtccaagcaggaaaattcttttccagagcctccttagcacgtttatcctaacacagcatcg

SEQ ID NO: 139960 - DNA, 210 bp, Homo sapiens
ttcttatgttcttatttaggcccctttaattcagatttgtcaacttgattattgtctctcatgcaaaactcaccatcattgttccttggtacactccttccacctagacctttcatgcttttctaccagttcaagttaccacctcctttaacatcagtcctaatacaccttgtccgcaggaagtctttcctctcccaaccatcagtctca

SEQ ID NO: 139961 - DNA, 666 bp, Homo sapiens
agttttctcattttttcttcctctgtagatctcatagtcattttgttaacatttctggtgatgagaataggatccaaagtggtccccaatttcttttcctctactgcctcaatcaatgcctaggtgccagcaaggatgctgtaaggtccagttgaattctggcatggtaggaaagagttgggtaagcattcttggatccaagatctccttttaggttgagatctaggaggttttattttctttaaatagggcaatccatctggtttgcaggtagaccttaattcttatgttctaagcaggaacacctgctctattgttacactctgaagttgacttctttaggtgagtgctttaggtagttcacccactaaagtaatggtcactggccagccaccattgggaactccagcagcctatatgtttaaaactatgggaaaaactcctgtgaatatttaggatcctggatgcaaataacccaggatgactcaaagctttgttggcaacaattgggaacttttgatatgcctaaattagtctatcaacatgcacaattagagcggagagaattctggacttttcaaaagcaatgggaggcctcttttatttcttttctcttctctttcttcctttcctttcttttcttttttctttttttttttttttaca

SEQ ID NO: 139962 - DNA, 398 bp, Homo sapiens
ctctgtccttggtttggatggactccatatcagtcattttctctctcatcctctttaaatggtagccattatcctatagctaatgatgcaggtgctttattgatctggtctctctgattgggaatcactgcctgttgagtcactgtgattcacacatgtgtatctctggtctggacctttctccatactctaaacttgtgtatgcaactacctgctcaacatctctccttaaatgtctaataggcacctcaaactaacatacacaatcgagcttttgatatccctctcccttctgtgccttaatatacatctcccaccttagtcaatggaagtttcatcttattattacttaagtcagaaatattggagtcaatcctatggtatatgaattctatcac

SEQ ID NO: 139963 - DNA, 325 bp, Homo sapiens
caagcctgtggggaggtggcacggtggtgtgggccaaacccatgtgcatttaaaaaaatcatttaacttaggatttggaatatatcaagtaactgtcttagtagagaaccatgggttaaactgtatcccccaacaaaggtaacgttgaagtcctaacccccagtacctcagaataagaccttatttgaaagagcgtctttacagagataatcatataagaaggttattagggtgaaccacactctaatatgactgtatctttataaaaaggagaaatttgtagccaggcatggtggcatgcgcctgtaatcccagctactcagga

SEQ ID NO: 139964 - DNA, 401 bp, Homo sapiens
tcatatatgcctcggtgtcctccctggtggctaacagggaatcttacccaccacaggcctccaagcaccagagagaactgaatggcaggtaagtaataactgagccacttcctaaaatacctgtatcacagatgaccttgaagaagaccatttgtccaatgaaccaaggtatgcctgaagtgaaacacagagaatccctttcacagggggtggaatatccctccacccgaagtgcacctcttgggtcctcagaatcagattccctaaaggcttaaaggactctgggaacaattctggccaatgttttacatgcttccagagtctgaactgagtttaaggcctctgtcattcattcaaattaaaaatgcctgccagacagaatgaaatgtgtcagagtttgc

SEQ ID NO: 139965 - DNA, 410 bp, Homo sapiens
ttgttttctttccttttcccacatctcctcccagataagcaagagttgttttaatgaaagaaagacagaaatcaggtttgttttggtggttgagcagctgagcttcctgcctttgttgtggaggaggcattgatgagcaacatgtggttgtccatcaaggccactgacaactcggtgactctccagctggtgtgcccccactggggctgcgtcctcactgggggaactgggataaggaagtattaaagctgatgtcagtttacctgcctttacatctttctttcctcacactcttctgtgccaagttgaaactgatatccccttgtgtgtaagaacgtaagagttgtcaaacctctggcccgtttggtcctgcaccactgctcagatgtggcagtttgaacgttgcctcc

SEQ ID NO: 139966 - DNA, 190 bp, Homo sapiens
cacaaaagcacccctggaattatctttacgtgacgctgtctatctactgtgtctctccactttctgtttcctccactgaatgtaaggctgggaggcagggaccgcgttgttgtatccctgtgcctggcagctactggctgtacacccatacttgctagtgaagaaatgtatccttatatcctaaattttt

SEQ ID NO: 139967 - DNA, 199 bp, Homo sapiens
tagaatccaccgggtggctgcaggagggagacagcactctcagtgaaggcttagatgcggggaaatggtggggctgtccgtttggagaccagtgactgtcagttcagcacagctggatatgggttgctcagattatcacaaaagtgagctaacagtggcctctgtgcattggcaccaaggttgtttatttatttactgt

SEQ ID NO: 139968 - DNA, 122 bp, Homo sapiens
acgtctagctttcgagggtcacaccgcggggagaggtgacattttgaaaaggtaatgggggccacgatccctccagaggctatagggaggacccttcctgcctctttgagctcctgggggct

SEQ ID NO: 139969 - DNA, 125 bp, Homo sapiens
aactccacagagatacaggaaagaaaaaagcttaggttggtgaatgagcatttgaaagcaatgttaaaccaggatatagtaatgagcagccagatttttctcatgtttcagcaccagaaaattat

SEQ ID NO: 139970 - DNA, 254 bp, Homo sapiens
tttacttagaatcacttttcacaaagttagggaactttgcgaaagttccctagggaactagggaaatcagcccacagtcaggatcatgagtgtcacggggaaacggctcagtattgtattacgtgaagttctgcccaagttggaatggccatttatttgtcttctccaactggaaggctccacctagaagcctcttggctggaggaaggggagaccagttttcagtttttgtctctctacacctctctgtccag

SEQ ID NO: 139971 - DNA, 152 bp, Homo sapiens
aggtgtgaccacctacctcccagatcttttgtgaggattaaatgtataagagtcttttgtaaacaccttaccaaagtagaccgttacactgttggtcccttcatttgagaaaggactgccttttctgcctcaccatcccctggccttcttgg

SEQ ID NO: 139972 - DNA, 349 bp, Homo sapiens
tgctgagttcctggaccattcacctcaggtctcccattcactggctggctggctttgctccatctccatcccttcccactctggctgggatgggagggccggcaccctctacttctgtttctcttgctctgcttgtgttttctgtcaggtctggctatagtcacttgagtgcttccaggtaggtttggggcagcacgctgctctgcttgctaccctgggactggaaaatgctggtaggatacagcctcctctgtcctccagacatcagcggtgggatttgctttctgtactccctgcaaccactaaagtgtgtgcaaatgaaggcatttaaatggtcatgtatgctgaa

SEQ ID NO: 139973 - DNA, 531 bp, Homo sapiens
tctgggtgtcacctggtgtgatcacagcatcctccacgtcccttgtgtgcgttcttgaaaaaagaccgtctctttttttacatggctactgagttgataactgagtttatctgctctcccttgtacttgcactttgtaatattcattagtgggacttgtacatttcaaggggttagcctttgtgtcggaattttcagttaacagtggattattttctagtatctgtagggattaatgttaagcagcagtttaggaaatgctttgccttctgtagtttactgacaagagtttctcaggattcctgaggaccttgtggctttcagcattgccacctctaaactggcccactcagctccactttcctactttgtgaccgtgccctttccccttccagctttctgatggcctgccttctgctgcacatgctcttctccctcgaagaggccactggggccatggtcccgtcctagcctcctggtcagtcagcctcctcccggcctgcctttcccacagccttgatcgcatggctca

SEQ ID NO: 139974 - DNA, 320 bp, Homo sapiens
ggaatctggtgtcagaactgactggctgctggtggtgaggaggaatccctacaaattttgatgaccatagatcacagaagcactcggtgttgtgagagtatagtaggagaaactgattttgtgttttcctatatccttatgcacacagatatgcaagcactggtatttttctaacatactagttttcataagaaatggaatcaggaatcaatgaattagataacattcacattggctggccattattggttaaaatttgatcgatgcccctgtcctccaacagaagcagcttttttttttttttgtgagacagagtcttg

SEQ ID NO: 139975 - DNA, 468 bp, Homo sapiens
ggtgtcctgactcatcgtcacatcactgtgacaagctggctcgcacgcaggtcaatcctgatctgttcccaggccgcacccacgtgccctgctgtttctcagagcctcctagagggtgtttgcttgtggttcctctcacaggtcagattcctccagattcttccagctgcctccacagctcccctcaccaccttggcttcccctgggtggccctgtgtcctttgtcctctgccctaggtggatgtaaggttaacggcttcctgctgtttggcttctcagcctttccatcccctgtgtgtaactaatctcccccattaagttccttttaatgctttctgttttcttggttggatcctggcagatgcaattctttttcaaaatatattctgatttgttatctcacttgataataatagtgaccagcctgatcacttagcatgggctaaaccattaggatggctacaatca

SEQ ID NO: 139976 - DNA, 250 bp, Homo sapiens
gaacatccacacagtgaaacccattttaaaaagagagagacaacactgtcttgctaaaacatactgatttataatacactggaaggatcagcaaggtactgattaaaagtggttatctatatgatgtgatgaagaaataagattatggaatattttagaagatatattatcctttatttccccacattaatttctagcctgatcacaaataatggacttctgaaagtgggttttttttgtgtgtgtgtca

SEQ ID NO: 139977 - DNA, 337 bp, Homo sapiens
tgagcggtgctggagacagagaggcagggaccgagggtgcggcacctggggaggaggaggacagagacatgaagatggcagagaatgacagggaagggagcatgcacaaggcggccagagccctggggctgggcacctcggtccaacccctgagccccaacccgagccccagcccaggccaagctcccagcgccctgcaggaaccgcctgggggccagcccaagagcaacacgccatccgcatccacgcctctccccagcttccaggccactcgggagcccacctgcgcccctcgtgagaagcagcccaggaagatgtcgccttcatgagcacacca

SEQ ID NO: 139978 - DNA, 483 bp, Homo sapiens
tacttttccacaggtatcactcttgcccaggcgtggagtgcagtggtacaatcatagctcacgtgcaaccgtgagaactctgagctcaagcgaaccctcttttacctcaacattcccaagtagctgggactacaggtgcgtgccaccatgcccagctaatttaactttttttcttttttttgagaaagggtctcaccctgtcacccaggctggtctcaaactcctgacctcaggtgatctgcctgcctcggcctcccagagtgctgggattacaggcatgagccaccgtgcccagctgcttcatgtattttgaacaggggttttagttgtaattagaagagaaatgtaatgggtgtgcttattccatctcctatggaactggaaacaacatttggcattgaaaattgttgtcttgataaccttcagggtgttacttctcattttagcggcaatacattttgcttccgtgtgatgaaacatcct

SEQ ID NO: 139979 - DNA, 511 bp, Homo sapiens
tgtgcctgaggagttataggggatgccggtggaacgaccattacatgtggcagctggactgggcaacggccgatcgccactgtgctctgaggagagaaggcagagcttccccctttatctgctggctggtgaagtcctgagaaccgggcagtcagctaagcaccaagttttctctgactacagagctcctatcaaacggatgggtagaaaaggaatgttgtcataatagctaacccttctttagtgcttcttatagtctgggcactggactgaggtttatatgtgttatatcattaaaactcaatctctgggaacgactgttagtacttggtaggtatactattattattgtcgttttacagatgagaaaactgaggcccagagaaagtgagcaaaatggtgctgggggcgattaataggtggcagggctggaacatgaagccacagtctggcaccaaagcccattcatggagccccaactcaatgggctgcttctcagtagaaggctttg

SEQ ID NO: 139980 - DNA, 408 bp, Homo sapiens
ttcctatgtgaaggacaaacattcagaatccaggagcagtgttttgaaatcatatgttaagggcaaacatacagaccctagcatcaatgttctagaatcatatgtgagggacagacattcagaccctcgcagcagtgttctggaatcctagatgggggacaaacattcagaccccagcagcaggcttctggaatcctatgtgggggacaaacattcagacaatggcatcagtgttctggaatcctatgtgagggacaaacactcagagccttgtagcagtgttctggaatcctatgtgagtgagagtgcctggagcctacccaacctgacgcccccaaagccctcacagggtctgacctcccagcatgcacctgcctctccctgaaccccaactgcccaccctgcctg

SEQ ID NO: 139981 - DNA, 277 bp, Homo sapiens
atctcactcagagtgtgagtggcagtcctttttataatggccacaagactccttatcatctgacctcatctcctatcacccgcctcttcattcactctgctttagacccgctgctctccaggcagctacttgaacgtgccaagaacacttctccctcaaggtctttgtccttgtttcctctacctcaaatactcttccccctaatgccagtgtgacttgcttcccacctccttcaggtctctactcaaatatcatctttaccggggggggcctcccc

SEQ ID NO: 139982 - DNA, 897 bp, Homo sapiens
cttgatctgagtcctgggttttccctgtagtttgatcaagaggaagagtttttccccccacatcccaggaaacttgggacaatgaggtgctccctcttggcagttacataccatttcttcattttctgcttcaaaatccctagctcctcccaaatgcacagcatgagactatgtcatctgcctcttcttgttttgtaatcttctcccactgtcctggtcactccccttcattcattgaaagcttcggcaccttgctgtcttcttcataccacgattcccatggtcacccttcctgccctcactcttggttacttcagaactgatgaacctgatctatctcccaccttcatctctcaattcttaatcatctccactattttcctctgctccaccccagccctactgcatcgtcagtcacctgcaggacgaaaagaagtgcttcctttgtgactcccggcgccccttctctgctagagacaacccacacagccatcgcatccagaatgtagtcaccagctttgcaccacagcggcgggcagcctggtggcagtcagagaatggtatccctgcggtcaccatccagctggacctggaggctgagtttcatttcacacacctcattatgaccttcaagacatttcgccctgctgccatgctggtggaacgctcagcagactttggccgcacctggcatgtgtaccgatatttctcctatgactgtggggctgacttcccaggagtcccactagcacccccacggcactgggatgatgtagtctgtgagtcccgctactcagagattgagccgtccactgaaggcgaggtcatctatcgtgtgctggaccctgccatccctatcccagaccccttaagctcacggattccgaacctgttgaa

SEQ ID NO: 139983 - DNA, 478 bp, Homo sapiens
cttgatctgagtcctgggttttccctgtagtttgatcaagaggaagagtttttccccccacatcccaggaaacttgggacaatgaggtgctccctcttggcagttacataccatttcttcattttctgcttcaaaatccctagctcctcccaaatgcacagcatgagactatgtcatctgcctcttcttgttttgtaatcttctcccactgtcctggtcactccccttcattcattgaaagcttcggcaccttgctgtcttcttcataccacgattcccatggtcacccttcctgccctcactcttggttacttcagaactgatgaacctgatctatctcccaccttcatctctcaattcttaatcatctccactattttcctctgctccaccccagccacacatgccctggatcagggtttttaaactgacactactgatattttgggtcagataactgtttgttgtgagcagctgt

SEQ ID NO: 139984 - DNA, 472 bp, Homo sapiens
gtgacagggaatgcaatgactagatcattgagaactagtgtggactttatcaggaaggcattgggagggccacttaaaattaataatgtagctgggtatgatggcacatgcctgtggtcccggctactgaggaggctgaagcaggaagactgcttaagcccaggaattcaagtccagcctgagcaacatgccaagaccttgtcgcttagaaaaaaaattaataatgtaataagatctgtgttctgaagacaacactgatacaaggcagagaaaggctgagaaggaaataagacacaaggcaaggtatcaggctattgcagtaatcgaggccaaggatgacagtggcccagaggtatgaacagactctagtgatctttaggaagcacagctgacaggacaggacaggactcacctcatgaggaaggagtaactgggcagatgaagaaggcattcatggagaggaaagcatagg

SEQ ID NO: 139985 - DNA, 269 bp, Homo sapiens
cttttgctcaatattcacttacgaggccaaccctgaccactctacttaacactgccctctgtccccattcccaccatgctcatttctttctttttgaaacaaggtcttgctttattgcccaggctggagtacactggtgcaatcacagctcacagcaacttcaacctcccaggcttaaacaatcctcccgcctcagccaccctaggaactgagactacagctgcatgccacaacacatggttttttttttttttttttttttgagacgg

SEQ ID NO: 139986 - DNA, 285 bp, Homo sapiens
gatgatgtgtccatgatttataaattagagcaactaaggtcggaaggggtaaaaatggctcagtatttttactaagaatgctagatagtgaccacatctactcacagacagaaatcagccaactgtaactaaatgactcacagagaattttaataatacatttcaatcagagtctgtaaaaactctctctgctgatgaaaaatctgtcctgtcagaagttcccaaccaaatctgcttataatccattttcaatgaacctcagcttcctttgaagtagaataagct

SEQ ID NO: 139987 - DNA, 503 bp, Homo sapiens
tcacaaaatgtaccatctattgttgcaaaggagatagaatattcctagataaaaatacctgactattgaacaactaaattatagtttgcgcattgctgactcaaacaataaagcactgtgaggagtatgggacatgctggaggaacacattcaaaagtcaaactcatcaaatgtggaacatgatccttccgtttgttggccttcctcacaggaggcagagagaggcctctgtatctgccagagtctaagtctatttacaggctgtcatctgggagcgagatggagatttcagctacctgtctaaagtggccttgtttgctaaaatatccttcaaaatcgctatttcttccgaaaaatccaattaccgtttactggtacctgctccggcaaccctgcactctgcaacgttaaggctgggaaggtagggaaggtcaccgctctaggctggggaaacccagggaatgggtctttccctagctcccttcaagccagcaggtctggtg

SEQ ID NO: 139988 - DNA, 444 bp, Homo sapiens
gattcaaactctacaaacctgtggtggaatgagaacaaaagctttcggcttgtttgctagctgctgaagtttaacagctaaaacattttgaaagcagatccatatttattttgggagacggaaaggtttctccatctcacaagtaactaatacaatcaaaaccctggcaaacacagcagtgcgcgaagaaatacagtgtgaggctggacaataaaaagttgcacagaatccatttgtcattttggcccactcaccagaggctctgcaagcctgcttcccacagctcagctcataaatccccatctcctccggcccactctcaggacgttcctcccccagcaccggaactaggacttcctacatactgcagagctcactcctggggcacccctgtccccaattcagcaggaccctctgtgaacagggactgaaagccagatctcc

SEQ ID NO: 139989 - DNA, 394 bp, Homo sapiens
tctcggtatttaaacagctgctgttgctcttcattctgtagctctacatcagattcatgctctagtcctgtatatccaaatgatgactagaggctgccggctctgctctttcaaagccacaatgagtgtagcccgtctacaaaactctcccttttccaatccagctttccctcctgcatcacctatctctctacatctggaaccatcggcagctgccttcataaggcacctcggtctggcatttggaaaaccaccctgtcttgccagagctgcttggtcttgggtagcaaaagctgtatgcaatctaaatcaagctttcaatcatgagaaatcacattccttcttttccccttgtaatatactcgtgtgtttttttttttcctttctcaataag

SEQ ID NO: 139990 - DNA, 380 bp, Homo sapiens
gaagtctgtctcttctaccttgatttctctcaaatccttgcacttcttttgggcttttgtctcaaacatactgggtttaaccactgactatctgcaattctgaattgcctttgacaggctatttaacatctctgagccttaaatgcctcatggaataacagatgtcaagtcagcacctactaagtgttctattacaataatgcatctattactattcttgcccagcccactgccatgactttaggagtatcaatgcagcccagattactgccatggcctcactgttatccctgctctaaacagcactccagtctactctcaccaatgcagccagaaggatctttcaaaaatgccaatgagatgatgtcactctcctgctt

SEQ ID NO: 139991 - DNA, 373 bp, Homo sapiens
gttaaatgcttccacagcacttggatgctgaccacacaggtaaactgaattcagtctctgagtttctcgcagaacatcagttcatgaggtcagagatgtatcagggcagtccttcaggaaccaagccacactgtaaattgctgcctatgtctctttacttcttgatatctcttctttttatttttccaaaccttggaagtacacagttatcatgaacaactctccatctgtctgtgcatcctttccctaaactttttgtcttaaaacattcattataaacccaaataacaccagcctgacaaaagtttctagtgttgcctgatcagacaccagactacatggtagtaacactgttacattaatgcagatcagg

SEQ ID NO: 139992 - DNA, 151 bp, Homo sapiens
acatggcatccctgggagtggtttgggaggaagggagctggggcttcgaggggacctgcacattcagtcctgtgctgggtgctggagactcgtccctccccactgccccctctgcccatcctcagtgctatgtggctatggctcctcggag

SEQ ID NO: 139993 - DNA, 489 bp, Homo sapiens
cctcccaccttggcctccagagtagctgggactataggtgtgtgccacgatgctggctaatttttttgtattagagatgtggtttcaccacgttgcccaggctggtcttgaactcctggcctcaagcaatctgcctgcctcagtctcccaaagtgctgggattacaggcgtgagccactgagtttagatcgttttaaaaaaaattactttacttttattttaatgggcttctgggagggagcagagtttaccttatttaactaaaagctttttcttctatttaacctttatatgttcttttgctttaaatttatctttttatacaagatattgatggattaaacaatatccaagataagaatctgaattttaatacagaagatgagcctgttatatatttactataattattattatattaggatttacctatgctgtcttatttaatgcttgcttgctttttatttttttatttttttattttttttg

SEQ ID NO: 139994 - DNA, 323 bp, Homo sapiens
ggtgttttaagctaaggtaattgctgttggatgccagttaggtcctaaagtaaaagaaggttagagaataattaaattcttacgtcccaagttttcagtttcaagtctgaattccacacaaattctgcttgattattattagacatttgatttttttctaattactgaaccacaacacccacagttctgttactccaagtctcctaatttattcatgcggagatgcatctgctatttttttttaattttgataatgtttgattacatatttgtaaatgaatgtgcaggtgaaaaaatgaattgtgaagaacattttaagaata

SEQ ID NO: 139995 - DNA, 397 bp, Homo sapiens
ttcagccataatcaaataatattccaccgcaaagtaatgggaaaagtatatgaacttattacttagcaaagagagctctgaataaataccttaagtgcttagtaaaaatataattaaagccttacgtcaatataaaaccgtgatggcaaaatctgtttagtatttttcaccaaccaaagaaaattatccaagttaagccatcagcttcacagataaacatttatttttgtctaaaccattgtaatatatgtaagccaaattccttttttttttttttgggcttaacctgaaaaaagaaacaaagcatattacaggggttaaattcctaggtctcccattggctaccagggtgacctgggtaaagtaacttggaggggtacggagctcgaatacgaaa

SEQ ID NO: 139996 - DNA, 211 bp, Homo sapiens
gtctgagatcctctgagctctaaccagactttccttccccacagtcccacatgtgtaaaagggactaggagaggtgaccagtacctttggggctcagatcgagaagtgctagggacatgtgggccatgagcttagttgtcaggctcctcagagggagggaagcttggccaaagggaagtgagtagagtccaggaggaggaggaattcgccc

SEQ ID NO: 139997 - DNA, 368 bp, Homo sapiens
ctttaagcaagacacaagtgttcactgcacacggcatgctagtgcagccacccaatttacggcctcacagatcttagggaccaaccaaggacagaacccaagttctttcttttatttttccatccctcacaatagtggttctggaagttaggtccctagaccagcagcatcagcatcacctgggaactggtagaaatgtgtgttctcggccgggcgcggtggctcacgcctgtaatcccagcactttgggaggacaaggtgggcggatcacgaggtcaggagatcgagaccatccgggctaacatggtgaaaccccgtctctactaaaaatacaaaaaaattagccaggcatggtagtgggtgcctgt

SEQ ID NO: 139998 - DNA, 534 bp, Homo sapiens
caccacagccaagactcggtttttccattggaacatggaatgaaatgaagtgagtttacatttggggctctcattgtatcggatgaactcttctctaaaggtcagaaggccgggcatcatgagctgtcacttgagcagaatgctcaccctgctgtgagacccagaaagaagccggcacgtccttgagcgccgtacagtgggatggccttgcctgggcggctgtctggggctcaaggacatgaagttgaaaatcacacacacttccaatctatatacaaggaggaagcacatgagagcccaacactggtgtttccaagagaaacgtttcctttcaggggctaatgcaggcgctacaatacctgcagcacaggaagcacaaactattttcagactcagaagagagccgttcaagtggtggcaatgccaccaatagggagtatctcatcaattgtctttggtgaggaaacgctgacaacagaccaagaaattggtgaattcaagaagcctgagtggtctgggcgcggtggctcacgc

SEQ ID NO: 139999 - DNA, 231 bp, Homo sapiens
ttatcctggaaactagtgtctgttctttgtagagacaccaatagtatcttggctttaattgccaaagagctctacatctggaaggaattgaattgagtaacactggtattcaaaagttgatctgacataaagcctatctgatggcttaaatttcatgatgtcctggaaaaattgaggtaggaatgattaataactagtaagatttttaaggacaataagtaaaaggaaaaa

SEQ ID NO: 140000 - DNA, 518 bp, Homo sapiens
ggacaacttcagaactttagagttaccaagtatttttgttgttgctttcctttggaaattctgcctgttaggtgctgggacaaatgacaagcatggttgagtatctatttcctataatgtgaagtcatccctgaaaataccatttcaagtggcagtattccagggattaagggcacacaggatgtctgaactcactctctggctcagaatgaaccccagttccattttagacatagccggatgtaagaaacatggtcactaagttaggagtcttctgggctttccacgctaaagaaaaagagaaaaatgaaaagagcaagaaagggataggtttataaaattttggaactttccaaaaggagttttgagatttggagataatgtttaatatcactttcaatttacaaataaagtaggtaggaaatgtcaagtagtttaaaaggaagaaataaattttcagaaaacaaattgacaatgtgctagtcttaggatgttactcattatcattttatttctgt

SEQ ID NO: 140001 - DNA, 405 bp, Homo sapiens
tataaattcataacacattaaaatgagcagactctttagttccttaatcctagcagtctgatttagtaatttctttaatggcaatattattctccccatgccacagttcatatttgacttctcttgactccttgcttcccacttactatcagcaaccaagtcctgcttattcttaccttattatattgttctttctatccctattgccacaacctacttcaggtccttatcatttactcccaatgcttcttttgcaatagcccactaactagctctctaattcttcaatttttctctttttctttttcttttttttttcttttgagatggagtcttactctgttgcccaggctggagtgcagtagtgtgatctcagctcactgcaacctctgcctcctgggttca

SEQ ID NO: 140002 - DNA, 483 bp, Homo sapiens
ctggttgtggctctgctgtgctgtgaggtcctatatgctgcccatggtgctttcccactgtcttgggtctctagatgagagaggaaaatgttcttatgtgtagcatctatgcagataaggaagctgtggatggagatggtgcagttggttgttcacaggtcggcctcagcctcggagtgctctgtggaggcaggcggagccacatgatgagcctggcgtggagggctgtactggggcctgtgaccacccaaacaccctctgtgcatgttttttcactccgtgttgaagacgtgagctgagagcacagcagtcacgccctcctgactggctggtcatgtgggactgctccttggggcccctcagatgtgggttggagctgcgggaaacaccctgtagctttttgaatctcttccaccctctctggacctctctccttctggcttttcttcaggaaggaagtagcctgcatttggtgagagtcac

SEQ ID NO: 140003 - DNA, 393 bp, Homo sapiens
cccacactattatcaatcctcttaacatctgggggaacagagacccaggaagataaactgaactcagggcacacagctggaagtggtggcattaggtgtcacactcaggccatggactccgtcaccctgtgtaaggagcagtaattttctctcccattctctgcaggcccctgaaaggtaccatgctcaataccagtgaacgctgttcagcccaacctgaccacaactcttccagatgggcttttattccccccatttttagggtgaccaacgggtgtgcctagggctgaaggggctcctgggatgcaagactttcggtgttaacaccagaaaagcccgacccattttacagacacggaaactgagatttggagagggtaatatattccacag

SEQ ID NO: 140004 - DNA, 136 bp, Homo sapiens
attaagaaatgcactggattttaaccttaaagtctacatacttgagaaaagatatagagtacattacagactagggtaataaacagaataattcatgactccctaaggggatttttttttccagagggcaaatgag

SEQ ID NO: 140005 - DNA, 272 bp, Homo sapiens
cacggctttaacacacttcttcgcactagtgagaacgcccgcaatgccttattcagtaaggttaaatgagtttgtttgctgaaacattcgccacatgatcccaacgctcctccagctccatcccgtctataatcgcagagcgaacactcactcaccttgggcgtgtcaataattgatggtctggggatggaagcgtgaaacaccactgcttcacagtccgccccatcatccagggacccgggcacatcttcaggcgtctccgcgggctgggc

SEQ ID NO: 140006 - DNA, 181 bp, Homo sapiens
gggacttggaggagttagggcttggcctcttaggatgacctgagcccagactcctagggcggccagtggatggggaggcagccaggggtgccaagctgcttgggtgttgtaggagagctctggggaggactcagcctcgctagcgggatctggttggtcctggtgggaaggacgcctagtg

SEQ ID NO: 140007 - DNA, 107 bp, Homo sapiens
tttttcacaggggactccagatccttttagtggggaataggatttagaagcccagatccaggtgctaggtgttatcgttactatggattacatagtttttcatggta

SEQ ID NO: 140008 - DNA, 299 bp, Homo sapiens
ctgaagtcataagcaagttgcaaaaaatcggcttactagaacaggaaacattcttttgcttttcaaaggctttcccatcatctggagccaaaaatattatcttctgacccaaaaagccactaataaaccctgtttctataggctaagcaagagggaagattttgccctgagcaaaacggcaaagagggcaagactgttctctgggtcctcccaccctcacttctgccccctctcctacctcctgccaccctccacttccaggtatctcccaactgccctctggctgcctagtgtcttac

SEQ ID NO: 140009 - DNA, 106 bp, Homo sapiens
ttgctatgccattatgttacagaatgtattcatacagcaatttttgctaacttacttcttgcccttccatacgcagtaacaaacagagagaagtccatccaccatg

SEQ ID NO: 140010 - DNA, 765 bp, Homo sapiens
tttagttcttgaacacctggaattacttctgacttttgccctcctactccttcactatctcatcagttatcaagcagtgttgaatttttctttatcgcctttgttggcgttcttcttttcatttcttccagccatctccaacctgttagggagtttaggaaattgttcaaagactgattaataagatggtatggagaggatatttggttggggatgtgggaatgtctgaatcctgtcttggccagccatctctactcatcaggagtgtggggagtacatgtgcaatgacacaccagggaaaggaacactttattattagctgggtatgaaccacaatgcagaagtcaggaaagataggctggattctggtcatctctgtctatcctccccacatcaatgcccaaatttgagtcttggaacttttcttccgagtgggatagaggcacactaaccagaaaaagtagagagaaagacaaatccacagcctctttgccccaagcccggggccttgctaagactttttctgtgggccatagccttagggcctggctaccttgtgggagagggaaagagaacaagctggctgggctgcctctgagaaaggcaagggcagcccttgttaccactcagagtatgttgaagaacgggaaagacgcagcactttctgttgaacgtgttatcttttaagggctccatcccaagaaaatgttattccatattctccaattttagtaagattttcttcctttgtgtgtgtttggtggt

SEQ ID NO: 140011 - DNA, 427 bp, Homo sapiens
gctcaggaaccttccaggtcctatttgggcttggcccttccaagcagttccagccccacaggaggatgctcggctattgcccaggatccacgaggtgaggaggatggggccttccatcaacagtgggccccgaggaggacagcaatggccaagacgcaagggaggaggcagattccagaggtggccccgcccaggcatgcagagaagggaggctctaaaggcatcagagagcaaggggtacctgcggggccttgaaggatgcagggacaggacgagctggaggagctgggcaagatggctgctcagggaggggacagagaaccaaggcacccaacagtccctccttttcccatctcacctggcaagtgaagaaagggaagggataaaggcagggagggtgaaaagaaatgaagggccagaaggaaaa

SEQ ID NO: 140012 - DNA, 621 bp, Homo sapiens
tttcattcgttgtcaaatttgtatgtgtacagctaaaaaacaaaattgaagtatctacttttatgatgactttcagtttgtagcatataatccataatcagggtgtttatcgatgccacaatctcaaagactacaccattgagattgtggctgtggactctggcaaccccccactctccagcactaactccctcaaggtgcaggtggtggacgtcaatgacaacgcacctgtcttcactcagagtgtcactgaggtcgccttcccggaaaacaacaagcctggtgaagtgattgctgagatcactgccagtgatgctgactctggctctaatgctgagctggtttactctctggagcctgagccggctgctaaagggcctcttcaccatctcacccgagactggagagatccaggtgaagacatctctggatcgggaacagcgggagagctatgagtcgaaggtggtggcagctgaccggggcagtcctagcctccagggcacagccactgtccttgtcaaggtgctggactgcaatgacaatgaccccaaatttatgctgagtggctacaacttctcagtgatggagaacatgccagcactgagtccagtgggcatgggg

SEQ ID NO: 140013 - DNA, 232 bp, Homo sapiens
ctcttcaggatctctgcctgcctctagtagggacagagactttgagactatgattgcaaaggagagcactgggccctcaatgacccagtatgggccaagccaagtactagtaagaggtcttccctggggctgctgtttggctgttgctttcaaacatgtttaagtgtcttttcagcaacagcaactccacagttggcatggttgtgtgcaaggataaagcagtttcccttag

SEQ ID NO: 140014 - DNA, 461 bp, Homo sapiens
agctgggactacaggtgtgtgccaccacgcctagctaatttttgtatttgtagtagagacagggtttgaccatgttggccaggctggtctcaaactcctgaactcaagtgatccacctgccctggtcttccagtgatgggactacaggtgtgagccaccatgcctggctttaggcatcttcttagaccactttttctagagttgttttcctaatatttgtcttgtgattacaagtgaatgtcactatatgcaggttattatgacaggcaggttttaacttctctgtcaatcaagttaatcatatgatgtaggcctaatattttgaataatagaatcactcattctttcatttaagtatttatcaggttgctattgtgtgccagggactattcttaattctgtgtaagataaggagatttctaagtaaaacagattttcagttctccaagagcacttagact

SEQ ID NO: 140015 - DNA, 417 bp, Homo sapiens
cacaagagaccctcacactacagccttccagaagcctccatctacataccatgtcacaggagaccctcagaccgcagccttccagaagcctccatctacacaccatgtcacaagagaccctcagactacagccttccagaagcctccatctacataccatgtcacaggagactctcaggctgcagcctcccagaagcctcctgaggaaagcagggcttcatctgaagacaggtcactggcactaagcttacttgtttttttgagacagggtctctgtctgtcgcccaggctggagaatagtggtgtgatcacggctcactgtagcctcgacctcctcaggctcaggtgattctcctacctcagcctccccagtagcagggactacaggtgctcaccaccatactcagctaattttgt

SEQ ID NO: 140016 - DNA, 234 bp, Homo sapiens
atatccagcaagaatgacaggctaggatttccagaacttaacatgtggcatgtttcgtgtcacagttgtgttgactctactatttatttcattttaaattttttgagacagggccttgctctgtcacccaagatggaatgtagtggggagatcatggctcactgcggccttgacttctgggctcaggtgttcctcccaccttagcctcctgggtagctgggtctacaggcacgc

SEQ ID NO: 140017 - DNA, 435 bp, Homo sapiens
tttgggagatgaagaatggaccagtctggccagggcagtgggtttcacattcaaatccaaagatatgaactacagggcagtagaaggcagggctctgggcacactctacagggaggacggcttcagtcatggtgcatacacacgatgggctctgggcacactctacagggaggacggcttcagtcgtgcatacacacgatgggctctgggaacactacagggaggacggcttcagtcgtgcatacacacgatgggctctgggaacactctacagggaggacggcttcagtcgtgcatacacacgatgggctctgggcacactctacagggaggacggcttcagtcgtgcatacacacgatgggctctgggaacactacagggaggacggcttcatcgtggtgcatacacacgatgggctctgggaacactacagg

SEQ ID NO: 140018 - DNA, 350 bp, Homo sapiens
ctcctgccttagcctcctaagtagctgggattacaggcatgcatcaccacacccagctaatttttgtatttttagtagacacagggtttcaccatgttggccaggctggtcaagaattcctgacctcaagtgatttgcccacctcggccttccaaaatgctgggattacaggtgtgagccactgtgcctggcagtttccttcctttcttatgtcttggatgagtcacttgacttttccaagccttggtttccttgctgggaaaacaggaattatagccggaatcaggggatggtcatgagggtgaaataagatcatgattagggcagagcctcaggggccaggctgctcc

SEQ ID NO: 140019 - DNA, 321 bp, Homo sapiens
tacttcttcacagcaataactcagatgcaacttttcctccttggtgaaagatagcatgacttgcagtctgtgagaaggaaaaggaaaaacagttgatttgttttcccatgagagggaaaaagaaggaggggatacaagctcacacactatcaggtggatggatcatttcctccactgaaaagatacacaaataatttgatctctaagcattagcaaggtctttgtagggtacgtagtgaggatcacatgcatgaagaatccattgctcgctgaaagaagatcttggaatgagtgcgtggatccacaattcatgtagatggc

SEQ ID NO: 140020 - DNA, 133 bp, Homo sapiens
tcctgcgccccctcgtggcggtacttcagcccttcgcagcccgacgctaggggcctggcagggggcagcaagagaccgcggattacctgaagctgagtaatttataaagaaaagaagttcaattggctcacag

SEQ ID NO: 140021 - DNA, 477 bp, Homo sapiens
aatgcaaggacacaatcacagctcactgcagcctcaaaatcctgggctcaggcaatcctcctacctcagcgtcccaagtagctgggactacaggcgtgcaacaccacacctggctattttttatttttttactgcagacggtggtcctgctatgttgcccaggctggtctcgaaatcccagcctcagtgattctcccaccttgtccttccaaagtgctgaggttacaggcatgagccaccgcacccagacagaactagaataataattattattttgcgtcatagcagctgtgcagaggatttgaatcagcacagccatgaagtcagacccacctggtcccattctcaggttgcttcttgctaataacagcggtgactgccagctcacccatgtcgctagacgctaggcatgattctaagtaattcatgcgtagtatcccaattaatcctcacaagaactgtatgaatcaggtatga

SEQ ID NO: 140022 - DNA, 590 bp, Homo sapiens
ttcccaccaattaaaactcctgtaataagataagtagagctgaatgtagtttcttaaattgtatgaggaaatgtgtcaacatttggaagatctgcataactcagtgaaggaagagtttcccaattaccaatgcatgatatgaccaaggtgtgatttttgtaacagatctttccaagtgcaagataaaacagtggattttaatgtaacagagcatgaaaaatccacattgctagtgacctttgaggaactaccacttatgtagtttgggtgtagcatcaaagaatatctacaattatctgaaaggctaggtattaaaatacttcactgagccaggtgcggtggttcacgcctataatcccagcactttgggaggctgtggcaggtggatcacctgaggtcaggagttcgtacctgacttgccagggttgttataagaactaattgggaccttatgtataagtatactattacctggtgcatattaggaatactaatttctctcttcctttccatttttaaagcatattacagtgtcaatcttttttttttgaattttgtgcagtataccttttatagagctatttttaatt

SEQ ID NO: 140023 - DNA, 385 bp, Homo sapiens
tttcccagggaaatggttcttgacagtcctgctggttggaaacacacctctgcgtaggttggtgtgtgttctcctgcctcccgtctccaagaggcgtgagttctaagggctcccatcctctcacatgcaccatgaggactgtcagccgcatccagctcagctagatgatacgagtagctatgtgaggggtaggaaaaccaggtattcagttttgaactgagaagtccggtatttctgcttgctataaaatgagagaaatacaaggcatagaaatgcctttttctccataaattaagttttattatgaagagatgacctggttcgaatgcactcaagtggtaccaactcacacaaaatagaagtggggtttagattgctgccgaca

SEQ ID NO: 140024 - DNA, 529 bp, Homo sapiens
gagtgtagtcgcatgatctcagctcaccgcaacctccgccccccaggctcaagcgattctcctgcctcagcctcccgagtagctgggattacaggcacgcaccaccacacccggctaatttttgtatttttagtagagacgggggtttcaccatgttagccaggctggtctcgaactcccgacctcaaatgatccacccacctcagcctcccaaagtgctgggattacagacatgagccactgcgccaggccagcagggagggtcttttgagacaatgacatttcagtaagggtctgaaggaggtggaaggacatttcaggcagaggggatagccagtgcaaagaggtgatatagaagaaatatgtttggggttttgcaggaacagtgtggctggaacagagtgagtgagagggagagtggaaggaagtgagggcagggaggtgatgggacagattgtgaaggagttacgtgccttggggagaactctactttgagacaaggagagatcatggctcaccacagcctcga

SEQ ID NO: 140025 - DNA, 179 bp, Homo sapiens
gggtcgagaagccctctggggggaaactaggagaggtcagctggcacttctttagacgggtttcaggagactgtcattcctgcagtggggacccagtcccttcgcccttgaccatcaggcgagactgccagatgagtgttgagcagggctgatggctcttccagcaggaaggctttgtg

SEQ ID NO: 140026 - DNA, 755 bp, Homo sapiens
gagacagagtctcactatctcccaggctggagtgcagtggtgcgatctcggctcactgcaagctctgcctcccgggtttacgccattctcctgcctcagcctcccaagtagctgggactacaggcgctcgccaccacacctggctaattttttgtatttttagtagagacggggtttcaccgtgttagccaggatggtctcgatctcctgacctcgtgatccacccgcctcggcctcccaaagtgctgggattacaggtgcaagccaccgtgcccggccaattttttcactttttaattatgtacaacaatagttgaaaccatacatatactcaggagtggaatataattagcaaatattttcttcagattgttatttgtctttgtttatggtgattttttgacatgtgtaagtcattcagatatatttttatgtagctaaatttattaatatttaacttgcttttggaatttgggctttatttatgacagtttttctgtttccagattaaagaggaatacatcattaatgacaagatatgaaatgcaaatgcacacattaaaaaaaccctaagtatcattagcctttcgggaaatacaaatcaaaactaccatgagataacattgtatagatagataacatccatttgattgattaaaaaggaaatatatggatatatcaagtgatgtaaagactgaggaataattgggattttcatacactgctggtaaacaataaaaataatatacccacac

SEQ ID NO: 140027 - DNA, 329 bp, Homo sapiens
gagcacgagtggctcctaggctggcagcacactgctttgtggcagaagggctctgatatgctctggtctttacctcttttctttaaaaatctaatttggccacctctttatgaagaagacaaatcagacaaattggaaggtatgagtgaacatcatttactccttcaacagctattattgagcaactcctatgttgtattacagtgtcaacattacatctaaattaggtgatgacctctctgggaagaagtcctatcttccagctatctctgaatcctcagggtctgtgcaggatccaagacaaggcaaatggttaagtgtttactgaa

SEQ ID NO: 140028 - DNA, 223 bp, Homo sapiens
ctactcacagccccagacggccactcatagaccagatggccacccctagccccagacagccactcacagccctggacagacactcctagccccagacagccactcaactcacagccctgggcagccactcacagtcctggctggccactcacagccatgatggccactcacagccaagagggccactcaactcacagccctggagagccactcacagccctgg

SEQ ID NO: 140029 - DNA, 255 bp, Homo sapiens
cgggaacacgtatacctggcagcacagggaaacagctcggagatctcacagcacatgcactctctgcacacacatgagcacagcacacagcacatctatcatgcacacagcacacacgcatgcacagacagccactcaactcacagccctgggcagccactcacagtcctggctggccactcacagccatgatggccactcacagccaagagggccactcaactcacagccctggagagccactcacagccctgg

SEQ ID NO: 140030 - DNA, 287 bp, Homo sapiens
tcaggggctttggttgtaagtcacacaatctgactctggctaccttaaccaagaaaaagaactttggggatgagatatcagaatgttctcagttacaagtaacataacagcaggacttcttacatcacttaacaagaaggcaacagatcgttctcaagattggttccacagctcaattaggtcattgtggtagcagcctccaagatggcaccaatgctgcctacctcctggtagccttgcctcccatgttagaaagtgttggctcatgtaaccaataggagactgca

SEQ ID NO: 140031 - DNA, 863 bp, Homo sapiens
ggggctgctctgtctatggagcagcgattcttttgtttctttacttcactcatgaacttgccttcagtttactctgtggactcaccctggattccttcttgcacaaggtccaagaaccctctcttggggtctgcatcgggacccctttctggtaaacctttatttggctgtaggtagagtaagtatcttttttcttcctattgatccttccaaactatctatccttcttttgactttgaaaaccctaagtctgttgagttcatgtcttcagactttaccacctaatctctcttctaatagttgtcatctttcagaatctcttgctgtctctcatcattctttgatgactttatcatctagtttattgtatttgatttcctccattattcctacaatcctgttggttttgctgtccttgtagattatccacccagtaccctggtctctcaatttcttgaacttctctacttcaaatatcttcactccactgcaaccagccactgccattcttacagccacaccatagacattattaacagtcaataccaatagcctttaaaatctctggacagcaatcactatcctgctgtctgattatcacattttgagtctctatctcactcctaccagttcccttggaactgttctttgaccctatagggacattcaatccattgatcctgctgattttattttttaatttccctaactttcatattgttatttatcttcttgttaagctagcttccatggtctggcacttgagccagattcttgcagaaaacctgaactttcttgttttcctttctctccactgaacacatctgaaaaaactcaccccttgtgaaacccagttatcctcc

SEQ ID NO: 140032 - DNA, 154 bp, Homo sapiens
atactagtaaaaaactcttccccaagttgctagctgaggcttctaaagatctgctggttttcaatataaaggatgaaacaggctagaaaatctggagatgctttagaaaggtcttcacagaaggccagaagggcccttcgcgccgtgcctcctg

SEQ ID NO: 140033 - DNA, 258 bp, Homo sapiens
actgtattgatagtgttttcctcagccaagaagttacagctgcagtactctgctttgctactcagcacatcccgatgagacaggagagcttaagtatcattttccccatgtccagggaaaactgactctgactggtgctccttagtttgagcctcatgaactattgacagaggctggaagcaccacactccttgtcctcttgcactgtttggagctaatgcactgtgggaacctttaccagggctctccatctgtgtg

SEQ ID NO: 140034 - DNA, 146 bp, Homo sapiens
tacctgatacctgctatttgctcctgagcctatggtggccactctctcttctctctacacctgtgaaggttttaattcagtgctgtccatttatacccttctaagagtggcaggactccaggaatctctgtcctcaccaatcataa

SEQ ID NO: 140035 - DNA, 347 bp, Homo sapiens
tttgagttacaaataatggtcataattatttccatcctgaaacaataacctgacaaatgacataaaagttatcagtgatagggcaaatcactgacaaatgaagtcaagttatcagagacattcaatgtaaaaatcgtattaatttcagaaacatttcctgagacactgggcttccattctacctaggaagcaaactaatcaaaaactttcagtatataaaacaaactgagtttatatatgcttccaatgagaaatgactaagattggctttaggcttctcccatcacgagaaaaacaattatcttcgtataattctttttgaactgttcatttttctaaaaataatt

SEQ ID NO: 140036 - DNA, 363 bp, Homo sapiens
gccatctagcgttggaaattactaattgcggtcttcaaagtattataacaacaaaatgcaaaaaggaaaaaataatttttcttcattacttttacaacattctttccaggagtgcactgagagaataccgataattctcctctactttacttgcagattttcgtttttgaaactgtaatcatgactggcagttagaatcagtgcacttgtgagctcatcaagccaaagctatggttactccttcaagcaggagggcctggcacttcacataaagatgaaaggaggaaggtgtctgtcaatcagctgagctgggggagtggaggcaactgtgatgaaactgaaggattcatgcccagtccaagg

SEQ ID NO: 140037 - DNA, 349 bp, Homo sapiens
agtggagaaaagggaacatggactgtgactctatgtcacaaatcagacgggagaaagggagacactgtgttaatctattctcacattgttataaagaaatgcctgagactgggtaatttataaagaaaagaggtttggccgggcgcggtggctcacgcctgtaatcccagcactttgggaggccgaggcgggtggatcacgaggtcaggagatcgaaaccatcctggctaacacggtgaaaccctgtctctactagaaatacaaaaaattagtcgggcgtggtggcgggcacctgtagtcccagctactcgggaggctgaggtaggagaatggcgtgaaccctggagga

SEQ ID NO: 140038 - DNA, 421 bp, Homo sapiens
aaaaaggaagaagaaaaagaaacttaagtggggttcatacatagcatggcagagggacactggagaataaaatggcatgcagagaggaacacgcgggccagtggatgaggcttctagacctggcagtgaactggagtctatttgcttacacaaatttaaccttctctccatgatggaatacaagtgtttcttgccaaaactcgcagccccagctgccctagatgaggagcaccgtgctggaaaagtgcacaggctgatcacagagacaggtaggaagcaatggactgttaaaatgcatgttccgggctggggatggtggctcacacctgtgatctcagcactttgggaggccgaggctggggaatcgcttgagcccaggattttgagactagcctaggcaatatggtgagaccctgccctt

SEQ ID NO: 140039 - DNA, 152 bp, Homo sapiens
gcacatgacatcgagaacattctcaggtatattaaagagttagcattagaagtaggaacatgacaataagcaactgaattctcaaaaattctgtgaagagaaagtaactttaaaaacaaatcacacatgcaaaaaaatatttgatataaaaa

SEQ ID NO: 140040 - DNA, 404 bp, Homo sapiens
ctctaatctaggacagttccttagtctttctctgtttcctgccctcgactcttgatgagtgctgccagttattttctagaatgtccttcaatttgggtttgttagatgttttcttatgattagattgagactatgcatttttggaaaactaaaactgagactgtgaatttttgccaaaaatagcacagaatgttgcagtgtcctcagtgtaccatatttggagaacctgaatttgatatgtctcattactggtgatgctagctttgatcacctggttaaggtgctatctgtcagatttctctgagtattaataaatcattaaagcctgaggactagcaaggtatatccagcttttccctgtaaaatatgcagaatttttggctatgctattcaagtgaactgtg

SEQ ID NO: 140041 - DNA, 765 bp, Homo sapiens
tgttgaatggcagtaagagctgaaaaaaactttcacagaaagagaaacattcttggggcccctcccctcattccctcctttacatcccacaaagatgacatcaggaaggaattccctgggtgagaccccccaaacgtaaaaataaaaggaatcctgtgaaataggaaacaacaacttcaatctctccagaaagggagagccttggctggagacaggatgtggaaatgatgacatccagaaggccaaaggaatctaggactctaactcttactcccaagatcatagagaggtcctgcagaaaatctacccctctcacagctccttctaatcttggctaacaggaaggaatgccaggccttgccttcgtttctaaatatgctgctcttctattctgaaatgtagggctgatgttcccattatttcaaactccagcacactcacactttgtatagtacttcccttcttccttcctgtgttactgcccgttgcttgggcagtggatttgctcagcttggtttgatgactgccttatacccaccattaaaaagagaatgctgtcccttatagctcccagtggtctcagggctggctgcatccccccaacccccataatgttgaccgccttcagagggtctgggttccctggaatcacctctagggactttcaggaggtgaagctaatgttggatagtgcaaaagatggatggaggggcatctcaaataggaagtggacttcaacatcctaaaggtcttttgaacagcgac

SEQ ID NO: 140042 - DNA, 716 bp, Homo sapiens
gcagaatcacgagtgaacagacgtcagatgcctaatagcagggtgcagtgttgtttatacttcattgctccttcaggacatgaacttaaaccattggatattgagtttatgaagcgttcgcatgaaaaagtgattatcatccaacttattgccaaagcagacacacttataccagaggaatgccaacagtttaaaaaacagataatgaaagaaatccaagaacataaaattaagatatatgattttccagaaatagatgatgaagaagaaaataaacttggttagagaggatgatcagaggatccgttgtaccggtcttgcgtgtgtgtacggtagtagatacgtatctattggaaggtgtaatgggcagaaagcggtgcagtagagaatggcagatgatccttcgggagtagtcatgatgcaagatttgaatacatggttgagaccattcgtagactttattaccaatctctactgcaccagtattgttggatagaagaagaacaacattgcagggactttgtaacagcatggttaagctaaataaatgtgccaactagtgtagtaactacagaagcagaaaactggcagctgtgacttataatggagttgataacaacaagaataaagggcagctgactaagagccctctggcacaaatggaagaagaaagaagggagtatgcagctaaaatgaagaagatagagatggagatg

SEQ ID NO: 140043 - DNA, 385 bp, Homo sapiens
gcacctgggcacacacacaaacaaagaggaactcaccgcagatatattcatgtatatgcatgcgcattttctgaaagaacccacctgaaactgctggtggtggttaatgaagcatgggggcagatcttttcttccctggccacttctttgataatcaggaattacctttcccctcaaaaattgattttgtataaaaatggatcacttccatgagtgttcagaaaatatattcattcatttcctttaagacattaagcacatgtgaccaatctaaatggaattgtcacgtttgtgtggttatggagtaaatggaacaaggatgagatgactttagcagctgtttaagtaataaactgtttagatccattttcctttatgcatctgg

SEQ ID NO: 140044 - DNA, 336 bp, Homo sapiens
cgtcggcacaaacactcctttgcgtcttggcaaacgagactgcagcagcgccaaggtcctacttgctgcggggctgccccaggaatctagagctggtaggcaagaaacgcttttggagttaagaaaaagaactgaccatcctggtccgcccacaggagaaacggcaaaggaaagccacctccaatggagtcattatgacaattatcattccggactgggccagcgggaacacctgagcccgacctagctgcacagccccggagctcagacgttagcagggggataacacctgtcaccagcttgggagagccattagcgctggcgcgttgcgcgcag

SEQ ID NO: 140045 - DNA, 427 bp, Homo sapiens
ctgatccacctgtagtctgggtttcacagtaaccacttttaacaaactaaagactcaaaatttaaagtatatttttagttcatcttcttgcaacaaaatggtaagctttcaaatgggtaaaacctaaataaatttgtcaactttgaattttgtatgtaaagtagaagttatagaaacaaaatttacattgaaaagggttttgttattacagtatcaacgcatatttataaatgtccttcatttccaaaggtgctcacaatatcgacctgtaaatagaaaagctaccaacatcaacttgtaacagtcatcttcacaacaaacaaaaacatcaaatgtcatatatcactgggccttattttggataagcattacaagctgttctcagatgcatacattttatatggtcaagaaacagaactacagtctc

SEQ ID NO: 140046 - DNA, 393 bp, Homo sapiens
cattttctgtaactacttcatgctgaataggggtgatgatatttttgcctaactattcagttttcttgaccctgaaacaaaggatcagtgacattttatgtgaagtcaaaaagtattactttcatcttccattagttcagtcccttcagttaattcctgttctgtttgattgtcatgaacattccagttctccatgtatactgaatgttttttctctattctaatgtcacaatttctaaagttatcacaaacttgcatttaagaacatctgttgctgggcacagtggctcctgcctgtaatctcagccctttgggaggccaaggcaggtggattatctgacgtcaggagttcaagaccagcctgatcaacatggtgaaaccctgtctctacta

SEQ ID NO: 140047 - DNA, 329 bp, Homo sapiens
gatgacctggaaagattcccagagtgagagatcaggagggcaaaggcctgatggctgtggtcattcttgttggctttactgatgaaagtgataggaggatggttgctccagaagtgaggatgaccagaaaagattcccagagtgaaagatcaggaggctaaagacctcgagtgggaagggaatagagtgttccatgtagagagagaacaaaggtggcctggactagcaggttctgctgactctgacctctggctttgattgaaacattcatcagacttggttgtttgctgaaacaaaagtcaggggacttcgagaaatcaagtcaagat

SEQ ID NO: 140048 - DNA, 739 bp, Homo sapiens
cttatcttttgggggcacctgggtacccatttctcatggtcacgtacctaggagtggcattgctgtgttagagggtacgttatagggtatgtgatttttgtaggttcttctttatcctatcacgattacatttttttacttttgttcaacctggtgtagactcaccttggtcacaatgcactgtcctttttatatattgctagattcaatttgaagaatattttgttaggattttagcaactctggttacaagagacgctggtctataatttttttttctttataatgtttttgtcaggttttcctgttaagatgatgctggacttagaaaagcagttggaaaatgcttttaaaatactctttggaagaatttatgtaatattcataatatttctgccttaaatgtttgggaaaaattaccggaaatgccagttgggcctggagatttctttgaggaaagtttttaaattagaagttcaatttctttctttctttctttctttcttttttttttgagatgggttctagctctctcactcaggctggagtgcggtgtaatttctttaatagtttataggactgagcagattttccatttttgtatcagtctggggagtcttcccatttccactcagctttacactgattcatgcaaagttgttcagtgtcctcttagatggctctgagcccaacgctgacatcctcctcttccttctgagaatcttatactgatcttttg

SEQ ID NO: 140049 - DNA, 427 bp, Homo sapiens
gttgtacagattatttcatcactcaggtactaagcctagtacccaagagttattttttttgctcctttcccttttcccacaccccccaccctccaccctcaaggaggtcccagtgtgtattgctcccctctgtgttcatgagttctcatcatttagctcccacttgtaagtgagaacatgtggtagttggttttctgttcctgcattagtttgctaaggataatgtgtttttcattaagtaaatacatatcgagtacttaccataccaggctctgtgcaggctgtgggaatacaacataggacataacagatactgtcctgacctccagcactcacagcatatgaaggaggagagaaaaggacagggcacaggtcattaggacccagtgcagtggggaaagatggcagaggtgcttgggaaccccta

SEQ ID NO: 140050 - DNA, 262 bp, Homo sapiens
aattcgcccctcaacttataaaaggaatgatactcaaaataattagatatgcttgtcattctgcagatttttaatgagctctacactgtgcatgcctccctattatcaaatccacagtatgtggaaagctagcaaagaaaagttcagcctccccagattaattatatacaagtaaaatgttgttaatatgaatacatttcagcaactgtttacttttcaatttggatagaaacatattcacgttcatgcataaagactggca

SEQ ID NO: 140051 - DNA, 303 bp, Homo sapiens
cttctgcctctcactaattctcagggttctccctgccctcaataccttccactcacaagaaaagctaattgagccaaccaatccagacctctccccttccaggaatttttttttcacaaagcacaatgcttcaagggggcaacatttagctcatatgaatgaattgctattaactgaatttcaagtatttttgccttggttgagaatggaagggctgctctacaaggggatttttggctgatggaagctctcctgaggtagtttaaggcaacttaaagagacagcaacctttctgcctacttc

SEQ ID NO: 140052 - DNA, 195 bp, Homo sapiens
gaggctggagaggggagaagcagctgcaggtttacagatgggaaagagcctctggacccccctttcaactctcctagagataagttcaagctgagccggtccttgcccttccctgcaacttccacacagaggcagggcggggacagcaaagcccagggccacatacagaagctcaaggaggccctctcagccctc

SEQ ID NO: 140053 - DNA, 415 bp, Homo sapiens
aattttcctgaaaggtactttctgactccatggagaccgggtcaaacccttacactttcttcagcgttagggacaggaaaatccccctagtgggttaactttctatcattaagggctgtcaagaacacctcttcccagcccgagagtcccctacttctctatgtgggctgtcccgcagcatacaccaacacacacaaaccacaaacgcagggtggaggctcttggggcttcccgctcccgcgcccctgcccccgacaactgttcctacagaggggattatcttggggaatcccgagtgccaaaactaagctcttactagtggttttcaaacttgaccttccaccagaatgccctggagggctccttaaaacttggacgggaagactaagtgttttcggttcagcaggctgggaga

SEQ ID NO: 140054 - DNA, 506 bp, Homo sapiens
gaactgcttctattgggtgaaaacagtgatttttctgagattccaagacattacagtttttcctgccactgggcagcttaatactaaataataacattttggtacctgatcagtggcttaaatatagtatagctatagggacaaatgcccctttatctttgcatttatttatttatttatttatttatttatttatttatttattttagaatatttggagttttcctggtcttactggatgtcactctcctccttgccgacctaattttcactgacagcaaactttatattcctttggagtatcgttctatttctctagctattggcttattttttctcatggatgttcttcttcgagtatttgtagaagggtaagtttgattatttttataataagaagcactttgggaggctgaggtgggaggatcccaaggtcaggagttcgacacaatcctggccaacatggtgaaaccccgtctctattaaaaatacaaaaattagctggg

SEQ ID NO: 140055 - DNA, 240 bp, Homo sapiens
gtggagaggaggagccaagtggttctagaacagtgtccttttgcctagaatgtccctacagcaggagcagctgggcaagactcagaagtcctgattataatcacagattaaggtgaccaactatcccagtttgcctaggactgttccagttttagaactgaaattcctgcaacccagaaaacctctcaatcttgggcacatcccaatcagctttgcaggctttctctatctgacaatacc

SEQ ID NO: 140056 - DNA, 866 bp, Homo sapiens
gcttcaccaactggaaaagcctgtgaaatgcggcctccctcaggggaatgccagtgaccccagcccctgtccttctgaccttacccatcctggtacccagtcccccgtagccttctctccagacccaggaactcccaggaaagagcctgaaccttggtcacccagaagagtcatccccagtgggattgcctagtgcaacccttgcccagagagattggcccttttgtgctagcacagctgcaagctggggcaggggcttgcctgcccgctggactgcccacagcccagggatctcgggtgtgctttgtagaactgcacccattttagacattgtgtgtccgtgcccgcaatgctggacaccgtaacaagccacatactgaaaactggctgttcatttgagccgtggaaagatatttattgcccctctcaagtcgggcaggcagctctcctccaagcagcttcaggctcctcccagctcccagctcctccatcctgaatacgcagatgcccaggtcaccgggctcggccgcctctggctggcagaagagaaagtgcatatcacttccgcttctgttccgttgactgcaatctcaactggcggtcattcctccctgcaggggaggctggggcaggcggtcttgctgtgcctctggaaggagagcacatgccattctctgctgttgatctcacaatgccttgtactggatcctcctagacaagctaaagcacgtttaagaaaaaagcatagtccaggcgcagtggcttatgcctgtaatcccagcactttgggaggccaaggcgggcagatcacaaggtcaggagatcgagaccatcctggctaccacggtgaaaccccatctctacta

SEQ ID NO: 140057 - DNA, 745 bp, Homo sapiens
  misc_feature (525)..(525): n is a, c, g, or t
aggtctgtttgatgatcttagctcttgacgtcagcactcagactcttagggtcacccaatccatgtgcctcatcccagcaacagggaaggcatttctctatcagtcagttggtaaatgattattgacaaacaatgtgctgggaaggtggagtgatttgagtagatttggcctctattctcatggagcttcctttctagaggggaaggcagatgatggatggataaatataaatgattctaataggttggtgcagcagtcattaaaagtaatggcaaaaaaaaaccaaaagaaacggggaggagccgttgctgccgttcattgatagtaatggcaaaacccgcgatgacttgtgcgccaacctaacccagtaaccacgggtgtgcaaatgtggcgatgggcaagttccgagtgctaggagagcatctagcttcccggagtcaggagacgggggttggcaacctaaccaaggttaagtccaagtgaggggggtgggcagggaagcggttatttattttttttttttnatttttattttttttttttttttttttttttttattattttattattatttttttttataatttattttttataatatttttatataatttaattattttttatttattttttttttttataaatatttatattatatttttatttttaatattttttttatttatatattaattaatatttttttatttattaattatttttatatttatattttttcc

SEQ ID NO: 140058 - DNA, 1633 bp, Homo sapiens
tggggcaagcaggggagagggctggtgatggggtcacagcggaggggctggggatgcacgggaggggctggggatgtgagctttcctgagttcccacagttctctgcccctctcctgtctcatggcacaagggccccctggggcttgcggtggttttgcgccaagctaatatcttgttcttcccaacagacggaggcccattgaggcttctgtgtcctccacggggaccagcattgggctaaacctgcagacaccattgcaaagggaattcaggcaaacctgctggtgaagaatgattccagcgtggggacagaggctgacatttcttgcctgggtgatttaatgttgggcctcaatttttcactccccccgtaagagtatgacatagccacaacctttccagggcccgagggagggtggatggacttatccatcccataggtgttgctcgtggctgggtgacttgcttctgccaacgagattttcacagacacggcacaagcagaagcctggaatgtgtgggcactgccaggcctgccctctaaggttcttgattttccccatgagatgcacgtgccccagggaacggccgctctggctgtgggatgagaggcatgtggagcaggcatggttcccatgcttagcctggagtcaaggccagactagatcagcctaagcccagccacgccatgggtgcaggagtgaagagcaaatgctaactgtccatggaattgactttcaaaggggcgtgtcatgtgcctcatcccagcaacagggaaggcatttctctatcagtcagttggtaaatgattattgacaaacaatgtgctgggaaggtggagtgatttgagtagatttggcctctattctcatggagcttcctttctagaggggaaggcagatgatggatggataaatataaatgattctaataggttggtgcagcagtcattaaaagtaatggcaaaaaaaaaccaaaagaaacggggaggagccgttgctgccgttcattgatagtaatggcaaaacccgcgatgacttgtgcgccaacctaacccagtaaccacgggtgtgcaaatgtggcgatgggcaagttccgagtgctaggagagcatctagcttcccggagtcaggagacgggggttggcaacctaaccaaggttaagtccaagtgaggggggtgggcagggagcgatatttcagtggagactccaaggatgaatggtatttagagagtaaaccccgatagagggtttgtgtctggcacagagaagagcctgtgcaaaagctggtggggcgagaggacaccgtgtgttcatccacctgacgggcgaccagcaggctggagctcagcgggttgagaggaggatgcagaacccgggaaaggcaccctaggcagagggcacagaagcgcaaaggcctggagtcaggcctgagcctgtgtggtttgaggaacggacagaggcctgtccgtcaggaagggaacggcacaggggagagaccttaggccacagcagagggcagggcagagggcagggccgtgctgggcagtgtgggctgtggatggtgctggcatttaagaggggagaccatagaccagggcaaagggcagggccgtgctgggcactttggg

SEQ ID NO: 140059 - DNA, 2392 bp, Homo sapiens
  misc_feature (14)..(14): n is a, c, g, or t
  misc_feature (1732)..(1732): n is a, c, g, or t
gaattcggcacgantcagggaagcagccccggcggccagcagggagctcaggacagagcaggctccctgggaagcctccgggtgataggggtgttccagctgcggcgctctgggggttcagagggggatcttgaatgaacaaatgaatgaactgctttctgggcaaacagccacagccagaggagcctgtgattggcagaaagaagccagggtgtgcaagtctccccaacagcctcgagtggcctgcagtcacagggaaccctcaggaagaccttccgggcagagaccagagggaaggtgtttctagctgtgtacagggactgattggctgaggactcacattggagagctgcagacaacataacggtgaatgagaatggaggatgaagattacaacacttccatcagttacggtgatgaataccctgattatttagactccattgtggttttggaggacttatcccccttggaagccagggtgaccaggatcttcctggtggtggtctacagcatcgtctgcttcctcgggattctgggcaatggtctggtgatcatcattgccaccttcaagatgaagaagacagtgaacatggtctggttcctcaacctggcagtggcagatttcctgttcaacgtcttcctcccaatccatatcacctatgccgccatggactaccactgggttttcgggacagccatgtgcaagatcagcaacttccttctcatccacaacatgttcaccagcgtcttcctgctgaccatcatcagctctgaccgctgcatctctgtgctcctccctgtctggtcccagaaccaccgcagcgttcgcctggcttacatggcctgcatggtcatctgggtcctggctttcttcttgagttccccatctctcgtcttccgggacacagccaacctgcatgggaaaatatcctgcttcaacaacttcagcctgtccacacctgggtcttcctcgtggcccactcactcccaaatggaccctgtggggtatagccggcacatggtggtgactgtcacccgcttcctctgtggcttcctggtcccagtcctcatcatcacagcttgctacctcaccatcgtgtgcaaactgcagcgcaaccgcctggccaagaccaagaagcccttcaagattattgtgaccatcatcattaccttcttcctctgctggtgcccctaccacacactcaacctcctagagctccaccacactgccatgcctggctctgtcttcagcctgggtttgcccctggccactgcccttgccattgccaacagctgcatgaaccccattctgtatgttttcatgggtcaggacttcaagaagttcaaggtggccctcttctctcgcctggtcaatgctctaagtgaagatacaggccactcttcctaccccagccatagaagctttaccaagatgtcatcaatgaatgagaggacttctatgaatgagagggagaccggcatgctttgatcctcactgtggaacccctcaatggactctctcaacccagggacacccaaggatatgtcttctgaagatcaaggcaagaacctctttagcatccaccaattttcactgcattttgcatgggatgaacagtgttttatgctgggaatctagggcctggaacccctttcttctagtggaccttgggaggccagccttgactgactcaaagcaaaaaaggaagaattctcaaaagcattgccntgaactgggattggcatagggcggtgggattaagctgcctattgtgtgtgccccagaaatgacactctccaaggtccattcctggtgtgagcagtgagggggtcagagcaaacccagtgtgatgcagatcacacttggcccttgtatatatattatcagtagctggccagaaaacctacttcaagtcactgctctgtgttaaagtatgtggaaatgcataggtgatctgggagaggaaggtgacatatcagcccatgaactccataggccatgaatttggctttcggatcagctaggaagacagagaactggtcctgagaggtcctgtgggctctttgcaagggcaagacaagtgagggatgcaacgaggacttgagatttggcaaagaaatgagaaaggagaaaagaacctttaaaggatgcaggcatggagcagctcaccctagaacatcgcaggctgatggtgctttaggctggagctatttggggcgtcagggtggtgccagcccctgatctcaccttgcccctcttacctgggggtggggttgtggcaggcatcttcaccagcagccctcaccccatcacagggatttttttctgcctttcctaatccactcagctctggctggaggtgcttagaataaaacactggtggtgggg

SEQ ID NO: 140060 - DNA, 3042 bp, Homo sapiens
  misc_feature (14)..(14): n is a, c, g, or t
  misc_feature (1915)..(1915): n is a, c, g, or t
gaattcggcacgantcagggaagcagccccggcggccagcagggagctcaggacagagcaggctccctgggaagcctccgggtgataggggtgttccagctgcggcgctctgggggttcagagggggatcttgaatgaacaaatgaatgaactgctttctgggcaaacagccacagccagaggagcctgtgattggcagaaagaagccagggtgtgcaagtctccccaacagcctcgagtggcctgcagtcacagggaaccctcaggaagaccttccgggcagagaccagagggaagcccatctctccagcagaactgcttggatttttctaccaggaggctcagggctctgcaacaatgatagcagaagctgatggcatctagagatctaggctgggactagcacagcatcacttctaccactttctgttggtcacagcaactcaccatgccagtgcagattcaaggggaggagaaatagagtccacttcttgatgggaggcgtgacatagaatggaggatgaagattacaacacttccatcagttacggtgatgaataccctgattatttagactccattgtggttttggaggacttatcccccttggaagccagggtgaccaggatcttcctggtggtggtctacagcatcgtctgcttcctcgggattctgggcaatggtctggtgatcatcattgccaccttcaagatgaagaagacagtgaacatggtctggttcctcaacctggcagtggcagatttcctgttcaacgtcttcctcccaatccatatcacctatgccgccatggactaccactgggttttcgggacagccatgtgcaagatcagcaacttccttctcatccacaacatgttcaccagcgtcttcctgctgaccatcatcagctctgaccgctgcatctctgtgctcctccctgtctggtcccagaaccaccgcagcgttcgcctggcttacatggcctgcatggtcatctgggtcctggctttcttcttgagttccccatctctcgtcttccgggacacagccaacctgcatgggaaaatatcctgcttcaacaacttcagcctgtccacacctgggtcttcctcgtggcccactcactcccaaatggaccctgtggggtatagccggcacatggtggtgactgtcacccgcttcctctgtggcttcctggtcccagtcctcatcatcacagcttgctacctcaccatcgtgtgcaaactgcagcgcaaccgcctggccaagaccaagaagcccttcaagattattgtgaccatcatcattaccttcttcctctgctggtgcccctaccacacactcaacctcctagagctccaccacactgccatgcctggctctgtcttcagcctgggtttgcccctggccactgcccttgccattgccaacagctgcatgaaccccattctgtatgttttcatgggtcaggacttcaagaagttcaaggtggccctcttctctcgcctggtcaatgctctaagtgaagatacaggccactcttcctaccccagccatagaagctttaccaagatgtcatcaatgaatgagaggacttctatgaatgagagggagaccggcatgctttgatcctcactgtggaacccctcaatggactctctcaacccagggacacccaaggatatgtcttctgaagatcaaggcaagaacctctttagcatccaccaattttcactgcattttgcatgggatgaacagtgttttatgctgggaatctagggcctggaacccctttcttctagtggacagaacatgctgtgttccatacagccttggactagcaatttatgcttcttgggaggccagccttgactgactcaaagcaaaaaaggaagaattctcaaaagcattgccntgaactgggattggcatagggcggtgggattaagctgcctattgtgtgtgccccagaaatgacactctccaaggtccattcctggtgtgagcagtgagggggtcagagcaaacccagtgtgatgcagatcacacttggcccttgtatatatattatcagtagctggccagaaaacctacttcaagtcactgctctgtgttaaagtatgtggaaatgcataggtgatctgggagaggaaggtgacatatcagcccatgaactccataggccatgaatttggctttcggatcagctaggaagacagagaactggtcctgagaggtcctgtgggctctttgcaagggcaagacaagtgagggatgcaacgaggacttgagatttggcaaagaaatgagaaaggagaaaagaacctttaaaggatgcaggcatggagcagctcaccctagaacatcgcaggctgatggtgctttaggctggagctatttggggcgtcagggtggtgccagcccctgatctcaccttgcccctcttacctgggggtggggttgtggcaggcatcttcaccagcagccctcaccccatcacagggatttttttctgcctttcctaatccactcagctctggctggaggtgcttagaataaaacactggtggtggggcttctcattctggttaatttcctcaacgcctttggagacaggtccaaaatgcagctttgggaagcaactccggagagtcccctgggaagaagagtatgtccgaggactcagtcacttgagacagagtctggagctggactccttgaactgtgtttctgagctgcagacaccaaatacctcctggatacaggtgcctggcatggcttttctcatctaatactgacacgtccctgtggccacagagtgtcatagccccatttacaaatgacatagctgaggcccagatggggaaagtaacttgcccagcatcacacagctaatcagtggcagagttaagatctgaacctggctccgtctggctccagaaactctgttcttctatttggaatttatctgtggagattattctagtatattgatagcctacatttatttagcactttttatattatgcactttacatatgt

SEQ ID NO: 140061 - DNA, 3118 bp, Homo sapiens
  misc_feature (14)..(14): n is a, c, g, or t
  misc_feature (1991)..(1991): n is a, c, g, or t
gaattcggcacgantcagggaagcagccccggcggccagcagggagctcaggacagagcaggctccctgggaagcctccgggtgataggggtgttccagctgcggcgctctgggggttcagagggggatcttgaatgaacaaatgaatgaactgctttctgggcaaacagccacagccagaggagcctgtgattggcagaaagaagccagggtgtgcaagtctccccaacagcctcgagtggcctgcagtcacagggaaccctcaggaagaccttccgggcagagaccagagggaagcccatctctccagcagaactgcttggatttttctaccaggaggctcagggctctgcaacaatgatagcagaagctgatggcatctagagatctaggctgggactagcacagcatcacttctaccactttctgttggtcacagcaactcaccatgccagtgcagattcaaggggaggagaaatagagtccacttcttgatgggaggcgtgacatgtgtttctagctgtgtacagggactgattggctgaggactcacattggagagctgcagacaacataacggtgaatgagaatggaggatgaagattacaacacttccatcagttacggtgatgaataccctgattatttagactccattgtggttttggaggacttatcccccttggaagccagggtgaccaggatcttcctggtggtggtctacagcatcgtctgcttcctcgggattctgggcaatggtctggtgatcatcattgccaccttcaagatgaagaagacagtgaacatggtctggttcctcaacctggcagtggcagatttcctgttcaacgtcttcctcccaatccatatcacctatgccgccatggactaccactgggttttcgggacagccatgtgcaagatcagcaacttccttctcatccacaacatgttcaccagcgtcttcctgctgaccatcatcagctctgaccgctgcatctctgtgctcctccctgtctggtcccagaaccaccgcagcgttcgcctggcttacatggcctgcatggtcatctgggtcctggctttcttcttgagttccccatctctcgtcttccgggacacagccaacctgcatgggaaaatatcctgcttcaacaacttcagcctgtccacacctgggtcttcctcgtggcccactcactcccaaatggaccctgtggggtatagccggcacatggtggtgactgtcacccgcttcctctgtggcttcctggtcccagtcctcatcatcacagcttgctacctcaccatcgtgtgcaaactgcagcgcaaccgcctggccaagaccaagaagcccttcaagattattgtgaccatcatcattaccttcttcctctgctggtgcccctaccacacactcaacctcctagagctccaccacactgccatgcctggctctgtcttcagcctgggtttgcccctggccactgcccttgccattgccaacagctgcatgaaccccattctgtatgttttcatgggtcaggacttcaagaagttcaaggtggccctcttctctcgcctggtcaatgctctaagtgaagatacaggccactcttcctaccccagccatagaagctttaccaagatgtcatcaatgaatgagaggacttctatgaatgagagggagaccggcatgctttgatcctcactgtggaacccctcaatggactctctcaacccagggacacccaaggatatgtcttctgaagatcaaggcaagaacctctttagcatccaccaattttcactgcattttgcatgggatgaacagtgttttatgctgggaatctagggcctggaacccctttcttctagtggacagaacatgctgtgttccatacagccttggactagcaatttatgcttcttgggaggccagccttgactgactcaaagcaaaaaaggaagaattctcaaaagcattgccntgaactgggattggcatagggcggtgggattaagctgcctattgtgtgtgccccagaaatgacactctccaaggtccattcctggtgtgagcagtgagggggtcagagcaaacccagtgtgatgcagatcacacttggcccttgtatatatattatcagtagctggccagaaaacctacttcaagtcactgctctgtgttaaagtatgtggaaatgcataggtgatctgggagaggaaggtgacatatcagcccatgaactccataggccatgaatttggctttcggatcagctaggaagacagagaactggtcctgagaggtcctgtgggctctttgcaagggcaagacaagtgagggatgcaacgaggacttgagatttggcaaagaaatgagaaaggagaaaagaacctttaaaggatgcaggcatggagcagctcaccctagaacatcgcaggctgatggtgctttaggctggagctatttggggcgtcagggtggtgccagcccctgatctcaccttgcccctcttacctgggggtggggttgtggcaggcatcttcaccagcagccctcaccccatcacagggatttttttctgcctttcctaatccactcagctctggctggaggtgcttagaataaaacactggtggtggggcttctcattctggttaatttcctcaacgcctttggagacaggtccaaaatgcagctttgggaagcaactccggagagtcccctgggaagaagagtatgtccgaggactcagtcacttgagacagagtctggagctggactccttgaactgtgtttctgagctgcagacaccaaatacctcctggatacaggtgcctggcatggcttttctcatctaatactgacacgtccctgtggccacagagtgtcatagccccatttacaaatgacatagctgaggcccagatggggaaagtaacttgcccagcatcacacagctaatcagtggcagagttaagatctgaacctggctccgtctggctccagaaactctgttcttctatttggaatttatctgtggagattattctagtatattgatagcctacatttatttagcactttttatattatgcactttacatatgt

SEQ ID NO: 140062 - DNA, 474 bp, Homo sapiens
acttgtctcccccatactttcttcctttattttagctgaagatggtatttaaacccaaatttttaaattttgttttgttttgagacagcttcttgctctcagatcccaggctggacctcagtgacatgaagataactcattgcagccttgactcctgggctcaggcaatcttcttgcctcagcctcccaagtagctaggactgcaggtgcataccacatgtctggcaatttatttttatttttgtagagttgtggtctttctatgttacccaggctggtcttgaactcctggcttcaagcgatgcagtcacctccaccttccaaaataaatccaagttttaaacacctcttctgggttattcattgctgggtactcatgctaatacgcttctgtttcttttctgtcttgttaatctgtcttttgttacagataaccagccaatcacacgcaagagtagaaggaatgaaagattt

SEQ ID NO: 140063 - DNA, 509 bp, Homo sapiens
tgcaggcagacgggatgatggaaccccagggtgttggggggaggagcggccccaggtgatgctcctaggctcatggccaagtgccgagcccctttccccatagccagagtgcctggagggcctctgtcgcaggggcagaggagaaaggggcctctatggcatctgtgattgagctcccggcataccgtcctgctctctgacaactattcctgtcttcattcaagaatcatccagcccctgggcctctcagtttcttgatgtcttgtcctcctccacctcaacctcacggccatagctgtacctcagcttttgtcactgcctgccattgtctttgtcatccccagcagcctagatctattgttcaggttgcgccctcgagtcctgcaactcccagcgagcctttgagtctactgtggggtcttcagtcagttggtcctccccatgtgtcactcagccccttgtgtccttggttcagtcctttgttagctttgagtccatagttgaatata

SEQ ID NO: 140064 - DNA, 329 bp, Homo sapiens
tgcaggcagacgggatgatggaaccccagggtgttggggggaggagcggccccaggtgatgctcctaggctcatggccaagtgccgagcccctttccccatagccagagtgcctggagggcctctgtcgcaggggcagaggagaaaggggcctctatggcatctgtgattgagctcccggcataccgtcctgctctctgacaactattcctgtcttcattcaagaatcatccagcccctgggcctctcagtttcttgatgtcttgtcctcctccacctcaacctcacggcctacccgtcttccacagcctacccgtcttccccagccta

SEQ ID NO: 140065 - DNA, 275 bp, Homo sapiens
cttgggattgaagtaaacccatgtaaattgatgagaagctggagtaaaatactaatattagtatgtctggagaaagacccaagtcagtcattcttggaggaaattcttcaaaattgccttggatttctgtttttctttgcaatttttttaaagctatgcttgtgccatactgaagacaggatttcttatttataaagtcattcaagtggcctgatataagaaacttatagtaacacaatatatatgcccatagcttatgcaggtacagaccgtgg

SEQ ID NO: 140066 - DNA, 350 bp, Homo sapiens
agagcttccggaggctgctacgtagaatgggctgtccgagaatgaagacaaataggcaaatatagaggaaaacagagagaggagaagagacagggagcccctgggccaaccatccgggatggatgttggatgcactgctgcttgttccatcctagaaagtaacacatcctcttcctcactcctgctatttttcccttaagcccactttattttttcaatcacttgcaataaaaggattctctttaaagcaaacaggaagacagaacttcttctctgccatggggacttctttttccctggagtggatgggaatgtgccccccaggaagatatgttgaagtcttacccctt

SEQ ID NO: 140067 - DNA, 560 bp, Homo sapiens
ccatgtgaacattgtttattgtcgtatactcctgggagagtcccagggatgagcttttataaagttgcagacgggaaagggactctcactttggagagaattaagcatgtcacccagttgcctaacaagttattgctgtgcaggcaaaaaacagacaaaagactcacccaactctaagatttttttgatggacttctctaagttcattatgataaagttaatattatgatttttccagttctcaatattttgggtctaacccttttttttattactttatgtatatgttctgggctccgtagactctctggagtgacaagaaaatcttgaaaaataaaaggcgaggtctattggagagctgttcgtggatgattctgatacgtgctcttggttaagaatcactgctctggttttcttcccagtgcctcttacccaccactgttagatcagttctttaaacaccacttaaactcccactttatgtcagcaaactgttcattcttctgtcaacatgtcatattcaactctgttcacatgccactcaatacaagagtcctcta

SEQ ID NO: 140068 - DNA, 780 bp, Homo sapiens
ccatgtgaacattgtttattgtcgtatactcctgggagagtcccagggatgagcttttataaagttgcagacgggaaagggactctcactttggagagaattaagcatgtcacccagttgcctaacaagttattgctgtgcaggcaaaaaacagacaaaagactcacccaactctaagatttttttgatggacttctctaagttcattatgataaagttaatattatgatttttccagttctcaatattttgggtctaacccttttttttattactttatgtatatgttctgggctccgtagactctctggagtgacaagaaaatcttgaaaaataaaaggcgaggtctattggagagctgttcgtggatgattctgatacgtgctcttggttaagaatcactgctctggttttcttcccagtgcctcttacccaccactgttagatcagttctttaaacaccacttaaactcccactttatgtcagcaacctcctcttgacagtcaagctccttagtctggcatgtagcactcaccattacttggtgtgagtcctgaattctgagcagccagtgtctccttatctgtcacattcgtactcatttttatgactttgcaggtcttgctgaaaattcttccttaacttgccttgagaaccaccttttccaccaagcattcccaatgaatgtagctcgtggtgttctttccttccaaattcctgttctcttatctctactgcttataacccaatacttgactatatattgtcttgtataaatg

SEQ ID NO: 140069 - DNA, 380 bp, Homo sapiens
gtgttttggtttaaccaatagtcctaggagcttagcacacctggggtgtcaccttttgcttgtgtttgtgaacctctcttatcagggacaagaaccatgtgtccatctagctgcaggcctctagggtggggacagtatcccatcagacagggattccccatggtgcaaatgatggtctctcctccttcgacacatctgtgctgcactcaagccatttgtcaggttagcagagcctgggggaggcagtgtggagagagctggcttcggagatagctgggcccaggtctgaatcctggctctgctgccacttcccagcccaatgactttagtcacttcacctcacaaggctgagtctctgtttcctcatttgtgagggggca

SEQ ID NO: 140070 - DNA, 386 bp, Homo sapiens
ctaagtgataaaggaattcttttccaagagaggtgaataaagtgaaaatgagtttgagaattaagagaagggtgttaaagtatgtgtgattgccaagagttagacagtgataaaggagagacatgtttgacaaatgactctttttgttactggagtttttaagaatacttctatggatcaaatgtgaatttaattttcaatctgtacttattacaaagttcacatctgttttaaggaaattagaatgtaaagagattatatctggggagtgcttctacttgtttaaatagatggcatgattgtaaatcaggaaaactaatagaaaggatttaagtcactttaggatttaagctagtggcagtaatttagggagaagtaacagctga

SEQ ID NO: 140071 - DNA, 512 bp, Homo sapiens
aaatgataatgacagtacacaatattgggtaactttattttctgattttaatgggagcacattcattgtttagccctgggaagaatgatgcctttgggtttgaaaaacacataacagaaatatactcacatatacacatacaaattcacacatatttcctgttaaggaagcattcatttattcctctctactatggattttaatttttgtggcttttatattctaagagtgctttagttttatcagttttgattttttagaacttctataaccatcatcatctgcattttctccccaggctacttaatgtgaattttatcaacagacttcctaatacatattcatcattatattcaaaggaagaataccatccaagcctaataaaagtactattatttcaatgtaatgctgtattttccacttgttaagttagatgttgtacatcagtattcgtatgtaagactgatatacagcaacagttttcacaagtggggtccaaggaccactgagcg

SEQ ID NO: 140072 - DNA, 486 bp, Homo sapiens
tattgaaagaagagttcaaaaataccaacattgaatatcaaactatttgaaattatgtgctatattggttttatttttcaattttgtatggattaacttgcaataacagataaacacaagtatggtgcactttggtaattttttggtgaatgctgtggaagacaggcctttagtaaggttaaatattctactttcctctattagatctcatttgacttcacaagattcacttgataatagttacaaagtaaatccagttcttcaaatggaagataggatttaggtattttttactttagattttacttaaaactatagattacatttaaataagcagcatatttcacagagattttcaaaaatattagatttcaccctaatttatgttttgcacaatatttcaatgaaaatttgatgtggttgttaatgttttattccttttgatcattgcaataaaataataaaatgtaacatcagatttactgt

SEQ ID NO: 140073 - DNA, 337 bp, Homo sapiens
tgggctcaggacaccaaaaatagaccaagcctccaattcaagtttggcttggagtggggaggagagtgggaaagcacgtttctggcaggcagcaggggctgcattcagctttgaccagttgagattctctgatttctaggaagagggtcgtatgtttcatgcccctgactcacttgacggcttcagatcatcagctcgtccggccttcatttttagcgtctatctgtatttgctgtgtttcttaggacaccggttctgagagatactgagtggcagttgcatgaaaaaatgagtcttggccaattaagttaggggaatattagatataatatccccc

SEQ ID NO: 140074 - DNA, 518 bp, Homo sapiens
agatggcgttctgaggatccctcataacgtatcagaactcaacatagtatgatgatctttgtaactcttgtaagatgcttttcagttcacatctttttaaatgattgtctgtccacactgttcactccatctgtgcagctttatgttatttgaaggcatagtgccccctgctggattcactttataacaatcagttctcccaccaggatgattagcgcccagaaagtgtaagtaaatatttgtggagaaaactgatttgaatggcccagatggtggcactcagcccaggctccctaaccactggagttaatccatcacagacgtgctggccaatgtttttcaaggtgtgattctccaggtgtgacttccatggaggagacacttggatccgatctgccttcaaaaaagaatgtgtcattcagccactgggggtgcaggttactgacatcctctggcttcagagccctcaggattcacttccgcttttgagctgaggtcacattctgccagagcagtcc

SEQ ID NO: 140075 - DNA, 363 bp, Homo sapiens
ataaaagacatattaaagtgttccagaagtctacaataacagttttattagccataaagtctagaagaataattctgttagccataaggtatttcatatatcataccctcctctatctccgttttcccccagttgagttcttgtgaaggagaagggactttaagaacagcaggtcattttaaaaaaatgaacttactctaccagtaggtaacactgagtagaagttaaatccaaggagtgctaagaatggcaagtctggctgcttaaacacaccggtctttctgactaatgatttaaatcagcagtaagaaattcgtttttatgagttcaaactattctacaaatcaaagacaaaaagaaaca

SEQ ID NO: 140076 - DNA, 303 bp, Homo sapiens
tgtgctaaatactggaatgaaagcatgtgaaataatatgcagacaataaacatttttcctgttatagaaagcattttaaatgcagtcatttatatatatactaaaaatatacatatatgtatttttgagacagaatctttttttgttgctcaggtaggagtgcagtggtgtgattacggctcaccatagcctcaacttcctggggttgaggaaggaagcttctcacttcagcctcctgagtagctgggactacaggcgcatgccaccacgcccagctaatttttgtatttttttttttttttg

SEQ ID NO: 140077 - DNA, 191 bp, Homo sapiens
atactttgaagtgttacttaaagtgctaccagactggggcgatgtcccggtatgttgagtcctggagagtaggagacacagctttctggcgaggacctttcgtggatttccttctacaactctgataactttttctcagtctgctttgaatgctccttaaatatttgtgcttcctaggcttctgtcattgt

SEQ ID NO: 140078 - DNA, 581 bp, Homo sapiens
aggctggagcagagcacaggagcatttcctctgcctggagggttgggagagccttctgggaggaggttatgcctaagccctgtcttgagggattgagtaagaattcacttaagcaagcaaggtgggatgggttgtagccaaagcaacagcatgagcaatggatggagtatttaggaggactacatgcagttgggggttggctggatggaacagtgtgaagtaggaattcctaggaaatgagcctagagagcctggtgagtgtgaacttgctggtgggccttgtgtaccttgctgaagaattcagggttatgggctgagtgctgtggctcacacctgtaatcccagctctttgggaggccagggtgggcggattgcttgagctcaggagtttgagaacagcctgggcaacatggcaaaccctcgtctctacaaaaaatacaaaaattatatgggcatggtggcgggcggctccagtcccagctagtgaggaggctgaggtgggaggattgcttgagcctgggaggattgcttgagccagcgaggtggaggttgtggtgagctgagattgcgccactgcactc

SEQ ID NO: 140079 - DNA, 355 bp, Homo sapiens
gtgtgtatgtgtgtgtgtatgttgggtggggcaggtgggaacctttggagaatgcctgtaggctgctagtgaggtgctatgatctctagaccttggtaggtccttgcaaagagacagggttctgaaaggctggcaccattataggtttttaaaatatttttgttatccataggggtgaccctggagatcattaccaaaatttaaaaatttcaccactgggcacacatgttacccttctcgtgatggcatggcaaagcttgatttgcaagagtttcttttggattgtccccaatgattccctttaaaaataggagctccttcaaggtaagaaaggaaggagaaaatatcccttcta

SEQ ID NO: 140080 - DNA, 405 bp, Homo sapiens
gggggtgcatctagccaaccgtgctcaggactctcatcagaagcagacatctgggctcctgcgggagtggggccgtgtgtgggttcaagggtgcagggtgtcaggttctgaatcgcttgttctctggggtttgtggatacctgagaactgcctgagccctgcgagtggatgtgccaggaccacaataccccaccccagtgcgctgtgtcgacacttttcctttccgtcctgttgatgcctggattttcctcccacctctgctcctcgccttacctctgggctcttttctacccgctgcgtgtgtgctcatgcaggtgtgcaggtggggtgctgctggagcttgtgccgtgttgtgggtgggcctccccttggcccctgagagcccagacagtatctagaatcata

SEQ ID NO: 140081 - DNA, 444 bp, Homo sapiens
gaaattgggggccggggagggggtgcctatccaaggatctttacctggaggcctgaggatggaagactgtgggccgggcagtagctctttctcttgtcactgggtcaggctgtgagtgagctgggggtgggctctctggtcatacctttttcctgtcccaccgtcttccacctgggataggcagggcagaggcttctgctgggaacttggggagtgccctggacgcagcttggcctccatcttctttcatctcacctcctagcctccaggctgagtttctgctttcccaagaagtcttctgagccataagcattgatctttctgatccctgcaaccctctttcctcgagctgtcagggcacagggacagaagggcctgcacaggatctgtgatctcatataatgcttgtccaggcgtggcttggctttcatgtgttaacatgca

SEQ ID NO: 140082 - DNA, 521 bp, Homo sapiens
ggcctcagtttcttacacatggacccctccatagctacttgagtatcctcacaacatggcagctggtttcttccagagcaagttatctgagcaaacctagggagtaaaccacaatatcttctatgtgctagccttggaagtcaaactctctatttccacaatatcctattggtatcacaggtccgctctactgagctgaattatacaagggcgtgaatatcagaaagtgaagctcagcagcatccatcttcaacctggctacaccttacatgagagtcccttgtgttgtcaagaggtaatagcaccagcctagacagagccagccctgagtcctggccctgtgtgggtgaatggcctgggggaaaaaacgtaacctgccttaccgtcagtttcttcatctatcaaatagaaataagagtagtacctacttctctgagttgtaatgaagattagatgagatagaataaataaggtcctccacagtgcctacaagatagaaagtggctataatggtaactact

SEQ ID NO: 140083 - DNA, 325 bp, Homo sapiens
ttgctatttctactttctcacctttcattctttcctcaactactccagttgggcttttatccccatgatgcctctgaaatagctcttatcaaggttctcaaggagctctattttaccagattgaatagataattctcagttctcatcttgttaaaccctttggcagcctttgaaccagctgaccactcccttcttggattttttttttttaacattgtactcacctgtttttcttcttaactcattggctgttaattttcagtattctgtatggcttccctcctctgcttaactctcctgaataaggttcccaggagtctacttt

SEQ ID NO: 140084 - DNA, 162 bp, Homo sapiens
ctggcacacaggtactgagcaaatgtttgttgaattggaatgaatgaatgaattctagtggtaactccatgaggcagggactatgatgcccattttgcaaatgaagacgctgaggcttggagaggctgaatggcttgcactgggtcacacagctgggagtgc

SEQ ID NO: 140085 - DNA, 307 bp, Homo sapiens
cgctcccacataaacactgctttccacaaaactaaaactgattaaaaatgactgatttcctcctgatttactagaaaaatttaagtgtcttgaaaaagtttcaatttaagatttccattcctattattctttcttaaatcactgatacattatatatctcattatatcagcaccctgtatctgatatgtattttagaattaagcttaatacatcagtgttgcgtggtattctgggagcagaaaaaaagtccaaggattgtgttattcaaataattaaagcccttgtatggtggggaacttaaggtcc

SEQ ID NO: 140086 - DNA, 334 bp, Homo sapiens
ttttcagctacctaactcggttctaaatcaaaacaccaggtacagtacagggtgaaaaccggtgagccatattgttaggatggacacctttgttatacaaacacactgagcagggctcaggagaatacggggcaagaagaaatatcttgtatcctgctcacaacctgctaatgaggacgagaatttcatcaacacacacagcagtagctcccattcatgtagcatcttaagtgagcatcaggcaccctgttaccagcatattagcatgccatctccacaacaccagctgtcacaccctgcaaagctgtgccaatattcccattttctagatgaa

SEQ ID NO: 140087 - DNA, 319 bp, Homo sapiens
tttgggggctgagtttacagttaaggctaaaactacagaaaacatgtagatagtgcacatccttggctgccttggtgcctcacacctgtaatcccagcactttgggaggctgggacaggcagatcacttgagcccaggagttcaagaccagcctgactagcaaaaccccatctctctattaaaaatacaaaaattagccaggcatggtggtgcacacctgtaatcccaactacctaccatgttgggtggtggaggcacaagaattagttgaacccaggaagtggaggcttcagtgagccacgatcctgtcaccgtactc

SEQ ID NO: 140088 - DNA, 132 bp, Homo sapiens
cctgtctctcttacttccactgtctactggccccctgtaacagcattccttgccagcaacaattctagcattcagccaactagcaagctatgaactgaatcaccaagtagactttaacagataagaaaacag

SEQ ID NO: 140089 - DNA, 160 bp, Homo sapiens
aggccaggtaggacgaagactgaaaactgactttgggtttagaaatgcagcactatcagtgtctgtgacagtagcaattttggaatagtggtggaggagaaaacttgacaagtggattcaagaaagaaagacaggagaggaattggtgacaatgagtaca

SEQ ID NO: 140090 - DNA, 357 bp, Homo sapiens
tgtggcgttctagaggatccctggtcgcgtatgggggctggtgtttgctaaaaggaacttaacaggggtgtgggtgtgcagttctccctctgcccaaggttaagtaatagtaacatcctgtgtaaagagaattgaatgtggttttctgctaaacttcaatgttttagggctgtttattagatgtgtttaatcttgggccaatttaaccagtagcagactaataaaataacagatttgggcttgctgccaggacaaatgttgacttacccttataatgttgactaaaacgagtaactttgaaagttattgcagagtgaaaccttagccagaaatacagcgtctgaaacagtggttttg

SEQ ID NO: 140091 - DNA, 109 bp, Homo sapiens
cggcgttggccatcccgatacccatcccgatacccatcccgataccggtctgaatcataacgatctcgatacttgtctccaaagctatcatcacctcttctaggtgggt

SEQ ID NO: 140092 - DNA, 430 bp, Homo sapiens
agacacgggtttggggttgggaaatgttggtgtcttaaatgtaaaactctatgtcaaactggatgttgagttgaagagaacaatattgttaatgtggctgaagagacaaagataaaaattgaaagaaagaaattatagtgcaataattaagaaagtttagtcaatctgggaaaaggggaagagggagaagagtgggctatccctgccacacccttttttttaccccttccttactgaccacacatatggagctgaaaaggaaagaatgtgggtttgaactgaaaaggttgcacaggattgacgaattgaagttcattgtgggggcagggtaaagctacaaatgtgattcaaactgcagccccaagaagcacctctctccatcagggaaaaaacaaaaaatgatctttgcttaaaagtcagtagcaagaaa

SEQ ID NO: 140093 - DNA, 718 bp, Homo sapiens
tgattgatggcctcattaatattttgtcctttcttcctatacatttagtactgtaactttgcctttaaaagtactattttggttttatcccatgaattttctgtgttgtattcattgttattcagttctgtactttttcccagtttccattagtatttgttctttgacctatgtttattaagttccaattgaacagggaaatttgaaagtgcattgttaactttgaattttattgggctagacggaaacatttctttgatatttgtggaaacttgcactgcagcttgatacatagacaatttttataaatgtgcttaaaagtagtgtaagttcttttaattgtggtatgcagggttataaaattatcagatcaaacctgtcaattttctattcagagctatatccttaaatttctttaactgcttgatcatcagagaaaagtatgttaaaatctctattgtaacaattttttttttttttgagacagaatcgctgtgttgcccaagctggagtgcagtggtgccatctcggctaactgcaacctctgcctcctgggttcaagtgagtctcctgcctcagcctctggaatagctggctttattggcacccacgaccacgcccagctaatttttgtatttttagtagagaggaggtttcactgtgttggtcaggctggtctcgaacttctgacctcaagcaatccacccaccatccatcc

SEQ ID NO: 140094 - DNA, 321 bp, Homo sapiens
tcgggtggcgttctagaggatcccgaaatgacacccacaaaaggggagaaaatatgtgcaaatcgtatgtccaatatggggctggtcatttcactatcttgatggtatccttggaagcacaggtgttcttaattttgatgaagtctaatttaacttattttttttaaactgctgatttattacaagtcccaagagggctttatttttggtcttcaacatccggttcttcagcttccttgtctcttggccggtatgccaaagagccgggcgtcagcatggaccatgtggagactagcgaaggctttgaaattcttctcctcg

SEQ ID NO: 140095 - DNA, 290 bp, Homo sapiens
gtcaatatgcctttcctaggcaatgtctcacaatggtgccaaaaatgagaatcttgttttctgcttttccactctttgaaatttgtggccttgagatgtaaggagtcgccgctaggagagcttcccggaaagcttttgcttttctgacaaaaggagacagatacagctagcagcccctccctccatcctgccctcgctcgagcattcgagtattactgggcaatagcagccattttgtgaccctgatatgacacccaccgggaaggaaacccaacacatagaagatagcg

SEQ ID NO: 140096 - DNA, 313 bp, Homo sapiens
cgtacgtaggaaaaaaagaactcagagacacacatggttttaagaggctgtgactgtcaactctgccccttcctattgaatattgaagcctttatgttattgaatacattgaatatattgcaaattggaaccccattaataggattctaagaagccttactactagatctggattctaagcctccttgcttgtatgataggttattgtctgagacattaagcaactagacctatgttgggacacttgcttcacaaggtaatgcgatgtattaataatgaggaaagaaaaattgccctgcttgtgctagtgagg

SEQ ID NO: 140097 - DNA, 409 bp, Homo sapiens
cattgtaggatatctacacgcctctacccgttagatgctagcagcacatgcatcaccaccaccccccaattgtgacaaccaaaaatgtctgcagacactgccaaatgtctcctggaggcaaaatcttcacccctcctccccaagtggacagccactgggaacagaatggggagaatgaaggggaataactgatgagaaaagactgccaaagaagcagcagtgaagcctaaggctcctggcaaaggactgcctcaaacagcagaagaagcatctcatcccctgagacaggaggagagggcaactctggagaagcagggatgacaaactggtagaagtgtgaagaaaatcaaccagatggctcaaagttctcagtgaagtggaggcaaggtcatgtgctgagtatgagtgg

SEQ ID NO: 140098 - DNA, 269 bp, Homo sapiens
gacattggaggagttttatttagtaaggctgtttgctgagttttggttggacagtggcaggaatggcttttgagctgggttataagagtagaggaatttcatttattcaacaaatatgtcaagcagtgttttgggcagcataaatataatggggagcaaagcagacaatgttcttgcccttgtggaactgccgatatcatgtggggaaaaaagatattcaagcaggaacagtgggaaaagcaaaggcacagctgagggaaagaaatttt

SEQ ID NO: 140099 - DNA, 409 bp, Homo sapiens
ccaccggcaggttgtactatctctggttttcagtgatgctatttctcctagggctttatctaccattgctttgtagaagcagggccagccatgtggcagaggtaatggttaaggaagtcaggtgagtgaagataaagacagaaaggcacagcagcaaggcagcatcaaataaaacctgagatagtactcctggaatgtatgacactgctcagaacctctgtgatcaagagttaattacataaaaaagaaataactcaacttttcatttacataaaaattaagttattttgtgatacatttctgttaattccctccttttcttcataatttctctggttgataattttagtatatagatttattttaggacatggtgaataagattatcagtgctaactctaaatgctaa

SEQ ID NO: 140100 - DNA, 401 bp, Homo sapiens
ttccttataattaaggtgggttttttgtgcattttgtaaacaacatatagttgattctaatttttgtaattcagtctacttttaaaattttaaatggctatttcaatctataatatactgatctagatggttgtaagtccatcatttttctgttatttttctatttgttcttttaattcattttttctgacttatttaaaagtgtgtccttaaatatttaattatttgattaaatacattgaataatccagtattttgttattcccttttaccttctctattttatcttatctattagcatttcagttttgccctactttattattcttttgaaattataatacagaaccttgatttattaccatctacctttaattatcattttctacaacttctcagca

SEQ ID NO: 140101 - DNA, 234 bp, Homo sapiens
ttaactctggtcaataggtaattctacaagttaatccttgcatatagtgacaccacctactcaaatgtaatatattcttaggagcaaatgcaacttttgagcactgaaatgtcctgtctgcaacatgtctctaagctgctgtcaccataacatttttttaatgatattgaaggtagaaatttttcctgggaaactcagattctcccaaaaatattcacaatttgatttattttt

SEQ ID NO: 140102 - DNA, 383 bp, Homo sapiens
tacgaaacttggaggacagattcactagacttaacatgaataacaagagtgcctcgaggagaaaaagagctagagagaagaagaataatagttaaataaaagtagaagaaaagttctctgagttgaaaagtcaggcaaggtgaatgaatatttcaaactacatgtatagacatttcctggtgaaatcctagaattttatggataaagagaaagttttatgcatctggagaggcagaattagaagaatcagactagtgccagatttctcatcaccagccctagaaagtagaagaagacaatagaacaatatctgtagatgatttatacaaaaaaaaattgcaatacacaattctacatcaagctcaataaccattttttgtttg

SEQ ID NO: 140103 - DNA, 885 bp, Homo sapiens
gcacatgcctgtaatcccagctactcgggaggctgaggcaggagaattgcttgaacccgggagacggaggttgaggtgagccggagatcgtgccattccagcctgggcaacaagagcgaaactccgtctcaaaaaaaaaaaaaatgccagggatctctctgagcatctcatgtaatccttgctatggtctgaagagatggttagtagcagggatcccctttcactgtgggagaaacagcttgggtagatgaattggctctgctgtgggtttgtgtgttgtgaaattccctctttatggcttgggaagattcggaatagcctcagggccacggaagcaagccggtgagagagctgccaagactgtggtgcacttcatcttttttttttttaattaaaaaaaaaaatgttgtgtagagacagggtcttgctatgttgcctaggctggtctcgaactcctagattcaagggatcggcctggccatgggcctcccaaagcggcggggattacggcgccttgagccacaaggctggagggctatccaaatgggtacgtgacgatgttcgatggtacgtgcctgataacctcagagccttgccgggtgtatgggcctaacccttgcgccatttgcggcgtgggaaaaaaccccttggatgggtactggctttggacgggggcgtgcaaaacctgctaactggtgttaagagatcccagccccacctgtcaacgcgggtcctgtgcctaccccgcgggtttggaatattccgccacagttttgccaacaacaccacgagcggtgggccactcgtaacaccacagagtcattctgtttccaaaacaggcacaaagggagccagtacaccttcgagatgcacgctaactcggcc

SEQ ID NO: 140104 - DNA, 138 bp, Homo sapiens
ttgtaaatcttgcaagagactggtttactttgaaactgaagcctgtaaaatccaaaaaagaatgaaatcaagtttgctatgagaagcactttcctcctgtatcctacaatccaagttgactgagagcagtgatctgaa

SEQ ID NO: 140105 - DNA, 354 bp, Homo sapiens
cagtgtactcacagtactcttctctatcctcaaagtttctgaatagcttctctgttcctgtctcctctgttattctgcctccctcctcccttccttgcctagtttaagtggatttttagcaaacaaaagtgttgactagaggctgtaagtgaagggcatttttacctcccctggcccccagtgtagattcctcttctgtctacacagaatccttcagatcaggataaaattgagccttccttactagttactacgatttttgaagaattggtgtgattgataaccacagcaacagtgtttggactttagagaaactttattcatgcccacactatgtctactgacctacatttt

SEQ ID NO: 140106 - DNA, 261 bp, Homo sapiens
ggtgggcttccatttaccaacactgatatagcttctaccaatgctaagtgtctaaactgccagcaacaaagaaaacgctgaactcctaacatggtaccatttctagaggagcccaactaagtatgtggtggcaacttgattatattgagtcccttccaaactgtaggagacataggtacattttaacaggagcagacacatattctgtgcatggtttgcctttcctttcttcatggcctcaggtcagcactactatccaaa

SEQ ID NO: 140107 - DNA, 2580 bp, Homo sapiens
ttttctcagaactcaattgagggtgggcagagatagctgatgctccagggcttattgaaggcctgtcacccgttctcacttcagtgcggcatgcagcttcttagcctgcagcttctttcttgctcctggagagctagaacattcatgttcacagggtttgggagcttttggttctctagggtatgttaactgcttaggagtccacctcgtacatatctgaagagttgattaccaatggccttgacctgtttcctcccaaatctgataatccctactgttgctttaccccccatactcagtccatcagagaaaaaaacaagagtgccccgtcctttcccccagtgctagtaaaatacatcttcctttttaaattgggtcagtttctaaacagaatgaaattgcccagataaaaacccttgtccccatcaggcaccacttcattcttagttcttcacttagatttgctggtgaaagtgaatgcaaaccctaacttttgttgctgtggtcactgcagtgagcctcactcaacctgtcactatgaatgctcatcttttgactgagtatatcatattaatgtttgaattcaggtagaagtacagttgtcacttgaagggagtagatgtggaagggcgttcggggaggagtgggaagtggggaaagccaggctaaagaatgagggttatagctttagcaatgttgatgagccacatttcccacacagatctgtagcatttgctgttgacctcttttgagatgaactctcccataggccctgccaggcagcactgagacatggaggaaattcagacaaaaaatggctcaccctgatagggaaggagtgactatattttaaattaaacttgctttttccaacactgtgaggtttctgtaatatttagcttttatttggaagcgatagcgtatggcattttttatgctgtttggtttatattgtctactgcaggcttctttgtataagctttgcctgggctcaccctctcctggacactgttttaaagtgtcaccgctgtccatgctgccagaggctctgatgtgaagctgtactctcaagatccacgtttttaagtcggcatgattagtaatgactttttgtggcaatagaaaagcccattaactcaaaaaaaccaaggagagtaaaaaggaaaggaaactatgaatcgtgcctcatctttcattgaatcctatatttattattctagaaaaaaagaacttacaagatagagaagaactaatagagcatctactttacccctcaggctgtccagtggggataattattaataaacatttaatggaaaattcaagatcttccaatttaatttttaaaaatagttttataccaaatattataaggatttattaagcagattaaggactttgtgaaataagtgcttaacttagctgagcacgcatatatcaaagtaataaaagaaactaacatcagagtctccactgagctacacatttgtgaaaggtgcccactgcagttacagacacctcaggtacccagaggcggcagcactggacacttaggacgttagtatttaaggagatttttattaaagaagagttccctgctgcataagccaatggctattgtgagggaaatgtccctttgcctttaatttatttacgtactgggtatagatgaatgtctcagttgcatctgaaattgaatcattctaaagagaagaaaataagaaccaggtaaaaactgactagatgctgccaaatcaaacccaaggtctcctaaccgaaccttaatgggcctgcttctctcccagggcaagtagttaagagtctcattccaggaaccctttgtagttagttggctggcatgtttacttgctgctgtagccagccaagatgagtgcacctaggccctcaaaaaggatttttttttacctcaatctagcctgaccctcatatctgtggttgcctctgagacgaacatccatgctagtataaaaatagttaggaatgcccttggcagaactgaagctcttattaaatggtggacagagctcttgccagctttgatccagcccctcagtctcggagttatggggcagggttggggggcagtgctacactgtaaagaatttccaggctgggcgcggtggctcatgcctgtaatcccagcactttgggaggccgaggagggcggatcacaaggtcaagagattgagatcatcctggccaacatggtgaaactccgtctctactaaaaatacaaaaattagctgggcatggtggcacgtgcctgtagtcccagctacttgggaggctgaggcaggagaatcgctggaacccaggaggcagaaggggcagtgagccgagatcgtgccactgcactccagcctggcgacagagcgagactctgtcttaaaaaaaacaaaaacaaaaacaaaaaggggggggcaaaaaaccccgagggcaactaggcgcacccgctttggacagggccaaagggcgaaaaagaagggggggggtacacggggggaacacccggggctggaggaccttccggggggatggacccccaaacggaaaaaaggg

SEQ ID NO: 140108 - DNA, 469 bp, Homo sapiens
tcccttgcttgcctagtcctataatacaggccaatttccctcctagttctgccccaggaaactcatctgaacatctgttgttacacaagttcccagtccaatacagacctaacagcatgaatatcattttctcatgatttcagggccctattaacattacataaagatccaaatatatcattttccagtatccaaaggcaatttttatcactagatgctatgatattgaatcctacaagaagtcttaaccctcttctaccaattttcaatttttttcccatatcagactacgaatagacttatacacagaaagaactgacagttttagaactgacatagagcctaaagaccatttactctaaagtactttgcaaatcaggactctaagcttacagcaattacagagatttgtaaaagatcataaaatgagttattactaacccgatctactagaatacatagaactccc

SEQ ID NO: 140109 - DNA, 301 bp, Homo sapiens
tgttctttagacagatattttgaaatcactcatcagaaaatattgatagatgagacatacatcacaaaaatccttgtagttgcaataaacaacttgccaatatatgcaaactattttcccctccattctcttgaattaagggagtatttaagggaggattgattctcctatgaagcaaccatttggatagaggactgggtgaatcaattagccacaccactgttctaaatactcagctttaacattcttggccatgtccagttcattctctgaccacaaaagttcagcttggttctttgcc

SEQ ID NO: 140110 - DNA, 305 bp, Homo sapiens
ccagctgggcatcgctggttactggcctaccttcatctcttctacttctttccactatcacaagattccaccttctggaaagctgaggataggctgtaccagcatgtcaaaacactccttagttagcagccactgatgttatgggtagtggctcttcttccttccgctctcttgtaagccacaaagcaaagaatgaggaaggagttagggccaagaaggacataagtcatcagggtgtaaaacaaagccatcctcagcacacaaaagaccacaatctaaccacctacctagtataccattcaata

SEQ ID NO: 140111 - DNA, 158 bp, Homo sapiens
catttcagcattctagggagcagatcagcttcccactgtattctaccttccacatgtattctaggccttggctttcgttgtctagtttcatcagttattatgctttcatttatgtcattccaaaaatttcatgaagtggctcatggccttttcattat

SEQ ID NO: 140112 - DNA, 299 bp, Homo sapiens
gcagcacctaggccttgagggcaggaatggtggtttactcttttctgattccctagcacctagctctagtgcctgccgtactcagcaagtgccctgtaaatgtctgcgaatggaagatgacttctagaagttaatcatttcaggctgtacaaaccttcaggggatgctgtatcttgggctctcccagtggctggcacagtagctggccaaaggctttttctgtcttctgatggatggtggaggctctgcctccctctctggggcacatcagattgtccagtctgaaactgaatccaccc

SEQ ID NO: 140113 - DNA, 350 bp, Homo sapiens
tgttggtcctctgcaatgaaggggccaatctcaagactgaaagggaagtggggcccagtccaatcacctgatatttgatgccagaatcctggccgatggttaccctccctcaggtcagataattgcgattccaaggatttgctgcctgtttgattagggggctgcctttccctgagcaacagcagcggggtaagacccaagccatggaggcaggtgcattagccccagaccaaagcaccatgctccctccctcatgattgcttcccctctccagggttcagaccccgcagccagcaaacatatagttgttccctgaaaacagaaaagcaccctctcttgaccccattttt

SEQ ID NO: 140114 - DNA, 542 bp, Homo sapiens
aacaaggggcttgatcgacactatagaccaaatggacctgataaacatacacagaacattctacctaatagcagaagaattcacatttttcccaagaacacacagaacatttttttttaatagatcacatgctggatcacaaaacaagtcctatcacatttaagattgaaataataccaagtaccttttccaatcacaatggaatgaaaccagaaatcaatattagaaggaaaattggaaaattcacaaatatgtggaaatgcaacaacatactcttgaacaaatgggaaattagaaaatatctagaaacaaagaaaataacataccaaactttatggaatgcagcaaatgcaatactaagagggaagttgataacaataaacatattaaaaatatctcaaataaaaaatctaaccctacatgttaaataactaaaaaaagaagaacaagctaagcccaaagttagcagagaaaggaaataatgattaaagcgtaatggtggcttatgcctgtaatcccagcactttgggagcccaaggtag

SEQ ID NO: 140115 - DNA, 171 bp, Homo sapiens
ggcagataacagtaccacctggtctggttcctagccccaggacccttacagtctaactgggacacaagggcttgaaatcaaattgcctatcagaagatatacaaggagcatgagaaactgctacacttatgtattaagtgctctaagacttagaaacaaaatgcaatgctg

SEQ ID NO: 140116 - DNA, 806 bp, Homo sapiens
gacagtacatgaaacattgtaggaagaaagaatgaaaggaaaagagcacctatgaagagttttggggcacctcctaaaactaaaggtctggtagtggaaactcagaagtaattgccagttaaaaaaaaaaaggcaaaccacaagcctgtcataaaagtggtatcacaaaaattgaaagagtgtttccaggagggactgctcagctatggcaaaaggctgcaaagtgttcattggaagacagccacatagacatcagggagtcatggagccagtgcattggtgggcccgggagccagaatggattaggaaatgagagggagacaatagcttgttgtcagcatatggctactagttgtagaaaccttggcaagtactcaggggattgactgcttctggcgtgcctggagctgttgagcccagaaagaaacaatgctgaaaagggattctcatcttgtgacctgaaaaaaaaatgctggtaatagccacttaaattcatcagaatcccttaaatcacttaaatttctcagaatttatttgggggcttattgtttagttttttgggtttttgctttttaattacagatactaacttgagtacattctacctctcccggtttccataccccctgctatgttgagattcagccctccttacccagcctgcgttattgtgaagtttgtagaccagtgctctccacttgaactttttgtagtgatgggaatccctgcccagtaaagtagctcttagccacatgtagctattgagcacgtgaagtgtggctcatgtgactcaggaactgaatttt

SEQ ID NO: 140117 - DNA, 218 bp, Homo sapiens
atgaacacctaatttgaataacacataacactcacaaactgtcctcttcaaccaacagttgcagtgattcaatctttgggggcctggcccaaatgttctctttcaaacaaatgccaaatgtgattgagattttaaagccagcaaaatacaggtgcagtggctcagcctgtgatcccagaactctgggaggctgaggtggctggatcgcttgagtccag

SEQ ID NO: 140118 - DNA, 122 bp, Homo sapiens
ctcattatttattaaaaggctaattacaagaaggattcattgaaaaacataattggactattgcctgaggagtatgtcatccatcctgaaatgcaggcttctctaagttaggctggaagaga

SEQ ID NO: 140119 - DNA, 431 bp, Homo sapiens
acccatccttaatgtgtgcccatctccataacgtctgcccacaaccagcactctatttgaaatccagacgaccctatccagttggtttatcttccaatctttcttgtttccaacccactcggcagattcatcttcctaataaactaccgaaaataaaaattttcaatggctctctattgcctgcaggataaaagtgaaagacttccctcccacccttaacattcaagccctccaaaatctgatgtaatcctgcctttccaacttagccttctactgacgccaaaatcaaccatgtgctccagatggtctattcgttaaccatagcccagaaatccacgaacatacctgtctctgcaccttcgctcttgccagtgtctgatttggaatattcacctcttccccttcctgtagattttgtccacagttcaaag

SEQ ID NO: 140120 - DNA, 1143 bp, Homo sapiens
aaatgtaaaaaacacataacatacaatttaccacctgaaccatttttaagtgtacagttaagtggtattacgtatgttaacattgtggtacaatagatcttcagaacttttttatgttgcaaaactgaaactctatacccattaacaactcctcagttcttctccctccagtccctgaagccaccattctcctttctgcttctatgaatttgacatcttctagatacctcatataagggaaatcatacagtatttgtctttctgtgactgccttgtttaatttagcataatgtcctcaaggttcatgccttcctttttaaggctgaaccttaaaaaggtaatatatattccacttaaaaaggtaataaaataattacttaaaaaagtaataatattccactgtgtgtatataccacattttgtttatccatccgttcgtggatacttgggttactttcaccattggctgctgtgaataatgctgctacgaacatgtgtgtgcaaatatctccttgaaatcctgattttcaactgttttgaatatgtacccagaaatgagattcctggaccatatggtgattctatttttaattttctgaggaaccaccatactgttttccatagcggccgcaccattttacagtcccaccaacagtgcgcaagggttccaatttttccatattcttgtcaacacttgttattttcatttttttaatagtagccatcctaaaggcgtatgaggtgatatctcactgtagttctttacggattcttgatatagcacagaatatagtcatagaaaatatttctattatctctaagttagtgaaattatgtttcatatagtatacaaacaataaatttatcttacagttcagtgtaaggtaaagcagatccttattcagtcttgttctgagatttgtgtttttaaagatatgttttgtgttgcttattttctaaattccctccatttatgttaaatctccttcaccatacaacttctcaaatattggaagacttgatttgcaatgattttatggttttgtcagtctgctttttgcatgctgacttctttagcactgtgtggaattgttctgcttcatccagcattttaagctttggactgtcacatgcttgtcaaaa

SEQ ID NO: 140121 - DNA, 304 bp, Homo sapiens
cagacttgtggcctgcccaagtgtcagaaggcttactgaatatgtaagtactttcttgccttgtcctttaaaaagtttagggaattcacttatatttctttttaccaatttgtttttgagggaacagtgatttttaaggtttttcagatgcataattccttttggtacttaactccataataatcactgaataaagttaccttgatataaatacagtaggtaaaatgtaaaaccctctgaagagagggtgaaaatactgcaaagccttccaaatagagaggatagtaaaatgccattttaactt

SEQ ID NO: 140122 - DNA, 3607 bp, Homo sapiens
cgccttccctcatccccggtagaggcagggcgggactgttgtggttgagatgaaggctagtaaatggtgaagtacttcccggccagagggcacctgcgctcgggaggtttgggcggcttggcgtcggaggagagccccacccgcggaggaacccagccttgccaacggagctggcggagctcactcctcaggtcaggcgggcggcgtagaaaacgcagcggagccaggtgaaaccaaggcaccgccgtggctggcccccgacagttcctctagccgggaggttggaggagctgaaaacgccgcggagccctcggccgcccgagcaggggctggaccccagcccttgcagcctcccttctcctggcacccaagtgcagtcctggctgcagaaggggccgcgggcgcactgagtttccaacctccatttcagcctgtctgtctcagggtgcagccttaatgagaggtgattcctaagctgctgggaacctgaggttgtcaaaggggcggcaggaaatggacagcagtataaaacccagaagcagaacttgaaggttaaaccactagcccatttcacagaatgtttcatccatttgtggaccaaaagatggagttggtttttatttttaaaaagataatgttaatgatctgataccactacaaatatttacgtgagaagattcatggacttgtcttttggttggactgtcactcatttctgaaagtttcttcagccacaatttctatttgaaaattcaagtatcaaaggataccaggtttagaatggtataatgatgtattttgtctgaggactgcaaattttatagagaccacagttggattccagtgatattctgcaatcaaagtgatttgataaacctaattttgaagcattttatatttataagcgacatcaaaagatgggagaaaaaaatggcgatgcaaaaactttctggatggagctagaagatgatggaaaagtggacttcatttttgaacaagtacaaaatgtgctgcagtcactgaaacaaaagatcaaagatgggtctgccaccaataaagaatacatccaagcaatgattctagtgaatgaagcaactataattaacagttcaacatcaataaagggagcatcacagaaagaagtgaatgcccaaagcagtgatcctatgcctgtgactcagaaggaacaggaaaacaaatccaatgcatttccctctacatcatgtgaaaactcctttccagaagactgtacatttctaacaacaggaaataaggaaattctctctcttgaagataaagttgtagactttagagaaaaagactcatcttcgaatttatcttaccaaagtcatgactgctctggtgcttgtctgatgaaaatgccactgaacttgaagggagaaaaccctctgcagctgccaatcaaatgtcacttccaaagacgacatgcaaagacaaactctcattcttcagcactccacgtgagttataaaaccccttgtggaaggagtctacgaaacgtggaggaagtttttcgttacctgcttgagacagagtgtaactttttatttacagataacttttctttcaatacctatgttcagttggctcggaattacccaaagcaaaaagaagttgtttctgatgtggatattagcaatggagtggaatcagtgcccatttctttctgtaatgaaattgacagtagaaagctcccacagtttaagtacagaaagactgtgtggcctcgagcatataatctaaccaacttttccagcatgtttactgattcctgtgactgctctgagggctgcatagacataacaaaatgtgcatgtcttcaactgacagcaaggaatgccaaaacttcccccttgtcaagtgacaaaataaccactggatataaatataaaagactacagagacagattcctactggcatttatgaatgcagccttttgtgcaaatgtaatcgacaattgtgtcaaaaccgagttgtccaacatggtcctcaagtgaggttacaggtgttcaaaactgagcagaagggatggggtgtacgctgtctagatgacattgacagagggacatttgtttgcatttattcaggaagattactaagcagagctaacactgaaaaatcttatggtattgatgaaaacgggagagatgagaatactatgaaaaatatattttcaaaaaagaggaaattagaagttgcatgttcagattgtgaagttgaagttctcccattaggattggaaacacatcctagaactgctaaaactgagaaatgtccaccaaagttcagtaataatcccaaggagcttactgtggaaacgaaatatgataatatttcaagaattcaatatcattcagttattagagatcctgaatccaagacagccatttttcaacacaatgggaaaaaaatggaatttgtttcctcggagtctgtcactccagaagataatgatggatttaaaccaccccgagagcatctgaactctaaaaccaagggagcacaaaaggactcaagttcaaaccatgttgatgagtttgaagataatctgctgattgaatcagatgtgatagatataactaaatatagagaagaaactccaccaaggagcagatgtaaccaggcgaccacattggataatcagaatattaaaaaggcaattgaggttcaaattcagaaaccccaagagggacgatctacagcatgtcaaagacagcaggtattttgtgatgaagagttgctaagtgaaaccaagaatacttcatctgattctctaacaaagttcaataaagggaatgtgtttttattggatgccacaaaagaaggaaatgtcggccgcttccttaatcatagttgttgcccaaatctcttggtacagaatgtttttgtagaaacacacaacaggaattttccattggtggcattcttcaccaacaggtatgtgaaagcaagaacagagctaacatgggattatggctatgaagctgggactgtgcctgagaaggaaatcttctgccaatgtggggttaataaatgtagaaaaaaaatattataaatatgtaactaacgcctgtttgtgaaattagcttatcaggctgaaattaaagccatgcaaaagaaggtctaggtccatcaaggaaattcccctccgttttcctttgtcatggggtttatgttttatttcagattttatttgtgtgacttagaaattccaggaacacaattaggatattttcatacacatagggtatcttgttcactgctgtgctactttacatgagtaggatggaagtgtatattttatatgaaataccactgtacaatttataatttatttacaaattatatattaagagaaacaaatgtcataacaaaaatcagctgtttctaattgcttttgtgactgttaccttttagttcatgcccccccaaagagctaaatttcacatttttacctacaaaattgatttttaattcctggcaaataatttaccattatgagctacaaggtgggcaacagcgcctgaggatctaattttatgcatattactcccaagtattttaacacttgttggagaagcaata

SEQ ID NO: 140123 - DNA, 1693 bp, Homo sapiens
ttttccttattggataagaaaaacgattaagcagtgcatctgcttttaaaggattattgtttacaaaggtgtaattattgaatggtcatctagtaaaacaccaaacactaatatgtgcaaaacccctagcaatacagttgtcactgctgggacttgtggaaggtgtctctgtcagggttaggccttttattggcagcataaaggcctagagtgcctccaaaacacccactctgttacatttgtttagaatatacttaagtgcagattccagaattaaagagaagaaagtcagtttattatgagtagagattaaatataataatgaagaagcaagatgtagattcataaaaaggcattgttacgtagtagaaagaaggcagactttgggattcaaacatttctaggtttgttaccccagttctcgttattgtgggtcagatgaattccttaatccctcagagaaagtttcctttatacaattaaaataatactacctgcctaacacattgtaaggatcgataattaaagcacctagcatctaattagtgttgttaatttcagcactattgctcagcaagtatatttcctgatgtttccttccaaaatgtctattagaggactcaagttcaaaccatgttgatgagtttgaagataatctgctgattgaatcagatgtgatagatataactaaatatagagaagaaactccaccaaggagcagatgtaaccaggcgaccacattggataatcagaatattaaaaaggcaattgaggttcaaattcagaaaccccaagagggacgatctacagcatgtcaaagacagcaggtattttgtgatgaagagttgctaagtgaaaccaagaatacttcatctgattctctaacaaagttcaataaagggaatgtgtttttattggatgccacaaaagaaggaaatgtcggccgcttccttaatcatagttgttgcccaaatctcttggtacagaatgtttttgtagaaacacacaacaggaattttccattggtggcattcttcaccaacaggtatgtgaaagcaagaacagagctaacatgggattatggctatgaagctgggactgtgcctgagaaggaaatcttctgccaatgtggggttaataaatgtagaaaaaaaatattataaatatgtaactaacgcctgtttgtgaaattagcttatcaggctgaaattaaagccatgcaaaagaaggtctaggtccatcaaggaaattcccctccgttttcctttgtcatggggtttatgttttatttcagattttatttgtgtgacttagaaattccaggaacacaattaggatattttcatacacatagggtatcttgttcactgctgtgctactttacatgagtaggatggaagtgtatattttatatgaaataccactgtacaatttataatttatttacaaattatatattaagagaaacaaatgtcataacaaaaatcagctgtttctaattgcttttgtgactgttaccttttagttcatgcccccccaaagagctaaatttcacatttttacctacaaaattgatttttaattcctggcaaataatttaccattatgagctacaaggtgggcaacagcgcctgaggatctaattttatgcatattactcccaagtattttaacacttgttggagaagcaata

SEQ ID NO: 140124 - DNA, 960 bp, Homo sapiens
cgccttccctcatccccggtagaggcagggcgggactgttgtggttgagatgaaggctagtaaatggtgaagtacttcccggccagagggcacctgcgctcgggaggtttgggcggcttggcgtcggaggagagccccacccgcggaggaacccagccttgccaacggagctggcggagctcactcctcaggtcaggcgggcggcgtagaaaacgcagcggagccaggtgaaaccaaggcaccgccgtggctggcccccgacagttcctctagccgggaggttggaggagctgaaaacgccgcggagccctcggccgcccgagcaggggctggaccccagcccttgcagcctcccttctcctggcacccaagtgcagtcctggctgcagaaggggccgcgggcgcactgagtttccaacctccatttcagcctgtctgtctcagggtgcagccttaatgagaggtgattcctaagctgctgggaacctgaggttgtcaaaggggcggcaggaaatggacagcagtataaaacccagaagcagaacttgaaggttaaaccactagcccatttcacagattttctccaggaaacatgttttacttgtgcacgttcagttttcaaattttcaggtgtgaacgctggtgagagctgcttaaaaacaaagctatgggccgggcgcggtggctcacacctgtaatccccacactttgggaggctgaggcgggcggatcacctgaggtcaggagttcaagaccagcctggccaacgtggtgaaaccccgtctccactaaaaacacaaaaattagccgggcgtgtggtggcgggcccctgtaatcccagcttctcgggaggctgaggcaggagaatcgcttgaacccgggaggcagaggctgcagtgagccgagatcacgccactgcacccttctcactgcactggtgacagagcgagactccgtctc

SEQ ID NO: 140125 - DNA, 1203 bp, Homo sapiens
gtttgcaccctgtctcaaaaaatgataattataatagaaaaatattttttaaagatatatactatagccccaaatatctggtactgtagaatattcaattatcctaaactgttcctattcaataagattttgcacacctgaaattttgactcttattcccatttagaatgaatgcctgaaagggctgaagatatcaggtatcacccagttccactcgggataaatgatgcagagtgctacataatctttaattcagagctattccccagctacttccacactgcaggcctcaacacatgactgggtcccactgttggcaaaatacacttcttcctcatattgataggttccttcttacttaacattttagtagatttgaaataaaactcaaatggttattcttaataaaaggtcattcctaattggtggatgttgggtgagagaacagatcatatttttgaggatggttaatgttaatatgaaaattgatataatttggttcattggtagttatttagggtattttatgattcttttcaaatttctactttctaggtatgtgaaagcaagaacagagctaacatgggattatggctatgaagctgggactgtgcctgagaaggaaatcttctgccaatgtggggttaataaatgtagaaaaaaaatattataaatatgtaactaacgcctgtttgtgaaattagcttatcaggctgaaattaaagccatgcaaaagaaggtctaggtccatcaaggaaattcccctccgttttcctttgtcatggggtttatgttttatttcagattttatttgtgtgacttagaaattccaggaacacaattaggatattttcatacacatagggtatcttgttcactgctgtgctactttacatgagtaggatggaagtgtatattttatatgaaataccactgtacaatttataatttatttacaaattatatattaagagaaacaaatgtcataacaaaaatcagctgtttctaattgcttttgtgactgttaccttttagttcatgcccccccaaagagctaaatttcacatttttacctacaaaattgatttttaattcctggcaaataatttaccattatgagctacaaggtgggcaacagcgcctgaggatctaattttatgcatattactcccaagtattttaacacttgttggagaagcaata

SEQ ID NO: 140126 - DNA, 3477 bp, Homo sapiens
cgccttccctcatccccggtagaggcagggcgggactgttgtggttgagatgaaggctagtaaatggtgaagtacttcccggccagagggcacctgcgctcgggaggtttgggcggcttggcgtcggaggagagccccacccgcggaggaacccagccttgccaacggagctggcggagctcactcctcaggtcaggcgggcggcgtagaaaacgcagcggagccaggtgaaaccaaggcaccgccgtggctggcccccgacagttcctctagccgggaggttggaggagctgaaaacgccgcggagccctcggccgcccgagcaggggctggaccccagcccttgcagcctcccttctcctggcacccaagtgcagtcctggctgcagaaggggccgcgggcgcactgagtttccaacctccatttcagcctgtctgtctcagggtgcagccttaatgagaggtgattcctaagctgctgggaacctgaggttgtcaaaggggcggcaggaaatggacagcagtataaaacccagaagcagaacttgaaggttaaaccactagcccatttcacagaatgtttcatccatttgtggaccaaaagatggagttggtttttatttttaaaaagataatgttaatgatctgataccactacaaatatttacgtgagaagattcatggacttgtcttttggttggactgtcactcatttctgaaagtttcttcagccacaatttctatttgaaaattcaagtatcaaaggataccaggtttagaatggtataatgatgtattttgtctgaggactgcaaattttatagagaccacagttggattccagtgatattctgcaatcaaagtgatttgataaacctaattttgaagcattttatatttataagcgacatcaaaagatgggagaaaaaaatggcgatgcaaaaactttctggatggagctagaagatgatggaaaagtggacttcatttttgaacaagtacaaaatgtgctgcagtcactgaaacaaaagatcaaagatgggtctgccaccaataaagaatacatccaagcaatgattctagtgaatgaagcaactataattaacagttcaacatcaataaaggatcctatgcctgtgactcagaaggaacaggaaaacaaatccaatgcatttccctctacatcatgtgaaaactcctttccagaagactgtacatttctaacaacaggaaataaggaaattctctctcttgaagataaagttgtagactttagagaaaaagactcatcttcgaatttatcttaccaaagtcatgactgctctggtgcttgtctgatgaaaatgccactgaacttgaagggagaaaaccctctgcagctgccaatcaaatgtcacttccaaagacgacatgcaaagacaaactctcattcttcagcactccacataacttttctttcaatacctatgttcagttggctcggaattacccaaagcaaaaagaagttgtttctgatgtggatattagcaatggagtggaatcagtgcccatttctttctgtaatgaaattgacagtagaaagctcccacagtttaagtacagaaagactgtgtggcctcgagcatataatctaaccaacttttccagcatgtttactgattcctgtgactgctctgagggctgcatagacataacaaaatgtgcatgtcttcaactgacagcaaggaatgccaaaacttcccccttgtcaagtgacaaaataaccactggatataaatataaaagactacagagacagattcctactggcatttatgaatgcagccttttgtgcaaatgtaatcgacaattgtgtcaaaaccgagttgtccaacatggtcctcaagtgaggttacaggtgttcaaaactgagcagaagggatggggtgtacgctgtctagatgacattgacagagggacatttgtttgcatttattcaggaagattactaagcagagctaacactgaaaaatcttatggtattgatgaaaacgggagagatgagaatactatgaaaaatatattttcaaaaaagaggaaattagaagttgcatgttcagattgtgaagttgaagttctcccattaggattggaaacacatcctagaactgctaaaactgagaaatgtccaccaaagttcagtaataatcccaaggagcttactgtggaaacgaaatatgataatatttcaagaattcaatatcattcagttattagagatcctgaatccaagacagccatttttcaacacaatgggaaaaaaatggaatttgtttcctcggagtctgtcactccagaagataatgatggatttaaaccaccccgagagcatctgaactctaaaaccaagggagcacaaaaggactcaagttcaaaccatgttgatgagtttgaagataatctgctgattgaatcagatgtgatagatataactaaatatagagaagaaactccaccaaggagcagatgtaaccaggcgaccacattggataatcagaatattaaaaaggcaattgaggttcaaattcagaaaccccaagagggacgatctacagcatgtcaaagacagcaggtattttgtgatgaagagttgctaagtgaaaccaagaatacttcatctgattctctaacaaagttcaataaagggaatgtgtttttattggatgccacaaaagaaggaaatgtcggccgcttccttaatcatagttgttgcccaaatctcttggtacagaatgtttttgtagaaacacacaacaggaattttccattggtggcattcttcaccaacaggtatgtgaaagcaagaacagagctaacatgggattatggctatgaagctgggactgtgcctgagaaggaaatcttctgccaatgtggggttaataaatgtagaaaaaaaatattataaatatgtaactaacgcctgtttgtgaaattagcttatcaggctgaaattaaagccatgcaaaagaaggtctaggtccatcaaggaaattcccctccgttttcctttgtcatggggtttatgttttatttcagattttatttgtgtgacttagaaattccaggaacacaattaggatattttcatacacatagggtatcttgttcactgctgtgctactttacatgagtaggatggaagtgtatattttatatgaaataccactgtacaatttataatttatttacaaattatatattaagagaaacaaatgtcataacaaaaatcagctgtttctaattgcttttgtgactgttaccttttagttcatgcccccccaaagagctaaatttcacatttttacctacaaaattgatttttaattcctggcaaataatttaccattatgagctacaaggtgggcaacagcgcctgaggatctaattttatgcatattactcccaagtattttaacacttgttggagaagcaata

SEQ ID NO: 140127 - DNA, 1713 bp, Homo sapiens
tctgcggcgtgctgtatcaatgagatttgcctcagggagcgctcagtctgcctcgattcccaggcaagacttacgtaacagacagaggctcacctactgagtgacgtctgtatggtaattgcgttgagcacacggcgcagacgatgatgacaatactatctgagacattgagtaatatatatctagcataagcgtatggagaatcttatagtggagcggtgtcctagcattcgtgaaggtggagacgttcatcccgagtacagagactagcgtaccaagcaagtcctctttagacaaagcttgccttaaagagatcatagatgaataaatagatctctatctccaaagatggttctagattagttgatataccccataggcatgctattaactgattgggacatagccgaagatgaatagattaagcattataactggaattattcgcaatttatctagtatacaagtatatatagcacgagcgcaggctaatgttctggaatgaaaccagccatttttcaacacaattgggaaaaaaatggaatttgtttcctcggagtctgtcactccagaagataatgatggatttaaaccaccccgagagcatctgaactctaaaaccaagggagcacaaaaggactcaagttcaaaccatgttgatgagtttgaagataatctgctgattgaatcagatgtgatagatataactaaatatagagaagaaactccaccaaggagcagatgtaaccaggcgaccacattggataatcagaatattaaaaaggcaattgaggttcaaattcagaaaccccaagagggacgatctacagcatgtcaaagacagcaggtattttgtgatgaagagttgctaagtgaaaccaagaatacttcatctgattctctaacaaagttcaataaagggaatgtgtttttattggatgccacaaaagaaggaaatgtcggccgcttccttaatcatagttgttgcccaaatctcttggtacagaatgtttttgtagaaacacacaacaggaattttccattggtggcattcttcaccaacaggtatgtgaaagcaagaacagagctaacatgggattatggctatgaagctgggactgtgcctgagaaggaaatcttctgccaatgtggggttaataaatgtagaaaaaaaatattataaatatgtaactaacgcctgtttgtgaaattagcttatcaggctgaaattaaagccatgcaaaagaaggtctaggtccatcaaggaaattcccctccgttttcctttgtcatggggtttatgttttatttcagattttatttgtgtgacttagaaattccaggaacacaattaggatattttcatacacatagggtatcttgttcactgctgtgctactttacatgagtaggatggaagtgtatattttatatgaaataccactgtacaatttataatttatttacaaattatatattaagagaaacaaatgtcataacaaaaatcagctgtttctaattgcttttgtgactgttaccttttagttcatgcccccccaaagagctaaatttcacatttttacctacaaaattgatttttaattcctggcaaataatttaccattatgagctacaaggtgggcaacagcgcctgaggatctaattttatgcatattactcccaagtattttaacacttgttggagaagcaata

SEQ ID NO: 140128 - DNA, 2515 bp, Homo sapiens
cgccttccctcatccccggtagaggcagggcgggactgttgtggttgagatgaaggctagtaaatggtgaagtacttcccggccagagggcacctgcgctcgggaggtttgggcggcttggcgtcggaggagagccccacccgcggaggaacccagccttgccaacggagctggcggagctcactcctcaggtcaggcgggcggcgtagaaaacgcagcggagccaggtgaaaccaaggcaccgccgtggctggcccccgacagttcctctagccgggaggttggaggagctgaaaacgccgcggagccctcggccgcccgagcaggggctggaccccagcccttgcagcctcccttctcctggcacccaagtgcagtcctggctgcagaaggggccgcgggcgcactgagtttccaacctccatttcagcctgtctgtctcagggtgcagccttaatgagaggtgattcctaagctgctgggaacctgaggttgtcaaaggggcggcaggaaatggacagcagtataaaacccagaagcagaacttgaaggttaaaccactagcccatttcacagaatgtttcatccatttgtggaccaaaagatggagttggtttttatttttaaaaagataatgttaatgatctgataccactacaaatatttacgtgagaagattcatggacttgtcttttggttggactgtcactcatttctgaaagtttcttcagccacaatttctatttgaaaattcaagtatcaaaggataccaggtttagaatggtataatgatgtattttgtctgaggactgcaaattttatagagaccacagttggattccagtgatattctgcaatcaaagtgatttgataaacctaattttgaagcattttatatttataagcgacatcaaaagatgggagaaaaaaatggcgatgcaaaaactttctggatggagctagaagatgatggaaaagtggacttcatttttgaacaagtacaaaatgtgctgcagtcactgaaacaaaagatcaaagatgggtctgccaccaataaagatcctatgcctgtgactcagaaggaacaggaaaacaaatccaatgcatttccctctacatcatgtgaaaactcctttccagaagactgtacatttctaacaacaggaaataaggaaattctctctcttgaagataaagttgtagactttagagaaaaagactcatcttcgaatttatcttaccaaagtcatgactgctctggtgcttgtctgatgaaaatgccactgaacttgaagggagaaaaccctctgcagctgccaatcaaatgtcacttccaaagacgacatgcaaagacaaactctcattcttcagcactccacgtgagttataaaaccccttgtggaaggagtctacgaaacgtggaggaagtttttcgttacctgcttgagacagagtgtaactttttatttacagataacttttctttcaatacctatgttcagttggctcggaattacccaaagcaaaaagaagttgtttctgatgtggatattagcaatggagtggaatcagtgcccatttctttctgtaatgaaattgacagtagaaagctcccacagtttaagtacagaaagactgtgtggcctcgagcatataatctaaccaacttttccagcatgtttactgattcctgtgactgctctgagggctgcatagacataacaaaatgtgcatgtcttcaactgacagcaaggaatgccaaaacttcccccttgtcaagtgacaaaataaccactggatataaatataaaagactacagagacagattcctactggcatttatgaatgcagccttttgtgcaaatgtaatcgacaattgtgtcaaaaccgagttgtccaacatggtcctcaagtgaggttacaggtgttcaaaactgagcagaagggatggggtgtacgctgtctagatgacattgacagagggacatttgtttgcatttattcaggaagattactaagcagagctaacactgaaaaatcttatggtattgatgaaaacgggagagatgagaatactatgaaaaatatattttcaaaaaagaggaaattagaagttgcatgttcagattgtgaagttgaagttctcccattaggattggaaacacatcctagaactgctaaaactgagaaatgtccaccaaagttcagtaataatcccaaggagcttactgtggaaacgaaatatgataatatttcaagaattcaatatcattcagttattagagatcctgaatccaagacagccatttttcaacacaatgggaaaaaaatggaatttgtttcctcggagtctgtcactccagaagataatgatggatttaaaccaccccgagagcatctgaactctaaaaccaagggagcacaaagtaggctttgtttcttctgtgaatgcctacctcttctgcctgtttctctgtctcttgctcaatacctgtagctcattttcttagattc

SEQ ID NO: 140129 - DNA, 2058 bp, Homo sapiens
cgccttccctcatccccggtagaggcagggcgggactgttgtggttgagatgaaggctagtaaatggtgaagtacttcccggccagagggcacctgcgctcgggaggtttgggcggcttggcgtcggaggagagccccacccgcggaggaacccagccttgccaacggagctggcggagctcactcctcaggtcaggcgggcggcgtagaaaacgcagcggagccaggtgaaaccaaggcaccgccgtggctggcccccgacagttcctctagccgggaggttggaggagctgaaaacgccgcggagccctcggccgcccgagcaggggctggaccccagcccttgcagcctcccttctcctggcacccaagtgcagtcctggctgcagaaggggccgcgggcgcactgagtttccaacctccatttcagcctgtctgtctcagggtgcagccttaatgagaggtgattcctaagctgctgggaacctgaggttgtcaaaggggcggcaggaaatggacagcagtataaaacccagaagcagaacttgaaggttaaaccactagcccatttcacagaatgtttcatccatttgtggaccaaaagatggagttggtttttatttttaaaaagataatgttaatgatctgataccactacaaatatttacgtgagaagattcatggacttgtcttttggttggactgtcactcatttctgaaagtttcttcagccacaatttctatttgaaaattcaagtatcaaaggataccaggtttagaatggtataatgatgtattttgtctgaggactgcaaattttatagagaccacagttggattccagtgatattctgcaatcaaagtgatttgataaacctaattttgaagcattttatatttataagcgacatcaaaagatgggagaaaaaaatggcgatgcaaaaactttctggatggagctagaagatgatggaaaagtggacttcatttttgaacaagtacaaaatgtgctgcagtcactgaaacaaaagatcaaagatgggtctgccaccaataaagatcctatgcctgtgactcagaaggaacaggaaaacaaatccaatgcatttccctctacatcatgtgaaaactcctttccagaagactgtacatttctaacaacaggaaataaggaaattctctctcttgaagataaagttgtagactttagagaaaaagactcatcttcgaatttatcttaccaaagtcatgactgctctggtgcttgtctgatgaaaatgccactgaacttgaagggagaaaaccctctgcagctgccaatcaaatgtcacttccaaagacgacatgcaaagacaaactctcattcttcagcactccacgtgagttataaaaccccttgtggaaggagtctacgaaacgtggaggaagtttttcgttacctgcttgagacagagtgtaactttttatttacagataacttttctttcaatacctatgttcagttggctcggaattacccaaagcaaaaagaagttgtttctgatgtggatattagcaatggagtggaatcagtgcccatttctttctgtaatgaaattgacagtagaaagctcccacagtttaagtacagaaagactgtgtggcctcgagcatataatctaaccaacttttccagcatgtttactgattcctgtgactgctctgagggctgcatagacataacaaaatgtgcatgtcttcaactgacagcaaggaatgccaaaacttcccccttgtcaagtgacaaaataaccactggatataaatataaaagactacagagacagattcctactggcatttatgaatgcagccttttgtgcaaatgtaatcgacaattgtgtcaaaaccgagttgtccaacatggtcctcaagtgaggttacaggtgttcaaaactgagcagaagggatggggtgtacgctgtctagatgacattgacagagggacatttgtttgcatttattcagatccacattctacacatcctgcctagacgttcatctctcatacttctcaaa

SEQ ID NO: 140130 - DNA, 459 bp, Homo sapiens
cttgaagttactagttacagagaacaggaatctatacactcataccataagagaaaggaaaatttgtttttctcctctctatgttgagggagtgctgggagagtcccagagcacattcctttgtgtcctggcttcttagatagtattaacaagactttttctgggtctgggctgtgcctattgctgcctctgggataagtcatcctaatacaggaaagcttatttctctttttaattttatttttctttctttaattccctgcctcacaggagcatcacagaaagaagtgaatgcccaaagcagtggtgagatttgagagcacattataccaccctaataggtgaaagggaggagcagaggggcacttctggaagaacacatgacttcaaagataaatgggtcctatgagaataagtgaaagatttgtaacagtgtctgtctgagtatagtactgactt

SEQ ID NO: 140131 - DNA, 3505 bp, Homo sapiens
cgccttccctcatccccggtagaggcagggcgggactgttgtggttgagatgaaggctagtaaatggtgaagtacttcccggccagagggcacctgcgctcgggaggtttgggcggcttggcgtcggaggagagccccacccgcggaggaacccagccttgccaacggagctggcggagctcactcctcaggtcaggcgggcggcgtagaaaacgcagcggagccaggtgaaaccaaggcaccgccgtggctggcccccgacagttcctctagccgggaggttggaggagctgaaaacgccgcggagccctcggccgcccgagcaggggctggaccccagcccttgcagcctcccttctcctggcacccaagtgcagtcctggctgcagaaggggccgcgggcgcactgagtttccaacctccatttcagcctgtctgtctcagggtgcagccttaatgagaggtgattcctaagctgctgggaacctgaggttgtcaaaggggcggcaggaaatggacagcagtataaaacccagaagcagaacttgaaggttaaaccactagcccatttcacagaatgtttcatccatttgtggaccaaaagatggagttggtttttatttttaaaaagataatgttaatgatctgataccactacaaatatttacgtgagaagattcatggacttgtcttttggttggactgtcactcatttctgaaagtttcttcagccacaatttctatttgaaaattcaagtatcaaaggataccaggtttagaatggtataatgatgtattttgtctgaggactgcaaattttatagagaccacagttggattccagtgatattctgcaatcaaagtgatttgataaacctaattttgaagcattttatatttataagcgacatcaaaagatgggagaaaaaaatggcgatgcaaaaactttctggatggagctagaagatgatggaaaagtggacttcatttttgaacaagtacaaaatgtgctgcagtcactgaaacaaaagatcaaagatgggtctgccaccaataaagatcctatgcctgtgactcagaaggaacaggaaaacaaatccaatgcatttccctctacatcatgtgaaaactcctttccagaagactgtacatttctaacaacaggaaataaggaaattctctctcttgaagataaagttgtagactttagagaaaaagactcatcttcgaatttatcttaccaaagtcatgactgctctggtgcttgtctgatgaaaatgccactgaacttgaagggagaaaaccctctgcagctgccaatcaaatgtcacttccaaagacgacatgcaaagacaaactctcattcttcagcactccacgtgagttataaaaccccttgtggaaggagtctacgaaacgtggaggaagtttttcgttacctgcttgagacagagtgtaactttttatttacagataacttttctttcaatacctatgttcagttggctcggaattacccaaagcaaaaagaagttgtttctgatgtggatattagcaatggagtggaatcagtgcccatttctttctgtaatgaaattgacagtagaaagctcccacagtttaagtacagaaagactgtgtggcctcgagcatataatctaaccaacttttccagcatgtttactgattcctgtgactgctctgagggctgcatagacataacaaaatgtgcatgtcttcaactgacagcaaggaatgccaaaacttcccccttgtcaagtgacaaaataaccactggatataaatataaaagactacagagacagattcctactggcatttatgaatgcagccttttgtgcaaatgtaatcgacaattgtgtcaaaaccgagttgtccaacatggtcctcaagtgaggttacaggtgttcaaaactgagcagaagggatggggtgtacgctgtctagatgacattgacagagggacatttgtttgcatttattcaggaagattactaagcagagctaacactgaaaaatcttatggtattgatgaaaacgggagagatgagaatactatgaaaaatatattttcaaaaaagaggaaattagaagttgcatgttcagattgtgaagttgaagttctcccattaggattggaaacacatcctagaactgctaaaactgagaaatgtccaccaaagttcagtaataatcccaaggagcttactgtggaaacgaaatatgataatatttcaagaattcaatatcattcagttattagagatcctgaatccaagacagccatttttcaacacaatgggaaaaaaatggaatttgtttcctcggagtctgtcactccagaagataatgatggatttaaaccaccccgagagcatctgaactctaaaaccaagggagcacaaaaggactcaagttcaaaccatgttgatgagtttgaagataatctgctgattgaatcagatgtgatagatataactaaatatagagaagaaactccaccaaggagcagatgtaaccaggcgaccacattggataatcagaatattaaaaaggcaattgaggttcaaattcagaaaccccaagagggacgatctacagcatgtcaaagacagcaggtattttgtgatgaagagttgctaagtgaaaccaagaatacttcatctgattctctaacaaagttcaataaagggaatgtgtttttattggatgccacaaaagaaggaaatgtcggccgcttccttaatcatagttgttgcccaaatctcttggtacagaatgtttttgtagaaacacacaacaggaattttccattggtggcattcttcaccaacaggtatgtgaaagcaagaacagagctaacatgggattatggctatgaagctgggactgtgcctgagaaggaaatcttctgccaatgtggggttaataaatgtagaaaaaaaatattataaatatgtaactaacgcctgtttgtgaaattagcttatcaggctgaaattaaagccatgcaaaagaaggtctaggtccatcaaggaaattcccctccgttttcctttgtcatggggtttatgttttatttcagattttatttgtgtgacttagaaattccaggaacacaattaggatattttcatacacatagggtatcttgttcactgctgtgctactttacatgagtaggatggaagtgtatattttatatgaaataccactgtacaatttataatttatttacaaattatatattaagagaaacaaatgtcataacaaaaatcagctgtttctaattgcttttgtgactgttaccttttagttcatgcccccccaaagagctaaatttcacatttttacctacaaaattgatttttaattcctggcaaataatttaccattatgagctacaaggtgggcaacagcgcctgaggatctaattttatgcatattactcccaagtattttaacacttgttggagaagcaata

SEQ ID NO: 140132 - DNA, 3030 bp, Homo sapiens
ggcgtccgactcctcccatgtagtgatcggtttagaatgtttcatccatttgtggaccaaaagatggagttggtttttatttttaaaaagataatgttaatgatctgataccactacaaatatttacgtgagaagattcatggacttgtcttttggttggactgtcactcatttctgaaagtttcttcagccacaatttctatttgaaaattcaagtatcaaaggataccaggtttagaatggtataatgatgtattttgtctgaggactgcaaattttatagagaccacagttggattccagtgatattctgcaatcaaagtgatttgataaacctaattttgaagcattttatatttataagcgacatcaaaagatgggagaaaaaaatggcgatgcaaaaactttctggatggagctagaagatgatggaaaagtggacttcatttttgaacaagtacaaaatgtgctgcagtcactgaaacaaaagatcaaagatgggtctgccaccaataaagaatacatccaagcaatgattctagtgaatgaagcaactataattaacagttcaacatcaataaaggatcctatgcctgtgactcagaaggaacaggaaaacaaatccaatgcatttccctctacatcatgtgaaaactcctttccagaagactgtacatttctaacaacaggaaataaggaaattctctctcttgaagataaagttgtagactttagagaaaaagactcatcttcgaatttatcttaccaaagtcatgactgctctggtgcttgtctgatgaaaatgccactgaacttgaagggagaaaaccctctgcagctgccaatcaaatgtcacttccaaagacgacatgcaaagacaaactctcattcttcagcactccacgtgagttataaaaccccttgtggaaggagtctacgaaacgtggaggaagtttttcgttacctgcttgagacagagtgtaactttttatttacagataacttttctttcaatacctatgttcagttggctcggaattacccaaagcaaaaagaagttgtttctgatgtggatattagcaatggagtggaatcagtgcccatttctttctgtaatgaaattgacagtagaaagctcccacagtttaagtacagaaagactgtgtggcctcgagcatataatctaaccaacttttccagcatgtttactgattcctgtgactgctctgagggctgcatagacataacaaaatgtgcatgtcttcaactgacagcaaggaatgccaaaacttcccccttgtcaagtgacaaaataaccactggatataaatataaaagactacagagacagattcctactggcatttatgaatgcagccttttgtgcaaatgtaatcgacaattgtgtcaaaaccgagttgtccaacatggtcctcaagtgaggttacaggtgttcaaaactgagcagaagggatggggtgtacgctgtctagatgacattgacagagggacatttgtttgcatttattcaggaagattactaagcagagctaacactgaaaaatcttatggtattgatgaaaacgggagagatgagaatactatgaaaaatatattttcaaaaaagaggaaattagaagttgcatgttcagattgtgaagttgaagttctcccattaggattggaaacacatcctagaactgctaaaactgagaaatgtccaccaaagttcagtaataatcccaaggagcttactgtggaaacgaaatatgataatatttcaagaattcaatatcattcagttattagagatcctgaatccaagacagccatttttcaacacaatgggaaaaaaatggaatttgtttcctcggagtctgtcactccagaagataatgatggatttaaaccaccccgagagcatctgaactctaaaaccaagggagcacaaaaggactcaagttcaaaccatgttgatgagtttgaagataatctgctgattgaatcagatgtgatagatataactaaatatagagaagaaactccaccaaggagcagatgtaaccaggcgaccacattggataatcagaatattaaaaaggcaattgaggttcaaattcagaaaccccaagagggacgatctacagcatgtcaaagacagcaggtattttgtgatgaagagttgctaagtgaaaccaagaatacttcatctgattctctaacaaagttcaataaagggaatgtgtttttattggatgccacaaaagaaggaaatgtcggccgcttccttaatcatagttgttgcccaaatctcttggtacagaatgtttttgtagaaacacacaacaggaattttccattggtggcattcttcaccaacaggtatgtgaaagcaagaacagagctaacatgggattatggctatgaagctgggactgtgcctgagaaggaaatcttctgccaatgtggggttaataaatgtagaaaaaaaatattataaatatgtaactaacgcctgtttgtgaaattagcttatcaggctgaaattaaagccatgcaaaagaaggtctaggtccatcaaggaaattcccctccgttttcctttgtcatggggtttatgttttatttcagattttatttgtgtgacttagaaattccaggaacacaattaggatattttcatacacatagggtatcttgttcactgctgtgctactttacatgagtaggatggaagtgtatattttatatgaaataccactgtacaatttataatttatttacaaattatatattaagagaaacaaatgtcataacaaaaatcagctgtttctaattgcttttgtgactgttaccttttagttcatgcccccccaaagagctaaatttcacatttttacctacaaaattgatttttaattcctggcaaataatttaccattatgagctacaaggtgggcaacagcgcctgaggatctaattttatgcatattactcccaagtattttaacacttgttggagaagcaata

SEQ ID NO: 140133 - DNA, 3132 bp, Homo sapiens
cgccttccctcatccccggtagaggcagggcgggactgttgtggttgagatgaaggctagtaaatggtgaagtacttcccggccagagggcacctgcgctcgggaggtttgggcggcttggcgtcggaggagagccccacccgcggaggaacccagccttgccaacggagctggcggagctcactcctcaggtcaggcgggcggcgtagaaaacgcagcggagccaggtgaaaccaaggcaccgccgtggctggcccccgacagttcctctagccgggaggttggaggagctgaaaacgccgcggagccctcggccgcccgagcaggggctggaccccagcccttgcagcctcccttctcctggcacccaagtgcagtcctggctgcagaaggggccgcgggcgcactgagtttccaacctccatttcagcctgtctgtctcagggtgcagccttaatgagaggtgattcctaagctgctgggaacctgaggttgtcaaaggggcggcaggaaatggacagcagtataaaacccagaagcagaacttgaaggttaaaccactagcccatttcacagaatgtttcatccatttgtggaccaaaagatggagttggtttttatttttaaaaagataatgttaatgatctgataccactacaaatatttacgtgagaagattcatggacttgtcttttggttggactgtcactcatttctgaaagtttcttcagccacaatttctatttgaaaattcaagtatcaaaggataccaggtttagaatggtataatgatgtattttgtctgaggactgcaaattttatagagaccacagttggattccagtgatattctgcaatcaaagtgatttgataaacctaattttgaagcattttatatttataagcgacatcaaaagatgggagaaaaaaatggcgatgcaaaaactttctggatggagctagaagatgatggaaaagtggacttcatttttgaacaagtacaaaatgtgctgcagtcactgaaacaaaagatcaaagatgggtctgccaccaataaagatcctatgcctgtgactcagaaggaacaggaaaacaaatccaatgcatttccctctacatcatgtgaaaactcctttccagaagactgtacatttctaacaacaggaaataaggaaattctctctcttgaagataaagttgtagactttagagaaaaagactcatcttcgaatttatcttaccaaagtcatgactgctctggtgcttgtctgatgaaaatgccactgaacttgaagggagaaaaccctctgcagctgccaatcaaatgtcacttccaaagacgacatgcaaagacaaactctcattcttcagcactccacgtgagttataaaaccccttgtggaaggagtctacgaaacgtggaggaagtttttcgttacctgcttgagacagagtgtaactttttatttacagataacttttctttcaatacctatgttcagttggctcggaattacccaaagcaaaaagaagttgtttctgatgtggatattagcaatggagtggaatcagtgcccatttctttctgtaatgaaattgacagtagaaagctcccacagtttaagtacagaaagactgtgtggcctcgagcatataatctaaccaacttttccagcatgtttactgattcctgtgactgctctgagggctgcatagacataacaaaatgtgcatgtcttcaactgacagcaaggaatgccaaaacttcccccttgtcaagtgacaaaataaccactggatataaatataaaagactacagagacagattcctactggcatttatgaatgcagccttttgtgcaaatgtaatcgacaattgtgtcaaaaccgagttgtccaacatggtcctcaagtgaggttacaggtgttcaaaactgagcagaagggatggggtgtacgctgtctagatgacattgacagagggacatttgtttgcatttattcaggaagattactaagcagagctaacactgaaaaatcttatggtattgatgaaaacgggagagatgagaatactatgaaaaatatattttcaaaaaagaggaaattagaagttgcatgttcagattgtgaagttgaagttctcccattaggattggaaacacatcctagaactgctaaaactgagaaatgtccaccaaagttcagtaataatcccaaggagcttactgtggaaacgaaatatgataatatttcaagaattcaatatcattcagttattagagatcctgaatccaagacagccatttttcaacacaatgggaaaaaaatggaatttgtttcctcggagtctgtcactccagaagataatgatggatttaaaccaccccgagagcatctgaactctaaaaccaagggagcacaaaaggactcaagttcaaaccatgttgatgagtttgaagataatctgctgattgaatcagatgtgatagatataactaaatatagagaagaaactccaccaaggagcagatgtaaccaggcgaccacattggataatcagaatattaaaaaggcaattgaggttcaaattcagaaaccccaagagggacgatctacagcatgtcaaagacagcaggtattttgtgatgaagagttgctaagtgaaaccaagaatacttcatctgattctctaacaaagttcaataaagggaatgtgtttttattggatgccacaaaagaaggaaatgtcggccgcttccttaatagtctcactttgtcaccagtggcacaatctcagctcactgcaacctccgcttctggggttcaagcaattctcatgcctcggcctcctgagtagctgagattacaggcgttaatgaatcacatgatgaatgtgtggagatggcggctagtgggcaacagagcaatactggaatagtgctaatatgaggaaatggtatcatctatttagaagcctcggaacgacgatacataatgactatcttcagcaaagaaatttgttgcttacaatatctcctctccaaaaggcttgtttgttacagtgatgtaaaaattaggttctgtacatcttcatattaaacttactttgtgaaaactttttgtttaaa

SEQ ID NO: 140134 - DNA, 328 bp, Homo sapiens
ttgaccttgtgatctgcctcccaaagtgctgggatcacaggcatgagccaccacacccggcttaaaagcaattttaagttaagattacacaatgatcatctttagtatttcctcccaattaaggcatcttatctagattttactttataggaatggtcacattttgtgtctgggactaataacatgctgctaccacccccttctaaaaattatctcatgaaaagctagtgattaattctcttactgaggtggttatcttgtctgtccattaacctctgaactcttcttggccatccatgtgggaattagaaagcaggcagagccaagg

SEQ ID NO: 140135 - DNA, 156 bp, Homo sapiens
ctggccccgggtggaatactattgccacagaaagacaggttagagtttgaaaacaagatgtactcacatttttcttgcctagtccatcaagtttcaacaagcaagcagtacatattttcatcagacatttgccatagactcaaaggatcatcttaa

SEQ ID NO: 140136 - DNA, 380 bp, Homo sapiens
ttatatcagcagaatcatacaggatctctttttgagactggcttttttctcttagcataatgttattatggctcacccatgttgtagcatatatcagaattttctctcttttaaaggctgaataatattccattgtgtgaatataccacatttggttgcgaatgtttttgcatctatgatttaaaaattatattcgaggttattagaaggtgattttaggggttctttaaaagaaaggctaatgttggtgtctgagaaccaggcttctgggagccaggaggcatctggccagagcagtgcagcctgcagcccagagctccaggtctttgcgtgacccacgcactggtgctcatgttcctccaagagcccgaaagaagagc

SEQ ID NO: 140137 - DNA, 333 bp, Homo sapiens
gagattgttgtattaggtgaaatcattccaatttcttatatagctgcagatactccatcatgctgatggatgtaggcatgggatggatcacataaataaatctttcctatgcttgtttcagaatcaggagtcttatggtattcatcattgaatcagtggtcctgacttagcttgaggagtgtattagtcattattaataattagtaagtgaataaaagcacataattttttataaggatacctagaattaaagcaagatccctttcttcaggatgcatactttttaaaatggatatttcaataaaagacaattctcatatattataatagttc

SEQ ID NO: 140138 - DNA, 418 bp, Homo sapiens
ctttgggaggctgaggcaggtggattgcttgagcccaggagtttgaaaccagcctgagcaacatgatgaaaccctgtctctacagaaaaatacaaaaattagctgagcatggtggcatgtgcctgtagtcccaactacttggaaggctgaggcaggaggattgcttgagccctgaaggtcgaggttgcagtgagccctgaaggtcaaggttgcagtgagctgggatcgtgtcacctgcactccaacccaggcaacagagtgagaccctatcttaaaaagcaaacaaataaaaaaatatgggagtgtttttccctaccagcaagcaatcagttctgcatcaggcaccagctaggtgtcatctaacttaatactgacactgtctacttgagatagtgtcacatcccacagtttgaggtct

SEQ ID NO: 140139 - DNA, 529 bp, Homo sapiens
tcaaaatggaaattgaagagaaaaattaacaaaattaatgacacctatcaccaaggccacacttgcaaaaatagtatcagttcaacttatcatatatttattgagcactaagtgatgaagggattgaaaaagcttaaaaaatgttaaatgcagggatctcaggcagcttcatagaaaagtcacatttggattggaccttgaaatttttttttcctaattctaaaagtaatacaatggctgggcatggtggctcatatttgtaatctcaacactttgggatgcccaggcaggcagatcacttaagcccaagaatttgagacaacatggcaaaaccccgtctctacaaaaaacaaacaacaacaaaaaaacaaaacaacaacaaaaaatcaaaacaaaacattagctgggtgtgtagcacgtgcctgtggtcccagctacttgagaggctgtggtgggagatcatctgagcctagggaggtcaaagctccactgaaatgtgatcatgccactgtgctccaacctgggcaac

SEQ ID NO: 140140 - DNA, 250 bp, Homo sapiens
tcaaaatggaaattgaagagaaaaattaacaaaattaatgacacctatcaccaaggccacacttgcaaaaatagtatcagttcaacttatcatatatttattgagcactaagtgatgaagggattgaaaaagcttaaaaaatgttaaatgcagggatctcaggcagcttcatagaaaagtcacattgtcttaggtcttaatctattaagacctaagacaatgtttactttcttatatagaaacttctgac

SEQ ID NO: 140141 - DNA, 423 bp, Homo sapiens
agtgtctacaatgtgtaagcattatcacattcgttaacctttctttgaagtagaaactagccaatgagtgtttttcatctttacacaacttacagttgaaggcaaatttataatctagtaataacactttctaagtactgagatgattagaattgggggatacagacagggatgcattaagattttaattcccaaagaatttcttgacagtctttatagctgtggcttaataaagcacctagaagtagaacagagtcaaaggggatgacacttgttgactccattagtctaaagactccttatgatatcagctttgaggcttttcaaaacgaatctagtacatatagcctatgatgattgacacttgatgaaagaggcctaactgctaaatacttttgcctgacctggaaagtaaagacatct

SEQ ID NO: 140142 - DNA, 431 bp, Homo sapiens
cctgtgttgccatgtagaagcccccatcgtgggtcatagtacttgccgcagtactcttaaaactaggcggctatggtataatacgcctcacactcattcgcaaggcccctgacaaaacacatagcctaccccttccttgtactatccctatgaggcataattataacaaggaaggggtaggctcacagggttgcggaattgagaagagtgtggccagagtataaggtgtgcatttataggatgggtgaataaggctggaatagcacttgggagaaggctggaaggccttgagtggcaggcagaagcatctgaccttcatccttgagggaggcaacaaggagctgtgagacattctgagtaggatgccaccagggggaagtctgggtctgcagcgacctggagcagagagggaagcaagctctgatgaaatg

SEQ ID NO: 140143 - DNA, 418 bp, Homo sapiens
agcggatgcagtgagctgatatcatgccactgcactccagcctgggctgatagagcaagactctgtctcaaaaaaataaaaacataaaataaataaataaacaaacaagccaaacttaggaatctaaaaccaaggtcacctcacattcaacatgtcccaaatttaactcattgtaaatacctcaaaactatcttgccatagctactggaacaactatcacactggaggcaccttagtgtagggtctacagatttattgagagggtgtgtggaaaaaggacccagctgtattccattatgaaatgaacagcaggtgaaaaagaggaagagccaaatgtaaacaacaatgcaagagtctggctgggaaaaggagaaacagaaatcagatcttactccagcctcatctttgaaaactgaat

SEQ ID NO: 140144 - DNA, 790 bp, Homo sapiens
actctctgatagtaatctgtggacaggtcacccctgtggctgcggctttttccctagggtaagaggaagtagtattttttaaattagcctaggagggagccaggtagagagctctgagatgagggtggggagcttcagctcccagccgaagcatcctgatcatttcattacaagatcaccttctcctgtaggtgagtttctgttgttttaatcagaggtaacgttgtgccctgactatgttgtataattgtgtgtgaattatattccagctccatataggcgagggctatttttttccttccaattttaaagctatttagagggaaggccaaattgtagcttgaaccctggtgctctctggctaatagctatatacagggagggagaacttggaggaacatttggggttatatttgtaattagtttcctttgaagttaaattaattttagcaatcggcaacgtaaaatattgttatacctttttccagtggtcacctgtgggtgacctgaggcctgtggaattgatgagagacgaagcggtgggaatggtgggcaggcacactttcttggacatgtgggcttattttaagtcatttttgcattcagactcttggcttagggatctctctggcctgtcatttttttttgacagctttattgagatataattcaaataccatataattcactcatttaaaatggtgcaattcaatggattttagtatattcacagatatgtgcacccatcaccacagtcaattttagagcatttttatcacctcaaaaagaa

SEQ ID NO: 140145 - DNA, 295 bp, Homo sapiens
actgcgcctggctggatttgttatttttaatgttcaggttatcgtccagaaggagctttttgaaggatagaagtttcatgaaatgtggtagtatataaataaggatgatgtttaaattatctatcaaaaattaaagccatggtgtaccatttcaacagtgtttatactttgtttaaagaagaatgggatctctatttatgtataattgcaatattttgtcattttgtgggacctcaatgcagtcaataagatggacctggagaggtggaagataattaactagaggagtaggcac

SEQ ID NO: 140146 - DNA, 144 bp, Homo sapiens
ttaaaggaaaggctatgacccgtcttctacgctctccatcctgcctcctggaacgtggatgtgatgaagacccatcttgatccacgaaataagggaaacagaacttaagctatagatgcaagaagcagagaagtagcctgggtc

SEQ ID NO: 140147 - DNA, 334 bp, Homo sapiens
aggcccagaattgacatagatgatgacggaattagcagacaaggacatgaaaacagctattataaatacattcagaatgctcaagagtataaagaaaaacatgaacgtaatgaaaggaacagaagatataaaaagaagtgaacagaacttttagagaatgatatacacatatctgaaagaaaaattttactgaaagggattacacagattagacaccggcagcagaaaagatgggggaatttgggccaggcacagtagctcatgcctgtaatcctagcacactgggaggccgaggcaggaggatcacttgaggctgggcctctgctctccgggt

SEQ ID NO: 140148 - DNA, 544 bp, Homo sapiens
cactttgggagccaaggcgggtggatcgcatgagcccaggagttcgagaccagcctgagcagtgtggtgaaaccccatctctacaaaaaaatgcaaaaattagctgggcgtggtggttcatgtctgtagtcccagttacttgggaggctgagtaggaggatcgattgtcctgggtgattgaggctatagtgagctgtgattgcactactgcactccagtgtgggcagcagagccagaccctgtctcagcaaaaaaaagaaaaaaaaaaaagaaggaaacatttgaacctggagaaaagcaggaagaactgtagcaaaaccataaacctgtcacccagactagctgaagcatttcacagtaaactgcagacactctagctcttcactcttacatacgtcagcattccttttcataaaatgatgttttccaccagaaccacaatgggagtagactgaaacatcaccacacagtaccaccatccgtcacacctaaagcattggacaggagtcctccgtgtcctgaaatgttcacttgggtacttcat

SEQ ID NO: 140149 - DNA, 271 bp, Homo sapiens
tacatttcacatggcaccctttggctggagctgagttgttgctgtctcctccatacaggtcatgtgccttccagttcagtaagatcccaccaccataccccaacttagtatttgaaggggtaacccctgctcaatagtcacttgttgctttgggtaccaaacagaatgatgttccccaagctcagagctgacagctcttggttactgctaaaaatcagttcaactgtccaagtaccattttctaccactgagtatcccagtaaaagtattt

SEQ ID NO: 140150 - DNA, 315 bp, Homo sapiens
ctgggaaaagatgtgtgttgcaattttacaaatgggattctctatataaaaatagtataattctccactggagtgataatgacacaaagatgcagtgtatgtgatatgttttatggaagagttgaatatttttgttttgctatgactttaaatagtttttccctcttaatgactttttatcccttccagcgcaacagaaaatttagggagatagcattcttttgcagttagatttattaatttcccagtaattattatttcaggttagaacatatgccttgtctctctctaatacataaacctgttttttaatag

SEQ ID NO: 140151 - DNA, 221 bp, Homo sapiens
ctgatgagtccccttctatattgaaaatgctggtagaaacactgaagccaggaaagcagaggaataaaggagggcagggcattgaggaaatgaggccaagggtagagcgatcatacttgaacctgccaatcgtgaagcaggaatctgtgctgccttgggaatggagaggctggggaggagtctcgagccagccctttggctgtggccagggatgggtcatg

SEQ ID NO: 140152 - DNA, 423 bp, Homo sapiens
cctgcagagaaatagccaaatcagtgtgaactactggcttttatatacatatgttctcacatcagcttactcatgactgccttctaaagactgcctctttcaggaatcctaatagaaaaagcaactaagagaaagaaaatgaatcacgtcagaggttacagaaattataacctacaccatctttcacaactagaacatcatataaagctgtttcattatttttcttactccttttacacatttttcttactcctctttgtcttgttcctatcagcccagggactctgttgcattttgctttactttctggtgtttgtaatataaaaacaatttatctattgtacatgttttccatttccagtacatacacatgcacaaaccccaccttcacctcaggctttgatttgactccaccttcaagct

SEQ ID NO: 140153 - DNA, 340 bp, Homo sapiens
gggtataccatagatggagaatggagagatgggagtcagggcaagatctcccaagatgaggccctggcacagcccccttcacctttcagcttctgcccgccctctctactctcctggctgcacttgttgcctgggtgatactacattctccacattctccaaataccagtcccaggggctctgtcagcgggaggggctgttcttgctgcagttaggggagagcctgcactgaagagagaggttgcactgaagagagaggttagcaagggagacgaagtgttgcaggtagcagaagcgggggagagaagaaggagagaaagggagatttagaagaaatgag

SEQ ID NO: 140154 - DNA, 506 bp, Homo sapiens
cgggggattaagtgtggggatgggagttgatatttttggaagggtagacagggaggaaggtatatgagtctgctaacactgccataacaaaaatagcacacatgcctggcaaatttttgtatttctaatagagacagggtttcactatgttggccaggctggtctctaactcttgacctcatgatccacctgcctcaaccccccaaagtgctgggattacaggtgtgagccactgtgtccagccaatttttgtatttttaatagagacagggtttcaccatgttggccaggctgatctcgaactcctgacctcaggtgattggccccccctcggtttcccaaagtgcagggattacaggcgtgagccaccacacacggtcagctactttttgtttttgaggtggagttttgctcttgttgcccaagctggagtacaatggtgtgatcttggctcactgcaacctccgcctccctggttcaagcaattctcctgcctcagcctcctg

SEQ ID NO: 140155 - DNA, 533 bp, Homo sapiens
agaattccagtagcttcctccagcaagactgcacaggttagtttgggagccaccactcctgagctgtggtttcccttgccaagtcagactccttgggaaaactctaaaactaaggtggcctgacatgctgcactaatggagaaggccaggaaagcctggattctgtgtgtcctcattgtgctccctcatcgatacactgtctctcaccagcctttggaatttccttcctttggttttctgccatttttttctacttttgctgaacttgagtctgaggctttcactgctcaaaccgcccttccaggttgtatttaacagggcttaacaagcaccaccaggctgggcgcagtggctcacgcctgtaatcccaacatattgggaagctgaagtgggaggatcccttgaagccagaccaagcaacatggtaagaccctcttgttcctggaccaaactgagggttgggctgctatttctcatggcccagtaacaagatgcagatgaactagggaggaagagagtttttatttctgcaa

SEQ ID NO: 140156 - DNA, 189 bp, Homo sapiens
cctctgggccacttggagttttccatgtccttccacgtcctcccatgcccttctgtgtcctcctggtctgcacggtgcctgtggctcagtcctcagacccggatgatctcatccagtctcatggctccttttgtgctgacagttcccagacatctctctttagccccagaactgcagactcagccctcc

SEQ ID NO: 140157 - DNA, 423 bp, Homo sapiens
tcatatatcagtgaattaattttggagtattgaaacgtggaaggtgctgagtgaacagtatcttcctagaactaagcattaggcccttgaatatttcacctcctgcaaggaactgacccagaataaaataagtggcaagtggaagatatttctaagaagggcttataggtaggtacctgggatgcaaggtggggagcaagcagagtatcaggaaggtgtttaaaagtagccagcactcttctagagaaaggtgggaagacctccaaacacatcttaccaatgagatctcaatacccctagaggcaaatcaacaacaggttatcaaagtaattcataataggagtttaccaacagagtttaccttaccaggtatagttgataggtcaaagagagcttgataaactaaatagagatctcattggt

SEQ ID NO: 140158 - DNA, 427 bp, Homo sapiens
ctcctcactcccttgctggctcttttttgtgaacttgaccttgaacatgttggcacattctggagctcagtccttactgtaccttgttttattaccctctcattcccttactgatctcatcctgccttgggcttttaaatgccctccagattccaatgactcccatgtacgcctccagcctggacctctgtcctgactcctgacctccaaccaggttttcaacgtggatgtcaaagatacctctgctcacatccaacacgtccaacactgaactcctcatctcctcccacctccctgtctgggttggtggctgccctgtcttccccatggcttgggccaggagcctgtgtttgttcatggttcctttttctcctgcaccctacatccaatctgtcaggaaattgtcgttccattgccccagcgcatc

SEQ ID NO: 140159 - DNA, 177 bp, Homo sapiens
agcttagtataaagacaaaggaggagtctgaacgaagcgaccacggtcttaggattcaatcacacttattattaagtgtgacgtgcatgatgtggcatcaagtactggcttctcttttggaaagtccaaaatattttccctagaatggatgctcttggagtcacatggccagaatta

SEQ ID NO: 140160 - DNA, 258 bp, Homo sapiens
tatgaagtgcccgggctgtgtttgtgttactgacggcccgtgatcggctatcttctctcttgtctcggagtcaaataagcagggggattgttggatctgtccccttcacctcccttctgtcgaaggatctcacgctcacattgtcttacttttctctcgtttttcctatccttttaatctgatctttaaatgtcagtctctgttctcatcttcctttttaacgagtgtgggtttctcatgtttatcttgctctccttt

SEQ ID NO: 140161 - DNA, 427 bp, Homo sapiens
tcctcttttactatgggtggaaaacagttgaggttagacaccagccaagttcttgcttttaagtttcagtttcagaagaacatctgagaaaaaacgaccaagtgaagccttttctggtttcacacctagtaagtccttgatacttaggccagcatcccattcttgctgaatctgaaataggcaacacctaactatacaggctctcatctacttccgaaggctaatcctccaggggcaagccagcagacgtgggcaagtggtgataacatccctgagacagagggactacaagcttcactatcatttctgagtgagttttaattttcagatgatgttagtattgtttggcttcttatagtagtcttttggttcagtacctgctaattgcttattgtttattattaatattatagactatatttttata

SEQ ID NO: 140162 - DNA, 391 bp, Homo sapiens
gaggccctgccctcccctgggcttggccgtggctccaggcctggcgtccaacttctctgagcaggagcctcctgtctgtcaaaaggaactggtagtcccttcctctccctcactgtgggtgtcgcaggatcctgggaggagatggtgtgcagggcctggtggtgtgaagggtgacaggcgtggaggggactactgccacttcactggccacctgacgtgggcccagagtttgggtttcatgggagagcctatgaatctcccagaatggtttaaaccaaaaggtttttgcacgtgcacttgtcagtgggagagcatgtttttcacattctccaagggggcacgtgaccctaaggcagtgtggcacagctgatttacaacaaggttcaatagt

SEQ ID NO: 140163 - DNA, 467 bp, Homo sapiens
ttgtctctgtgggcacctggattctgcaccgcaggaggagagctggccgtggcccggccaggaggggagtaaacacccagcccagccccacctgcccccatctgtgaatagcaggagggtctctataggcaccctgggtctaatcagttgtgtgcgggccacacactgagtccgtactcagcaccagcctgggcctttttgggatcctgcagagaggaagagcaggccctgccctcacagagcactgagtgctggggaaacaggcactgcacagattgacaggcacatatgtgggtcaacaggctccataactggaggctgtggctgtgctgtgaatggaaacacacacatactaatgcacacacacatgcacacacaggcacccacacacgtgcacatacacacaggtacccatacacatgcacacacacgtgcacacacatgaatgcacccacatacgtgcccac

SEQ ID NO: 140164 - DNA, 109 bp, Homo sapiens
tcaactctcagagctcagtgaatgaatatcctctgggctctgactccatttccatcaaggcaccctgtattacaatttcccctggcctcagatttgctacagtgagaat

SEQ ID NO: 140165 - DNA, 520 bp, Homo sapiens
agaggatcctccgggggccttaaccctatgcacagggattgtgcccagagcacatacccatatctcattctctgtagcaacagccacacccatgccccaaccatttaatagcttctcagcctgtcctattctaaggcaggaaagggtcggtggcagttccagccttatcctcaaggtctgacacaatcgggcttttacgaaaggcatgttttactgccacctgggtctagcctagtgaccctgagaccctgcctcttcatgactcctaagcccatcttctgtgcaaagccccagagctaggggcttccagaggcatttcctgccttattctttgtgccttaatctgtgtcccaggatcctgcccttgcgctcaggttctctgggctcctactagtattccccaaacctggtgggtgctgctagaccacagcttgaactcccaaacacctgcaacaggcccccaagagttggacttcccattcacgtggattttagaactaagcctacttctggatttccc

SEQ ID NO: 140166 - DNA, 239 bp, Homo sapiens
ggacagggatcagccagtggagagaggcagaagaatgggccccgggatatggtgagtaaagccaagttgcccctagacctgggacttgggcaggataatacagccaggggaagcaaccatgtggacaacaaaagagggaacagatggaggtcagctgagggacagtaggctgccatagcatgggaaacgtcactcaacttgggaccaaactgtagctaaccaactcccatagggcatct

SEQ ID NO: 140167 - DNA, 424 bp, Homo sapiens
ttcacaggtccatgttagatatttaagatagtatcaattcagagagttcatttaatttggccataccaagctgacaatgctgagatgggttgttgctgacaaatggaagacaccaaaaggccataactcaaaatgtttaagttcactacaattcatgcagattacaatggaaagtcactaataaacatggcatcaatgaaaagtgaattaggacgtgtgatttttgcttgtgataacaatttcatcagctcactcagcctacatttctacataaagacgtctctccaatctagtggatgtctgaggcatggtggggatggggagcaagtggtaaagtcaacagtccttcataaattttcttacattctcatttctggtcagaattgttttcacataagaaattttaaatcaacaaaaccatcct

SEQ ID NO: 140168 - DNA, 353 bp, Homo sapiens
gtttcttgtgatactcatttagtctccttgtgcacagaagttgttaactggatctattagtttcatttatcagaaagtttggttacctcttttcttattactgtggttaagggcttccatagcaagaagacaaagaaaaatgatcaagaaggaagacatgaggaacaagtgccattttaatgaaaattaaacctagcaatatgagataataaggaagtcataaggaacaacatatttatttaaaacccagaacaaataaatatgaattgcttagttacattcatttattgtagaagcagattcagtattttctttgattggctttgtgtttttaaattatattaccagtgtcc

SEQ ID NO: 140169 - DNA, 422 bp, Homo sapiens
caggaggaagggaaggaggaagggagagagggagggagaagggaaaatgtgtgcaagcctagggagcttgctgggacacaggaagtgcctctaaatgggcccacacaaaaaacccttcctgatactacagcctgcagcttctctcatccttctcatctcagcttaaatctctctcccggctgtctttgccgctaacaaacatagaagtcagccagtgcaccagatgaccaagttgccagattgccaacagtgtttttcagcaatgtggtctctcttccactcctccatccaagtctgtccctgaacctcttgaacctgctcaggccagtcacacacctgcctagagctggatactccagcggctttactggggacctggccgtgaactctgtcatttctccagccgaagcagacagctaatc

SEQ ID NO: 140170 - DNA, 503 bp, Homo sapiens
ttgtacatgcacagaagatctcacgaccccacctcataaaagccatctagtggatgtatgtggttaacaatgccctttcaataaatccttggctggacggacgctggggcgggactctctcagaagagctgccccatggccccactcagctggaattgtctgagaagttggcttcacagcagagctcacatctgtggtcgacctggagagtagaaacccagggtgtcactgccagcactcccatcagagtcgggagtgcatcttttgccaaagcccagaaatctcagtgctgttgactccctctgaaaacgacctaagggaacaacacaggaagaaaaaaatgcggttgcacgtttctcattattggcaaagcatccctagagaggagcgggagccatcccctcctcccgttcatgcttcttctgggtgttctgagggtgtgcagggcaggagcagcaccggattcctcctctccagcctcttccgaccttccagtgacccac

SEQ ID NO: 140171 - DNA, 162 bp, Homo sapiens
gcaagtgatagagtaaggagaatgactggaacatggtcggttatccatgactcttaagaagaaggtctacagtgaaaggatactaagaaaatactaagaaaattggtctgctctggcttgttctgggaaatgatataactgtgtcagtctgcaataaaaaat

SEQ ID NO: 140172 - DNA, 312 bp, Homo sapiens
acttactgcatttgtgccaactttaaggagacttcctagacctcagaattctcatctgtaaaatactggaacttcattaaattctgtgtagagttccatctgatgctgcccaatctagtgcctgggccttccaactgaaatataagagggaatgtttttggctcaaaaaaaaatatctagataaatgactcactgctctggttcactgatcatacatacatcattgtcatctcctttgattatggaaagaatgaaaaaaaattatcttcttaagttacattccaggaaagagccagcagacctaagtatatt

SEQ ID NO: 140173 - DNA, 715 bp, Homo sapiens
tttgtacttccttatcttatggcgactagctcagtgctgagggcttggtatatgcctactgattaatagtgttcatcattcactcatcaaatatttttggttccagtatgtgcaaggcctgtactttgtgctatgggggaaaaagtgacacaaagccaaccttcaaggagctagtgagcccaaaacaaaaattagcagggatttttgtgtgttatgatgactgctatatcccatgtgctcacagagcttacattcttgtcagaggagacagacaataataagataaattgtaaaaaatagactatgttagatagtaataaatactaaggagaaataaaagtagaaaaaggatatattaattaccagagaaagaaagataaggtaaatttacataatttctcatcccagtttccacaactctagaacagaaaaaataaaagtatatgccttatatgattgtgataaggattaaatgagcttggatatccatatataaaagatggaaactagacccctatctcttgcaatatacaaaaatcaaatcaaaatggatcaaagactcagatatctaagacctcaaactatgaaactactacaagaaaacattggcaaaactctgcaggacattggagtgggcaaaaatttcttgagtaacacaagcacaggaaacaaaagcaaaaatggacaaataggaccacatcaagttgaaaagctt

SEQ ID NO: 140174 - DNA, 454 bp, Homo sapiens
acttagaggcttccccgggaagccttggttaagaaagctgtgaaatccacggtcactgtaccgcaggaagcacttccaggaccttggcttgtgcagtgctgctctgtgaccatgtgaagagtctgcgctggttggcagactggaaaatggaggtgtcttgctgcctgagacttctcagattgtgaaagagagacacaaaagtcaaggcttgcatgttctaaagtttgttgtgtccagcaaattcatcttctagatttaaaaaaatgctttgttttgagctccacaatgagagaactttttctcacgatgtagtgtgaaaggaaattccaggctaggaaaggtgcaggttgtcgtacactctgcagaaggagagctcaccatagctagaccactgcaacattcaagaactcctccattatgagattggacatgaaaatagaggagcccagcaggc

SEQ ID NO: 140175 - DNA, 241 bp, Homo sapiens
ggggttgaggctgcagtgaactgtggtcacaccactgcatgccagcctgggtaatggagtgagaccttgtctctcagacaaaacaaacaaacaaacaaacttctgaataatcttctttggctaattttgcacatggcctcaattaacactagttctcctaaacaagcctagccacaaaacgaattccttttataaagtcactaaggggcgaatgtagtctggattgggatgggagcgtggt

SEQ ID NO: 140176 - DNA, 160 bp, Homo sapiens
cagagaaagatgacagttgacatttcatacaggcagctcgagccaccagtcttactttgtgaacatatgctgtacagggagtgagatggaaaacacaaatctactgtgctctcaactgtgcgcattcccacacgcctcttccagtgtgagccccttcagt

SEQ ID NO: 140177 - DNA, 474 bp, Homo sapiens
tcagctgtagatacttacccagagtatcttttaggagtatggtgttaggaaattattggacaattcaatatccatcaccatctgcatcaagccaatgcaactccttatcttccctcctcatagcatttatcacactctattgtgatttccttggtatctgtctgtttctccccaattgtctctgagctccttggagcagagaccattttggtcttcatctttgcattattccttttacttcgcacaatactagtcatgtcggtgagggctggctaaacaatgttaaatgaacgaacagattagagatggctccaaataaggaataacataaggtgattgaatgtgagtgctgtgaagaaaaggtgctttgagaattaatagcataggccttagaaagaccaaagagtgaaggcagacacattgtgagtggcattgactgtgagatatggccctggtctctctgagctaaccagt

SEQ ID NO: 140178 - DNA, 155 bp, Homo sapiens
agcaaaggctgctcttgtacagcacaggcagcttcagggtggcaggcaccatggcctataccaggggctacagcatgcctgccaccctgcaggatatggctgacaggatgggcatgaacctgctccttaattctaagcaatggctgtgagcaaat

SEQ ID NO: 140179 - DNA, 129 bp, Homo sapiens
cctgtcttcccatttggtgcacttttctctgattgatctctacccttcaactattttacatacacctactctttcctaattggttttctaccctgctgtgcccacctctgagtggtgcctctgctttag

SEQ ID NO: 140180 - DNA, 352 bp, Homo sapiens
  misc_feature (335)..(335): n is a, c, g, or t
  misc_feature (338)..(338): n is a, c, g, or t
ttctagctcggtaccccacaccacctgagtccaggataacccttggtgaaatggctcatccttggtgttttcttttgtagaaagacttgaaagtacgggtttactttccatctcgtgcttttctgggatgtctcagctgcctgacacacactaaacttttgaagatttgagttttctcagtgttgcggcagctttgtcagctaaaaacagtttgatgctaaaggaagcttaaaagggttctgtgttggggaaaaacaggtttttgatgtctgtcaaacactggactttaaacttttctggcttcttttcaatcacttctcttttaaacaaataantancagattaacatgag

SEQ ID NO: 140181 - DNA, 412 bp, Homo sapiens
aaattgagatgaatgcagagttttagtaaagaagtcagaaatgtattgaatgaaagaaagatccaaatagaaagtctcttggagaccattgatttagttcttcacttttcagaagaagacatgaaagtccagagaggtttgctccaatgccccaaatcacataggcagagttaggagcacagagaaaaccagaattccggtttcagactcccagcctagtgttgcttccattacgccagtgttggaatccagccgccactgttagctacctggaaaacctgggctggtctcaataaccctggagcccagttttatcatcactctatctcccttagggtagcatcgctaagagcatccaataaaattgtgactgttaagtaccacgtaaatagccaagcaattttcaagtaca

SEQ ID NO: 140182 - DNA, 277 bp, Homo sapiens
gaaccaggtcctgtgggagcagctctgcccttgagaggagggcacagggaagctgaagtgaagtaggaccagcatgtagggggcagaggcagaagaacaggatggcaaggcagtgctgggcatctgcctgagtcacggccgagtggctgtgcaggccctgcaggtgggactctgcagggatacgggtagccctgtccacggaggatcgccccaggccaactggaccaacagaaccaagccccggagctggtgcctgacagttcctatttttggcaag

SEQ ID NO: 140183 - DNA, 378 bp, Homo sapiens
cacaaaaccaacagtctactcttcctgtccctaactccaaccaaaaacacacacaatgtaaaaatctaatttatttagaatgaaaactatttaggtaaatttggtggctttcaactatcatattagaatatataatcctagaaagtttaaaaccaagggtaagaaaatgcagtttgtagggacatacacttccacagatcaggatttttgagatcccctaaagagatcctactatacaagagtgcagtactccacacattttcactcaagattttatctgtcagttgcaaagactttttcatttaagtcaaagcaactgttccttaatagatcctgctcaatattccctgaagaagatcatcagccttacaaataaaa

SEQ ID NO: 140184 - DNA, 330 bp, Homo sapiens
gctgcttactccccacaggatggtgagcagggcttctcagaggaggtgggaaattctcccgcggtgggtagagtgaggaatgttttatgggcccagaaaatcaagagcagcttcacacatactctcatgtctcttatctttgagccactcagtggctcttgacccagtcaagggctgccgatgagaattacctggagagattgaaaacgtaacagattcagagatccagatttagttggtctccactggaatgtttttttaaagttctccagatggttctaatgtgcagctggagctgaggaacttactgaagcaaatgcttcttcctcc

SEQ ID NO: 140185 - DNA, 355 bp, Homo sapiens
  misc_feature (170)..(170): n is a, c, g, or t
ggaatatcggagagagggcctgagatggcaggagtaataacatccttgcccccagctcccccggctcccccagctgctatgcacttcagcctgcttcatcttccccctccacagcactgattgacgtgacataaggtacactctcttgctgatgtgttgatgacctcctnacccccaaacagtatgtaaactccatgagaactcatattctgtctactgctgtggccctgttgcctaggacaatggctagcaccaactgggagtttaagtatttgtggcagaagctttggaatgtatacgacctattagacattacctcttttgtaaagaatttagtttattctgtgctactcaa

SEQ ID NO: 140186 - DNA, 174 bp, Homo sapiens
ggttcacctttctgtgatccctcctgaaactggattcaccgggtattttcctggtgagttaggctttctcttctgtgaactgcctgtcttatctacatctttcgcctattttcctgttgtgttgatttgttttgtctgtttgtatactcttgacaccaacccattcttggtggt

SEQ ID NO: 140187 - DNA, 433 bp, Homo sapiens
aggcactcaggtgcatctctgcagtggcatgccctcgttcctggtcaggggacgttcactctcaggcatggaggtgcgtggaggcagtattcccgaaggtacccctgtacaggtactggctgaagtgtgttacctgactttgtcacctggcagaggtttcactactgtcaagttattctttttctcccctcttcgttattggaaagattttcgtctttggaagaaatccatggtgcacagccctcagggaagaagtggggagttacaatgctccagctctttcaagccacaacaacaggtgttatttggaatcctttttcatgggatatttgtctcttttcttccacttactaacttactcaaccatttattcatattagaatggactcatgcctcattatcctttaaataggtataagatccttaatgattt

SEQ ID NO: 140188 - DNA, 127 bp, Homo sapiens
catgaggaatgctcagatccatctgagaagagtctggaaacccacatcttcatttcccaccatggccctgtcaggggagaccctttgtcctgtaccttcctgtcgtgttctttctacgtttcaccca

SEQ ID NO: 140189 - DNA, 131 bp, Homo sapiens
catcactcatttcttggaaaatcagattcccaactcaaaaaattagaatatatgtcaacgtatttcccatgataactctagcctatttctgagtggggatacctttgtgtagtcagggcattgcaccctcc

SEQ ID NO: 140190 - DNA, 173 bp, Homo sapiens
gggatgggaaggttgcagtgagctgagatcgcaccactgcactccagcctgggcaacacagcaagaccctgtctcaaaaaagcaaatggtctaaggacttaaaagagatatttctctgaggaagatacaaaaatggccagtaaccacatgaaagaattctcaacatcattaga

SEQ ID NO: 140191 - DNA, 101 bp, Homo sapiens
cctcagttcatggtacagcagcagacacctctgaatacagccacattctccataaagccatgatctaagctctttaattttggctctctgggttaggataa

SEQ ID NO: 140192 - DNA, 148 bp, Homo sapiens
gttttatattcctttcatgttttcagaattcctgaacacacttacatttgtaaaattaggttgaaaacagatgtgacaacatgggtacaatctatgcatttgctgatcactgctggatatttcccaacatacttacacatggagcaca

SEQ ID NO: 140193 - DNA, 410 bp, Homo sapiens
aactcttctgctcgtctctcctgtgttaatagcatcatcgtccttcgttgtccaagctgggaacctcagcagatttgcaggcattttcttctcctttaattcccacataatttttttaaattatgtatgttatctctaagaattttctgtttccacagacatagttcagactcattttttacttggacagttgtaagagccttggataaattatgggttgagtagaatttttgcaggaaaaggggatttggcatgggactcctttatatgtatctctttgtcacaataaaattaaaaattatggatatgcttggaaaaatgttaaggagactctaatattaatgaacagagtgaggtttcaaagctattgagcaagagaagcaagaatgcccccaatccccctgtcaatc

SEQ ID NO: 140194 - DNA, 628 bp, Homo sapiens
actcttggaagaaaagatagggagaaatattcacaacattggatttggcaaggatttcttggagatgacaccaaaacacaggcagtaaaagtaaaaatagataaacgtgactacataaaaattgaaaattctgcatcaaaacacaaaatgaacagagtaaaaggcaacctataaaatgagagaaaaccatttgcaaatcatatctaaccccacaatatataaagctcctataactcaacaacaaaaaacccaaataacccaattttaaaataagcaaaggacttggataaacatctcttcaaagaagatacacaaatggccaacaagcatataaaaagatgctcaacatcacaaatcattagggaaatgcaaatcaaaactgcaatgagatattatttcacatccattaggatggctgatatttttttaaaaacagaaaataacaagtgtcagcaaagatggggagaaataggaacatttgtgcattgtcagtgggaaaataaaatggaaaacagtatacaggttcctgaaaaataaaaaaatagactatatgattactatatgatccagtaattccactctgggtatatatccaaaaaagttaaaaataggatcctggagaaatatt

SEQ ID NO: 140195 - DNA, 267 bp, Homo sapiens
tggccaccacgcccagctaatttttgtatttttttgtagagatgaggttttcgccatgtggctcaggctggtctcaaactcctgggttcaagtgatctgcccaccttggcctcccaaagtgctgcgattataggcacgagccactgcgcctggccagaactgattttcaagtccaatgcctggcaataactttttgctcaggagaaagggtgacctagtactaaagattctgatcaagataccttagttgtagtttaatttcccctg

SEQ ID NO: 140196 - DNA, 968 bp, Homo sapiens
ttttgagacagagcttcactcttgttgcccaggctggagtgcaatggtgcgatctcatcttactgcaacctcttcttcccaggttcaaacgattctcctgcctcagcctcccgagtagctgggactacaggcatgcaccaccatgcctggctaattttgtatttttagtggaaaagcggtttctccatgttggtcaggctggtctcgaactcccgacctcaggtgatctgcctgcctctgcctcccaaagtgatgggattacagatgtgagtcactgcgcctggccaactgctttggtttctgagtcctccctcctctaagcccgctcagtgtgtgtcattcctgggaggcggtggctctcccaggaccccatgccgaaatctgccttcttcttgtcttcattcccccacctgggtacccctcagtgttttcccattacacagattcacgtttacatgttctagaaacatctgtaagtctttttcctgtttgtaaattgtatatcctctgttagattaaaaaacttttaaaagtaagtgtctttctctgtggtgacctatttgtgtggcatagtataggttacaaagcccttttcatgcattgttttacttataagtaatgtttatagatgataccgaggtagaccctatggggtgcttactatgccaggtctgttctaagaatgttatacacattaccttactaacccaccccaaccatccattgtgttattgtcacccctgttacagggtggagagaagaaggcagagagaagtggaatgacactcctgaggctaggcatttgccaagtgaggtctgggatttgaacccaggcagctgaacttcagaatcctggtgtttaaccactataccatgctggccttcatgttattgagcaggataaggaattgtcactcttgacttgtttttgaaacatgaaaacccttctcttaaattcaaaagtaata

SEQ ID NO: 140197 - DNA, 285 bp, Homo sapiens
gctgagggtggagcgaggggctggaggaacaggatgtcgtagcacgggtgccaacacagctctgaggagctgggaggctggggtagggctgagggcagggcctgtggctgcaacagctgcagactcccactttgcccacaagactcctcgttgccagcaaacgggtgtggcctgtagtcctcagtcaccctgggagtcctgcttggaaagcaagctttgctacatgcaaagggcaggagactgatttgtgaactctggtgttggtgcctctggcagagagggggg

SEQ ID NO: 140198 - DNA, 475 bp, Homo sapiens
cttataaccttataacagctctgtgaggaaagctattattgccatttcatggatgaagaaattaaagtacatacagggagtaaatagctgcctaatatcacagcctttagtaagggtcagtgccagattctgtactcacttttctgatttcaaagcctgtggtgctaatttgtacaacactaccttgccctttggcaagtatttcttttgctgaatagagacgtctcccattcccttctgaaaggaagactcttgtccatggagatttgtaatttagtaggaggagcaggtgtgctgagactcaggtgcaaagatttaaaagaaaacagacatgctatttccaccctaggaagaacttggatactgaacatgtttattcttgacgagcatcagtggagagagaaataacttgttgcaaaatccctccccaggagctcattcgtatattagaaagatctaagtagtgaagtaatga

SEQ ID NO: 140199 - DNA, 356 bp, Homo sapiens
gtcctgtagtcatctaatgagactataaatcagtttacaactgatactttagaagcatattttttgagtaaggtaagggatatagaacatgcagcatgacagtcccctatctcctgctctgggttgcaatggtctctttctccgagtccgaacagtcaccttgacaatccttgatggcagtagggagcatttaatccaactgtgaaataataaattagctgtggagtcaccaccagaacagggaatcctggctttatgcacctggctagtttgcactccctgtgaaaccatcacggttccttctcattgcagctgagctttctgaatcttttaagaactgaattgatgggatgtgg

SEQ ID NO: 140200 - DNA, 299 bp, Homo sapiens
ctctgtgcaggccctcctgtgatctttgctaagtgaatagtcattatgaaatcaaacagatgaagtcagatatcttggggaaagtcacagtcaagtctgtctttaaactcagaacatttctattctacacgggtacttcttaatcttagtcacttgtgtctgggttaagcccttaaataacttataccagtttccctagcattccttcctgcaacctagagattcctaattatgataatatccctgatggaatgcagtggttcccacatctggcttgtccccagcaaagaattgaggat

SEQ ID NO: 140201 - DNA, 337 bp, Homo sapiens
ttagggtgggccttaatttaacctgactggctttcttataaaaggaaatttggacacacagagagacaccaggggtgcatgtgcacagagaaaaggccatgaggacagagagaaggtcccatctgcaagccaaagagagaggcctcaggagaagcaaaacctgccaacaccttgcttttggaattctagcttccagaactcgaaagctagaagataaatttctgttatgttattttattttagtatttaaactgtctgtggtcttttgcaatggcagccccagtggactaatacactgggtcaagaaattcagaggcccagagaatggggctgagta

SEQ ID NO: 140202 - DNA, 422 bp, Homo sapiens
attctactttgctacaactcagagagccaacaactaaaaacaattctacaggcagttaccatggttaacaaacaccaagagggccatcagggatgtagcagagagggaatggtggaaggtgcctaacaaggcaattcattcatctcttgttcatttcattgggcagtgttttcacttcctggtacccagctctcaagacattccatcaggcgtgagagctggttttctgtttccaacatcctgtagctacagatccatttccaagcttcacacccaccttgcctgtctttcctctgccaacacccacctggccactggtccttaccaacccaagaacagcctatcttttcctggctcctcacttccttctcatgtaatctaggtaatatgttcctttaggaaactgtctgccttatcccaga

SEQ ID NO: 140203 - DNA, 337 bp, Homo sapiens
ccaatgtttccctgattgacaatagttttcctgaaatgtattcttggaatggaattgtatgatacgcttagaaaattctgcataccttatacttcagaatgtgtatgtaaaagactccagtaaatgatccagggaagcaaaaatatttgtgtgttttgcgagttgtattcatatgtgtataaaattcccacagcactttgggtaacaatgctctgcacacttttcctgtgctccttttatccattcccacacttccagcatttcctttgacgtttgattttctttatttttttttactccaatattttcctgtaggtttcaaacctatattttaaaa

SEQ ID NO: 140204 - DNA, 550 bp, Homo sapiens
cttgtgatccgcccacctcggcctcccaaagtgctgggattacaggcgtgagccactgcacccggccagcagttttttaatcataaaattctctcaaattattgtatgccttttggttgatttcaagagtgttaaaatggttaattttgtcaagtttgtcaatcttcataattggtttttgtgttgaagatctgccagtctcctcattcagctatacctggaagtcctccctgttttatttactttttaatgaccgatataacttcatacaatgaagtggaaaaatcttaagtataaaacatatatatgcaaaattaatatatatatagccatataaccaatcacctcattaagatacagaatatttccagagtcccagaaggcttacttgtgtcccttcctagtcaatattctcccttaaaggtaaagactactctgaccttttataaccattgatcagtcttgtttactcttgaacttcataaatatagtgttatataatgtatgtactttaatgtctgacttcttttgatcaatattatgtgtataa

SEQ ID NO: 140205 - DNA, 414 bp, Homo sapiens
gctccggccgccgccccctcttgcagcgcgggaaccggcacatggacacggccccttgtcgctagggacgctcgtcggtcagccccgaacgacaccgctgcttcagaagtcggggcggcagtccgagccttggaggtttttttcagccctggcccgagagagctgctggccaccaccccgtccaagatagagctgtccgctctccgcctggttgttagaaagttctgatagaaagttccccctttgatgctttttgcctcattgtgacgtccacccatcctctcctctcagaactttctttccttagggatctcaacccgaacggggtgagaatgaatcttactgaagaaatctttctgttcccccttcttggtcttccccagacaaaccgtctcgttgaaagtatcttcaccc

SEQ ID NO: 140206 - DNA, 447 bp, Homo sapiens
agtcggaccgggttcctgcccatgttggcaggctggtctcaaactcctggcttcaaatgattctcccacctcagccttccagaatgctgggattataggcataagccactgctcctggcctcattggaactttttagctataggacaaaatctacccatcttggtttgtccttttaaaatcatttgaaaatatataaacccaggaaaataacctcataaccagtgttcctgtaattcccccccaccgcaaattctggacagatggtcagtccatatgtgtaagtctggcttccaatccattgaatttcatgatgtaatgctgagatataggtcccttatttcacagagttccccttcgtaagtccgttgggccatttgagctcctgcagtatggatctggttgcgaagcagctagctttggcggagttggttcttggtccttgcctt

SEQ ID NO: 140207 - DNA, 347 bp, Homo sapiens
taccaacagacacattaactgatcaggatggaccctatatgcacgactggctgagaagccagactcttaattgtttggggcagaaaagggtagaagaaaatccttctagacatgagctaacagatctttctcagtaccctctttttttttttttttccttgttttgtttttgagacaaagtctcgctctgtcacccaagctgacactgaagaagacagatgttaacctcagccacccactcttctgggttagggggaagccattagcaaccttggataaagtatcttctttgggtaaaggaagaaataggtgtgatgactatgttctttggcatttacgtatgaggg

SEQ ID NO: 140208 - DNA, 617 bp, Homo sapiens
aataagattccatctgcctcatcctaataagccatactgttcattaattcataggtttgattccctaaagcataagaaacgaaacacctaaagttcgtatacatagtaactgaaaaaatctctcatcctatatgttccacatttggggaccttaatttagtgctttcacaagcatacatagttgtcttgaagactggaagccttgagcatattactatctagcaaaagggagaaatggaaaggaaaagttgtgagtcccattttcctattctcaatgtgaatctgaagatgggtagaaggaaaggctgaaacagaagtttccacattcacgaatgatgattattaatatttttcacatggagtgagcagggatggctgcatggagctttgaagaggctgcctggtggggacgcaggctctcccaggtgctggttttgaagttaggaagcctgatggagcttggctgttaggcctgtggaagttccttaatgtatctaaggttggcttaatcctgtctaaaatcaaggtattggactagaacaatgaggtttgcagctttttagcatagattcctttctaaaatgcaatttttatggaaaccaaatataaaaaaaaaa

SEQ ID NO: 140209 - DNA, 126 bp, Homo sapiens
acaagggcatgagcttgtctgggctctcagagtaagcatgagtttgtgtaggagtaatagattgtcagcgctttgcccaagaacaggacatctgggttaggtcacaggcccactggagcatcggat

SEQ ID NO: 140210 - DNA, 236 bp, Homo sapiens
aagtgtagcagggcccctgagacagcagctgcaggaaggaccaaccattagcttggacatatctgtgactgacactgacagcctagactccatcagggcaatcacctgaaaggcagattcttcaaggctcagccctgacactgaaataaataaatcctgtacaaaagatgagcaaaagatgaaacgaatgggagaggatgtcactctactctcaaaatatacaagctatagctatg

SEQ ID NO: 140211 - DNA, 464 bp, Homo sapiens
tttgagacgctacttgaagagggtgaaacctgacccaaggaaatctccaattcctaaatccaaggtatttcatagagagtgaaagatagcccagggtgtggtgaatgagaaatggagagagcaggaaaacagaaagaaaaccacagagagaccacagaggtggactgtgctgagtatgctggaaggaggaacggaaaagatagattcttaagccaagcaaaaagccaagggatgctggtggcaatgtaggcatggccttctaagatcttgagacagtctgaggcagctcctttaagaagctgaattcttggctgggtgtagtggctcacgcctgtaatcccatcactttgggaggcagaggcaggatccctgttcacagcaccaacttggccaccgtctaatggggttggccttttgttcttggaacacctgagatcaggagtttgacaccagcctggccaaca

SEQ ID NO: 140212 - DNA, 213 bp, Homo sapiens
gggcacacctgtgccagatgaatccacgccttctctaggggagagagggtatcccggcttaagagcaggggctctcctgagttaaggaagtgtcttccccagagcccattccgtcagacgttcatatcatgtaactcagtccttttctgattatgtattcaccaagcaaacttaagagttggcttgtcaccagacctacagtgaataattgca

SEQ ID NO: 140213 - DNA, 422 bp, Homo sapiens
  misc_feature (3)..(3): n is a, c, g, or t
gtnggtgaccgcccattgcttagtggtgatgtacaataaagagcagagtaggagcagagcgatagcgtacctctactttcattatcatagtctacttagtctgactgttgtctgaaattactattaagcaaaacttgcctttacttaaagttttaggtcaagacctcaaaccaaaagcaaaaacactgccaggcccaaacactgctgcattgagatgaatgaacaactactctgctgtccacagtttaatctgactgtcccttttttgcatttggaaagtgaacttgagtcagatctaagtaaaaattatttgctcctggaatgacagctcatcgtggctttaaaatccttttttagaatgaggggcataaatacataaatatataaaagtaacccccatcaaaaaaatgtaaccagctagg

SEQ ID NO: 140214 - DNA, 523 bp, Homo sapiens
aaagtaagtcaagttcagaagttcactattaaatccagaccctcccaaatccagaccctccctggccccctgcactgtggaaaaaagtgataaactgcattggtatttaaataaaaatctgatctctgccactcgaagatgtaatcatcactggggattactttcatgcatctttaaaattctttcagattaaaagatctgtcagagtgtcaataccaatactattaagcaaaacttgcctttacttaaagttttaggtcaagacctcaaaccaaaagcaaaaacactgccaggcccaaacactgctgcattgagatgaatgaacaactactctgctgtccacagtttaatctgactgtcccttttttgcatttggaaagtgaacttgagtcagatctaagtaaaaattatttgctcctggaatgacagctcatcgtggctttaaaatccttttttagaatgaggggcataaatacataaatatataaaagtaacccccatcaaaaaaatgtaaccagctagg

SEQ ID NO: 140215 - DNA, 327 bp, Homo sapiens
gatcaagtgattctcctgccttcagcctcccaagtagctgggattacaggcatatgccaccatgtccagtgaatttttatattttcagtagagacagggttttgccatgttggccaagctagtctcgaactcctgacctgcctcggcctcccaaagtgctgggattacagccaaggctgaggactttcaacagctgcagcgtgctgccagatttcaggggcctccttactgttaggtataagacttcatgcctcagcttgctcttcctgaggagtggaagcagagagctgctggggcaaattccctcctgcttagctaccctccttc

SEQ ID NO: 140216 - DNA, 257 bp, Homo sapiens
atgtatctcctaagcatggacattctcttacatgatcatattataataagcaaattcaggaaatttatcattaatgtagtattactatctattataaagtccttattcaactttcactgattcatccaatattgtccctgtagagcttcttcccctcatgccccaacccagaatctaatctgtgattacatattgcatttagccgtcttgtctcttttaatctggaacaattcaagatgaattatttgtttttcatg

SEQ ID NO: 140217 - DNA, 490 bp, Homo sapiens
tcatatttgagaatgagattggttgatttgagaatcattcattcatatttgagaatgagaatgagattggtcttggttgctctcagtaagtcataacataagcacattcagaattcacatttaattgtctattttgacgtttagtgataaggttcgtgattgctgggggtcggggcactttttcacccgagtcaatctgctgagcccttggagcctgcggctgtgctttgcagggacaccgtgccaggacacgctggtccctgctgcagctctgcacctgccagttgagcagtcccgtcttggctgccgccaccactcttttcaggtccacactctgaccatcgccttcccttccataggagctgcactgcaggggagtgctcaggtggcagccttcctgcttcgcctgctcactgcaaaattctctcctttatagaaaaccaaaatttcaaagaacagcagatcacacagaaggaataacaaattgtct

SEQ ID NO: 140218 - DNA, 293 bp, Homo sapiens
ctgaccctggaaaaatctgtctcacccacaaagatgtgggctcagctccttctaggaatgttggccctatcaccagccattgcagaagaacttccaaactacctggtgacattaccagcccggctaaatttcccctccgttcagaaggtttgtttggacctgagccctgggtacagtgatgttaaattcacggttactctggagaccaaggacaagacccagaagttgctagaatactctggactgaagaagaggcacttacattgtatctcctttcttgtaagcacagactc

SEQ ID NO: 140219 - DNA, 118 bp, Homo sapiens
ctaggtactattaattgtagtcatgaatttaatgtaaaccctccagtctgttattttctccaggggcagtcagctatgtacagataatacaaacagctggtttcagagttggtgtttc

SEQ ID NO: 140220 - DNA, 247 bp, Homo sapiens
tgaatcggtagttactagacactgtgacaatggttaagtccattcttcatacacctgcatttggtgcgggcctatttcctcctggccctacctcctaccttactgcactgtagcttctggaaggttacaaattccctcacataagcagccactccctggaacactgtccactctgtgtgctggaactgaggcttggctttgtcctgctttgtgtcaccaccctctccaggggaagaaacgcctcact

SEQ ID NO: 140221 - DNA, 287 bp, Homo sapiens
agagagaaagaaaaaaagaaagagcgaggaaggaaaggaaagggaaggaaaggaaaggaaaggaaagggaagggaagggaagggaaggaaaggaaaaagaagagagagaaaaagaagtgggggagtgagagacgaaggaagaaaaggagggaggggaaccccgggcaattacagtaatgtatgaaaaggtaacctacgaaatcagagttaagagccttctccacgccatgcctggtgctttgccatttccacattcaatacgtttttttttttttaatttcttcctt

SEQ ID NO: 140222 - DNA, 688 bp, Homo sapiens
cagggtgcacggaatggggtctgtgggaggatgggggcatcctagcccagggcagggaccccgtgggccccccaagatgagctgcgtcaggctgttgctttgcacactctgaggggcctgcctgagtgctgcatgggaagccagcagtgtggccgccctccccagaactcatccagggcaccagggtggacccatgagtcccgtcgggtcatgggcatcagcctcgccatcctggcctccagatacaacgatttgtcagattccctgaggtcaaagggaagcttcaagggttgccatccccgcctccctggcggtcctagacgggatgtcaggaggacgcagggccatcgctgctttttaaatgtcacagtgactgcagcgtctgctcctctgtggaaggagcttgctccgctaatgagggagttcctcctcatggccttcccctcacttctcttcaaaaagttgccctttattttaacattttttaagttttatttttttgagccagggtcgtgctctgttgcccacgctggagtgcagttgcaatcatagctcgctgcagcctcaaactcctgggctcaagtgatcttcctgcctcagcctcccaaatactgggactacaggtgggcgccaccacacccagcctctgccctttgtaagtgaagtcccccaggcaggttgaacctct

SEQ ID NO: 140223 - DNA, 615 bp, Homo sapiens
gaaggagggattttctgggccttccacccaaattttactcattaagtgtctgcatacctatactgtactagactccagatgtggtctctgacactgttcagtggtcactcttgtagggagagagacaataaataagtgaaacgaatatatttattcttaacagttgtgataaatactaggcagaaaagaataggggaggtcacctctgaagaggtgatatttaaacaaactgaaaggatggagagatagctatctaaaactttttggtattaaggaatttttaaatatatacaaatgtagactagtttaatgaacaccaatatatccatcatcagcttcaattattatcagcatttttgccagttttgtttcatatattctcttccctttttccctgggaatattttaaagggaatttcagatattataagacagatagctagtttaaaaggggaaggtggaaggaactgcatttgtaaaaggcttgaagcaaagtacagatacatgctacaacataaacctcgaaaacattacactaagtgaaagaagccaatctcaagagtcacgtatttgtatgataccatttatatgaagtgtccagaatagacaaatcta

SEQ ID NO: 140224 - DNA, 301 bp, Homo sapiens
aacacagggtgcagggccatgatgacaaagttagaaaccactgagctcaacatttggctgttctgtgttccctgagttaggcagagggtaaggctttgtgagatttgtttttagtactccattaccaccattactgtcacagtaataatcaacactgctatgaactgtcacagctgccacccaccacaaccgccaccaccaccttcaccacaaacatcattatcatcaccacaaggaaaaggactggtacggtagtctgtggaaaccaggaagataaaacaacagcccaaagtgaaaagta

SEQ ID NO: 140225 - DNA, 412 bp, Homo sapiens
tatcctttcacctcaatcaggtcctgagtttatatggctaagtgtcagaccaccagttacttgaaatatagcctaattttgaaactgtgatgcaaagggattatgaaaacttcctctttgttgttttctcatggcttgagaatggcttttgctgtggatttctggatttgcactggagaaaagacaaaacaaaaagaccttcctgcctctcttcttgggctgtttctatagattcttctgcatccatagaacacctattgtggacctcctatgagactggcatacgctggttgcatctgtgtgccagaggctcttctgacagacgcttctttttagttttcaggcttagagaactagaatacttctaggattaactggtgatgaccttgcttgtcttgcagtaatgcttaca

SEQ ID NO: 140226 - DNA, 442 bp, Homo sapiens
gtaatgtatttcaagtacacactggacctgtaagtgccacgctgcctcagagtatctttcaacacacactggaccttgtgacccccacgctgtcctcagagtatctttcaacacactggaccttgtggccccccatgatgtttggagactttggacaaataacagttcacttgtaagtcacaactcttccccactgtctctccccccgcacctcacctctgtgtatttgtgctctgatgtacatttcaattttaagtgattacaaaaattccttatgctggaataaaaataacattgacaggtgctgaatttttaaatagtcaaggaatttctgtcaacttacattttaaatagtttctaaaatcaaaggttaatctatgtaagttttatggttattcatgttttattttcccaaagtttagaaaattctataaagatatat

SEQ ID NO: 140227 - DNA, 562 bp, Homo sapiens
gcacgccataggattccagttctgtgaaactcacaaacaggcaaaactaatccatgagggtgacgtcagcatacctgttacccaggggagagggaggggcatcgggaggcctcaggaatgctggaacgttctgtcttgatctggttaatggtcacctgggggcatatttgcataaaaattcaagttgactattctagatttgtgcttcttactttatagaagttatgccctcagtaaacattttgaaaacataaagaccaggcagaggcagggaagtaggcaggtgtgcggcctgtattggtagcagagtcctccctgagggctggatcattagggaggtagtgggcccagggaggaggcacgggaggttaatttagaaaggtggcccaggctgggtcatggtgggcctcagaggccccactaaagaatcagacttggccaggtgtggtggctcacacctgtaatcccagtacttttgggaggctgaggcaggcacattgtttgagcctggggattcaagaccagcccgggcaacatggaaaaacccgtctctacaaaaaaa

SEQ ID NO: 140228 - DNA, 312 bp, Homo sapiens
ggggcgctctagaggtcccagtttcccatttacctgctcacaaagcctagtttttcagatgaataggaaatagggccaggaattaaagaacaagaacagatatcctccaggtggaaggtactttagagagaaacctgacatgtcttggaaaagaggtcttgcaggcaaatagagacaaagcacctgggctctgccaagttagaatgaagacagcaaagcaaaagaaaatctgcaacaagacaaagtagctccaacttaactagatgcaggttattccaaatttaagtgaaataacagtggggcattttatca

SEQ ID NO: 140229 - DNA, 505 bp, Homo sapiens
tagatataatctcttttgataaaagggtctttgcttctgattagaggagcgctatggaacgtctgtaaacatgtttttataatcccatgtataattggtatgcactcacataataccagtccccagcagccgctcttctctgtatagggccataataggattccgaagaaaccttggggagggagggggagttggaacaaatgtctattccctggagcccagtctggcgctcagacctttagactcattataagttgccactgccaacatgacaccaaagtgtgtgagttgtcaatgcagcgcgacagcattaaagactgatgctaaacctcaaaaaaaaaaaaaaaggaaatatcaaaactattctgacctgaggacaatgggagccttggacttaaaaacaatagaacaggacgggcacagtggctcacgcctgtaatcccagcactttgggaggccaaggtgggcggatcataagatcaggaaatcgggaccatcctggcta

SEQ ID NO: 140230 - DNA, 2781 bp, Homo sapiens
  misc_feature (1)..(3): n is a, c, g, or t
  misc_feature (954)..(954): n is a, c, g, or t
nnngaatgatgagtgtatggtagtaatttttttagagaatggtgttgcttattctgacagattttttagcagtttacttaatttgctgttattttgagaaaacatttaccttttttcattttttaaatatatatttcaggtgatggctattccttgctgaactttttcagcaaccttttaatataatgactagcagttttctgcttttacaaacagaagcatgtgattttcagaaccatttaaatattaacctgattaaccacaactgctgggttttgctttggtagcagtactcactgaaatatgttttcagttaaaaaggttagttctcactgttggttgggtaaatttcaagaaggagtcaaagattataaaaatccacccaaagtacgggtattgtcttgtacataagtaagcacataatttagatgccagctttaaatagttaactatatgcttactgtggagtgcaccaatgaaacaactcattttgttcttttggcttctcaatacttctttgtgacaaagcatcactgtataagataaatagtagcttattttgtgagtatggttgctctatgtagcaagcagttgtgacctaaagcaacccataaattacagatttagtgggagaactggacagttaacaacgtcacttttgctttggactactacttaggtcccttaaagtggtgccagtgccacagaactgaagattcctgactgtagggaatataccatctaattttgagtttcaatagagtaactttgattttagtgagttgttgggaaatcctttagatcattagttatgcagcaaaattgcttggctttaataatcatatgtactggcttattctttctgaaggtaagctacttcggaagcacaactattgactaaaaactaaaccttcgaaagaaatgacagcattgctagttttttgtgtgcgtggntttttttggggaggggggcgtggggtactgtattaaggttagtttccaacaagaattgatgtaattagaagaaattgacttccttacctattgcctctgatatttacttgcttaaatttttttttattggaaatccagaaaaagtggatttagagaacaacactaactcccacctaatctatgacagagatgtagaagagagtacctgtgaaaaatgtgaaagtatctgaaaaatgtaacctttggcagcctgagcatagtcaaccagaaaaactatctgaattaaaataattggtccataggtactattttatttggtccataaggattattttttcaacttttttttcaagtgtattattatgtcatttcccacgtaggttactgatacctgaagactttttccacctttaaccttactcgttgaggagctttgtagtctaataaaagagaaatataagtaaatgttagatatatgggtggataatggtaactatgtgcttaaagaggtataaaagaagggtagggagcagataagacaaaggaagggctatattataaggaagaatattccaagtagggaagagaaaaagatatgttatccatataatattttatgtgcagtagagaacatgttctatagaagagacagaagatgaaactagatgggcacccagatcataaagcaccgtatgtacttaggagttggaattatcttaaaaactatcatagatttcaagcaggggagtaacatttttaaaagaccactttatcattaggatggagggataatcattagtaagctattgccataatctaggctgaagataacatcatgaactaagatggtagtgacagtgggcataaaggagaagctaattcaagaaattttaaagatcttacttgataactatcttgattctgagataagagaggaagaagttgatgatgagatcctggtttatggctttcagttatggcttgctattaaaaaacaggaaaaaagggattgagacaagtttcagttttggacgcatgacatgagatatccaagtagagatatccaagtagaaatatcagtaggcatttgaatatatgccctggaatgaataactgaccagagatatattttgcaactcaaatttttatgggtcagcagttaagagtagaaaatcaacctataagaataccagcatttttagctgggtgtagtggcacatgcctgtaattccagcttctttggaggctgaggcccgagaatttacttgaacctgggaggtggaggttgcagtgagccgagatcacaccactgcactccagcctgggcgacagcaccactttaaaaaaaaaaaaaaaagaataccaacgttttattgccacagaagagctgaggcactgtgagggagcaactttgcactgatgagagcaaaagaagtagaaggtttctgaaaaaatctaacataaattctggacttgtacgatttgagtcgatttgctgatcacagtgttccttattctttggggattttgtttctttttggtgtagtttgctgctgattcataatagaatttaaatatcatagggtctcaattttttatattgcctagtttcattatctctgaacctcgtagttcttcctcttttggcatggcagaactttagtgttaaattgtaacattgaaatattttgccttctttataaagttcttttttcgaacaaacgaaacgaaatttggctttgcctaaatcccatcagcagattgcctttattcagaagcagtcatagacagcatttgattttatgaaaattgaaatgaaagcttaca

SEQ ID NO: 140231 - DNA, 2728 bp, Homo sapiens
  misc_feature (1)..(3): n is a, c, g, or t
  misc_feature (954)..(954): n is a, c, g, or t
nnngaatgatgagtgtatggtagtaatttttttagagaatggtgttgcttattctgacagattttttagcagtttacttaatttgctgttattttgagaaaacatttaccttttttcattttttaaatatatatttcaggtgatggctattccttgctgaactttttcagcaaccttttaatataatgactagcagttttctgcttttacaaacagaagcatgtgattttcagaaccatttaaatattaacctgattaaccacaactgctgggttttgctttggtagcagtactcactgaaatatgttttcagttaaaaaggttagttctcactgttggttgggtaaatttcaagaaggagtcaaagattataaaaatccacccaaagtacgggtattgtcttgtacataagtaagcacataatttagatgccagctttaaatagttaactatatgcttactgtggagtgcaccaatgaaacaactcattttgttcttttggcttctcaatacttctttgtgacaaagcatcactgtataagataaatagtagcttattttgtgagtatggttgctctatgtagcaagcagttgtgacctaaagcaacccataaattacagatttagtgggagaactggacagttaacaacgtcacttttgctttggactactacttaggtcccttaaagtggtgccagtgccacagaactgaagattcctgactgtagggaatataccatctaattttgagtttcaatagagtaactttgattttagtgagttgttgggaaatcctttagatcattagttatgcagcaaaattgcttggctttaataatcatatgtactggcttattctttctgaaggtaagctacttcggaagcacaactattgactaaaaactaaaccttcgaaagaaatgacagcattgctagttttttgtgtgcgtggntttttttggggaggggggcgtggggtactgtattaaggttagtttccaacaagaattgatgtaattagaagaaattgacttccttacctattgcctctgatatttacttgcttaaatttttttttattggaaatccagaaaaagtggatttagagaacaacactaactcccacctaatctatgacagagatgtagaagagagtacctgtgaaaaatgtgaaagtatctgaaaaatgtaacctttggcagcctgagcatagtcaaccagaaaaactatctgaattaaaataattggtccataggtactattttatttggtccataaggattattttttcaacttttttttcaagtgtattattatgtcatttcccacgtaggttactgatacctgaagactttttccacctttaaccttactcgttgaggagctttgtagtctaataaaagagaaatataagtaaatgttagatatatgggtggataatggtaactatgtgcttaaagaggtataaaagaagggtagggagcagataagacaaaggaagggctatattataaggaagaatattccaagtagggaagagaaaaagatatgttatccatataatattttatgtgcagtagagaacatgttctatagaagagacagaagatgaaactagatgggcacccagatcataaagcaccgtatgtacttaggagttggaattatcttaaaaactatcatagatttcaagcaggggagtaacatttttaaaagaccactttatcattaggatggagggataatcattagtaagctattgccataatctaggctgaagataacatcatgaactaagatggtagtgacagtgggcataaaggagaagctaattcaagaaattttaaagatcttacttgataactatcttgattctgagataagagaggaagaagttgatgatgagatcctggtttatggctttcagttatggcttgctattaaaaaacaggaatagagatatccaagtagaaatatcagtaggcatttgaatatatgccctggaatgaataactgaccagagatatattttgcaactcaaatttttatgggtcagcagttaagagtagaaaatcaacctataagaataccagcatttttagctgggtgtagtggcacatgcctgtaattccagcttctttggaggctgaggcccgagaatttacttgaacctgggaggtggaggttgcagtgagccgagatcacaccactgcactccagcctgggcgacagcaccactttaaaaaaaaaaaaaaaagaataccaacgttttattgccacagaagagctgaggcactgtgagggagcaactttgcactgatgagagcaaaagaagtagaaggtttctgaaaaaatctaacataaattctggacttgtacgatttgagtcgatttgctgatcacagtgttccttattctttggggattttgtttctttttggtgtagtttgctgctgattcataatagaatttaaatatcatagggtctcaattttttatattgcctagtttcattatctctgaacctcgtagttcttcctcttttggcatggcagaactttagtgttaaattgtaacattgaaatattttgccttctttataaagttcttttttcgaacaaacgaaacgaaatttggctttgcctaaatcccatcagcagattgcctttattcagaagcagtcatagacagcatttgattttatgaaaattgaaatgaaagcttaca

SEQ ID NO: 140232 - DNA, 2727 bp, Homo sapiens
  misc_feature (1)..(3): n is a, c, g, or t
  misc_feature (954)..(954): n is a, c, g, or t
nnngaatgatgagtgtatggtagtaatttttttagagaatggtgttgcttattctgacagattttttagcagtttacttaatttgctgttattttgagaaaacatttaccttttttcattttttaaatatatatttcaggtgatggctattccttgctgaactttttcagcaaccttttaatataatgactagcagttttctgcttttacaaacagaagcatgtgattttcagaaccatttaaatattaacctgattaaccacaactgctgggttttgctttggtagcagtactcactgaaatatgttttcagttaaaaaggttagttctcactgttggttgggtaaatttcaagaaggagtcaaagattataaaaatccacccaaagtacgggtattgtcttgtacataagtaagcacataatttagatgccagctttaaatagttaactatatgcttactgtggagtgcaccaatgaaacaactcattttgttcttttggcttctcaatacttctttgtgacaaagcatcactgtataagataaatagtagcttattttgtgagtatggttgctctatgtagcaagcagttgtgacctaaagcaacccataaattacagatttagtgggagaactggacagttaacaacgtcacttttgctttggactactacttaggtcccttaaagtggtgccagtgccacagaactgaagattcctgactgtagggaatataccatctaattttgagtttcaatagagtaactttgattttagtgagttgttgggaaatcctttagatcattagttatgcagcaaaattgcttggctttaataatcatatgtactggcttattctttctgaaggtaagctacttcggaagcacaactattgactaaaaactaaaccttcgaaagaaatgacagcattgctagttttttgtgtgcgtggntttttttggggaggggggcgtggggtactgtattaaggttagtttccaacaagaattgatgtaattagaagaaattgacttccttacctattgcctctgatatttacttgcttaaatttttttttattggaaatccagaaaaagtggatttagagaacaacactaactcccacctaatctatgacagagatgtagaagagagtacctgtgaaaaatgtgaaagtatctgaaaaatgtaacctttggcagcctgagcatagtcaaccagaaaaactatctgaattaaaataattggtccataggtactattttatttggtccataaggattattttttcaacttttttttcaagtgtattattatgtcatttcccacgtaggttactgatacctgaagactttttccacctttaaccttactcgttgaggagctttgtagtctaataaaagagaaatataagtaaatgttagatatatgggtggataatggtaactatgtgcttaaagaggtataaaagaagggtagggagcagataagacaaaggaagggctatattataaggaagaatattccaagtagggaagagaaaaagatatgttatccatataatattttatgtgcagtagagaacatgttctatagaagagacagaagatgaaactagatgggcacccagatcataaagcaccgtatgtacttaggagttggaattatcttaaaaactatcatagatttcaagcaggggagtaacattttttaatctaggctgaagataacatcatgaactaagatggtagtgacagtgggcataaaggagaagctaattcaagaaattttaaagatcttacttgataactatcttgattctgagataagagaggaagaagttgatgatgagatcctggtttatggctttcagttatggcttgctattaaaaaacaggaaaaaagggattgagacaagtttcagttttggacgcatgacatgagatatccaagtagagatatccaagtagaaatatcagtaggcatttgaatatatgccctggaatgaataactgaccagagatatattttgcaactcaaatttttatgggtcagcagttaagagtagaaaatcaacctataagaataccagcatttttagctgggtgtagtggcacatgcctgtaattccagcttctttggaggctgaggcccgagaatttacttgaacctgggaggtggaggttgcagtgagccgagatcacaccactgcactccagcctgggcgacagcaccactttaaaaaaaaaaaaaaaagaataccaacgttttattgccacagaagagctgaggcactgtgagggagcaactttgcactgatgagagcaaaagaagtagaaggtttctgaaaaaatctaacataaattctggacttgtacgatttgagtcgatttgctgatcacagtgttccttattctttggggattttgtttctttttggtgtagtttgctgctgattcataatagaatttaaatatcatagggtctcaattttttatattgcctagtttcattatctctgaacctcgtagttcttcctcttttggcatggcagaactttagtgttaaattgtaacattgaaatattttgccttctttataaagttcttttttcgaacaaacgaaacgaaatttggctttgcctaaatcccatcagcagattgcctttattcagaagcagtcatagacagcatttgattttatgaaaattgaaatgaaagcttaca

SEQ ID NO: 140233 - DNA, 147 bp, Homo sapiens
ttgggaagtggagtctgcagtgaactatagtcctgccactgcacttcagcttggggaacagagcaagaccttgtctccaaacaaacaaacaaaaccctcaaagactatatataggctttaccaccaagaaccatctgtggccttatg

SEQ ID NO: 140234 - DNA, 350 bp, Homo sapiens
cctgagcagaagggaactgctctgaaagaaaatcccagcttctggggttgcagggctttgctgattcattcagtcaattgacaagcagcacccacagacagccagatgttaccccgtgtttatctacccggatgttcacaccaggtctatatggcacgggggatccttccatttctctgataggggaaaactgagacttccaaaagtgaagatagtctcccaaggcccacagctttgaagaggtagcagagcctggatttgaattcaggtgaccagctctaagcctggagtttgacctaaggctgatttctcctctgagagctgacagaatcttaatggccaaagcaaca

SEQ ID NO: 140235 - DNA, 166 bp, Homo sapiens
agagcactcaggcttgaggctccagcactgccctagggaaagggactcaggcctctgggacaagtggcccatccagtccttagaaagtaggactctagagccgtgggcttttctgcttcctttctgttctgggtgggtctgtctccaatccactccttgtggccag

SEQ ID NO: 140236 - DNA, 386 bp, Homo sapiens
catctcttggagagactggttgaacctcagggaagatgtcagctccaacactgtatgtgctatttccagtcttcatctaattttcctctttttctctttttctttttttgagacagggtctcgctttgccacccaagctggagtgcagtgtttcaaacatggctcactgcagccttgacctcctgggcaacatagtgagacagacccttgtttctacaaaaaaaaatttttaattagctggttgtggtggtgtgcatctttagtcccagccactcaggaggctgaggcaggaggatcacatgagcctaggagttggaggctgcagtgagctatgatcttaccactgcactccagcttgggtgactgagtgagaacctatctctctc

SEQ ID NO: 140237 - DNA, 983 bp, Homo sapiens
accctcattataggctcacaagagtctctctgtctctctctcagacatacacaaacacacacaaccagccacaggcccacaaaggtctctctctttgtccctgtctgctctctcgcactcacaaacacacatcgataaatagaaggaagaaggggaagaagaagggaggggaaaagagaaattccaagagttgttgttttgttttgtaagacagggtctcgctctgtcctccaggctggagtacagtggtatgatcgtagctcactgcagccttgaccttctgggctcaattgatctgcccgccttagcctcctgcatagctgtaaatttgattttgaaaaaatgttgcattacattattattttttgtagagatagtgtttttaccatgttgcccaggatggtctcgatctcctgacctcatgatccgcctgcctcggcctcccaaagtgctgggattacaggcgtgagccaccgcgcccggccatttaccccatttttgaaagcttggctaatgtatgtgacactgagaattccagctgtgctcctgcagcaagcatggtcactgaccatggttcacctggaagcctcccttagtcctgtgggctcagaaactcattttcttggccccttacttagatcgtttcattctgggaccctattccaagattattaatcacactcaggtggatgtgtaaaaccaaaatgccatttttagtacctgacaactgaagaaacctgctagactggcagctgagaagctggttgtaatcactctgtcctttgggatctagcgaggctttttgggtggagtggccggctctaggagatgaggccttctccatttttttttttttcttgagacagggtttagctctgtcacccaggctggagtgcggtggcacaatcatagctcactgcagcctttacctcctgggctcaaacaatcctcttctcagcctcccaagtagctgggattacagg

SEQ ID NO: 140238 - DNA, 454 bp, Homo sapiens
gaaggaagacagggacgttgaggatgacttttaagcctgtaacttgctgggcttatgaatgtgggttgtattcactcaaaagagaaaactagaagcacaggagcaggttggatgttgtagttggttttctggagaatgcatgcagggaggggttagtaatggtggtagaggcagggtgcagaagtcataaatttaaattttggatatgttgaaatggtgatgcctttaaggtatataagtggagatgttaagtatgcagttggatctatggatcgggggctcggaagagatcgggttgaagatacatatttaggagttacctaaattcaaatgataattaaagtcacaggtgtggctgaaataatctagagagatacagcattggttctcaaagtgtggtccctggaccaccaagctcaacattacctgggaaattaacaaaaatgcttattct

SEQ ID NO: 140239 - DNA, 596 bp, Homo sapiens
atggccacagctttgttatcttgctgctgtgaggggacctgtgttgtaggtccagtggagagaggtgtttggggacccatgaccgactgcctctccaggcagcctggggggtccactctttgtatagctcttttttttttttctttgagatggagtctccctctgtcgcccaacctggagtgcagtggcgtgatctcagctcactgcaacctctgcctcccaggttcaagcaattatcttgcctcagcctcccaagtagctgggactacaggcgtgagccactgcgcctggcctgtgtagctcttgaaaccactcctcatcatggcatacctggtgacatccctgcagactctagagatggaggcacaaccaacaactctctgttctgctccaacacacacacacacacacacacacacacagcactgcagatctccagggagcccagccactggcccttgtgtgttcctctcctcccaatttcagccatttacttccctatgtgcactagccctggaggcaccaggacaactgtcatgatttaactcaggccatgggagatgggagtagatgaagaggagcaacagcagagagag

SEQ ID NO: 140240 - DNA, 417 bp, Homo sapiens
tctgccataatagcgtcagcctgcgtatcaataacatcataacagcagcaaaaccttctttggttaccccccttcaaatatttattcccccaaacaaaacaaaaacgacccagttgtccatcacaaatgaagacccctagaagggccacgaccctagcagctgtttcattattaaaataggaggtagactcaatctttcgcctggagagatgcggtgtgatgtgttttctgaatctttctggacttttcgggatctttccggaatcttcccggaatcttccccccaccctcaaaacaagtttcctggtttcaggatccacattgccttttctgataactataaataggtctttggtaatttgatttttttttttttactagctaggctaagttcttgattagttttcaacaatacca

SEQ ID NO: 140241 - DNA, 519 bp, Homo sapiens
atattgatttattgaacccacttaaaaaattatatgtagactgttctgaatccattgtatgttggatacaaagttttaacctatcttcctcctttctaagataaatgtagagataaaatggtaacaatatttcctggaattagattttatgagccaaggctaatttttttgccaactgaataccaggcattgctataggagcagggaaactggaaaccttgtttagcttatttctgtctctggtacgtacatctattagcaagatcagaaactctcgtagtggaaatcttttccatccctctccccacaactccagctcttgccaaaatctttgtattttaattacagcatctgaaacaattcagtacttcttcttttgcttttattttctcttttttttttttttttttttgagagggaggattaggaagcaaaaatgataggagaaatggagaaaataagagctcttgttaagaaagaattgactgtaagtttgctttggaacagcccagaagtgtc

SEQ ID NO: 140242 - DNA, 295 bp, Homo sapiens
cggtagtcaataggatgggactttgggtccagtcaaaatagggtttggatctcagcactgctatttaatgttggatattagccacctctgcatcattttgaacaatattaactaacatgtttagaatcacaattaaggagcagaaattacccgcaaggaatttccaaaactcaaaaagagaatatgttcagaccaatgtttttccgatatataaggaaatgtccgcaaaatatcacattcagcttttaatttttgtttttgtggtttttagtcagatctttatactttcaaaatt

SEQ ID NO: 140243 - DNA, 416 bp, Homo sapiens
tattactgcctttccctagggttttgtaaaatagtgctttatctccaagctactacccagccgccttttatttaaagtgttcagtggaccattatttgggatgaataaaaattcgatgttatgccacagaaaggtaggattttggggagaaacaaatacaggaaacaggtggaaatagatacattgagaagaatccttttgagcagggatttttgtagaaaacattaaaccaaatcgtatatcaaactctctggctggtggtcagtctaatcacaagcatttattcttaagtgtcctacagagagaaaaagctgtttatggctgtatcttgagttaaatatttggatttggactgcaagttaattttagggagaaaacatctgtctttctgaaaacagtatgcctttaaaagtgat

SEQ ID NO: 140244 - DNA, 233 bp, Homo sapiens
cgccactgcgcccggccaacccctgcctcctctttacagtcctcttccaccccgtccctggctgctgtcctccagcactggggcttctgttcgctgctgtactgcacactcctggaaagggacaggccatgtcctactcaaatttgaatattcacggaccatagacctagacaacaacttctagatgaaaacataggatatctttgtgacctcgggcaaagatttttctcaga

SEQ ID NO: 140245 - DNA, 285 bp, Homo sapiens
agcagggagtgaaggtggaggcagagaagcccgttaggaggctggtgctgtaactggagtgagaggtggtgggaaatggaccaggaggagctggggaggactggtgctctagtgagggtcctgcttgccttggtggggcgtggccagcttgatgcttggcgctgtcctaggtactgaccgtcaacctctagtcctccgtgctgatggtgaagcagagagagttgccccttctggaaagaggccagggctaccccgaggagctcactgtaggtggggagccttccc

SEQ ID NO: 140246 - DNA, 202 bp, Homo sapiens
ttaaacaagagaaactggcatgtccaaggtcacattactagaagcagggaaactgggattccaatccctcacaaaactccagagcctgcactcttttttttttttggggaaagggattcgggttgggcccccattgggggggggaggggccagattttgggcccggggaattcccgcccccgggtaccggcgatattcctct

SEQ ID NO: 140247 - DNA, 437 bp, Homo sapiens
accctaaatactctgacttgatcatcacacattctatgcatgtaacaaaataccacatgtactgcataaaagtgtacaaatagtatatattaattacaaaaaaaaatcgtgtggctaccaaaactcattatttcaggtgctagcaaatgtagtcacaaccaagactaggcttgaactcttcctttcagcttcctgacagccaagtaacggagtgaaaggtcagataatttacttagacctgagactgccattaatattgtcaacaaattgctttgatctacagctcattagctttggttggaattgctaagcaaataagccaaagtgaaattttgttctatccaatggcctatctagtaccttaaccccagacaaccttcttacatggtgatcacaactaagctggtgaatgggcataaatcttttattgctaccag

SEQ ID NO: 140248 - DNA, 362 bp, Homo sapiens
gtgatgggcccagcccttttctgaagttaactttgaaagcagtaagatatttatttacatagaattcaagagaagggatttttgagtacaacttcctcactggttttgcttttaatgtaggattctggaatgtaaatcagtaggagatttctagttactggtggaagagaagatggcttccttatcccggaatcacagggattgggggtaaattctgtacataggtcctctctggaagttcttgtaaggaatatgggaaaatgaagctggaattattatagttacaatgttggctaaagttggttcatggaaaccttgaaattaagtttgttggtttgcttattcaatattggacagcagag

SEQ ID NO: 140249 - DNA, 377 bp, Homo sapiens
agaaagatatgtttggcttttttggtttttagttagagattttaaaaaggtctgtgaaggtcaagttgatcattggttttgattgcatcccacaggtttctataaactggcttaaaaatggcatactccattttctggtgtattcattgtaactttaggaagtatttgaaatggtcacattaaagtctaggaatgtcaaattgtattttaatgcgttagttctttttctttttctttttttttggagacagtcttgctctgttgctcaggctggagtacagtggcatgatttcggctcactccaacctctgcctcccaggttcaagcgattctcctgcctcagcctccacagtagctggaactacaggcctgtgcca

SEQ ID NO: 140250 - DNA, 302 bp, Homo sapiens
tatgtcagggtgtgtatgtgtgtggggtgtgtacgtatgtggagtttgttgtgttacttcacctgcagggagatcacgaaataaaagcaatagcccttgtctccaccagtggcttgggccaaataagacagagctgttgccccagctgggacaggcaaggccactgggatgccaaggcatggtggcttgttggtgtgcacaatcagtcacatgctcccagccctcagtagaagtgccctattgatcctccaccctcacccaagcgagcccagccccctagccctacctgctgcctccctcct

SEQ ID NO: 140251 - DNA, 311 bp, Homo sapiens
ggcagtctactgatggggtcccagaaaagcccttaggtccatatgcaccgtgtataagctcttcttctaaaatgaaaattactgtgagaattttacctgaagaaaattgagtttactgcaactatctttgggtcaggtgtgtacctgtgtagtatatattacatacttagtgtttatactatgcatggtgtaaaaccaggccactttgtgctatgagtgaggactccccaaaagggcatggcagacaggtaccctgaaatatatctggtatatacctctttgagatcagtcttctgaaatcttatagatac

SEQ ID NO: 140252 - DNA, 543 bp, Homo sapiens
gtagtcgtctgtcattcttcgcggtgaacatgtctgagcattacacgtctgctcctcatagtgatgtgacggtcgcatacctcccgaagtactgggattacaggcgtgagccactgcgcccagtcatgtatagtcacattctgaagtgctagagattagggcttcaacatatgaatttgcgaggcacacaattcagcccataacactaagcaattattttcttagaaattttgttgtaaaggaaagcaaaagatcaaagtggaactagatgtgaatgggaagacagggaggttttgtctttactttgggcttttactatgggaggaattacaactactggtattgctggtaagaatgatatggcagagaagctgaaaatggctgcgggaaagagggggtgattgcggtagcaaagcctgagtacctgagaagggatgggatcaagaagtatccaatgacttactcaggtcacataacctgtgagtgatggggctggcacttgacctcaggaatcctcactctgagactctccagtccaaccaa

SEQ ID NO: 140253 - DNA, 430 bp, Homo sapiens
gcccagggttaagcaggtgtgactcctcgtggagtgcatccctatttcctgagccccactcgctgttagaaaccaaggtattgagggcttagtgagagtttttcaccatttcctgctgctttaggtcctcccatttccagttgttttcttcctactccagggatctcctcccttccccagggttgaagcaatgcacactgaagtattaatagtagtgatcagcaccttcaagacagcaggacccttctgttgccttctggctgtggtgtgatgtcctagggcctgtggtgcataagcaggtggaatctaagcactgaccctggtcattctacatataagaggaagaggactaggaaagctcgacaaatgctgttctcctcttcatggcaaagccttgctctttggaatccttatctgcatttaaaatgtg

SEQ ID NO: 140254 - DNA, 516 bp, Homo sapiens
aattataaagcactgtattttgcttgcatggtatcactgccatccttcaacaggacacagttttacattctttatgtattgcaaagtgggagacaatgtattgacagttgccaagctatgattttaaaaatgtgaagcagatcttctgtggacgatggatcttgaggctctgggccggatgacctgtcctgacacctgctaacatctcagcaggacccgtagggaagggaattctgcctccttctccttcagtcatctcagaattgaacactgcgcaggactcagtgacatcctgcaaccagagatacagatattctcccaggaacacccagacctacagctgaagccaggatgtcttagtggaagggaccaagagccaaggagacttcagcctcctggttacttcctccctgcagcctgggtgcactgcagactcaggcgcagtggccattagtgctgtctcttggacccgcacctgaccgtgtcttaactacaacaaccttcaaaggcttaggt

SEQ ID NO: 140255 - DNA, 140 bp, Homo sapiens
ggatcgagctcggcccggttgaatttatttgccaattactttagaaactaaaggtattaaaattcagaactcagagtccttgtaatattattatacaataaatatttggaatatttccatttatcaataatgccatctgt

SEQ ID NO: 140256 - DNA, 276 bp, Homo sapiens
ctgcactccagcctgggtaatagagcaagaccctgtcttcaaaaaaccactctagatttcatgttgtagggggtagggaggacaatttttaacagctttaactgacatgggtaatatataagttctgtgttctcactttatatgaaagtacttttttaaatgttaaaaatactagagctgtattaacttcgtgattttatttttcttcttagcactaacttcaaaataaccatacagtactgcttgtaatttttgtatttttagtagagacagggt

SEQ ID NO: 140257 - DNA, 305 bp, Homo sapiens
cttgcaatagagactgagaaggaacagagaggtaggagaactgggagggagtttgaacaaataattaaggagaagagagagtttcaaaatggaggaagagatcaatactgccaaatgcttcagagacatcatgaaaagagaaagactatctatctgtcggatttgtcagtgctttttggtggtctggataagagcattctgaggaggagagaagcgagagtggaggccagactacatagagggacatgaggaagcggagaaggtaactgtagcaagtcttgcatattcctggtaggggtatgggg

SEQ ID NO: 140258 - DNA, 349 bp, Homo sapiens
ctgacttggctatatttatgttggaaaaaagctctaaaaccagaaataacactagaggtaaagaagggcattatataatgctaaaaggataaatttaatggaaaaatatctaaaatttttatatatgtaatagtataggtctaaaactaaaaggaaaggttgacaactattataaaaagttaaaatagacaaaaccacaaccatagatcagtgcccctctttcagtaactagtagaacaaacaggaaaaaatcagcgaggataaagatttgaacaacacagccaccctgacctacttggcggacatagaacacttcactcaataatttcaggatatatatgcttttcaa

SEQ ID NO: 140259 - DNA, 241 bp, Homo sapiens
ttacaggcgcctataactgcgcctggctaatttttgtatttttagtatagacggggtttcaccatcttggccaggctgggttagaactcctgatctcgtgatccacccacctcagcctcccaaggtgctgggattacaggcgtgagccaccacacccggcttcaggcaggggatttagagggcattctgggcacacctccccccggggcagatggggaaactgaggctgagactggtcagt

SEQ ID NO: 140260 - DNA, 323 bp, Homo sapiens
gctgcgagaggtagggaggtcacctccacgaccttcctttgcctttcccttcacagacctgagactgggtcctgagggaagttgggccccagggaaactgtggggcttgagatggagcaggatccaggcagccactctgaggttgaggtttcaagccatgagcaggtagacctagtgcaggcaggcctggagggtggggtggggtggagtggcaggaagagccaggctgggggaagacctgtcaggtatcctaggaacaagagtgaggagcaagatgagcctgcaggaatctgaggctggcctctgggatggtgtggggagct

SEQ ID NO: 140261 - DNA, 589 bp, Homo sapiens
ttgtcctggctagtcttgaactcctgggctcaagcaatccgtccgccttggcctcccaaagtgctgggattacaggcatgaaccaccatgcctggcccacacagcatataatttaaatggaatcacatcatgagaacagtaataaaaacagtcatattggtccacttaggctgccataacaagacaccaaaggctgggtggcttaaacagcagaaatgtgttttctcacagttctagagtctgggagtttgagaccagggagccagcatggttgagatctggtgagggctgtctctcttcctagcttgtggacagctactttctggccatgttctcacatggccttttctctgagtgtgaggggcacatatgagagagtgagatgtcttccttccccttcttataaagccaccaaccctcctggattaggaccccatccttatgacctcatttaaactcagttacctcctaaaagccctgtgtccagatatagtcacaattaggggttagggcttcaacataggactttttggtggacgcagttcagaccatagaaacagagatacatagcacttacttgggaccccca

SEQ ID NO: 140262 - DNA, 231 bp, Homo sapiens
gataacctcctctgtatcagttatctttatatttgatatttgattattgaccaaagaattttaatgtcagttttttatccttagaatgggagttctataaggacagggatttttttttctgttttttaaacagtgcatggcacataatagctgctcaatgaatatttttgaataaacaagtggataaaccagtatgatgcagttttttctttaacatagaaagctatgatg

SEQ ID NO: 140263 - DNA, 552 bp, Homo sapiens
agatcagctcactcaggctctgtgggtgggtaagggcatctctaaggcaaagcaaaagcaaactcctgtccagagtagagcgcacacatgaaaaagtaatttactggttaagttcaaaagttcaactacctggctgggcaaggtggagctctcagaatattgaagacttctgattttatctatctaaaatacaagactattttcaaatacagaattttgagaggttgatagtttctaatacttccaatccatctgagagagtgacagcatatattgtacagagctatcaggtatactaatgcaggcaacaggcattggctttcctaagtttttccatccctagaaaaataatctatcataaatgctaattcatcaatggaacagacatggtccacaggagtccaagacaaggaggtgtcacctgccttgtatgcaaaaatagagaaggcacaagttagacatggtaccccctaaggcctcacagaagcatccaagactttcaacaagtgaacctgaggagaaagggagaacgaacccctaagtcttattcac

SEQ ID NO: 140264 - DNA, 500 bp, Homo sapiens
gacagtgtgatcttcaaagacgagggagtaaagaagtagtggggaatattttcctgggtaattctgcacccccgctcccacctttacagaaacactaagagccttagccacttcctctttcttggtggttatgtgggtactcaggctctggtcaagtcattggctgtttatggagcaggagacagatgacttgggaaagcaacatgaaaatgtcttgggttggttttgagcttgcatggggggagtgagtcagtagatgtttctcgggttctctctcttcctctcttgcctttcctcctttctttgagcttgtttcgctctgagagtacaggcttggcacccacttacccaagaactgattagttcctaaaagaagcagtgagttgattgcttacagagatgatgtaagctttgctctggggtacatcaacttggatttctcatgctttatcttataaagcctaaattaacagctggtttggtttgagttctctgggatc

SEQ ID NO: 140265 - DNA, 312 bp, Homo sapiens
taatgttcctccagcaggtcaggcatattcttgcccaagggcctttgcacttactgttcctgcagcctggaatatttctctccaggtcactgcatggctcaaaccctttcctcctccctgtttttacttagatgacaccttctcagggaatatatattccctgaccaggtggaatatcctctgatcaccttatcttttgagactgggtctcactctgttgcccaggctgaagtgtagtggcacaatcacagctcactgcagcctcgaccgccctggctcaggtgatcttcccatatcagcctcctgagtagc

SEQ ID NO: 140266 - DNA, 694 bp, Homo sapiens
ctacttaccagaaacttagcagcttgaaacagcacccgctcggcacacattcctgttgggagtgtgaaatggtgcagctgctgtgggaaatggtctggtgattcctcgcaaagctaaacaattgccatagcaccctgcagttccacacctggggatgcacagccagaaatgaagacgggtgtctgagcaaaaactcggacatgagtgttcacagcagcgttattcacagtagctagaaggtggaaacaacccaagtgtccgtggaccgaggaacagatcaacaggccacggcgcacgcacgacggagtattgtgcagccagaaaaagggtgaagctcccttacacattatggcgtgggtgagcctcagaaacatggtgctaagtgactgcgtttatataaaaagcttgcactgatgtaaagtgtctagagtagagaaacccaggagatgaagtggattcgtggcttccagggcctgagggcagagggaagggaccggctgctgatgggtctccgtttgggaagatgaacgagttctggagcttgcttgaggcagtgtctgcacaacagtgtgagtgcacggaatgtggctgaattggactctttaaaatagttcaggtgggcaatgttatgttatgtgtgttttactaccatacaaataagtaaataaatggacaagcctgcaaaaaaaagtag

SEQ ID NO: 140267 - DNA, 557 bp, Homo sapiens
ctacttaccagaaacttagcagcttgaaacagcacccgctcggcacacattcctgttgggagtgtgaaatggtgcagctgctgtgggaaatggtctggtgattcctcgcaaagctaaacaattgccatagcaccctgcagttccacacctggggatgcacagccagaaatgaagacgggtgtctgagcaaaaactcggacatgagtgttcacagcagcgttattcacagtagctagaaggtggaaacaacccaagtgtccgtggaccgaggaacagatcaacaggccacggcgcacgcacgacggagtattgtgcagccagaaaaagggtgaagctcccttacacattatggcgtgggtgagcctcagaaacatggtgctaagtgactgcgtttatataaaaacttgcttgaggcagtgtctgcacaacagtgtgagtgcacggaatgtggctgaattggactctttaaaatagttcaggtgggcaatgttatgttatgtgtgttttactaccatacaaataagtaaataaatggacaagcctgcaaaaaaaagtag

SEQ ID NO: 140268 - DNA, 451 bp, Homo sapiens
aaaccccactagtcttcgggagaaagaaaaaaatataaaaaagcccgggggcatcgcaagggaattttttcacacccaaaaaagggtgaagctcccttacacattatggcgtgggtgagcctcagaaacatggtgctaagtgactgcgtttatataaaaagcttgcactgatgtaaagtgtctagagtagagaaacccaggagatgaagtggattcgtggcttccagggcctgagggcagagggaagggaccggctgctgatgggtctccgtttgggaagatgaacgagttctggagcttgcttgaggcagtgtctgcacaacagtgtgagtgcacggaatgtggctgaattggactctttaaaatagttcaggtgggcaatgttatgttatgtgtgttttactaccatacaaataagtaaataaatggacaagcctgcaaaaaaaagtag

SEQ ID NO: 140269 - DNA, 597 bp, Homo sapiens
cagctgaatcctggtttagactaaagtcagctgattgaactactagtattagatcttttggatttattttaagcactattttaggacaaaatatctaacattttacttgatgaattttaactttttcttaccactcattgttttgaagaaattactttgtaaaagtttgagatgtcactaatttttcccttggcattaagcgatacatgaattcattttattcttctgactgaggatgtttctgttagtgtatacattcaagaatatgatgatgccattagtcatttaattttgttgaaacttggctttagtggctgttaataaaatgaattggttggccaggtgtggcactttgggaggctgaggcgggcagatcacctgaggtcaggagttccaagaccagcctggccaacatgctgaaaccccatctctactaaaaaaaagaaaattagccgggcgtggtgacatacacctgtaatcctagctactcgggaggctgaggcaggagaattgcttgaacccaggaggcggaggttgcagtgagccaagatcacgccactgcactccagcctgggcgacagagtgagattctgtctc

SEQ ID NO: 140270 - DNA, 313 bp, Homo sapiens
atgttattgtaggaagaaaaggaagctaatttgtgagatacccaaaatttggtgctgtagtttagcaacaagttgattgtctaaacaagcaaaagttccttgctcacagttgacctgaaaaaaagaagtagaaagaataaaagcaaaggacagtaactatgataattttggtttcttgcttgggagttaggtgatgtgatgccattgatttctatgatggtggatggacagatataaaggaaaaaataagtaatcattataataatagtaataatccacatttgttgaggtctaactatagtatatagtatgc

SEQ ID NO: 140271 - DNA, 489 bp, Homo sapiens
ggagacagtttctcttctggccaacaagagcttttctgacccttcataaaaccaaaataaatcccattttcttaaaggatagaaaaaccctattaacagaaatactgaagggactttcacaacactggtgacagaggcagaaatttttctaaaaaagaaactttcttgggaagtttggctagtggcacccttctctctctctctctttttttcaagaggaagaataccaagggaaaaaaaccctcagaactttctgaggaaaccagctaagggataaaatgtgagagggtaaagaagtcttcagaaactgtgagaacaagcttgctctgaggtgaaatgtccaatttatccagggaagaagcagctggcacgcgctgcatccccagagtaaattaaaagtagaacggtgacagccaattagaagggaacaattaattaaaagttaaaggttgacacatttaggtcgatatattagattgatacattaat

SEQ ID NO: 140272 - DNA, 297 bp, Homo sapiens
gttggtgagtaggttgtggggatgaggatggggaaaagtaatctaattatggagatgtacatgagaatggagtctttattaccatgctggccactggcaagcattgtagctgtggataacatgtggataacatgtaaagggtatgttctgcttcacaagtagtgctctgtgtggtgggatgagcactgtgctaggagtcctgaggtccagatcctagctctggctctccctctaacagagggagactccctctgtgacttttggaaagatgacctctctgaggccacatattcttta

SEQ ID NO: 140273 - DNA, 285 bp, Homo sapiens
gcaaaaaattaatctaaaataaaaagggatctggtcagttgatttaatattttggaggctggatcatcgataataggctcaattttgtcttgtttgtttttcttcttaggggaaaaatataatttagtctttcttcagtatatcccctcactccattttctaatagcatgtttgtcttctatatggcatcactaggtaatattgaaatggtagtaactcttgtattagtctttgatgtaattgaattgtcttgacatttttcaggctgttactaatttttgctaa

SEQ ID NO: 140274 - DNA, 478 bp, Homo sapiens
ggaaacatcacaccctcagagaaccttctctgggaccatcccatccacagcagccactactgacttgtcactatcagtctcttgagcaatttcagcttagtacttgcacaattcatgatttttttagttaactatctgtctcctttatggtctgcagtttctatgaagagagaggccaggcttgtctatttttagacacagtccccagctctgggctaagtccttttaaatgcatgatctttccatgatccccattttataggtaagaaaactgaggcacagtttattcatttatttgccaaatgaatggataaatagcaccccccgcccccgcctcagaagatgtgctgtattcatgctgtaccttatctgtagcttatatactggccagtttcatgttcctgggggtcatgacctaatttgagaggtttggggaaatgagcagtctacttgggacctaacgcaggcctgcaacttc

SEQ ID NO: 140275 - DNA, 301 bp, Homo sapiens
gaaggtcagtgtcactgccgtgtggacagtggatcagacaggggagacaggaggtagagagaagttccaggtagggagaaggccgtctcagcacagaatctaggatgcagcaccaagggccacaggcagcaggggagcagaggaggagtcactagggacataaggacaggcttgggagaggggccactaacacggcctctagagtagtggctgggctcctggctgggaggggctcccaccagccagacaagagacacagaatgaagaagggctttgggacatgcctcgtctgaggtgctgt

SEQ ID NO: 140276 - DNA, 301 bp, Homo sapiens
gggagggtatggaataaagtaaagctcatgggaaaatggtacctttaccattttcccaccttgggaaatggtgggaaaatttagacattgctttacaaagtctaaatttctgccaacttgtgttacatgtggtttgattctggagaaagatagactatcatctatccagtcctaaattgggcctcttagtctgtcctcccctcagttaccaggaagaatagcaggaatatgtcacagaagcagagaaagcttttattctgagtgtcagaggcatgttctaagcactctgttatctactccc

SEQ ID NO: 140277 - DNA, 319 bp, Homo sapiens
gagaaagagagagagaaaagaaaaatacagaacagcaaatgaaatcctaagatctcacccaccgttccatgatttctgggactgactgcacataaactcagttcccagaaatcccgcactgaggcagaaacatagctgctttgaatttactgcaggtggtttctgggaagaaatatttagtcaatgaagggcagtaagcaacagtctttcaagtcatgactcacagcttactccaacacatgaactcagcttcttctcctccttgtagaatgtactggatccctgagaaaggtccgctcgacccatcctcctctacaca

SEQ ID NO: 140278 - DNA, 439 bp, Homo sapiens
gtgaccaatcactttgagagctggaaaattaaaggaaagaataaacatttattctgaatcttgtatatgaacggcaacatttagagtggtagatgtaagaagttcttttatagatacttcctcaacaagcagcaataacagtattaaaatatatttttgcaggccagcatggtggctcacaccaataatcccagcatgttgggaggccaaggcaagagcactgtttgagcctaggatttcaagacccgcctgggcaacatggcagaactccatctctaccaaaaatacaaaaaattagccggtgtggtggcacgtgcctgtggtcccagctactcaggaggctgaggtgggacgatggcttgagcccgggagtcagaggttgcagtgagccaagacgccactgcattccagcctgggtgatagagtgagaccccgtctc

SEQ ID NO: 140279 - DNA, 440 bp, Homo sapiens
tcccaaagtgtggagattacaggcccagcagtaatttgctttataatatgtgaatgttttatatttgaacttaggagatatatttaccctaaaatcacttttttttctattttatattcacgttctttgcaaggtttaatttgaaagaaagttttactgtttgaaaatttggaaaattgctgattcagtatatgtaacaaattggaaaaggtgaagcaggaaataaaggaaattggttattttaaattgagttaatattctgatggggagggcacagcagaaatgaaatcagttcaaatttctgttccaagttttgttttcatttctttgacaacttttagaatcccgtaggcattgatttgtttctgccttcaacttcagtagatacaacttaattatttcctgttaagtagagttactggtagctcctgaaaaggtga

SEQ ID NO: 140280 - DNA, 883 bp, Homo sapiens
cgcaagaagatccatcgcagagtcctaaagaagaacccactgaaaaacttgagaatcatgttgaagctaaacccatatgcaaagaccatgcgccggaacaccattcttcgccaggccaggaatcacaagctccgggtggataaggcagctgctgcagcagcggcactacaagccaaatcagatgagaaggcggcggttgcaggcaagaagcctgtggtaggtaagaaaggaaagaaggctgctgttggtgttaagaagcagaagaagcctctggtgggaaaaaaggcagcagctaccaagaaaccagcccctgaaaagaagcctgcagagaagaaacctactacagaggagaagaagcctgctgcataaactcttaaatttgattattccataaaggtcaaatcattttggacagcttcttttgaataaagacctgattatacaggcaaaaaaaaaaaaaaaaaaaaaaaaaaaaaaaaaaaaaaaaaaaaaaaaaaaaaaaaaaaaaaaaaaaaaaaggggggggggggaaaaaaaatacccgggggggggcaatggggcacccgttttaggcgtacacaagggggtccccaaatagaaggacgtcgtagtattaataaacatagagcggagagaggcggggttttaaaaaacaagcgtggtgggggaggagaaaacagctggttatgtggagaataatctgtggagaaagaggaagcgcaaatctgtgggggggggaagaaatatgggggggaacaacccgcatagaagtaattataacggctaggagaaataaaaactgagggtggtataatgggtggaacacaagcgatattgttgtgcgcaagaaagtaggaccggggatagttaagaaaattcatgc

SEQ ID NO: 140281 - DNA, 1295 bp, Homo sapiens
  misc_feature (52)..(52): n is a, c, g, or t
  misc_feature (64)..(64): n is a, c, g, or t
  misc_feature (153)..(153): n is a, c, g, or t
  misc_feature (203)..(204): n is a, c, g, or t
  misc_feature (206)..(206): n is a, c, g, or t
  misc_feature (257)..(257): n is a, c, g, or t
  misc_feature (280)..(280): n is a, c, g, or t
  misc_feature (292)..(292): n is a, c, g, or t
  misc_feature (295)..(295): n is a, c, g, or t
  misc_feature (302)..(302): n is a, c, g, or t
  misc_feature (306)..(306): n is a, c, g, or t
  misc_feature (316)..(316): n is a, c, g, or t
  misc_feature (323)..(323): n is a, c, g, or t
  misc_feature (330)..(330): n is a, c, g, or t
  misc_feature (335)..(335): n is a, c, g, or t
  misc_feature (349)..(349): n is a, c, g, or t
  misc_feature (354)..(354): n is a, c, g, or t
  misc_feature (356)..(356): n is a, c, g, or t
  misc_feature (359)..(359): n is a, c, g, or t
  misc_feature (370)..(371): n is a, c, g, or t
  misc_feature (373)..(373): n is a, c, g, or t
  misc_feature (375)..(375): n is a, c, g, or t
  misc_feature (388)..(388): n is a, c, g, or t
  misc_feature (393)..(393): n is a, c, g, or t
  misc_feature (396)..(396): n is a, c, g, or t
  misc_feature (410)..(412): n is a, c, g, or t
  misc_feature (416)..(416): n is a, c, g, or t
  misc_feature (420)..(420): n is a, c, g, or t
  misc_feature (423)..(423): n is a, c, g, or t
  misc_feature (428)..(429): n is a, c, g, or t
  misc_feature (431)..(432): n is a, c, g, or t
  misc_feature (435)..(436): n is a, c, g, or t
  misc_feature (438)..(438): n is a, c, g, or t
  misc_feature (444)..(444): n is a, c, g, or t
  misc_feature (447)..(447): n is a, c, g, or t
  misc_feature (451)..(451): n is a, c, g, or t
  misc_feature (453)..(453): n is a, c, g, or t
  misc_feature (459)..(459): n is a, c, g, or t
  misc_feature (464)..(464): n is a, c, g, or t
  misc_feature (469)..(469): n is a, c, g, or t
  misc_feature (471)..(471): n is a, c, g, or t
  misc_feature (475)..(477): n is a, c, g, or t
  misc_feature (481)..(481): n is a, c, g, or t
  misc_feature (486)..(486): n is a, c, g, or t
  misc_feature (491)..(491): n is a, c, g, or t
  misc_feature (497)..(497): n is a, c, g, or t
  misc_feature (499)..(499): n is a, c, g, or t
  misc_feature (502)..(503): n is a, c, g, or t
  misc_feature (515)..(515): n is a, c, g, or t
  misc_feature (518)..(518): n is a, c, g, or t
  misc_feature (520)..(520): n is a, c, g, or t
  misc_feature (522)..(523): n is a, c, g, or t
  misc_feature (528)..(529): n is a, c, g, or t
  misc_feature (531)..(531): n is a, c, g, or t
  misc_feature (541)..(541): n is a, c, g, or t
  misc_feature (546)..(546): n is a, c, g, or t
  misc_feature (549)..(550): n is a, c, g, or t
  misc_feature (555)..(556): n is a, c, g, or t
  misc_feature (559)..(559): n is a, c, g, or t
  misc_feature (561)..(561): n is a, c, g, or t
  misc_feature (564)..(564): n is a, c, g, or t
acttaaagcctggaatgatatcaaaaaggtctatgcctctcagcgaatgagngctggcaaaggnaaaatgagaaaccgtcgccgtatccagcgcaggggcccgtgcatcatctataatgaggataatggtatcatcaaggccttcagaaacanccctggaattactctgcttaatgtaagcaagctgaacattttgaagcttnntnctggtgggcatgtgggacgtttctgcatttggattgtattttttttttccngatttttgatttatttttctttntttttctttaantcnttttccntctnttttttttanaattttncctattntcatntttattaattcttnttttntnttnttttttttatnntncnttttatccataanatccnttntttctccactcaannntttncttntcngagtnntnnatnntnaccctnttnaatnanttttgnatctnttttntntctnnncccnttttntaaantccatncnccnnatactctcattnttntncnntctcnntntttttcaatntccgnttnnataannctntnttntgcagcagcggcactacaagccaaatcagatgagaaggcggcggttgcaggcaagaagcctgtggtaggtaagaaaggaaagaaggctgctgttggtgttaagaagcagaagaagcctctggtgggaaaaaaggcagcagctaccaagaaaccagcccctgaaaagaagcctgcagagaagaaacctactacagaggagaagaagcctgctgcataaactcttaaatttgattattccataaaggtcaaatcattttggacagcttcttttgaataaagacctgattatacaggcaaaaaaaaaaaaaaaaaaaaaaaaaaaaaaaaaaaaaaaaaaaaaaaaaaaaaaaaaaaaaaaaaaaaaaagaaagaaaaaaaaaaaaaaaaaaaaaaacaaaaaaaaaaaaaaaaacaaaagaaggagaggggcgggcgaggcgagagcataacgctccacgggggagcgggggacatgcagaccccgagaccgctaagaatttattaaaaacgaaggacgacaataaaatgagagacgtagagtaagatagaaaaaagaaaggaaaggaggaggagaacaagaaaaaaaaagagatattagtatgaagaaaacttaatagcatagtagggagtaataagatgaagataagaataaatatttgatggagtaggagaaaataagtatggacagaaaaaatacaaagaaagaaatgctagaaacgacgcgtaataat

SEQ ID NO: 140282 - DNA, 883 bp, Homo sapiens
cgcaagaagatccatcgcagagtcctaaagaagaacccactgaaaaacttgagaatcatgttgaagctaaacccatatgcaaagaccatgcgccggaacaccattcttcgccaggccaggaatcacaagctccgggtggataaggcagctgctgcagcagcggcactacaagccaaatcagatgagaaggcggcggttgcaggcaagaagcctgtggtaggtaagaaaggaaagaaggctgctgttggtgttaagaagcagaagaagcctctggtgggaaaaaaggcagcagctaccaagaaaccagcccctgaaaagaagcctgcagagaagaaacctactacagaggagaagaagcctgctgcataaactcttaaatttgattattccataaaggtcaaatcattttggacagcttcttttgaataaagacctgattatacaggcaaaaaaaaaaaaaaaaaaaaaaaaaaaaaaaaaaaaaaaaaaaaaaaaaaaaaaaaaaaaaaaaaaaaaaagaaagaaaaaaaaaaaaaaaaaaaaaaacaaaaaaaaaaaaaaaaacaaaagaaggagaggggcgggcgaggcgagagcataacgctccacgggggagcgggggacatgcagaccccgagaccgctaagaatttattaaaaacgaaggacgacaataaaatgagagacgtagagtaagatagaaaaaagaaaggaaaggaggaggagaacaagaaaaaaaaagagatattagtatgaagaaaacttaatagcatagtagggagtaataagatgaagataagaataaatatttgatggagtaggagaaaataagtatggacagaaaaaatacaaagaaagaaatgctagaaacgacgcgtaataat

SEQ ID NO: 140283 - DNA, 308 bp, Homo sapiens
aaggagccagaactgatgactccaagttcttagcccagtgaaactgatctggacttctgaactatgagagattccattcctgttgtttgaagctaccacatttttgagaacttgttacagtagcccgaggacactaacacaaatggggctccgggaaaatccagactaaaggtgttgtgttggtttgcaatctccttgcttaactttctgatactagacgtaaatagattggtgaaaaattttgtgattgaagaaatgtacatgaaacctacagtgtacagagaagcatctgttagttataagataaa

SEQ ID NO: 140284 - DNA, 447 bp, Homo sapiens
cttaaaaagctaggttcgttttgctttctcaaattaagtcaaactaaagaattttaaaataaaagtataaatttggttttgtatttgtctcatttcaaagcataggtcagacagattcatcgacctttttttttctttccccactttaaaaaaatgaaaaatttcaggcacgtaacaaaaagtatgggatattcatgtaatctttgagatgtggtcttcctatgttgccaggctggtcttgaactcctggcttcaagtgatcctcctgcctaggcctcccaaagtgctggaatcatttttaaggaccattctatttaacttttggaaatgaagcatctgccttttaatggaaaaactacttctcattgtaaagatagcacacaatgttcttggctgctttggtctccaaaaaaagggaattgagatatctccctgtgtccgcattat

SEQ ID NO: 140285 - DNA, 518 bp, Homo sapiens
gaataaaagaaagaaaaaagggagaattgctgactttggttggatggtgtgaagtttcttggggtttaacagtaggaatggggagttaaaaccataagaggctgagtggaagatgcatgtggtgacaacttttagggtggctctctccctaatcaccagtgtggtggaagggtggtggggcagtaaaaccatcaaaagtcacagtgtagctgtcaatctcatcactgaagacaagaatacccaagtgccaggccaggaaaattatttacttcacaatcaggaagaaatgctgtggaactaaagttggggtatattcttgaatttgattttattctccagagccctaaagttaaccagctggaatcatttttaaggaccattctatttaacttttggaaatgaagcatctgccttttaatggaaaaactacttctcattgtaaagatagcacacaatgttcttggctgctttggtctccaaaaaaagggaattgagatatctccctgtgtccgcattat

SEQ ID NO: 140286 - DNA, 607 bp, Homo sapiens
tgactgggttttccatgactccagacagtgtcattctatcctaaccttccaaataagaaagtctgggttcatcttcaacacatcacagcctctcatcatacacatgaaatctgcagccattctgaggtgttatcctttactgttactgcagaccttgctcacacctccacccacttcctactttgctgtgtctcctttccctccctccctcttactctttcccatgtactgttcactgccactgtcaaacatctgttcacataatttcctgcctgaaggtcaccaggttcccttctctatgacgaatcaagtctaattataaagttgcataaactcaggaggcacaacctccacagagtggagctgagcaccatgctggctctgccttggcatctgtctgaacgggttcctattcctcagcctatcccttctctccatctgcgttaagctgaacaccctctttccaattagaccatctaggtcctccccactctagtctaagttccgtgtatgaagaggcagaaggcatccttttgactgtctcagagaaggctcttagaggcatgtggaataaataccactctgacccagcgaatactgccacaag

SEQ ID NO: 140287 - DNA, 184 bp, Homo sapiens
cttgtataataggcaaaattataatgtcagtgattatttttctagttttccccctttgtgtcttcaataaaaaataatctatatcattaggcagggatgagatatggattggtcactaaaactagcacatcagctacaaacataactttcactttcttcccattcataaacaagtcattatttg

SEQ ID NO: 140288 - DNA, 224 bp, Homo sapiens
actttgggaggacgaggcaggattgtttgagcccaggagttgcagaccaggctgggcaacattgtgagcccccgcctttaaggaaaaaaaaaagaaagaaagaaattagccataggaatgcattttatttaacctaacatattgaaagtattatttcggctacatgcggtggctcacacctgtaatcccagcagtttgggatgttgaggtgggaggatcacttg

SEQ ID NO: 140289 - DNA, 575 bp, Homo sapiens
ttcacgactgctctaatgataggcatatgaagccacagttttcctccttcctgctgttcattcaacctttctagcctggcagctttgcctcagttttcctccctggatgatgaatccacaagtctggccagaaggaagatgagcattactctgaaagtcattttgtacttttaaaacttattttctttctctgagttctgtattagtgttgtaatttgctcctgataccacctaaatcagttgcgattaaagcttttctatctttctttttttgtttaaaagaaaaaaacagatttgctgcctggagttcacgtattaacaaagatgaaaaagatagtgtctgatttataatgtactgaattgcctaagtctttcatttgtaattcttgacagtgttcctctagtaaagcgaggcatcgttctgttgtcaggggctcagtaatcgccatgaaaaacgggggaaggatttgtgagacattctatatgagtaccgaaggtgatggacaagtaaaaatcaggacggcataaattactcagtatctttcttctccacaattattttcactgtggcatta

SEQ ID NO: 140290 - DNA, 671 bp, Homo sapiens
gaggcggaggttgcagtgaaccaagattgcgccattgcaccccagcctgggtgacagagtgagactcaatctcaaaaaaaaaaaaaaaaaaaaagaaattattttcagggaaaggtaagatgaatgagagccactgacgaacagttgccaagtgttttctgtttgggggcttcatgtaatttccaaagcgaaatgaactttggttcaggtggtgggagctgtggtcagtgtgttctcaatggaaggtgagtgaccttatggctccaagcacctgaccaatctctctgctcctgcctcctggacgtccagggagcaaggatgcagagggtgtgcccaacttctcttggggagagggaccacttttcagaaccctcttcctgtgctctgtggtgggaggcaggggcagaagaaaaggatggatctgcctctgagaagcccatacggagcagacagacgaaggcaccccagcggctggctgagctataaccgtttatgggattgcaaatttccagacagactcttatggtgtgtgatgcagcccacttgtcatctttgcctgtgttttggaagggttcggattcaatgctcctcagccattttttaaagggaggcaccaaatatagaaagtacctggtaggtaggtaccaaacatatgtttgatgaatgagtat

SEQ ID NO: 140291 - DNA, 152 bp, Homo sapiens
ctgatctgcacagctcattctcacctacttcaggtttctgcttaaatgttatctaagtaacctcataccctaacttatttctcgaactgatcaccagctaatgatgcaacacataagactgtgtgtgtttgtgtgtgtaaataaaattaact

SEQ ID NO: 140292 - DNA, 604 bp, Homo sapiens
aatttgacctagagagatcattaagtgatgatgcagagaggcccaaattcacaaagctaatatggctgtggctaaaatctgggaaccattgcacacattttggggttaaaaaaacctttggatgggaaaataaattcaaacttacagaaatactgcaagaagtgtacaaagaactcctgaatcctgccccctcggctttcccaggcgttaacatgcttcacctgtgctccagcactttctttcccacctctccgttttttcctgaactgtttgagaggtatttgcagactttatgcccttttacttttaaatacttcaggatgcatttcctaagagcaaggatgctctcatacacaatcacagtacatttattcaattcaagagatttcacgttgattcactactcttatctattgaatagtccacaatcaatagtccccagttacatagagtttttcagatgtttttgagagtctccgtcgaactagttcgacggagactctaaaagtctgccaaataacaaggtgtagggcatctcacagcagtgcatcacttctggaagactacccacagggtgggggctgccacgggggccaactcgggc

SEQ ID NO: 140293 - DNA, 249 bp, Homo sapiens
aataaaagccgataagatcttgcaaactcgcatttgttggaattttgttctagaaggcagcatggcgccttgtagaccccaaagcgttgttcacagtgtgcaaccagggccaggcgcggtggctcacgcctgtcatcccagcactttgagaggtcgaggccggcagatcacttgagatcaggagttcaagaccagcatgggaacatggtgaaaccccatcgctaccaaaaatacaaaaacaaaaattag

SEQ ID NO: 140294 - DNA, 551 bp, Homo sapiens
gagcaggttgcgactaagtttaagggaagtagagaggctgtgtgcaatgggtcacatctgtaatcccagcaccttggaaggcgaggcaggtggatcacagaggtcaggagttcgagaccagcctggcaagtgtggtgaacacccatctctactgaagatacaaaattagccaggtgtggtggcacgccccatatagtcccagccacttgggaggctgaggcaggagaatggggtgaacctgggtagcggagcttgcactgagccgagatagcgccactgcattccaacctcagcctgaagtagctgggactgtagatgtgagccaccttgcctggctctgttttctctagtacacccacatatatttgaagatagttgtatcttacgagtctttcttttcctgtgctaagcaatcttgattccttctaatatgtctcatgtgacatgggttctgatcctttttcagttctgtatacattcctttggacctatactagtttccttaggcattgtgcttagaatggaatgtagttgtccagttatggcctgac

SEQ ID NO: 140295 - DNA, 439 bp, Homo sapiens
ggggaagaaagaagccagtagtggctcagtaaaagcctcagaagcagagaagccaaaagtgcagccttcagtctgtggccgaaggcctaggagcccctgtagaaccactggtgtaagtacaagagtccaaaggctgaagaacctggagtctgatgtccaagggcaggaggaacgaagggagcatccagcacgggaaaaaaatgaaagccgaacacagcaagccagcttagcccaccttcttctagctgctttgttctactcgctctggcagccattggatggtgcccacccacaccgaggatgggtcttcttcgcccagtccactgagtcaaatgtcagtctcctctggcaacaccgtcacagacacagccagaaacaacactttaccagctatctaggcatccttcaatccaatccggctgacacctaatattaatca

SEQ ID NO: 140296 - DNA, 681 bp, Homo sapiens
accatgttggccaggctggtcttgaactcctgacctcatgatccacctgcctcggcctcccaaagtgttgggattacaggtgtgagccacggggcctggcccgggctcacaatcactttctaatttaacctcagggcttgagctgcggcaggggaccctcaaggggagacgcttcccctgaccagagccctgggctcacaggcagctgcacagctgcacagctacacagcccgggctctgtggaccctggcaggggaggcagcgctggctgggggaggctggcaggggggtgtccacgtcctgtcttcacctgctatgggacgagcgtttgcacaatggctacccttgttcatgaggcttcacgcacagccgttccaagagcggaccagacacagccccgcctcagggcctttgcacacaccgtttcctaactctgtgaccctccttcccgtgcttgctcctctggttccacagctcttggtcccaagggcagctcctcagagcggagcccctggtcactgcctcccagccgcctgttttgttttctcccagctcttcttgctgcctgaatcatctgcgtggctggtttctctccggtctccttggggcagacgctgctgagtcatccccaatatccattttctgtttccttttaataaaataatcggagtcctaaaaaaa

SEQ ID NO: 140297 - DNA, 594 bp, Homo sapiens
atgcaaagacctcataatagccaaaacaattttgaaaaaatgcaaagttggaagatttatactaccagacttcaagagatactataaagctacagcaataaagtattggcataaggataggcatattaatgaatggaacagaatggagagtttaaatgtagatccatagacatgtatggtcaattgattttcgaccaagctactgaggttttccacgaggaaaggttagtcttttcaacaaatgatgctgaaaaagttggatatccatttggaagaaaccccaaaaacccaaaaaaacaaaaagccttaattcttcttacttatcacaacacacagaattcaactcaaaatggatcataggccttgggacaagtaatattatgtgtcaacttgactgggtcacaggtgcccatacatttggtgaaacatcattctgggtgtttctgtgagggtgtttttggatggaattaacatttaacttggtaggctggataaagctgagtgctctccctaatgtgggtgggcctcgtctaatcagttgaaggcctgactagaacgaaaaggctgacattcctttgagtaagagaggattcc

SEQ ID NO: 140298 - DNA, 1092 bp, Homo sapiens
cgccactgcactccagcctggtgacagagctagactccgtctcaaaaagaaaaaaaaggtgtgaagtaggaattagagcctaatacccgaaaaataacctttgaggatattgacggtataatgtctgttctcttctggtatactttacttacctgtaagtttaggtgacagaatccagaaatcagaaaattaaactcccaagaagctagttttaaaatcagtacaatagtatatctctgtttctcctttctctgtctgtttctacatgtgtatttaaaatccgtaattacctattcctttgtatacccaagataaggttaactcccctgccaaaaaaagagttataaaataaaaaaaaaaaaaaaaaaaaaaaaaaaaaaaaaaaaaaaaaaaaaaaaaaaaaccaaaaaaaaaaaaaaaaaaaaaaacaaaaaaaagggggggcgcaaaaaaaatccccacgggggccccacacggcacacaaatgaacaaaggggcccaaaaaggccccaaacaaaaccacaaaacagcggccccgcttcaaacacacggcgaaagggcacaccccgcccccgcgacccactgggaagaacaccacacacacgccgaggacaacaccaacgcgggcaacacacaccaccgcgcaagcaccacaccgcccaggcgaaacacaaaacaaaaacgcagggagaatagcggagaacacccccagcggcaataatcgcggcgcgcaccaacaacgcgacaccgcggactaatacgcgacaaactacgcgaggacgaaaaacacgcccgccgccccctcacgcaccgcaggcagcccgcgcccggacgccgcacggccgggcgaccgacccgcggacgaggcgtcggcgagaagaaggagcggacaggcggcaccaagagaccgcagaaaaagcgctcacaactactgccgcgagcgacgcgaacaagccgagaccgcccccgggaccagcgaaggagccagcacgtgcgaaagccgacacgccgcggcggcggcgagagtcgggagccgcgcgcacacgcgagcccagcgagccgcaaaccacacaacgaggacgcgacagcaca

SEQ ID NO: 140299 - DNA, 535 bp, Homo sapiens
ctatactctcttgatccctactttcaagatgatgaaaatgcagtacatagagcttaagtggtatactcacagttctttagctcataaatggccttatccctcttggggtgggcataggggtgacccatatggttgtacaggttgctcactgcacaaggtgcctgcccaaagtgcaagtggagaccaaaatccagctgtggtgtgcttgccaggtgtgcagcttgtctcacttgcacagggggacacatgggctgacagcagccttgagtgagcagggttaccccccaaccccgccttatcttctaaatgcagatactggacttgtacccacaggaaatgacgctctagttaaggtttctgcaagaagtgagttccatgccttttaacaagagccaccatgcttttgtctctaaagagatgttttccttgtggcaacaaggatttggaggaggggactcatctggggaatgcttaaagggaggcctgaagggaagcttccggaagaccctggtggtgtccccatgctcctacccca

SEQ ID NO: 140300 - DNA, 582 bp, Homo sapiens
ctttccaacctcttatccatcagaatcccaagagggcaaacactagcactgaagatctaaaaagtatattcccaaatgactggaaacagtaccaggctgaaagatcagaacacctagtataaatatgtttaactgcagaggtttaacaactgtagcttttaagagcaaaaatcctgtgagctgcattcaagtaatgtttggtggaatgtacaaaacaagagggaaaatggagtactaattattgaagaacaacagcagtaagagttattcaggaataaaatgtctaatctgatgatccatatagcttatggctttaaagcattttcacacacttctccatttatttcctccaatcaccgcgacatgacgttcacaatctatgaccatcctttaagaaagcatttaaatttatgtaagttcttatcatcatggtctcaccacttgcaccattatttttccatttctctaagtaaagcctgtagcaaaggtacaggagacagaatgttcaaatgaagagtatcgtacagaatatgtatttagtaccacactgtgccaaacccaactggatactgtagtaaaaat

SEQ ID NO: 140301 - DNA, 165 bp, Homo sapiens
tgcgtgagtgtttagcctgtccatgttctcagatgtggggtggatgagtgagctgtgacagtgaccatcagttccctttccccacgtccccttattgaacccttagcatgaatccatccagatatccctgactgaagacacccagcttcccaagcaatgccaggc

SEQ ID NO: 140302 - DNA, 515 bp, Homo sapiens
ttctcagaccacataaactaattaaaatagacatgatgcagtgtgccacatggtcagaaatgtgaagaattcttagggttgacatcgtcaccacagtcaacaggactcacaggaaatgctaagtgctggtcctccttcagccctgtgttacgctgtgtgagtgcctgactctgggcccagggctcagcagcacggtcttcctgtcccaaaggcttattccacaaacacatctgtctcagctcctgcgtggagagaagacagctcctactcttcctactcagttaatgtaaagtaatgaacagtcctagaatgagttcagatagcttggtacacatgtcaataaaagtgtaaataacagactccggactgcattagcactgtggctgttactgatattttctacacactttacttggcaaaatcgaaaacctgaagacaggtttggttttgtgccagctggctcacactctaaattggcattagaaggtgtatgtcactatagaaaaatgactgtc

SEQ ID NO: 140303 - DNA, 421 bp, Homo sapiens
catgagatactgagtaagcatttattaaattgagttgaaagatttgaatatattaccagaaaatttttggaaggccaaaaatctcatatcagaatgaccagtatatacttattaatggaagctcaggaattcctgaagaatagcttttctgttggtaaatatgtactaactggttgagtaatatatgctaatgtaatttaaaaaattatgtgattgtgaaggcaggaaagcgatggattgtttcaggccaggcccactgcttgctgtactttaatgtcattgctgcttatcgccttctctgcagccttgttgacactcctgacaacaagtgtttgtctttggcttctagggcactgtttcctgttcctttacctttcttgttggttcttctggcatctgcccttaatcctttatcctacaa

SEQ ID NO: 140304 - DNA, 310 bp, Homo sapiens
gttctttttatggcaattatagttgttcatgtcttgcaagtcatagccctctgacctgcaacaaaacctattttagctcttctggctgggcacagtggctcatgcctgtaatcccagcactttgggaggctgaggtgggtggatcacctgaggtcaggagtttgagaccagcctgcccaacatggggttttggtgaaacctgtttgtactaaaaatacaaaaattagccaggcgtggtagtgcacgctatagtcccagctacttgggaggctgaagcaggaggattccttgaacctgggaggcagaggtt

SEQ ID NO: 140305 - DNA, 300 bp, Homo sapiens
taagggatcttgatttttccttgaatcaaattgtataggttattcatgaggcacatgggagaagatgggccattttatctatggggaatgtaagacatagagcagtagagatttgctcagcacaagttccttgaggacaggagacatgactgtctcttctataccctcatggtccttagtcaagtgcaggatgcccagagaatcgtaagtgcttgatgcatagttaagtagagtgaggcagtcctggaaaatggataagctgggtggctttggcctgtttttatatatttttaaaactct

SEQ ID NO: 140306 - DNA, 274 bp, Homo sapiens
accagaaaactgctagatcttttacatcttttatcaatccttagagacttagcaaaaatccctatgaatctactatacaccaagaatataaagataggccaggcacagtggctcacgcctgtaatcccagcactttgggaggccgaggcaggcagatcacgaggtcaggagttggagaccagctgaccaatgtggaaaaaccccaactctactaacaatacagaaattagctgggtgtggtggcgggcgcctgtaatcccagctactcaggagg

SEQ ID NO: 140307 - DNA, 492 bp, Homo sapiens
cttggatattgaacagtaattatgtaagatgttaacatgtggggaaacctggggaagggtgtgtagaacctctctgcactattttttttttgcagcttcctgttattctataattattttaaaagtaagagctcagtacaaaaaaggaatgaacttctattgatacatgcacaaatctgcatgaacctcaaaggcattatgctgagtaaaaaaataaaatagcctatcttaaaaggttacagactgtttgaatgcatttatatggcattctcaaaaagacaacactacagtgatggagaacagatcagtgcttgctaggtgtgggggagaaaggaagatgtgattgcaaaaggatagcacaaggagatttgaggggttatggaactcctctctgtcatgaatctatacatatgtttaaaatcagatctgcacatgcacaaatgtcaattttactgcagaataaaatttaaaataaaagtagataggcaaggc

SEQ ID NO: 140308 - DNA, 310 bp, Homo sapiens
ctaggaatgaaaaagcataaaaacaaagcagaattataagagggaagattttattcataaaatgaattaatcagcatgtagtggtatgtgcattatgtgcaagcatggcttggggagaaaaagaaatcttgtccaaacttcagctccactgcttatgccctgggtggccttgaatgaatttcttagcctctcagtgttctctgttttctaacacttaagatgaggctaataactacctagcagtgttgttgtgaagattagataaagtacgttataccattatcacataatagacaccagataaaaggtt

SEQ ID NO: 140309 - DNA, 233 bp, Homo sapiens
ctccgtggcatatcttctttccctggagagaagagcagtaaataaaaatgacaatgacaattatttttgcaagagtttcctgaacaaaaggataagagtgaaatgtttgttagtaaacttcagctccatggtgagaagatgttattagcagaagctgattaaaaaacaaaattttgataattttaaaaggtaaatcatttaagatccttcacgctgtagtataacataggcaa

SEQ ID NO: 140310 - DNA, 299 bp, Homo sapiens
agtttacatccttagggtgttttcctgcaagaggcagcacagagtaggggcccatagtgcaggattcctgagcctgatgccagcaccacctctcacgtgtggtgccgggaacccaggggataggcaggggcaaagtgtggcctttgcgttgagacacagagggccatcccaacccatgactggtgacagcaggctagacagaagctgctgggaggcagagatcaggagtagcagatatgccctacatggtgctatgagagcctataatgggggaatagtcctggagttgggatgctttt

SEQ ID NO: 140311 - DNA, 252 bp, Homo sapiens
agtctctacttttttattcactacaaaaaaggttgatgctaatgatgcagtaatgaagacaaggaacaatgagggaaatgcttccaaggttaggaggaattttcagagtatggaaatgggctcctggaaggatatacggtacacctagccagagcagatgacttagaggaaaggaagacaaaggtacagctgcattggtcagacagaaggggctgtactggaatataggaagttttaggagggcaaatacct

SEQ ID NO: 140312 - DNA, 566 bp, Homo sapiens
ggagtgaggaggtgtgatacgcctcccctgtgcccatcatcaactccagcccctgctgtctcccatctgtgcagttctgtctttgctcccaccagtacccccttgcatgatgctgaagccccaatttaaaaaacagttttcacatcagaaggatttttgtttgtttgtttgtttttgagacatggtcttgccctgttgcccaggctggagtgtagtggcatgatcagagcgcactgttgcttcgaccttccaggaccaagtgctccttccacctcagtctcccaagtagatgggaccacaggcatgtactaccatgcccagccaattttttttttttttttttttgagatggagtttcgctcttgttccccaggctggagtgcaatggcgtgatctcggctcactgcaacctccgcctcttgggttcaagcgattctcctggctcagcctcccgagtggctgggattacaggcatgtgccaccacacctggctaattttgtatttttagtagagacggggtttctccatgttggtcaggctggtctcaaactcccgacctcaggtg

SEQ ID NO: 140313 - DNA, 168 bp, Homo sapiens
ccctctgagttcaagttccccatgtcttacatataatcttgaatatcagctcctcaggatgatgataaagatctaagcggtcttgtatttggaaaagacaagagaaggaggggccactgtaaacggggaatgagaagccattatctatttatgtccaaggctaaattg

SEQ ID NO: 140314 - DNA, 498 bp, Homo sapiens
tgggagtagtaatataatcgaggaaatgatttaaaatagaccgtcagatttgagtagggcaatcgtgatatcactatgcatcgttatctactcagagcataaggcatacactaggatgatggtattatcacgggttcaggaaacaatcccccatggatactgagggatgactgtatttgttttgtcaggtaccatccatctagcttttgtgctctgcgtttttaaacatgcactccaaagtaagttgcagacattggtgtatgtcacctctgaagaattcagcattaaaatccttaattttatttattattaactctttattttaatccttttttacattttaaaatgtgtattatttttatcatcaggcctaccacagtgctgctacagatatacttaatatttgaattgaaatctcttaaaatttttaaattttactttttttttaaatttccgtagcctttttactttgtgcatttgagtctaagtttactgcac

SEQ ID NO: 140315 - DNA, 442 bp, Homo sapiens
gcctatagtcccagctacccaggaggctgaggcaggaggatcgcttgagcccagaagacggagactgaagtgagccgagatcacgccactgcactctaccctgggcaacagagcgagaccctgtctccaagaaaaaaaataaaataaaaatgtactttgcattgagagaatttaaggaaattcaatgtaaaaaagtaattcagaatttactatgggaaaaggcatttttctcaggagtttccatccagcttggaattcatctcataatgtgaatgaagtgtgaaaatacctctgattccctgaggttgcagaacactgcacacactctctcttacgttctactgaaataatcaggtgagaggatttccagaaataatttattactgaaatgctgagtttatgtggttcttaggggaagctgcttttatgctaagcaatttca

SEQ ID NO: 140316 - DNA, 549 bp, Homo sapiens
tgacttgttatgtagcaatagataagcagaacaggtggagatgaaaggcttctctggacaatctgatttcaacaggaatgcatgctaaatgctgcaaagaaagtaagttcaaccagttgcaatatgatgcaaatgaaattctgactctagtaaaggcaaaatccagctaccctgactttcctatcgcagaggatttgtttgatgcagataatcttacatacacaggtatttttcttaactttcgctgcctgcaaaaatgtacataaataagattgagttctgtgagccatttccaagtacctggaatggaggtctccatttcaggtacttggaaatggctcactgaactcatagatggtttcgtgatgatgttggctcagggacacccggaagcagggtctatagactgtgcggggatgagggcagattgagaggctggtgagagatgtgctgggaaagagagccagcagttattcccgtggggtgtggagtgtgtgccctcacagcgggtgatgaaaagaatacaggagagtgttgtccaggccccat

SEQ ID NO: 140317 - DNA, 151 bp, Homo sapiens
tatgtgtgtgtgtctgtgtgattaagtccttccctccttagctttaaaagaaaaatatcatattataaattccaatactgccaatatttgcaacaaaggtttaattttgtttgcagccattctattttataattattgataggttcatgtg

SEQ ID NO: 140318 - DNA, 754 bp, Homo sapiens
tgacagcactgtgaggcccgtgcttgttatttccgttttatagatgaggagactgaggtacaaaggcagtaacttgctgaggtcgcgtatctggtcagtggctggttcattggaccccaggctacctaccaggtatatgacctagtctgccaacttaattttctatatgtccaaaagatgtgcttttttaaaaaataaaaaattttttttagagatgggggtctttctgtgttgcccaggctggtctcgaactcctgggctgaagcagtcctcccacctcagcctcccagagtgctaagattacagacatgagccactgcacctggactgtgcttttctaacggctttactttatggctgtcagattttcctgccaattagagttcagcaaaataaaggattgtgttaaattgcaaaccatcatatggtccatgctgactaaccatgtgagtatgagtctgtattttgttggatttttctcagctgtaatcacaattttgctggttttacttagaagcatttataatgcgatcattattccagctttttttcttgagtattttcagtttggggtttggaaaataatttttttcctggaagcaagcacatgataaatgcctttagaccttgaaggtggcttttctcatctcaatttttgggtggatgttctttcttctcccttttggaacaggaaaggtctcagctagaataattagaaaggtagggttataatttataaaacctgtaagagaca

SEQ ID NO: 140319 - DNA, 324 bp, Homo sapiens
gctgggattaaagacgtgagccccacagcaccctgcccagatgtgagaaacgttgaattctaaaattgctggcaggccaggtgtggtgagagtcctggtgacagcaacctgtgaggattgttacctgtgtgtaaggataggcatgccatcatcccttcctccccttcctccacacttgtgctcagcctcccgagtagctggttctatgagcagccaccaccacacccagctaatttttgtattttttgtagagaacggttcaccatgttgctcaggctggtctcaaaaactcctgagctgaagcaatccatccacctgtgtcgg

SEQ ID NO: 140320 - DNA, 387 bp, Homo sapiens
ttttgagacagagtttcgctctgttgcccaggctggagtgcagtggcagctgacagtcaacctcagtatctgggaggcaataggaaagcgtggcgactctggtaatttgaaaagcacataacctgtatagaagcagaagccactatgaacgccaaccatctgtttttcagaagtgtggatccaagtctttgaagagaaaccagaagtccagattcctatgtgtaatctgtcaatttttaaatatggactattagcttaaaagaagtcatcgggtcaccactttgctaccccactttacgaaccagaagcaatctgactggggatagaactgttctggaagtcagggagccaagactgttaaagccagctgacaccaacctattttct

SEQ ID NO: 140321 - DNA, 346 bp, Homo sapiens
gaatttggagggaagctgattcttcaagcatctgccatttccgcagcctctctctttgaaaagacagtttcctctggggctaaagacagctggtggcaatttcaggtcacagaactctgtcctcttgcctttccttctcctccatggcctctcctctgtcccccttagccagaaacctctggagggagtgttgattacgggccacctatccacactcacggactgtggggtggagaagggaataatcctcctagaacttctagaatgaccctggatcttcatgaggccctggccttggccaggtccagccacttgcctgtggggtgttggggttctccctggactg

SEQ ID NO: 140322 - DNA, 511 bp, Homo sapiens
aaatccttatcattttctgttataaaacagacctatatttgcaaataatgcaagtgaaggtgctttaatcttgtattatatctgtttatggcttttatcctaaattaattcatgctttttaaagtaatatgtaaatgtgaaattacacaagtgcaatctaattttaatgctaattaatcttctatccaacacattcttatttactagctagttaaatttgccacaaactttggataacaaataacgggatcattaaatagtttattttggaaattttgatcttttcaagtatctctcttttctaccaatttctacaattgtgtcttgtaccacaagatacaatttttttcctgaagtagaataactgtgcttccaataaggaaaatatttgagtattaaataaatatttctaaaagatatattacgataggcaacattaatagatagacaattaaggtcaattaatattgtaatgatattggaaataaattttcagcaggtacaagacttt

SEQ ID NO: 140323 - DNA, 134 bp, Homo sapiens
gaaacacacagggaagaaaaatacctggaaaccataaccgctgcttttagtttccagagattttgaagcctctttctctttgtttttcctctaaaccagttacaattagaattgagggatataattacgttgtt

SEQ ID NO: 140324 - DNA, 418 bp, Homo sapiens
gggcttagtactgatgagaacagcacattattactgcaagtaggcaaatgtgtcacttaaaattctctgcctgtagtctgatcatatgtgctagttttacactggaaaatagtaatcaagaattgagaattaaatgccagagatctttcaagcaagggggagcccagtctatcctcacacactccccagttattgttctgtacggtctagacctataacctctccagcgcttcaactccgtctctgatattcctgcagaggagatctcaaagaggagctttttaatattgtaacttgccatttcttctgtaatcgcttcttttcttctctcttggcaccagttcctattagaatgcccttctctttgaaaatgagagatggggctgggtgcgtgtggctcacgcctgtaataccagca

SEQ ID NO: 140325 - DNA, 132 bp, Homo sapiens
gcagttgattctgatgtgcctgtatgttagatggtagtgattacaggatctgtttcctaaggcttttggtgggaatgagctagcagtcggcacttagggctcaataaaaattagttaaagcaaattgctacc

SEQ ID NO: 140326 - DNA, 314 bp, Homo sapiens
tcaaacctattgatcggaagtcagtccatcagatttgctctgggcaggtggtactgagtctaagcactggatgaagaagatagtagaaaacagtctggatgctggtgccactaatgttgatctaaagcttaaggactatggaatggatctcattgaagtttcaggcaatggatgtggggtagaagaagaaaacttcgaaggcttaatgatgtcaccatttctacctgccacgtatcggcgaaggttgggactcgactggtgtttgatcacgatgggaaaatcatccagaaaaccccctacccccaccccagagg

SEQ ID NO: 140327 - DNA, 301 bp, Homo sapiens
tcagggagaggaaggtggtataccatgtagtcacagcaattactacacactgggcacctagtatgtgccaaatgctttgctatgccttatatacattattatgtttagttatcacaaccttgtaagataagtaccatatctatattcagatgatgaaactgaggcttagagtacataaccacttgcatctggataacaggatttgaatctgcctgtttctgacgctcatgctattaaccactaacttaggttacacaaagtaaacaagcaacttagtggcacctgacagctgaaaatgatc

SEQ ID NO: 140328 - DNA, 432 bp, Homo sapiens
ggatactcttcaattaaactgatcacaacatgagaaaagagtaataggaaattttattctgcaacagaatcacaggcacctatagcctgcagtttttattattaatataaaatgtcagcaaccagagtataataatcctcctaactatgcatgtacctttcacattttattgcaaaactattaggctataataagaacatgcatcaagcagggacaccaatatcttgcctggcatttaattatcaaaaacacctgtgctacaatagtatattcacgtgtataattctttatatgtagacatttaagtgcttgaattatttaaaaaatctactgtctggataaaacttccataaccaatgacaaatgtcaaagctgctcttaaatgagcacagcaaagtcaaatgatataaacaataactagcaaagtcaaca

SEQ ID NO: 140329 - DNA, 418 bp, Homo sapiens
ctccaaaatattgataagactttcaagaacaactgcattcctgcagagaccatctggaaagaactagagaaaagcagaagagaaagagctccgttttgacagagctcagaaactatcaaaagatatatttcttgatggtgaaaggcaaaaactaatactcattttttcaatactcactgtggaaatagatgaactaggtgacagcagaactatctggatccaggatggttcaggaaacaatgagagtgggtctccatgaagaatcatacgaaacatctatatttctggattttttaaagtttttttttttttttgtaacaactgaacacaattaaaatgggctttttgatagaaaaaaatatttgctaaaagtgtccacaggaaaaatatgtaataagggcagagtgatttccatata

SEQ ID NO: 140330 - DNA, 828 bp, Homo sapiens
tggaaaatagcaggaactggtctggattctgtgtctggaaaaaagtattaaaaacaaacaaacaacagacaaaccagtagccagaaaaggataaaggaaacggtaccttagaagagaagcatgaagacatttttaaaaaggcttttataatgaggcagaagatttaaagtgttacataaaacaagttttagggaatgaggaggaccaatgtggcataaaaggtttttatggttaggctggaggtggagcaaggtggccaaacagaagcctccaccaaccatcctcctcacaagaacaccaaatttgacaacgatctacaccaaaaaagcaccttcgtgggcactaaaaatcaggtgagcgatcacagtacctggttttaacttcatattaccgaaagaagcactgcagagggtaggaaagacagtcttgatcactgactccatccctgtggcggtggccacatggtgctcagagagaacctgtgtgacggggaaaggagagtgcagcagttgtgggactttgcattggaactcattgctgccagcagtgggtagaactcagccgatgcccacggagggagcatttagaccagcctagacagaggagaatcacccatctcagcagtcagaacttgagttccagcaagccttgttaccataggttaaagtgttctgggttctaaataaaccaggccacaaggactgcaacacccaggtgagtcctagtgctgtgctgggctcagagccagtggacttgggggttacatgacctaatgagacaccagccagggtggctcagggagcacttgcatcccctatcccccaaacc

SEQ ID NO: 140331 - DNA, 550 bp, Homo sapiens
atgagagaccagcttagagatagaaaagattgagaagactaaacattacacaataggaagtccaagaaagaatggaggagatagtgtaaaaacttaatcctgagaattttccagaattgaagaaacccatgaatttttacttcagctaataagcagggtaaataaaaataaatctagacctcaaaacatgatagtgaaactacacaacatcaaggatgaaataaccttaaaaactacagagaagacaaactacaaaagaatagtctgacagcagacactcttagctagataggtaagccaaaagatagtgggggaaatatttttcaagtgttgaaggaatataattctacctagaattttatacccaaacacaatgtcattcaagagtaaaataattttcaggcacacgaaaacagcttattgtctgtagaatttagcaaatgtattattaacagacatatatatatgttatatatatatttcagcagaaagaaaagtgaaaacagaaggaaagtgtggaatatgagaaacagtagtgaacaaaaaaata

SEQ ID NO: 140332 - DNA, 308 bp, Homo sapiens
cctgttacccatatggctgctaccactgcatcctgttaaataatgtcttcaacccaagaaacctgcttcctagggaagtttctctctctctgcatttgttcccactagagaatgaccatcaccagattcctgaactgaaaatgctgttgacactttggaaactcgggcctctattaatagggtgaccaactatcctggtttaccttgagtacaggattttcaatgctaaaaccagaaaaaccaggatggttggtcatctgcctcagacctaataaataccagtcaataattcagccatgagctttctt

SEQ ID NO: 140333 - DNA, 291 bp, Homo sapiens
tccaacttccaatctcatcttctccaatctctcatccaccactaacctaaactcagatttgatcatgttattcccttaattataactcttcattcattccaaatgcactcctttgtttcttcttccatgccctttcttggcttagcctcattttgtcagtttgccaagcttctagtactcttcctatggccagttcctagggcctctatgaagccttccctgaccactcgatgagagcccttcctgctttcatttggtgctcctgggcctggttcttctcttgcagtgctc

SEQ ID NO: 140334 - DNA, 354 bp, Homo sapiens
ctggtagcatttatttgatgaggttcattttagagattgctatgcatgggagctctacacatctcctattcatgtaggagattagttggagcattaaagtctcttatgagcaagaattaaatcaggtgtcataaaatctttccatgggccagtgaaagatcggaagttgctcaagatggaaccaattggaaatgtgctccgaacaacccaggggcagcacagctcgtggttgccaggaggagatgctggttcagtttcatggaccttctgttttcttaagacaacatggaaattcaaaactttttaaatgtgaaaattttcaatctcaaatgttagtgactaattaaaattttc

SEQ ID NO: 140335 - DNA, 278 bp, Homo sapiens
ttgcatttctcaattgcatcggagaaactcctaaattgcatcagtgatcctgaagctgttaaagtaaagaattttctgtagaagaaagaaaagagaaagagaaagaaaaggcaaaaacttaatcatgcctgggatcttttgaggtagaaaaaactgacaagaaacaaactttccttatattctagtgtgttggaaaacagtggaaggactgtttgccaaattgtcttagcggttctcaaagatggctggccaaatcataagagaatacgcttaggttc

SEQ ID NO: 140336 - DNA, 378 bp, Homo sapiens
aggttagagaatcgcttgaaccagggaggaggaggttgcagcaagctgagatcgggccactgcactccaccctgggtgagagagtgagactccatctcaaaaaacaaacaaacaaaaaattaaaaaagaaaaaaacagtggctcaaaatgcataatgcttgcctagagcataacagggaaaaaaggaaaatcagatgcttttagaagactgatacactgaaaactatttgagcgttctgttaatcaataaatcctaaacctaccaatacaaatggaacttatcatgcagccaatccagtaaataatggtagctggaagtaatgatagtgattgtaaaaactatggctgggcatggtggctcatgcctgtaatccgagc

SEQ ID NO: 140337 - DNA, 517 bp, Homo sapiens
agcatcctgtgaccgagagggacaccacggctggagatggtgggatggaggatcccccacagcatcctcgatgctcagaacatctcattttgcacaaaaaagctccaaattctcttgagggctgaagccattcagagttggggtttctgtctctcaggccaaaagcatcctgtcggagcagctgagagcacagcgggaggggaggggcaggagggaacagccccgccacggcgacaggggattctctgactccaagagggcctgcagacaccactacccacccccagccctgaactgtcccctgccaaggggccagaaattcctgggagggggaccacagggggcctcgctcatgagaacagtgactgtggtcaggccacagctcacaagtcagcaactctgctcagccgccgcggtggtcccctcttgatggcttccagaaaaagcgttccaccttctgtcatcagtgtcctgaaatccaagaatattctccaaacagcaactgcagcaaaagcta

SEQ ID NO: 140338 - DNA, 2865 bp, Homo sapiens
attttagccagagctcagcccatatagtacatcagaaaacacaagctggagataaatttggtgaacataatgaatgtacagatgccctctaccagaaattagactttacagcacatcagagaattcacacagaagataaattctacctttctgatgaacatgggaaatgcagaaaatccttttaccggaaagcacacctcattcagcatcagaggccccactcaggagagaaaacttaccaatatgaggaatgtgcaaaatccttttgttcaagttcacatcctattcagcatcctggaacttatgtgggattcaaactttatgaatgtaatgaatgtgggaaagctttctgtcagaattcaaacctcagtaaacatctgagaattcacacaaaagagaaaccttgtgataacaatggctgtgggagatcttacaagtcacccctcataggacaccagaaaacagatgcagagatggaactctgtggtggcagtgaatatgggaagacatcacatctcaaaggacatcagagaattctcatgggggagaaaccctatgaatgtattgaatgtgggaaaactttctccaagacatcacatctcagagcacatcagagaattcacacaggtgaaaaaccctatgaatgtgttgaatgtgagaaaactttctctcacaagacacacctcagtgtacatcagagagttcacacaggggagaaaccctatgaatgtaatgactgtgggaaatcttttacctataactcagccctgagagcacatcaaagaattcacacaggtgagaagccctatgaatgcagtgactgtgagaaaacttttgcccataattcagccctcagagcacatcatagaattcacacgggggagaaaccttatgaatgtaatgaatgtggaaggtcttttgcccatatttctgttctcaaggcacatcaaagaattcacacaggggagaaaccctatgaatgtaatgaatgtgggagatctttcacctacaattcagccctgagagcacatcagagaattcacacaggtagaaaaccctatgaatgtagtgactgtgagaaaacttttgcccataattcagccctcaaaatacatcagagaattcacacgggggagaaaccctatgaatgtaatgaatgtgagaaaacatttgcccataattcagcccttagagcacatcagaatatccacacaggggagaaactctatgaatgtagtgaatgtggaaaaacttttttccagaagacacgcctcagtacacatcggagaattcacacaggggagaaaccctatgaatgtagcaagtgtgggaaaactttctcccagaaatcatacctcagtggacatgagagaattcacacaggggaaaaaccgtatgaatgtaacgtatgtgggaaaacttttgtctataaggcagccctcatagtgcatcaaagaattcacacaggggagaaaccctatgaatgtaaccaatgtgggaaaactttctcccaaagaacacacctctgtgcacatcagagaattcatactggggaaaaaccctatgagtgtaatgaatgtgggaaaacgtttgctgataattcagccctcagggcacatcacagaattcacacaggggagaaaccctatgaatgtaatgactgtgggaagactttctccaagacatcacatctcagagcacatcttagaactcgctcaggggagaaaccctatgaatgcagtgaatgtgggaaaaccttctctgagaagtcatatgttagtgcacatcagagagttcatacgggggagaaaccctacgaatgtaatgtatgtgggaagccatttgcccataattcaaccctcagagtacatcaaagaattcacacaggggagaaatcctatgaatgtaatgattgtgggaaaacgttctcccagaaatcacaccttagtgcacaccagagaattcacacaggggagaaaccctatgagtgtaatgaatgcggaaaagcttttgcccaaaattcaactctcagagtacaccagagaattcacacaggggagaaaccctatgaatgtgatgaatgtgggaaaacttttgtccgtaaggcagctcttagggtacatcacaccagaatgcataccagagagaaaaccctagcatgtaatggatttgggaagtcctgagggaatgcataccttaccacataacacatagtgcagaaactcatgtgacataggctgggaacttgtttcccttatccatttcctttttcattaggctcatagtttgtggaaaaatcccaatatgccgtttattcaggtggggctgaccatgggatgtggtgctaatgataaatattacatttacccttggcccttaaaaaaaaaaaagaaaaaccctcacagtcttcctggttcataagatggatttggaggttatttctgcagcaaacttgggtcctgtgtgttcaaaaccatagagcacaaggtcaaggaagctagagtctgaaaaacgaacaattcacttccaggtcttcatcagggttttgtttttgttgctttaaagcaagagttaagtttatagtctgttaagctcttacaaatttggcttattagttaaatggacgtagtttagcttaaactttatgttagagtgagatgaaaccctatgaatataatcagttttagaaaaactaatcagtttattgtgcatcagagacgtcacatgaagaagaaaacttgtcgacatccaggatgatcaggagccttcattaaaacagaaattttagggaaaaccacaaaaaccttcgtaaagtgaattgcattaaacatcaattataataaaatttcatattttgaataaatg

SEQ ID NO: 140339 - DNA, 2479 bp, Homo sapiens
attttagccagagctcagcccatatagtacatcagaaaacacaagctggagataaatttggtgaacataatgaatgtacagatgccctctaccagaaattagactttacagcacatcagagaattcacacagaagataaattctacctttctgatgaacatgggaaatgcagaaaatccttttaccggaaagcacacctcattcagcatcagaggccccactcaggagagaaaacttaccaatatgaggaatgtgcaaaatccttttgttcaagttcacatcctattcagcatcctggaacttatgtgggattcaaactttatgaatgtaatgaatgtgggaaagctttctgtcagaattcaaacctcagtaaacatctgagaattcacacaaaagagaaaccttgtgataacaatggctgtgggagatcttacaagtcacccctcataggacaccagaaaacagatgcagagatggaactctgtggtggcagtgaatatgggaagacatcacatctcaaaggacatcagagaattctcatgggggagaaaccctatgaatgtattgaatgtgggaaaactttctccaagacatcacatctcagagcacatcagagaattcacacaggtgaaaaaccctatgaatgtgttgaatgtgagaaaactttctctcacaagacacacctcagtgtacatcagagagttcacacaggggagaaaccctatgaatgtaatgactgtgggaaatcttttacctataactcagccctgagagcacatcaaagaattcacacaggtgagaagccctatgaatgcagtgactgtgagaaaacttttgcccataattcagccctcagagcacatcatagaattcacacgggggagaaaccttatgaatgtaatgaatgtggaaggtcttttgcccatatttctgttctcaaggcacatcaaagaattcacacaggggagaaaccctatgaatgtaatgaatgtgggagatctttcacctacaattcagccctgagagcacatcagagaattcacacaggtagaaaaccctatgaatgtagtgactgtgagaaaacttttgcccataattcagccctcaaaatacatcagagaattcacacgggggagaaaccctatgaatgtaatgaatgtgagaaaacatttgcccataattcagcccttagagcacatcagaatatccacacaggggagaaactctatgaatgtagtgaatgtggaaaaacttttttccagaagacacgcctcagtacacatcggagaattcacacaggggagaaaccctatgaatgtagcaagtgtgggaaaactttctcccagaaatcatacctcagtggacatgagagaattcacacaggggaaaaaccgtatgaatgtaacgtatgtgggaaaacttttgtctataaggcagccctcatagtgcatcaaagaattcacacaggggagaaaccctatgaatgtaaccaatgtgggaaaactttctcccaaagaacacacctctgtgcacatcagagaattcatactggggaaaaaccctatgagtgtaatgaatgtgggaaaacgtttgctgataattcagccctcagggcacatcacagaattcacacaggggagaaaccctatgaatgtaatgactgtgggaagactttctccaagacatcacatctcagagcacatcttagaactcgctcaggggagaaaccctatgaatgcagtgaatgtgggaaaaccttctctgagaagtcatatgttagtgcacatcagagagttcatacgggggagaaaccctacgaatgtaatgtatgtgggaagccatttgcccataattcaaccctcagagtacatcaaagaattcacacaggggagaaatcctatgaatgtaatgattgtgggaaaacgttctcccagaaatcacaccttagtgcacaccagagaattcacacaggggagaaaccctatgagtgtaatgaatgcggaaaagcttttgcccaaaattcaactctcagagtacaccagagaattcacacaggggagaaaccctatgaatgtgatgaatgtgggaaaacttttgtccgtaaggcagctcttagggtacatcacaccagaatgcataccagagagaaaaccctagcatgtaatggatttgggaagtcctgagggaatgcataccttaccacataacacatagtgcagaaactcatgtgacataggctgggaacttgtttcccttatccatttcctttttcattaggctcatagtttgtggaaaaatcccaatatgccgtttattcaggtggggctgaccatgggatgtggtgctaatgataaatattacatttacccttggcccttaaaaaaaaaattcacttgccgccgattacaacgtttcgactgtgccttggcgttccccaattttggcttgagcacatccccttttgccagttggcgttgct

SEQ ID NO: 140340 - DNA, 3078 bp, Homo sapiens
attttagccagagctcagcccatatagtacatcagaaaacacaagctggagataaatttggtgaacataatgaatgtacagatgccctctaccagaaattagactttacagcacatcagagaattcacacagaagataaattctacctttctgatgaacatgggaaatgcagaaaatccttttaccggaaagcacacctcattcagcatcagaggccccactcaggagagaaaacttaccaatatgaggaatgtgcaaaatccttttgttcaagttcacatcctattcagcatcctggaacttatgtgggattcaaactttatgaatgtaatgaatgtgggaaagctttctgtcagaattcaaacctcagtaaacatctgagaattcacacaaaagagaaaccttgtgataacaatggctgtgggagatcttacaagtcacccctcataggacaccagaaaacagatgcagagatggaactctgtggtggcagtgaatatgggaagacatcacatctcaaaggacatcagagaattctcatgggggagaaaccctatgaatgtattgaatgtgggaaaactttctccaagacatcacatctcagagcacatcagagaattcacacaggtgaaaaaccctatgaatgtgttgaatgtgagaaaactttctctcacaagacacacctcagtgtacatcagagagttcacacaggggagaaaccctatgaatgtaatgactgtgggaaatcttttacctataactcagccctgagagcacatcaaagaattcacacaggtgagaagccctatgaatgcagtgactgtgagaaaacttttgcccataattcagccctcagagcacatcatagaattcacacgggggagaaaccttatgaatgtaatgaatgtggaaggtcttttgcccatatttctgttctcaaggcacatcaaagaattcacacaggggagaaaccctatgaatgtaatgaatgtgggagatctttcacctacaattcagccctgagagcacatcagagaattcacacaggtagaaaaccctatgaatgtagtgactgtgagaaaacttttgcccataattcagccctcaaaatacatcagagaattcacacgggggagaaaccctatgaatgtaatgaatgtgagaaaacatttgcccataattcagcccttagagcacatcagaatatccacacaggggagaaactctatgaatgtagtgaatgtggaaaaacttttttccagaagacacgcctcagtacacatcggagaattcacacaggggagaaaccctatgaatgtagcaagtgtgggaaaactttctcccagaaatcatacctcagtggacatgagagaattcacacaggggaaaaaccgtatgaatgtaacgtatgtgggaaaacttttgtctataaggcagccctcatagtgcatcaaagaattcacacaggggagaaaccctatgaatgtaaccaatgtgggaaaactttctcccaaagaacacacctctgtgcacatcagagaattcatactggggaaaaaccctatgagtgtaatgaatgtgggaaaacgtttgctgataattcagccctcagggcacatcacagaattcacacaggggagaaaccctatgaatgtaatgactgtgggaagactttctccaagacatcacatctcagagcacatcttagaactcgctcaggggagaaaccctatgaatgcagtgaatgtgggaaaaccttctctgagaagtcatatgttagtgcacatcagagagttcatacgggggagaaaccctacgaatgtaatgtatgtgggaagccatttgcccataattcaaccctcagagtacatcaaagaattcacacaggggagaaatcctatgaatgtaatgattgtgggaaaacgttctcccagaaatcacaccttagtgcacaccagagaattcacacaggggagaaaccctatgagtgtaatgaatgcggaaaagcttttgcccaaaattcaactctcagagtacaccagagaattcacacaggggagaaaccctatgaatgtgatgaatgtgggaaaacttttgtccgtaaggcagctcttagggtacatcacaccagaatgcataccagagagaaaaccctagcatgtaatggatttgggaagtcctgagggaatgcataccttaccacataacacatagtgcagaaactcatgtgacataggctgggaacttgtttcccttatccatttcctttttcattaggctcatagtttgtggaaaaatcccaatatgccgtttattcaggtggggctgaccatgggatgtggtgctaatgataaatattacatttacccttggcccttaaaaaaaaaaaagaaaaaccctcacagtcttcctggttcataagatggatttggaggttatttctgcagcaaacttgggtcctgtgtgttcaaaaccatagagcacaaggtcaaggaagctagagtctgaaaaacgaacaattcacttccaggtcttcatcagggttttgtttttgttgctttaaagcaagagttaagtttatagtctgttaagctcttacaaatttggcttattagttaaatggacgtagtttagcttaaactttatgttagagtgagatgaaaccctatgaatataatcagttttagaaaaactaatcagtttattgtgcatcagagacgtcacatgaagaagaaaacttgtcgacatccaggatgatcaggagccttcattaaaacagaaattttagggaaaaccacaaaaaccttcgtaaagtgaattgcattaaacatcaattataataaaatttcatattttgaataaatgacatttttcctaggtatttttttctgaggaaatatgtcagttttagaattggagataaaatattcacctagaactgatgtaccaagcttctgttttgtaatatcaaaaattttatagaacatatataagaaaatatttacctatagaaaaactcactgtagaatgtgaagttaaaaatggaataatttgaattctgtggagaatgtgaataaa

SEQ ID NO: 140341 - DNA, 275 bp, Homo sapiens
aagtatagatgtacacctaaaagtttcttgagtccttgttgaaagaagacttatagggagggtcaaatcaccaggcatctctgagtctcgagaagagccatagaactaactgtactcttttctttccagagattgcagtatgggtggaaacagcttgaaatttttaacagggtaatattgataagtgtctcattaagaagacaaaatttcaccaaagattggacaaagctaaggcagtgatccacgcagacatctgtgggaagagtactgcatac

SEQ ID NO: 140342 - DNA, 253 bp, Homo sapiens
ctagcagggggcactccaggtacacgtctggtgtctgtggtgaagaagacagtgcagactgctttctttctccccacgtctggtcttactcttaggctctcctgtaggtgaataaacagcatttcaagaaaagagcgtaactcattcaggcaatccagttacaaaattgggccagaaattccagcaacagatgcagacaagacaagatagtcattgttccgtttgcaggaattacttacagaaaatcacttga

SEQ ID NO: 140343 - DNA, 388 bp, Homo sapiens
agatccgaggtaaagtgggaccacccccagcacccagaagctacccgataacttcagatattagtatttgcttggcttgagcacagtctcaactaaaagtcaggtacacctgtcctcagaccatgggctttttgaaccttaatgcaggatttcacatcagtcatgatgggtacccaggaaatactcattgaatgaaatcaccaaagaccaagaagcagcagctaaaatgtagaggtgagaggataaagaagaaagaaaggagaaacagtggaggatgtacaaagagaagggggtaggaagaggatccctttagccttgcttgaaatcttgctagagttgggaggggagggacaaaagctgctgggaaacagctaaaaacggaacgaat

SEQ ID NO: 140344 - DNA, 539 bp, Homo sapiens
  misc_feature (25)..(25): n is a, c, g, or t
ccatcagcaaggttctctcactttngtactcattagcaatgaatgaaatagctcatttcacttgtttgctgaatgttttatattcataattattaaacttcttaattgggcatggcactactattatctccattttatagatgtggaaaattgaggctcatgttaaatcatttttccaaggtcacatgttaagtcacaaagaagagcctggaatccaagataataaggctttttccaccacagctgacttttcaggtggaggcctttctacacttcactaaggttgctgaaaagagggtgtgggtgctactagcagagagatgttgggggcagggagagcactggagcagcctgggtcactcaggtcctcacagccaacttcagtccatagatcaaaagagcggcacaggccatgtggggtggctcatgcctgtaatcccagcactttgagaggccgaggcaggtggatcacttgaggtccaggagtttgagaccagcctggccaacagggtgaaaccccatctctactaaaaatacaa

SEQ ID NO: 140345 - DNA, 282 bp, Homo sapiens
atgcttaagaaataaagtataaaaagcttatttaaaatcaaagagcaagagaacgatagtgaactctttgaacaaaactgcagaatgaaaacatcattctccaattaactcaataccttagagagtatattgtgtgcctgtgtgccatatttaaattagctttacttgtaaaatcactatatgccacaattcaaaatgcagctgagaaatcactctttttgcagtacagacgataacctaattccaactatttttatctactttgtaattcaagtgatgcat

SEQ ID NO: 140346 - DNA, 358 bp, Homo sapiens
cgatccccctggcttgctcaggtctccaagtagctggaactacaggtgtgtgccatcacacccggctaatttttgtatttttagtagagacagggtttcaccgtgttggccaggctactctcaaactcctgacctctggtgatccgcctgcctcagcctccggaagtgctgggattacaggcatgagccaccacaccaggctccctcccctttctcttgtaaaaacactagttattggatttagggcccatccttagttaaggatcatctccaggtccttaattaaataccgctgcaaagaccctatttccatcaagtgtaaggcttgctctgtcatgagaactgagtcattgattga

SEQ ID NO: 140347 - DNA, 884 bp, Homo sapiens
ctggggaggccccagggtatcactaattagcagcgctgcaggaagtttgagcaagtttaatcatatctttaagcgaagtcttctggtagtgctagactactcttttctgtacctgctgatttttttttagaaacggaggctgatgacaccttttgagtacttactgtataccattctttctgccaaaaaagtctcgtgtattgtttcttgatcctatgaaggtagacacaattatccctgttttgcatttcaggaaaccaaaagcttaaagaggccataccctcaactttttcaatttagcaccaagctaatctgagagtgcttgaaggcttctctgatgagcccagagaaagacaagaggaagctgacattaaggatgaggttgatttcatttcctatgtgatacacggagtttaagatacagttgtgggccaggcacggtggctcacgcctataatcccagcattttgggaggtcgaggcgggcagatcagttgaggtcaggagtccgagaccagcctggccaacatggtgaaactccttctcttacttaaaaataacaaaaaatttagctgggtgtggtgacaacacgcctgttatcccagctactcgggaggctggggcaggagaatcgcttgaaactgcgagcgggaggttgcagtgagccgaaattgtgccactgcaactccatctggtgacgagcgagatccctccaaacaatagaacaacaaaaaagttttcggcgctcccccaaagatttaaacactgttgcggcgcgccaaatatagaaacgggcaacgctcacaaactcggcaacacaggggtttccaacaaacgcgggcgcgtctcacacaatggtgggtgtacagcccaacacaacaccgc

SEQ ID NO: 140348 - DNA, 452 bp, Homo sapiens
cctgggaacagtgagtcacagatggaaagaatctagacctctgaaagctgccctaccccctgattggactgagacgggagcgagaagtaagcccgctcttgcatgaagctgctgagatccaggactcattcatgatggcagttagcccaggctgaccactggggcttattcaaggaaaacagagtcccactcagcccctaccacaaccctgttaaacatgaatgggaggatgaataggtgacttcttttttttttcctcacctcatgtctcagaccacaaggccactgctcacatgaacaggtgccttccatttcccagtgtcggtaaccagaggcaatgaaagacacctgaggaagacataacactgtccccaaggcagcagagcctttaataatgataactgatgctcacagagccactctcctacctttcttcaaaaagaaaaggtatc

SEQ ID NO: 140349 - DNA, 357 bp, Homo sapiens
tgaaatatttttaattacaatccacaatagaaaatatattttctgttgtgattcaggataataccctctagtgtgatctattttatcctattctatttatttcagtaaagaatgttggtcacaatccaataaattgattatataatatgctaaccaattatgactttcagtttgaaaaacactggataagaaaacctattaaagtttctcctactgcaatgtgattatgattccatgatatggtggagtgtggaatcatgaattgttcatgccatatcaaaacaagtttgaactttgaagtagagtgagggcagtgatctcttgctctttcctactctgcacccctgaatctgattt

SEQ ID NO: 140350 - DNA, 671 bp, Homo sapiens
ccagcccagccaatgcttgttgaaggctcagtggcaggcctgttagtagcttccagacgcactctgggcttgcctccatctagtgtgtaggaagggcttgtgctgactggctcgtggaggaagcctgtcaaggaggcttggtggcctgatgtttcccacaaacactgtgttaggcagataatgaagttttcgcttccatcggtgtcctctctggccacgttaggtgaggggtttgctttagctttgggtatcctcttcccttggatacccagagatggtcattagtaataattttgtgtcttggctggagatggaaacaattagccaacagaagagaccagtcttctagagttgcaatctggaggacatcttttgctttgaaaagatacaattaagaatctgcaaacgatccgcactaatatccgtggtctttctgttcattaagattaaagtcatgtttttcagggaacgaatactcacacccctcccagattggtaatcagcttttattttccttgtcgggtggggtggggggatttccggggaaatagtttccaagccaaatctgaagggaggtactttttatggtttttcttggcaagtgctgcttggtggccaccagatgggtatctaaatgaccacaatgaaagccctggaatctgttttctcaa

SEQ ID NO: 140351 - DNA, 200 bp, Homo sapiens
agagtgaacattcttaatcactattcttcccagtggaaagtcataaaagtcacaagagaccaacttaaatcagtccaaaaatcctcctacttctgtttctgcctgttacatttcatctggttcaaactttgttcaaatattcttaacattctttatctcagtctacataatattatttcctatgttgcagtgtgcttccg

SEQ ID NO: 140352 - DNA, 306 bp, Homo sapiens
tagcggccagatttctatgcaaatgggccaactaccttttcctgagggaagactctgtcttattctagctccagagtcacacatacgcatgtttcagtctccctgcacacttcattcccctcatatttctgcctctcaagttctctaggtagactaaatcttttcacttgttcaatgatcaataattgaataatttaaacctttaaaatatggtgggtcctgcagtgactacagagtgaagaatctagtgtcattgccaacagtcacagggaggactttcctttctctcatagaaaatcttgggcc

SEQ ID NO: 140353 - DNA, 469 bp, Homo sapiens
acgtcatcgatccatccacccacccacgcaataaccatgtattgaatattgtctatatgctgggactagggaggacaggcataaataggactcagccctgtctttgagctcacagtcttgagtgggagtgtgcaatggggtgtgtacagaaccgtgagggagttcaggactcaagggcacagggtactttctatgccttagggcagtggtattccaagtgtggcattagcatcccttgggaccttgttgaaaatgtagattctcaggttctactggatgtcctgaaacagagactccaaggatgggggccagcagtctgggtcttacaaagctctccagggcattctggtgcatactcaagctttaggactactgcattagggggtttgcaaaggcttcactgaagaggtgacattcaagttagccattggagaatgagaaggaatttcttaggagggagagggcttcc

SEQ ID NO: 140354 - DNA, 221 bp, Homo sapiens
gtagcctctatttaaattccagctggtccaccatttagctggtgacttaagggagctcaagctcgataacatctgtttactcctttgtaaaatggaactaatgggagtatgtactaagtttgtaggaaatatagataatttctgtaaagtgcttggtaaagagtaagtagtgaaaatatatcagcccttctttatttctcattatgatgttcaactgagat

SEQ ID NO: 140355 - DNA, 219 bp, Homo sapiens
gtcccgggaaagccagtggtgtgattcagccttgagtcccaaggctgagaaccaggggagctgaaggtgtaactctcagtctgaggccaaaagccggagaacctggagctctgatgcgcaggagaagatgagtgtcccagctccagaacaggtggattcggtcttcctccacctgtttgctctatccaggccctccgtggattggatggtgcccactca

SEQ ID NO: 140356 - DNA, 367 bp, Homo sapiens
gtcaccctgtatctccttacctggtttgttctctcactttactaattcatttttttagtctttttttagtatttatcacccttgacatattatatatcagttcatttactatctgccttccccagcagaacataaactctatgacaacagacactttgcctgttctgttcactgctgaattcccaagtactgagaattcttcagcacagagtggcaggcactcaacatttgttgaaaaaatgaaacactgtcctttcttctttctgcattaccaaacctctccttgaactggctccctccccaatgacatttaaacaagttcaagtctcttctaccttaaaaaaaagaaaaaacaaaatacttttaa

SEQ ID NO: 140357 - DNA, 452 bp, Homo sapiens
ccccacctggcccaactcacttttccatccttatctgcctccacctgctacccagctgcctgactcttccatttctttgctcaggccttagtgtccctggaatgctcaaaatgctacccatcccgccaggtactggtgccgcctctaccaggaagccttccccagtgccccaccatcacctcctctaggccacaatgccatagacctctccacagaggatgtcatgtccacttttggtaacagctccctgttcctatggggaaccagccctgcaggggtggactcacaactagcgtatatggaggaatgggtgtgagactcaggtggtcctgtgaaattcacttccaggacttttgttgggactgtgggaaagtgttctcattcacttggcagtaggtgtgagctacgagccactggggccatctttgccacagtggcagtcagcctccagt

SEQ ID NO: 140358 - DNA, 382 bp, Homo sapiens
taaaagatcagagtaacctaattgcccttatgtagtaaattggttgaagaagtgatgatacatgacttccaaaatggggaagagctcctctgaactgatagggagtaaattcttggatatattaagtgaaaagagccaagtgcaaagagtgtttttaaaagtgagaaattatgagcatatgcatatctgtttcttctttttttcttttcccacaaagtaatacagggttaataaaccagaaactaatgagattggttagctgtgaggttatatgtgggatttggctggaaggctatggaaaggagaggcatgccctttctgaatagttttgcacttttggagcatgttagtgtttaaatactcaaagaaaggaattaaatca

SEQ ID NO: 140359 - DNA, 397 bp, Homo sapiens
ctggcagatcacttgaagtcaggagtttgagaccagcctggccaatatggtgaaaccctgtctctactaaaaatacaaaagtgagccaggtgtggtggcatgcccctgtaatcccagctacttgggaggctgaggcaggagaatcggttgaacctaggagcaggaggttgcagtgagctgagatcgcgccattgcattccagcctgggcgacaagagtaagactccatctcaaaacaaacaaacaaacaaaaaacatgacgatgatgcagaagagaaaagctttaaaagaccaggttttgaaaacttgaaactaacttggaagcagtactgaagaacctggctttaagacggtgatggaaaggacagattttttttccccagagccttggagtaatc

SEQ ID NO: 140360 - DNA, 500 bp, Homo sapiens
acagagaacatctggagttttgggctgccagcctgtgctgggctgtctgagttacagaacaggagatgtgtgctggactgggactgggagaattgctgagaaagaagaatgtgaggagagcctgggctccagtgcgtttgagttaacaaatcctatccttctccactgaactctttcaggacagtataaaaaagtttaatggcaaacttcactaagcaagaggatgggggacctggctgggaacattttccttatgctgggggagaggctgcactctatgctgttaggcagaaaaaaccaggcactgtaggctagaggggagtcaaaacatcccctacactcaacccacacctccagacaacaggcctgtgctcgactggtggtgagggcctctcttggaattcagttcttggccagaaatccctgccttagactggggaaggtttgagagaagctcagcaaacctggcggctgctctttgggtttggcaaactcgagat

SEQ ID NO: 140361 - DNA, 556 bp, Homo sapiens
ggctagctcagcaaatttatagtgtaaataagggaaaagttaacttacttaagagcaaaagccaataaacagttttaaggaccattaaaactattttatatgcaaacactgctgcaaaaacaatgaatgtgatcattacaccacttctgtgttctttgaaaagcactaacaagaatctctaagatatgctgactgaattcccaattccttattctagttagtggtgttatcccaagtccgaggctctaggaagcagactttacaggcagtggaactgacttttctacagttacataatttttaggcaggggatggtaatactattcactatgcccataaagaaacagccactatgtacgtgtgagtcatgatgtatgcgtgggtcattatgtgtgtgtgggtacaggaagcaacagcaaactagaggaaggggtaacacggatacccagggaagggcttcaggacgccatggaaggtgagaggaagattaggaggctggacagagaagtctctttttgacactgtccctagaaagatacaaaaataacacaaccca

SEQ ID NO: 140362 - DNA, 290 bp, Homo sapiens
taaacatgcgttaaaattcatagacttgttcaccaaaatgaagtcagctttactgtatgttaaaaattttaaaaaggtattttttaaaaccacaatataattacccacactaagattgctaaaatttaaaaaaccccagtgcttagtgttggtgaggacatgcaacgcatatattgctggaaggaatgtaaaatggtacaaccattttaaagaattccttggctgtttcttaaaaagttaaccacacacttaccctgtgaaccagccatttcatttctagatatttatct

SEQ ID NO: 140363 - DNA, 812 bp, Homo sapiens
gtgacacacttttttgcaaatatcaattgccagctccacctgaaagctctagtatattatacaaagtgtttgctgtaaccagagatggccgaatcctggctgctggaggcaagtcaaatcatcttcatttgtggtgcttggaagctaggcagctctttagaattatccagatgcccactaaagttcgagccattcgccatctggaatttcttcctgatagttttgatgctggttctaatcaggttcttggagtactaagtcaagatggtattatgagatttatcaatatgcagacttgtaaacttctctttgagattgggagcctcgatgaaggaattagctcatcagcaattagcccacatggacggtacattgcatctattatggaaaatggaagtctaaacatatattcagttcaggctttaacacaagaaataaataaggaagaagttcgtgctcaaaattaatcacacagcgagtaactagcagttctgggtgttccaattcttccaagattacatgagattgggtgcatttggagtggcgtttgccacctttttttattctaaaaaaaagtttgtgcctcctcctttttgttttatcttttaaaaaattatacaagtagtgtcttattgcagaaaaaaataagaatgtacagaatagcaaacagacaaatacaaatcactgaaagtctcaccattctcagaagattctgatttatatgttcccaatttcttttctatgtgtgtaaatatatatagtcactcctcattatttgtgcattctatacatgagaattcacctgctcacta

SEQ ID NO: 140364 - DNA, 2598 bp, Homo sapiens
gtgacacacttttttgcaaatatcaattgccagctccacctgaaagctctagtatattatacaaagtgtttgctgtaaccagagatggccgaatcctggctgctggaggcaagtcaaatcatcttcatttgtggtgcttggaagctaggcagctctttagaattatccagatgcccactaaagttcgagccattcgccatctggaatttcttcctgatagttttgatgctggttctaatcaggttcttggagtactaagtcaagatggtattatgagatttatcaatatgcagacttgtaaacttctctttgagattgggagcctcgatgaaggaattagctcatcagcaattagcccacatggacggtacattgcatctattatggaaaatggaagtctaaacatatattcagttcaggctttaacacaagaaataaataagccacctccgcctttagtgaaagttattgaagatttgcccaagaataaactgagttccagtgatcttaagatgaaagtaacatcagggagagtacagcagccagcaaaatctagggaaagcaaaatgcaaactagaatattaaaacaagacctgactggtgattttgaaagtaaaaagaatgaattaccagatggattaaacaaaaagcgtttacaaatcttattaaaaggctatggtgaatatccaacaaaatacagaatgttcatttggcgctctctgctacaactgcctgaaaatcatactgcgtttagtaccctcatagataaggggactcatgtggcatttctcaaccttcagaagaaataccccatcaaaagtaggaagctactcagagtattacagagaaccttatctgcattagctcactggtctgtcatttttagtgacacaccatatcttccactcttggcatttccatttgtaaaattattccagaacaaccaactcatctgttttgaagttattgctactctcataatcaattggtgtcaacactggtttgaatattttcctaatcctcctatcaatattcttagcatgatagaaaatgttttggcatttcatgacaaggaactgctgcaacacttcatagatcatgatataacctcccagctatatgcatggcctcttcttgaaactgtgttctcagaagtgctgacaagagaggagtggctgaaattgttcgataatatcttttccaaccatccttccttccttctgatgactgttgtagcctacaacatatgttctagaacgcctctgctcagctgtaatcttaaagatgactttgaggcagacagttgaagatatgcaagctaaagtcgaccagcaaagagttgaagatgaagcttggtaccagaaacaggagctgcttcgtaaagctgaagaaacaagaagagaaatgctcttacaagaggaggagaaaatgatacaacaaagacagaggctagctgctgtgaaaagagagctgaaagtaaaggaaatgcacttacaagatgctgcaagaaggcgttttctgaagcttcagcaagatcaacaggaaatggaactaagaagactggatgatgaaattgggagaaaggtatatatgagagatcgagaaattgctgccacagccagagacctagaaatgagacagctggaactcgaatcacaaaagagactttatgagaagaatcttactgaaaatcaagaagctcttgcaaaagaaatgcgagcagatgcagatgcctatagacgaaaagtggatcttgaagaacacatgtttcataagctgatagaagcaggtgaaacccagagccagaaaactcagaaggtgattaaagaaaatttggcaaaggctgaacaagcatgcctaaataccgactggcagattcagtctttacataaacaaaaatgtgatgatctacaacgaaacaaatgttaccaggaagtagccaaactccttagggaaaacagaaggaaagaaatagagataataaatgcaatggtggaggaggaagccaagaagtggaaggaagctgaaggaaaagagttccgtttgagatcagcaaagaaagcttctgctctttcagatgcgtctagaaagtggtttttaaagcaagagataaatgcggctgtagaacatgctgaaaatccatgtcataaagaagaacccaggttccaaaatgaacaggactcaagctgtttgcctagaacctcacaattaaatgactcttctgaaatggatccctcaacacagatttctttaaatagaagagcagtagaatgggacaccacgggacagaatcttattaagaaagtgagaaatcttcgccagagactcactgcccgggctcgtcacagatgtcaaacccctcatcttttggctgcatagaatgcatgtcaccttgagacggtcgagagagagacctattttgcaatcagtgacattgatttttagattatttatttaaaattcctataaagatcagccctttgtacagaaaaatgtgtctataaaaattatgtgttatttaattctgatactttttggcttgtaaatggcttcttgaactttttacaataaaaatgttttagaaactgttaaaactgt

SEQ ID NO: 140365 - DNA, 2831 bp, Homo sapiens
gtgacacacttttttgcaaatatcaattgccagctccacctgaaagctctagtatattatacaaagtgtttgctgtaaccagagatggccgaatcctggctgctggaggcaagtcaaatcatcttcatttgtggtgcttggaagctaggcagctctttagaattatccagatgcccactaaagttcgagccattcgccatctggaatttcttcctgatagttttgatgctggttctaatcaggttcttggagtactaagtcaagatggtattatgagatttatcaatatgcagacttgtaaacttctctttgagattgggagcctcgatgaaggaattagctcatcagcaattagcccacatggacggtacattgcatctattatggaaaatggaagtctaaacatatattcagttcaggctttaacacaagaaataaataagccacctccgcctttagtgaaagttattgaagatttgcccaagaataaactgagttccagtgatcttaagatgaaagtaacatcagggagagtacagcagccagcaaaatctagggaaagcaaaatgcaaactagaatattaaaacaagacctgactggtgattttgaaagtaaaaagaatgaattaccagatggattaaacaaaaagcgtttacaaatcttattaaaaggctatggtgaatatccaacaaaatacagaatgttcatttggcgctctctgctacaactgcctgaaaatcatactgcgtttagtaccctcatagataaggggactcatgtggcatttctcaaccttcagaagaaataccccatcaaaagtaggaagctactcagagtattacagagaaccttatctgcattagctcactggtctgtcatttttagtgacacaccatatcttccactcttggcatttccatttgtaaaattattccagaacaaccaactcatctgttttgaagttattgctactctcataatcaattggtgtcaacactggtttgaatattttcctaatcctcctatcaatattcttagcatgatagaaaatgttttggcatttcatgacaaggaactgctgcaacacttcatagatcatgatataacctcccagctatatgcatggcctcttcttgaaactgtgttctcagaagtgctgacaagagaggagtggctgaaattgttcgataatatcttttccaaccatccttccttccttctgatgactgttgtagcctacaacatatgttctagaacgcctctgctcagctgtaatcttaaagatgactttgagtttttttttcaccatcggaataacctggatataaatgttgtgattagacaagtttatcatctcatggagaccacgcctactgacattcatccagacagcatgcttaatgtttttgttgcactgacaaaagggcagtatccagtatttaatcaatatccaaagtttattgtggactatcaaacacaggaacgagaaagaataaggaatgatgaattggattacttaagagagaggcagacagttgaagatatgcaagctaaagtcgaccagcaaagagttgaagatgaagcttggtaccagaaacaggagctgcttcgtaaagctgaagaaacaagaagagaaatgctcttacaagaggaggagaaaatgatacaacaaagacagaggctagctgctgtgaaaagagagctgaaagtaaaggaaatgcacttacaagatgctgcaagaaggcgttttctgaagcttcagcaagatcaacaggaaatggaactaagaagactggatgatgaaattgggagaaaggtatatatgagagatcgagaaattgctgccacagccagagacctagaaatgagacagctggaactcgaatcacaaaagagactttatgagaagaatcttactgaaaatcaagaagctcttgcaaaagaaatgcgagcagatgcagatgcctatagacgaaaagtggatcttgaagaacacatgtttcataagctgatagaagcaggtgaaacccagagccagaaaactcagaaggtgattaaagaaaatttggcaaaggctgaacaagcatgcctaaataccgactggcagattcagtctttacataaacaaaaatgtgatgatctacaacgaaacaaatgttaccaggaagtagccaaactccttagggaaaacagaaggaaagaaatagagataataaatgcaatggtggaggaggaagccaagaagtggaaggaagctgaaggaaaagagttccgtttgagatcagcaaagaaagcttctgctctttcagatgcgtctagaaagtggtttttaaagcaagagataaatgcggctgtagaacatgctgaaaatccatgtcataaagaagaacccaggttccaaaatgaacaggactcaagctgtttgcctagaacctcacaattaaatgactcttctgaaatggatccctcaacacagatttctttaaatagaagagcagtagaatgggacaccacgggacagaatcttattaagaaagtgagaaatcttcgccagagactcactgcccgggctcgtcacagatgtcaaacccctcatcttttggctgcatagaatgcatgtcaccttgagacggtcgagagagagacctattttgcaatcagtgacattgatttttagattatttatttaaaattcctataaagatcagccctttgtacagaaaaatgtgtctataaaaattatgtgttatttaattctgatactttttggcttgtaaatggcttcttgaactttttacaataaaaatgttttagaaactgttaaaactgt

SEQ ID NO: 140366 - DNA, 2636 bp, Homo sapiens
gtgacacacttttttgcaaatatcaattgccagctccacctgaaagctctagtatattatacaaagtgtttgctgtaaccagagatggccgaatcctggctgctggaggcaagtcaaatcatcttcatttgtggtgcttggaagctaggcagctctttagaattatccagatgcccactaaagttcgagccattcgccatctggaatttcttcctgatagttttgatgctggttctaatcaggttcttggagtactaagtcaagatggtattatgagatttatcaatatgcagacttgtaaacttctctttgagattgggagcctcgatgaaggaattagctcatcagcaattagcccacatggacggtacattgcatctattatggaaaatggaagtctaaacatatattcagttcaggctttaacacaagaaataaataagccacctccgcctttagtgaaagttattgaagatttgcccaagaataaactgagttccagtgatcttaagatgaaagtaacatcagggagagtacagcagccagcaaaatctagggaaagcaaaatgcaaactagaatattaaaacaagacctgactggtgattttgaaagtaaaaagaatgaattaccagatggattaaacaaaaagcgtttacaaatcttattaaaaggctatggtgaatatccaacaaaatacagaatgttcatttggcgctctctgctacaactgcctgaaaatcatactgcgtttagtaccctcatagataaggggactcatgtggcatttctcaaccttcagaagaaataccccatcaaaagtaggaagctactcagagtattacagagaaccttatctgcattagctcactggtctgtcatttttagtgacacaccatatcttccactcttggcatttccatttgtaaaattattccagaacaaccaactcatctgttttgaagttattgctactctcataatcaattggtgtcaacactggtttgaatattttcctaatcctcctatcaatattcttagcatgatagaaaatgttttggcatttcatgacaaggaactgctgcaacacttcatagatcatgatataacctcccagctatatgcatggcctcttcttgaaactgtgttctcagaagtgctgacaagagaggagtggctgaaattgttcgataatatcttttccaaccatccttccttccttctgatgactgttgtagcctacaacatatgttctagaacgcctctgctcagctgtaatcttaaagatgactttgagtttttttttcaccatcggaataacctggatataaatgttgtgattagacaagtttatcatctcatggagaccacgcctactgacattcatccagacagcatgcttaatgtttttgttgcactgacaaaagggcagtatccagtatttaatcaatatccaaagtttattgtggactatcaaacacaggaacgagaaagaataaggaatgatgaattggattacttaagagagaggcagacagttgaagatatgcaagctaaagtcgaccagcaaagagttgaagatgaagcttggtaccagaaacaggagctgcttcgtaaagctgaagaaacaagaagagaaatgctcttacaagaggaggagaaaatgatacaacaaagacagaggctagctgctgtgaaaagagagctgaaagtaaaggaaatgcacttacaagatgctgcaagaaggcgttttctgaagcttcagcaagatcaacaggaaatggaactaagaagactggatgatgaaattgggagaaaggtatatatgagagatcgagaaattgctgccacagccagagacctagaaatgagacagctggaactcgaatcacaaaagagactttatgagaagaatcttactgaaaatcaagaagctcttgcaaaagaaatgcgagcagatgcagatgcctatagacgaaaagtggatcttgaagaacacatgtttcataagctgatagaagcaggtgaaacccagagccagaaaactcagaagtggaaggaagctgaaggaaaagagttccgtttgagatcagcaaagaaagcttctgctctttcagatgcgtctagaaagtggtttttaaagcaagagataaatgcggctgtagaacatgctgaaaatccatgtcataaagaagaacccaggttccaaaatgaacaggactcaagctgtttgcctagaacctcacaattaaatgactcttctgaaatggatccctcaacacagatttctttaaatagaagagcagtagaatgggacaccacgggacagaatcttattaagaaagtgagaaatcttcgccagagactcactgcccgggctcgtcacagatgtcaaacccctcatcttttggctgcatagaatgcatgtcaccttgagacggtcgagagagagacctattttgcaatcagtgacattgatttttagattatttatttaaaattcctataaagatcagccctttgtacagaaaaatgtgtctataaaaattatgtgttatttaattctgatactttttggcttgtaaatggcttcttgaactttttacaataaaaatgttttagaaactgttaaaactgt

SEQ ID NO: 140367 - DNA, 375 bp, Homo sapiens
tttctaaattttaaatttcgttttcaagtttctttaaatagaagagcagtagaatgggacaccacgggacagaatcttattaagaaagtgagaaatcttcgccagagactcactgcccgggctcgtcacagatgtcaaacccctcatcttttggctgcatagaatgcatgtcaccttgagacggtcgagagagagacctattttgcaatcagtgacattgatttttagattatttatttaaaattcctataaagatcagccctttgtacagaaaaatgtgtctataaaaattatgtgttatttaattctgatactttttggcttgtaaatggcttcttgaactttttacaataaaaatgttttagaaactgttaa

SEQ ID NO: 140368 - DNA, 756 bp, Homo sapiens
cgcagagggctctcttcctccttctgcaaaatgatggtaaaacttgaagtctgcagtctgaaattcagaagcgagtcatcaccagagctcaaccgtgctgacaacctgatctcaaatttcgaacctatagaagtatgagaaattaagtcctgttgtctataagctgcttatctatggttctttggcatagcagcctgaactaatacaaaagtgatatccttttctgtatttcattggacagaagctgaatttgtacccctatgctgttaaaaaaatgacttaaaatggattttcagaatgaaagataggaaatggcttgttgaaacactaaaatgttatctgcttataagatttttaaacattggctgaaattgttggaactgatatggccaaatgaagtccatgaagaatcagattgcatatgttagagcccaaatttccattgtgtgtttcatactaactctccctgaatttgcatgtgacttgagaggaagcaagaagagatgacagtatatgtctcatgactttccatattcctactttccttccagcaatcccttacagaacccacctcttaggccttttctaatcactgccttaaagccagtataagaaaacaaatttcagctggactgctatctcctttttggccaacctacaacatgatattttcctcaaaacccaagggccatattactgtcatcaggctgtaggccattttattcaataaaaaactgagtcactaaaaaaatagta

SEQ ID NO: 140369 - DNA, 183 bp, Homo sapiens
ctccatcatgcccttgcatatggcgtgttgacaagttgggaggactgccctaggcacggctggctgatggactctgggatgaggcactgccttctctcacccagccgcagacacacagctgtcctgggccttgcagagatgatttttctcttaagttactgaggctgaagaaggtgtggtcca

SEQ ID NO: 140370 - DNA, 104 bp, Homo sapiens
caaacaaacaaacaaaaaacactgagatctccatgtgagtaaagtttagtttaggaaaccataaaaaccttgttaattgagcctctggcaatagtttttttaat

SEQ ID NO: 140371 - DNA, 240 bp, Homo sapiens
ctgcactgtgtcccttgttcctgcccatctcttcagctgcttctggtgtcctgctccccttggcccactgtgcacgtgcccagctggctttgtgttgtggctctcttcaaggtctctgtgctagttggccagtctttttaggccttcagagattggttgcttttcctccagatgtcactacttggggcctagcatcttgggtgatctaaggaagacctctccctcacttccagtcttatg

SEQ ID NO: 140372 - DNA, 356 bp, Homo sapiens
cctgtgactgggccaccacgctgcaagtacagcagtgagaatgaccgctaggaaaggacactggcggcaatagggggctctgcccagggctctctgcctgggctggggcaggccggctatcaggcagtcgcacccccagagcggcctcgtttgttacccccacaggcaggagttggataaatactcagcctcctccccgctccaggggagtcactggagggtgctcagcaggggcactaagccatcagcccttacaggtgcatccccttccctactccctgtcttcctgggtcacctcccaaagaaatgaacagcttccacatcaaccctggcctcattctgcttccagggagagt

SEQ ID NO: 140373 - DNA, 358 bp, Homo sapiens
aaatcacaaacccagtgagtgtgccaaagggatcaggccccagtaccctgcctcttaatatagccctcacccaccagcctgcccagggaaaatgagaggcaggcctctgaggtgcacagacatccatctgctatctatgtaattaaggaatatttactctgatgcatagctaagaactaaaagcagaataactagatatactgctgcttggggaatctctgctaatagttaacacatatgtagtttccaacatgactgaataaagctatactgatgttctggtgaaaaaatgtgtatccaatctatacagaatataaatagtgcgaacagtaaaattcaactagccacaattctaaac

SEQ ID NO: 140374 - DNA, 183 bp, Homo sapiens
tctgcttaaaaacctaggaagatgactctctggttcacaataaagtctaccctggaggtcccgagacctgcccatctccctcttctagcctcatttctctctacacccagcagccagcctgacaccagagccacaatggccttcccaccctctccacaatacgtgtcacatttcccatgcctt

SEQ ID NO: 140375 - DNA, 546 bp, Homo sapiens
tcctgattttctatctctgatttctcaatactttcagactcaatagatgttctgatttttgctacttcttgagaaaacgcttccataaaattctgatctgcttcaatctggactagtttcttccaggtccctgaaacttttccttctgggacctccactgaccttcttcctggagattcttgtcacctcctccttgtgccagattacctgtttccagggttcactactgagaaagtgtgcacctaaggagaattctgaggactttgtctatttagaaacatctttactcttatcttgaattaattttggctgagtgttgaattctaagtttaaaatcatttttgatcagaatcttgaggtaactgctctatttttttttttttcctggttgtcaagctcttgatgcttccaaagccattcagatttgtggtattctgtctctcccatatcagcacatatgattctgtgtgacaaacaatggaagtattaaggtttattggataaatacttatgtaagaccatcaatcaaataaatcacacattata

SEQ ID NO: 140376 - DNA, 503 bp, Homo sapiens
gccgtttcccagggactctgggtgaaagggctttcttggcatgaaggaggataggataggatgtgatgtggtgtggtctgaccttctctggaaggagacccggggctgcagtggactcccgtagtagacttctctgaacctcagtttagcatctttgagaccatctctgcccatcctacttcatggggctgcagatagacttgaaaagatttaggaacattgtagagcactgttatgatgaataaactcattcattcttcaaacatctactgggcagtcgccaggcaccatccaaggccccgtgaattcagaattgaatctggccaggcttctgaaccatcttccaaacttgtgagctcccaaaagatgaaggacgccacacaagcacgaggtctctttattaagtgacctcctgcccacccaaaactgaatactggtcactgcccacccttgtgccatgctttttgttactaactctcgaccctctgtcagcttaggctgcc

SEQ ID NO: 140377 - DNA, 402 bp, Homo sapiens
gttctggcaatagtactgtgaatctgttgttgttggcagcatcttggttcgaggtggtctttttgtgtgtggagtaggagcttagccaataagtgtagattgggagtcaggatctagcctgctagatcaggactaggtcagggctaagattcagaatagggttttagtccaagtagggaaaagaaggactgtagattagaaaatcttgctgtctaatatgcgcctcccatttcctaggtccaaaacagaatttctaatatcctttaattgtctcctaatctgtaagagacaatggcacctccattcctccaattgacttagctgaaaatcttgggagaaaattctggactcctttttctgttaccccaagtccaagttgttagcaatccccttggctttacc

SEQ ID NO: 140378 - DNA, 478 bp, Homo sapiens
agccaaaaacacttttctttttatatctgcaaactaagcaagaacaaaatcatcagagagaaaaataaacaattccattgaacaatcttgccacataaccacagaaaaagcattgttgcagaaacaggcataatgctaaaacaagtgttcagtttgtttctgactcttagcagccatttgggcaggacaggactggggtgctgttgggtggggctgctatgaactggggactagaactgggatgtagctagggtactgcactgggcagcaggaactaaggggttgaattttcactatgagggcataaaagatttccgagcttcacttactgagtaccactctactcctttgtcactctcttggtattctgaaatctcaccaggttggtgaagcttcagagattgcagttgctcccctgaatcctggagaccaccaagtgattaaattgagaaaacatgatggctcagtgggccagggt

SEQ ID NO: 140379 - DNA, 543 bp, Homo sapiens
ttatcctcaaagttaagatgaggaggccaaagaacagagaggctgagggactggcacgagttcacacattaagaaacagaactggctgggcgcaatggctcatgcctgtaatcccaggactttgtgaggccaaggcgggtgaatcacctgaggtcaggagttcgagaccagcctggccaacaaagtgaaaccccatctccactaaaaatagaaaaattagctgggcctggtggcatgtgcctgtaatgccagctacttgggaggctgaggcaggagggttgcttgaacccgggaggcggaggttgcagtgagccaagattgtgccactacactccagcctgggcaacggagagagactgggtctcaaataaataaataataaaataagaggcagaagcaaaagatggtcaactgtcttggttggctcagaacagaagagtttttcctggatgtgggactttgggtgccaaaatggggaaagctccaagcaaactggaagtgtcagttaccccacccagagttgaacccaggcagtgaggctcc

SEQ ID NO: 140380 - DNA, 305 bp, Homo sapiens
gtcattccgagccatcacagatctctgctagggacctctgaggcagctgagaaatagctgtaatgtccctagatgggaacagccatcaggaagtctttcctagtcctatctgtagtttaattgaaaagggtcaacttgagctttattaagtctctcttgctcaagaagagctccaggctgacttctactagaaagtaaaaggggaattgggtgtggttagggagatggaacgggtgcggggaactcaagcaggacaggtgtcatcttcagtatgtctttgctgctaatagaaatcaagcacattg

SEQ ID NO: 140381 - DNA, 311 bp, Homo sapiens
ctcctaccccaccctaggacagacaggacccctgcacttatccagcatgcatttaatgtgcacttcctgtatgcccaggcctgggttaggccgtttcacaggtagatactggagaaccagagggtttggggatcagaaggtagtgaatttgctttctttagaccaacttcagaaattggtttgggccaggcaaaatggctcacccctgcaatcctagcactttgggaggccgaggcaggaggactgcttgaggccaagcattcaagaccaacctggccaacataacatgacgatacccccgtctccaaaaa

SEQ ID NO: 140382 - DNA, 204 bp, Homo sapiens
taatgagtcctccctgataaatggcatggatttagaaattcacaggtcctggggagtgtggaatagaattcatgaccctggcctcattatctgagcttacttcttacaactattacctttccattgcattttccacctgaagccctcacttcacttttacagtgttcttggttcttaaagtcaataagaaaagggtagtatttt

SEQ ID NO: 140383 - DNA, 245 bp, Homo sapiens
tagtgagctgtaaacactagggctggagaagtttggtgtggggggctgggagcgggtgggggtggtgcagagggagagggtttgctctcaaactccacttcatgaagcaaagtcctagagtttcctgggtcagatggccattcggagtcagcccggataaccccagggaagaagtgctttttaatgagcagtgtttaaacactcggcaatttttgtgtgtgttcacctcttcaccccttacttct

SEQ ID NO: 140384 - DNA, 692 bp, Homo sapiens
taatggattttaccctaataagatcccacctgtatttgggattatttgcttgacttgtttctttttctcacagctgaaacacaaccgcaaagaacacaggggcttggtttgcctcctttgtctgcaagtgatttacaggggaagattttaagctctgctgttggcctgaaagtttctctgcaatcttactccagatttccccaggactgctccttccctactttcaaaactgctgggttctgtacgtcaagggataatgcttggcagcatatttaacttcatgctttcacaatgagaatgtctgtgcctttgctgtcagcttcactgctgaaacactctgcaccacattactcacaaccctgtgctttatcaaagcagctcgacataacaatcctcactatatacaagttaatcccagtatggcccaaattatcaaggaagccctctataaaacagcaggattcatttcacaaacatctcctctgagaaatgtaaattctctatttaaggtctatggtaataaactacaagaggattgagagtggttttggaaataacaaataacactgttagccttttcctatgactgcaacaccaggagtatgtaattaggttatttctaagaaaccagaagtgctcaggccattctgatgtgctttgagcatgaaatcttactacttttccaaggtacc

SEQ ID NO: 140385 - DNA, 267 bp, Homo sapiens
aactgttcgacagaaggcaattatttcaagattgaaataaatccctggtttttattaaattagttaattaagagcaaaacagctctgctgctttcaatgatgaagactgctttggtaaaaacagaaatagaagactctaagggaatgcaaatattaaaccacacagcttgccctgttttaaatccaccgtgtataattgaagaagctctctagacaacatgggccctccaggctgctgtaatgaaattgagcagaaaaattacaagg

SEQ ID NO: 140386 - DNA, 382 bp, Homo sapiens
ggaaagatccagggccaaggatctctctgtctcaaaaaaaataagacacatgaggctgggcacagtggctcatgcctgtaatcccagcactttgggccagaaaactccatccttttctaagaagagaagaccccacaaagctcacctctctggcttgggggtgccctagatagtagcagatgagttcccctagggcactaactttcctcagggatctctgatgggtatgtacaaggactaggttccctcacagttcaggaacaattccctacactctgcaccccagctgacacacagctggtttagaccagttgagccatggagctatcttcattccaccaccctacccgccccagccccaaagtccattataatattctta

SEQ ID NO: 140387 - DNA, 771 bp, Homo sapiens
atttctacgttaattgagcaaacatttgcaccatggctgctctgtccagggcttttgagaatgctaagtgctgctgaaataactttgagagtctaacttgaaagggcctccagcagaattgagtataaacccgagattagcacccgtaaaggtccataaagggcttaatttgtagtccttttatttatctttagcacagtgtgaagtgtgatggactagggtggaaggtgaaggagcaaggtaaagagagactcccgtgacaatcagcaatacgcctttaagttcattgggctttgcttatctttactaagccatcttttcttcttagagaaactgcaattattattggtcacaagaaatgaatattctcatgtaccttacaggatttgtttatcctgttagtctttaatagcattgtagataaatgccctgccattgtagagaggtaatcatacttttagtttttgataatttagattatgtggaaaaaattctgttttggtgaaaatacgacattgttaggactagtaacaaaagcatatatatgatgctcagtgctgccaattatttctttttacatttgaaataacatttacttaatttaattagtatacaggaagatctgttgtaaacatttcagaaaattcagaaagcattgaaaaaaaggtaaaaagtcatttgaaactcaacaccaaagataatctcagttaatattttgacataattccttttactactttttcctaaatgtatttgtatgtatgaatatat

SEQ ID NO: 140388 - DNA, 378 bp, Homo sapiens
tgaagcaggaagactgcttaagcccaggaattcaagtccagcctgagcaacatgccaagaccttgtcgcttagaaaaaaaattataataagatctgtgttctgaagacaacactgatacaaggcagagaaaggctgagaaggaaataagacacaaggcaaggtatcaggctattgcagtaatcgaggccaaggatgacagtggcccagaggtatgaacagactctagtgatctttaggaagcacagctgacaggacaggacaggactcacctcatgaggaaggagtaactgggcagatgaagaaggcattcatggagaggaaagcatagggcctggcttctatgacatatatacacatacctattctgcttcataaat

SEQ ID NO: 140389 - DNA, 411 bp, Homo sapiens
agagaagccggctggtgggggaggggtctgtgtggagagcagcctcctccccatgtcctgcagtccacacctacctctctcgacctgtaactgggcctcctccgtgcccagcttggcttggcagtattgctctgtgcaacagtctccaagaagtctctatgcctccccagctcctggggcacccgaaagggcagcgctggataagtctcagtaacacagagcagtcctggggagagggccgctccatggcttttgggcaggctgacctggaatgagctggcaggcctgattccagtcctgagggacaggtacccacatcaggaaaccaccatcctaactggccccatttttggcagtccgaactgagaggctaagcagggaaaggagaatgtagaattccaccccacctta

SEQ ID NO: 140390 - DNA, 408 bp, Homo sapiens
tctttgcctttaggggtctttgctttttgatatatagcagagagacaaagaaagagatagtaaaaagaagtattgaaatgagtagaatatctcattcaattgtgctagatatgacttttattggcacatttaaaagggtaatattaatgttgctgtttgtaattggaaaaatagaaatgtaattcttgaggcaccgctccagtttatccttttgggaaaactactaagtcatttgtctttactgattatatttcttttgtaaaatatgtttactgttttggtgcttccatagagaaaaggataagatgattaataaagttatttaaaagactgaaggatagtagcatgccagcccgaatactttttatttttaaatatcaaatcactagtgcagatgagcatgttgat

SEQ ID NO: 140391 - DNA, 540 bp, Homo sapiens
attctgggtgggcccagagccttccaaaggttttacgttgggcacaggggctgtctgttgatggatcgagggtgatgactgtattttggtgtgattcccttagggctgagaagtacaaaaggggaggaagtcagtttcattttttagcattatttttcatttgcatgagcagaggccatggatgcaggctttataaaccagtcctgttgatgccgtggatggtctgctttaattgtcttcaccctgcgcctcactcaaataatcacttccagggagagggcatttaaaaaccaaggagggccagagggctggaataacttgttttgatagttgttcagtatccgctgctggagtacctggaagcgtgacccctctttcaggagtcaagaacaaagaagtgatttctccagggatgcgaaggtgatctatagtaactcccgcactgacttttttttttggtcctctgcaaatgatttacatatggagtaagaggcagttccacatcatgagcagctgaaagcaaagtcaatgagctagaaa

SEQ ID NO: 140392 - DNA, 277 bp, Homo sapiens
ggtgaagtttcagagattcaacccttagcctccaaggagacacaaatggccatgctgtgaactgtctttggaggtggcagctctaggagctgagggccttcgttcaacaattgcaagaaattgaattcagtccacaaactgaataagcttggaagaggacactgagcatctgatgagaccccagctgacactctggttgcagtattgtgaccctaaatagaagacccagttaaaccctgcccagacccttggctcatggaaacagataataactgga

SEQ ID NO: 140393 - DNA, 121 bp, Homo sapiens
ccatcacttctgccacccctcccatggccaccaccagaccttctcgacacctctacctctaaaatcataaatgccagcatttcagaccaagacctgtgacccatccagctcttttcttact

SEQ ID NO: 140394 - DNA, 261 bp, Homo sapiens
ccaagttatcttatcagaaagtgtctcctgggtagaggctctgagatctgctgctatttctagaactctgggagggaagaagaagccatctctctgtttcacactctggccctgcacacaggaaatgcttctttccttgattgtctgtctatgccgaataataaatgctcatattgaaagaaacgcaaaccacccctccctttcccctctatctctttaaggcaggcatcaaaggggaaagctgctctggaggcctgggga

SEQ ID NO: 140395 - DNA, 547 bp, Homo sapiens
gtgatggaagagtagtgagagaaagcgagggatgggtctggaataagtgggcgcacagagcaggctgcgaaagccaagggagtggagactttaggagagagggatcaaaattataatgtggccagacaggcagcagatcagaactgccgagtgtcctttgggatagttcaaatgaagggtcactactgtcgtagcaaatttaagggaaaagtaaagaagaaataaaagagaagtggggaaatagacaaggcagcaagcatgaactgctctgctgaggcttagctgctgaggaacagtaggaaattagaggtcacataggattaagagatttttatggcagatattagattcacaatctttaatgtgatatatccacaaagggtaaaatatttagaaaaaatagagactggctggtaagtaaaagcagaaatattgaactaattgttgagtgcggttcttattgaggtcttttgaaatgtatagtaacttatagggcactagaacaagctaaaaaagtgtatgaatcactaagtcctcattctgaaaa

SEQ ID NO: 140396 - DNA, 477 bp, Homo sapiens
agcatttcctccctaaccccatggattaatccattttaacagggttgttaatgaagctacagatatttctatgtaatgatttggccaaactaccaagtacttattcagcatataccatgtgtgagaaagcgcagcaaagtaatgttaatagtctctgcccacaaagagcttattaccaatttagaaaaacatgtaaggttaacaacacaaggcaatataaaaatgtcaagaagttttggacgccgaggcaggcagatcacaaggtcaggagttcaagaccagcatggccaacatggcgaaaccccgtctctactaaaaatacaaaaaattagccaggtgtggtggcatgcacctgtagtcccagctactcaggaggctgaggcaagagaatcacttgaacccaggaggcggaggttgcagtgagccaagaccacaccattgcactccagcctgggcgacacagcaagactccgtctc

SEQ ID NO: 140397 - DNA, 355 bp, Homo sapiens
agtcagggtcagccttccagaaatagaactggctctgaggtggcctcgggcatgaaggagggatacagcctatcccagcaggagtgaaagatgaaggaccttggagtgacctcaagctctttgctttaaaaggaattctataggtttttttttttccaaggccttgaggaaaagtcctagggtcaaaggtcagaagattcccagttggttaaataagtgaacaaaaaggctttctgcagggaggaaagggggtctaccttgtttctaggggcaccttccttgctgcctccattttctttgcccctctcatcctttgacaaataaacatccaacacagtggctgaagaggaggctc

SEQ ID NO: 140398 - DNA, 110 bp, Homo sapiens
tgctgccccactcagtgggccaggctgttaaccacctgtggagttagttgtttggtctaacaggcctagtgattttcttaagttcttttctaatgagaaggcaattggtg

SEQ ID NO: 140399 - DNA, 275 bp, Homo sapiens
aaagccagatttcaaatctcaaacttctgatttggttcagaattctttttcatttcttggtggtaatctccaaggtaaaaaatattttaaaaggcatttaaaatgattttatcaaattttaggataacggtagtacacagccacaaaaactaagagtaatctagtgtatagttttctaaatattattttgggtggaacttatggttaattctcatttgttatggagcaaagattgaagttacttttaaatatcatacacatacttttataatcag

SEQ ID NO: 140400 - DNA, 572 bp, Homo sapiens
atattagtgatgctcccctttacagagtagcttctgccaactctagctgcagatgcaccctgcacaggaggtccttggtcagcctgaggttgaaatgcagtggggagccatgcaggccgaccactgcagagcacgaggcctgaaggattgagtaagggaagccagggaagcgtcagtaggacacagtcttgggcctggtaacagaaaggaggcaagttttattttcttattaaatatagccagatggacacctcaagtgaccccagaggagcctttgaacccagagggattgccttcttaacctttatatatggggtatgggaaataaatcttagttgcccccaagacttgtgacctccagtatggaggtctggggcagaatgatattggcccatgcatataattattaagcaattgtggatggtgttctgcaaatggagaaaggggaaaggggattttcttggtaaatccagaatcaggatacaatgtctctttgctatatgaccttgaaaatcttccggcatccatggataccgttgtgcatcaagctggcatgtagaagcgaaattgtt

SEQ ID NO: 140401 - DNA, 216 bp, Homo sapiens
atcatcatatgaacttaggatggattcttaggaagatacaagaaaaagctgaagtattgccccaaagtttcaactccttattttcaacacctatactgggcagtatctgagattctccaataaataatcaatagataaatgaatagaaagtagggttacaaagaagaaggaatttttacaattttttttaaatgttgaaacatgctggagttgggg

SEQ ID NO: 140402 - DNA, 625 bp, Homo sapiens
gaaacctccattttctattacaaaaatactacatgactcttaatacagaaaaatcgagagaaggaaaacaattcccagtgatgaatatcattgggcagctctttcctacaagacttaaaaaaaaaaaagaattaaacttagttctccttctggcttttaattacagagctttgcaaatgtgcaaaacaaagaagaggggagagtgtaaagagccccacgtgcccatcacgtaggcggcttcagcagttactaactcacggcgagtcttggctcatcgtttgtcttatctccccctgcccctctgcccactgccttattttgatgagatcgggcgcgtttagggtggtatggccgtagactgctgccttattttgatgagattgggcgcgtttagggtggtatggccgtagactgctgccttattttgatgagatcgggtgcatttagggtggtacggccgtagaccactgccttattttgatgagatcgggcgcgtttagggtggtatgggccgaaactgctgccttattttgatgagatgggcgcgtttaaggtgtatggccgaaactgctccttattttgagagaacggcgctttagggtgtaggccgaaaccgctgcttatt

SEQ ID NO: 140403 - DNA, 568 bp, Homo sapiens
gaaacctccattttctattacaaaaatactacatgactcttaatacagaaaaatcgagagaaggaaaacaattcccagtgatgaatatcattgggcagctctttcctacaagacttaaaaaaaaaaaagaattaaacttagttctccttctggcttttaattacagagctttgcaaatgtgcaaaacaaagaagaggggagagtgtaaagagccccacgtgcccatcacgtaggcggcttcagcagttactaactcacggcgagtcttggctcatcgtttgtcttatctccccctgcccctctgcccactgccttattttgatgagatcgggcgcgtttagggtggtatggccgtagactgctgccttattttgatgagattgggcgcgtttagggtggtatggccgtagactgctgccttattttgatgagatcgggtgcatttagggtggtacggccgtagaccactgccttattttgaagcatcactttttctgtaaatcctttagtgtgtcctcattttatttcaaaagatctaagtttattgtccccatattgttagatatta

SEQ ID NO: 140404 - DNA, 470 bp, Homo sapiens
  misc_feature (35)..(35): n is a, c, g, or t
ggctgggtgtctagacgatccctggctcagtgatntcattgtagccaacatttgatgatatttggttgtaagatagagaagaaggagcacactggtgttttggtcctgtaccctactggttattaaggatttttcatagtatcccctggtggttagattccccaggcagggccatgaaagatagtattttaccctgtgctatatctgaagaccagactaacagtatcacacaccctaaccacactgaagaaaatatctcttttaaaaatgtattcagtggtcgggcatggtggctcatgcctgtgatcccagcactttgggaggccaaggcaggcagatcatctgagttcgggagtttgagaccagtctggccaacatagtgaaaccccatctctactaaaaatacaaaaaaattagccgggcgtggtggcacatgcctgtaatcccagctactcgagaggccgaagcag

SEQ ID NO: 140405 - DNA, 580 bp, Homo sapiens
tctctgattcaccaatatatgcccagtgtctaaaaaattacctggcatataataaatgttcaatgaaattttaaacatgaacctactatatgcaggtgagtatgctagatctgctctgtccaatataatagccatctgtggctctttttaagttaaataaaaattcatcagtcacatcttaagtattcacacactgtaagtgctcaatagccatgtacagataatggctcctgtatgggacagtacagatatacaacatttccatcattgcagaaagttctactgaaaaccactgtgctagaccctttgcaaacttctcatttaatttcacaaaaatggcttgtggcaaggagaagtgtctttatgctggagttaagaaagtgaggctcagagaagttatatgacttcccaaagtcatacagctgggatttgaatacaggtctgtttgactccaaaacttgtggcctatttgttgcaagagtgcttaatacaaattggttcagtcaatattattatctttgaacaatggaaggagaaagtaagtttcaatccaaaataattgagtgacttatacattgac

SEQ ID NO: 140406 - DNA, 134 bp, Homo sapiens
gcctcccaccggaacatgctcctccagaggtcctccccatctcagtcgatggcaactccatccttccaactgcttggtccaaaaaccttggacctatccttggctcctcccttccactcacacctcacacctaa

SEQ ID NO: 140407 - DNA, 540 bp, Homo sapiens
cccctcacgttttcttcaacttcagcgtccagcagtgttaaaaatagttgtagttgttgttggagtattaactataacccagtgcagaagaggtatgccgcttggtattggtaatgtgctggcgttcaaccaccatttgtgtgctcttttggggcatagattttgcttacctacggaatacttattttaaacgctttgtattgaagcattgttttcggtttagaacaacccatgtgaaattgtttttgttaaatatagtacactcataaaataggttttagctcaaggttgggggaataaacgggccattttatattggaaattttgattttgtgaggacgttctatggttgcaaccagtggttggaaaaactatctagtcttttgtatttgaaattctataaataaatacagcatctagctgaaaggtgtgcagatgtacataacaggagagttagttcaatagatgaaacattttaaataagtctcattggatctatttattgtaaaatttaatattcagttacaagcttgtggcata

SEQ ID NO: 140408 - DNA, 214 bp, Homo sapiens
taatacagaaaatgtggccaacaaccaccacggctcccagagaactcctggtccagcaggggaggcacgtcacagattattcaaatatgatgcgataattgctaaaacaaaaggtatgaagaaggggctctgacaacaattcttaaagtagatttaaatacagtacacagaaaaaaataactggaaaagatgatttttaccacagacctgggat

SEQ ID NO: 140409 - DNA, 269 bp, Homo sapiens
gccacccccaccctaatcttttattttgcagatgggttctctacctggccagtgccatgttgcctgtttctttactgtaactgtggtgacaaagaaaagggaagatggagcctccatgttgaacatacctggcccccagcactaactccctctctggatatctggaacaaggaggaccttaaacttaacaataaagccaatgatggttctaccagtctccccaaagcctcaagtttaaaagccatatgaactggctgatagtggaaaat

SEQ ID NO: 140410 - DNA, 374 bp, Homo sapiens
accctcagcagtgggaacacagcaaagatgatgagggactgaagcgtgggacacgcagggtgcagggcccacagagcccagggcgcagggagtcctgagggaggatggcatgttcggggaagagagagtgcctcttggggaggcctgtggccactcatgcatccaaagccacacagatgcaggctgcggaggcagccctgggttgtttactacaggctgagtaacccctttctgaaatgcttggaaccagaagtagttcaggtttcagatttttttcagattttggaatatctgcattatacttaccggggttcagcaaccctaatctgaatatccgaaattccaaaatgcttcaaggagcatttcctttgagt

SEQ ID NO: 140411 - DNA, 570 bp, Homo sapiens
gataatcaggaatggaatagacaggtgatgatgcagctgttggtgggtaagaagtggggaggagctcggggaggctgcccctggaatgtggactcgtaggtgggaaggatatacagttaggatgtccctgagagatagtgaaaatgccaggaacgagtgggctcctggcatgacaaaagaggctctggaaaaattgcctcagagggagaggaaagggagaacaggagagagttggaaattgtagatcctagagtattatagcggtgtcccggcgtggtggctcacacctgtaatcccagcgctttgagaggctgaggcagtggatcacttgaggtcaggagttcaagaccaacctggccaatatggtgaaaccgtatctctactaaaaaaaaaaatacaaaaaaaaaaaaattagccggcatggtggtgtgcatttgtagtcccagttactcaggagcctgaggcaggataatcacttgaacctgggaggcagaggttgcagtgagccgagatcagaccagtgcactccagcctcatcatgacagtgcaagactgtcaaaaaaaaaaaaa

SEQ ID NO: 140412 - DNA, 415 bp, Homo sapiens
gtactgtaagtctacaatttataatggcatatattttggagtacaaagtaatgttgtgatttatgactgctatgtggaataattaaattgaactaattaacatattcatcacctcaaatagttatcatttttttgtggtgagtacatttgaaatttactttcttaacaatgttgaagtgtgaaatacactattattaagtagaacacttatcttaaacaccctaagttacattaaccaggttaaacttgaaaactcatgcagctaagagtaacttccgtttcttaccagcatgatcctttcttattaacagggcagaaaagtgaaatcatttccacagctgggattattacttctttgcctttggttgcttatttcagtgggttagaaaagcaatctaggttctttcaacaattc

SEQ ID NO: 140413 - DNA, 187 bp, Homo sapiens
gaatttacagctcattttaccataaaagataatgtgtaggttgtttaaaacctgttctttggccgggtgtggtggcttatgcctgtaatcccagcactttgggaggctgaggcgggcagatcactaggccaggagatcgagaccatcctggctaacacggtgaaactctgtctctactaaaaataca

SEQ ID NO: 140414 - DNA, 150 bp, Homo sapiens
tgccagccctgcctctggggcatctgtaaccacagggagcacttggcctatctccctccatctcttcttttttcacgatcccatgtatttatccgtgggaaggaaagcttcgtttctttttaaagtgattataccgtagatgcagttttg

SEQ ID NO: 140415 - DNA, 388 bp, Homo sapiens
agcctctctcctctctaccactgccaaaccagagagctctggtctctgagaaaggagcacacccttcccagtcttgcccataatcccacctctactgccccaccaggccatcgctgctgcccacgtgtgctgtcagatgagattctgctgcttcccctccatgtgagagatcacactcaatgtccccattcttaaaaaaaaaaaaaaaaaaattcaggtctgtcttcccttcaccaccaaacccattaacctcctgcctaccctggtcctccttattccccacctcccccttactctccagtcctgcctgccttcctgcaccactctactggaccacctgcagcatctgtcatgaaaatgatgctgtgttacacccaaagggtgcttt

SEQ ID NO: 140416 - DNA, 402 bp, Homo sapiens
agatccccctccatcccctcccacccctcaatagaagacaatgcaacagctctgtgtataaggatggacaagtctccaggctacctatttacgtgaaagaaagcaaggtgcaaaattgtagcatgctatcatttgtgtggaagaagcacacacacacacacacacacacacacacacacaaactgaaactaatgcaatgtgattttttatagcttctttgtaccctgcttgtttaattttaaagagctacaaacccacaggaattatcctgctacagcatctttcagacttgattcttttgttgcatcctgtcttgttctttttctaaacagagagtaaactcaccagatttgtgttttagaagggtacaactgggagcagcatagaggatggattggaatt

SEQ ID NO: 140417 - DNA, 162 bp, Homo sapiens
cactgtcagcttggccaagtcaattttctcagctacaaatgaaaagagactcagggagaaagatcttggaggatgactaagacctgaagtcatgtttgtgaccattttcaatcttgagaaaaacagaaaatgtctatattatattaatgattggcttgagag

SEQ ID NO: 140418 - DNA, 102 bp, Homo sapiens
ttcctatggctttgaaataactatattttaggaaattggctctttgcttataagatgtactgtgaatttttttatttgtcagtttatcttttattcctccaa

SEQ ID NO: 140419 - DNA, 523 bp, Homo sapiens
gccaaggcttagacaggttttataatcacacagataaatggaaatgtcaggagttgaacccagttagtctgcatccacagtctgtacttttagttattatacagatgtaggataatccgtcagagtaactcattagcactacactaagttcagggtcacagtcaggccctctgtctcacatagcttgcctcttttgttcttggattaaaccttgacaatttctttctacaaaatgtgtgaaatctgcctagaaagcctgagaaaggaagaaagacacatgagctaactacagaccaccacatgagtatagaggaagaaaaattaaaaaaaaaaaaaaaaaagatctacacaaaagcataccaccaccagaaataaaagtctccttactctgtcagctgtggaatttccaggctgcctgctctaagctgacctttcctacagggaatttggggtataggcatactttgtccacaaaaagttcacagttaatcctcccattcaaggaagacgtctgtcctataag

SEQ ID NO: 140420 - DNA, 309 bp, Homo sapiens
aacattcccaggaaaacagcagagtagccaaatgccccttgtaacatagcctgaggatccactgggcaatacaggatcttgctttgcattttctattttccaggatcctctaaatctatcagatccatggatttaggttagaaagaggctcgtgaagctgtagtgtcagctataagaagcccaagtctgggcaggttccaacaacccatgagtggtgagatggctctagccgttgccctcaaagtctttagtcattcacttaacaaagatattcttggtgcctaccataagccccatggtggtgttaca

SEQ ID NO: 140421 - DNA, 243 bp, Homo sapiens
  misc_feature (164)..(164): n is a, c, g, or t
gcgtgcaatggcaggatcatagctcactgcaacctcaaactcctggctgaagcaatctttgtgccctagcctcccaagttgttgggattacagtcgtgccccaccatgcctggctaagttgttttttttttttttttttttttttttttttctttttttttttnttttttatttttttttttttttttcatttaaaaaaaccacacaaaaataattaccacacaccaccgccgccatattttc

SEQ ID NO: 140422 - DNA, 327 bp, Homo sapiens
agaacgaataaagaattttggcaattaactatgtaactgagtcccagactctgctatcatctggggtggcagataaaaacacacagtccaaataaaaaacctgattttttattttagcctgaatcacccagatcacagcaggattttgcttgaacaacccagacagattgcatccattttctgctttactgtgcttgtggaagccaggctgttagtggtttcttctggaatgggagaatgtatcacaaaaaggttggaacctgaaaaatttctagaatttcattgttctgtgcttcttaataaacaatgtgacactaccaaggaatg

SEQ ID NO: 140423 - DNA, 165 bp, Homo sapiens
gtttgctctttgacttgtacagtacctctaaataggcactgatgaacagacattagagacttaaagtttaatgatactccacagacaaaaagggtcaattatttttatgaaaacttgcctactctttgtatgttttaccattgtaggggaaaaaaagtagtgttt

SEQ ID NO: 140424 - DNA, 519 bp, Homo sapiens
gctttaaagtctttgtcagttaattccaacattggtgttgtctcaggttgatgtgtgagttgagattttcccagtgagtatcacccactttctgtctataccagcggtcccctttctagttcctcaagccaggactagagagctcttgatgctctttctctctgctgatgctcatttccgggtttcagcctgctgtgcatccaggctggggaacatcagagggaaaaatgataaactcgccgccagtttattggtacttcaaattgtggtcttcttcatccatctgctattatttttcatagttctcagatagctgctacatgcattctgttcaggttttacagcttcattcagtgaaagagacactgaacctagaaccctgttccttacatcttttgtttctatttttaaggaccatccatgttgctttaagtacagctgtttaattttgtctgctgcatagtattctgtcatgtttttgtcaaattttgtttgtcttttttttttttttttttttgg

SEQ ID NO: 140425 - DNA, 295 bp, Homo sapiens
tttataaaattttaactgttgatttaaaattagctttctatactttaataatactaataaaaatcagccttaatcttagacatagcatatgaagtgtgttataatgtccaggtggctttgtattttgataacgtgctattattatggactcaaatctcgtggaagacttgttttcttttaactgcaccatgtgaatatacgataccatgaacgtgagtccatttcttctttaaaagtggttctgctcagtttttttaaaaatctgattttaaataaaacttgataatgttattat

SEQ ID NO: 140426 - DNA, 460 bp, Homo sapiens
gctgagtctcctgagagcagttctgaaccacagtccagagcagggcaagcctcaccttggtcaagcaatgtcaccagagcctccgctggcctttcctgccattgttccctatgcctggggaggtggtgtttaagggacaggtgtttctgctgttggggaagtcccacctgctgcctccactggagaaagtgactcctctctgctgggtgacagtgaggggagcccctaagtcccaggcaatgtgccttgcagctcattcctgtccttagagacactgcctggggcctgctcagctgaactgtgcccctcgcctgctgcagagacaaggccaggcttctttttccctctgcacccccctacccccaggaatcggggttggtctccaaggcttctccccccagtctcaaacatgcaggcctcactcagctgcccagctccaggagccctaggtcacccctgc

SEQ ID NO: 140427 - DNA, 209 bp, Homo sapiens
gttccttccttgatgctccccattcagaacaaatgccattgatgaagctgcaattctggcctttggccaaaccccagccatagcccattccctgaggctggaactagtacaagagacgggtatcagccagcacttcccgaaccatgcccatagcctaaacccgcaacccacatacttcagttacgggatgaggccattcatttggctgg

SEQ ID NO: 140428 - DNA, 137 bp, Homo sapiens
attcagtgaacatatgactaaaggaataggctttcagatgtactaaaagagcttgctaagagggtatacggaagttctgtcttattttttttgtttgtttgttttgtttgtttgttttaaataaagacttaaatgcc

SEQ ID NO: 140429 - DNA, 455 bp, Homo sapiens
caccccaccttaaccagggccctctgcactgggcaaatctctcaccctctgcttccaggggaggagggtaaaggaagagaaggcacccacactgggagctccattcctgcctcgcctttctccttgaccctagcagcccctctattgttggtgggtggggagggcagtccaatgtccccgagagcctgcggagaagccccgccagagaaccagagcctctctctccttcttgtcttctggtctttccacatcagcctccacccacactccaagcatagtctggaccatacagtggactgggtccaggggctcccttggctcccctttgtgactgggttggccatggggagaaaatctaacatgtagtggatgcttactgtggatgggggttgtgctgagctaagtctttcttcgacacctgtttgttctgccatttctgtaaccccatgaccctg

SEQ ID NO: 140430 - DNA, 317 bp, Homo sapiens
gaaactcacccagagaatccgggagctagaagggactctggagctctgaaataagtctggcagtctgggtttggattccaactatctaaccttaacatctctgcattttgggttgttagtgggccctggaaggattttgtatggattaaatgagacaacctgtgaaagaaacatctagagcttaatggagacatctcataaataattttttatacatgattcacagttcaacatcatcaaaaatgcccagaggagggagagcatttaactaaggacacacagttggcagcaaaaccagaatcagaacccaggtcttt

SEQ ID NO: 140431 - DNA, 748 bp, Homo sapiens
cacagctaaaacaatatttaacgggtgtaaatcacagtaggatccacaggaaagagaggtgttgtcactgcagtgcagggggctaacaagaggtctttctgaccctgagagctggaaggaacctgaaaaaagtcatctcatccgtcttcagttctagattagaggctcaaagaccatagagttccctacagagctccccaacagaagaactcatccattccggggcgtctgaactgactgctgcgaagtcctttcttgaatcaaactgtagctctttctgagaaggagggagacaggaaaaaggatctagggtcataattttctgaacactcctaatctaagagggaaaataccgtgggcctgttagagccataatgatctgtcaccatcaagtcaaatcactacaagtacattttaattttgtaaccttgactcccaatctgtctccttctcgtgtctgggcggcactgagggaggaaggaatatttgaggtcagacaccctgggttcagatatcgacatttaatgggtttcaagtcggtttcctgaaaactcctactggaaagggtgattcagagaagcaagttggggtcccgcacgtggcactctggttgtggtctctcaccccctccccacccagatgctccatgtttcaatagcagcaccgctttcccaccacagtccagcctctgcctaatcctcctcctcctcctccctttcctgtatcgcagccaccctgtcctttctcc

SEQ ID NO: 140432 - DNA, 419 bp, Homo sapiens
agttggcgcctttttttgggggggcaggatcggtggtaacatctgtaatcccagcaactttgggaggtcgaggcaggcgtgagccactgcgcccggccaagagaagtttttcttaaaatcctttttttgggggggccaggatcggtggctaacatctgtaatcccagcaactttgggaggtcgaggcaggcggatcatgaggtcaagcaatcgagaccatcctggccaacatggtgaaacctcatctctattaaaaatacaaaaattagctgagtgtggtagcacgtgcctgtagtcccagctacttgggaggctgaggcaggagaattgcttgaacccaggagacggaggttgcggtgagctgagaacgcaccactgcattctagcctgacgacagagggagactccgtctcaaaaat

SEQ ID NO: 140433 - DNA, 110 bp, Homo sapiens
ttacagttgttagaagctgtgtaggattgcaagcttggtgttaccagaatcgtgcttgttaaagagaaactaaaaacctgcacttttattattaaatgtcttgacttttt

SEQ ID NO: 140434 - DNA, 385 bp, Homo sapiens
ggtgtgtacatgaagagttaggggcttgtggtccagtgggagggagacacgaaaactgacaattacatttgaatatgctcagtgtggtcatgtttcctgaatccatcctgttttctctatctccattattgtcacctggtcaccttagttgctctctttaactccagggtcacctcccagcatatcctttagctttcactcctgcctcctacgcattgtcctcctcatggcaaccatggcgtcttttaaaaccatgattcaaattatgtcacctgtttgcttaccacctcccaatagtgatcaccataagtcaaggaaaatccagacgtcatacagtggctgcacatgtgtggttggcccccctcttgatagcgttgtctattat

SEQ ID NO: 140435 - DNA, 410 bp, Homo sapiens
atgcagtgagccttgatcaggtgactatatgtccatccccagccccactccccaaaggccttttcttctaatggatccagtgagcatttattccttgtctgtcatgtgctccattttaatcatcctcccccaaagaccttttcttccaatggctcccctgagcatttatggagtgtcttctgtgtgttctgtatattcacacctcctccccagaattgttttcttaacagtagatccagtgagcacatatgcaggacctgttgttttggggagtacattcttcttccttacccctaggagagcctgttccaatcacaaggcctctcccaaggtcctttcctgtgataaatccagagctgagtttataatgatcacccctttcccactcccttcagtacccctaggattcc

SEQ ID NO: 140436 - DNA, 336 bp, Homo sapiens
atttgaggagagttagaaaaggtggaacagtatattaggatggagtagcaaggaggagataagaacagaatgttaaattagcagtgtaaaaataatatatgacccggttaagagacagtgagtaccagagagcccgtttgtgcacaggagtgcaaaaatacacacagaaggcatgtgctcactcccttcctagttatcatttgttagcatgagcttaagcttcttataagtttattttttcacttaacaaattagaaagttacatttgtaataataccaaaaaggtttctaatacagttcttgaattttcccttatctgactaccttctaaccaca

SEQ ID NO: 140437 - DNA, 165 bp, Homo sapiens
gtacctggccacagcctgttttgctgtttctttaaacaatagatatttagctatatgctttgttattgtgtagttacttttaaactttagttttcttgataataaaccaaacatatattccagagtgatttttgagagcattgggatgtcttttacagttacttt

SEQ ID NO: 140438 - DNA, 390 bp, Homo sapiens
gcacgtagtgagagccccaggctgggattgtgagtgctggaatgaaacccttctctttatggctccatctggagtgtgtgggtggtggactagaatcagtggttttgctgaccttgtttttaagctgctgcagccttaaggtccaaaatggaaaacagaccaacttggagttagctggggctaattctaaacctggctgagtttgaaaactcagctcctggggtgtgtctgaatctcagggagagtgtaatgcttttcttgcccatagatggcagcatctgcactctttgccggctctgtgaatgtgtgtgtgcacgtgcacgtatgtgttacacacgtgtgcacgcatgggagtcatagtttcttactttggtaaatcttgagctgcgg

SEQ ID NO: 140439 - DNA, 411 bp, Homo sapiens
gggagctcggaacccccaccacctgagtcttctgggatgattgccttgagtcttatctttgcttttttgtctttcacactgtaaccatctccattctcagcacattaggaaccgggggaaatgtgatgaagctttataagtgaggagagactctttctttcttaattgatgttttctctcttcttcctagggtgtggatggcgtcataaaaaggtatgtgtgggaggacagagatggtccttttgtgcagtgaggagagatttatagccattagaattgtcctgggtttaattagaataaaacatctcccagggcagaaaaatgtcgatattgttttatcataaatttctggtcataaatcagcattcgaatgttctataactattaagaatagaccagggactcagtggt

SEQ ID NO: 140440 - DNA, 428 bp, Homo sapiens
aaacaataaagaattttaaaagacttaaacccacaaggagggggatgaactagagaggagacaacaatattttggaacgtggaaagcaaatgaaggaatgataactgactaagcaaacctaagaacgctatattgaataataagcatgcaacagaaaaaactttgaactataccaatcaacactacagaatcttcccctaaaagctcagtaactggcagtaccagatgatgtgaaatcaatgatttaggatgaataacactgattgaaaactatataagaagcaattatggctgggcacagtggctcatgccgtgtaatcccagtactttgggagggctgagacgggcagatggcttgagcccatgagttcgagaccagcctggacaacatgatggaaccccatctctactaaaaatacaaacattag

SEQ ID NO: 140441 - DNA, 255 bp, Homo sapiens
cgcggcgctctagaggacccttctgccacgactcagtaactggcagtaccagatgatgtgaaatcaatgatttaggatgaataacactgattgaaaactatataagaagcaattatggctgggcacagtggctcatgccgtgtaatcccagtactttgggagggctgagacgggcagatggcttgagcccatgagttcgagaccagcctggacaacatgatggaaccccatctctactaaaaatacaaacattag

SEQ ID NO: 140442 - DNA, 317 bp, Homo sapiens
catctttgtacattttcctctcgtaactatgcttttctaagcataaccgacctttgattcagcagttggacagttgcctacatcatcccgttcttttcaggaacaaatgacagtaaaacctgaatatttcaggaatgaggtatttcaggataacaggattttgtgtgtgtgtgtgtacctaaaaatataacattagaatatctgaacttaaaaaaaaataacttttttggatgacaatattttaaaaatagatatatttctttctttctaaacggaatatacataaataatttaatatattcttaatcactgaagat

SEQ ID NO: 140443 - DNA, 290 bp, Homo sapiens
ttcagatgatcctctggagaatgacaagccgggaagagagatagggagtgtcagaggcactgcattttatgcagaatgctcagagaatgtctctctagattgacatttaagcagagaactgaaggaagtaggaagcaagtcatgcctgaatctagagaaagaagagtaacaggggcataggaaaagcaagtacagaggccctgaggcagcaatgttccctgatgtgtttgaaaaaaacagggaggccagggtggctggagaatggctggactgcaattgtaataaagctt

SEQ ID NO: 140444 - DNA, 389 bp, Homo sapiens
ataccggcacgatcagctaataaaacttccgagatggagtctcactgtgttgcccaggctgtagtgcagtggcgcgatcttggctcactgcaacctcagcctcccaagttcaagcgattctcctgcctcagcctccctagtagctggaattacaggcacgtaccatcacgcccagctaatttctttatttttagtagagacagggttttgccatgttagccaggctggtcttgaactcccggcttcaagtgatccacctcccaaagtgctgggattacaggcatgagcctccacgcctggccgaagagcacttcttaataaacatccttcatgctaaactctgtcccggagtttattttctaaggaatctgacctgtgacaaatgataa

SEQ ID NO: 140445 - DNA, 515 bp, Homo sapiens
gctcttggctggcctggccttcccccggacgcatctcattcacagaggaggcccgctggctggacacgcctctcggatcatctctgacactggcagggatttcagccatctcgacatctgattcctgcataagatattccttgccaagaaaattgaccacagactgtagagagaaaaaagacaatcagactcactatgagaacctgaaagtagctctcatattccctgggtcctgccataatgctcacactttactgtaatgttcaaatctgccttcccaatgcagaatcagctctgtggacacagcaatctgtctgaattttttccttttctacataagtacataaatatgagtcctttagatgaaagggtctctaaaccaaagagaagacaaggagaaatattctgggtgaatccaactcaattggccgatggcagctcaccttgtattagaacttaggggctcatttggggacctggaggcagatccctgcatctgataccaaccactttcc

SEQ ID NO: 140446 - DNA, 239 bp, Homo sapiens
cagctctggggttggtgcattctgtaaatgatcagtttgacagtgtaggtagtagagacatgctgctttaagaaagaactttgtatctctattacagagagaagatataaagatattagttcagtcttccataacacgatataacagacttttcatttttatgcgggagggatctctaactctttagtctttatcttaaggaaaatgtaaaggtattacagggttgtaagcatgacaac

SEQ ID NO: 140447 - DNA, 137 bp, Homo sapiens
gcaagatcctgtgtcaaaaccacaacaaaactaacaaacaaaaccagaaaagaccagaagaaacagaaacacaaagtgttaaccttattataaataaatcaattgaaacaaaaaatattatctcgttccaatataca

SEQ ID NO: 140448 - DNA, 280 bp, Homo sapiens
ttctagaaatacatgtggatctttgcaaatgcagaactgactggtggaaagggcgatcatgaactgatgacggaagtctggccctcatggaccatatgtgtttggtgaatattagaccaatatttgggaagaagtcttgcagatactttctctcattagacattctactctctgattctgagtttgactactctatgtacctgatatcagtggattccagagtgaatcagagagtagaatagtagtttgcaggagctgggatcaggggaatagggtgttg

SEQ ID NO: 140449 - DNA, 372 bp, Homo sapiens
cgtctagcacgcaggagcacacaggaaggcacatggctgggcagcacgtgcatgatcgtgggaccactttagcttgggtagtccagcatgagtctctgagcaggtgaccttgatgctgaggccggagcatgaacgagtagcccaagggaggccaggtgtccgggttccaacagcaggagctggccctaaggtagaaaccggcttgtgcgggaggacaggagggtccatgctgcaggacagcaagtgagtggccgtggcatgtgctgaagggctgggggtggtttgggggacaaggtgcagtccctgacaccaggcttcatgtgcatttgttcataattcgtccataaagccacgcctcctgagggacatgcc

SEQ ID NO: 140450 - DNA, 303 bp, Homo sapiens
gaagatagacagcattcaaaatacactcactgaacagcaaatatgtgacaggcattgttctacctgcagggacacattactgtataagaccaaaattcttttggaacttacattctaatagtgacagacagacaataaagaagctttaaaaagaaaatagaaagtaagagtaagtactataatgaaaataggagtgggtaacaaaagggaagactagtgaggtacttattaagctgaggtacttattaagctgggtggttagcaaagctctctctgagatgacatttaaagtgagtcctgaat

SEQ ID NO: 140451 - DNA, 462 bp, Homo sapiens
aatgtaagtgactagctgacagtttggctaaagaagtggttgcatttaaccaggctaataaacatgagcttaaaaaaaaattcactggctaagactgggtcttgcacttcattttcagtttagtgtttctccttggattaattttttctgttttatccattactagtggtatactgtaaattgatgtacagaagtatctctaaaaagactaatttataggagtccagacggactagaagggttttaagcttataatacctggatccttttgttttaattaggtttctagataagtccttacaaacttcaaaggtgttataccctatcagatactttttcccccaaataaaactgtatttttcagttgaaaataaattgatataggcaattccttttcttgacaaccttcacaagtgtggtagagaattatttagcacactaattagtctcagcttcgatttt

SEQ ID NO: 140452 - DNA, 406 bp, Homo sapiens
tgacattcttgagtttctgcagctttgctcttttgagtaaactaaagagaaagaaaattgaaggtaaagcagagaagcaagctgtgcatgtgggcgagtgcacgtgggtgcagtcacccgggcagtgtgtccaccccggcctagagaggggatttccatcccaggaacagggacaatgaggcagcataactgaggctgcaggagctgcttctctcccggctcatctaagctgctcctgcctagagctgccatgcctgcggatgtctcttataccaccatggatgatgaaagtgtgcgggccagttccctctcttcttcttactttccctggcccattcagcagtgcgtccctcccttctctgcagttatgctcctgctcttcttccaagcatcacctcaagttgca

SEQ ID NO: 140453 - DNA, 389 bp, Homo sapiens
aagaaaaaacaacagcaacaacaacaaaaaaaaacaatcactgctcttagagatcaaaagacacaaatcagacaatgagggacacagagctgaaagactggtttttcctctacttttagaaaagtgtgccctgccgggtgcaatggtgtgccactatagtcccagccactcaggaggctgaggcaaggagttcaagaccaacctgggcaacatggcaagactctgtcaccaaagaaacaaaaaaagaaagaaaaaagaaaaaaaaaaatgtggccagacagggtggctcacacctgtaattccagcactttggtaggttatggagggtagatcacctgaggccaggagttcgagaccagcctgggcaacatagggagcccctacaaaaa

SEQ ID NO: 140454 - DNA, 602 bp, Homo sapiens
ctcagcagagcagcagattcagcatctcccaggagattgttagatatgcagaattgaagacagtgcttcagacctacagaatcagaatctgtattttaacaaggttccaagtacttcatgtgcatgttaattttggagaagcattcctgtttggttatctagacgtaaatgctcaaatggtgtattgataagtgaaatttaaactctaataaaaacattgttcttttatataattttgtggttttaatctgagactaggcaataatgacactttgttttgctcaatttaattctaaaatatagagtatctattcacaggctgcattctgtctatataactctttccctgtgattagaagacaacgaaaatatactttgagttttgtcagcctaggcactggaaattgggagattgcctatcttctcttttccacatgaagtcaaagcagccacatgaaaaatggaaaaccatgccaagtgcagtgacatgcacctgttgtctcagctactcaagaggctgagcaaagatcacttgaattcaggagtttgagaccagcctgggcaacgcagaaagacccaatcttaaaaaaaaaaggaaaaga

SEQ ID NO: 140455 - DNA, 151 bp, Homo sapiens
atcacttcctggtcccccgcctccccggcgcctctcacaggcttctcctcggcacctccagttttccagttgctcaggccaaaaccttagcaccattcttgattttttttttcctattcctttcacactccacattcagttcatcagcaaa

SEQ ID NO: 140456 - DNA, 544 bp, Homo sapiens
tgggattataggcatgtgccaccacgcctggctaattttgtatttttagtagagacagcgtttcttcatgttggtcaggctggtcacgaacttccaacctcaagtaatccatccgcctcagcctcccaaagtgctgggattacaggcatgagccactgcgcccagcctgattgttttttacatgcatagattgagtttagtatacttgtgataggaatgctgtataagtgcacgtctcctcctcagcacatctcatcaggaggtgcaccatcaatttgttccattattgatatagatcacttggtaaaggtgacatgtgctagaatcatccctgtaaaggtatctttcacctttgaaagtagtatttatctgtaaggtgattctttgagaatatcctattgcccaacaacctttcacccagtagttttaggatctgttgatggttcttgcttgaatcagttacacctctgattgcaaatggtgacttctctatttctatcatttctttgttaattatctggcatttgaagacatctccctttct

SEQ ID NO: 140457 - DNA, 293 bp, Homo sapiens
actagagaggaaaactgaagtcctctcaaaatgttactataaaatttgcaagagtggcaagtgagggaactagaaattgcatagcaaataagcagtgatgtgactgagagcaacagtcagtcataatgaatgcatcacatatcattacgttaggtttgtcctccacacacttgtcatagcacaccctgcatcctataggacacttacatcccaggaagctgtgctgtgcaaggcttgcctggtttttgtttggttttgtttttgctttgctttcatgaatgcagtaacaaagg

SEQ ID NO: 140458 - DNA, 312 bp, Homo sapiens
agttcatattttcatgtgtggtgtggactttatcaataatatatcatgtgattttatttctgtgttttgacttacagtttctactgcctgaatccaattaaacttcagcaaaaacattcaagccaagtgccatgagccagtaaatccaacactctaacacagttaatgaaaattagaattgcatgaaagaggtttctgccagacatttagaaatcatgattcctcagtcattgaatatacagtatctctgtcagccttttactataagacagataaaataacaaaatgttgtttataaataatatgtaccct

SEQ ID NO: 140459 - DNA, 320 bp, Homo sapiens
gtacttttataggcacggtcttatttcatcctccacataaccatgtgggaatgctttattcaatgttttacatgaataggggcaaacgaagatcacagggattgatggcctctttaatgttatacaaccagtcccgcgggggcagggcttaagcccagatgaattccttgtactttttgtttgtttgtttgttttgagatggtgtctccctctatcgcccaggctggagtgcagtggcgcaatcttggctcactgcaacctctgccttctgggttcaagtgattctcctgcctcagcctcccaagtagctggaatcacag

SEQ ID NO: 140460 - DNA, 87 bp, Homo sapiens
aaatagtacttgtccaaccctagaaaacttgatttgtcatctaaggtagttatttctaaggtaggattgcgatgtctggaagctgaa

SEQ ID NO: 140461 - DNA, 255 bp, Homo sapiens
gacaggggcctgtctgcctctccttcagggactctgtgatgggggcaggaacccttgtgtttggggccagagggaactcacacctcagggaggaggctggtagagaactggctgggaggaaagactgccccagccctccaccaaatcccaacgtgctcgccttggtagccaagctcaacatcagacatggttgtccctcccaaggggcagggtgctcatggttcaatggggaggccgaacacagaaaaggtcagc

SEQ ID NO: 140462 - DNA, 383 bp, Homo sapiens
tatgcattctgggcactggaatttttaaatgctcccacagtgattttcatgtgcagccaaggtggcgaactctaatacagttaatcctgtcattcttagttgcttgtcctcctctctgtagtcatcatgtcctctatcctatttggtcctacacttacatgcttatatgctacattagaccgtctcccttctgataactgaaacccctccacagtctcaatttcaagcatcctgttctctaaacatatctcctgtctttctgtaccgctccgtctagtactccagcaacaatcccccaaccttactggggccaacaatctgttaatcctaccacctgacatcgtccttcactgccattgtgtcttcacgtctctctcactagg

SEQ ID NO: 140463 - DNA, 155 bp, Homo sapiens
gtgtcaagtccaagtatccaacctcaggacgctttgcgcagctctgtgcggctccccaggcttggctctagctctgtctccagggctgccctgtgtcctggggaggtggggaaggtgcgccgggtcacaactgtctcccgtgagctctgccagca

SEQ ID NO: 140464 - DNA, 426 bp, Homo sapiens
gcaaatgcagaccaagtcagtccaccctaaatctgaaaatactactatagtgtccagtcaaagaaaggtttacagggcagggacttaaaagtatattattgaagtaacagtcttcaaaaccaaagcttctcagggaaaaataaaaaagaaggaagaggaatcctttggcatttgggtggtgaagatgaaaagaagcaaaagaaaattcagggtcctgcaagaaaaatccagtcaaaaaagttgaaagagataaatattattcatccacaccaacacaaacttcctaaagaatctggactttcttacactgacagaaaaggaagccattgctagaaatcttacaaaacagcacaaaaatgaggaagaaaaggataaacagatccatacagttattaccaaaaaaaagtatcagaaaattcctcttgg

SEQ ID NO: 140465 - DNA, 138 bp, Homo sapiens
ctgtgggatgtttaacagcatccctcgcttctacccactagaagccagtagcatccctcaccccagctgtgtcaatcaaaaatgtctgcagacactgctaaacgtcccagggtgggggtggggggcacaaaattggcc

SEQ ID NO: 140466 - DNA, 132 bp, Homo sapiens
taattccacctcacataaaccttaccctactcccacctctgggaaaagagtgactcaatttaaatgattttctggaatcagccatatgtcagcccagttataaatggccttgcactatccacactctccttc

SEQ ID NO: 140467 - DNA, 463 bp, Homo sapiens
tcatgctttacgtttttgactttttttccagaaacatatatattccatcactcatttattcaacaaatttgtactgagcacccacctacgtgccagacattattctaggtcctggagatgataaagttctaaccctcatagagcatactttctagtggcaaaacgaagactatattttttattgcacacacataacacaatcttattttctgctagtaacactgttcctaatacaccttgacctctgcaaggagaatgttcaggaaaaaaaaaaagaaaaaacccagaaagaaactttcacatgcctgtactcaaaatatttgagaattattgacctaagaaaatcttccctcattgttttcactcattcatttcattgagtacctagtaaagtaccaggcacagtggtaaaaataagacaagtaaaataattccagaagtcagtcagtttataatacggagg

SEQ ID NO: 140468 - DNA, 294 bp, Homo sapiens
aacagaggccttggtttctcccttctgtcttggtgagacagcattgtacagaggcaaaacctgggcttttaagacaggtgatctggcttcaaatcaaagtggcctctaccacttactcgctctgtgatcttgagagagcctctgtttccacatctgcaaaatgggagaaatgatactcagcttacggcgtcgctgtgaagctatggataataaatgcatgcacagagtctgacgttgagtaggtgctaaatacctggtagccatgttgctgtttcagtgatatgtgttgtgagg

SEQ ID NO: 140469 - DNA, 521 bp, Homo sapiens
ttgtggaggtggtgccctgaggcttcaatagagaccctctgcccatcacaaacaaaccccatatcaggctgccaagcatagtggacttcaccccgggggcatctcagccccatgcttgaccggcccctgcctttgcctaggaaccaagtgcctttcccttggggctgggctttgcccgggttgactaccctgatgcttctgctcctctatgtcctggggtggtcttgggggtattaactgtcaccatccagtggagggtttcaccgagggtcccaggtgctaacatgaggtctgtggccagcaggcagcctggatgactggccggataggcagcagggagggcctggatgactggccggataggcccacctcacctatgggctgcacttgcagcacaaactgctgattcatggagactcatgaggccttggctatctgtacattctccatctccagctgtcggccaaaatataattgtagttgtcactttggcagagagatactatgatgtgtcctatctc

SEQ ID NO: 140470 - DNA, 789 bp, Homo sapiens
atcttcgttccctgcagaaccttgacagttgaacaagtgacctcctccagaacagatggagagtctccagaagcagaggctttagtgaacgaaattcgcaataatcagctccagatcctgaaaaggagggcgaagaatcagtggccaaagctaaccgcttcatacccacacttcatcctcctcagtttctctccaggccaccatgtctgcaggcaacggcaccccttgggatgccacctggaatatcactgttcaatggctggctgtggacatcgcatgtcggacactgatgttcctgaaactaatggccacgtattctgcagctttcctgcctgtggtcattggattggaccgccaggcagcagtactcaacccgcttggatcccgttcaggtgtaaggaaacttctgggggcagcctggggacttagtttcctgcttgccttcccccagggatctagaactagaaataccatttgacccagccatcccattactgggtatatacccaaaggactataaatcatgctgctataaagacacatgcacacatgtttattgcggcactattcacaacagcaaagacttggaaccaacccaaatgtctaataatgatagactggattaagaaaatgtggcacatatacaccatggaatactatgcagccgtaaaaaatgatgagttcatgtcctttgtagggacatggatgaaattggaaatcatcattctcagtaaactattgcaaggacaaaaaaccaaacaccgcatgttctcactcatagatgggaat

SEQ ID NO: 140471 - DNA, 901 bp, Homo sapiens
cccggcctgcgtcgtgggactggcgtttttggcgccggctgtgaggggagcgcgggggtggtggaatcgggcggtctccggttcgccaatgtggctgggtccgtaggcttgggcagccttggagttcctcagagaccccgcgctcggtcccggcacgcactcacgccgcggctcctggtggccctggagcgaggagtccgccagcaccggaagttcagggaccgcggagttcccgttggcccttttggaggcacagcttatccctgcttgcccgcgagcatggggccggaggcaccccccggctgcaggcagtctcctgagagctgttaataaaggcagtcgcgggtctgtgcgaggttttctgtgagaaatgcacgaacctcccctaccccacagaacctcaagcgggagatatttctcgacatggggaacggcctcggagaagtaactttctggcctcacagggcagggagaggggcctgggagggccgaccgcagagccgggcctttgaccgcccacaggttccctggttattatttgggtcgaatgcgccaattaaggtggtggctgcgaagtcagtgtcaccagatggccgggagcaggtcgagagccaccggcagggttccccggcggcagggcgaaggaggccgccagtgacttccacggttagctttgtgggtgggtctcactcgatggccgggttagcaaaccagagcatttccctccgtccagggcctgccggggatccatcccatccataggtccagctatggatccatccatacctcattgttcctacagaaccaggatatctgcagctacggctgtacttgttaaaaatcacctcaggccgggcgcggtggctcagatccgcaatcccagcattttgggaggccgagg

SEQ ID NO: 140472 - DNA, 485 bp, Homo sapiens
catgcacaaagttctgtggagcataggaaaagactttctacccacctctgtcttccggggaacttggggtaaggcctcatagaggaggttgcttttggattagagctcgaaggatgaataaatactgccaagtagataagttgagaaaagagtgttctagacaaagggaacactttatacaaaaaccgtagagggaggagaaaacatggcatgattggagagctagaaaggattcagttttgctattgtacaaatctgaatgtggtagatttcctatgaagctactacagccgaagctttggggaccctcacttcacttgcacaggcaccttccaaagcccctatctaactttatatctttataattttattcttagatttttttcttaggagggtcccctttactaatgttcaagttccacaaaagctggatctgcttgtgatggatcaggttgcatgataggaggggggctaggtatacaaac

SEQ ID NO: 140473 - DNA, 554 bp, Homo sapiens
agcaagaagagcaaaactccatctcaaaaaacaaacaagcaaacaacaacaagaaattagccgggcatggctgcatgtgcctggagtcctagctactcgggaggatgagataggagaatagcttgaacccaggaggcacaggctgcaatgagccaagattgcaccactgcactccaatctgggcgacagagtgagactccaaattaaaaaaaaaaaaatttttttttcattaatagactctaagaatatgtgaaagtaaattttttataggcttctccaaatgtctttcactaattaatctaaatatgtattttaaagattttccagctgggcgcagtggctcacgcctgtaattccagcactttgggaggccaaggagggtggatcacctgaggtcgggagttcgagaccagcctgaccaacatggtgaaaccctgtctctactaaaaatacaaaattagccaggagtggtggtgcgcacctgtaatcccagctactcgggagggtgaggcaggagaatcgcttgaacctgggaggtgaggttgcagtgaggc

SEQ ID NO: 140474 - DNA, 424 bp, Homo sapiens
tcctggcacaggctctctctctctctcatgtgcctgataagtcctatacctccagtgacattttaaacttccccaaggcagaatctgctattttcatgcttttacgtcttttgtctacaaaggatactttgaaaagatcaagaatttaataaactttcattaaataagtgaacacatccagaagaaaaatttatagtgagtgttttttttgtttgtttgttttgctggacaaatcttggtccctggttaaggaaattccatttgtacgagactataaatgtgtttttagtcccttaatgttttttattagatgtctttatgtcttagatactgcaaataagtatgctgtgctgtgatagatatctggccctcaacatcagacttctgattgtaccacatactccctctacatgttcatgttttt

SEQ ID NO: 140475 - DNA, 695 bp, Homo sapiens
gatctggactctggctgctgggatgtcattgtccctagaccttctaagccttatcagcagatgatcataatctcatgagtgtttagaattttaaaaggttttaaactgaacttacataagacttctgatacaatgttaagtacacacattcacatttctgattccgatttagtcacttctccccatcctttcttcttctgtttctttcagaaactatcttttctgtcttaaattcccctctctgccttatattccttcttagatacctttcccctctttccctttctttctccttctaggtcacgagggtctgacctaatcattagagggaaaataatctgcttaactacatttttcttagaggcgaatgactgatattagtctaatgaaatgaatggctctaaaaatcctatgtgcagtgaatcaatcatgagctgttgaaaatataaatactttagtcaggtgaggtggctcacgcctgtaatcccagcactctgggaggcagaggtgggcagatcacgaggtcaagagatcgagaccatcctggccaacatggtgaaaccctgtctctactaaaaatacaaaaatgagcggggcatggtggcgggcacctgtaatcccagctactcaggaggctgaagcaggagaatcacttgaacccaggaggcaagatcatgccactgcactccagcctg

SEQ ID NO: 140476 - DNA, 419 bp, Homo sapiens
gactgtcgaccaggttgggcggcagtggcgtaatcacggttcactgtggccttgacctgccaggctcaggtgatcctcccacctcagcctcctgagtagctgggcctacagaaacatgccaccacgcccggctaatttttgtattttttgtagagatagggtgttgtcgtgttgcccaggttggtctcaaactcctgggctcaagcaacctgcccaccgtggtctcccaaagtgctgggattacaggcatgagctgccatacctgaccagaccaagagagttaaaaactactggaggtaagaaagaattcaaagaattgacaattagatcacaaataatatcttatcaacattggatgccagaaaacaacagaagaatgtcttagagaagctccttgtcaacctggtcgacagtctata

SEQ ID NO: 140477 - DNA, 991 bp, Homo sapiens
gtgttggatgtgggtaggctaacaagatttatgctgtggtcccttacgtggcttaatgtgtgccctgtgctgcgggacatttgcttacgcatgcactggaacctgcagattgaggaagaaagcttgtgggaaactaccattcttcagcatgacatgcttacgtttagggatatcgacatgctacaccaagcagtgtacacagtgccactctctttctcctcacatccttgtctggtggaaggaataggaaatataataccataaacttgaataattcatacttctgtaattggggcagagttgagtcagaggatggaaaagaactcttattacttctaagaatagcacctattacagactccttcacccccccgccccaatctctatagtttgaagattaaacttgtatgtgccaatggatgttttccctcattcatgtaccattggtcttggcttttattaatcccatttctctgctcagttgaattgcagtcttactgtacaggcatgatttttgtaacttaagcagtttcccctttctattttgtaattaagagaaataagatcatgtgcgtgaaagagttctgtgaaaggtggtgctatctgtgtgtaggttgttttcatttgtaatcttcattaaaaattacttggctctgaagcactttcagttataaaaagctgccaagtaatagagttgtgtgtgtatgagactcttcatatgttttccttttgacagtaggaaaccattcagctgacagattcagctgcctggaaataataccaccttcgtgttcatctttttcaaaataatagctcagctatctgtaatcccaggaatgcagttttaaattaccagtgttagagcggtctctctattgggcccttttgagttgcgtagcatgctgcctgcagcttgcttatcctcagtctttaggcctgtctgctctggtaactgatgtcctttgcacttgtgagagctggtttacccttt

SEQ ID NO: 140478 - DNA, 407 bp, Homo sapiens
aagtcgaggtgggtggatcttattgttcatggacaaaaagaaagaacatctttagaatttattaagtagttgtttttaggctgggcatggtggctccacctgtagtcccagcactttggaaggcagaggcggatagatcacgaggtcaggagatggagaccatcccggctaacacggtgaaaccctttctctgctaaaaatactaaaaaaattagctgggcgtggtggcaggcacctgtggtcccagctactttgggaggcagaggcaggaggattgcttgagactatgagtttaaaaccagccccaggcaacatggcaagacccccatctctccaaaaactttaaaacattatccagttgtgctagtgcacacctgttgtcccagctaatcaggatgcggaggcag

SEQ ID NO: 140479 - DNA, 473 bp, Homo sapiens
tcataaactaaaggttattattctaaaggttagtttagaataattacttttctagttatttgtatctcttaaaaacttaataaattacatatatactttgttttattattgaatatttgctaaggatatacctcactgatataataatttcatgggtatgtacagtgttcagcacatttaccacaggcaacataggagagatgctggaaaaaattatgaggtcagtgagacttatttttcgtgttctcatatctttttttttttttcttttaagtgacctctcttgttggtgtccattacaaccttaaggctcggaacttccttctgtgggatctcaggcaatgattcatgcttttcccttcctcttcagtttctttctgtcaacatttacttaggcagtatcatacgcctgagctctgctttccatctcctgctacagtaaattaacctgcacttagttattggtagttgat

SEQ ID NO: 140480 - DNA, 330 bp, Homo sapiens
ttaggggtattaaatgcattctcaacttatgacattttcaatttacattgggcttatcaggatgtaaccccatcacaagttgaggagcatctatattagcaaagtctcacaattctttgggtgtgtaagctgtttcctctggaatcctgctgttcctctggaaaatgctgagattcgacacctattatgggtctggggagtgattgtagcaggccttgagcatcccctttcaaaccttatgaggttatcacagtgcttttaagcaaagaagtgtcttttcctcagacacaggagagcaagctaattccattggtaaggaagaaacagagt

SEQ ID NO: 140481 - DNA, 283 bp, Homo sapiens
gcgtgggtcgtttgtaattgaagacagtgcatcctttgtaactgaagctagtgcaaatgaggacaggagtggagggacagaaagcggagaggtgtacagctgctcttcttgcactgtacccctcatatctgcagccgggatcagtcaagatctcattcgtgatgcttgggtgccttgggggcttgggaagccagctcaggccttgtgatccactcggattagtgttgtctggggttctcactttctgactcctggaggacgaaacgccacttgtctgagaggg

SEQ ID NO: 140482 - DNA, 204 bp, Homo sapiens
ctgtgttacacgagaggtaactctgaaaaaattagcatattgtgatctaatctgtcattatcatattttctgccactgaacagctttttgaagtgtaaaatttccttcatagctgaaacttcctaatataaaaaaaattacagcagacataaatcacaaattcacttaagctgtaccaatttacacatttaagtttgatgtctt

SEQ ID NO: 140483 - DNA, 1058 bp, Homo sapiens
cctctgcctcccaggttcaagcaattctcttgcctcagcctcccaagtggccgggattagaggcacccgccaccatgcccagctaattttttgtatttttagtacaggctggtctggaactcctgacctcaggtgatccacctgcctcggcctcccaaagtgctgggattacaggcatgagccaacgcacccggccctagtctcattatttttataggcaattatatttcatgatttttatttttatgaatcggagtattaataggaagcatgaagctagaagatctagatggagccctagaaataagccagtctctgccacaacaaagccaaataggtggccggtttcagtggctctctccagctacccagagctccagggctggtgatccatgtcatcatgaccagacagccatgcccaagcatccagctccaaacaaatgccaggcaaagcctaagtctatagcccaggttcaccaaatgaggatctgggatggagttcagcaaggtcaggcaggctgtgggtaaatgaggttgggggccaggcaggcgatgcatccagcgctgcccactccagctgtcggtgctcactgacgaccctgctccaagagcatctctcagcctcttactgcccatctctctggctgcctcatgggattacttatttctaaatgtgattcctcttatctgtgttgtcaacaccgtgaccagtgcattccaactcttggagagtcacccacagagactgaaactgggaagaattagtgaaaaaggactaggttagccgtcagaggaagaagcccgccctttaagattgcttcctaatgaatctctgggaaaaccctgggacacagagaaacccaaagtcagcaggtctcccttcaggctgggaacataaccaaggaaatgtataaccggagccactgacaggcccaggctgatagaaggtgaaagcagaaaggcaggaagacatgaggtctgcaggaaacccagcaaccctggaaggcggagtcccctttctgggccaccatgctccctaagcagtctttgggttgtga

SEQ ID NO: 140484 - DNA, 241 bp, Homo sapiens
gaaaattatgtctaatgtgtgttttcctttcatataattttttatgtttgtgttaatagttattaaaatgatcagattcattaagtgctattcattgatggcaagaaaaataagtattatcagttggctaattctgaccatgaggtgttagaagtgagtgttaccatcagactattgattaaattgttaaatttttgtaatgatgatcatctatctaaagtgctagtattttaggccaggt

SEQ ID NO: 140485 - DNA, 275 bp, Homo sapiens
aatcgagctcggccccccggtaactctggggaatgcctgcgtctctggggataccggctctctgggcataaaagagtcctcaaaaaaatttaaaggaattaaaatcatataaagcatgttccttggccacaaaaaaatcagaagccaacagcagaaagatggaaaatcccccaaatatgtgaaaactcaacaacacatttctaaacaatatctgggtcaaagaggaagtcacaaaggaaattagagtatatttaaaacagaataaaaaaatgaag

SEQ ID NO: 140486 - DNA, 243 bp, Homo sapiens
catgaaaggtcacacatttcctgatttcaaaacttactacaaagctacagtctagttctgtcataaagacagacatatagaccaatggaataatatggaaagcccagaaataaacctccacatacatgatcaaatgttttttgacaatggtgccaagacattcaatgggggaaagaatagtcttttcaacaaatggtgctggggaacctggataccaacatgtgaaagaataaagctggacta

SEQ ID NO: 140487 - DNA, 512 bp, Homo sapiens
aagtatgaacatagccagtgctgcatcatgtaatagtatgcaattaaatatgtggaaaacactttttaaaagtggagttgttgaatgatgtcatgtgtgtatatagaaagaaaatgcaatatcacttgaatttctatagactccatagacagtagtagatattaacacatgaatgagatggctttgtaatttgatcagttcattcacttaacagcatttatttagtgtctctgatgtgttggacactatgctaatcactggagataagaattgaataagactgtcctgatggttctgtctcccaggggaaatagatgtatggacaattaatgatagtatgattagtgagaaaatgaagtgtgtaggcagtgcaggggagcagggaaaaggaacaatcagtgcctggggaattgaagaccttgccacagaataggatgtgttggtgaattgagtgatagtttaaaggataaaaccaatttttctaggcagaaagggcatttcacaaagaagga

SEQ ID NO: 140488 - DNA, 267 bp, Homo sapiens
cttttttttttttaaaaaaagctagaagcaataatcaattcattagcaaaaagcaccactagcaacgagattgtggtctgaaacaccaaaaggcaccagagctccttggagaagtggctgattccaagtctggagtaggaaacgtaataaaataaactaattaacttggaacatcttatacagagagcaagaaagctattgaatagtctaggattatttccaaaagaactcagaagcaagttgaagggtctcccactggctggccaa

SEQ ID NO: 140489 - DNA, 248 bp, Homo sapiens
cacaagccgataagtgttcattgctcctgcataaataaaatatacgaacattgtcctgaagaaggaaaagcttgcacagttcttggttaatagagtccatagactctgagtaggacccaggcctgttggtgactttccacatttgtacaagcttttccctctttcccttcccctcagtttcctggcaaacttcttctttagaccacctagggttggcaaactttttgagtaatgtgccagaaaggaaa

SEQ ID NO: 140490 - DNA, 464 bp, Homo sapiens
ggggttaggacttagagtctcactataattctcatatttttaaataatgttgactcattgatcaatattatataagtgactgaagatggtgaagtgttaaataaaaaacattggtattttcattacaggcatttggggagaaagtcattttacttatcccaaaattgagtatgaaggtggaagatgttattagaatgctagttaaaaggacaaagaatgtggttaatactttaattctgtaaacaggaagcaaatagattgtttaactcgtctgtgttgacttcagacctaaacctacaattttaagtgtttgtgattttcttaatgtaaagttctatattaaagttattttttaataccctcaacattctgcacatgagaagcatggaatcagcaattctgaaagtcactggatttagtaattttaacaattaggcagctttctggtcagtataatttaattt

SEQ ID NO: 140491 - DNA, 530 bp, Homo sapiens
aacaattgtaaggaaaatacagtgtgttcacatccatctccgagttttcactaaagttagtatgttaaaaaaatgggacatgggactaatatatttacattgataattttctgtttattcagctctgggatttatttgaattttgccaatttttaacagtttccttttttcctttttcttttctttttgagataaagtctcactttcctattgctttttgtttgtttctttgttcaactcaggtaaccacatcaaattcaatcaccatgtccctctaatatcttctggttaatcacagtttgggttcctgctgtcttcccattgaatattctataaatgaaactagtgaaataagttgattctggtcacttatgtatttacctattttatcacgtttgttttgtcaatcacaataagtgtcgaagtctctatctgttatagatgttagcctattttctattgcagatccattggttaaatctttggtgatgccttttagaaaactgatccctttaccctatgtaatatgc

SEQ ID NO: 140492 - DNA, 388 bp, Homo sapiens
agtacctgggccgacgttcgtactccaatatctagatcatccatgggtgtgcttggatcatttttctttctctttattgtcagtcatattttcctacctttgtacatatctagtaatggttattatatgttggaaattgtcatgaaagaaccacagaggttccatatgatgttatcttccattagagagggttgcccatttcctttgttagacaaatgtaagaaggaactgatgatcacaactaattagagactgaacagttttgggatttggtaatagttttgctaagcctctgtttacatctgattaattcctactcctcagtcatggtgtcctgggcttttgacaaatggtttttaccaagtactcttctcttcaaccctgaaag

SEQ ID NO: 140493 - DNA, 300 bp, Homo sapiens
ctctcctgtccccattatcccaggaaaatccagagtagcttccagtccattctcattaatccactggatccaaagtttagagaggttccccttccctccagcctccttcctggcccaacagaggagcaccccaccaccctccatcagctgctcaaaacccacaagggaaaaatccctacaggtccatgccaggaggtagtggagctaccctcaggttccattaagtcataccagaaggctgagtgtagaaatgacattaagaggggttccatctgtagggaaagggttcaagatgcaaag

SEQ ID NO: 140494 - DNA, 449 bp, Homo sapiens
agaatccaggatctctgcttctctcctcacccagaatgtacagagctgcagctcatgtagagaaaattaccttgattcacattcctcctcagaacatgctattgatgattggtggaaagtgggaaagaggatcttagcgcaggctggttgttttaatgcaacagccaagtttttgaaaaactggcaggagaacaggagtttctgtttttttctcagagagaacaaatgtgaccagactatgtgatttaattattctctgggcctactgttttgtaaacagccccatgagcctgttaaagcgaatagcatgaagaccaaaaccttccagcccttctttccatatgccacccttttagtttcatgagttgggttgcgttttccccaaatttaaataatctgcagttgtttgttgtgatgtcttttcctggtgctcctagtgtctcctagaa

SEQ ID NO: 140495 - DNA, 272 bp, Homo sapiens
gctgatgtcactgtggccggcctagggggaaagtctcaggataaaactgcttccacctggatctggagaaggggaagtgactggcaagagattcgcaggtagggctcagagaccaggaggaatccagtctgggtaagaattccctgtcatggggctctgaagccacgggccaggcaggtagtggatttcaagccagccagcggggtcacttggcccctgcagctactcctcgccccctcctgcataatttcctatttcctgcctcctcctcc

SEQ ID NO: 140496 - DNA, 516 bp, Homo sapiens
tcctaagggtgttgttgaggaaactgtaatgtcacctctatagggacacaacaaagagatttctttcaagtcaagttttatcttataatcacgtaataggtcacgcttgctttttgcattggctgttagaaaggtagggccagaggctacctgaagggctgacttctcacactgtacatggctttatttaggcttttatgttgtgtactagccctactcctgactgggtctcatggttactatcctgtttttctctttagcagatttattcatattttaaaaaaaattccattgtgcttttttcttttagttttatagtttcagatcttacatttaagactttaacccattttgagttgatttctttaaatttaatttttgtttcttattgacaaataattacatatttatggggcaaaatatgatgtcttagtacatgtataccttgtggaataaacaaattagactcattaacatgtctgtcccctcacatacttatcatttctttggggtaag

SEQ ID NO: 140497 - DNA, 433 bp, Homo sapiens
atatctggttttggtctttagtagccacgaatatattattttatatcaaaatttcttctagaagcattacttttccaacttgccatggagagtatcgtgtaaaagaactgaggcttgggaactaggatattagggtcacattcttggctttcatcataatttcctctgtgatttttctgggtctaagtgtgcataatgcatacaaaaatgaagactctgaagatgatgagctcttctagttaaaaatctgatttccctgatataggaaagagattttaaatagctaagagtacttaaccaaaacacaggattaaccatttgttaggctttataaattaaaattcactttactatatcctttagaaaagcctgggcattttttcattcagatttctgtataaattcaagaagacatgaaaactctacaaggaag

SEQ ID NO: 140498 - DNA, 148 bp, Homo sapiens
tgctgggattacaggcatgagccaccgtgcccggccagaattattttcatttcctgatctaaagagcatgccaggtgaaaggagcaaaaatttctctaagagaggaaatcaggaaatggggagaggagggggccaagaagcaggcatt

SEQ ID NO: 140499 - DNA, 171 bp, Homo sapiens
tgctgggattacaggtgtgagccacagtgctcagccccaaattcacttcttaattctgataatttatctgtagattctgttgggttttctatacacaatgttatctatatataatgagttgtcttccttttcaattcttacccaccttgggtatttttcttgccttattgc

SEQ ID NO: 140500 - DNA, 158 bp, Homo sapiens
ccgctgcagaatgctgttcaagtagaatgttctatgtcagccacccaaggacactgccacccatcacctcacactgtcatttaattctcagcctgaccctcttctagcagacaccctgcctcactgcatcctgtacaggtccaggcacgtggggctgc

SEQ ID NO: 140501 - DNA, 535 bp, Homo sapiens
tggctgttctagaggtcccctctgggatgcaagtgtcatcacgggagggggtcggggaactatcagtgactgacccgtgaggtggcccagaaggcctgccaggaggtgttggagaaagtcaagctttgcatggaggcgtggcagtctctagcagaggcaccccactggagttggtcaatggggatggtgtggacagtgagatccgttgcctagatgatccacctgcccagatcagggaggaggaagatgagatgggggccgctgtggcctcaggcacagccaaaggagcaagaagacggcggcagaacaactcagctaaacagtcttggctgctgaggctgtttgagtcaaaactgtttgacatctccatggccatttcatacctgtataactccaaggagcctggagtacaagcctacattggcaaccggctcttctgctttcgcaacgaggacgtggacttctatctgccccagttgcttaacatgtacatccacatggatgaggatgtgggtgatgccattaagccctacat

SEQ ID NO: 140502 - DNA, 366 bp, Homo sapiens
tgcacggtctcctgggttctcaggtgaaaggtgtcaggtggatcaagtaaatactgttaagatgaactcaagttcagctttgaggatctgtgacatcagagagaggcctggcaagtataaaagatcttgaatggcatacaaagcaggatataacatgggatctgtcagtaagacaactgttcagtgtataaccctgtggcataaaaatatcagacagttatctaaatttctgggtcatgtgactacctttaacaaccattttttggattttttcaatttcagtctaaccagagtggtgactacatttgcagcattaactaagaaacacacggccgggcgtggtggatcacgcctgtaatcccagca

SEQ ID NO: 140503 - DNA, 345 bp, Homo sapiens
acagggtctcgctctgtcacccaggctggagtgcagtggtgcaatcatagctcactgcagctttgaactcctgggctcaagcgctcctcccacttaagcctcccgagtagctaggactacaggcacatgccaccacacccagctaattctttaacctttttgtagagatggggtcttgctatgttgctcaggctggtctcgaactcccaacctcaactgatcctctcacctcaaccttctaaagtgttggggttacagacgtgagccaccaccactggcctgcttttctttaaacctccgtctaggcctttccacttgctatttcctctcctggaacagtcttcc

SEQ ID NO: 140504 - DNA, 405 bp, Homo sapiens
taaatagagaagaatgaggaaatagtattggactgtttctcctagatttcagcaaaggtgtcaaactgactgtgaggttgcaggcagctatgcaaaaatcagttaatataaagaataaatggatagtcagcgctatggcccagcccacaggtcaggtgttttgaatccaggcacttgtgaagccctggattctccacatcctcctcttccacctggacaacatggtaaaactccatctctactaaaaatacaaaaattagccaggcatggtggcacacacctgtaatcccagctacttgggaggctgagacacaagaatggcttgagtcagggaggtggaggatgcagtgagcccagatcgtgccactgcactccagcctaggtgacacagcaagatttggtcaa

SEQ ID NO: 140505 - DNA, 183 bp, Homo sapiens
ctctgctcaacaatgagacgttttcccactaccccagggaatacctttattaatgcagacaaatcccttgacaaaccccattgcaaccataacacttactatatgagaggattgtatcttttgctagagagaatttcctgagcctaaaaatcatgtgagtagactgacaggaatttctctctg

SEQ ID NO: 140506 - DNA, 439 bp, Homo sapiens
atggcccaggctctgccacccccacagctagcacaggacctcacttgaaaatgtgctccattcagcccaacgtgggccccatctcccatcattctgggagctccaggagggacttggtgtggtaccagcctcattccaactccctctaatcacgggctcctcatcctccacatctgacagctttgtggtcgcatcactcctggtagtcttacctctttcacacgctgtactcagtcggagctctcagaaaccttcctgatacctcaggaatcttcctggagcagccagcctctgcctcgctccaacactgctctcctaacagcagcctgatgccccacctcagcctgtgcctctgaagtccaaagttcacacagctgctgctcggaattcctggacgggccccatcgtttccctgtttaccagggtcagacctccatcc

SEQ ID NO: 140507 - DNA, 245 bp, Homo sapiens
tcctctacagagctctgtgttttccactcaacaaaggatagcgaggggccaggtgggggtaaactttataaaatttttgcttggggacctgaatttaaatctattccatggatgagacagcaagttaattagttttcaccctataagtagtctaatttccagggctagtttaaggaactgtaaataaatgtacactttaaatcttttatctcttaacccaatacaaactatggtcttatgctttc

SEQ ID NO: 140508 - DNA, 524 bp, Homo sapiens
ccactcgccaaacagctctaatagctgttccccatcccaaagcaaactctcaagatccaaaatagtctaacaaacaaacaaataagacccaaactttaaggactttgagctttgccaagataggcttttatctaactcctattgggaatgatattcaggctacagatgagttattttagttttgcctttctagagtcaacagaaacactgaagcttaagttttctaactgtccccttgatctgttccctcgagcaccctggattttattatctgactataatagctagaatataggggtcagataaataccgctaacaatttattttttggagtttatattgaaagtgtgaagctatctgttttatgaccttaaattatcattcgtgaggaagatggaagagagatgagggcctgagggggtaggcattagggaaatgagaatttttgacatgagagactgacatgaaaaagtaaccccaaaatattcaggtaataaaaccaatgcattattgatcagcccatc

SEQ ID NO: 140509 - DNA, 433 bp, Homo sapiens
ctctctctgtcacccaggctggagtgcagtggcatgatcttggttcactgcaacctcctgcctcagcctcccaagtagccaggattacaggtgtaggccacgatgactgggtaatttttgtatttttcatagagacggggtttccccatgttggccaggctggcctcaaactcctgaccagaaaggatccacccacctcagcctcccaaagtgctaggattacaggcatgagccactgcacctggctataactttacaatttaaaaaacactttctttcctgtctttcccctcatttgatcttcaaaatgaacttaagacttcttcaaagtgactcagccaaaaagtagtaaaacctaaacttgaactcaagtgtcttgcgacctgagaaccgtttcccttctccacctgggcacattactctccctctacgg

SEQ ID NO: 140510 - DNA, 792 bp, Homo sapiens
gaagaattccccagcatggggtagggctcaatttctcggaaccttccaagccgcctttttttcccagttatcctaaatatatagcgttttatagtgtttctaagcatggggacaaagtgttttgcaccaaagaacaggagtctcaaaataaaatatgggcttcctttggacaaggaaccatggccgcagttagcatgctgggcaggttcctggttcaagctcaatttgaactatttctagatatgcaagcagttttataatctctctccttccccctattcctttcaccattaaaaaaaaaccaggcttataactttgctgactatcaaatcctttgtccttcctgttacatgcgttaccacaggagcctgctcaaagcttttcctttagggagtttcaatagacactacagagagatgagaaggaaattaaactcggtgggggttgcccctgtaccccgaaagtaattccatgattgaaatgccaaaagcccgaacatctctttcgctgtcagacccagagaggagagtgagacaaacttgagttgacgagaatggaactttaatttctgggtggttgttcgaaatcatcagtctggttttggggaacatgactgtctcgaaagtcctttaactctttccagtcccatagctttttctttcgagggtagtggacaagttagtttaccagggaagtcatttattgtccaaaatgaatttaagttaaagctactcatttattggtggtaaggcaaatgggttcaggctttctggaggagaatagccaaatgaa

SEQ ID NO: 140511 - DNA, 404 bp, Homo sapiens
ggggcccagccacagggttgcttagtgaatatgttggggttctccatgtgttccccacattccttgggggagtcgtctctaggcaggcagagacagaggccctgattcgatgaagtgtgcccgcagtggtctggcttgtgtcaggaaggaccgagggctttgccttaggtcttccatatcagagaaacgccagtgaaaatcacaagatgtccctcgacagagtggcagatgttaggaggctggatgctactgtagtgaacactctacgctgtagagtgttgtctccctcagggcagggttctgtctgtctggttcactcctgtgtcctcagtgtggggcgctcagtagacagcttaagaaaggggtttgaatgaacgtctgcacgcatgaatgcgtggtgtgca

SEQ ID NO: 140512 - DNA, 238 bp, Homo sapiens
tgttgcccaagctggtctcaaacttctggtctaagtgatccttctgcctccacctagcaaagtgttgggattacaggcgtgacccaccatacctggcctctttcatttctcgtcaaccaagaattactttctagcagcaggtgtccagtattaccaaatggaatagcatatttgaaaagaagttgtagacttttaatttaatgggcttcattagagaattctgacaccccccatcccc

SEQ ID NO: 140513 - DNA, 321 bp, Homo sapiens
ctgctccctctcatccccactgttggtccagtgaggtggacaacaaagacgtgttaggtttgctccgatatgtagacaggagtaccaactttggggtctgccctggcaccagtacctcttttagcagagacagacagaagttcagagctaaggcaaacactctggagatcatgagtggggcaggctagtggtattttaacaaaactcttgaaaaaaatttttttttgagacagagtctcactgtgtcactcaggctggagtgtaatgccgcaatcttggcttactgcaacctccacctcacgggttcaagtgattctcctg

SEQ ID NO: 140514 - DNA, 249 bp, Homo sapiens
tttggggtattgaaagtatgttgaaaggaaggccagcagaagcagaaatggatgaaacgagaggcaaaatgtctaacagtgacgttgccttgcaatctgtgtatttagatcctgcaaatttacctcctctcttttctactgaaaatgtaaatgaaaggttacaaaaatgccagtaatgaaaaactgtgatatcataaaaatacttattaagacagtcagtagcaccacaatctaaattcagcagtcaga

SEQ ID NO: 140515 - DNA, 298 bp, Homo sapiens
gtgcagtggtgcaatctctgctcactgcaacctccgcctcctgggttcaagcgattctcatacatcagcctctcaagtagctggaaattataggtgtatatcaccatgcctagctattttttttggtagagatggtctttcttaacttccatattttctgaatgaagagaagggaaactgaaataagctaagaacttagacagctttcatgttattatcatgatatagtgggaagatcataggctttgaagttggactataaatccagattcttcaactcatagacttggattttagg

SEQ ID NO: 140516 - DNA, 423 bp, Homo sapiens
ctcctgcctcagcctcccaaagtgctgagatcacaggcatgagccactgcacccaggctcagtaaatttttatattaaatcgggcacagaaaaattttggagtaaaatacaaaattcatacaatttcctatataaaataggagcctacagaaatgttgatccctggaaatactgtgttcttcatctaacattagaagtctggtgtaaaagtgtattaagtacaccaccctcaaggaagaaagatcgggatccttgcaaaaatcctttgtaaagattaagtgacactaggactacttctctgcttaaaggccatggcaagattactggctgcaccttaggtaaggcctagttattcctcacctgggttttcacaactacctaactgcttcctcgacagcagtctttcccctccaaaccacttgg

SEQ ID NO: 140517 - DNA, 458 bp, Homo sapiens
aatataataagtaggtggtttgcagggctgtctgtatttcataatgtgataaactgccctcaggattcttgatatgattgaatttaaaaggaaacgaaaaaaagggaaaatgtactgttctcaattttaaatggatggcatttgaggctagctggacaagaagatgacagaattatagcagtataaaatgtgtaaaattaagggatttcacataccccctcgaaaaagaaatacatacagccaaatacaagctatgtgcctcttagaaatgtagatggtacaaggagacctggaaactaagtggttagggtaaacaagatacagaaggagaaataaagggactaaattaatcatctggtccaatctttaaaaagacactaattaattttggggagtggggtgcagacaaaaaaagagacatacacaagatccagacctcaaaggaaatgtaatgggat

SEQ ID NO: 140518 - DNA, 790 bp, Homo sapiens
tgtcccacctctgacgagttcctccgcgaggaacacttacagacttttcttttacaaagtcagagcttccaggaaactgtattgccaaggaggcccttaatgccaactcattccccaagccctcaattgcaggcatggagggaaaattacgggcattctcagagcccctggtaagaatcgatcccagggctggtacactgagccacgagaatgcactgttcctgtatcatgcagccaggccaggaagctctgttcttccagttcggggagaccccaggggaattcagcgatacttccaagcactgagcatcagtcttttattaccaacaaggggaaggtctgtagcttcctgagctcacaggccagctataaaatcagcgtgaggcagccaggaagcacccagaactcttctgccacagttgtagaattgtaggacccagtgggcaccacctttgtctcctgggcaagtccctttaccttccaaggcctcctttctcccaccctgctccacttttctcagcctcctgaatgaggatggaggcttaatagacatgagaggattttgttttcagttcaatgacatagagttaagtgagctgtcagggaagacgagaggcatagctgctgtgagctcctgagaccctgaaaatgctggtttgcttcacaggtgccatctagaacttaacaggcactttcggaaaaagttggctgaggaggaacctgctggggtattagaagctgccaccagcgggttggtgattgatgttctttgggaactcggtcagaggtg

SEQ ID NO: 140519 - DNA, 283 bp, Homo sapiens
ctagctgttaccaccagactgctaatgaaaatcagaaagtctgcaaacaaaactgccggcttctccagaatcgaaccagaatagcataaatttggaaaaggagccctttccactcagcacaggtttcccccgcagtgagtcccatcaaccaaaatgagatctataaatcctgacaatgtctctgcgactctgcatttttcttcttctaaatcaataaataattgattctgtgtcaatagggacctcttatatcccaaacacagataagaggtacagaccgtcg

SEQ ID NO: 140520 - DNA, 411 bp, Homo sapiens
tacaattaaatccttaataatttccttaaggcacatttttaaaaaagggccttaatgagtcaaagagcattggaatacatcattcgctgatctcattgggcgtggacagaaataaggaacgattgcttgtttggacttaattctgacaagtaataaaaaattgaaaatcatcggaatctttggagaacgactacatcatatttgagcaagtttgtatcttctaatttagggaagcagctttccagaaatttagataaaaggaaattagatgttctagcctgagtctttaaaggggaaaccaaaacatgaccacagggagcctaaggaatagtgcttaaccctgcctgggtctatgggggtaatgagaaggagggagagctaagacgactggcctagatgtatcagtttaaa

SEQ ID NO: 140521 - DNA, 761 bp, Homo sapiens
ctctccacttccttgttgataagggaaatttcctcttttttgtcctctaatcttaggccatgatagtgtcatatttgctctgtcatcacaaagcctttcttgtgtgcttgagagattgcaagatgctatttgcttctcttaggggccagagaacccctttgccacctttatgttcctgtaggctagacacccatctttaagatggttgctgattattcttcaaggaaatcctaggagtcttgctgagttggtttatttttcaggttattattagattagctttatcacatttgcataccacctgcaggcacagctattcactgattccaaaaacctcactgaggtagctacactataaagtgttgaggaactgccactgttagagattaatctgatgtctcacttaagctaaggcagtggtaaatattggattagatcattaaaggcacaatgcatgagagtccattatttaatccattattcaccgttgccttagcttaagtgagacatcagattacaacagtggcagtcccttaatatttcatagtgtagctatctcattagagtgtttggaaccagtgaatgtatcagaagatggcaaggttttctcattcttgattggtactgactcttgcccaactttccttagaataattggtctaaagtcaatttttatgacatcttgacagattgttctactgcactacagattttaagaagaattcaggagaccgaggcaggcagatcacctgaggtcagga

SEQ ID NO: 140522 - DNA, 340 bp, Homo sapiens
gtaactcatggccctgcatgaaacagaacctggaagagagaagaagaatttaaaatgctgttattgagaatctctggaagtatattattccaaggtaccttagattttaaaatttggcctcaccctacacctattttatgatttgtccccactacatcaaactcagtgtatgctcttgccatggtaagcattttttattcactttactggaaatgattgacaaggacttcttcaggatacattgggagagcagtgtttcctatttattatgtcctttcatctctgcctgacctagaatattcatgcttctgtcttaacaggtcccatgttataaaagttt

SEQ ID NO: 140523 - DNA, 455 bp, Homo sapiens
gaagcaaaacccaagataattggttgaaacaatcacttcttttaaactgagtgacccttcaaatatcccaattctgatttctcttcttgctggcctatgtgaagcatcatttattttaactacatttctctctggctgctaaagttacttctcttactttgatcttagctctgaatattaagtctctgcgctcactgtgggtatctcaggacattcccctgggttgccatctttggtgttcagaccccagggatcaactccagggaattctctgggggctggaactgtccctcttatgggagaacttctgtgttgttcttcatgtaacccagatgaggatcaattacttggtgacttgtttaatgaccctccattcaccggttccacctgatacttgtagatgaggaaatggacaaagagaggctagatagcctgcccatgataatccttgatta

SEQ ID NO: 140524 - DNA, 149 bp, Homo sapiens
ggaggagaggtgagggaggtcctgttcctggcgctgcagggcctgtaccccttcctgtccacaggccttctctggccttcccctggggcagctaggggtgtggagcagggcggctgccagtggagccaccgtcaagggaagtgtgggtg

SEQ ID NO: 140525 - DNA, 504 bp, Homo sapiens
tttttagaaatcttcttcttctcctatatgccaagagtttgtacatgctgagaaaattttaaataaatattggagaggaagattgctaaagtaaaggctggtgggtgaaaagaaagaaagaaggaaaatctgcctagggttctgatttagatttcaccactgtcttcttcaggtctcagacaacgtgccaccagcccaaagagcacagacatactaaagcagaggcagcagcttccctgaagcacgcacagagctggaagaaggagaacacattccatacatttttctagaaagtctagtattgctttcacttcccttgagtcatttaggtttctgaaagctaatcatctcccagaaaaaatctaacagatggtaagacactttcacagccataaagagatgtatacaaagggttaagaggcttagaaagaatacgttgtccagtcaattgctagtctgttccagaatgaatcctctctatccacttccttttcatgcaacatg

SEQ ID NO: 140526 - DNA, 989 bp, Homo sapiens
cctctctggcaagcctctggatgttctgacttcagaggggttctggctgcagctttaactcagccatatgttgtgacagctcttggagcagcattacacgggagcaatatccttcctgctaattggatctcagaattcattttcggaccaaagacatcaaataaacccaggaaatacgaagccgtttgcagttatgacttgagacgaattgagttgttcatcctctaaagttgtgttctgttccttatcagcctcatctgaaatctcagacacaaaagcagagatgtttctgccaggaggggcggaaagttcggtctggctttgatatgtgtctggagatgataaacttgggaagggaaatatagcagatccaatcctccctcccccatctccattaggtctttggccttgatagatttcaatatcctgtgcagctgatgtctgacccacgcatcaagaatacagccttcacacacctgccgtgagaagccctctatgaccttctgcagagggagggaactgcctaagagctgctgagtgcaggaatgcagggtgctaagaagcaggtacccagtttggggttaaaatatgtataatatatccatttgaatacccatcaataaatatcagtcatgctcaaaaaaacaaaaaggggggcgacaaataaccctcaagagcacaagaaaaaacgaacacaggatgatggaacaaagggaccccaattgtggatcgaaatttacactatgcaatcgacgacgaataaccacgcggacacgcgaaacgtgacaactgacatggagagaaccaactacgggggagaaatgaacaaccaaacataagatacgcacaaacacaggtctagggaacaccgcaacgagcaaacgacagtaacacaacaacgagcgataagcagaaacgacagcacaaaccagccagaaaaaccaaacacagccaacagaaaaaatgcagaacagaacacaacgcacaaa

SEQ ID NO: 140527 - DNA, 243 bp, Homo sapiens
gggcttttgtcttagaaatctcttttattaactgacacaatttcttgatctgttatgaatgcatgctgttctagtccttcaaaagctcaccacacattgctatggtttaaatatttgtgtcctccaaaactcatgttgaaacgtaatccccagtgtggcagttctgagaggtggggcttttaagaggtggctggatcgtgagggccatgccctcatgaatggatgagtccattcatggattaa

SEQ ID NO: 140528 - DNA, 891 bp, Homo sapiens
cttttcccggagccgcacccaggtcccccaccatcatgcaccccttacccaggcctctgaggggccaggcaccccccaccactcccctacagcaggagagcttagggaggctgagagcttggacagccgggagagggggccggatctctggatctccccagcctccagatctcagtgtggctctctctggagacaaaagctaagactcaacccacaggcaacactcaacacagagatccagctcagaaaaaaaggagctgaccagggaggaatggagaggccaagacacataatgaagactaagaaaaggaagaaagatgatgctggggctggagccaaagggagaggaagaggaaaggaaggaaagccaggggcagagacctggcagggcagcgtgagcccaacaaccacggggtgggggtggggcgcgcatcaagatttctaacaagcgcagctgaaaacacccagggccgttctctgaggccttctctctgcctaccagccctcaccagtgcttcgaagagccctgaggaacgtctctctatttgaagtcagagccgagtgcctgctctcggcacctggggctccatgcttaccaggatggtgggtacttgaccttcatttgctgtgggactgtcagggattccagggacccactggtccccgaactggctcagagatgcaagccacttttacctcctacacatctataatccccaccccatggctgacaaatattcccagtccacagctgtctccacccacccagtgacagagcacaggcagccaaaaggatcaagcaatctcttgccacctcccagcaccccaatacgcaaaattaaccccctaataaaattaattaaccactcacccatcaacaaccgctatgta

SEQ ID NO: 140529 - DNA, 1952 bp, Homo sapiens
cttttcccggagccgcacccaggtcccccaccatcatgcaccccttacccaggcctctgaggggccaggcaccccccaccactcccctacagcaggagagcttagggaggctgagagcttggacagccgggagagggggccggatctctggatctccccagcctccagatctcagtgtggctctctctggagacaaaagctaagactcaacccacaggcaacactcaacacagagatccagctcagaaaaaaaggagctgaccagggaggaatggagaggccaagacacataatgaagactaagaaaaggaagaaagatgatgctggggctggagccaaagggagaggaagaggaaaggaaggaaagccaggggcagagacctggcagggcagcgtgagcccaacaaccacggggtgggggtggggcgcgcatcaagatttctaacaagcgcagctgaaaacacccagggccgttctctgaggccttctctctgcctaccagccctcaccagtgcttcgaagagccctgaggaacgtctctctatttgaagtcagagccgagtgcctgctctcggcacctggggctccatgcttaccaggatggtgggtacttgaccttcatttgctgtgggactgtcagggattccagggacccactggtccccgaactggctcagagatgcaagccacttttacctcctacacatctataatccccaccccatggctgacaaatattcccagtccacagctgtctccacccacccagtgacagagcacaggcagccaaaaggatcaagcaatctcttgccacctcccagcaccccagaatgctaaacagaccctcacatctggactccacatccagcgaggagtgcccctgcccaccacccagatcacacagctgccagttacagaccaccctataggtcccaccacacggccatagcccaccagcatcccagagctgcctctacactaaagctctgtcccagcccagccatccttcaagccacatctggaatagcacacaccctattccactagccaaagcccccaggggtgtaattcagaaggaggcagactgggcctggggcatgtggacaagtccctgacaccacgccctggcttctccggcttgtctgaagaacctgaactgcccttaaggcctgcgcctcccatcccagggcagcccccccgccatacctacactcttggccatgggagaatgtcctcatgtgcggctaaacatcctcctcatgcagccttgaattctgttccttccacgtcacctcaccagacccaggatgaaagccgctcacctagagcaaagcttctgcttccgaggcattcaggactcccctcagggtgtgtgagcaccctggggcacatgcctgttgcttatgtctgggttacctctgtgaccctgggaccgctccacattgaaggccgttgtgtctttttgtggaaggatggaaggacagaagggaaggagagacaaagtggtaccacagccctgttcttgccctggcacttggagggcaccagatacccaggggactgtagctggctgtgaggactctaaggccaggccagcatacacagtccccaatagtgagtaggagcccagtcagtccacaccccttcccatccactcgaaatgtaacttagccctcggcttctccttacctttcaggagttctctccttacccccaaagacttcctgaggaccccctaggccagccagcctatccctctctcccctaacccagcatcctgcagtcccctggttcagattggtggtgtctgtgcctgaacccccacgagcctgaaagcccctcaaaggccacatgggtctcccgcctctctgcatctccagatggtggcacgaggcctagcacacaaggaatcccagaaaatgttggctgaaggaataaatggatggatctag

SEQ ID NO: 140530 - DNA, 353 bp, Homo sapiens
cttcctccagtatgatttggttggtaaaggcagcatgtgcaagtgttgtgggtagagatatatatcatgtgcatgacttttgaaatcattcaaaattgtctttaaattgctgctctgcccttcttagcacataacactgaataaattattcatcctgcttcagccttagtcttcacattgttaaatggggatagtaaatcctaattcccctgactgatgtaagagtgaagtaaggcaatgccaacgcctcgagtaatgcacatctgcttccctagaaacactcattatgtgtcaggtattctgattagcagaggtattgttctaaaaattactatttaatagaattttaaata

SEQ ID NO: 140531 - DNA, 320 bp, Homo sapiens
aaaaggcactgcagcttcctccttgcacacttagatcacacatgtggggaagcagctgccatgctttccgggcactcaagcagccccgtggagaggccatgaggtgaggaacagaggcctcctgcctgtagctgtgtgagggagccatcttggaagtggcttccccagactccgttgggcctttggatgatgctgcagcccctgctgacattctgaccgcaaccttgtgagggaatttgagccagaaccacccgctaggctgtgcctgcatcctgacctttggaaactaagagataataaaggtttgttgtttcagtctg

SEQ ID NO: 140532 - DNA, 528 bp, Homo sapiens
tacctagttgtatattgaataccttttttgttgattaattcatatactttctgtggctgtcagtgtcatttctgaattttcttgattgctctctctcacctaacaaataggagctcatttttgcagcatttaaagtactgtaagctttcttatacatccattgataagaggaataaaactttttcagttcattttctgaagagagagcttttaatttacttcttgttatagaacattaaaacgtacacaaaattagaaagtatactgcaatgaatctattatactcatcacctaacttcagtggttatcagtatatgaccagtcttttttcatttaaaccattgtgtgtgtgtgtgtgcgtgtgtgcatgtgtgtgcgcacctgccataaatgcacatatctatgtacaaacagtacattatgtaaccacctcccgaaatcaagaaacagtccattatcaataccccatacacacttctcatactgtcttctagttaactacctgcccccaccaaggataaccactat

SEQ ID NO: 140533 - DNA, 168 bp, Homo sapiens
agagacacacatggggaagaagtccatgtgaagacagaggcagagattagagtaatgagctacaaggcaaaagacacctagagccaccagaatcttaaagaggtaagtaagcattctcctgtaaagccttcagagggaatgtagtctttccaacaccttgatttcggg

SEQ ID NO: 140534 - DNA, 404 bp, Homo sapiens
gtcaatcttacttctactgtatttttcttatcttcctagggaaaaaaattgacaaaacttaaatgataaactatttttctgattattttctactgaagagaaagcagtgctatctaaatcatctaatactaagtatagctcataggtatcagctctatttttaagaagttaatgatcacttaataaaattaatgaatttattatttccttatatttcactccaatgcaaaaaagttttcatttaccttaaattccaacttgggtttttgttaaaaaattaaactccaaacaaaataagtttattcaaaacgtccttctgatagccttcaatccattaaaaaacctagtttagacactgtagcaattaaactctctttattttttactaatatctttaaaaatat

SEQ ID NO: 140535 - DNA, 490 bp, Homo sapiens
cagggctacaggatgtgcgggccatggtgagggctagagctgtctcttagcactggggaaccaagcgaggcctggataaatgcaggagaattttatcaacaaagttgtccttttaatgaggtcactctgattattacaaaaaacaattttacagtcgggaaaactgaggcttgagctaaggattgttccgaggtcctgtggaatcacacagctagaaggcaagtggtctcccatccgcctgaacctctctgtaatctctaagcaggtgaagggctgttatccaggtctatttgcacacctctggtgatgggaaactcacagtgttaacagttcttcctataggacccaattaacagaggcttctcaaattggacccagctcttccctctagctctgcctggacaccagctgctaccctgccagagtcctattaggaggagcccgctgtgggcggggatgaagtaggaagagatatgagctgtgacggagg

SEQ ID NO: 140536 - DNA, 1423 bp, Homo sapiens
taatgatctaaatattagattctaaagtattaaaaatgaagtgtaatattaaagtacacacaatttgaatttattttcatcaaaaatgtaaagtaaacataaaaatccaaaactaaaggttagcttttgtgctactaaaagttttcttctaaaatcttcagttttctgggaaaaaaggcaaaattcaaagtataactaatgaatataacattcaaataattatttaaatgaaacaaattatattttttgaaaatttaaatcacattaaatatttttataaaaataaaactggtagtaattctagtgttcaatggtgatccaattaccaaagaatccctagcacactagtcactactagacctgcatatatttaactttaagggccataggaattgtttaatattacaagatgttctttggccacgatatgcaacttttggggttatcaaggtaataggtgagtacttctggagcatcgaattagaacatgaaaagaagtagcaaaatggaagcttggcactcctgggaaatgatatctcattatcccttgcattcgtgctgagaggaaagacttgacaagttaattaatttgtctttttcttaactgagtgcttctgctgctcaactcctccctgctctctaaagaagtgtccttctctgatatgggcagcatcacaatccagcctcaaaagaagccaccttgggcttccaagacacaaagcaggggatatggagaggtgtctgcactagagtctggatggtgctactgacaacagtgagtgttcagggtgactgctagtgctgtgcagtgctgagcgccacattccatgggaccacgtgtcctttaataaacatattcagcgtgcgcttatggaactcatggcttctaaagcacaaggcgtatgtttcaagcatagtgctatccctgagcagcatttgtaagcctccagtctgcaacagtgggattacctaccaggctcagctgatggaccgggatgatattggaagagaggctgccagcctgaagacttacctggaaacattttctcgttggtctggttttaataaaatcaccagattccactagaaggaaaccaaagattacaaaggtccaaattaatatatgacaaagtagaaacggaaactgggaggaaatgaggtgaaacacaggggatgatgtattggaaatagggaatgaaaaccgtacagagtagaaacacctgaaagcagttctggaaactccacatgctcctgctgtaccaagacctggtcctatgtgtgctgaccttgttcttctgctcacatctgccacatctgcaaatgtggcaacattttagctgttttctattaacactgaagtactctgagagcttggaaattttcaagtgcaaaatcaggtccagagaacagtaaaaaaaaaaaa

SEQ ID NO: 140537 - DNA, 1465 bp, Homo sapiens
taatgatctaaatattagattctaaagtattaaaaatgaagtgtaatattaaagtacacacaatttgaatttattttcatcaaaaatgtaaagtaaacataaaaatccaaaactaaaggttagcttttgtgctactaaaagttttcttctaaaatcttcagttttctgggaaaaaaggcaaaattcaaagtataactaatgaatataacattcaaataattatttaaatgaaacaaattatattttttgaaaatttaaatcacattaaatatttttataaaaataaaactggtagtaattctagtgttcaatggtgatccaattaccaaagaatccctagcacactagtcactactagacctgcatatatttaactttaagggccataggaattgtttaatattacaagatgttctttggccacgatatgcaacttttggggttatcaaggtaataggtgagtacttctggagcatcgaattagaacatgaaaagaagtagcaaaatggaagcttggcactcctgggaaatgatatctcattatcccttgcattcgtgctgagaggaaagacttgacaagttaattaatttgtctttttcttaactgagtgcttctgctgctcaactcctccctgctctctaaagaagtgtccttctctgatatgggcagcatcacaatccagcctcaaaagaagccaccttgggcttccaagacacaaagcaggggatatggagaggtgtctgcactagagtctggatggtgctactgacaacagtgagtgttcagggtgactgctagtgctgtgcagtgctgagcgccacattccatgggaccacgtgtcctttaataaacatattcagcgtgcgcttatggaactcatggcttctaaagcacaaggcgtatgtttcaagcatagtgctatccctgagcagcatttgtaagcctccagtctgcaacagtgggattacctaccaggctcagctgatggaccgggatgatattggaagagaggctgccagcctgaagacttacctggaaacattttctcgttggtctggttttaataaaatcaccagattccactagaaggaaaccaaagattacaaaggtccaaattaatatatgacaaagtagaaacggaaactgggaggaaatgaggtgaaacacaggggatgatgtattggaaatagggaatgaaaaccgtacagagtagaaacacctgaaagcagttctggaaactccacatgctcctgctgtaccaagacctggtcctatgtgtgctgaccttgttcttctgctcacatctgccacatctgcaaatgtggcaacattttagctgttttctattaacactgaagtactctgtacggttttcattccctatttccaatacatcatcccctgtgttcacctcatttcctcccagtttgcgtttctactttgtcatatattaattgtctgacc

SEQ ID NO: 140538 - DNA, 663 bp, Homo sapiens
tgaacaaaagcagatagagggtcacaggatatttattaggagatgattctggggttttgttttggttttgcttttttcttttttgtgtgattcagttttaaccggcatacagagtccacgaagaggaggctgagaagtgattaggaaagtaaaatggaaccaggttatgaagagccttgcacatttcagcgggtcaaatgcaagggcttgtgttttccttggtaggtgggagaagtcacgaagggtttcaaatggcatatgataagggcatagctagactttaggaagatgcactcagcacagggagtttttgattctgactctgtaaggtgctgtagaagtttagtgagtttgtatttaaaaggacttcagaggagaggtaatttagcagcagcttctaagccctgatttgggaccaagaacacaggagcctctttaactgtggagctgctctagttgaaggtggggtaaatgttgccctcttagtctcatcagtggtctgacccccaagcactgaaatctcatttagtaaaagggttttgctggaaagagtgtttaaaaactcagcaagctagcaatatactattggttgtctttgagtggagatgggtgggagaaagctgtttagttagagctcttttgtaataatcttagcatggattg

SEQ ID NO: 140539 - DNA, 336 bp, Homo sapiens
tgatgctcaggtctggggactcacttggtgtagccagcgctggctgttgaaaaaggcaatgcgtgatttctattccaagcctttctgtgtaagagaagaaggtactcttgtgtcctggtgtccgctagatgcaggcaaccccctcccatcactaaggcgtgttctggggcactgctaccctcctgagagcaccctatctgagagatccctggggagtttccaacagctgaacctctggtggacaaaggctggccagcttctttttccatgaagtgcaggattattcctgggagggaagttagaagacctgaaagccagagacctgagcaagccagg

SEQ ID NO: 140540 - DNA, 276 bp, Homo sapiens
cagagagtccagagaaacagggagtgagacccctttgggtcctggcccttgcttttattatagtttgagcattttgtcctccttcccacagatagagcagatgtcctcaaagatgctctgtatttcagccttcagggcagctaagaagccatgagtgacttaggctgccctggccatgaacaccggagccagactggctggccagactgattcccgcatcccccatctgtgttttgaggggaaatctcaggttttgaggaatgaacatggcagcta

SEQ ID NO: 140541 - DNA, 844 bp, Homo sapiens
gcgacaaaacaccgaattgttctttttgaactgacaggcttactttgttcttttttgagaaaagtctgacagattcccaagtctgaataaccagagcttgtcactctttctttcaaataaaaatggtatttcatgaaaaatgaggctttccccccacacacacagttgcacaggtgtttttccctcaaaacaaccattgtactttggtatgcagtatgagtgctttttatgcactttccatttcatcctatagagtactacaaagatgtgtacttcacattcaagatttaatacagttaatagttttactgcttcaacgaggacattcttaagtgaaagtggctttttttactgtgagtgcatagtggtaatgacagtaatgattactagtagtttgatgctactgccatgattcaagttaaggggccagctgccttacccatcactgcttttacatcatcaatgaaaatgtcaacacagtgaaaaaagcaaataaataatattgttattacttgaaatcacagatttccttaaatggacttgggcactatcaggggtctgcggacaaacactttgagaaccattggttttatcagactttttgaagcttctctcaaacagtgaaacctatcagagataggacgttacttacatgaaaatataaatcatggaacctgaaaatgtaggatatatttaaattattattattatgattcctataattctacaaaatttcaaagattgtttttatgatgttttacagctctggtaggaacaaggtgttggatggatatacttttattttttttctttgagtgcattctttccaaatatttcagaaaag

SEQ ID NO: 140542 - DNA, 135 bp, Homo sapiens
ttctcagtgacctggcaacctaacctaacagctgtgtccagcatcaaatactcctcctcatcccctgctcttgctccccaagaccaggagcaggcgctggagtgctcctccctggggctgggccacaggccttaa

SEQ ID NO: 140543 - DNA, 272 bp, Homo sapiens
gaactgatcagcagagcccgaagcatcatgcagcaagatggcatctcctccggacacgggagcagggcagagctgaggtggctcctctgtaggctttacgcccctgaggtgccctggggcggctggcctgggactgcacccactgtgacaggcttctgatcaagttgcaccctgcagcgctctggcctggctccctccacccaaccccagccatccgttgcctttcctccggggtggggccggatgcctggcagctgagggtagttctgacg

SEQ ID NO: 140544 - DNA, 378 bp, Homo sapiens
ggatcctagaatagctgtattttccatgaagacaaaacagcatctaatgccaaaagccttatcatcagggcttgaatagcgccaacatcgagacccgacattctacacagtcttacctacatgaaactctacagtattttctcttttaaatctgtaccttttaatttataatttacaaaagctattttattacttaacacatggcataaatgtagtagaccatgaagataaaatgttttcccattttgttaactgtagcaggaaataatataaactatagccaacgtattttgcctgtttatttatttctctggcattgtttagtacttctatttgaaaaatgagagaaaaccttttcactttggaaggctgaggcag

SEQ ID NO: 140545 - DNA, 392 bp, Homo sapiens
gctttggggtctgtttctggtgtgtccatagatctgcctctccatgccacagagcggtgactgttctgatcatggtagtgactgttctgatcatggtagttttatcatgttttcatgctcaaggaggcaattccacattcacacattacttgtttgttgtttcatggacttcttttcacatttccctgggaagaactagggaacatgcgatggaggtgggaagaagttaagtgggtggcttgagggttgtatcacaaaagatagaagggaggggagaaaggaggatcttcttatctgagcccaacgctctggggaagccacccagagtgagtgagtccttaaatagacctaaatagaatccttggaattgtctgtgaggactcccttggagc

SEQ ID NO: 140546 - DNA, 311 bp, Homo sapiens
ctacttgtaaatttctgtctcctgtttgtctactgcgtgcaccgtggtcggatcctgcctctgttgctggaggctgcctctgtcctctgctgtggtggtcaggaagctggagcgtctcggcgccagattcatgtttgtaagaggagacgctctgtgagcctcggtgtgcagcgctgtctgcaagtcagactccccacccctcctttgtgcgagctgggcgggggctctgccgggactggtggtgttcatggagagggcttctgtgtgatgaagagatgacagtgacctgctggggccgaaggctgtgagtg

SEQ ID NO: 140547 - DNA, 311 bp, Homo sapiens
ggggaagctggaggaggcactttctggtaaagaaagcaaaagccagcagtgcccaggccaatttcaacagggagttaaatagcaccttaatcctgtggcaggacagctcatggggccatgtgtgctcttagaaagactcacatgcacgcatgcacggcagcaatgactccatactcacgttcccctgcagacaccaggcccccacagccggcacacacactgcagccccagttccatgttgctagcagtggcttagtgaatgagtaaagttcttaaaatgcaggggacacctgcccttcattcataaggct

SEQ ID NO: 140548 - DNA, 384 bp, Homo sapiens
gggaaaaagacccagagatcaaatgactcactcaaaatgacagtcaatgacagagcagggcctggggccttaggactgattatccaaatgccatcagaaaacgagctaaatcagaagcacctagtgagcttttaaaaaataattctacagggcacaacccctgagattctgattcagtaggttttggagtgatgcctaatattctgaaaatgccaaaagctcaaaagatggttctcttgcttggccaggtttagaaaatgctgtgtcccacattaccaccttcactcatatgacgactgtagagaaaatcataaaaatctggtgctcaagtacgtttaaatttaatataaagcaccaggcgtggtggctcacgcctgtaatccc

SEQ ID NO: 140549 - DNA, 232 bp, Homo sapiens
tgtagctgcctcttcagggtcagactttaaggtgtatggggacaaagttgggtcagtgtttgtagaaaaaaggctctttctccatttctccctcctgcttaatccaaggagcagagaacaccagggaaactcggaagtagcggggttgatttgggagctagatggggcctgacatatgaagctgctacctggttacagccaggcagagttgaaagggtgtcctttggcgggg

SEQ ID NO: 140550 - DNA, 237 bp, Homo sapiens
gagccccaagatttagtcacaagcatgttaaagctcttgggcagctctgatatgtaaaggtcagaatcttaattatgaaagaatgagatcctgtgacatgtgattggaacacctgagttgacaaacttaaaaattttgaaccctctccagattctcctaatactgcagaagtagcctacccatatctactaagatctgggtatattcccttagttgaagatgatgcaggacaaaagg

SEQ ID NO: 140551 - DNA, 390 bp, Homo sapiens
gtgagaccctgtcttttaaaaatgttgagcggattagtttaaaataatgactgcaaagtacatatgagcccaagaaatagggaggaggcgttggctgcatcggggggaggatggtgccttgagtgagcctgccagggtgtgctgaggccctccccaaggccacttgtctttttgttgtttctctggttataaaaatagcacctgctcttcattggctcacgcctataatcccagcactttgggaagccgagagaggtggatcacaaggtcaagagattgagaccatcctggccaacgtggtgacatcctgtctctactaaaaatacaaaaattagttgggcgtggtggcacgcacctgtagtcccagctactcaggaggctgaggcagga

SEQ ID NO: 140552 - DNA, 267 bp, Homo sapiens
gccaagtcattctttttttaatgagcatataatagttttgtggttcttgaaaaagttcaacagaggcttatcacatgccccagcaactgaactcctaggtttatacacaagagaaatgaaaatgtgtccacataataatttgtatgtgaacattcatacagcattattcataacagtcaaaaggtaaaaacaactgaaaggtccaccaatggataagtagataaacaaactctgttatagtcatgcaatggaatattactcagccat

SEQ ID NO: 140553 - DNA, 132 bp, Homo sapiens
acatggccacctccgatcctctggggaaccccatgtgctgctaggaaaacgagctgggaggaaaaggacagaaggaaaatggggaagcagtggtagaaagaaaaaaacgcacaaacaggcactagatagata

SEQ ID NO: 140554 - DNA, 344 bp, Homo sapiens
ctccttggaatgatcttccctcccttgtttagctggtaaacttctgcttgtcctttcaccttcagctcaaatggctcctcagggaactctgttcactcccatgcctctatcatgaggatcttttatcatcatgaacttctcctttgtagcacttccacagttataatgatgcatttatttttctaattgactagtagtctctagaagctggaagttctgtgaaagcaaagactgcctgttttattcatcaatgaatttccacaatgtctagcacataggagatactgcagacacatttgttggttggttggatggatggatggatggatggatggatggatgaa

SEQ ID NO: 140555 - DNA, 366 bp, Homo sapiens
ctgacactagtccaacctgttgttatgaaatatttcttacttacttgtgacagtcctcactgattggtgacatgttaaatttgacacttctgtccagtctccaattttcccaaaagggaggtaattgtttcttttgttataagtactttgtggattcctttgttagaccttgttatattgtacttgtttgcttagagcctatctttttaaataggctatgagcccttttaaaacaaaaatcatggttatctctgtatcaatatctttctgtacaaattatttctgtacaaattaatagacaaatagaaacttttaacaaatgttccttctgttctcctttgtccatttggggtctagagaattttt

SEQ ID NO: 140556 - DNA, 443 bp, Homo sapiens
  misc_feature (44)..(44): n is a, c, g, or t
gggtttatcgatgccacttcacaggctggagtgaagtggcacantctcaggtcactgcagtctcgacctcccaggctcaagccatcctcccacctttgtgcccagccatgacgttttttcttcttttttagcctgaagctctatcccatgtcagtaaaacctgcagctagtctttcctgtcttgcggagcaaatctgcagcagtgccgtcttagctctattgtgaggatctgttataccagcacctgttaacttgcttggcatttggagaagctaggtaaatgttgtgtgaatgagtaaatgaacgaacccaaccaagtatgtcccatgagccaagtacaaggggaagagtggacttttttcctgctcacactctccttcattgttaggaaaggcacatttttctacccaaggcgtaaactccaagagtggatacaatggaca

SEQ ID NO: 140557 - DNA, 318 bp, Homo sapiens
gctgcctaaacccagctagctccgggttaaaggaaggcctggaacccaactacagtgcttcctgacagtctgaccctaccactgccagcccctcttcaggcccaaggtactactgggttgagtagcagctgcttcccctccctgggagaaagctgggaccgggactctgcctgtttcctcccattagcacttcctcccatttctgactttgacacatctggctggtcacttagtaccaaaaggtcctggtcaagcagcaggggccagatctggacggtcctaaaacccacagctgggaagggaagatggccagaggtg

SEQ ID NO: 140558 - DNA, 178 bp, Homo sapiens
tgagccctccaggacgctgggtcagacaaggtcttgaagctcctcatggggggcactcatttgagtggggatgtggctcctggagagaggggcttgcccagggcttgaggcttccctgagccctctcaagtcgggtcctggcccagtctgcccatgaggctgggcctgagccccagcc

SEQ ID NO: 140559 - DNA, 236 bp, Homo sapiens
agatggaggctgcagtgagccatgatcgtgccagcgcacttcagcctgggtgacagagcgagaccctgtctcaaaagtaagactacctgggagtgggggaccaccaggttgtctaaggaggggtgaaaaccgaacagatcaaaactcccatgctgatcagtagtgggattgtaccttggaatagccactgcagtccagtctgagccacatagcgagactccatttcttaggaaggt

SEQ ID NO: 140560 - DNA, 360 bp, Homo sapiens
cctgaaacaacaaaatatgtgtgttttttaaatgtgtttttgctaaaaatagctttccccttaaaatttgttttaaaatcaaaacatttattatcctttatctgaaagattttcagtgagctgaagcagaacaaataattccaagttcattgacccgaaaacagtgttcagctattaagctaatcctctcccagtttgaaagagacccagttaaaggtgtcacagtagtctctggcatttgtggcttccagagcctttagcaaactcgatggtaaacttttcctaccacgttcttcatttatttttggtagtgctttttcccttttttttttttttaagacagagtttcactcttattgc

SEQ ID NO: 140561 - DNA, 324 bp, Homo sapiens
agtttagttgattgcttagtattggcacattttgactctcttctcatttcatttccttttcttcttagatagtttttgtgttaccatggagattacatataacattctaaagttatagcaatctggtttgaatgataccaatttcacttcagcgacatacaaaaattctactcctatatagctctttttccatcattttatgtaattgagatcaggaattacatctttatgtgttgtgtatccatgaacagattcgtaagtatttttaatcctttagaaaataacaagtagagttataagccaaatttacaataatactctagt

SEQ ID NO: 140562 - DNA, 977 bp, Homo sapiens
agtttagttgattgcttagtattggcacattttgactctcttctcatttcatttccttttcttcttagatagtttttgtgttaccatggagattacatataacattctaaagttatagcaatctggtttgaatgataccaatttcacttcagcgacatacaaaaattctactcctatatagctctttttccatcattttatgtaattgagatcaggaattacatctttatgtgttgtgtatccatgaacagattcatccctaaagaagtggctgacatctttaacgcccccagtgatgatgaagagtttgttggcttccgagatgatgttcccatggaaaccctctcgtcagaggagagctgcgatagttttgactcactagagtcagggaaacagcaggatgtgcgctttcattccaaatacttcacagaagagctaagaagaatttttatagaggacactgactcagagactgaggatttgcaggatttacgcagagtgatctgaatggaaagactaacccagaagtaatggtcgtggagtcagatttgagtgatgatggcaaagcatctttggtgagcgaggaagaggaagatgaagaagaagataaggctacccctagaagaagcaggtctagaagaagtagtattggtcttcgagtagcctttcagttcccccaccaagaagctggccaacaaaccagataaaaacagttcttccgagcagtgtgttctagcgcacgcttacagaatgggaaaaaaacattctggaaggacagaacgactgggaccggtgataccacggggagaatctaactccgagtcgagggatgaaccccgggatgagaaccggagagtccgaaggcttgcgaaaggaccggacctcacggaacaaggccggtgcccgatgggggagagaacgagcaattccgaagacccaccgttgaaaaaaggggggccgggaagaaacgggaacac

SEQ ID NO: 140563 - DNA, 270 bp, Homo sapiens
ctgaggtgctgcctgtaatcgctttgtgggtaggtctgcttataagaattcgcaaagaggagttcctctgaaactccctagccccgggaaacagaaagaagaacagtgctggggcttctcttcctgttcctgtcttttccttccagttcccccttcccagaatttcctgtctctcaacctccactctgttttctccgccccagtgttcccccactctctttcatttttattgtcttaaatccacttctcccacttattccagctttctgg

SEQ ID NO: 140564 - DNA, 273 bp, Homo sapiens
tgaacattttgttattagcatatagattggatgtatgtaggaacttgtaaagtgcctgaggttccttgaaaattgtttattctgtgtctaaaatgtgtacataagactgaaaataaatgtttaaaacaccatatattatccacctataaataaagtatttacaaagcaaaagtaaatgtccacccagctcatgaacaaattatcgaaagattttaaatttattgaagtcccaaattaatgagatattaccatgtgtgcataaataacttaaag

SEQ ID NO: 140565 - DNA, 515 bp, Homo sapiens
ctgggctcaagtgatcctcctgccgcggcctccgagagtgccggggtcacagctgtgatccccgtgcctcgctgttgttctctttctgttgagttggcagtcaggtccttgattcttggtggctgagggtatctcagtccaaggcaagaatcccacagaaagagactgggacaaatgaggccagaaatgggcctcgcccatcactcttttccaaaatgggctttgtcagtcactcttcctatacttgggtcaccaaacctgatcaccactatgtgcaaagtgcagttttagttttcaaagaagtgacactatacttaagaatacttaagaacgttaactgcgttaacctccacgcacacagccatagacaaattcccccgtcagacaggagcccattaggaaatgcccacccctctctgtagcctttgtaaaattaagctgataaaagacatcgctgttgttgaggtttaaaatcaatggataaccaggaaagaatataagaaatcatattaatt

SEQ ID NO: 140566 - DNA, 330 bp, Homo sapiens
agccatcctgcatagctaaattataatttaaaaagttaaaatgaggctgggcatggtggcttacatgcctgtaatcccagcactttgggaggccaaaacgagtggatcaccaggtcaggagttcaagaacagcctggcccacagagtgaaaccctgtctctactaaaaatacaaaaaaaaattagccggacatggtggcaggtgcctgtagtcccagctacttgggaggctgaggcaggagaatagcttgaacccaggaagtggggggttgcagtgagctgggattgtgccactgcactccaccctgggtgacagggtgaggctccattt

SEQ ID NO: 140567 - DNA, 340 bp, Homo sapiens
cctagggaagccgaaggagattttcttcaactgtccttagaactcacattcttactctaactatgatttttgtgctttgtcacaggtgagtcaatagggataacctgggataggtgctctcccagcacctgcttcctcagctgttaaaaaatagtctgtgattctacagagacacattgcataggttgacgcagaaccataggataatataagcttctgtgacacacagactcccaaacttcaacagtttaatcacagtagccattgctttctggctcatgtcacaagccagggttgatgtaacaatggaactgggtggggtttgggggatgcccctcct

SEQ ID NO: 140568 - DNA, 382 bp, Homo sapiens
gcccagggttcagtttgtatgtctgcaagatggggatagtaatgtctgtcataactatttcaaagagtctattgaagaagaaaaaaagtgacacaatgtgtagctcctccacacaccctgtcgggcagaaaggttgctactaatataattccgaagagttttagttttgcttgcacggagggcaaatcttcctttctctcatatgtctccaacctcctagagaagttaagaggggcaaagaaagttctggccattacatcaataggaaaactgagaaacagacaaatacagatgctgctagttgaggaggaaaatgatgaggccaagctcatagagccgctcctgataggttctagagatgtagctgactcaggatagtccc

SEQ ID NO: 140569 - DNA, 366 bp, Homo sapiens
gtttttatttcgtggtgaggctagagagtatgaagcacctgttacatagcttgcagttgtatcaaggatagagttactgggctgggcacagtggctcatgactgtaatcccagcactttgggaagctgaggtgggcagatcatgaggtaaggagttcaagaccagcttgatcaacatggtgaaaccgtgtctctactaaaaaaatacaaaaaaattagccgggcatgatggcacattgcctgtaatcccggcctacttgggaggctgaggcagaagaatcgcttgaacctgggaagcggaggttgcagtgagccaagattgcgctattgcactccatcctgggcaacaagagcgaaaactccatca

SEQ ID NO: 140570 - DNA, 164 bp, Homo sapiens
gccagctgtgtgcattcataggtgacagccatgttcggcacattccttgcttcacttctctgtccttctgagtcactggggattgagctagaaaactctggccataccagaggtctgatccttgccattttgcgcaacctcagcctaggtcaaagactggacag

SEQ ID NO: 140571 - DNA, 480 bp, Homo sapiens
tcttgtctgcctcgtgtccacactattcttcgaatcataattagatcacatcgcattctgcagaaagccttctagtgggcacccctgcaggtaccttggcttattaggcccctttacactctgacctcttcccctgagacatcatatccaactaggctgtcttgttcttcctgccccaaccctcacctctcagcccactggcttcattttggctctaaacacaccaactgagaaagtgaagggacttcaagtagatgtcccggagggctctgaaatgtgccctctactttgggaagcctgataaatctaacagaatgcactgaatctgattggggccaggaactgggaagaacaatgaaagggctaagtgttcctgaggtagagccctgagagcatggtctaagggctgcgccagtgtttccctggaccagatgtgtgccgggggaagagattttacctggggaccaacagggaggaaaa

SEQ ID NO: 140572 - DNA, 454 bp, Homo sapiens
atagtatacatcataatcatattgcgtgacgaacgactgctagtgtagcaactcagatatcggcgctggagtcttataaagtcgatctgcacggcttgcctcttcccctgagacatcatatccaactaggctgtcttgttcttcctgccccaaccctcacctctcagcccactggcttcattttggctctaaacacaccaactgagaaagtgaagggacttcaagtagatgtcccggagggctctgaaatgtgccctctactttgggaagcctgataaatctaacagaatgcactgaatctgattggggccaggaactgggaagaacaatgaaagggctaagtgttcctgaggtagagccctgagagcatggtctaagggctgcgccagtgtttccctggaccagatgtgtgccgggggaagagattttacctggggaccaacagggaggaaaa

SEQ ID NO: 140573 - DNA, 519 bp, Homo sapiens
tgaaaaaattacagacaccacagaattgcaaagttctctaagtattaattaaaatcctttaaagtaagtaaatattctttaaaaaaaaatctggggacagtcccttaaattagcatgggtccttgaatgagtaggatgtgatttaccttccagtaactgtgttttttcaaattagatagcttggattgttacctggtttactgaatggctatgcagctttctttgcctgataattattttgaaaagccggtgctttgcatatgataggcacttggtatttgaatgaattgaaacatctaataaattctaaaattcagagagctttcttaaagtgattgacagaacctattgatgtattcagtctaatcagattgtcatttggctctaagattaagccaatgatttaagtacatggttggccactgacctacttatattgatagatacaaaaattaagaaatcttcataaaaatagttttgctgtgctatatatttaattgtctttgtcttaaaattcaa

SEQ ID NO: 140574 - DNA, 230 bp, Homo sapiens
tgaatacaataggcatttgcagcacaatggtaagtatttgcatatctaaacaaacatatctaaacgtacaaaagatacaataaaaatatagcattataatcttatggggaccactattgcaaatatgtttcatcattaaaacatcactatgcagtacatgactgtatattgaaaaatgactctcaattcatacaaaaccacatccaggccatcatcaatcattctatacg

SEQ ID NO: 140575 - DNA, 496 bp, Homo sapiens
tccttccttccctttcaagttaggggtaccatttgacttgcattggccagcaaaatgtggccatacatggcaattctgggcagaagcagttgccagtatgggacagttcagtgctctcttttcttgccttggtgatggtgaaagtttgtgagcaggtggaacctctgtcaatctgagctcttgaactacaatgatggaaagattgcccctccctgacccttgttggacacacagcataaaaaataaatgagcttttgtgaggttaagccactgaaattttgggggttagttgttcatgcagcagaacccagcccattcttactgccttaatagtcatttaatacatatgtattgagtatttaactttgtgctgggcactgttaggttggggatataacagtgaacaacacagaagtctcttctctaatggagattacatctatgagggagacataataaataaactaagataattaaatattgagataagtgctat

SEQ ID NO: 140576 - DNA, 584 bp, Homo sapiens
atttttctggccacgactcgcagttcataaaccctgtgcttctgtaagtcagtggcaggtatgagtgaataatggtctgtctgtcctcaaacctcagtataaaaggaaattgaatcctgcctctttatctactgtttatcctcgacacaccacctgcaagtgcttgttttgggtagtaaaacttcctgcgtggtcacgttgttcattttgatttttgatgcatttactaatggaattactgggtttggagacataaccataggtaatttatctctgagggtgcctgcttggaaaaataactcttgactgtgtgtatgtttaatgtaaagaccattaacacttttatctctaggttatttaattcagatatttctctgcacacagaagagtcatacaagaaagccccctagtactgtacaagaaaactggaagaacaggtcagaaggaaaaacgtttctttcacatattccacattaaattatattctctaaacacatgtcaatgtgttaaatttaatggaagaatagtagtagttagattttgagaacagtgtcataatagtcataaagctgtctatttcagga

SEQ ID NO: 140577 - DNA, 778 bp, Homo sapiens
tctcagcctcccatacagctgagactacaggtgcttggcaccatacctggctaatttttaaatttttttgtagagacggggtctccctatgttgcccaggctggcctcaagtgatcctcctactttggcttcccaaagtgttgggattacttgtgtgagccacagcatccagccatgttaatgatttctaatttcatttccttgtgtttggagaatatccttttaagaatctaatcttcttaaattgcctgaggcatgttttacagtctagcatatgactatgtttcatgtttacttgagaggaaagtattctgctgttgttgggtgttgttttacagacatgaggtatacagtcagtttacagtgttgctcaagtcttctcctgccttcatctcctgcctagttgttctatccaagagaaacagtttctgttgcttagttttttcctgtgtagaggtcacacttccttgttctttccatgtcttataatctgtggttgaaaaattggacattatagataacatattgcagtagctctggaattcatgtccttggggactgatcttgtctttttggtggtttattatttttgtttagtgacttagctgaactaactgtaaagtctacttcccccatagtgtgcagcccctgtggccctgctcggatgtttttactttttttttttttttttgagtttcacttttgttgcccaggctggactgcaatggcgtgatcgccgccgcctcccaggttcaagcgattctcctgcctcagcctc

SEQ ID NO: 140578 - DNA, 535 bp, Homo sapiens
ctgccaacgagtcccaactacatgcctcaaaacaaactcatcatcttaccccaaaacctgctcctagctcagcagatggcaagacaatccaacaagtaacccagaccagaagcttgggtgccatccttgactcctctttccctcatcactccagttactgagaccttttccactctacccatcccctccataccctagcagagagtcctgtcggctctccccagcctggggacggttcctccactggccatgctgtctcccatcagtccccgcactgcagacaaaaagcacttttaaaaatgccaatctgggccgggtgcagtggctcatgcctgtaatcccagcactttggggggccgaggtgggtggatcacttgaggtcaggattcgagaccagcttgggcaacgtggtgaaatcctgtctctactagaatacaacaaatcactaggcgtggttgcacatccctgtaatcccagctactaaggaggctgaggcaggagaatcgcttgaaccaggaggtggagtttgcagtga

SEQ ID NO: 140579 - DNA, 105 bp, Homo sapiens
agatccttaacttaatcacatctgaaagaccccattttcaataacgtcactcacaggtacaggaggttaggaatgcattattgaactcactactcaataattttg

SEQ ID NO: 140580 - DNA, 177 bp, Homo sapiens
tgagtgctacaaggggacatgcaatttcagataacctccttccaccatctcatggtaactcacaagcgcaagccttcccatacccttgattcagggctcttttcttatatcttattaaacattttactaatcttttataatccaaacaactggctgatgagaaatctcaccttcaag

SEQ ID NO: 140581 - DNA, 261 bp, Homo sapiens
ccgccttggccaccgaaagtgctgggattacaggtgttgagccactgcacctggtcattatgttttaaaattacatacaagttgttaaaaaaatatgaacagcagaaatagattttagaaaaacagaatgaaattatccatctcttcccccatttagtgaatatttggagtatttcttttcacactgtaggtattataattcctgatttattagaagcagggagtggctgggcgtggtggctcatacctgtaatcccagca

SEQ ID NO: 140582 - DNA, 401 bp, Homo sapiens
aagatcttcacctcatgaccttcaacactgtgaatcaacaatttgggggatttcaaagacaaagggcaaaaattaccatcctgtttgtcacacacacaacaagaaaccagaccaggatgacagaggtatgactggaattcctccctggacccagtgatattttggaaaatcccatcgatggcatgatttataaattatgattttccaaaatgttgaatatttgaatattctttttcttttcttttctttttttttttttttttgagacagagtcctgcttgttcctcaatctggagtgcaatggcgcaatctcggctcactgcaaccttcgcctcctgggttcaagcaattctcctgtctctgcctcccaagtagctggaattacaggcatgcaccaccat

SEQ ID NO: 140583 - DNA, 157 bp, Homo sapiens
gctgccttcacctccctgttcttcaggctgtaaatgaggagattcagcatgggagtgatcacgctgtactgcaaggagaagatcagctcttgaatggatcctgaatttggcatgagatagcggagtaatccggagccataaaagaaaatcactgcag

SEQ ID NO: 140584 - DNA, 541 bp, Homo sapiens
ctcagacagccctgatagccttctatgtatatttgtacaaataacaaattcaagatttgttttcctcttctctaaaaaactttgtttactcttttgacatgatacatttcctttttgttatagaaatggttcatagtgctgtaccttaccctactaaaactgcaaatcacctggctagctcttgtcatacagcaaacacatattattgttactattagttagtcttctcattctttgataaggacccaacccaagaaaaggctaaatatagtccattatcagtaagaggcaaacaggaatcaaggttcaagaacttctgactcttagttctatgaatacgcatctcacaaaattaaaagcatttttcaatattgttaccatgttgacaccgttaagtttgtgacaacacatttacttcacacagtccactctaagttaattccaatattacttaagaaactttaaaaaatgctttgtttcacaaaagtcttcaacaggggccaggtgcagtggttcacctctgtaatctcagcactttggg

SEQ ID NO: 140585 - DNA, 766 bp, Homo sapiens
tcattttacccctagtacttcatgcatggtaggtcctcaacagatacttactgaacaaatgagtaaatacttgggtgtcacagaatagtgtaatggagatagtctttcatgtgatgtgcctttttgctcagtttcactacacttatttaaagttatatttagtaaaaactctaagtaaaacatatcaattccaacagtgtattaaataataaatacatctatgaataattaggatttgtactttgaatactagcttataagtcaagatgcttttgggtgcaaaaataaataaaaccaaaaccagctccaacttcagctggcttaaacaccacaggtataatttgatctaggctctgatggtgtttttttggtaactactcagctctgatcttgtctatgttacctttctccttagctggttacaaagtagctaccagcagaaactggtaggtaagggaaggtgacctgtttgtgcctggtggcaaagagaaagtcttcattcttttactgatttttaaaatttctttggtgacacgatctcattctgtcatccaggctgaagtgcagtgatgctgttcagccttctgagtagctgggtgtgtaccaccatgcctagctaattttttttttttttttgtagtgatggggttttgccatgttgaccaggccggtcttgaattcctggcttcaggtgatctgcccacctcagcctcccaaagtgtcgggtttaccagtgcaagccattgcacccatccctggcctgttt

SEQ ID NO: 140586 - DNA, 150 bp, Homo sapiens
ttgattagataaagggggaaaagagaggcgggggtggtgggaggaggaggatggatggcagggccaagggagggggaaaggcggtgaagaaagaggaagaaatgaatgatgataatgcaatgaaaagaataagccagaggagggaaaagc

SEQ ID NO: 140587 - DNA, 603 bp, Homo sapiens
aatttattgtatgaaagtaatacatgtttccaaatgaatgatacagtagtacaatcagttttataggaatgtatgtccccttgctattattgggtattgatctttcaaaatttccctcgtttagaatgcagaattatagatatatcaaatataaatacacatgtacatattataaaagaggttgtcttctgtggaaggtttttggaattacatctgtgtatttttttgaaatttgccaaattttctactaggagtctacattttataagggaaggaagaaaaggtttgtttgtttgtttggtttttgagacagcatcttgctctgttgcccaggctggagtacagtggtgcgatcttggctcattgcaacctatgccttcctggctcaagtaaccctcccacctcagtccccgagtagctgggactacaggtgtacgccgccatgcctggctaatttttgtagtttttgtagagacagggttttgccatgttgcccaggcttgtcttgaactcctggactcaagggatcctcctaccacagccacccaaaatgctggggttacagatgtgagccactgcgcctggtcaagtttggatttttta

SEQ ID NO: 140588 - DNA, 325 bp, Homo sapiens
aggatgtaagaagagcatctgggctcctggggaggtagaagcaggcacagacaagaaaggagggctgaggctgacatctgtctctgctttggctatgcagaagggggactgggctgctcagtgatctgatggaggaggagaaactgaggccagaagactcatgctctagcaccacctctctttagatgtgtttctagtctcttcactctccctttggatttatttacattttggggttagaaggagcatttagagatgcagtccttttctggcacagatggcaagagtaggatccaaggaggccaatttcaatggccagggccag

SEQ ID NO: 140589 - DNA, 437 bp, Homo sapiens
gcccactggcaaggagaactgctaagatcctccaagagcgggtgttcagggtcccttcagactcctgaccctccactttgcctggagcagccacatccctctctgcctggagagggggaaggaagagattccagaagccaggtcagagcatggagagtaagcagcaagggcccagagaactctgccatggaaatcagccatgaaaccagactccagccacagagctccaagggcctggtgccatcaaagataggttatctcaaaagactgttgcctaaaagttggatgtgattgtgagggttggggaaacacttggaggctgtgctgcagtggccaggccaagccaggttttacaagttcacagcagctgcggttgctctgcggccagcctaagggatgtttaataaaaagctgtgctcaatttcacccccttcaca

SEQ ID NO: 140590 - DNA, 542 bp, Homo sapiens
attcttggcagttgcctttgacatcatttgtcacttcctcctcctagatattgttttcatccatttcatttgtagggcattttccttcctcctcatgggttgctcctcttcttccagacattgtaatgatgtagtcatgcaatcttcggtcaccctctctactacattcactcccatggtgatctcatttgccttgaggttttaaataccattggtatgccaatgacgcttacatttttgtctccaaccaagacttcttctcaactccagactcctatatccaactccctatttcacttcactccctggattctctattactgagctattgccacaaaacttctgcataacagaccacctccaaactcattggcttacaacagtagctattaattctcttgattctgtagggtctggtaatctaaagcaggctccatgggcagccctccttccaaatgtgggatgagctgggcttagctggggtggctctgtgtcacttgcattcacttggggtccaggctaagagggcaacgtctgcccca

SEQ ID NO: 140591 - DNA, 297 bp, Homo sapiens
gtgatcatcgagctcgtaccgatggccaaggttcacaatttcagcctggaggaaagtaaattaaagaggtaagggcagctcccaccttggaaagacaatctccgcaggcctgcagaaacagacctgcagaataccagaggccccttgtctactcccagatcactgagagagtttccctaacttgaggctcagcaacatttggtatcctacatttaggcagagggttgcaaacagtaggggcaaatgcttgaactctgcttagcactgagtggtctttgctgcttttggtcctgaaat

SEQ ID NO: 140592 - DNA, 223 bp, Homo sapiens
tagcctgggcaacacactgagaatccatgtctacaaaaaactaaataacttagcggagcagggtggtgcacacctgcagtcccagctacttggttgggaggctgaagtgggcagatcacttgagccagagaggttgaggctacagtgagtcatgtttgtacaactgcacttcaacctgggctacagagcgaaatcttgccttaaaaaagaaagaaaagaaaaa

SEQ ID NO: 140593 - DNA, 559 bp, Homo sapiens
gtctctgcacctttttaaaagtcttcacttaaatattgaagcaggaaaggcctctcgaaggggatttatctgtgaaagctctgaaagtaccatggccacttctgacagtcactttatttgagcaacaggttcagaagggaactgggttgttcccacagtaaccagggtcttaatcaatttcaatttttgataacgaattgaacatttaaaaatatatacaggccgggtgcgttggctcacacctgtaatcccagcactgtgggaggccgagtgggcagatcacctgaggtcaggagttcgagactagcctggctaaaatggcgaaacccaatctctactaaaaatacaaaaaaagcagccaggcagtaatggtgcacggctgtagtcccagctactcgggaattctcctgcctcagcttgaacccaggagaacccaggaggcggaggttgcagtgagccacgttcgtgccattgcactccagcctgggtgacaagagcaaaactctgtctcaaaaaaaaaaaaaaagtatacacacacacacacacacacaaatagaat

SEQ ID NO: 140594 - DNA, 517 bp, Homo sapiens
gcaaaaaccccaaataaactgctgaagtacacagacgagctgctcttctgttatcagcctgactgcgtaccagctctgtgtgaggcgtctggtgaattcccgacccacaaatagtctcatagtctcatttttttttttttttttttgagacggagtctcactctatcgcccaggctggagtgcagtggcgcgatctcagcttactgcaacttccacctctcgggttcaagtgattctcctgtctcagtttcccgagtagctgggattacaggaacccgccaccacacccaactcatttttgtatttttagtagatacagggtttcaccatgttagctaggctggtctcgaactcctgacctcaagtgatccgcccgccttggcctcccaaagtgctgggattaaaggcatgagccatcgcacccggccaatttttgtattttttagtatagaaggggtttcaccatgttggccaggctggtcttgaattcctgacctcaggtgatccgcccaccttg

SEQ ID NO: 140595 - DNA, 340 bp, Homo sapiens
tactgggcacttctcaggctgtttttagatcttactttcttgggggtcagccactggaactttattttgttcctttggtagtgccatatttccttcattcattgtgttttttgaagccttggtgccggaagcacactgcaacgggggcaagtgggggcttagagggtggtagtgtggaacacagtttaaaagtcctgtctcctgtttctctccctcctccccatccccccaccgtttccccctgttgcagggttttgtttatataactcaagttgtttggctaaattcttcaggtgaataccttttttcttccttttatttgttgctgtttttgattgag

SEQ ID NO: 140596 - DNA, 287 bp, Homo sapiens
  misc_feature (283)..(283): n is a, c, g, or t
taccaagcaacaaaattttaatgtgctatacaagaaagaaaataaaataacagtatcctgcatagctcagctgtgaaaaatatttacagtgaaaacaaactgagatataactatcttagagagtacaagcgcaggtatttaagggaggaagaataaaagaaagataaacccctctcttcctcaatggaattcatgtttaatgactaaaatggaaaaaaaaaaagaagtcaataactggaaaggatggctggggttctggatacgggttttggacggggatccntcta

SEQ ID NO: 140597 - DNA, 477 bp, Homo sapiens
cttgccaaagtgctgggattacaggcttgagccaccgcgcccagccaagtatgttttttaataccaaattatagcttcatcctaactggagagagacgaccaaggcttcaaatggtcagtgctaaacccagcagccagggaaggttacttgtgtgacttggggagccaggcccttcattcagaggagaacggtttatgagagacaactcattgtctattaaaaacctggtctcagttgtctgtgaatgtgagaatagcattttgtgagatgcactttcttctcccggttccctcatgaagcagatggtgtagtcctagttaaaatgaaaaggaacaaaaaaaatacaacaggcttggggaaaggctttatttgacatctaagtgaatttccttattacctcaagtttgcttctctgccaaataggggcctgttgaaaggaacagatcagagtggattgtgctgcaaacggagatgtt

SEQ ID NO: 140598 - DNA, 492 bp, Homo sapiens
acaatgtgccaactccaagcctacactgtaaaagtcaacatgtttgcctatgtccttcttgtgctccagccatccatcacaaagagaagatcatgcctcacatagctgccagttcaagaaggaagagggacctgtggacgaggcattgggcccaacctgcagcttggagcccagactagccacatttagtttaggtcagctgaatctcagcaatgcacagtgaaatcattggtaataaggctggaaagatagtgtctagaaaactaagaataccagattaagttattcacagttactctattttaggtgagtgagagttattacaagtctttgagcataaattttgccaagattattctggcaacaatgtgtagggcatagggccaagacttcaaatggagtttacttctatagctcccagagaagaaataaaccatgcctttagtttgatgctaggactttgagaatgcatgaggcaatatgaagaataaa

SEQ ID NO: 140599 - DNA, 714 bp, Homo sapiens
cagatttggggtctggcgaggacttgctgtctgcttcatagatggtgccacctagctgtgtccccacaaggcggaaaggggcaaacaagttccctcaggccactcttacggggcattaatccctgacttaatcacctcctaaaaagggtgtcctcttgacactatcacattatggattagggttcaacctatgaattacgtaggcacagacacattcagatcctggcactacatgtaggatattcagttagcccctggttgaggggcgtttgtgttgttactggttttctgctattacacataaccctttaatgaattgccttacgcatgcatgtttttgagtgttcgtcagtctctctttggaatagactcccagaagtggaattgctgagtcaaagggtaaatgcatatggaattttgattgatacggccacttcccatccatgggggttttactgttttatattcccgccagcagtgaatgagtacccttttttccccaacagagtattttgtcaaatttttcaatttttgcaggcttatagatgagaagtgatattatctcagtgtacttctaattgcatttctctcttttcatgtggttaagagccatttgtatttgctgtgaactatttaacctatttttctatagaatttttggtctttttcaaccattttcagctctttgtatactaggaatattaaccctttgta

SEQ ID NO: 140600 - DNA, 193 bp, Homo sapiens
ggccatggctgggggatgggcagcctccatgcctgctggcttctccccgcctccccagagcccttcagcagggagaggggcccaggcttggggtgtcctgggctggaccccctgatgctcagggcctagaggtcctggcatccatgcagctggcccggtccagcttccttcctggaaaggctgcacagagggg

SEQ ID NO: 140601 - DNA, 530 bp, Homo sapiens
agttcgacggagactctcttgcttctctctcacatggcaaattaaacaggagagagcaagagagatggaagccacaatcccttggactcagatcacagaatgtctgaattttgctgatccctgtttcaaatcaaccacaaaatatttatttctgaactcatgaaaggtaagtgcattgtacttctaaaaacaattttttttccatgaaagaggatagacccaagctgtgtatggctgagttgactctactgaatgtcgatgctatctagttacaaaaggaacaagaagatttaagccttacactttgattgacacaccaatctttttagacttccctgggaaaaagtgaggttgaccttaaatgagagcgaattgcttcctatctatgttgtgtgtgtttcagagcaaaacctggcattgtccaacttgaagcttcactgggaatgttttggaagtgtttggtgtaagagtgcaggactgactctgagactcttgccgctacagtgcacttgtttttctgaagttgattc

SEQ ID NO: 140602 - DNA, 473 bp, Homo sapiens
atttgacattggttacccaagtttcatatagcgagccagattcgtaaatgctaaggattttttttaaaagtggaaatccaagggacaggttgagtatcccaatcagaaaatctgaaatccaaaatgcttccaaatcgaatattttctgatcatcaacgtgatgccacaagtggaaaattccacagttaagtgctcaacacagcctttgtttcatgtacacaattatttaaaatattgtataaaattacctttaggctatgtgtataaggtgtatatgaaatagataaatttcgtgtttagacttgggtcccatccccaagatatctcattatctttgcaaatattctgaaatctgaaaaaatctgaaatacgactggctgcaggcatttcaaataaaggatgctcagcatatactgacttaagtcccttcaaatctagtcctaatctgccctcaatttaagatctgaatttat

SEQ ID NO: 140603 - DNA, 502 bp, Homo sapiens
aagatgcgggaagcaaagcatttcttagatggcttgagacatcttcatccctggccttctcttgcagaagagaagaggcaaggatatatttgggctgctccttcccttaggggtgggccttaaggagaggttggaggctgggactgagtgtgctctgtgaacaaatacatctgtgggaccttgaatgaagctcttctgcaggagtgctgaggacagcaaagctcatatgagtgttcttctaatcactttttaagaggattgagattcctgcctgtgccccatacagacatgggtaagtgatcacattggcccaggtgaggagtgtctgtgggacatgggtctggcctctcccaccaggctgaaggcatctctagagcaagaccggcgtcactgagtgtgatgctgggtgagcatcctcagagcacgaacgagggtcaaagaaagctctgggtggttctatggttctataaagggttctataaagacaaagctcttggaagag

SEQ ID NO: 140604 - DNA, 520 bp, Homo sapiens
ccccccacacagggcacccccgaccttcaacagcctctcctcacccacacaccaattccgtggcgagtctctcggctcttcccagccacccctacaaagcaccattccctttgcattcggatgggtcctgttttgaggcttacccccgccagtttgacatctctgcttcagtggcctactaatttttctttttctttttcttttttgagatggagtctcgctgtgtcgcccaggctacatctaagaagaaaaaaaatacatacacgcacacatacacacacacacctggagagtcaaagagtacgtgcatactaaaggtttaacacgaacattcaactctgagacatggtctggttaggcagaagaactatgagacaaaaagaaagaattcctcagaaatgcatgaagggacggacacgcctccacatggggcactatcagctgacctcaggcttccctacagcacgtgtgagccaggcgatggtggaatgacagctgcaaagtgttggggaagaagatc

SEQ ID NO: 140605 - DNA, 446 bp, Homo sapiens
aggctcaagcaatcctcccgcctcagcctcctgagtagccaggacttcagacataagccactgtgaccggccaagagacccaccttttacagggcaagtggtttgtttgccaattttcactgccccaccacatgagggtgtttcgagtgggaagcaggtgcaccctgtgtgaacagcaaagcccagcgcatgcctgctgcctcccacctgctgccacgtagagctgggaaggggaaaggctgagccccacctccgaccttccctacatatcaggaaatcttgtcgttctccaaggtcagctcagacgcctctggccactgccgcccatggcaacttggtgccagggatgacagcaaccaacactcattgatgccgtgacatgccaggctgtcaccagcttttcacaacagccctgccagggagatgctgtgtggctttcattttgc

SEQ ID NO: 140606 - DNA, 375 bp, Homo sapiens
atttgcagtgatacatgtagattgtttagtagtgcttggcacattttgagtgctcagtgagtgatggttgttgtcttcatcatcatcatcatcattatcagtagtagtactagtagtattgtaagggcagcatcatcataatcagatagtagttaaaaatcagcatctagagtcagtgaacctgttaagttctaaccctggctataccatctcttcctgtgtaaccttagaggagctctttaacttctttcagcctcagttttctcatctggaaatgtggataatagtatagtggttgagaggaattaaacaagataatatatggtaagtgcttaaaacagtgcctggcgcatattaagctcagttattcgttgc

SEQ ID NO: 140607 - DNA, 481 bp, Homo sapiens
caaatccagtaccagaactggctgactcagaatttaccttagatggaagatagggtaggaattttggaagaaggatgaccttacagatcaagacagacaattgcaggaaatgaaaattggacatttgacatttgaacctctctcctgtgtttggaaaactctccatcaatgtgatacaatggtggaaagcggggtctaggctcaatggaacagatggagtctcgctctgttgcccaagctggagtgcagtggcgggatctcgggtcactgcaacctttgcctcctggattccagcgattcttgtgcctcagcctcacaagtagtgatgagccctcctcttccagctaggaaaatgacggtgttcagaaagttaaaacttcttcgctggaaggatttcatcttaaagttgggagactggaagaaattaaagtgttctaaatggaagagcattcaccacatgtgttctgatacgttgtgaggt

SEQ ID NO: 140608 - DNA, 440 bp, Homo sapiens
ggaggaaaaaacttgtgttccattttagacatgtaaggtttgagataactgcatgacatccaagtggagttataagacagacagttctgtacctgtgtctgaagctcagagaggggagtgctctgatctgaagaaataactgggaattgtcagcctaaattcaatattgttattgaatccatgggaatggatgtgatttcccaggaagcatgtatctaggactgaggcctggtttgagtgaatgtaaagaagcctctatatatggtactcatctttgatggttctctccattcccaaaagctcagctgaataattagtatttagggagaatcctctggaccctctaaaatttttctctggactaagccaggccactgactgtattttgatgctgtacctgaacacagaatggcttttattagatcatgctatcagcctat

SEQ ID NO: 140609 - DNA, 466 bp, Homo sapiens
ccacctcagcctcccaagtagctgggactccacatctggctaattttttatagagattgggtggcggggggtggtgtctcattgtgttttccaagctggtctcaaactcctggctttaagtaatcctcctgccctggcctcccaaagtgctgggattacaggcatgggtcactgtgcccagcctagcccacactcttaatcgctctgctaggttgcttctgtttgtctgttagttcagcacatggtttgagtgctcaccatgtgcccggtattgggtatatgctatgaatagggaagccttctacagtctagctccctgagacgggcccacgtgtattctcttcaccatggtattccctgtgcctatcacactacctggcatagtcaggtagactgacccatggacattccctcttgtctgcctctatgtgcttttcatttcatcgggaggggaacagactacaca

SEQ ID NO: 140610 - DNA, 398 bp, Homo sapiens
aactgattgccagctttataactcgatctgggcacactccccatcggggcctgcatttcctgtggatgatgcattggtttccaaggtgacggtgggaaggaatagacctgttagcttgtggcttctgactcactcactgcaatggacgtcatagaattgtagctgaacaaatggatgctgataataagtatgtgcctaaggtagcagcggggcaccaatggttaaaacaatcccattgtaccagctctctctccctcccactaagcaagccgacaggccaacagaaataccggaactgaaaaaagatacaacagatttccccagtcatatataagttcacagtgaagtcctatttacatccccgagattttgctcctacgcctggagaatttcctttt

SEQ ID NO: 140611 - DNA, 658 bp, Homo sapiens
aaagcagtggattagaggtagctttgcccacagatattttaacctcccaaaagtatttaattccaaattttaatagtgtcaaagctaacaggatattgcagatacataagttacttagggaggaaatcttaatttcttgatattttatgtagaataaatagtcaagtttatactataacatcctggcaaaattgtaacaagtaagagaagactgcttacataaattctgtgtccatgaatactatattagatgtttgtaaagagttattgtaactgtaattctctaagcatgcagaaggaaatgaaatcttgattagatggtcagttattaaagatctaacagggcacagagatatagatgataataaattagcaaaattatccaagaaaaaagatggtgtccaaaaaattgacaaagggaagatcctgtagtaagaaaacattgaatttagaaactagagaagcatagtctcattttacagatgaacacactagaacccagaaaagtttttcaagtcatgtcccccaggttaccggcagaggcagtctaatactcttttccactctgtcctgctgcctcccagtaatcactgattatttgcactacttacagagcctattgctgctggcaaagctctttctcaaaacaaataaaaaa

SEQ ID NO: 140612 - DNA, 375 bp, Homo sapiens
tgagactctgtctcaaaacaaaaaaagcaaaacaaaaaaaaaaagaagatgcagggcaacaatgccagggtcatgggtgtacatgccgaggctatcgagcccctcgtaaagcccaaggacgttaagcccacttgcctacactgcccaccccaagcttgagaagcatgcttgtgcccacaatgccaaggggctcagactgtaccagccaaaggccaaggatcaaatgaaggcccaggctgcagctccagcttcagttccagctcaggctcccaaaggtgcccaggcctgtacaaaggcttcagagtagagatctctgtctgccaacgtgaggacagaaggactggtgtcctcctgcactatttgtacaaataaacc

SEQ ID NO: 140613 - DNA, 215 bp, Homo sapiens
gccattcggattccttctttagccgtggtttgctgcttctctaaatgaacactcttccaggcatgctccccatttccaagcacatcatgtgtgttttaacttgagcgattttccttatgtcatgctgcaaacctggagttctttttccctccgtttatctctgtcctggctttccttcagtgaagcctgacattagctgtgtgcccagcccttct

SEQ ID NO: 140614 - DNA, 311 bp, Homo sapiens
aagtagctgggattataggcgcctgccatcatgcccggctaatttttatatttttagtagagatagggtttcaccatatgggccaggctggtcttgaactcctgacctcaagtgatccgcccacctctgcctcccaaagtgctaggattacaggcgtgagcaaccgttgccttcctgtgcctggcctcattgcttattttcacagttagatctgccaccagcctagaataggttccagagctctattattattttttttttttagaagagggagtctcattctggtcacccaggctgggcgtgcaatggcg

SEQ ID NO: 140615 - DNA, 298 bp, Homo sapiens
tccttcctctgcatgcatccagttatatatttataacatttaatggaatttgctccattcatccctatatttctacagctaatgtattacattattgagtagactccaggaagggtccacggaggagacaggctttaacggtgttgatcagtgtaaatgctatcaaaatggctaaaaatccacatggtgaacaatggatgatgctgtactcaaagctcaactttgattcggttttcaacaaatttggctgtggtataataatttggctctgggactgcataatcaaaagaaattaaat

SEQ ID NO: 140616 - DNA, 186 bp, Homo sapiens
acagtgtcaaatatttaaggaataatcaagccatacaattaagccacttgtaaatgagatcatttaaacatagtgctcaccaattgccaggcacagattaagcactagataaatattggtccctcttccccttcctctcctaactgagttccccatctgcttcccccattccaacatactttcacg

SEQ ID NO: 140617 - DNA, 497 bp, Homo sapiens
cacactcctcaagtgcctgaaatacccctcattgtcttcttcaggtggcaagggctctggaacagccacataaagcccttgaagataaggatggtcaaacaaaataatatcatacctggagaaactcagatcttgctaagatttactggttgggaatccaaagttaatgccaagaagcagctgccagttgggatcaaatgtgagcctatggatcaagacggttacctggcacgctggccacaatctacctcactcttatcagagtctgagcagtgctttcagctctgagttgaggcacctcgaaccttgtttttgtggtgaaggatcctaaagtgctgtggggagtgatcacatttttcacaacatccctgactccacctcttctgccacaaacgtcagcatggtggtatcagccggcccttggtccagcgagaaggcagagatgaacattctagaaatcaacgagaaattgcgcccccagttggcagagaacaaac

SEQ ID NO: 140618 - DNA, 439 bp, Homo sapiens
gtacccctcgcgaacgtgttatcccctcaagtagttcatgggcgagtggaataaagggattttcagtaaaaatttaagatccaagcttgaaagcttctttcccaagacatcttgtggatctgagaaccacaacaccttgtcagagagcaatttctagcctgattctggaactttgcccttctagaaacttctatcattgtttctctcctctgagcggaaccaacagtaaagcactatatattaaaaaacagtatataaaattctccttttgttttgtgaactctacaaatgcctagattatctgtttttaacagtcttcttgcctactaaacatagacttagagaacacagtctgttttggggctccagaactcaaaagggaagtgaagacatggagagtgttcggatatacggcgcgaggggtcctctagtcagccac

SEQ ID NO: 140619 - DNA, 763 bp, Homo sapiens
aaaaaaaaaaattcttccctttcaatctgcaccctctccccaatgagtataagaaatcctacccttggattatccatctggcagcaagacaggcagtgaccagtggtggtagttcttctaactttaaaagatgagaggctcaccctaaaacatcttcattcctctaccagtgagactatcaaccatggatctatctatctattttttaagcctgcatcacttcttgagataatgaggtttctacctccaaagcctgctgggtgagcaccttgctcattatactggttctgaatttacctctttgaagtttctagatgcaccacttcctgctcacagcctggaattcggttaacaagtcagtgtcaacctacctttcccttcatgatttatagacttttgggagtaccttctggtagcttttgtcttcccataggaaagaggcccaatcccagtttgtcctcacaaagcggccagctccgtgatatctcttttgcgggcagagttaagattgtacacagatccccacaagtaccacgatttttgcctcaggaaggataaagcacatgtttgtttctgctttcgttttcttttttctttttttcacgaagccttatggagaagtatgtttctgctttctttcctgaggaagcctagcttctgggccacgggactgatcctgtctacatcctctttccctccattctccatcgtgtctctgcccccgtctcaccccaccccgtgcccctctctgcctcagcttccc

SEQ ID NO: 140620 - DNA, 261 bp, Homo sapiens
ccttttatcttttctaggcacacacaccttagtaaatctttgggttgaagctttgctttggagaaattacagagccctttacagcagccctccagtctttttttggtcatgagtttcagaatggtctgggataatccaagatacccacagtggccatatctcttggagtgtctaatgaatatcatcccctgggtcatctcttggagaacagcctgaggagtaagagtgtagcctctcagaagagcagctggatggcctagg

SEQ ID NO: 140621 - DNA, 882 bp, Homo sapiens
gaaatttacagtgatacctcttggaatgagtgtctccctggcattattttgttttgttttgttttattttattttgttttagacagggctgcctaggcgggagtgcagtggcacagtcatggctcactgccatctcgactctctgagctcaggtgatcctcctgcctcagcctcccaagtagctgggactacaggcacctgccaccacactgtccagctagtttttttgtattttttgtagcgatgggattttgccatgttgcccagactggtcttgaactcctgagctcaagcaatctgcccgccctggcctcccaaagtgctgggattacagacatgagccactgcacccaagcctcctttctcttttgccactattaaacctctggctccttaaacccttaaaaaaaaaaaaaacaaaaaacaaaaacaaacaaaacaacacaaccagacacccacagaaaaaacaacaacaccacagaaagaaacacacacatcgacaagagccaaacacaaagacaaaaagacgagcacacaacagacaaacaaacactaccaccaccagccagaggggggccgcccgtataaaaaacccccccgcgggggccgcccatagtcaacgcccccaatctttgaagacaacaaccgacccccaaactcagcagcgcaatcataatacagaccgcgccgccgcccaccaaacaagctcggtgcgagagaacacaccaacgctcgccgcatacactgcgagaacaccccacccggcggggggcgcataaggacacccccaccagaagaaagtcagcccggacaaaaacgcacggggacccggaacaccccgacctgtgcgggcaaaacacctcagcaataaaaaatcacgga

SEQ ID NO: 140622 - DNA, 389 bp, Homo sapiens
ctctcaaatccccacctggtgtgtgtgcctcaatttctctcttcttataaggacacaagtcatattggactgggggccgctctaatccaatatgacctcactacaattgattcatctgcaaagactctatctccaaataaggttaaattcacagggtccaggtagataagaattttgaggtgacactatttaacctggtatatcatccctgtggaaatggatccttacaacttgagaactagtcttgaaatgctccaatatcccactaaactcaagaagaaacaaacacaattcatcaaagtatcttcttctttccatttgctatacaaaaccattcttgagttgtggatggaccttgcactgcttcctcatttggaccctgtttaacc

SEQ ID NO: 140623 - DNA, 185 bp, Homo sapiens
tgggctgcatcttcaaaatacacagtcaggtacagaattggacctcttcttgtcactctcaccaccacattgtccaggctcccaccagctctcacctggatttcagtaactacctcctcactggtctcctgggttcccccttcactcccttcagcctatttcccacacagaagcagggggatccc

SEQ ID NO: 140624 - DNA, 390 bp, Homo sapiens
aggagctaagattttagtaggggagacagagagctagcttatggtagacagcatttattaaggttcaatcctatgccaaaagactagaaaaaaatacgccaagatgtttgttcatggcgttcaataattttatctgcatatgctaggatattacactgcttgatattttccctccatggatcttctaaattgtgtactattaacacatattatagactttgataacagaagaaaattaggtttaaaattgaaaaagtataaaacttggcacctaatgggttatatctgaggtctctgctaattaaagtcctcaaagttttatatttgaaactttagaaatatatctaaaatatgaatactttttaccatctcaagagctatgaaccttgg

SEQ ID NO: 140625 - DNA, 509 bp, Homo sapiens
  misc_feature (78)..(78): n is a, c, g, or t
ttggactacatttagatttatatccttacctatcttgggatttatataataatcagaaattggagtcagattaccttnatgtataatggttaacttttaaagaaatttaagtggattaaagttaaataaactttagagaaacctaaaagtcacagaagccttaaaggtacatacatatttttaaaatcctaattttacactgttagcatcttgatgtgatatcaacaccatttatgaagacactctttgttaattagtttatggggtgttaggtgaattattcagtaaatggttatcaaaaatcaaatatttaactataaacattgaatgataaacaatattcctctgatcttaataattgtcgtaagtacattacttcaacaactatttactgaattccttttgagtggaagacattgtccaatgtgatagggtctttgaaattaaaaaaaaaaaaaaaagaaaagcctgttatccaatttgatgagctcaaagtctgttgggtgaga

SEQ ID NO: 140626 - DNA, 169 bp, Homo sapiens
tgagaatgaagtagttggagaagactccttggaggaggttccctaggggaagaagatgagaaggactagtgactgtgtaccatgggttgtcacaccaaccatatggcctccaggtgaaggaaaagtagtttggtttataccaagggttccccatgttatcccaccagct

SEQ ID NO: 140627 - DNA, 372 bp, Homo sapiens
tctcgatctcctgacctcatgatccacccaccttgggctctcaaagtcctggaattacaggcatgagccactgcacccagcccaaaagctttgtgcttttacagatattagacatgtttcttgtttaagaaaaaaaatcttaacgaaaacgtaggagaataagagaaacatttttccaaaaaagagaaatcattgtgattattttatcttattagaatgttggataatatagtctgcttcattaatcatcaagcatgctatgcattttccatttttataggatctgtatctcagttaaggtaatactggtaatttttgtactgtaatcaaagatgaaaaatataggccaaaatcatagaccttgcatagaag

SEQ ID NO: 140628 - DNA, 265 bp, Homo sapiens
tagtattcagccacaggctgaaggagaactcatgcaaatttctggagcttttgctctgtgcagctcctttctcaccattactccatcccaaacactttgtctcctcagcctcccagaactttaatctcggcctcctcaatcaccagacccccatatactgcctgagttccccctccctggactgtagtccagatagtgccttcagcagaaagctggggtgagcagagggcaaccttgtttgtctctcttctctcttttttttttt

SEQ ID NO: 140629 - DNA, 327 bp, Homo sapiens
tttaggacctcagcagttatcctcatacctcctttgggacacaactgttcataaggcaccatcaaaagccacactgcatctgcacctagcatcattcctcccaggggccacctcctcagaatgcaattttttttgttttgttttgttttttgagacagggtcttgctctgtcacccaggctggagtgtagtggcacgatcttggctcactgcaacctttgcctcccaggctcaggtgattctcctgcctcagcatggcattttgctatgttgccccggctggtctcgaactcctcagctcaagcaatccacctgcctcagcctccca

SEQ ID NO: 140630 - DNA, 247 bp, Homo sapiens
ttcaacaattattcttaaaaatacatatatatatatatggcttcatatgaatgcctatttaagagtcacatacctactgctatagaagataaagagatgcttacaaggtatgaaaatgaaattctcttttggagaactggatggcctctatgagcaaggttaaatttcttgctcacatatgtttactaatcattgcaaaagttcttctaaagcaaatataggcaatcagtccagttatatcccagag

SEQ ID NO: 140631 - DNA, 206 bp, Homo sapiens
gtcagcaaggaagcacgaagttaaagaagcttcctcctgttctacagctgttcgtagggagagaagattctcaagggacagtgtgaatgacggaaatgttaaattgaggaggaggcggagcttgggtgtggaggcatttattgtttggtctgtccagtaatcccttcttctgggaccttcctctcccctgtcacacttctgcatgg

SEQ ID NO: 140632 - DNA, 242 bp, Homo sapiens
ggaccaaccatatcttgcttagattttcctgagatatacctgctgccatacccggttcttccaacaagcccacctttgccttgaggacgagtgctgtggggcacagcttgaaatccctccccccgtaactctgtctatctcagaagacttcctccaggccacctgcaacaggtaggggcggggtaaacgcatgtataaaggggacagctgcaccagtatggagcacagagggcatgggtctg

SEQ ID NO: 140633 - DNA, 138 bp, Homo sapiens
agtaagtatttgttgggaaaaaagacatttacttcattgatatattaagttgttcatgtaggtaatactttatgccacagaaaatggcccgattccttttaagcctgaaaattctatgggtcatagaaagtttttttt

SEQ ID NO: 140634 - DNA, 422 bp, Homo sapiens
ttcagcttccatagctggactacatgcatacgctctacttttttttgtgtgtttttagtagagacagggtttcgctatgttgaccaggctggtcttgaactcctgacctcaggtgatcctcccgccttggccacccgaagtgctgggattacaggaatgagccactgcacccggcctcaaacgcctgtttctgttttattttgccaactgtgtaagtcatgttgtagatcccatgatccttacctctgaatacttcagcatgtgtatcttaaaaataagaacattctcctacataaccatggtgtcattatcacacccagaaatttaacgttgtgttgccgtatgctatatcctataatgttatcgcttatgcaacccatattcagatatctctggtggtctcagaatgacgtttatggctt

SEQ ID NO: 140635 - DNA, 309 bp, Homo sapiens
agtggcgagagggtggtggtgggagggtggggcagagacccagaagtgcctgtgacactctcaggggctgcaaagccccagaacggccttcagagctagggacaagccaccgagtacctgggagggcaggagaaggagggccacccaaaagacaggatcctttaagtgaaaggagaaaggagagggaggaagagggagggaaggaggggaggatgatgaggctggagaaagaaacagccccaggtccttcccgggaggggctgccccataaagtgaggggggtgcccagtggccatcgtcaccacacca

SEQ ID NO: 140636 - DNA, 153 bp, Homo sapiens
agtacatgccgcaaaactcgccagtcatttcagactaaaggggccagaattcccctaatttctccataagagaaagtaaagctatcactaaagcaaatgtagaaaattaactgttgaggctgggtgcagtggctcacacttgtaatcccagaa

SEQ ID NO: 140637 - DNA, 310 bp, Homo sapiens
aaggcaggcttgtgctcaggcatcctaatgctgagagtaggaggcaccgcccatggtgggcaggggtgggatgattctcaaacacaaggcagagtgttcaagtgagccatgctgaggtccttccactggagaggttggggtgaccttgctggctatagcctgggtaagcaggtagggaagatgtttttctcttatgccccagtttgacagggcttactccccaaccccagctgcaaaagcccttgcccagtccctaactaagtctcactggcaacttgtgccctgctagcatttcagtctcagtcctggc

SEQ ID NO: 140638 - DNA, 129 bp, Homo sapiens
agaattgttaagtctgagcaagaaaaagcatagcgggttaaggacaagtgaaacgaagagaaccctctgtccctggcagaatctgcatgtacatttcttgtctgtccttgtctctcttcttcctgtctg

SEQ ID NO: 140639 - DNA, 471 bp, Homo sapiens
actcaacctggatatgttttgatttggtactatccacagtttcaggcatccactgggagttttggactgtatcccctgcggatatgggaggactactatattctgcttacaaaatgtaagaaccttgcaacagtatagtgtgggatcaagattctctatcttaaacatgttcagatttttctattccttggtcctggttattcacccaaactgcttttctggttctctaacataggccacatttgcttcctctgctttcttaccaaaacttattctccaaccctttctaatctagcttctgccccgtatggtattccagttctactgaaacacctctccgaagatcatttatgggctgacatggtggctcatgcctgtaatcccaacactttgggaggccaagacaggaacatcacttgaggccaggagtttgacaccagcctgagcaacatagtgagacttcatctctat

SEQ ID NO: 140640 - DNA, 658 bp, Homo sapiens
ctgcaatctgatacaggggttaagggcaacaggacattgaagtcatgcagtctgggcttgaaatacaagttggaatctcctgtgactcaggagtgtgtagcataacagaagtaatgtgaggtataaagtatcgttggttggatatgaatcccagctctcctctctggtagctggatgacccaggacaagctattcccatgtcattccctaggcctagtcagattaggactctctgtccatgatattccagtgccagcaagtacagtctatgaatctggatagtaactaaatcagtactgtgaatgaaccaaggtatagtttgaaatgaacctctaagaaagacatagaagcacgcagtgaaccccagaaggcattcccccaaatgcagccccctcaaaaccatctatagggacaaggcactcattcccccagctgctgggaaaaccaattgctcacagctgtgtcctccctgggactcctcccctgaagaagggagctgctttgcccaaggtaatgctgccttccaaagagcagcccacaatcaatgcccacttgatgcattggcttgtcccagttctgaagggccgtctcagctccagccatggaattggctttggcctctattacaactattgcaccacagttcaactacctcttc

SEQ ID NO: 140641 - DNA, 385 bp, Homo sapiens
ccctgcccccaggcaacctcctgtctggtaggcagcctgtgtcgctgatgcctccctccgcaaggacgtcccgcagtgtaaggcaagggttctagatgcacctctggtgtgagagcggtgccttccacacagcgggcactcgggatttgcccaacagattccaccttcccccaaacccctgcaaaaatccccagcagggccgcagggctcgcagccctctgagcgaaagggcctggcctgtgtggcatgtgctcagagatgcgggatctgcaccccagaccctgctggagatctgctccatgtggggaagtagagcttagtgtccctgagggctgcggacaggggtgcatcagccttgtggccgaagtctctggccttcacgcct

SEQ ID NO: 140642 - DNA, 434 bp, Homo sapiens
aatcaatgaacaaagtttacaaaagtttcaaattaccactgcaggaatatttcaaatatattttataaagcacagcaaaactggtggaaaatagttttgattttcctgaaaacagtcaatcagagccaaagattttcagggccccatcccaggcctatcatttatcaaagtgtgaaacactatgagaatctgtattctttgaaaaacaccatgacgttcattttatttgaaatcttatataataaagaagttatagggatggggagactttagaaagttacccagaaaaaacactttaaatgagtcaactaacaaaaacaaaaaaactaattcatggctattagaaatcttatcagtggttacctggggcagtagaaggagaactccaacagggcacaagaaactctgggatggtggaagtattctctatcttg

SEQ ID NO: 140643 - DNA, 377 bp, Homo sapiens
tagaggacgcccgggagccttaccctactcaagcttgaattctgtgaagctttccctggcctctccaataattaggagctctgactcctttactttactcaccgcccctgaattgagcaagttatattttaatagtgtatacaacgaattgcagtgaatgttaacacgttcaccttttattgctaacagcaatgctacccgtgcttccaggctctatccaaactcactgcttccagataatagctggctggtccctagggagaattctttaactctcagcatttgatgctcaattcagtacctcctcatattcagcactgtagcttacaagtgctctccgggttcccttcctctcctccccgacagactaaactgct

SEQ ID NO: 140644 - DNA, 167 bp, Homo sapiens
gtaggaaccacaggtacttttacagtgtagctttcggggtggggaggagagaagtagactgacagagataatagaggtagtttcttctttccaaaaatcttgggcactggcccccatgaagaagatgcccactttccaaaccattgctcccactttgcagatgggag

SEQ ID NO: 140645 - DNA, 415 bp, Homo sapiens
ccttttaaaggttaattttatgactaaaagctggcctgatattactaagaaactgcaaaaaagttgatggatggaataaaaagccaattaaggaattagaaggtttttgcgaaaagtaagaaacgaattggaaaaagagaaagagagaaagccaaagctgtccatcttgcagacggacagaggggagccacggcatggctcacgctggtgctcagagagagaaagagttaagctgctgaccctgaaggcaagggagccggctgtgcagctgcaggtgtgggggcggcaggagctgcagagccgaagcaaacagccgagataaaggtggacagtgtgagagagctaatgtaagtaagctgttaacatggcgagtgcgctggcgcccagagaaagaagaagaaactgagtgtaaggg

SEQ ID NO: 140646 - DNA, 459 bp, Homo sapiens
aatctatcactctctgctcccagattctgaatatagtatcttcccacatctctggcctcccccaaaccacacgtgcacagagcagacacaaagcagcccagttacggctaaaaaaagcaaagagatttcagctactgcccatcaaaggggagacagaatttgggctgtaagctcagccaagtaaaccacctaagaaaaccaaataaatcaagaacataaaagaattcatcatctctggctgggtatggtggctcaagcccgtaatcccagcactttcggagaccgaggcaggcagatcacctcaggtcaggagtatgagaccagattggccaacatggtgaaatcccatctctactaaaaatacaaaaattagccgggtgtggtaacacacacctgtaatcccagctactccggaggttgaggcaggagaatcacttgaatctgggaggtggaagttgc

SEQ ID NO: 140647 - DNA, 471 bp, Homo sapiens
atcattcttgcctcagcacagagtggttttctgtggatggtataaatcaagtaacctcctcactcccctctgtctcataatcatatttgcttttattgaaaacatttgtcactaacttaaatgtcttaaattatgcatatcttatcgcctgtctccttgtggttcactgtacctagaagtgtacttggaatatatcagtgattcaaatatttgttgaatgaaatagtgggtacagtttagcaaggttacaaatgtctcctttatcttgagcatagtaaagtggcaggactctgtagcactttaatataaagtattctgtgctctgaggtgatagacatataaaatgcaggaacagcaactgaaacaaaactataaaacaaatgttatcatgtaattgttttttgacatttattttttcaacactgttcctactttactgcttgttgcacctttacttcccatgtgaatgag

SEQ ID NO: 140648 - DNA, 276 bp, Homo sapiens
cagactgcccataaagaagatttctgccaagtaacacagtgaaagctgttgacattccctgcttccttcaatatgaaacttccccaacaattcaaagtcacaatccatgatctactacttagagttcaaagtacatcattcatcacaatatagtccaaatagtttctaggagattaaatgacataaacacaacaattgaagaggaataaggaataaaacaagatggatggcagtggctcacacctgtaatcacaggactttgggaagccaagcggg

SEQ ID NO: 140649 - DNA, 358 bp, Homo sapiens
gagagtggggctgtgggaccagcgcccatatataaaaatgaagcagggattggggcttgccctgtgatgtgctgttgaccaagttagaggggtataggcaagcagcaaagtattgggcaagatcactggactgggagtccagagatgctgcttcaccctggggctttaggcaagtccctttccctcccagagcctcagcatcccttttagcaaattatgacattctgcctttctcctaggatggctgtggggatcaagggagacagtggccatagggatgctatgttaaccgcagatgcggctgtaggagcactttgctaactgccaacgtgagttcagactcttcaggctatttggc

SEQ ID NO: 140650 - DNA, 368 bp, Homo sapiens
ttcctcagtgctctgtgaaaactctacattcacaagaataaaatcaaaggcacttggaaaataagaatgcagtccaactctccacatctagactgattgggaccaggcagattcagatactgacaaattgaaaatagcagagatgcctcaaaaccagttttctgggagggatgttgaggaagtctaagagtgtcagagggagggggttgctgttgtgtaaactgacatggaagacctcgatttcaagatgataaaagctcagtctctaaggaggagctaaggaagagaagtaagccgagggcgtctttgattgtgtagtaagggtggaaggtgattttatcggaatgggaggtgattcctagggggtt

SEQ ID NO: 140651 - DNA, 112 bp, Homo sapiens
ttgcataagtaactgttgggatgtgccattttttcaaagagaaggcactaagaaagacataaggttttaggctggatgatctctggtttcaacctctcctctacaatgttat

SEQ ID NO: 140652 - DNA, 869 bp, Homo sapiens
aaggttttgaaagtttgatatagtaccttttctaattcccttcttgttgttcctgcttttaatgtgatattcgaaaaacctgccaaaaccaatgttactaggcttctccctatattttcttctaagtgttcaagagttatatgtcttttaattttatgtttttatgtttagtgtgtgtaaagtattttgtttgcattgaagagaaaggtccaagttcgttatctttcatttagacgttgagttttctcacaccattggttggggagtctgaccttttcttcactgtttggtcatggtaacctagtaaaagattatatgataatacttgcacaggtttatttctgggttctttgttctgtcatgtatctttttttcactttatgccattaccacattggttttatttttgtagctttggactcttttgacatcatgaggtatggtactttgttcttttctaaagctgttggctattcatggtaccttgagattacacatgaattttagaattatataaaatatctctgccaaataagtaacattggaattttaataaggatgacattgaatttgtacaatactcagaaatattgacagtttaacagtattacatctcctggctgagaaacatgtatttgtgtctgtgtttgtgtgtttgtgagtgtgtggattggcatcagagatagtgctgagatgcaagacaaagagttcaaagtgtttccttggcctgtctctggtctcctgcacaactcttaacatacagaaggtaggctaaccacttgatcctcaactggtttatcttcttagatgtatcattgtcaagttggtaggaaaataaaaattcctttcacaagttgaacacaattgtc

SEQ ID NO: 140653 - DNA, 360 bp, Homo sapiens
ggtgtgagccactgcgcctggcctggatttctctatttgtttatgcgaaatcgtctactggcattaccatctctcaaaacattttcctggacttttaactaaagattttttccattgtaatgggcacaagtgcaatttccctttcattttaagagactgtgagaagtaacaaatcaggtaagtaaaattattaaagaaggaactagcacttaaaaaatataatttataaaaccaagttgcctaagagaagcgtcagcttacaagactttgttacttcatggcattaatagtttcaggaacattataatacatagtttaattttctttggtgtttgtcgtgtttggggggtggaggtactt

SEQ ID NO: 140654 - DNA, 114 bp, Homo sapiens
tgctgggattataggtgtgaaccaccatgcctgcttgggatatttaatatattctctggaatatgaaagaccaaagggcaaaaaaatagctaagacacactcttgaagagaaag

SEQ ID NO: 140655 - DNA, 648 bp, Homo sapiens
gctgaaagagtgaccaattcctgaaaaaagaaaagagacaaggagtaacgagaatataagttcccaacagaggctaatctatatgttttctaaagctgggaaaataaaacgcaatcagaatatccaaatattttgcaaacactactaagacatttcatttggtccaagcccctgatttatagacattataaacaattgggcaaagcacaaagcttgctggagattcttcaaaagaatgatacaaacagcaggaagaaaattaataagcaacagatgcatgcatgagcattctgtgtaactggctgtgagtacagcatgtgctgttttgtttgtgcatgagtttccttaacacatgcactatttgtatctgtagatatcataccaaaaaaatcaccattacgaaacaggcttacatattatcaattactacaattttaacaaaatgcataaagacaagtattcatggtgaaaaaatacatatattttacctctcagtcacataccttttttccttcaaaaacaaacaaatattggataagaaaaggcaaagcaatagtttgccagagaatcaactgatgcacttggttgcgagacaggttttaaatgtgcaaattacttccatccaatagttcgcttttgtttcaaacc

SEQ ID NO: 140656 - DNA, 430 bp, Homo sapiens
tacagtcacactaaatgttttcagaactttattaattttaagtgtatcaacatgtttatagctgcaatgttttctttagctctttccttaatgatatctgcagaatgaacagaactgtcctctatgacccccataacttatttgttagtctgtgatgtactcttatcaacctctttgtgaatctatactcaagacaaatgtatttttctaaagaaaaaagtagaggaacttaccctgctaatttttagtgtttttttcctctgaataatcaaatactgaagaagtcagactacgcacagaaaaggtaattcagtgtctacctctcttatgttttcttccaccttgtattactattgtgatgaataaagccaacaaccacttcagtctaccaagcctgaaaccctgtgaactgctatttactctttcttcc

SEQ ID NO: 140657 - DNA, 353 bp, Homo sapiens
tctagggggatgaaacagcgcaatctctgtagttaaattcttgagttaaaatgaagataaaattattggggaggtggggatagagctgaggggtgaaagtgggaggagaatggtttctggctcccggcaggttcatgaaagagaaagggtcttcttcctgagcagccttccgagagtgcctcatacctaagacagtcagccctgaccagcaacaatagccgagaaagggcttgtactggccatgccagagtctagagggaagagcttggggctcagagactgagcagtcctgcgtgctcctgtggtggcctaatgtgacctattatccagcaactcccatctatttctgaaaa

SEQ ID NO: 140658 - DNA, 256 bp, Homo sapiens
atcgcggtggccagcgtcagcgtttgacaaaggaagtactcagttacaattaccttcctgttggccagcagctcagataattgctttgcaatgtgtgtgagaacctcataaattaaaccaagaaacagaggggccaggtctgggctgaagggaagtgtcaagtggaggaggcagtgatgcaaggctacctttgaagtcactttgtttgtgaaaagtctgctgtgctctcttaaggaaactccactggaatgaggtt

SEQ ID NO: 140659 - DNA, 1189 bp, Homo sapiens
aagggactaaatccagcaaaaacttaagtgaaaacaacctgaggaaaagctgtagactgtgagtcaagatggggaatggcaaatctatagctggtgatcagaaagcagttcctacacaagagacccatgtgtggtacagaacatttatgatggaatatccatccggcctgcaaacactacatgaatttaagacacttttgggtctgcaaggtctgaatcagaaggccaataaacatattgatcaagtttataatacctttgacacgaacaaggatggatttgttgactttttggagtttattgctgctgtaaatctaatcatgcaagaaaaaatggagcaaaaattaaaatggtattttaagctgtatgatgctgatggaaatggttctattgacaaaaatgaactactggacatgttcatggcggtacaagccctcaatggccagcaaactctgagtcctgaagaattcatcaacttggtgttccataagatcgatataaacaatgatggtaatggagctactctctactggatcacttttcctacaaagggaattgactttagaagaatttatcaatggcatggcaaaagatcaggatctcctggagattgtttacaagagcttcgacttctccaatgtgctgagagtaatctgtaatgggaagcagccagacatggagacagactcctccaaatctcctgacaaggctggtctagggaaggtgaaaatgaagtagctgtgagaatacctgtcccagctatcaatgagcacaacatttcagtagagaagaaatagaatcttccccatgtacatgctgttgatttcaggtctttgttataattcatataggcttgtgaatatagcacttattttaatccagtagagacttgcataaagatcctaaacagatgcattgttgcttttctgtgctgtctctgcagattaaaacataatgattacactaaaggattgtctccatacctatctgttcaaattagagctctcatatgtgtttccttgtgcacttaatctacaccttgaaatagatctggattatccattggaaagtgtctccacagtttagcattcttagattaaacatccatgtggtaaatgtgcttgctgcctctttgctcctgttgcatctgtatattataaatgactgagttctggcttatctgagaaac

SEQ ID NO: 140660 - DNA, 791 bp, Homo sapiens
tttttgtttaaatgaagatcttcaaagatcttagagtctggttgaggggaaaggatatcaaaagaatatcaataaacataccagtgagtatatcatttgtgccagtgagtggtatagacaaagcctcttattaactgtttattattttccaggggaattgactttagaagaatttatcaatggcatggcaaaagatcaggatctcctggagattgtttacaagagcttcgacttctccaatgtgctgagagtaatctgtaatgggaagcagccagacatggagacagactcctccaaatctcctgacaaggctggtctagggaaggtgaaaatgaagtagctgtgagaatacctgtcccagctatcaatgagcacaacatttcagtagagaagaaatagaatcttccccatgtacatgctgttgatttcaggtctttgttataattcatataggcttgtgaatatagcacttattttaatccagtagagacttgcataaagatcctaaacagatgcattgttgcttttctgtgctgtctctgcagattaaaacataatgattacactaaaggattgtctccatacctatctgttcaaattagagctctcatatgtgtttccttgtgcacttaatctacaccttgaaatagatctggattatccattggaaagtgtctccacagtttagcattcttagattaaacatccatgtggtaaatgtgcttgctgcctctttgctcctgttgcatctgtatattataaatgactgagttctggcttatctgagaaac

SEQ ID NO: 140661 - DNA, 696 bp, Homo sapiens
aagggactaaatccagcaaaaacttaagtgaaaacaacctgaggaaaagctgtagactgtgagtcaagatggggaatggcaaatctatagctggtgatcagaaagcagttcctacacaagagacccatgtgtggtacagaacatttatgatggaatatccatccggcctgcaaacactacatgaatttaagacacttttgggtctgcaaggtctgaatcagaaggccaataaacatattgatcaagtttataatacctttgacacgaacaaggatggatttgttgactttttggagtttattgctgctgtaaatctaatcatgcaagaaaaaatggagcaaaaattaaaatggtattttaagctgtatgatgctgatggaaatggttctattgacaaaaatgaactactggacatgttcatggcggtacaagccctcaatggccagcaaactctgagtcctgaagaattcatcaacttggtgttccataagatcgatataaacaatgatggtaatggagctactctctactggatcacttttcctacaaagtaggagatggtggtagtggggagtgttatttagacaaaagcaggaaccattcaagagaaccctagttgtgacttaggcttcataatgggaccaatccaatgttctcagtatgattcaattgagtaaatatttattgatcatattc

SEQ ID NO: 140662 - DNA, 1149 bp, Homo sapiens
aagggactaaatccagcaaaaacttaagtgaaaacaacctgaggaaaagctgtagactgtgagtcaagatggggaatggcaaatctatagctggtgatcagaaagcagttcctacacaagagacccatgtgtggtacagaacatttatgatggaatatccatccggcctgcaaacactacatgaatttaagacacttttgggtctgcaaggtctgaatcagaaggccaataaacatattgatcaagtttataatacctttgacacgaacaaggatggatttgttgactttttggagtttattgctgctgtaaatctaatcatgcaagaaaaaatggagcaaaaattaaaatggtattttaagctgtatgatgctgatggaaatggttctattgacaaaaatgaactactggacatgttcatggcggtacaagccctcaatggccagcaaactctgagtcctgaagaattcatcaacttggtgttccataagatcgatataaacaatgatggggaattgactttagaagaatttatcaatggcatggcaaaagatcaggatctcctggagattgtttacaagagcttcgacttctccaatgtgctgagagtaatctgtaatgggaagcagccagacatggagacagactcctccaaatctcctgacaaggctggtctagggaaggtgaaaatgaagtagctgtgagaatacctgtcccagctatcaatgagcacaacatttcagtagagaagaaatagaatcttccccatgtacatgctgttgatttcaggtctttgttataattcatataggcttgtgaatatagcacttattttaatccagtagagacttgcataaagatcctaaacagatgcattgttgcttttctgtgctgtctctgcagattaaaacataatgattacactaaaggattgtctccatacctatctgttcaaattagagctctcatatgtgtttccttgtgcacttaatctacaccttgaaatagatctggattatccattggaaagtgtctccacagtttagcattcttagattaaacatccatgtggtaaatgtgcttgctgcctctttgctcctgttgcatctgtatattataaatgactgagttctggcttatctgagaaac

SEQ ID NO: 140663 - DNA, 1016 bp, Homo sapiens
acgagaccaagaaaaatgtacatcttgcaaactagcaaaaatggtaaatattaccattggtgtggagtatgtggaataatcatattacagtgaagtctttgaatttacaatgtgattgatgatcaggtttcactgtatgtaatgtaagtatcctcatgtctgaaagaagaacttggtaatgagagcagaggtgtctgctttggtgaccagctgccctggtttgccaaggactctctcaagccctcagtcctgggcaagctggggccattggtcccactagtgactgcccagaattgattactccttatgggatgaggagaagtcaaacctctaggagttgagcttatggatgctgtatgtcagacttggtgttaggccctgggacacaaacatgaggctttattctgtataaaaagaacaacacataggagactgattagcatcctttttcttctgaaaaccacttacccatagaaaaagatttcaactgaggaccaacatttagacggaaggttgggactgtttttattaccttagatttccaagttgtcctaaatataagatgcagttcataaatacttattggaatgtgagctttcagttgaaaataaatacactttctggttttgtttttgaaaaagccaaatctaaaatattgcagttgttttttttttttgtactttgaaggtaactatatggagcaagaatattattcagatattattcagtggttgcaaaaagcaataaataattcagtctgagattttgactggctaagagagaaaaaggcgggagaagaaaactggaagaagaacagaggagttagcaggtgacccccagaactggtgcggcgtgtgtccctccattactctgcaggctcccagacggtccttttcaactcccactgcacattggaaccacacaggaagcttaaagaaagtgattgatgcctggctcctccagggaccactcttttttctttttgttctgggattggcatagtgcttgacctgtaa

SEQ ID NO: 140664 - DNA, 921 bp, Homo sapiens
tagaacacacttgtctgaaattatgaacaaataatcatttccattattggcgttttttgagagggaaaaatactccaaaggttataaagcagtgtttttgtttttttggtttccctgaggcatagtctcgctctgttgcccaggctggagtgcagtggcatgataatagctcactgcaacctcctcctcctgggttcaagtgattcttctgccgcagcctcccaagtagctgggacgggcatgcaccgccatgcccggctgatttttgtttttgttttttgtttttttttgagatggagttttacccttgttgcccaggctggagtgcagtggtgcaatcttggctcactgcagcctccgcctcctgggttcaagcgattctcctgtctcagcctcctgagtagctgggattgcaggcgtctgccactacgcccggctaatttttagtatttttagtagagacggtttcactatgttggccaggctggtctcaaactcctggccccaggtgatctgcctgccttggcctcccaaagtgctgggattacaggcgtgagccaccgcgcctggcctgatttttgtaaagatggggtttcaccatgttgatgagtctggtctcaaactcctgacctcaggtgatgtgcctggcctataaagcagttttatcttcccataacattttatatgctttttaggattcataaatacttgctaactagttcctaaaagggctgtttcatgggatgtcattattaggcttgggaatgtattgatcttactgttgcaccatttttttgttgttgtttattaagaattttatacagaaagtgttgaataaaatctgaaaaactttaaaagattgttccgttttacataggatagacagcttgataactgtacccgtgtcaccctgagtctgat

SEQ ID NO: 140665 - DNA, 357 bp, Homo sapiens
aaaacatcatccagttctctccctcaccttattttgtatatgtgtctctgaagaactagaaaagatgagttccaagcacattataaagcaagagcaatgctactagaataagtatagtttcccagaatcacttttagaaagcactcacttgcatttttagttctaatatgcttgttttaaaaatccctcatgttttcaaacctcaacctttttattaggtctaccataacggattcttcttcactcaggagaaagtaatcatcttgattatcccaacatttctaacatgataggcaaaaagttcccctgatttttttcatgcttttcttctccttaaattcttccatttacaccttc

SEQ ID NO: 140666 - DNA, 234 bp, Homo sapiens
gacgctggaggccggagcctgggcaggtgctgtgggttcaggcgggtgatgcttgagggctgggatcaagcctggttggcgcgtggatgaggaaaagagagaggggcaggggcaactccggtgaatgatgcggttgggggctggggggcatctgggccccccggaatgcccctgactggacttagaggctgggagcggattgaagccccagggcggccgggggagaacaggatg

SEQ ID NO: 140667 - DNA, 735 bp, Homo sapiens
catataatacttctgcacaaaccccttttcttagagccactttacttatctttacgacagaaaaatagatatgaaatacattttttgacagtcttttgccagcacaataaaaatatgaaccaggaagctaagtaaagttttgttttgtttcattttctctttgccctctgaattcctttacttggtcatgcctctttggttcatctaaaccccaggtatgtcctctctacccaccgactctcgatacagagtctttccacatacaaacatatgctcttcattgatctatacctttgtttctccaaatctttaaaattggatattttggtgactttaaagattctcaagcatattcatatttccccatgtcttatttgcacagctgtttctgcgctaatgcttcacttggtatcaaggtatcaaagctgagtcagccctagaatctgtctttgaagtccagggtctgtgaggaactaaaagtttcatgtaagtatgatgaaacatgtgaaagcatcgtgcacacattactgtggtaacaaagaaaggatgagcaattctacctcagaaagttagtgctaaaaccatcattcacatgaggaatatttgcccctacatttgaaaaatgaatcggagccttttatggaaagacatcccagatggagagcacaacattttcagagacatttgctcaggaaccacagtagtggagaactgtggcattgctggagagaggaa

SEQ ID NO: 140668 - DNA, 231 bp, Homo sapiens
tctggattgtatctgcaaaagtaaaatgtgaaaacaacacagcttatagtttttatgtttgagtagtttttagttttcacagcattattttactttatctttacacccacttttgaaaatgggtaggaaaataatgctgtcattttttttaataagcaaaaagaatcagatgcagaatgatgatgtatgttactggtaccatgaaagtaagttagcaacagagttgaggca

SEQ ID NO: 140669 - DNA, 1394 bp, Homo sapiens
tgttactaacctaataggagtgcctagggaagtggctgtttcacagtttggtgagatgtttggggtcatctcaccaaagaacaaaccagaccacagttgcccaggtatgtcaaggggtcagtgtagggtaggtgctaaaagtgaaactggtccctctgaggtcacctgctcttggctgtgagtcctagggtccaggacttgggtgcccccacagctctgcactcatgattctgtggctctctgtccatctggccacagttcagaagccaggctttctccacccttacgcttttgtcaatttggtttaatacataaagatggtttagttcttgcttgtcttttaaacaccttcacagatatcatttgcaccttgccaaaggtgagagatgaataaagcaagaatattatcttcgtttaacaaggaaacccaagtaccaaagagatgatgtgatttgcctaagaccacatgatttctctggggcaggacctgaactccagcccagcattcctgatccttaccctggactctggctccctgggccatgaggggagtacagtagtgggaaatgcaggatacactccagggactcgaatccctgagtggcaggcctagttctttccccagcgggtccggggccttcgagcttcaggcccaagctttttgtggcaacctgtatgaacgcggagggagaagtgccctagaccagactccagatcgttcctagtggggctgtcagcggctttagcctcactgggcgctagatgggagtgtcccctccgtacccggacgaaggcggggcgcccgctggcaaagcgcattttccagcgcaagctgttggggtgcggggctggcgagtgagggaaaacagagggtggcgcgcccaccatcagcgtctgtgcagccccacctgcgccgcgggttggtctcagccggatcctgcagccctcatcgagcaaaggctgggcgcggcgcccccactgccggggagggaagaggctgggaggacgcaacaggcccaggctgtgccgggcggggagcctcggcaggcagctgcacccccagccccagagggctggggaaggccggcccgaccagcagacggaaaggtggcgctaagtcgccttcaagcccgcacggctctcccggcctttcctcctgtcctcagagtcagctcccccgcccgggacgtcccgcgccactccgcgcctttggccctggctcaaggtcttgtgatgtgattagcaaagccagcgccttgtcctcagacactcagccctgcccggcaggccccggcgctcaagccctgtttactgagcctgggcggggagggggcggagaaacgagcccgggctccaccggcaagactgccgcggcggccgcccgcgtggccacc

SEQ ID NO: 140670 - DNA, 316 bp, Homo sapiens
gatgtagtctgaggttgtgggagagtgggtagcaaggagaggctctgctgtgtccatgaggcagctggctgtctcctagcagactgctcacacatctacaccatcccttctctaactcacctgctgagctctccttccagaggtacccttcactcttacctctacagccatccctcagtgtccgagggggattggttccaggacccctgcagataccaaaacccaagcacgctcaagtcccaccgtccaccctgtggaacccgctgatacacaaaaaggcggccctctattttacatcccgagaacactgcatttt

SEQ ID NO: 140671 - DNA, 845 bp, Homo sapiens
atcacttcctgaatgtaatggtacaaaattaagatcactcataatagtctgaagtagaaacaacccgaatgaatgcttactgactgatgaatggaaacaaaatgtggtatatttgtacaatggaatattattcaaccataaaagggaggtacttatacatgctgcaacagacagaccttgaaagtattatggttaccttgttagtatagcgaagacagaaagagagaaagagagagagaaagaaaagaaagaaagaaaaaaagaaagaaagaaagaaagaaagaaagaaagaaagaaagaaagaaagaaagaaaagaaggcattatgctaaatgaaaacagtcacaaaaaactacttattatatgatttttgtttgtatgaaatgtccagaatagggaactctacgatagacagaaagtagattagtggtttctatgggctgaggaaagtgaaagtggagggtgacagttaaatgtttctttttgaggtgatgaaggtgtcctaaaaatgtggtgatggttgcacgtatctattaacatactaggccgggcgcggtggctcacacctgtaatcccagcactttggaaggccaaagcgggcggatcacctgaggtcaggagtttgagaccagcctgaccaacatggagaaacctcgcacctactaaaaatacaaaattagccgggcgtggtcgcgcttgcctgtaatcccagctactcgggacgctgaggcaggagaatcacttgaacccaggaggcagaggttgtggtgagctgagatggcgccattgcactccagcctgggccacgagagcaaaactttgtctcaaaaaaaaaagaaaaaaaaa

SEQ ID NO: 140672 - DNA, 436 bp, Homo sapiens
agagctaggtgaacaaccccggacaaggtagggatgtgtagttataatttgtcacacgtggtataaccaatgatgtgagctaattttttacattattgactctgttatagtttactgaaactgtatgacattcagaaagatacttggttaaaaactagccttagctcattgatatcatttgaaaaagacatgtggaagaatgtcctgtggtaccacagtggctttagctatctgacctttgaaataaatgcttgaacacataagtgcttcctcaaagatagatgtgtatgctgcagatttaaagaaaacattgaaatcttaatgttggggaataagaataacctctactatgtttactttcagtgttagaaataccttattattatgtctttttggccacagagagccttacatcatctgaggtttaaccaaaagt

SEQ ID NO: 140673 - DNA, 584 bp, Homo sapiens
agcaagttcaggggcacttttaacagacacaagcccagtttagaagaaacccttagaataaaaaagagcacacagggaataggtaaatgggaaaagctaacactgagagcctttaaaccaaaacctggtggcaagtgaccctgcagaatttcctaatcgcttcctttaatcctcttctaactgcagttgtgccagattgtaacacgtttacttttcaatacctgaatttgagacgttggaaatgctgattattccttacgaaggcttcagggtttaaaattcacttaatacagcctaacagcaaaacttgggaggaaatcagctcagctgacataaccaaagataataaaggaaaaaccaaccaagttaactgctgaattagtgtcagttaaaacaaaaatggaaaatttaaacagtcttctcaagcaggcttctcatttgtgcccagaagtcactgaaattggtgtggacattgctgatgcaaagattttgaagagaggaggcaccatgattgatttgggtggtggattcagagaagcagggtactctgaaatgagcaggatattagcacatggtgaagaaat

SEQ ID NO: 140674 - DNA, 466 bp, Homo sapiens
ctctcttatacaacaatataaacaaatatagttcacccaatgtgctagaattactctctattcctagatatagattagaaatgtttaaagaaggacaaaaagtatctggtgagtggctcacattctcaagctaatgtctacagttcttcaaattttataaatatttttgcttcttaatgctatgatgacagttgagcagggagcagcggtcagagaggaatgggaatttagcaaaactgtcagccttccctgttgtgaaacatacatggtattatggaaactcatatgctgctctgtgatttacatgtacgattcactcccgcctcaagttcaccacattgtgagcagtgtggttagcacattcgctaagtgtgtctttgaatgaatgaattctatattttaatgtatattaaaattgtatagaattttgtcaagaattaaaagataggaaaataaaaactacaaa

SEQ ID NO: 140675 - DNA, 140 bp, Homo sapiens
ttctgggtgatgagaacattaagatgtcgtcatgaaaatgtgtagactaatgtgaagtgaaggtgaaagttaggagagttcagatggtcaagaaattcttaagctagagtgtagcagaggttgtccacagggtctctgat

SEQ ID NO: 140676 - DNA, 585 bp, Homo sapiens
ctactcgggaagctgaggcagaatcgcttgaatccgagaggtggaggttgtagtgagcagagatcactccactgcactccagcctccgtgacagagccagaccttgtctcaaaaacaaacaaacgaaaaagttctaaatctagatatgttcacaagactgaaatgtacatgtagagttgatggcaaactaactcctcagttgcagattttgatctgacagttctagaaatgctgtccacgagcctctggcagagacaaatccagcgaatcgttgctcacattaggtgcatagtaggccgggtgcggtggctcaggcctgtaatcccagcacttggaggcagaggcggtaggatcacgaggtcaggagatcgagagcatcctggccaacatggtgaaaccctgtctcaactaaaaatacaaaaattagccgggcatggtggcgggcgcctgtagtcccagctactcgggaggctgaggcaagagaatcgcttgaacccaggaggcagaggttgcagtgagccgagatcgcgccactgcactccagccttggcaacagagcgagactgcgtctcaaataaataaata

SEQ ID NO: 140677 - DNA, 654 bp, Homo sapiens
gtataagcatggagagcggtataccagggtgtactccagagtgagcaaaatgggaactcatgtcagaaagtgaaatgaaaatgtaggctgaaattctatcagtaatactgcaacaaaactctctgaaaccatctcacttaactcggtccaccaacttgaaagacactttccttttcatctgtgaagcccactgctggggctagcaggctactattatgactaagcaattccacttccatctctcaagctgtttacttcctgaaaggtagctgtttgatccaaacctgtttatgccagaagttcttgtttaatttactatcaaactaatgaaattaatgcaagacagttgtttatacacaaaccagattgcttgctttggaaagactaaaagggagttgttaaaagaaaaacatgccaggcgtggtggctcacacctgtaattctgcactttgggaagccgaggtgggcagatcacttcaggtcaggagttcaagaccagtctggccaacatggtgaaacaccgtctccactaaaaatacaaaagttaaccgggcatggtggtgtatgcctgtagtcccagctactctggaggctaaggcaggagaatcgattgaacccagggggtggaggttgcagtgagctgagatctcacca

SEQ ID NO: 140678 - DNA, 313 bp, Homo sapiens
ggaaagagatcagagagattgtggggaggtgggggaggcagaccacctagggttttgtgggccatggattttactctgagtgagatgggagcccctggaaggctttgtgtagaggaggggtagaactttgttacatgttaagatgatcgtgtggacataaaaaggaggtagaggcagaagcaaagaaagtagttaagagtctattgcagtatctcaggtgtcttagtcctttcttgctgctatacctgagactgagggatagcagaaatttctcacaacacaaatttctcacaatcttggaggctgggaggtc

SEQ ID NO: 140679 - DNA, 333 bp, Homo sapiens
gatgttcactattttctgagattactaacctttctttaaaaatatgtgtttgtggctgggtgtggtggctcacgcctgtaatcccagcacttcaggaggccaaagcgggtggatcacgaggtcaggagttggagaccagcctgatgaacatggtgaaaccccgtctttactaaaaatacaaaaattagccgggcgtggtggcgcgtgcctgtaatccctgctactctggaggctgaggcaggagaattgcttgaacccgggaagcagaggttgcagtgagccgagatcacgccactacactctagcctgggcgacagagcgagactccatctc

SEQ ID NO: 140680 - DNA, 193 bp, Homo sapiens
ggggaaaatatgctgaacaaccagggcagaggtgccattcctctgctaccattcgtttctccactgcccttcagactcttccatctctcactgtactttctcgcacactgtctttcctccagctttaattcttcctttgccctctgctgccctttcagctccttctgtctgagccccacagttcatcagtact

SEQ ID NO: 140681 - DNA, 324 bp, Homo sapiens
atttggagagattttgtctaaacaagaagctcctggtgtctgagacagagtagaagtagaagtcaaagatggagtctgatgtcctgagctgggtggaggcagtccaactaatccacacactcacgatgagctcactgatctacatagacaagctataaaaacacaaggctcagatcaactgccttgggacctgctttactcattcccagcatgctttcacattaatcctgttgccactgaagaagaaactatcttccaagggctctaaatgtcatttttatgtttgcctggtctgtcctagattctagaagaaaagtcatctga

SEQ ID NO: 140682 - DNA, 390 bp, Homo sapiens
aaccctaagaatttcaatatattatgagtcagtgaaaatatagtatttgttgttttgtttccctaagtgcccaattgagagatctggacaattactattatagagattgtgaggatggacagagaaccttttgttgactgaggtagtcaaagaaggaaggctaccagggtgagctaggattgagcagtgagaaggattgtttctatgtatggagaaaaatgggaaagagggaattgtggacagagcagtgtaagcaaggatacggaaatagcaaagtacaggtcatttttagggacagaagatgaatcagtttagcattagaagatgatgaaaaagtagtctgaagttaaagtatggaaagccttcttcaaacataaggtcaaatacagc

SEQ ID NO: 140683 - DNA, 915 bp, Homo sapiens
ggggagggatatcataggtaattagatcatgcggttaattcccttaccctgttctcatgatagtgagttcccacgagatctgatggtttataagaagcttttcttccctttgcacgatacttctctctcctgccaccatgtaaagtaggatgtgtttggttccccttccactgtgattgtaagagtctgaggtcttagcagccatggtaactgtgagtcaattaaacctcttttcttccaaattagtctcaggtatttcttcagagcagcattaaaataaacttaccagtaaattcgtactgacacagtggggcactgctataaggatacccaaaaacgtggaagtgactttggaactgagtaacaggcagaggctagaagtttggagggctcagaagaaggaaagatgtgggaaagtttggacttcctagagacttgttgaattgctttgaccaaaatgctggtagtgatggacaatgaagtccaggctgagatggtctcatgtggaggtgaggaacttgttgggaactggaataaaggtgacccttgctatgctttagcaaagagactggtagcattttgctcttgtcctaaagatctgtggaaggtcgaacttgagagataatttatggttatctggcaaaagaaattaagcagcaaaacatccaaaagttgacaaagcataaaagtttagacaattcacagcctaatgatgtggtagaaaagaaagacccattttctcagaagaaattggctgcagaagtgaggagcaaatgttcatcaccaagacaatggggaaaatgccttcagggcatgttagagacctttgtggcatctcctcctctcacacacctggaggcctaggaggcaaaaaatatttcatgggctaggcccaggaaaccctgctgtgtgcag

SEQ ID NO: 140684 - DNA, 249 bp, Homo sapiens
ccttctaaggagaccacccactagaatcccttgctctcatttgtgtctaattttatctgatctccatttattcccaaaaggtactattacaaaatatatactagtgtttaacttcttttaaaaagctgtcggtcagacacagtggctcacgcctgtaatcccagcattttgggagaccgaggcaggtggatcacctgaggtcaggagttcgagaccagcctggccaacatggtgaaaccccgtctctac

SEQ ID NO: 140685 - DNA, 435 bp, Homo sapiens
attatactagtgccagagtaaaagcaatgcaagcagcaactactttttcttgttattgagaaacacctagtctaattagataaggataattaattcttaatttcttctgatgaagagttttcttgcagtagaacaactttaccccattccaacaatgtttatcatttagaaaagctttaaagagacttctgcttgagtctctgacccaagtaatcctgtgatacctacacagggctaactactagtcttggcctcctgtatgttttaaccacctcaccctttcatcaatgaatcctatctgctcttcagatgctgggagcatactagataagtagataattttaaaagtatccattcaaaaataggcatttcatgcctataatcccagcattttgagaggttgaggcaggaggattgcttgagcccaggagtttg

SEQ ID NO: 140686 - DNA, 453 bp, Homo sapiens
gggtttaagcgcttctccagctcagcctcccgagtagctgggacaggaacacaggtccctctcagatggggcaggtgagtcaaggctcgtgtgtattgctgtctccatcaggcgctcttttaaaagaatggcaaagcttttaatcccatctttattaccggtaagagtgtagggggaggatctggggcatagcctgggtctggccttagggtttctagaaaccaggggatatttttctaagaagatagagaatagagctttcctagtgtggttagacctagggaagacctttcttgcagtgcagcaatgcagaccgacttccaatccctaggtcaagctggagtctagggacagaggggaggagacccctgcctcctgtgcccagcctcaacttgtctcctgaccttcatggagtcacgttgcagctgcctccctcctggcttatgtaataat

SEQ ID NO: 140687 - DNA, 531 bp, Homo sapiens
acttcacacaataatgaccatatccctatccaggtcctgggcaaaggactttcttctctttcttagaaaaatgaaggattttttttgtttaaatttagcagtttccgcatcatgaagggaccagtcaatgacactcaggtaaccccaatacagtcacaaattccaagcacatgaaagcccgtgtttctgctaccagccagagtgggagtgtgcccagaacacagtccccaccggggaagcccagctcgtcagtaccagggtctcttctccttctccccgcttctgctaacgcatgcactgagcaacttcctggacagacaagccatttgaaaacaggattccagggaaggatgcctgtgatcaggcactgtggtcattaaatccgggttatgccgaggaaaccaggctggggggatacagcccattgtgcctccaagtgggaggttaggatgaggtccctcagctggccctgacaggaacactgggccaggaatgagcccaggccaagcaaggccacggtactcagggagc

SEQ ID NO: 140688 - DNA, 259 bp, Homo sapiens
cctgctgccgccattgagatgtatatgatctggactcaggctctgaaggagacaaagctacacaggctactcagcatcttcctcatttttgtactaagtcattgaggtcctttgtcctttcttggtctggacacaaagaaggacatggccattctaccaacctttctgagacccacctgtctctgttgctggtatctctgcaaagctacacccagcctcagttctgcaactctgcaggtggactgctggctcccttttg

SEQ ID NO: 140689 - DNA, 1048 bp, Homo sapiens
gagaaggaactagtgtttggtgcagataataaccaaaatagtggagaagagagaatgacaaatggttgcaaaatgatctgccaaagtgcagcaaagtatgaaacctgcagcattacaaaaactaagttgcagacttgccatataaagtgtggcgcccattgcttttcaagcctcctggaccagtaataggcagcttgagtgggaagaccacaggagtagcttaaatggcactaagaaatcgctatcccagtggtctagtgtggtcaggaagtcagtggtttgaaggtggaaccagataaggactacaggctgtagtcacaaattgttcttccaaaacactgcccttgcatttttttcccattgtttatagctgcagatgcctgactactccagtgtaattaaaatatagctctgcaaaagaaagatgttccattagcccctgcctcccctcaccaggagacagccttctgtggtttcgtttacaatttaacatggtttactgatatacctaccatatttgttaggattttcatattgagtctttttcattttattttctaatgggttttgttctctttgtttttgtttcaatttacttaaaacaaaacgcacgcctcctgcattggccacctgctgcggcaccaaccccttcatgcattgcccttttcttgctgctgtgttgggatggtgcgcgcaccaccctcactcaccctccatttcttgatcactctccatgttcttgcacctctgccttccacttcctggtcatagacgagctgtacgctcagaaactgaagtacaaagccatcagcgaggagctggaccacgctctcaacgatatgacttccatataagtttctttgcttcacttctcccaagactccctcgtcgagctggatgtcccacctctctgagctctgcatttgtctattctccagctgaccctggttctctctcttagcatcctgccttagagccaggcacacactgtgctttctattgtacagaagctcttcgtttcagtgtcaaataaacactgtgtaagcta

SEQ ID NO: 140690 - DNA, 1295 bp, Homo sapiens
gagaggaggaaggggggcaggagaaaaaagcttttccaaaaaagtattggctgtcttgaggaatgcggtcgcccccttgggaaagtacatatctgggagaagcaggcggctccgcgctcgcactcccgctcctccgcccgaccgcgcgctcgccccgccgctcctgctgcagccccagggcccctcgccgccgccaccatggacgccatcaagaagaagatgcagatgctgaagctcgacaaggagaacgccttggatcgagctgagcaggcggaggccgacaagaaggcggcggaagacaggagcaagcagctggaagatgagctggtgtcactgcaaaagaaactcaagggcaccgaagatgaactggacaaatactctgaggctctcaaagatgcccaggagaagctggagctggcagagaaaaaggccaccgatgctgaagccgacgtagcttctctgaacagacgcatccagctggttgaggaagagttggatcgtgcccaggagcgtctggcaacagctttgcagaagctggaggaagctgagaaggcagcagatgagagtgagagaggcatgaaagtcattgagagtcgagcccaaaaagatgaagaaaaaatggaaattcaggagatccaactgaaagaggcaaagcacattgctgaagatgccgaccgcaaatatgaagaggtggcccgtaagctggtcatcattgagagcgacctggaacgtgcagaggagcgggctgagctctcagaaggccaagtccgacagctggaagaacaattaagaataatggatcagaccttgaaagcattaatggctgcagaggataagtactcgcagaaggaagacagatatgaggaagagatcaaggtcctttccgacaagctgaaggaggctgagactcgggctgagtttgcggagaggtcagtaactaaattggagaaaagcattgatgacttagaagacgagctgtacgctcagaaactgaagtacaaagccatcagcgaggagctggaccacgctctcaacgatatgacttccatgtaaacgttcatccactctgcctgcttacaccctgccctcatgctaatataagtttctttgcttcacttctcccaagactccctcgtcgagctggatgtcccacctctctgagctctgcatttgtctattctccagctgaccctggttctctctcttagcatcctgccttagagccaggcacacactgtgctttctattgtacagaagctcttcgtttcagtgtcaaataaacactgtgtaagcta

SEQ ID NO: 140691 - DNA, 328 bp, Homo sapiens
atggatgttcactgtataaatcaatgtgtaaatgtgtccgagaactccagagttgatgagggcttgtaatgcacttaaaggtagctcaccacaagacagtcttcctatctaaaatcagcattgcagtcccagccatttcctgaagctaccaccctcactttctccccaactctgaaatgcttttcactctctacctacacctggactgaccctgacaccctccagtcacaacaactcacatggactgtcctccctcaggacttcagggatagccctcatttctttggacaagctctagcccgaaacctcactccttcacccaagctaa

SEQ ID NO: 140692 - DNA, 238 bp, Homo sapiens
gggcgaattctactctctgtgcgtttgtgtatgatatgtttgcggtttcgatgatgtggtctttggaatagaaacctgtgaggaaaggcattcctgctaatgctaggtgccaatggtgagggaggcatgaaagtcattgagagtcgagcccaaaaagatgaagaaaaaatggaaattcaggagatccaactgaaaggatgattcaagaaactgtttagctgcccaaatgaaaagtggc

SEQ ID NO: 140693 - DNA, 1563 bp, Homo sapiens
caaaatctcaaccatgatcttgagatggcaaaggttttaaatacgttttggaaatatactcattggtatatttcttttgagaaggctgaaatgtagctggggacagcaggttgatcacaagggacgatgatatgaggtaagcacacaagagctatggacaagacaaggtctaaaggattttgaatacaaagcagaaatatttcgaccttctcatttctggggtgggagtggggagtgttcattaagtacatatgacaagagggagtgtggggagaaggtgaaacagtagactacatttatggattaagtagggaatgtgaacaaagatgttaaagtcatggcgatccggtagacagattacacagaagagatgaactggacaaatactctgaggctctcaaagatgcccaggagaagctggagctggcagagaaaaaggccaccgatgctgaagccgacgtagcttctctgaacagacgcatccagctggttgaggaagagttggatcgtgcccaggagcgtctggcaacagctttgcagaagctggaggaagctgagaaggcagcagatgagagtgagagaggcatgaaagtcattgagagtcgagcccaaaaagatgaagaaaaaatggaaattcaggagatccaactgaaagaggcaaagcacattgctgaagatgccgaccgcaaatatgaagaggtggcccgtaagctggtcatcattgagagcgacctggaacgtgcagaggagcgggctgagctctcagaaggccaagtccgacagctggaagaacaattaagaataatggatcagaccttgaaagcattaatggctgcagaggataagtactcgcagaaggaagacagatatgaggaagagatcaaggtcctttccgacaagctgaaggaggctgagactcgggctgagtttgcggagaggtcagtaactaaattggagaaaagcattgatgacttagaagagaaagtggctcatgccaaagaagaaaaccttagtatgcatcagatgctggatcagactttactggagttaaacaacatgtgaaaacctccttagctgcgaccacattctttcattttgttttgttttgttttgtttttaaacacctgcttaccccttaaatgcaatttatttacttttaccactgtcacagaaacatccacaagataccagctaggtcagggggtggggaaaacacatacaaaaaggcaagcccatgtcagggcgatcctggttcaaatgtgccatttcccgggttgatgctgccacactttgtagagagtttagcaacacagtgtgcttagtcagcgtaggaatcctcactaaagcaggagaagttccattcctttctgattggcacacgtgcagctcatgacaatctgtaggataacaatcagtgtggatttccactcttttcagtccttcatgttaaagatttagacaccacatacaactggtaaaggacgttttcttgagagttttaactatatgtaaacattgtataatgatatggaataaaatgcacattgtaggacattttctaaa

SEQ ID NO: 140694 - DNA, 861 bp, Homo sapiens
ttcaaaggtcgccttggagtttatgtactgtgctaactgccatttctcacagaggtgactgaaactgacaagtagtttctgatccattttataggtgatgtgcttcattttcatcctctagttttccctatgtttgtagctacaggaaacataaaacttcccaactttaactcaaataaatcattacaggctgagactcgggctgagtttgcggagaggtcagtaactaaattggagaaaagcattgatgacttagaaggtaagatcttaagtagtgtttttagtttaatccttatggttgaataccaacctggcaaaacaattttccaattcaagggcatccacattgatacgctcctttgcacttgcacattcttcctgtgtgtcctctggggtttttctctgtggctcttgaactcatgaacctaagtcttctgctcacgaggtgactagttagccaccagccatagtggcaaatgccatccagcttgacttcatgctcattagaagtgtggcaggtttatttttcactgtgagtgaggtgcttattggtgagaatgactctagtatattttatatctttagtgttacttcctaattaaattgggaatgatgtggtgattgtggtcttgtttttagaagaacccatcttcttccaagtatgaattcaaagtaaggatttaggggttattttaagtcatatattatcttaacaaaatactttatatcctgaaggaggagggaaaaattatacttaagcatttcttccctaaggcacttaggttttattttagtaataaccactctatctcacagatatcctaaatgttgagctttgaagcttgtgaaggattagctgtg

SEQ ID NO: 140695 - DNA, 262 bp, Homo sapiens
  misc_feature (21)..(21): n is a, c, g, or t
ccggacctcataggttcgcgnggaggctgagactcgggctgagtttgcggagaggtcagtaactaaattggagaaaagcattgatgacttagaagagaaagtggctcatgccaaagaagaaaaccttagtatgcatcagatgctggatcagactttactggagttaaacaacatgtgaaaacctccttagctgcgaccacattctttcattttgttttgttttgtgttttgtttttaacacctgcgacctatgaggtaccgg

SEQ ID NO: 140696 - DNA, 403 bp, Homo sapiens
tccagcatcaacccgggaaatggcacatttggaccaggtccccctgtggtcttttgttcaacattgtacaatgtagaactctgtccaacactaatttattttgtcttgagttttactacaagatgagactatggatcccgcatgcctgaattcactaaagccaagggtctgtaagccacgctgctcttctgagacttccattcctttctgattggcacacgtgcagctcatgacaatctgtaggataacaatcagtgtggatttccactcttttcagtccttcatgttaaagatttagacaccacatacaactggtaaaggacgttttcttgagagttttaactatatgtaaacattgtataatgatatggaataaaatgcacattgtaggacattttctaaa

SEQ ID NO: 140697 - DNA, 143 bp, Homo sapiens
tcaagcttctaacgatgtacggggagttaaagatttagacaccacatacaactggtaaaggacgttttcttgagagttttaactatatgtaaacattgtataatgatatggaataaaatgcacattgtaggacattttctaaa

SEQ ID NO: 140698 - DNA, 445 bp, Homo sapiens
  misc_feature (5)..(5): n is a, c, g, or t
  misc_feature (24)..(24): n is a, c, g, or t
  misc_feature (29)..(29): n is a, c, g, or t
ggtcnactactactaaattcgcgnccgcntcgacctactcgcagaaggaagacagatatgaggaagagatcaaggtcctttccgacaagctgaaggaggctgagactcgggctgagtttgcggagaggtcagtaactaaattggagaaaagcattgatgacttagaagacgagctgtacgctcagaaactgaagtacaaagccatcagcgaggagctggaccacgctctcaacgatatgacttccatataagtttctttgcttcacttctcccaagactccctcgtcgagctggatgtcccacctctctgagctctgcatttgtctattctccagctgaccctggttctctctcttagcatcctgccttagagccaggcacacactgtgctttctattgtacagaagctcttcgtttcagtgtcaaataaacactgtgtaagcta

SEQ ID NO: 140699 - DNA, 1693 bp, Homo sapiens
  misc_feature (1)..(1): n is a, c, g, or t
naggcggtacggcccggaattatgggatcccgaccgcgcgctcgccccgccgctcctgctgcagccccagggcccctcgccgccgccaccatggacgccatcaagaagaagatgcagatgctgaagctcgacaaggagaacgccttggatcgagctgagcaggcggaggccgacaagaaggcggcggaagacaggagcaagcagctggaagatgagctggtgtcactgcaaaagaaactcaagggcaccgaagatgaactggacaaatactctgaggctctcaaagatgcccaggagaagctggagctggcagagaaaaaggccaccgatgctgaagccgacgtagcttctctgaacagacgcatccagctggttgaggaagagttggatcgtgcccaggagcgtctggcaacagctttgcagaagctggaggaagctgagaaggcagcagatgagagtgagagaggcatgaaagtcattgagagtcgagcccaaaaagatgaagaaaaaatggaaattcaggagatccaactgaaagaggcaaagcacattgctgaagatgccgaccgcaaatatgaagaggtggcccgtaagctggtcatcattgagagcgacctggaacgtgcagaggagcgggctgagctctcagaaggccaagtccgacagctggaagaacaattaagaataatggatcagaccttgaaagcattaatggctgcagaggataagtactcgcagaaggaagacagatatgaggaagagatcaaggtcctttccgacaagctgaaggaggctgagactcgggctgagtttgcggagaggtcagtaactaaattggagaaaagcattgatgacttagaagagaaagtggctcatgccaaagaagaaaaccttagtatgcatcagatgctggatcagactttactggagttaaacaacatgtgaaaacctccttagctgcgaccacattctttcattttgttttgttttgttttgtttttaaacacctgcttaccccttaaatgcaatttatttacttttaccactgtcacagaaacatccacaagataccagctaggtcagggggtggggaaaacacatacaaaaaggcaagcccatgtcagggcgatcctggttcaaatgtgccatttcccgggttgatgctgccacactttgtagagagtttagcaacacagtgtgcttagtcagcgtaggaatcctcactaaagcaggagaagttccattcaaagtgccaatgatagagtcaacaggaaggttaatgttggaaacacaatcaggtgtggattggtgctactttgaacaaaaggtccccctgtggtcttttgttcaacattgtacaatgtagaactctgtccaacactaatttattttgtcttgagttttactacaagatgagactatggatcccgcatgcctgaattcactaaagccaagggtctgtaagccacgctgctcttctgagacttccattcctttctgattggcacacgtgcagctcatgacaatctgtaggataacaatcagtgtggatttccactcttttcagtccttcatgttaaagatttagacaccacatacaactggtaaaggacgttttcttgagagttttaactatatgtaaacattgtataatgatatggaataaaatgcacattgtaggacattttctaaa

SEQ ID NO: 140700 - DNA, 2454 bp, Homo sapiens
cagaatctccggcagtttttgtacctcaagaagtaagtggaacacctttccctgtcatagttattttcatccagacatctggtggaagcatcagattccttacagatataagagaggcatcatttaaaaggtagaacaggatcgacaaacaaggatttatgtcaggatctctcagcctctgtgttaccgagggcatttctaacagtcttcttactacggcccgaccgcgcgctcgccccgccgctcctgctgcagccccagggcccctcgccgccgccaccatggacgccatcaagaagaagatgcagatgctgaagctcgacaaggagaacgccttggatcgagctgagcaggcggaggccgacaagaaggcggcggaagacaggagcaagcagctggaagatgagctggtgtcactgcaaaagaaactcaagggcaccgaagatgaactggacaaatactctgaggctctcaaagatgcccaggagaagctggagctggcagagaaaaaggccaccgatgctgaagccgacgtagcttctctgaacagacgcatccagctggttgaggaagagttggatcgtgcccaggagcgtctggcaacagctttgcagaagctggaggaagctgagaaggcagcagatgagagtgagagaggcatgaaagtcattgagagtcgagcccaaaaagatgaagaaaaaatggaaattcaggagatccaactgaaagaggcaaagcacattgctgaagatgccgaccgcaaatatgaagaggtggcccgtaagctggtcatcattgagagcgacctggaacgtgcagaggagcgggctgagctctcagaaggccaagtccgacagctggaagaacaattaagaataatggatcagaccttgaaagcattaatggctgcagaggataagtactcgcagaaggaagacagatatgaggaagagatcaaggtcctttccgacaagctgaaggaggctgagactcgggctgagtttgcggagaggtcagtaactaaattggagaaaagcattgatgacttagaagagaaagtggctcatgccaaagaagaaaaccttagtatgcatcagatgctggatcagactttactggagttaaacaacatgtgaaaacctccttagctgcgaccacattctttcattttgttttgttttgttttgtttttaaacacctgcttaccccttaaatgcaatttatttacttttaccactgtcacagaaacatccacaagataccagctaggtcagggggtggggaaaacacatacaaaaaggcaagcccatgtcagggcgatcctggttcaaatgtgccatttcccgggttgatgctgccacactttgtagagagtttagcaacacagtgtgcttagtcagcgtaggaatcctcactaaagcaggagaagttccattcaaagtgccaatgatagagtcaacaggaaggttaatgttggaaacacaatcaggtgtggattggtgctactttgaacaaaaggtccccctgtggtcttttgttcaacattgtacaatgtagaactctgtccaacactaatttattttgtcttgagttttactacaagatgagactatggatcccgcatgcctgaattcactaaagccaagggtctgtaagccacgctgctcttctgagacttccattcctttctgattggcacacgtgcagctcatgacaatctgtaggataacaatcagtgtggatttccactcttttcagtccttcatgttaaagatttagacaccacatacaactggtaaaggacgttttcttgagagttttaactatatgtaaacattgtataatgatatggaataaaatgcacattgtaggacattttctaaaaaaaaaaaaaaaaaaaaaaaaaaaaaaaacaaaaaaaaaaaaaaaaaaaaaaaaaaaaaaaaaaaaaaaaaaaaaaaaaaaaaaagaaaaaaaaaaaaaaaaaaaaaaaagaaagaaaatagagaaaaaagaaacaacaaagacgacagaaacaggaacagagcgcccgccacacgaccagaccgagcgggccgccgcagaccagaaacgacaacacagaaaaccaagcggaggaagaggaagacagggcagaacaagacgcggcgcgaggagccagagcaacaagaagctgacatggacagtgcacgggcacaccgcacggacgagacgcagcgacagacagcaagtccccgaccgcgcagcaaccagcgcgcgacgaacatcgacgcgaaacgaccgagagagcccacgcgccacgcgagcaagcgaaggagaagacaccacagaaaagagcatgcgactcacggacccaacgcaccagaccgcgcgagcgaccgcgggcaccgacgcccgcgaacgcggcccagaccaccccagccccaggcacggagcgcggcgaagcgacaaaag

SEQ ID NO: 140701 - DNA, 1694 bp, Homo sapiens
  misc_feature (1)..(1): n is a, c, g, or t
naggcggtacggcccggaattatgggatcccgaccgcgcgctcgccccgccgctcctgctgcagccccagggcccctcgccgccgccaccatggacgccatcaagaagaagatgcagatgctgaagctcgacaaggagaacgccttggatcgagctgagcaggcggaggccgacaagaaggcggcggaagacaggagcaagcagctggaagatgagctggtgtcactgcaaaagaaactcaagggcaccgaagatgaactggacaaatactctgaggctctcaaagatgcccaggagaagctggagctggcagagaaaaaggccaccgatgctgaagccgacgtagcttctctgaacagacgcatccagctggttgaggaagagttggatcgtgcccaggagcgtctggcaacagctttgcagaagctggaggaagctgagaaggcagcagatgagagtgagagaggcatgaaagtcattgagagtcgagcccaaaaagatgaagaaaaaatggaaattcaggagatccaactgaaagaggcaaagcacattgctgaagatgccgaccgcaaatatgaagaggtggcccgtaagctggtcatcattgagagcgacctggaacgtgcagaggagcgggctgagctctcagaaggcaaatgtgccgaagcttgaagaagaattgaaaactgtgacgaacaacttgaagtcactggaggctcaggctgagaagtactcgcagaaggaagacagatatgaggaagagatcaaggtcctttccgacaagctgaaggaggctgagactcgggctgagtttgcggagaggtcagtaactaaattggagaaaagcattgatgacttagaagagaaagtggctcatgccaaagaagaaaaccttagtatgcatcagatgctggatcagactttactggagttaaacaacatgtgaaaacctccttagctgcgaccacattctttcattttgttttgttttgttttgtttttaaacacctgcttaccccttaaatgcaatttatttacttttaccactgtcacagaaacatccacaagataccagctaggtcagggggtggggaaaacacatacaaaaaggcaagcccatgtcagggcgatcctggttcaaatgtgccatttcccgggttgatgctgccacactttgtagagagtttagcaacacagtgtgcttagtcagcgtaggaatcctcactaaagcaggagaagttccattcaaagtgccaatgatagagtcaacaggaaggttaatgttggaaacacaatcaggtgtggattggtgctactttgaacaaaaggtccccctgtggtcttttgttcaacattgtacaatgtagaactctgtccaacactaatttattttgtcttgagttttactacaagatgagactatggatcccgcatgcctgaattcactaaagccaagggtctgtaagccacgctgctcttctgagacttccattcctttctgattggcacacgtgcagctcatgacaatctgtaggataacaatcagtgtggatttccactcttttcagtccttcatgttaaagatttagacaccacatacaactggtaaaggacgttttcttgagagttttaactatatgtaaacattgtataatgatatggaataaaatgcacattgtaggacattttctaaa

SEQ ID NO: 140702 - DNA, 1934 bp, Homo sapiens
cagaatctccggcagtttttgtacctcaagaagtaagtggaacacctttccctgtcatagttattttcatccagacatctggtggaagcatcagattccttacagatataagagaggcatcatttaaaaggtagaacaggatcgacaaacaaggatttatgtcaggatctctcagcctctgtgttaccgagggcatttctaacagtcttcttactacggcccgaccgcgcgctcgccccgccgctcctgctgcagccccagggcccctcgccgccgccaccatggacgccatcaagaagaagatgcagatgctgaagctcgacaaggagaacgccttggatcgagctgagcaggcggaggccgacaagaaggcggcggaagacaggagcaagcagctggaagatgagctggtgtcactgcaaaagaaactcaagggcaccgaagatgaactggacaaatactctgaggctctcaaagatgcccaggagaagctggagctggcagagaaaaaggccaccgatgctgaagccgacgtagcttctctgaacagacgcatccagctggttgaggaagagttggatcgtgcccaggagcgtctggcaacagctttgcagaagctggaggaagctgagaaggcagcagatgagagtgagagaggcatgaaagtcattgagagtcgagcccaaaaagatgaagaaaaaatggaaattcaggagatccaactgaaagaggcaaagcacattgctgaagatgccgaccgcaaatatgaagaggtggcccgtaagctggtcatcattgagagcgacctggaacgtgcagaggagcgggctgagctctcagaaggccaagtccgacagctggaagaacaattaagaataatggatcagaccttgaaagcattaatggctgcagaggataagtactcgcagaaggaagacagatatgaggaagagatcaaggtcctttccgacaagctgaaggaggctgagactcgggctgagtttgcggagaggtcagtaactaaattggagaaaagcattgatgacttagaagagaaagtggctcatgccaaagaagaaaaccttagtatgcatcagatgctggatcagactttactggagttaaacaacatgtgaaaacctccttagctgcgaccacattctttcattttgttttgttttgttttgtttttaaacacctgcttaccccttaaatgcaatttatttacttttaccactgtcacagaaacatccacaagataccagctaggtcagggggtggggaaaacacatacaaaaaggcaagcccatgtcagggcgatcctggttcaaatgtgccatttcccgggttgatgctgccacactttgtagagagtttagcaacacagtgtgcttagtcagcgtaggaatcctcactaaagcaggagaagttccattcaaagtgccaatgatagagtcaacaggaaggttaatgttggaaacacaatcaggtgtggattggtgctactttgaacaaaaggtccccctgtggtcttttgttcaacattgtacaatgtagaactctgtccaacactaatttattttgtcttgagttttactacaagatgagactatggatcccgcatgcctgaattcactaaagccaagggtctgtaagccacgctgctcttctgagacttccattcctttctgattggcacacgtgcagctcatgacaatctgtaggataacaatcagtgtggatttccactcttttcagtccttcatgttaaagatttagacaccacatacaactggtaaaggacgttttcttgagagttttaactatatgtaaacattgtataatgatatggaataaaatgcacattgtaggacattttctaaaaaaaaaagaaaacaacgcaacacaacaatcacacacaaccaaaaaaaagg

SEQ ID NO: 140703 - DNA, 2210 bp, Homo sapiens
cagaatctccggcagtttttgtacctcaagaagtaagtggaacacctttccctgtcatagttattttcatccagacatctggtggaagcatcagattccttacagatataagagaggcatcatttaaaaggtagaacaggatcgacaaacaaggatttatgtcaggatctctcagcctctgtgttaccgagggcatttctaacagtcttcttactacggcccgaccgcgcgctcgccccgccgctcctgctgcagccccagggcccctcgccgccgccaccatggacgccatcaagaagaagatgcagatgctgaagctcgacaaggagaacgccttggatcgagctgagcaggcggaggccgacaagaaggcggcggaagacaggagcaagcagctggaagatgagctggtgtcactgcaaaagaaactcaagggcaccgaagatgaactggacaaatactctgaggctctcaaagatgcccaggagaagctggagctggcagagaaaaaggccaccgatgctgaagccgacgtagcttctctgaacagacgcatccagctggttgaggaagagttggatcgtgcccaggagcgtctggcaacagctttgcagaagctggaggaagctgagaaggcagcagatgagagtgagagaggcatgaaagtcattgagagtcgagcccaaaaagatgaagaaaaaatggaaattcaggagatccaactgaaagaggcaaagcacattgctgaagatgccgaccgcaaatatgaagaggtggcccgtaagctggtcatcattgagagcgacctggaacgtgcagaggagcgggctgagctctcagaaggccaagtccgacagctggaagaacaattaagaataatggatcagaccttgaaagcattaatggctgcagaggataagtactcgcagaaggaagacagatatgaggaagagatcaaggtcctttccgacaagctgaaggaggctgagactcgggctgagtttgcggagaggtcagtaactaaattggagaaaagcattgatgacttagaagagaaagtggctcatgccaaagaagaaaaccttagtatgcatcagatgctggatcagactttactggagttaaacaacatgtgaaaacctccttagctgcgaccacattctttcattttgttttgttttgttttgtttttaaacacctgcttaccccttaaatgcaatttatttacttttaccactgtcacagaaacatccacaagataccagctaggtcagggggtggggaaaacacatacaaaaaggcaagcccatgtcagggcgatcctggttcaaatgtgccatttcccgggttgatgctgccacactttgtagagagtttagcaacacagtgtgcttagtcagcgtaggaatcctcactaaagcaggagaagttccattcaaagtgccaatgatagagtcaacaggaaggttaatgttggaaacacaatcaggtgtggattggtgctactttgaacaaaaggtccccctgtggtcttttgttcaacattgtacaatgtagaactctgtccaacactaatttattttgtcttgagttttactacaagatgagactatggatcccgcatgcctgaattcactaaagccaagggtctgtaagccacgctgctcttctgagacttccattcctttctgattggcacacgtgcagctcatgacaatctgtaggataacaatcagtgtggatttccactcttttcagtccttcatgttaaagatttagacaccacatacaactggtaaaggacgttttcttgagagttttaactatatgtaaacattgtataatgatatggaataaaatgcacattgtaggacattttctaaaaaaaaaacacgaaggaaaacaaaaaaaaagaacggcgcagaacgagagagacacaacagggggggacgccaagagaggtacccccgagggggccacaaggaggggaccacaaggtggtgtagagaaagggggccccacaggcggccgcggactacaacgaacacagaagagcgccgcaccactacacaagcgctaggaacggggaaaacacacgaacggggaacccgcggaacaacaccacaccatgagcggagcaacaaagcgagggcaaccccccgagaggctccgcgccgcggcgagcaaacacggcgacaagcacaaaggac

SEQ ID NO: 140704 - DNA, 2260 bp, Homo sapiens
  misc_feature (2246)..(2246): n is a, c, g, or t
cagaatctccggcagtttttgtacctcaagaagtaagtggaacacctttccctgtcatagttattttcatccagacatctggtggaagcatcagattccttacagatataagagaggcatcatttaaaaggtagaacaggatcgacaaacaaggatttatgtcaggatctctcagcctctgtgttaccgagggcatttctaacagtcttcttactacggcccgaccgcgcgctcgccccgccgctcctgctgcagccccagggcccctcgccgccgccaccatggacgccatcaagaagaagatgcagatgctgaagctcgacaaggagaacgccttggatcgagctgagcaggcggaggccgacaagaaggcggcggaagacaggagcaagcagctggaagatgagctggtgtcactgcaaaagaaactcaagggcaccgaagatgaactggacaaatactctgaggctctcaaagatgcccaggagaagctggagctggcagagaaaaaggccaccgatgctgaagccgacgtagcttctctgaacagacgcatccagctggttgaggaagagttggatcgtgcccaggagcgtctggcaacagctttgcagaagctggaggaagctgagaaggcagcagatgagagtgagagaggcatgaaagtcattgagagtcgagcccaaaaagatgaagaaaaaatggaaattcaggagatccaactgaaagaggcaaagcacattgctgaagatgccgaccgcaaatatgaagaggtggcccgtaagctggtcatcattgagagcgacctggaacgtgcagaggagcgggctgagctctcagaaggccaagtccgacagctggaagaacaattaagaataatggatcagaccttgaaagcattaatggctgcagaggataagtactcgcagaaggaagacagatatgaggaagagatcaaggtcctttccgacaagctgaaggaggctgagactcgggctgagtttgcggagaggtcagtaactaaattggagaaaagcattgatgacttagaagagaaagtggctcatgccaaagaagaaaaccttagtatgcatcagatgctggatcagactttactggagttaaacaacatgtgaaaacctccttagctgcgaccacattctttcattttgttttgttttgttttgtttttaaacacctgcttaccccttaaatgcaatttatttacttttaccactgtcacagaaacatccacaagataccagctaggtcagggggtggggaaaacacatacaaaaaggcaagcccatgtcagggcgatcctggttcaaatgtgccatttcccgggttgatgctgccacactttgtagagagtttagcaacacagtgtgcttagtcagcgtaggaatcctcactaaagcaggagaagttccattcaaagtgccaatgatagagtcaacaggaaggttaatgttggaaacacaatcaggtgtggattggtgctactttgaacaaaaggtccccctgtggtcttttgttcaacattgtacaatgtagaactctgtccaacactaatttattttgtcttgagttttactacaagatgagactatggatcccgcatgcctgaattcactaaagccaagggtctgtaagccacgctgctcttctgagacttccattcctttctgattggcacacgtgcagctcatgacaatctgtaggataacaatcagtgtggatttccactcttttcagtccttcatgttaaagatttagacaccacatacaactggtaaaggacgttttcttgagagttttaactatatgtaaacattgtataatgatatggaataaaatgcacattgtaggacattttctaaagtccaacaaaacaacataaaatctaaccagaacataacaaagtcttgggggcatgtggattccgcttagcaaagcatctttatagcccatatcgatgaggaacctggggcctcgccttgggtaactgtaaaccctcctattgcgtcatttcccaaccgatgggaaaccacggagtttagaaaacgatttccgcaggtttttgcctgcctgatttaaaaatactcccgtggggaatagtccgtctgattctggaccataagacgtcgtactgcgtctttcctaggagtcacaaaaggggcgtacaattgccgggaggtttgcccatgcattcttcctagcattttagcccatttgtgggccanctatttacagtatg

SEQ ID NO: 140705 - DNA, 1951 bp, Homo sapiens
  misc_feature (1)..(1): n is a, c, g, or t
naggcggtacggcccggaattatgggatcccgaccgcgcgctcgccccgccgctcctgctgcagccccagggcccctcgccgccgccaccatggacgccatcaagaagaagatgcagatgctgaagctcgacaaggagaacgccttggatcgagctgagcaggcggaggccgacaagaaggcggcggaagacaggagcaagcagctggaagatgagctggtgtcactgcaaaagaaactcaagggcaccgaagatgaactggacaaatactctgaggctctcaaagatgcccaggagaagctggagctggcagagaaaaaggccaccgatgctgaagccgacgtagcttctctgaacagacgcatccagctggttgaggaagagttggatcgtgcccaggagcgtctggcaacagctttgcagaagctggaggaagctgagaaggcagcagatgagagtgagagaggcatgaaagtcattgagagtcgagcccaaaaagatgaagaaaaaatggaaattcaggagatccaactgaaagaggcaaagcacattgctgaagatgccgaccgcaaatatgaagaggtggcccgtaagctggtcatcattgagagcgacctggaacgtgcagaggagcgggctgagctctcagaaggggtaagcgggcccggcgccaggaggccacgaatggggtgctgcagagcagtgactaaacagcatgaccttctggcagctgcacattacctgtttcagctccgggctccttttgtgctcatttgatgtggatgagccacgagtatggaacatggaggactcgtgtggggtgtcttatgtatgaatgcgtgtatcactgcatgccttacctgcacactgattttgtgaatggccttgtgcatttcctgtgtccactaacaccaagtccgacagctggaagaacaattaagaataatggatcagaccttgaaagcattaatggctgcagaggataagtactcgcagaaggaagacagatatgaggaagagatcaaggtcctttccgacaagctgaaggaggctgagactcgggctgagtttgcggagaggtcagtaactaaattggagaaaagcattgatgacttagaagagaaagtggctcatgccaaagaagaaaaccttagtatgcatcagatgctggatcagactttactggagttaaacaacatgtgaaaacctccttagctgcgaccacattctttcattttgttttgttttgttttgtttttaaacacctgcttaccccttaaatgcaatttatttacttttaccactgtcacagaaacatccacaagataccagctaggtcagggggtggggaaaacacatacaaaaaggcaagcccatgtcagggcgatcctggttcaaatgtgccatttcccgggttgatgctgccacactttgtagagagtttagcaacacagtgtgcttagtcagcgtaggaatcctcactaaagcaggagaagttccattcaaagtgccaatgatagagtcaacaggaaggttaatgttggaaacacaatcaggtgtggattggtgctactttgaacaaaaggtccccctgtggtcttttgttcaacattgtacaatgtagaactctgtccaacactaatttattttgtcttgagttttactacaagatgagactatggatcccgcatgcctgaattcactaaagccaagggtctgtaagccacgctgctcttctgagacttccattcctttctgattggcacacgtgcagctcatgacaatctgtaggataacaatcagtgtggatttccactcttttcagtccttcatgttaaagatttagacaccacatacaactggtaaaggacgttttcttgagagttttaactatatgtaaacattgtataatgatatggaataaaatgcacattgtaggacattttctaaa

SEQ ID NO: 140706 - DNA, 2206 bp, Homo sapiens
cagaatctccggcagtttttgtacctcaagaagtaagtggaacacctttccctgtcatagttattttcatccagacatctggtggaagcatcagattccttacagatataagagaggcatcatttaaaaggtagaacaggatcgacaaacaaggatttatgtcaggatctctcagcctctgtgttaccgagggcatttctaacagtcttcttactacggcccgaccgcgcgctcgccccgccgctcctgctgcagccccagggcccctcgccgccgccaccatggacgccatcaagaagaagatgcagatgctgaagctcgacaaggagaacgccttggatcgagctgagcaggcggaggccgacaagaaggcggcggaagacaggagcaagcagctcgaggaggacatcgcggccaaggagaagttgctgcgggtgtcggaggacgagcgggaccgggtgctggaggagctgcacaaggcggaggacagcctcctggccgccgaagaggccgccgccaaggtacccggggcgcgcggcacggcgtggcgcacgaatggctaactctttctctttctctctctccctccctgtctttccctctgtctctcccgctgtccctgtccttctggttctgtgcacccacacccctccccttcgggatcacgctgcctgctgcacccccctccctccctgtaccccctggccaactcccagctggaagatgagctggtgtcactgcaaaagaaactcaagggcaccgaagatgaactggacaaatactctgaggctctcaaagatgcccaggagaagctggagctggcagagaaaaaggccaccgatgctgaagccgacgtagcttctctgaacagacgcatccagctggttgaggaagagttggatcgtgcccaggagcgtctggcaacagctttgcagaagctggaggaagctgagaaggcagcagatgagagtgagagaggcatgaaagtcattgagagtcgagcccaaaaagatgaagaaaaaatggaaattcaggagatccaactgaaagaggcaaagcacattgctgaagatgccgaccgcaaatatgaagaggtggcccgtaagctggtcatcattgagagcgacctggaacgtgcagaggagcgggctgagctctcagaaggcaaatgtgccgaagcttgaagaagaattgaaaactgtgacgaacaacttgaagtcactggaggctcaggctgagaagtactcgcagaaggaagacagatatgaggaagagatcaaggtcctttccgacaagctgaaggaggctgagactcgggctgagtttgcggagaggtcagtaactaaattggagaaaagcattgatgacttagaagagaaagtggctcatgccaaagaagaaaaccttagtatgcatcagatgctggatcagactttactggagttaaacaacatgtgaaaacctccttagctgcgaccacattctttcattttgttttgttttgttttgtttttaaacacctgcttaccccttaaatgcaatttatttacttttaccactgtcacagaaacatccacaagataccagctaggtcagggggtggggaaaacacatacaaaaaggcaagcccatgtcagggcgatcctggttcaaatgtgccatttcccgggttgatgctgccacactttgtagagagtttagcaacacagtgtgcttagtcagcgtaggaatcctcactaaagcaggagaagttccattcaaagtgccaatgatagagtcaacaggaaggttaatgttggaaacacaatcaggtgtggattggtgctactttgaacaaaaggtccccctgtggtcttttgttcaacattgtacaatgtagaactctgtccaacactaatttattttgtcttgagttttactacaagatgagactatggatcccgcatgcctgaattcactaaagccaagggtctgtaagccacgctgctcttctgagacttccattcctttctgattggcacacgtgcagctcatgacaatctgtaggataacaatcagtgtggatttccactcttttcagtccttcatgttaaagatttagacaccacatacaactggtaaaggacgttttcttgagagttttaactatatgtaaacattgtataatgatatggaataaaatgcacattgtaggacattttctaaa

SEQ ID NO: 140707 - DNA, 1140 bp, Homo sapiens
  misc_feature (1)..(1): n is a, c, g, or t
naggcggtacggcccggaattatgggatcccgaccgcgcgctcgccccgccgctcctgctgcagccccagggcccctcgccgccgccaccatggacgccatcaagaagaagatgcagatgctgaagctcgacaaggagaacgccttggatcgagctgagcaggcggaggccgacaagaaggcggcggaagacaggagcaagcagctggaagatgagctggtgtcactgcaaaagaaactcaagggcaccgaagatgaactggacaaatactctgaggctctcaaagatgcccaggagaagctggagctggcagagaaaaaggccaccgatgctgaagccgacgtagcttctctgaacagacgcatccagctggttgaggaagagttggatcgtgcccaggagcgtctggcaacagctttgcagaagctggaggaagctgagaaggcagcagatgagagtgagagaggcatgaaagtcattgagagtcgagcccaaaaagatgaagaaaaaatggaaattcaggagatccaactgaaagaggcaaagcacattgctgaagatgccgaccgcaaatatgaagaggtggcccgtaagctggtcatcattgagagcgacctggaacgtgcagaggagcgggctgagctctcagaaggcaaatgtgccgaagcttgaagaagaattgaaaactgtgacgaacaacttgaagtcactggaggctcaggctgagaagtactcgcagaaggaagacagatatgaggaagagatcaaggtcctttccgacaagctgaaggaggctgagactcgggctgagtttgcggagaggtcagtaactaaattggagaaaagcattgatgacttagaagacgagctgtacgctcagaaactgaagtacaaagccatcagcgaggagctggaccacgctctcaacgatatgacttccatataagtttctttgcttcacttctcccaagactccctcgtcgagctggatgtcccacctctctgagctctgcatttgtctattctccagctgaccctggttctctctcttagcatcctgccttagagccaggcacacactgtgctttctattgtacagaagctcttcgtttcagtgtcaaataaacactgtgtaagcta

SEQ ID NO: 140708 - DNA, 1848 bp, Homo sapiens
cagaatctccggcagtttttgtacctcaagaagtaagtggaacacctttccctgtcatagttattttcatccagacatctggtggaagcatcagattccttacagatataagagaggcatcatttaaaaggtagaacaggatcgacaaacaaggatttatgtcaggatctctcagcctctgtgttaccgagggcatttctaacagtcttcttactacggcccgaccgcgcgctcgccccgccgctcctgctgcagccccagggcccctcgccgccgccaccatggacgccatcaagaagaagatgcagatgctgaagctcgacaaggagaacgccttggatcgagctgagcaggcggaggccgacaagaaggcggcggaagacaggagcaagcagctggaagatgagctggtgtcactgcaaaagaaactcaagggcaccgaagatgaactggacaaatactctgaggctctcaaagatgcccaggagaagctggagctggcagagaaaaaggccaccgatgctgaagccgacgtagcttctctgaacagacgcatccagctggttgaggaagagttggatcgtgcccaggagcgtctggcaacagctttgcagaagctggaggaagctgagaaggcagcagatgagagtgagagaggcatgaaagtcattgagagtcgagcccaaaaagatgaagaaaaaatggaaattcaggagatccaactgaaagaggcaaagcacattgctgaagatgccgaccgcaaatatgaagaggtggcccgtaagctggtcatcattgagagcgacctggaacgtgcagaggagcgggctgagctctcagaaggccaagtccgacagctggaagaacaattaagaataatggatcagaccttgaaagcattaatggctgcagaggataagtactcgcagaaggaagacagatatgaggaagagatcaaggtcctttccgacaagctgaaggaggctgagactcgggctgagtttgcggagaggtcagtaactaaattggagaaaagcattgatgacttagaagagaaagtggctcatgccaaagaagaaaaccttagtatgcatcagatgctggatcagactttactggagttaaacaacatgtgaaaacctccttagctgcgaccacattctttcattttgttttgttttgttttgtttttaaacacctgcttaccccttaaatgcaatttatttacttttaccactgtcacagaaacatccacaagataccagctaggtcagggggtggggaaaacacatacaaaaaggcaagcccatgtcagggcgatcctggttcaaatgtgccatttcccgggttgatgctgccacactttgtagagagtttagcaacacagtgtgcttagtcagcgtaggaatcctcactaaagcaggagaagttccattcaaagtgccaatgatagagtcaacaggaaggttaatgttggaaacacaatcaggtgtggattggtgctactttgaacaaaaggtccccctgtggtcttttgttcaacattgtacaatgtagaactctgtccaacactaatttattttgtcttgagttttactacaagatgagactatggatcccgcatgcctgaattcactaaagccaagggtctgtaagccacgctgctcttctgagacttccattcctttctgattggcacacgtgcagctcatgacaatctgtaggataacaatcagtgtggatttccactcttttcagtccttcatgttaaagatttagacaccacatacaacttggttttggcaggttatttttggggggcccggcccactcggcttttccacccgg

SEQ ID NO: 140709 - DNA, 3407 bp, Homo sapiens
  misc_feature (1037)..(1037): n is a, c, g, or t
  misc_feature (1049)..(1049): n is a, c, g, or t
  misc_feature (1056)..(1056): n is a, c, g, or t
  misc_feature (1059)..(1059): n is a, c, g, or t
cagaatctccggcagtttttgtacctcaagaagtaagtggaacacctttccctgtcatagttattttcatccagacatctggtggaagcatcagattccttacagatataagagaggcatcatttaaaaggtagaacaggatcgacaaacaaggatttatgtcaggatctctcagcctctgtgttaccgagggcatttctaacagtcttcttactacggcccgaccgcgcgctcgccccgccgctcctgctgcagccccagggcccctcgccgccgccaccatggacgccatcaagaagaagatgcagatgctgaagctcgacaaggagaacgccttggatcgagctgagcaggcggaggccgacaagaaggcggcggaagacaggagcaagcagctggaagatgagctggtgtcactgcaaaagaaactcaagggcaccgaagatgaactggacaaatactctgaggctctcaaagatgcccaggagaagctggagctggcagagaaaaaggccaccgatgctgaagccgacgtagcttctctgaacagacgcatccagctggttgaggaagagttggatcgtgcccaggagcgtctggcaacagctttgcagaagctggaggaagctgagaaggcagcagatgagagtgagagaggcatgaaagtcattgagagtcgagcccaaaaagatgaagaaaaaatggaaattcaggagatccaactgaaagaggcaaagcacattgctgaagatgccgaccgcaaatatgaagaggtggcccgtaagctggtcatcattgagagcgacctggaacgtgcagaggagcgggctgagctctcagaaggccaagtccgacagctggaagaacaattaagaataatggatcagaccttgaaagcattaatggctgcagaggataagcgcagaaggaagacagatatgaggaagagatcaaggtcctttccgacaagctgaaggaggctgagactcgggctgagtttgcggagaggtcagtaactaaattggagagaagcacantgctgaagatgncgaccgnaantatgaagaggtggcccgtaagctggtcatcattgagagcgacctggaacgtgcagaggagcgggctgagctctcagaaggcaaatgtgccgaagcttgaagaagaattgaaaactgtgacgaacaacttgaagtcactggaggctcaggctgagaagtactcgcagaaggaagacagatatgaggaagagatcaaggtcctttccgacaagctgaaggaggctgagactcgggctgagtttgcggagaggtcagtaactaaattggagaaaagcattgatgacttagaagatcaactctaccagcaacttgagcaaaatcgccgcctcactaatgaactaaagctggccctgaatgaggattaaacttaagagtgaaaaaacttgggctgaattctaggcgtggagcccatgtgcagaaaatctaagactgtcctaccttcaactaatagagttgaaaacagttgctttctgcagaaatgcaaatgcaaggaattggctgaaaggctggccttgcctgcttgtttctctatatggctggaataattacgttctctttaatcacaaaacagcttttatggtagaatacttatatcaattcagcactgctccttgaaatagcaggtcctcttgtttgaactgataaataatgaggagcccccccaaaaaatgttttctatttcctgacagccatgagtcctactttaagtatgtatatatatatatatatattgtgtgtgtgtgtgtgtgtgtgtatatatattcctatcagatactcatattcctaacttctaaatatctggtatagtgtttgaaatatgattaaatgtacctatgcttgggcaaaatagcttttgaaaacaggaactcatgccagaagcccctggttgtctgaaaggtatgctttactcagtctaatggtgctgttggagtctggggagaatgtcatgctaataaatagaacactataaaaatattaagagaatgtcctaatgaagtgtgcatgaaacatgttgacaattttttatgagcaacagaaataaatcattttaaaagttctcagaaaacctatttatgtcatctttgcttttgtgagtttgtgttaccgcacaactcccagacttttaactgcctgtaccttggaaatgtctgctgttcgtaacttcttcagtttgtataacagtgctgcagctgtatttggtttttacctctccctgttcccacggcacaccgtcagtgaaccttcaccaaaccccacgtgcattttatcctcagtgaattgttggtggaggtgcacctgactgctctgtgagaatccgtgccatggctcctttgggtcaaagatgccctcccctccgtcttaggttcttgtctagaaatgagtaatgtcttacaagcatgcctagttctaatcatctcatcctgtgtttgtgattgatgtttgcctgcctaaatgtacaaaccaccattgtgtccaaagcacagctattcatgacttaattttctaatctcaccacagagaaagtggctcatgccaaagaagaaaaccttagtatgcatcagatgctggatcagactttactggagttaaacaacatgtgaaaacctccttagctgcgaccacattctttcattttgttttgttttgttttgtttttaaacacctgcttaccccttaaatgcaatttatttacttttaccactgtcacagaaacatccacaagataccagctaggtcagggggtggggaaaacacatacaaaaaggcaagcccatgtcagggcgatcctggttcaaatgtgccatttcccgggttgatgctgccacactttgtagagagtttagcaacacagtgtgcttagtcagcgtaggaatcctcactaaagcaggagaagttccattcaaagtgccaatgatagagtcaacaggaaggttaatgttggaaacacaatcaggtgtggattggtgctactttgaacaaaaggtccccctgtggtcttttgttcaacattgtacaatgtagaactctgtccaacactaatttattttgtcttgagttttactacaagatgagactatggatcccgcatgcctgaattcactaaagccaagggtctgtaagccacgctgctcttctgagacttccattcctttctgattggcacacgtgcagctcatgacaatctgtaggataacaatcagtgtggatttccactcttttcagtccttcatgttaaagatttagacaccacatacaactggtaaaggacgttttcttgagagttttaactatatgtaaacattgtataatgatatggaataaaatgcacattgtaggacattttctaaa

SEQ ID NO: 140710 - DNA, 1851 bp, Homo sapiens
cagaatctccggcagtttttgtacctcaagaagtaagtggaacacctttccctgtcatagttattttcatccagacatctggtggaagcatcagattccttacagatataagagaggcatcatttaaaaggtagaacaggatcgacaaacaaggatttatgtcaggatctctcagcctctgtgttaccgagggcatttctaacagtcttcttactacggcccgaccgcgcgctcgccccgccgctcctgctgcagccccagggcccctcgccgccgccaccatggacgccatcaagaagaagatgcagatgctgaagctcgacaaggagaacgccttggatcgagctgagcaggcggaggccgacaagaaggcggcggaagacaggagcaagcagctggaagatgagctggtgtcactgcaaaagaaactcaagggcaccgaagatgaactggacaaatactctgaggctctcaaagatgcccaggagaagctggagctggcagagaaaaaggccaccgatgctgaagccgacgtagcttctctgaacagacgcatccagctggttgaggaagagttggatcgtgcccaggagcgtctggcaacagctttgcagaagctggaggaagctgagaaggcagcagatgagagtgagagaggcatgaaagtcattgagagtcgagcccaaaaagatgaagaaaaaatggaaattcaggagatccaactgaaagaggcaaagcacattgctgaagatgccgaccgcaaatatgaagaggtggcccgtaagctggtcatcattgagagcgacctggaacgtgcagaggagcgggctgagctctcagaaggccaagtccgacagctggaagaacaattaagaataatggatcagaccttgaaagcattaatggctgcagaggataagtactcgcagaaggaagacagatatgaggaagagatcaaggtcctttccgacaagctgaaggaggctgagactcgggctgagtttgcggagaggtcagtaactaaattggagaaaagcattgatgacttagaagagaaagtggctcatgccaaagaagaaaaccttagtatgcatcagatgctggatcagactttactggagttaaacaacatgtgaaaacctccttagctgcgaccacattctttcattttgttttgttttgttttgtttttaaacacctgcttaccccttaaatgcaatttatttacttttaccactgtcacagaaacatccacaagataccagctaggtcagggggtggggaaaacacatacaaaaaggcaagcccatgtcagggcgatcctggttcaaatgtgccatttcccgggttgatgctgccacactttgtagagagtttagcaacacagtgtgcttagtcagcgtaggaatcctcactaaagcaggagaaggaaggttaatgttggaaacacaatcaggtgtggattggtgctactttgaacaaaaggtccccctgtggtcttttgttcaacattgtacaatgtagaactctgtccaacactaatttattttgtcttgagttttactacaagatgagactatggatcccgcatgcctgaattcactaaagccaagggtctgtaagccacgctgctcttctgagacttccattcctttctgattggcacacgtgcagctcatgacaatctgtaggataacaatcagtgtggatttccactcttttcagtccttcatgttaaagatttagacaccacatacaactggtaaaggacgttttcttgagagttttaactatatgtaaacattgtataatgatatggaataaaatgcacattgtaggacattttctaaa

SEQ ID NO: 140711 - DNA, 2892 bp, Homo sapiens
  misc_feature (1)..(1): n is a, c, g, or t
naggcggtacggcccggaattatgggatcccgaccgcgcgctcgccccgccgctcctgctgcagccccagggcccctcgccgccgccaccatggacgccatcaagaagaagatgcagatgctgaagctcgacaaggagaacgccttggatcgagctgagcaggcggaggccgacaagaaggcggcggaagacaggagcaagcagctggaagatgagctggtgtcactgcaaaagaaactcaagggcaccgaagatgaactggacaaatactctgaggctctcaaagatgcccaggagaagctggagctggcagagaaaaaggccaccgatgctgaagccgacgtagcttctctgaacagacgcatccagctggttgaggaagagttggatcgtgcccaggagcgtctggcaacagctttgcagaagctggaggaagctgagaaggcagcagatgagagtgagagaggcatgaaagtcattgagagtcgagcccaaaaagatgaagaaaaaatggaaattcaggagatccaactgaaagaggcaaagcacattgctgaagatgccgaccgcaaatatgaagaggtggcccgtaagctggtcatcattgagagcgacctggaacgtgcagaggagcgggctgagctctcagaaggcaaatgtgccgaagcttgaagaagaattgaaaactgtgacgaacaacttgaagtcactggaggctcaggctgagaagtactcgcagaaggaagacagatatgaggaagagatcaaggtcctttccgacaagctgaaggaggctgagactcgggctgagtttgcggagaggtcagtaactaaattggagaaaagcattgatgacttagaagacgagctgtacgctcagaaactgaagtacaaagccatcagcgaggagctggaccacgctctcaacgatatgacttccatgtaaacgttcatccactctgcctgcttacaccctgccctcatgctaatgtaataaactcaccaccatgccttccttgctccctaatctccatctttgcactcttgtgttcaccctttttgtcataacctagaatagtcattgttttttcactttctgctaatataaaggccaattagattaagtctgtctatacaaaccattttcttttcagaatccgtttattttgtaaacgctgaactagagcagtgaactagaatgagtgaccttgagcactgtccttttgggaaattaagctaaactcaagtaaaactagaaggccatgccgtttgttgtacaggaacttctcaaaaaatatcaaaatttgtttcctgaaattcaactaagtacaacataatcattttcgttaaatataatttgaaggaacccttaaagtgtcaggttattgagaatctgaggataaggaaattggcatgatccaatacagctttaacagtggtactacaaaagatcatctcttttacttttaagaattctagagtaggccgggcacagtggctcacgcctgtaatcccagcactttgggaggccgaggcgggcggatcacgaggtcaggagattgagaccatcctggctaacacggtgaaaccctgtctctactaaaaatacaaaaaaaattagccgggcgtggtggtggatgcctgtagtcccagctactcaggaggctgaggcaggagaatggcatgaacccgggaggtggagcttgcagtcagccgagatcgcaccaccgcactccagcctggacgacagagcgagactctgtctcaagaaaaaaaagaatggtagagtaaaaagaaccctctgctgagtaaccaagcctttaattttgtgtttttatgaaaggaattaaaatacccacgataaatatttaccacaacctgtgtcaaataaatgggaaattaaacacagattgtacaatgtgagcttgggagttaatggcccagattttactgttaggcagtaagagttggagtaggtagtcttgttatcatgagaagaaccttgaacagatacaactaatttacatattactaaccaaacttaaacattaaactttttctactactttaaattctaacctggaatgtttcagagttcttcattctaatatcaccctgaattccattgaagctggaaatgtcattttccaagcccacctgtcattcatttacccatgcagaaaaaatggtaacttgaagagagtggcatgtgcctgctgccttagaggttatagaatccccacagtcaacaaaaaagcctctagagacatgactgttgccatggaaaccagagaaaatgtgtcttctcatccctcatttgtaaatgagggggtggagcagatcatctgtctctaaggtctttttcagtgctaaaatgtggtgattctttgggaaaaactttttgcatcaagtatgattaaatattctgaaagacgagtgtagcttaaaatttgttttgtttttaaattctgttcatgggtcttcttaaaatggacccttgccgaaaggcggcctgtgacggcctcaggtgggaagatggatgtccttccaagggtgtggctggcagtggggtttgcatgactgcttcttgtctgtgtttcaagtgctctcatctattggtttggtttcctttcttttttttttttttctcattgtgccactttttttttcctcccacctttttatcttcacgcaataagtttctttgcttcacttctcccaagactccctcgtcgagctggatgtcccacctctctgagctctgcatttgtctattctccagctgaccctggttctctctcttagcatcctgccttagagccaggcacacactgtgctttctattgtacagaagctcttcgtttcagtgtcaaataaacactgtgtaagcta

SEQ ID NO: 140712 - DNA, 1437 bp, Homo sapiens
cagaatctccggcagtttttgtacctcaagaagtaagtggaacacctttccctgtcatagttattttcatccagacatctggtggaagcatcagattccttacagatataagagaggcatcatttaaaaggtagaacaggatcgacaaacaaggatttatgtcaggatctctcagcctctgtgttaccgagggcatttctaacagtcttcttactacggcccgaccgcgcgctcgccccgccgctcctgctgcagccccagggcccctcgccgccgccaccatggacgccatcaagaagaagatgcagatgctgaagctcgacaaggagaacgccttggatcgagctgagcaggcggaggccgacaagaaggcggcggaagacaggagcaagcagctcgaggaggacatcgcggccaaggagaagttgctgcgggtgtcggaggacgagcgggaccgggtgctggaggagctgcacaaggcggaggacagcctcctggccgccgaagaggccgccgccaaggtacccggggcgcgcggcacggcgtggcgcacgaatggctaactctttctctttctctctctccctccctgtctttccctctgtctctcccgctgtccctgtccttctggttctgtgcacccacacccctccccttcgggatcacgctgcctgctgcacccccctccctccctgtaccccctggccaactcccagctggaagatgagctggtgtcactgcaaaagaaactcaagggcaccgactgaacagacgcatccagctggttgaggaagagttggatcgtgcccaggagcgtctggcaacagctttgcagaagctggaggaagctgagaaggcagcagatgagagtgagagaggcatgaaagtcattgagagtcgagcccaaaaagatgaagaaaaaatggaaattcaggagatccaactgaaagcaaatgtgccgaagcttgaagaagaattgaaaactgtgacgaacaacttgaagtcactggaggctcaggctgagaagtactcgcagaaggaagacagatatgaggaagagatcaaggtcctttccgacaagctgaaggaggctgagactcgggctgagtttgcggagaggtcagtaactaaattggagaaaagcattgatgacttagaagacgagctgtacgctcagaaactgaagtacaaagccatcagcgaggagctggaccacgctctcaacgatatgacttccatataagtttctttgcttcacttctcccaagactccctcgtcgagctggatgtcccacctctctgagctctgcatttgtctattctccagctgaccctggttctctctcttagcatcctgccttagagccaggcacacactgtgctttctattgtacagaagctcttcgtttcagtgtcaaataaacactgtgtaagcta

SEQ ID NO: 140713 - DNA, 1061 bp, Homo sapiens
  misc_feature (1)..(1): n is a, c, g, or t
naggcggtacggcccggaattatgggatcccgaccgcgcgctcgccccgccgctcctgctgcagccccagggcccctcgccgccgccaccatggacgccatcaagaagaagatgcagatgctgaagctcgacaaggagaacgccttggatcgagctgagcaggcggaggccgacaagaaggcggcggaagacaggagcaagcagctggaagatgagctggtgtcactgcaaaagaaactcaagggcaccgaagatgaactggacaaatactctgaggctctcaaagatgcccaggagaagctggagctggcagagaaaaaggccaccgatgctgaagccgacgtagcttctctgaacagacgcatccagctggttgaggaagagttggatcgtgcccaggagcgtctggcaacagctttgcagaagctggaggaagctgagaaggcagcagatgagagtgagagaggcatgaaagtcattgagagtcgagcccaaaaagatgaagaaaaaatggaaattcaggagatccaactgaaagaggcaaagcacattgctgaagatgccgaccgcaaatatgaagaggtggcccgtaagctggtcatcattgagagcgacctggaacgtgcagaggagcgggctgagctctcagaaggcaaatgtgccgaagcttgaagaagaattgaaaactgtgacgaacaacttgaagtcactggaggctcaggctgagaagtactcgcagaaggaagacagatatgaggaagagatcaaggtcctttccgacaagctgaaggaggctgagactcgggctgagtttgcggagaggtcagtaactaaattggagaaaagcattgatgacttagaagataagtttctttgcttcacttctcccaagactccctcgtcgagctggatgtcccacctctctgagctctgcatttgtctattctccagctgaccctggttctctctcttagcatcctgccttagagccaggcacacactgtgctttctattgtacagaagctcttcgtttcagtgtcaaataaacactgtgtaagcta

SEQ ID NO: 140714 - DNA, 1465 bp, Homo sapiens
  misc_feature (1)..(1): n is a, c, g, or t
naggcggtacggcccggaattatgggatcccgaccgcgcgctcgccccgccgctcctgctgcagccccagggcccctcgccgccgccaccatggacgccatcaagaagaagatgcagatgctgaagctcgacaaggagaacgccttggatcgagctgagcaggcggaggccgacaagaaggcggcggaagacaggagcaagcagctggaagatgagctggtgtcactgcaaaagaaactcaagggcaccgaagatgaactggacaaatactctgaggctctcaaagatgcccaggagaagctggagctggcagagaaaaaggccaccgatgctgaagccgacgtagcttctctgaacagacgcatccagctggttgaggaagagttggatcgtgcccaggagcgtctggcaacagctttgcagaagctggaggaagctgagaaggcagcagatgagagtgagagaggcatgaaagtcattgagagtcgagcccaaaaagatgaagaaaaaatggaaattcaggagatccaactgaaagaggcaaagcacattgctgaagatgccgaccgcaaatatgaagaggtggcccgtaagctggtcatcattgagagcgacctggaacgtgcagaggagcgggctgagctctcagaaggcaaatgtgccgaagcttgaagaagaattgaaaactgtgacgaacaacttgaagtcactggaggctcaggctgagaagtactcgcagaaggaagacagatatgaggaagagatcaaggtcctttccgacaagctgaaggaggctgagactcgggctgagtttgcggagaggtcagtaactaaattggagaaaagcattgatgacttagaaggtaagatcttaagtagtgtttttagtttaatccttatggttgaataccaacctggcaaaacaattttccaattcaagggcatccacattgatacgctcctttgcacttgcacattcttcctgtgtgtcctctggggtttttctctgtggctcttgaactcatgaacctaagtcttctgctcacgaggtgactagttagccaccagccatagtggcaaatgccatccagcttgacttcatgctcattagaagtgtggcaggtttatttttcactgtgagtgaggtgcttattggtgagaatgactctagtatattttatatctttagtgttacttcctaattaaattgggaatgatgtggtgattgtggtcttgtttttagaagaacccatcttcttccaagtatgaattcaaagtaaggatttaggggttattttaagtcatatattatcttaacaaaatactttatatcctgaaggaggagggaaaaattatacttaagcatttcttccctaaggcacttaggttttattttagtaataaccactctatctcacagatatcctaaatgttgagctttgaagcttgtgaaggattagctgtg

SEQ ID NO: 140715 - DNA, 1378 bp, Homo sapiens
cagaatctccggcagtttttgtacctcaagaagtaagtggaacacctttccctgtcatagttattttcatccagacatctggtggaagcatcagattccttacagatataagagaggcatcatttaaaaggtagaacaggatcgacaaacaaggatttatgtcaggatctctcagcctctgtgttaccgagggcatttctaacagtcttcttactacggcccgaccgcgcgctcgccccgccgctcctgctgcagccccagggcccctcgccgccgccaccatggacgccatcaagaagaagatgcagatgctgaagctcgacaaggagaacgccttggatcgagctgagcaggcggaggccgacaagaaggcggcggaagacaggagcaagcagctggaagatgagctggtgtcactgcaaaagaaactcaagggcaccgaagatgaactggacaaatactctgaggctctcaaagatgcccaggagaagctggagctggcagagaaaaaggccaccgatgctgaagccgacgtagcttctctgaacagacgcatccagctggttgaggaagagttggatcgtgcccaggagcgtctggcaacagctttgcagaagctggaggaagctgagaaggcagcagatgagagtgagagaggcatgaaagtcattgagagtcgagcccaaaaagatgaagaaaaaatggaaattcaggagatccaactgaaagaggcaaagcacattgctgaagatgccgaccgcaaatatgaagaggtggcccgtaagctggtcatcattgagagcgacctggaacgtgcagaggagcgggctgagctctcagaaggccaagtccgacagctggaagaacaattaagaataatggatcagaccttgaaagcattaatggctgcagaggataagtactcgcagaaggaagacagatatgaggaagagatcaaggtcctttccgacaagctgaaggaggctgagactcgggctgagtttgcggagaggtcagtaactaaattggagaaaagcattgatgacttagaagacgagctgtacgctcagaaactgaagtacaaagccatcagcgaggagctggaccacgctctcaacgatatgacttccatgtaaacgttcatccactctgcctgcttacaccctgccctcatgctaatataagtttctttgcttcacttctcccaagactccctcgtcgagctggatgtcccacctctctgagctctgcatttgtctattctccagctgaccctggttctctctcttagcatcctgccttagagccaggcacacactgtgctttctattgtacagaagctcttcgtttcagtgtcaaataaacactgtgtaagcta

SEQ ID NO: 140716 - DNA, 836 bp, Homo sapiens
  misc_feature (1)..(1): n is a, c, g, or t
  misc_feature (808)..(808): n is a, c, g, or t
naggcggtacggcccggaattatgggatcccgaccgcgcgctcgccccgccgctcctgctgcagccccagggcccctcgccgccgccaccatggacgccatcaagaagaagatgcagatgctgaagctcgacaaggagaacgccttggatcgagctgagcaggcggaggccgacaagaaggcggcggaagacaggagcaagcagctggaagatgagctggtgtcactgcaaaagaaactcaagggcaccgaagatgaactggacaaatactctgaggctctcaaagatgcccaggagaagctggagctggcagagaaaaaggccaccgatgctgaagccgacgtagcttctctgaacagacgcatccagctggttgaggaagagttggatcgtgcccaggagcgtctggcaacagctttgcagaagctggaggaagctgagaaggcagcagatgagagtgagagaggcatgaaagtcattgagagtcgagcccaaaaagatgaagaaaaaatggaaattcaggagatccaactgaaagaggcaaagcacattgctgaagatgccgaccgcaaatatgaagaggtggcccgtaagctggtcatcattgagagcgacctggaacgtgcagaggagcgggctgagctctcagaaggcaaatgtgccgaagcttgaagaagaattgaaaactgtgacgaacaacttgaagtcactggaggctcaggctgagaagtatcgcagaggaagcagttgaggaggtcagtccttccgcagtgaggagctggctcggtggttgcgggagtcatactanttggaagcttgtgcttgagcggcttcgt

SEQ ID NO: 140717 - DNA, 801 bp, Homo sapiens
  misc_feature (1)..(1): n is a, c, g, or t
naggcggtacggcccggaattatgggatcccgaccgcgcgctcgccccgccgctcctgctgcagccccagggcccctcgccgccgccaccatggacgccatcaagaagaagatgcagatgctgaagctcgacaaggagaacgccttggatcgagctgagcaggcggaggccgacaagaaggcggcggaagacaggagcaagcagctggaagatgagctggtgtcactgcaaaagaaactcaagggcaccgaagatgaactggacaaatactctgaggctctcaaagatgcccaggagaagctggagctggcagagaaaaaggccaccgatgctgaagccgacgtagcttctctgaacagacgcatccagctggttgaggaagagttggatcgtgcccaggagcgtctggcaacagctttgcagaagctggaggaagctgagaaggcagcagatgagagtgagagaggcatgaaagtcattgagagtcgagcccaaaaagatgaagaaaaaatggaaattcaggagatccaactgaaagaggcaaagcacattgctgaagatgccgaccgcaaatatgaagaggtggcccgtaagctggtcatcattgagagcgacctggaacgtgcagaggagcgggctgagctctcagaaggcaaatgtgccgaagcttgaagaagaattgaaaactgtgacgaacaacttgaagtcactggaggctcaggctgagaagctcgcagaaggagacagatttgtggagagattccggtcctttcccacgatttgggggactttcacactaca

SEQ ID NO: 140718 - DNA, 1191 bp, Homo sapiens
cagaatctccggcagtttttgtacctcaagaagtaagtggaacacctttccctgtcatagttattttcatccagacatctggtggaagcatcagattccttacagatataagagaggcatcatttaaaaggtagaacaggatcgacaaacaaggatttatgtcaggatctctcagcctctgtgttaccgagggcatttctaacagtcttcttactacggcccgaccgcgcgctcgccccgccgctcctgctgcagccccagggcccctcgccgccgccaccatggacgccatcaagaagaagatgcagatgctgaagctcgacaaggagaacgccttggatcgagctgagcaggcggaggccgacaagaaggcggcggaagacaggagcaagcagctggaagatgagctggtgtcactgcaaaagaaactcaagggcaccgaagatgaactggacaaatactctgaggctctcaaagatgcccaggagaagctggagctggcagagaaaaaggccaccgatgctgaagccgacgtagcttctctgaacagacgcatccagctggttgaggaagagttggatcgtgcccaggagcgtctggcaacagctttgcagaagctggaggaagctgagaaggcagcagatgagagtgagagaggcatgaaagtcattgagagtcgagcccaaaaagatgaagaaaaaatggaaattcaggagatccaactgaaagaggcaaagcacattgctgaagatgccgaccgcaaatatgaagaggtggcccgtaagctggtcatcattgagagcgacctggaacgtgcagaggagcgggctgagctctcagaaggccaagtccgacagctggaagaacaattaagaataatggatcagaccttgaaagcattaatggctgcagaggataagtactcgcagaaggaagacagatatgaggaagagatcaaggtcctttccgacaagctgaaggaggctgagactcgggctgagtttgcggagaggtcagtaactaaattggagaaaagcattgatgacttagaagacgagctgtacgctcagaaactgaagtacaaagccatcagcgaggagctggaccacgctctcaacgatatgacttccatgtaaacgttcatccactctgcctgctgggtcagcatttgtcctgggttcccttgtgtga

SEQ ID NO: 140719 - DNA, 753 bp, Homo sapiens
  misc_feature (1)..(1): n is a, c, g, or t
  misc_feature (654)..(654): n is a, c, g, or t
  misc_feature (661)..(661): n is a, c, g, or t
  misc_feature (663)..(663): n is a, c, g, or t
naggcggtacggcccggaattatgggatcccgaccgcgcgctcgccccgccgctcctgctgcagccccagggcccctcgccgccgccaccatggacgccatcaagaagaagatgcagatgctgaagctcgacaaggagaacgccttggatcgagctgagcaggcggaggccgacaagaaggcggcggaagacaggagcaagcagctggaagatgagctggtgtcactgcaaaagaaactcaagggcaccgaagatgaactggacaaatactctgaggctctcaaagatgcccaggagaagctggagctggcagagaaaaaggccaccgatgctgaagccgacgtagcttctctgaacagacgcatccagctggttgaggaagagttggatcgtgcccaggagcgtctggcaacagctttgcagaagctggaggaagctgagaaggcagcagatgagagtgagagaggcatgaaagtcattgagagtcgagcccaaaaagatgaagaaaaaatggaaattcaggagatccaactgaaagaggcaaagcacattgctgaagatgccgaccgcaaatatgaagaggtggcccgtaagctggtcatcattgagagcgacctggaacgtgcagaggagcgggctgagctctcagaaggnaaatgtncnagcttgagaggattaaactttacgacactgagtacttgagctagctagagtcttgagaggagcagatttggaggccttgcctttccgcaa

SEQ ID NO: 140720 - DNA, 1160 bp, Homo sapiens
cagaatctccggcagtttttgtacctcaagaagtaagtggaacacctttccctgtcatagttattttcatccagacatctggtggaagcatcagattccttacagatataagagaggcatcatttaaaaggtagaacaggatcgacaaacaaggatttatgtcaggatctctcagcctctgtgttaccgagggcatttctaacagtcttcttactacggcccgaccgcgcgctcgccccgccgctcctgctgcagccccagggcccctcgccgccgccaccatggacgccatcaagaagaagatgcagatgctgaagctcgacaaggagaacgccttggatcgagctgagcaggcggaggccgacaagaaggcggcggaagacaggagcaagcagctggaagatgagctggtgtcactgcaaaagaaactcaagggcaccgaagatgaactggacaaatactctgaggctctcaaagatgcccaggagaagctggagctggcagagaaaaaggccaccgatgctgaagccgacgtagcttctctgaacagacgcatccagctggttgaggaagagttggatcgtgcccaggagcgtctggcaacagctttgcagaagctggaggaagctgagaaggcagcagatgagagtgagagaggcatgaaagtcattgagagtcgagcccaaaaagatgaagaaaaaatggaaattcaggagatccaactgaaagaggcaaagcacattgctgaagatcaaatgtgccgaagcttgaagaagaattgaaaactgtgacgaacaacttgaagtcactggaggctcaggctgagaagtactcgcagaaggaagacagatatgaggaagagatcaaggtcctttccgacaagctgaaggaggctgagactcgggctgagtttgcggagaggtcagtaactaaattggagaaaagcattgatgacttagaagataagtttctttgcttcacttctcccaagactccctcgtcgagctggatgtcccacctctctgagctctgcatttgtctattctccagctgaccctggttctctctcttagcatcctgccttagagccaggcacacactgtgctttctattgtacagaagctcttcgtttcagtgtcaaataaacactgtgtaagcta

SEQ ID NO: 140721 - DNA, 825 bp, Homo sapiens
cagaatctccggcagtttttgtacctcaagaagtaagtggaacacctttccctgtcatagttattttcatccagacatctggtggaagcatcagattccttacagatataagagaggcatcatttaaaaggtagaacaggatcgacaaacaaggatttatgtcaggatctctcagcctctgtgttaccgagggcatttctaacagtcttcttactacggcccgaccgcgcgctcgccccgccgctcctgctgcagccccagggcccctcgccgccgccaccatggacgccatcaagaagaagatgcagatgctgaagctcgacaaggagaacgccttggatcgagctgagcaggcggaggccgacaagaaggcggcggaagacaggagcaagcagctggaagatgagctggtgtcactgcaaaagaaactcaagggcaccgaagatgaactggacaaatactctgaggctctcaaagatgcccaggagaagctggagctggcagagaaaaaggccaccgatgctgaagccgacgtagcttctctgaacagacgcatccagctggttgaggaagagttggatcgtgcccaggagcgtctggcaacagctttgcagaagctggaggaagctgagaaggcagcagatgagagtgagagaggcatgaaagtcattgagagtcgagcccaaaaagatctctgcatttgtctattctccagctgaccctggttctctctcttagcatcctgccttagagccaggcacacactgtgctttctattgtacagaagctcttcgtttcagtgtcaaataaacactgtgtaagcta

SEQ ID NO: 140722 - DNA, 1073 bp, Homo sapiens
cagaatctccggcagtttttgtacctcaagaagtaagtggaacacctttccctgtcatagttattttcatccagacatctggtggaagcatcagattccttacagatataagagaggcatcatttaaaaggtagaacaggatcgacaaacaaggatttatgtcaggatctctcagcctctgtgttaccgagggcatttctaacagtcttcttactacggcccgaccgcgcgctcgccccgccgctcctgctgcagccccagggcccctcgccgccgccaccatggacgccatcaagaagaagatgcagatgctgaagctcgacaaggagaacgccttggatcgagctgagcaggcggaggccgacaagaaggcggcggaagacaggagcaagcagctggaagatgagctggtgtcactgcaaaagaaactcaagggcaccgaagatgaactggacaaatactctgaggctctcaaagatgcccaggagaagctggagctggcagagaaaaaggccaccgatgctgaagccgacgtagcttctctgaacagacgcatccagctggttgaggaagagttggatcgtgcccaggagcgtctggcaacagctttgcagaagctggaggaagctgagaaggcagcagatgagagtgagaggtgagaatgcctcatcagccatcttttgcagctgcctttcctggtggaataaaccggagggctcctgtgatctttgaggtttaagaatttttcagtcccctggtggtgggatcatttcctctattgatcccaggtataactcggttggttttgttcatttagcattagtgaaacacctactatgtccaaagcactgtcctaagccctaaggttacaaagaagaagatgatcttgttcctgcccttatagaactcaccatctaatgagggagacagacatgtaaaggagaaatgtcagggatacaagttggccctttcactcctactgaccacagagcaattgtgcattttttaaagtgtaactttattttataatatacaaggaggcttaggtgtaaataaaggaactgtggactaaa

SEQ ID NO: 140723 - DNA, 640 bp, Homo sapiens
cagaatctccggcagtttttgtacctcaagaagtaagtggaacacctttccctgtcatagttattttcatccagacatctggtggaagcatcagattccttacagatataagagaggcatcatttaaaaggtagaacaggatcgacaaacaaggatttatgtcaggatctctcagcctctgtgttaccgagggcatttctaacagtcttcttactacggcccgaccgcgcgctcgccccgccgctcctgctgcagccccagggcccctcgccgccgccaccatggacgccatcaagaagaagatgcagatgctgaagctcgacaaggagaacgccttggatcgagctgagcaggcggaggccgacaagaaggcggcggaagacaggagcaagcaggtctgcgcctccccggccctgcgcccgcgcccagagcgccgggactcgagcctggcacccccggctggatccccaccccgaggactcggggagccaccaccctacccccaccaccacccagggcggccagggcgcgcgtctggaaagaaggaagggaaacgcaagagccaggcttagtctaacttagtctggtctgaggacgcttatttcccttctctggttcccatggcccgcgaaatcaagtc

SEQ ID NO: 140724 - DNA, 310 bp, Homo sapiens
tattccttcaaggcgtagaagaacaactcggaagctctaattctgagaacccaggcgtccgagcaggccaggtgcagcatccactgctagagaagcccaatgacgccctatataagagtcgtatgacacacttctcccaagactccctcgtcgagctggatgtcccacctctctgagctctgcatttgtctattctccagctgaccctggttctctctcttagcatcctgccttagagccaggcacacactgtgctttctattgtacagaagctcttcgtttcagtgtcaaataaacactgtgtaagcta

SEQ ID NO: 140725 - DNA, 1802 bp, Homo sapiens
gagaggaggaaggggggcaggagaaaaaagcttttccaaaaaagtattggctgtcttgaggaatgcggtcgcccccttgggaaagtacatatctgggagaagcaggcggctccgcgctcgcactcccgctcctccgcccgaccgcgcgctcgccccgccgctcctgctgcagccccagggcccctcgccgccgccaccatggacgccatcaagaagaagatgcagatgctgaagctcgacaaggagaacgccttggatcgagctgagcaggcggaggccgacaagaaggcggcggaagacaggagcaagcagctcgaggaggacatcgcggccaaggagaagttgctgcgggtgtcggaggacgagcgggaccgggtgctggaggagctgcacaaggcggaggacagcctcctggccgccgaagaggccgccgccaaggctgaagccgacgtagcttctctgaacagacgcatccagctggttgaggaagagttggatcgtgcccaggagcgtctggcaacagctttgcagaagctggaggaagctgagaaggcagcagatgagagtgagagaggcatgaaagtcattgagagtcgagcccaaaaagatgaagaaaaaatggaaattcaggagatccaactgaaagaggcaaagcacattgctgaagatgccgaccgcaaatatgaagaggtggcccgtaagctggtcatcattgagagcgacctggaacgtgcagaggagcgggctgagctctcagaaggcaaatgtgccgaagcttgaagaagaattgaaaactgtgacgaacaacttgaagtcactggaggctcaggctgagaagtactcgcagaaggaagacagatatgaggaagagatcaaggtcctttccgacaagctgaaggaggctgagactcgggctgagtttgcggagaggtcagtaactaaattggagaaaagcattgatgacttagaagagaaagtggctcatgccaaagaagaaaaccttagtatgcatcagatgctggatcagactttactggagttaaacaacatgtgaaaacctccttagctgcgaccacattctttcattttgttttgttttgttttgtttttaaacacctgcttaccccttaaatgcaatttatttacttttaccactgtcacagaaacatccacaagataccagctaggtcagggggtggggaaaacacatacaaaaaggcaagcccatgtcagggcgatcctggttcaaatgtgccatttcccgggttgatgctgccacactttgtagagagtttagcaacacagtgtgcttagtcagcgtaggaatcctcactaaagcaggagaagttccattcaaagtgccaatgatagagtcaacaggaaggttaatgttggaaacacaatcaggtgtggattggtgctactttgaacaaaaggtccccctgtggtcttttgttcaacattgtacaatgtagaactctgtccaacactaatttattttgtcttgagttttactacaagatgagactatggatcccgcatgcctgaattcactaaagccaagggtctgtaagccacgctgctcttctgagacttccattcctttctgattggcacacgtgcagctcatgacaatctgtaggataacaatcagtgtggatttccactcttttcagtccttcatgttaaagatttagacaccacatacaactggtaaaggacgttttcttgagagttttaactatatgtaaacattgtataatgatatggaataaaatgcacattgtaggacattttctaaa

SEQ ID NO: 140726 - DNA, 734 bp, Homo sapiens
atggatgttcactgtataaatcaatgtgtaaatgtgtccgagaactccagagttgatgagggcttgtaatgcacttaaaggtagctcaccacaagacagtcttcctatctaaaatcagcattgcagtcccagccatttcctgaagctaccaccctcactttctccccaactctgaaatgcttttcactctctacctagctgaagccgacgtagcttctctgaacagacgcatccagctggttgaggaagagttggatcgtgcccaggagcgtctggcaacagctttgcagaagctggaggaagctgagaaggcagcagatgagagtgagagaggcatgaaagtcattgagagtcgagcccaaaaagatgaagaaaaaatggaaattcaggagatccaactgaaagaggcaaagcacattgctgaagatgccgaccgcaaatatgaagaggtcagatcctggggcccaaagccttgtggacacccagcagtggccttcaggaagccagggagcaatgtacagtcttgattcccgagtgaggccatctgctttgttggcagaaatgggtggttttgagaagcagagttcctttgtgtccagaaaacggttctaattttaatcctgctaggggatcccaggctttatcaggaagccaatcagtagcactgcgaagaaggaccaaaactcctctcccccagccacaaagacccggacaaaagatctttggccggaagg

SEQ ID NO: 140727 - DNA, 759 bp, Homo sapiens
gcctttcggccggaaccgccatcttccagtaattcgccaaaatgacgaacacaaagggaaagaggagaggcacccgatatatgttctctaggccttttagaaaacatggagttgttcctttggccacatatatgcgaatctataagaaaggtgatattgtagacatcaagggaatgggtactgttcaaaaaggaatgccccacaagtgttaccatggcaaaactggaagagtctacaatgttacccagcatgctgttggcattgttgtaaacaaacaagttaagggcaagattcttgccaagagaattaatgtgcgtattgagcacattaagcactctaagagccgagatagcttcctgaaacgtgtgaaggaaaatgattagaaaaagaaagaagccaaagagaaaggtacctgagctctcagaaggcaaatgtgccgaagcttgaagaagaattgaaaactgtgacgaacaacttgaagtcactggaggctcaggctgagaagtactcgcagaaggaagacagatatgaggaagagatcaaggtcctttccgacaagctgaaggaggctgagactcgggctgagtttgcggagaggtcagtaactaaattggagaaaagcattgatgacttagaagagagtgtaggtcagaactgaagtacaaagcatcaggaggagctggacacgtttcaagatttgattccaattagttcttggttcatttttccaagattcctcggtgagtggtgtgtccttta

SEQ ID NO: 140728 - DNA, 1884 bp, Homo sapiens
cagaatctccggcagtttttgtacctcaagaagtaagtggaacacctttccctgtcatagttattttcatccagacatctggtggaagcatcagattccttacagatataagagaggcatcatttaaaaggtagaacaggatcgacaaacaaggatttatgtcaggatctctcagcctctgtgttaccgagggcatttctaacagtcttcttactacggcccgaccgcgcgctcgccccgccgctcctgctgcagccccagggcccctcgccgccgccaccatggacgccatcaagaagaagatgcagatgctgaagctcgacaaggagaacgccttggatcgagctgagcaggcggaggccgacaagaaggcggcggaagacaggagcaagcagctggaagatgagctggtgtcactgcaaaagaaactcaagggcaccgaagatgaactggacaaatactctgaggctctcaaagatgcccaggagaagctggagctggcagagaaaaaggccaccgatgctgaagccgacgtagcttctctgaacagacgcatccagctggttgaggaagagttggatcgtgcccaggagcgtctggcaacagctttgcagaagctggaggaagctgagaaggcagcagatgagagtgagagaggcatgaaagtcattgagagtcgagcccaaaaagatgaagaaaaaatggaaattcaggagatccaactgaaagaggcaaagcacattgctgaagatgccgaccgcaaatatgaagaggtggcccgtaagctggtcatcattgagagcgacctggaacgtgcagaggagcgggctgagctctcagaaggccaagtccgacagctggaagaacaattaagaataatggatcagaccttgaaagcattaatggctgcagaggataagtactcgcagaaggaagacagatatgaggaagagatcaaggtcctttccgacaagctgaaggaggctgagactcgggctgagtttgcggagaggtcagtaactaaattggagaaaagcattgatgacttagaagagaaagtggctcatgccaaagaagaaaaccttagtatgcatcagatgctggatcagactttactggagttaaacaacatgtgaaaacctccttagctgcgaccacattctttcattttgttttgttttgttttgtttttaaacacctgcttaccccttaaatgcaatttatttacttttaccactgtcacagaaacatccacaagataccagctaggtcagggggtggggaaaacacatacaaaaaggcaagcccatgtcagggcgatcctggttcaaatgtgccatttcccgggttgatgctgccacactttgtagagagtttagcaacacagtgtgcttagtcagcgtaggaatcctcactaaagcaggagaagttccattcaaagtgccaatgatagagtcaacaggaaggttaatgttggaaacacaatcaggtgtggattggtgctactttgaacaaaaggtccccctgtggtcttttgttcaacattgtacaatgtagaactctgtccaacactaatttattttgtcttgagttttactacaagatgagactatggatcccgcatgcctgaattcactaaagccaagggtctgtaagccacgctgctcttctgagacttccattcctttctgattggcacacgtgcagctcatgacaatctgtaggataacaatcagtgtggatttccactcttttcagtccttcatgttaaagatttagacaccacatacaactggtaaaggacgttttcttgagagttttaactatatgtaaacattgtataatgatatggaataaaatgcacattgtaggacattttctaaa

SEQ ID NO: 140729 - DNA, 2205 bp, Homo sapiens
cagaatctccggcagtttttgtacctcaagaagtaagtggaacacctttccctgtcatagttattttcatccagacatctggtggaagcatcagattccttacagatataagagaggcatcatttaaaaggtagaacaggatcgacaaacaaggatttatgtcaggatctctcagcctctgtgttaccgagggcatttctaacagtcttcttactacggcccgaccgcgcgctcgccccgccgctcctgctgcagccccagggcccctcgccgccgccaccatggacgccatcaagaagaagatgcagatgctgaagctcgacaaggagaacgccttggatcgagctgagcaggcggaggccgacaagaaggcggcggaagacaggagcaagcagctcgaggaggacatcgcggccaaggagaagttgctgcgggtgtcggaggacgagcgggaccgggtgctggaggagctgcacaaggcggaggacagcctcctggccgccgaagaggccgccgccaaggtacccggggcgcgcggcacggcgtggcgcacgaatggctaactctttctctttctctctctccctccctgtctttccctctgtctctcccgctgtccctgtccttctggttctgtgcacccacacccctccccttcgggatcacgctgcctgctgcacccccctccctccctgtaccccctggccaactcccagctggaagatgagctggtgtcactgcaaaagaaactcaagggcaccgaagatgaactggacaaatactctgaggctctcaaagatgcccaggagaagctggagctggcagagaaaaaggccaccgatgctgaagccgacgtagcttctctgaacagacgcatccagctggttgaggaagagttggatcgtgcccaggagcgtctggcaacagctttgcagaagctggaggaagctgagaaggcagcagatgagagtgagagaggcatgaaagtcattgagagtcgagcccaaaaagatgaagaaaaaatggaaattcaggagatccaactgaaagaggcaaagcacattgctgaagatgccgaccgcaaatatgaagaggtggcccgtaagctggtcatcattgagagcgacctggaacgtgcagaggagcgggctgagctctcagaaggccaagtccgacagctggaagaacaattaagaataatggatcagaccttgaaagcattaatggctgcagaggataagtactcgcagaaggaagacagatatgaggaagagatcaaggtcctttccgacaagctgaaggaggctgagactcgggctgagtttgcggagaggtcagtaactaaattggagaaaagcattgatgacttagaagagaaagtggctcatgccaaagaagaaaaccttagtatgcatcagatgctggatcagactttactggagttaaacaacatgtgaaaacctccttagctgcgaccacattctttcattttgttttgttttgttttgtttttaaacacctgcttaccccttaaatgcaatttatttacttttaccactgtcacagaaacatccacaagataccagctaggtcagggggtggggaaaacacatacaaaaaggcaagcccatgtcagggcgatcctggttcaaatgtgccatttcccgggttgatgctgccacactttgtagagagtttagcaacacagtgtgcttagtcagcgtaggaatcctcactaaagcaggagaagttccattcaaagtgccaatgatagagtcaacaggaaggttaatgttggaaacacaatcaggtgtggattggtgctactttgaacaaaaggtccccctgtggtcttttgttcaacattgtacaatgtagaactctgtccaacactaatttattttgtcttgagttttactacaagatgagactatggatcccgcatgcctgaattcactaaagccaagggtctgtaagccacgctgctcttctgagacttccattcctttctgattggcacacgtgcagctcatgacaatctgtaggataacaatcagtgtggatttccactcttttcagtccttcatgttaaagatttagacaccacatacaactggtaaaggacgttttcttgagagttttaactatatgtaaacattgtataatgatatggaataaaatgcacattgtaggacattttctaaa

SEQ ID NO: 140730 - DNA, 1884 bp, Homo sapiens
cagaatctccggcagtttttgtacctcaagaagtaagtggaacacctttccctgtcatagttattttcatccagacatctggtggaagcatcagattccttacagatataagagaggcatcatttaaaaggtagaacaggatcgacaaacaaggatttatgtcaggatctctcagcctctgtgttaccgagggcatttctaacagtcttcttactacggcccgaccgcgcgctcgccccgccgctcctgctgcagccccagggcccctcgccgccgccaccatggacgccatcaagaagaagatgcagatgctgaagctcgacaaggagaacgccttggatcgagctgagcaggcggaggccgacaagaaggcggcggaagacaggagcaagcagctcgaggaggacatcgcggccaaggagaagttgctgcgggtgtcggaggacgagcgggaccgggtgctggaggagctgcacaaggcggaggacagcctcctggccgccgaagaggccgccgccaaggctgaagccgacgtagcttctctgaacagacgcatccagctggttgaggaagagttggatcgtgcccaggagcgtctggcaacagctttgcagaagctggaggaagctgagaaggcagcagatgagagtgagagaggcatgaaagtcattgagagtcgagcccaaaaagatgaagaaaaaatggaaattcaggagatccaactgaaagaggcaaagcacattgctgaagatgccgaccgcaaatatgaagaggtggcccgtaagctggtcatcattgagagcgacctggaacgtgcagaggagcgggctgagctctcagaaggccaagtccgacagctggaagaacaattaagaataatggatcagaccttgaaagcattaatggctgcagaggataagtactcgcagaaggaagacagatatgaggaagagatcaaggtcctttccgacaagctgaaggaggctgagactcgggctgagtttgcggagaggtcagtaactaaattggagaaaagcattgatgacttagaagagaaagtggctcatgccaaagaagaaaaccttagtatgcatcagatgctggatcagactttactggagttaaacaacatgtgaaaacctccttagctgcgaccacattctttcattttgttttgttttgttttgtttttaaacacctgcttaccccttaaatgcaatttatttacttttaccactgtcacagaaacatccacaagataccagctaggtcagggggtggggaaaacacatacaaaaaggcaagcccatgtcagggcgatcctggttcaaatgtgccatttcccgggttgatgctgccacactttgtagagagtttagcaacacagtgtgcttagtcagcgtaggaatcctcactaaagcaggagaagttccattcaaagtgccaatgatagagtcaacaggaaggttaatgttggaaacacaatcaggtgtggattggtgctactttgaacaaaaggtccccctgtggtcttttgttcaacattgtacaatgtagaactctgtccaacactaatttattttgtcttgagttttactacaagatgagactatggatcccgcatgcctgaattcactaaagccaagggtctgtaagccacgctgctcttctgagacttccattcctttctgattggcacacgtgcagctcatgacaatctgtaggataacaatcagtgtggatttccactcttttcagtccttcatgttaaagatttagacaccacatacaactggtaaaggacgttttcttgagagttttaactatatgtaaacattgtataatgatatggaataaaatgcacattgtaggacattttctaaa

SEQ ID NO: 140731 - DNA, 2921 bp, Homo sapiens
  misc_feature (1)..(1): n is a, c, g, or t
naggcggtacggcccggaattatgggatcccgaccgcgcgctcgccccgccgctcctgctgcagccccagggcccctcgccgccgccaccatggacgccatcaagaagaagatgcagatgctgaagctcgacaaggagaacgccttggatcgagctgagcaggcggaggccgacaagaaggcggcggaagacaggagcaagcagctggaagatgagctggtgtcactgcaaaagaaactcaagggcaccgaagatgaactggacaaatactctgaggctctcaaagatgcccaggagaagctggagctggcagagaaaaaggccaccgatgctgaagccgacgtagcttctctgaacagacgcatccagctggttgaggaagagttggatcgtgcccaggagcgtctggcaacagctttgcagaagctggaggaagctgagaaggcagcagatgagagtgagagaggcatgaaagtcattgagagtcgagcccaaaaagatgaagaaaaaatggaaattcaggagatccaactgaaagaggcaaagcacattgctgaagatgccgaccgcaaatatgaagaggtggcccgtaagctggtcatcattgagagcgacctggaacgtgcagaggagcgggctgagctctcagaaggcaaatgtgccgaagcttgaagaagaattgaaaactgtgacgaacaacttgaagtcactggaggctcaggctgagaagtactcgcagaaggaagacagatatgaggaagagatcaaggtcctttccgacaagctgaaggaggctgagactcgggctgagtttgcggagaggtcagtaactaaattggagaaaagcattgatgacttagaagatcaactctaccagcaacttgagcaaaatcgccgcctcactaatgaactaaagctggccctgaatgaggattaaacttaagagtgaaaaaacttgggctgaattctaggcgtggagcccatgtgcagaaaatctaagactgtcctaccttcaactaatagagttgaaaacagttgctttctgcagaaatgcaaatgcaaggaattggctgaaaggctggccttgcctgcttgtttctctatatggctggaataattacgttctctttaatcacaaaacagcttttatggtagaatacttatatcaattcagcactgctccttgaaatagcaggtcctcttgtttgaactgataaataatgaggagcccccccaaaaaatgttttctatttcctgacagccatgagtcctactttaagtatgtatatatatatatatatattgtgtgtgtgtgtgtgtgtgtgtatatatattcctatcagatactcatattcctaacttctaaatatctggtatagtgtttgaaatatgattaaatgtacctatgcttgggcaaaatagcttttgaaaacaggaactcatgccagaagcccctggttgtctgaaaggtatgctttactcagtctaatggtgctgttggagtctggggagaatgtcatgctaataaatagaacactataaaaatattaagagaatgtcctaatgaagtgtgcatgaaacatgttgacaattttttatgagcaacagaaataaatcattttaaaagttctcagaaaacctatttatgtcatctttgcttttgtgagtttgtgttaccgcacaactcccagacttttaactgcctgtaccttggaaatgtctgctgttcgtaacttcttcagtttgtataacagtgctgcagctgtatttggtttttacctctccctgttcccacggcacaccgtcagtgaaccttcaccaaaccccacgtgcattttatcctcagtgaattgttggtggaggtgcacctgactgctctgtgagaatccgtgccatggctcctttgggtcaaagatgccctcccctccgtcttaggttcttgtctagaaatgagtaatgtcttacaagcatgcctagttctaatcatctcatcctgtgtttgtgattgatgtttgcctgcctaaatgtacaaaccaccattgtgtccaaagcacagctattcatgacttaattttctaatctcaccacagagaaagtggctcatgccaaagaagaaaaccttagtatgcatcagatgctggatcagactttactggagttaaacaacatgtgaaaacctccttagctgcgaccacattctttcattttgttttgttttgttttgtttttaaacacctgcttaccccttaaatgcaatttatttacttttaccactgtcacagaaacatccacaagataccagctaggtcagggggtggggaaaacacatacaaaaaggcaagcccatgtcagggcgatcctggttcaaatgtgccatttcccgggttgatgctgccacactttgtagagagtttagcaacacagtgtgcttagtcagcgtaggaatcctcactaaagcaggagaagttccattcaaagtgccaatgatagagtcaacaggaaggttaatgttggaaacacaatcaggtgtggattggtgctactttgaacaaaaggtccccctgtggtcttttgttcaacattgtacaatgtagaactctgtccaacactaatttattttgtcttgagttttactacaagatgagactatggatcccgcatgcctgaattcactaaagccaagggtctgtaagccacgctgctcttctgagacttccattcctttctgattggcacacgtgcagctcatgacaatctgtaggataacaatcagtgtggatttccactcttttcagtccttcatgttaaagatttagacaccacatacaactggtaaaggacgttttcttgagagttttaactatatgtaaacattgtataatgatatggaataaaatgcacattgtaggacattttctaaa

SEQ ID NO: 140732 - DNA, 2030 bp, Homo sapiens
cagaatctccggcagtttttgtacctcaagaagtaagtggaacacctttccctgtcatagttattttcatccagacatctggtggaagcatcagattccttacagatataagagaggcatcatttaaaaggtagaacaggatcgacaaacaaggatttatgtcaggatctctcagcctctgtgttaccgagggcatttctaacagtcttcttactacggcccgaccgcgcgctcgccccgccgctcctgctgcagccccagggcccctcgccgccgccaccatggacgccatcaagaagaagatgcagatgctgaagctcgacaaggagaacgccttggatcgagctgagcaggcggaggccgacaagaaggcggcggaagacaggagcaagcagctggaagatgagctggtgtcactgcaaaagaaactcaagggcaccgaagatgaactggacaaatactctgaggctctcaaagatgcccaggagaagctggagctggcagagaaaaaggccaccgatgctgaagccgacgtagcttctctgaacagacgcatccagctggttgaggaagagttggatcgtgcccaggagcgtctggcaacagctttgcagaagctggaggaagctgagaaggcagcagatgagagtgagagaggcatgaaagtcattgagagtcgagcccaaaaagatgaagaaaaaatggaaattcaggagatccaactgaaagaggcaaagcacattgctgaagatgccgaccgcaaatatgaagaggtggcccgtaagctggtcatcattgagagcgacctggaacgtgcagaggagcgggctgagctctcagaaggccaagtccgacagctggaagaacaattaagaataatggatcagaccttgaaagcattaatggctgcagaggataagtactcgcagaaggaagacagatatgaggaagagatcaaggtcctttccgacaagctgaaggaggctgagactcgggctgagtttgcggagaggtcagtaactaaattggagaaaagcattgatgacttagaagagaaagtggctcatgccaaagaagaaaaccttagtatgcatcagatgctggatcagactttactggagttaaacaacatgtgaaaacctccttagctgcgaccacattctttcattttgttttgttttgttttgtttttaaacacctgcttaccccttaaatgcaatttatttacttttaccactgtcacagaaacatccacaagataccagctaggtcagggggtggggaaaacacatacaaaaaggcaagcccatgtcagggcgatcctggttcaaatgtgccatttcccgggttgatgctgccacactttgtagagagtttagcaacacagtgtgcttagtcagcgtaggaatcctcactaaagcaggagaagttccattcaaagtgccaatgatagagtcaacaggaaggttaatgttggaaacacaatcaggtgtggattggtgctactttgaacaaaaggtccccctgtggtcttttgttcaacattgtacaatgtagaactctgtccaacactaatttattttgtcttgagttttactacaagatgagactatggatcccgcatgcctgaattcactaaagccaagggtctgtaagccacgctgctcttctgagacttccattcctttctgattggcacacgtgcagctcatgacaatctgtaggataacaatcagtgtggatttccactcttttcagtccttcatgttaaagatttagacaccacatacaactggtaaaggacgttttcttgagagttttaactatatgtaaacattgtataatgatatggaataaaatgcacattgtaggacattttctaaaaaacctagaataaagaaaaatggcatagatcacgagtgagctaagctcgagggggggcccggttcccatttcgccctatagagaggcgattacaattaactggccgtcctattacatctttttagctggggaaaccctggctttgc

SEQ ID NO: 140733 - DNA, 1921 bp, Homo sapiens
cagaatctccggcagtttttgtacctcaagaagtaagtggaacacctttccctgtcatagttattttcatccagacatctggtggaagcatcagattccttacagatataagagaggcatcatttaaaaggtagaacaggatcgacaaacaaggatttatgtcaggatctctcagcctctgtgttaccgagggcatttctaacagtcttcttactacggcccgaccgcgcgctcgccccgccgctcctgctgcagccccagggcccctcgccgccgccaccatggacgccatcaagaagaagatgcagatgctgaagctcgacaaggagaacgccttggatcgagctgagcaggcggaggccgacaagaaggcggcggaagacaggagcaagcagctggaagatgagctggtgtcactgcaaaagaaactcaagggcaccgaagatgaactggacaaatactctgaggctctcaaagatgcccaggagaagctggagctggcagagaaaaaggccaccgatgctgaagccgacgtagcttctctgaacagacgcatccagctggttgaggaagagttggatcgtgcccaggagcgtctggcaacagctttgcagaagctggaggaagctgagaaggcagcagatgagagtgagagaggcatgaaagtcattgagagtcgagcccaaaaagatgaagaaaaaatggaaattcaggagatccaactgaaagaggcaaagcacattgctgaagatgccgaccgcaaatatgaagaggtggcccgtaagctggtcatcattgagagcgacctggaacgtgcagaggagcgggctgagctctcagaaggccaagtccgacagctggaagaacaattaagaataatggatcagaccttgaaagcattaatggctgcagaggataagtactcgcagaaggaagacagatatgaggaagagatcaaggtcctttccgacaagctgaaggaggctgagactcgggctgagtttgcggagaggtcagtaactaaattggagaaaagcattgatgacttagaagagaaagtggctcatgccaaagaagaaaaccttagtatgcatcagatgctggatcagactttactggagttaaacaacatgtgaaaacctccttagctgcgaccacattctttcattttgttttgttttgttttgtttttaaacacctgcttaccccttaaatgcaatttatttacttttaccactgtcacagaaacatccacaagataccagctaggtcagggggtggggaaaacacatacaaaaaggcaagcccatgtcagggcgatcctggttcaaatgtgccatttcccgggttgatgctgccacactttgtagagagtttagcaacacagtgtgcttagtcagcgtaggaatcctcactaaagcaggagaagttccattcaaagtgccaatgatagagtcaacaggaaggttaatgttggaaacacaatcaggtgtggattggtgctactttgaacaaaaggtccccctgtggtcttttgttcaacattgtacaatgtagaactctgtccaacactaatttattttgtcttgagttttactacaagatgagactatggatcccgcatgcctgaattcactaaagccaagggtctgtaagccacgctgctcttctgagacttccattcctttctgattggcacacgtgcagctcatgacaatctgtaggataacaatcagtgtggatttccactcttttcagtccttcatgttaaagatttagacaccacatacaactggtaaaggacgttttcttgagagttttaactatatgtaaacattgtataatgatatggaataaaatgcacattgtaggacattttctaaaaaaaacacacaacccaaaaacaaaacaacactgttct

SEQ ID NO: 140734 - DNA, 2505 bp, Homo sapiens
cagaatctccggcagtttttgtacctcaagaagtaagtggaacacctttccctgtcatagttattttcatccagacatctggtggaagcatcagattccttacagatataagagaggcatcatttaaaaggtagaacaggatcgacaaacaaggatttatgtcaggatctctcagcctctgtgttaccgagggcatttctaacagtcttcttactacggcccgaccgcgcgctcgccccgccgctcctgctgcagccccagggcccctcgccgccgccaccatggacgccatcaagaagaagatgcagatgctgaagctcgacaaggagaacgccttggatcgagctgagcaggcggaggccgacaagaaggcggcggaagacaggagcaagcagctggaagatgagctggtgtcactgcaaaagaaactcaagggcaccgaagatgaactggacaaatactctgaggctctcaaagatgcccaggagaagctggagctggcagagaaaaaggccaccgatgctgaagccgacgtagcttctctgaacagacgcatccagctggttgaggaagagttggatcgtgcccaggagcgtctggcaacagctttgcagaagctggaggaagctgagaaggcagcagatgagagtgagagaggcatgaaagtcattgagagtcgagcccaaaaagatgaagaaaaaatggaaattcaggagatccaactgaaagaggcaaagcacattgctgaagatgccgaccgcaaatatgaagaggtggcccgtaagctggtcatcattgagagcgacctggaacgtgcagaggagcgggctgagctctcagaaggccaagtccgacagctggaagaacaattaagaataatggatcagaccttgaaagcattaatggctgcagaggataagtactcgcagaaggaagacagatatgaggaagagatcaaggtcctttccgacaagctgaaggaggctgagactcgggctgagtttgcggagaggtcagtaactaaattggagaaaagcattgatgacttagaagagaaagtggctcatgccaaagaagaaaaccttagtatgcatcagatgctggatcagactttactggagttaaacaacatgtgaaaacctccttagctgcgaccacattctttcattttgttttgttttgttttgtttttaaacacctgcttaccccttaaatgcaatttatttacttttaccactgtcacagaaacatccacaagataccagctaggtcagggggtggggaaaacacatacaaaaaggcaagcccatgtcagggcgatcctggttcaaatgtgccatttcccgggttgatgctgccacactttgtagagagtttagcaacacagtgtgcttagtcagcgtaggaatcctcactaaagcaggagaagttccattcaaagtgccaatgatagagtcaacaggaaggttaatgttggaaacacaatcaggtgtggattggtgctactttgaacaaaaggtccccctgtggtcttttgttcaacattgtacaatgtagaactctgtccaacactaatttattttgtcttgagttttactacaagatgagactatggatcccgcatgcctgaattcactaaagccaagggtctgtaagccacgctgctcttctgagacttccattcctttctgattggcacacgtgcagctcatgacaatctgtaggataacaatcagtgtggatttccactcttttcagtccttcatgttaaagatttagacaccacatacaactggtaaaggacgttttcttgagagttttaactatatgtaaacattgtataatgatatggaataaaatgcacattgtaggacattttctaaaaaaaaaaaacaaaaaaaaaaaaaaaaaaaaaaaaaaaaaaaaaaaaaaaaaaaaaaaaaaaaaaaaaaaaaaaaaaaaaacaaaaaaaaaaaaaaaaaaaaaaaaaaaaaaaaaaaaaaaaaaaaaaaaaaaaaaagaaaaaaaaaaaaaaaaaaaaaaaagaaagaaaatagagaaaaaagaaacaacaaagacgacagaaacaggaacagagcgcccgccacacgaccagaccgagcgggccgccgcagaccagaaacgacaacacagaaaaccaagcggaggaagaggaagacagggcagaacaagacgcggcgcgaggagccagagcaacaagaagctgacatggacagtgcacgggcacaccgcacggacgagacgcagcgacagacagcaagtccccgaccgcgcagcaaccagcgcgcgacgaacatcgacgcgaaacgaccgagagagcccacgcgccacgcgagcaagcgaaggagaagacaccacagaaaagagcatgcgactcacggacccaacgcaccagaccgcgcgagcgaccgcgggcaccgacgcccgcgaacgcggcccagaccaccccagccccaggcacggagcgcggcgaagcgacaaaag

SEQ ID NO: 140735 - DNA, 2180 bp, Homo sapiens
  misc_feature (1037)..(1037): n is a, c, g, or t
  misc_feature (1049)..(1049): n is a, c, g, or t
  misc_feature (1056)..(1056): n is a, c, g, or t
  misc_feature (1059)..(1059): n is a, c, g, or t
cagaatctccggcagtttttgtacctcaagaagtaagtggaacacctttccctgtcatagttattttcatccagacatctggtggaagcatcagattccttacagatataagagaggcatcatttaaaaggtagaacaggatcgacaaacaaggatttatgtcaggatctctcagcctctgtgttaccgagggcatttctaacagtcttcttactacggcccgaccgcgcgctcgccccgccgctcctgctgcagccccagggcccctcgccgccgccaccatggacgccatcaagaagaagatgcagatgctgaagctcgacaaggagaacgccttggatcgagctgagcaggcggaggccgacaagaaggcggcggaagacaggagcaagcagctggaagatgagctggtgtcactgcaaaagaaactcaagggcaccgaagatgaactggacaaatactctgaggctctcaaagatgcccaggagaagctggagctggcagagaaaaaggccaccgatgctgaagccgacgtagcttctctgaacagacgcatccagctggttgaggaagagttggatcgtgcccaggagcgtctggcaacagctttgcagaagctggaggaagctgagaaggcagcagatgagagtgagagaggcatgaaagtcattgagagtcgagcccaaaaagatgaagaaaaaatggaaattcaggagatccaactgaaagaggcaaagcacattgctgaagatgccgaccgcaaatatgaagaggtggcccgtaagctggtcatcattgagagcgacctggaacgtgcagaggagcgggctgagctctcagaaggccaagtccgacagctggaagaacaattaagaataatggatcagaccttgaaagcattaatggctgcagaggataagcgcagaaggaagacagatatgaggaagagatcaaggtcctttccgacaagctgaaggaggctgagactcgggctgagtttgcggagaggtcagtaactaaattggagagaagcacantgctgaagatgncgaccgnaantatgaagaggtggcccgtaagctggtcatcattgagagcgacctggaacgtgcagaggagcgggctgagctctcagaaggcaaatgtgccgaagcttgaagaagaattgaaaactgtgacgaacaacttgaagtcactggaggctcaggctgagaagtactcgcagaaggaagacagatatgaggaagagatcaaggtcctttccgacaagctgaaggaggctgagactcgggctgagtttgcggagaggtcagtaactaaattggagaaaagcattgatgacttagaagagaaagtggctcatgccaaagaagaaaaccttagtatgcatcagatgctggatcagactttactggagttaaacaacatgtgaaaacctccttagctgcgaccacattctttcattttgttttgttttgttttgtttttaaacacctgcttaccccttaaatgcaatttatttacttttaccactgtcacagaaacatccacaagataccagctaggtcagggggtggggaaaacacatacaaaaaggcaagcccatgtcagggcgatcctggttcaaatgtgccatttcccgggttgatgctgccacactttgtagagagtttagcaacacagtgtgcttagtcagcgtaggaatcctcactaaagcaggagaagttccattcaaagtgccaatgatagagtcaacaggaaggttaatgttggaaacacaatcaggtgtggattggtgctactttgaacaaaaggtccccctgtggtcttttgttcaacattgtacaatgtagaactctgtccaacactaatttattttgtcttgagttttactacaagatgagactatggatcccgcatgcctgaattcactaaagccaagggtctgtaagccacgctgctcttctgagacttccattcctttctgattggcacacgtgcagctcatgacaatctgtaggataacaatcagtgtggatttccactcttttcagtccttcatgttaaagatttagacaccacatacaactggtaaaggacgttttcttgagagttttaactatatgtaaacattgtataatgatatggaataaaatgcacattgtaggacattttctaaa

SEQ ID NO: 140736 - DNA, 1885 bp, Homo sapiens
cagaatctccggcagtttttgtacctcaagaagtaagtggaacacctttccctgtcatagttattttcatccagacatctggtggaagcatcagattccttacagatataagagaggcatcatttaaaaggtagaacaggatcgacaaacaaggatttatgtcaggatctctcagcctctgtgttaccgagggcatttctaacagtcttcttactacggcccgaccgcgcgctcgccccgccgctcctgctgcagccccagggcccctcgccgccgccaccatggacgccatcaagaagaagatgcagatgctgaagctcgacaaggagaacgccttggatcgagctgagcaggcggaggccgacaagaaggcggcggaagacaggagcaagcagctcgaggaggacatcgcggccaaggagaagttgctgcgggtgtcggaggacgagcgggaccgggtgctggaggagctgcacaaggcggaggacagcctcctggccgccgaagaggccgccgccaaggctgaagccgacgtagcttctctgaacagacgcatccagctggttgaggaagagttggatcgtgcccaggagcgtctggcaacagctttgcagaagctggaggaagctgagaaggcagcagatgagagtgagagaggcatgaaagtcattgagagtcgagcccaaaaagatgaagaaaaaatggaaattcaggagatccaactgaaagaggcaaagcacattgctgaagatgccgaccgcaaatatgaagaggtggcccgtaagctggtcatcattgagagcgacctggaacgtgcagaggagcgggctgagctctcagaaggcaaatgtgccgaagcttgaagaagaattgaaaactgtgacgaacaacttgaagtcactggaggctcaggctgagaagtactcgcagaaggaagacagatatgaggaagagatcaaggtcctttccgacaagctgaaggaggctgagactcgggctgagtttgcggagaggtcagtaactaaattggagaaaagcattgatgacttagaagagaaagtggctcatgccaaagaagaaaaccttagtatgcatcagatgctggatcagactttactggagttaaacaacatgtgaaaacctccttagctgcgaccacattctttcattttgttttgttttgttttgtttttaaacacctgcttaccccttaaatgcaatttatttacttttaccactgtcacagaaacatccacaagataccagctaggtcagggggtggggaaaacacatacaaaaaggcaagcccatgtcagggcgatcctggttcaaatgtgccatttcccgggttgatgctgccacactttgtagagagtttagcaacacagtgtgcttagtcagcgtaggaatcctcactaaagcaggagaagttccattcaaagtgccaatgatagagtcaacaggaaggttaatgttggaaacacaatcaggtgtggattggtgctactttgaacaaaaggtccccctgtggtcttttgttcaacattgtacaatgtagaactctgtccaacactaatttattttgtcttgagttttactacaagatgagactatggatcccgcatgcctgaattcactaaagccaagggtctgtaagccacgctgctcttctgagacttccattcctttctgattggcacacgtgcagctcatgacaatctgtaggataacaatcagtgtggatttccactcttttcagtccttcatgttaaagatttagacaccacatacaactggtaaaggacgttttcttgagagttttaactatatgtaaacattgtataatgatatggaataaaatgcacattgtaggacattttctaaa

SEQ ID NO: 140737 - DNA, 1793 bp, Homo sapiens
cagaatctccggcagtttttgtacctcaagaagtaagtggaacacctttccctgtcatagttattttcatccagacatctggtggaagcatcagattccttacagatataagagaggcatcatttaaaaggtagaacaggatcgacaaacaaggatttatgtcaggatctctcagcctctgtgttaccgagggcatttctaacagtcttcttactacggcccgaccgcgcgctcgccccgccgctcctgctgcagccccagggcccctcgccgccgccaccatggacgccatcaagaagaagatgcagatgctgaagctcgacaaggagaacgccttggatcgagctgagcaggcggaggccgacaagaaggcggcggaagacaggagcaagcagctggaagatgagctggtgtcactgcaaaagaaactcaagggcaccgaagatgaactggacaaatactctgaggctctcaaagatgcccaggagaagctggagctggcagagaaaaaggccaccgatgctgaagccgacgtagcttctctgaacagacgcatccagctggttgaggaagagttggatcgtgcccaggagcgtctggcaacagctttgcagaagctggaggaagctgagaaggcagcagatgagagtgagagaggcatgaaagtcattgagagtcgagcccaaaaagatgaagaaaaaatggaaattcaggagatccaactgaaagaggcaaagcacattgctgaagatcaaatgtgccgaagcttgaagaagaattgaaaactgtgacgaacaacttgaagtcactggaggctcaggctgagaagtactcgcagaaggaagacagatatgaggaagagatcaaggtcctttccgacaagctgaaggaggctgagactcgggctgagtttgcggagaggtcagtaactaaattggagaaaagcattgatgacttagaagagaaagtggctcatgccaaagaagaaaaccttagtatgcatcagatgctggatcagactttactggagttaaacaacatgtgaaaacctccttagctgcgaccacattctttcattttgttttgttttgttttgtttttaaacacctgcttaccccttaaatgcaatttatttacttttaccactgtcacagaaacatccacaagataccagctaggtcagggggtggggaaaacacatacaaaaaggcaagcccatgtcagggcgatcctggttcaaatgtgccatttcccgggttgatgctgccacactttgtagagagtttagcaacacagtgtgcttagtcagcgtaggaatcctcactaaagcaggagaagttccattcaaagtgccaatgatagagtcaacaggaaggttaatgttggaaacacaatcaggtgtggattggtgctactttgaacaaaaggtccccctgtggtcttttgttcaacattgtacaatgtagaactctgtccaacactaatttattttgtcttgagttttactacaagatgagactatggatcccgcatgcctgaattcactaaagccaagggtctgtaagccacgctgctcttctgagacttccattcctttctgattggcacacgtgcagctcatgacaatctgtaggataacaatcagtgtggatttccactcttttcagtccttcatgttaaagatttagacaccacatacaactggtaaaggacgttttcttgagagttttaactatatgtaaacattgtataatgatatggaataaaatgcacattgtaggacattttctaaa

SEQ ID NO: 140738 - DNA, 2152 bp, Homo sapiens
  misc_feature (1966)..(1966): n is a, c, g, or t
cagaatctccggcagtttttgtacctcaagaagtaagtggaacacctttccctgtcatagttattttcatccagacatctggtggaagcatcagattccttacagatataagagaggcatcatttaaaaggtagaacaggatcgacaaacaaggatttatgtcaggatctctcagcctctgtgttaccgagggcatttctaacagtcttcttactacggcccgaccgcgcgctcgccccgccgctcctgctgcagccccagggcccctcgccgccgccaccatggacgccatcaagaagaagatgcagatgctgaagctcgacaaggagaacgccttggatcgagctgagcaggcggaggccgacaagaaggcggcggaagacaggagcaagcagctggaagatgagctggtgtcactgcaaaagaaactcaagggcaccgaagatgaactggacaaatactctgaggctctcaaagatgcccaggagaagctggagctggcagagaaaaaggccaccgatgctgaagccgacgtagcttctctgaacagacgcatccagctggttgaggaagagttggatcgtgcccaggagcgtctggcaacagctttgcagaagctggaggaagctgagaaggcagcagatgagagtgagagaggcatgaaagtcattgagagtcgagcccaaaaagatgaagaaaaaatggaaattcaggagatccaactgaaagaggcaaagcacattgctgaagatgccgaccgcaaatatgaagaggtggcccgtaagctggtcatcattgagagcgacctggaacgtgcagaggagcgggctgagctctcagaaggccaagtccgacagctggaagaacaattaagaataatggatcagaccttgaaagcattaatggctgcagaggataagtactcgcagaaggaagacagatatgaggaagagatcaaggtcctttccgacaagctgaaggaggctgagactcgggctgagtttgcggagaggtcagtaactaaattggagaaaagcattgatgacttagaagagaaagtggctcatgccaaagaagaaaaccttagtatgcatcagatgctggatcagactttactggagttaaacaacatgtgaaaacctccttagctgcgaccacattctttcattttgttttgttttgttttgtttttaaacacctgcttaccccttaaatgcaatttatttacttttaccactgtcacagaaacatccacaagataccagctaggtcagggggtggggaaaacacatacaaaaaggcaagcccatgtcagggcgatcctggttcaaatgtgccatttcccgggttgatgctgccacactttgtagagagtttagcaacacagtgtgcttagtcagcgtaggaatcctcactaaagcaggagaagttccattcaaagtgccaatgatagagtcaacaggaaggttaatgttggaaacacaatcaggtgtggattggtgctactttgaacaaaaggtccccctgtggtcttttgttcaacattgtacaatgtagaactctgtccaacactaatttattttgtcttgagttttactacaagatgagactatggatcccgcatggtccagaccctggccctatccccagcatggttctcctgttctcctctttggggagctctgtaccaccccggttagcaagataaaggcagccactgatttctcaagggtataccacactgccttacaacatataggcatgttctaggcctcatatgataccgtgtctagaaacatcccatctggggccttctgtacatccatggtcacttctgtaaggtgtgaatatttgagtcatacggagctgagagattctgagtaaagtggtaggcccactttagcttctctcactgctcagtggccctggagcaggatagattgggctggcctactccatgcatccncaaagagtgctctgaggttgtgcagcgctcagttacctattaatcttattcaacaaattcttactaactgctaccaatgaggaaagcctttggtgagctgagcttacattgatgaattcaagcaccctagagaactatctgggcattaaagagaggcttaaattcttttatttattcagcaaattt

SEQ ID NO: 140739 - DNA, 1227 bp, Homo sapiens
  misc_feature (1)..(1): n is a, c, g, or t
naggcggtacggcccggaattatgggatcccgaccgcgcgctcgccccgccgctcctgctgcagccccagggcccctcgccgccgccaccatggacgccatcaagaagaagatgcagatgctgaagctcgacaaggagaacgccttggatcgagctgagcaggcggaggccgacaagaaggcggcggaagacaggagcaagcagctggaagatgagctggtgtcactgcaaaagaaactcaagggcaccgaagatgaactggacaaatactctgaggctctcaaagatgcccaggagaagctggagctggcagagaaaaaggccaccgatgctgaagccgacgtagcttctctgaacagacgcatccagctggttgaggaagagttggatcgtgcccaggagcgtctggcaacagctttgcagaagctggaggaagctgagaaggcagcagatgagagtgagagaggcatgaaagtcattgagagtcgagcccaaaaagatgaagaaaaaatggaaattcaggagatccaactgaaagaggcaaagcacattgctgaagatgccgaccgcaaatatgaagaggtggcccgtaagctggtcatcattgagagcgacctggaacgtgcagaggagcgggctgagctctcagaaggcaaatgtgccgaagcttgaagaagaattgaaaactgtgacgaacaacttgaagtcactggaggctcaggctgagaagtactcgcagaaggaagacagatatgaggaagagatcaaggtcctttccgacaagctgaaggaggctgagactcgggctgagtttgcggagaggtcagtaactaaattggagaaaagcattgatgacttagaagacgagctgtacgctcagaaactgaagtacaaagccatcagcgaggagctggaccacgctctcaacgatatgacttccatataagtttctttgcttcacttctcccaagactccctcgtcgagctggatgtcccacctctctgagctctgcatttgtctattctccagctgaccctggttctctctcttagcatcctgccttagagccaggcacacactgtgctttctattgtacagaagctcttcgtttcagtgtcaaataaacactgtgtaagctatttctgtttgctattctttttacttcttatttattgacattttagtttcaacattgaataaaactacaaagctgcttcacacaaaaa

SEQ ID NO: 140740 - DNA, 1830 bp, Homo sapiens
cagaatctccggcagtttttgtacctcaagaagtaagtggaacacctttccctgtcatagttattttcatccagacatctggtggaagcatcagattccttacagatataagagaggcatcatttaaaaggtagaacaggatcgacaaacaaggatttatgtcaggatctctcagcctctgtgttaccgagggcatttctaacagtcttcttactacggcccgaccgcgcgctcgccccgccgctcctgctgcagccccagggcccctcgccgccgccaccatggacgccatcaagaagaagatgcagatgctgaagctcgacaaggagaacgccttggatcgagctgagcaggcggaggccgacaagaaggcggcggaagacaggagcaagcagctggaagatgagctggtgtcactgcaaaagaaactcaagggcaccgaagatgaactggacaaatactctgaggctctcaaagatgcccaggagaagctggagctggcagagaaaaaggccaccgatgctgaagccgacgtagcttctctgaacagacgcatccagctggttgaggaagagttggatcgtgcccaggagcgtctggcaacagctttgcagaagctggaggaagctgagaaggcagcagatgagagtgagagaggcatgaaagtcattgagagtcgagcccaaaaagatgaagaaaaaatggaaattcaggagatccaactgaaagaggcaaagcacattgctgaagatgccgaccgcaaatatgaagaggtggcccgtaagctggtcatcattgagagcgacctggaacgtgcagaggagcgggctgagctctcagaaggccaagtccgacagctggaagaacaattaagaataatggatcagaccttgaaagcattaatggctgcagaggataagtactcgcagaaggaagacagatatgaggaagagatcaaggtcctttccgacaagctgaaggaggctgagactcgggctgagtttgcggagaggtcagtaactaaattggagaaaagcattgatgacttagaagagaaagtggctcatgccaaagaagaaaaccttagtatgcatcagatgctggatcagactttactggagttaaacaacatgtgaaaacctccttagctgcgaccacattctttcattttgttttgttttgttttgtttttaaacacctgcttaccccttaaatgcaatttatttacttttaccactgtcacagaaacatccacaagataccagctaggtcagggggtggggaaaacacatacaaaaaggcaagcccatgtcagggcgatcctggttcaaatgtgccatttcccgggttgatgctgccacactttgtagagagtttagcaacacagtgtgcttagtcagcgtaggaatcctcactaaagcaggagaagttccattcaaagtgccaatgatagagtcaacaggaaggttaatgttggaaacacaatcaggtgtggattggtgctactttgaacaaaagtaatttattttgtcttgagttttactacaagatgagactatggatcccgcatgcctgaattcactaaagccaagggtctgtaagccacgctgctcttctgagacttccattcctttctgattggcacacgtgcagctcatgacaatctgtaggataacaatcagtgtggatttccactcttttcagtccttcatgttaaagatttagacaccacatacaactggtaaaggacgttttcttgagagttttaactatatgtaaacattgtataatgatatggaataaaatgcacattgtaggacattttctaaa

SEQ ID NO: 140741 - DNA, 1888 bp, Homo sapiens
cagaatctccggcagtttttgtacctcaagaagtaagtggaacacctttccctgtcatagttattttcatccagacatctggtggaagcatcagattccttacagatataagagaggcatcatttaaaaggtagaacaggatcgacaaacaaggatttatgtcaggatctctcagcctctgtgttaccgagggcatttctaacagtcttcttactacggcccgaccgcgcgctcgccccgccgctcctgctgcagccccagggcccctcgccgccgccaccatggacgccatcaagaagaagatgcagatgctgaagctcgacaaggagaacgccttggatcgagctgagcaggcggaggccgacaagaaggcggcggaagacaggagcaagcagctggaagatgagctggtgtcactgcaaaagaaactcaagggcaccgaagatgaactggacaaatactctgaggctctcaaagatgcccaggagaagctggagctggcagagaaaaaggccaccgatgctgaagccgacgtagcttctctgaacagacgcatccagctggttgaggaagagttggatcgtgcccaggagcgtctggcaacagctttgcagaagctggaggaagctgagaaggcagcagatgagagtgagagaggcatgaaagtcattgagagtcgagcccaaaaagatgaagaaaaaatggaaattcaggagatccaactgaaagaggcaaagcacattgctgaagatgccgaccgcaaatatgaagaggtggcccgtaagctggtcatcattgagagcgacctggaacgtgcagaggagcgggctgagctctcagaaggccaagtccgacagctggaagaacaattaagaataatggatcagaccttgaaagcattaatggctgcagaggataagtactcgcagaaggaagacagatatgaggaagagatcaaggtcctttccgacaagctgaaggaggctgagactcgggctgagtttgcggagaggtcagtaactaaattggagaaaagcattgatgacttagaagagaaagtggctcatgccaaagaagaaaaccttagtatgcatcagatgctggatcagactttactggagttaaacaacatgtgaaaacctccttagctgcgaccacattctttcattttgttttgttttgttttgtttttaaacacctgcttaccccttaaatgcaatttatttacttttaccactgtcacagaaacatccacaagataccagctaggtcagggggtggggaaaacacatacaaaaaggcaagcccatgtcagggcgatcctggttcaaatgtgccatttcccgggttgatgctgccacactttgtagagagtttagcaacacagtgtgcttagtcagcgtaggaatcctcactaaagcaggagaaggaaggttaatgttggaaacacaatcaggtgtggattggtgctactttgaacaaaaggtccccctgtggtcttttgttcaacattgtacaatgtagaactctgtccaacactaatttattttgtcttgagttttactacaagatgagactatggatcccgcatgcctgaattcactaaagccaagggtctgtaagccacgctgctcttctgagacttccattcctttctgattggcacacgtgcagctcatgacaatctgtaggataacaatcagtgtggatttccactcttttcagtccttcatgttaaagatttagacaccacatacaactggtaaaggacgttttcttgagagttttaactatatgtaaacattgtataatgatatggaataaaatgcacattgtaggacattttctaaaaaaaacacacaacccaaaaacaaaacaacactgttct

SEQ ID NO: 140742 - DNA, 2344 bp, Homo sapiens
  misc_feature (1)..(1): n is a, c, g, or t
naggcggtacggcccggaattatgggatcccgaccgcgcgctcgccccgccgctcctgctgcagccccagggcccctcgccgccgccaccatggacgccatcaagaagaagatgcagatgctgaagctcgacaaggagaacgccttggatcgagctgagcaggcggaggccgacaagaaggcggcggaagacaggagcaagcagctggaagatgagctggtgtcactgcaaaagaaactcaagggcaccgaagatgaactggacaaatactctgaggctctcaaagatgcccaggagaagctggagctggcagagaaaaaggccaccgatgctgaagccgacgtagcttctctgaacagacgcatccagctggttgaggaagagttggatcgtgcccaggagcgtctggcaacagctttgcagaagctggaggaagctgagaaggcagcagatgagagtgagagaggcatgaaagtcattgagagtcgagcccaaaaagatgaagaaaaaatggaaattcaggagatccaactgaaagaggcaaagcacattgctgaagatgccgaccgcaaatatgaagaggtggcccgtaagctggtcatcattgagagcgacctggaacgtgcagaggagcgggctgagctctcagaaggcaaatgtgccgaagcttgaagaagaattgaaaactgtgacgaacaacttgaagtcactggaggctcaggctgagaagtactcgcagaaggaagacagatatgaggaagagatcaaggtcctttccgacaagctgaaggaggctgagactcgggctgagtttgcggagaggtcagtaactaaattggagaaaagcattgatgacttagaagatcaactctaccagcaacttgagcaaaatcgccgcctcactaatgaactaaagctggccctgaatgaggattaaacttaagagtgaaaaaacttgggctgaattctaggcgtggagcccatgtgcagaaaatctaagactgtcctaccttcaactaatagagttgaaaacagttgctttctgcagaaatgcaaatgcaaggaattggctgaaaggctggccttgcctgcttgtttctctatatggctggaataattacgttctctttaatcacaaaacagcttttatggtagaatacttatatcaattcagcactgctccttgaaatagcaggtcctcttgtttgaactgataaataatgaggagcccccccaaaaaatgttttctatttcctgacagccatgagtcctactttaagtatgtatatatatatatatatattgtgtgtgtgtgtgtgtgtgtgtatatatattcctatcagatactcatattcctaacttctaaatatctggtatagtgtttgaaatatgattaaatgtacctatgcttgggcaaaatagcttttgaaaacaggaactcatgccagaagcccctggttgtctgaaaggtatgctttactcagtctaatggtgctgttggagtctggggagaatgtcatgctaataaatagaacactataaaaatattaagagaatgtcctaatgaagtgtgcatgaaacatgttgacaattttttatgagcaacagaaataaatcattttaaaagttctcagaaaacctatttatgtcatctttgcttttgtgagtttgtgttaccgcacaactcccagacttttaactgcctgtaccttggaaatgtctgctgttcgtaacttcttcagtttgtataacagtgctgcagctgtatttggtttttacctctccctgttcccacggcacaccgtcagtgaaccttcaccaaaccccacgtgcattttatcctcagtgaattgttggtggaggtgcacctgactgctctgtgagaatccgtgccatggctcctttgggtcaaagatgccctcccctccgtcttaggttcttgtctagaaatgagtaatgtcttacaagcatgcctagttctaatcatctcatcctgtgtttgtgattgatgtttgcctgcctaaatgtacaaaccaccattgtgtccaaagcacagctattcatgacttaattttctaatctcaccacagagaaagtggctcatgccaaagaagaaaaccttagtatgcatcagatgctggatcagactttactggagttaaacaacatgtgaaaacctccttagctgcgaccacattctttcattttgttttgttttgttttgtttttaaacacctgcttaccccttaaatgcaatttatttacttttaccactgtcacagaaacatccacaagataccagctaggtcagggggtggggttaggtctgggggatcctctatac

SEQ ID NO: 140743 - DNA, 1058 bp, Homo sapiens
  misc_feature (1)..(1): n is a, c, g, or t
  misc_feature (1011)..(1011): n is a, c, g, or t
  misc_feature (1014)..(1015): n is a, c, g, or t
  misc_feature (1020)..(1021): n is a, c, g, or t
naggcggtacggcccggaattatgggatcccgaccgcgcgctcgccccgccgctcctgctgcagccccagggcccctcgccgccgccaccatggacgccatcaagaagaagatgcagatgctgaagctcgacaaggagaacgccttggatcgagctgagcaggcggaggccgacaagaaggcggcggaagacaggagcaagcagctggaagatgagctggtgtcactgcaaaagaaactcaagggcaccgaagatgaactggacaaatactctgaggctctcaaagatgcccaggagaagctggagctggcagagaaaaaggccaccgatgctgaagccgacgtagcttctctgaacagacgcatccagctggttgaggaagagttggatcgtgcccaggagcgtctggcaacagctttgcagaagctggaggaagctgagaaggcagcagatgagagtgagagaggcatgaaagtcattgagagtcgagcccaaaaagatgaagaaaaaatggaaattcaggagatccaactgaaagaggcaaagcacattgctgaagatgccgaccgcaaatatgaagaggtggcccgtaagctggtcatcattgagagcgacctggaacgtgcagaggagcgggctgagctctcagaaggcaaatgtgccgaagcttgaagaagaattgaaaactgtgacgaacaacttgaagtcactggaggctcaggctgagaagtactcgcagaaggaagacagatatgaggaagagatcaaggtcctttccgacaagctgaaggaggctgagactcgggctgagtttgcggagaggtcagtaactaaattggagaaaagcattgatgacttagaagagaaagtggctcatgccaaagaagaaaaccttagtatgcatcagatgctggatcagactttactggagttaaacaacatgtgaaaacctccttagctgcgaccacattctttcattttgttttgttttgtctgtgtttttatgcaacngcnnggccnntgaatgcgttttaatggcctttgccgcgttccgatca

SEQ ID NO: 140744 - DNA, 1248 bp, Homo sapiens
  misc_feature (1201)..(1201): n is a, c, g, or t
  misc_feature (1204)..(1205): n is a, c, g, or t
  misc_feature (1210)..(1211): n is a, c, g, or t
cagaatctccggcagtttttgtacctcaagaagtaagtggaacacctttccctgtcatagttattttcatccagacatctggtggaagcatcagattccttacagatataagagaggcatcatttaaaaggtagaacaggatcgacaaacaaggatttatgtcaggatctctcagcctctgtgttaccgagggcatttctaacagtcttcttactacggcccgaccgcgcgctcgccccgccgctcctgctgcagccccagggcccctcgccgccgccaccatggacgccatcaagaagaagatgcagatgctgaagctcgacaaggagaacgccttggatcgagctgagcaggcggaggccgacaagaaggcggcggaagacaggagcaagcagctggaagatgagctggtgtcactgcaaaagaaactcaagggcaccgaagatgaactggacaaatactctgaggctctcaaagatgcccaggagaagctggagctggcagagaaaaaggccaccgatgctgaagccgacgtagcttctctgaacagacgcatccagctggttgaggaagagttggatcgtgcccaggagcgtctggcaacagctttgcagaagctggaggaagctgagaaggcagcagatgagagtgagagaggcatgaaagtcattgagagtcgagcccaaaaagatgaagaaaaaatggaaattcaggagatccaactgaaagaggcaaagcacattgctgaagatgccgaccgcaaatatgaagaggtggcccgtaagctggtcatcattgagagcgacctggaacgtgcagaggagcgggctgagctctcagaaggccaagtccgacagctggaagaacaattaagaataatggatcagaccttgaaagcattaatggctgcagaggataagtactcgcagaaggaagacagatatgaggaagagatcaaggtcctttccgacaagctgaaggaggctgagactcgggctgagtttgcggagaggtcagtaactaaattggagaaaagcattgatgacttagaagagaaagtggctcatgccaaagaagaaaaccttagtatgcatcagatgctggatcagactttactggagttaaacaacatgtgaaaacctccttagctgcgaccacattctttcattttgttttgttttgtctgtgtttttatgcaacngcnnggccnntgaatgcgttttaatggcctttgccgcgttccgatca

SEQ ID NO: 140745 - DNA, 793 bp, Homo sapiens
  misc_feature (1)..(1): n is a, c, g, or t
naggcggtacggcccggaattatgggatcccgaccgcgcgctcgccccgccgctcctgctgcagccccagggcccctcgccgccgccaccatggacgccatcaagaagaagatgcagatgctgaagctcgacaaggagaacgccttggatcgagctgagcaggcggaggccgacaagaaggcggcggaagacaggagcaagcagctggaagatgagctggtgtcactgcaaaagaaactcaagggcaccgaagatgaactggacaaatactctgaggctctcaaagatgcccaggagaagctggagctggcagagaaaaaggccaccgatgctgaagccgacgtagcttctctgaacagacgcatccagctggttgaggaagagttggatcgtgcccaggagcgtctggcaacagctttgcagaagctggaggaagctgagaaggcagcagatgagagtgagagaggcatgaaagtcattgagagtcgagcccaaaaagatgaagaaaaaatggaaattcaggagatccaactgaaagaggcaaagcacattgctgaagatgccgaccgcaaatatgaagaggtggcccgtaagctggtcatcattgagagcgacctggaacgtgcagaggagcgggctgagctctcagaaggcaaatgtgccgaagcttgaagaagaattgaaaactgtgacgaacaacttgaagtcactggaggctcaggctgagaagtactcgcagaaggaagacagaaattttggaagctggaatccatgctctctagttcctgcctgg

SEQ ID NO: 140746 - DNA, 1251 bp, Homo sapiens
cagaatctccggcagtttttgtacctcaagaagtaagtggaacacctttccctgtcatagttattttcatccagacatctggtggaagcatcagattccttacagatataagagaggcatcatttaaaaggtagaacaggatcgacaaacaaggatttatgtcaggatctctcagcctctgtgttaccgagggcatttctaacagtcttcttactacggcccgaccgcgcgctcgccccgccgctcctgctgcagccccagggcccctcgccgccgccaccatggacgccatcaagaagaagatgcagatgctgaagctcgacaaggagaacgccttggatcgagctgagcaggcggaggccgacaagaaggcggcggaagacaggagcaagcagctggaagatgagctggtgtcactgcaaaagaaactcaagggcaccgaagatgaactggacaaatactctgaggctctcaaagatgcccaggagaagctggagctggcagagaaaaaggccaccgatgctgaagccgacgtagcttctctgaacagacgcatccagctggttgaggaagagttggatcgtgcccaggagcgtctggcaacagctttgcagaagctggaggaagctgagaaggcagcagatgagagtgagagaggcatgaaagtcattgagagtcgagcccaaaaagatgaagaaaaaatggaaattcaggagatccaactgaaagaggcaaagcacattgctgaagatgccgaccgcaaatatgaagaggtggcccgtaagctggtcatcattgagagcgacctggaacgtgcagaggagcgggctgagctctcagaaggccaagtccgacagctggaagaacaattaagaataatggatcagaccttgaaagcattaatggctgcagaggataagtactcgcagaaggaagacagatatgaggaagagatcaaggtcctttccgacaagctgaaggaggctgagactcgggctgagtttgcggagaggtcagtaactaaattggagaaaagcattgatgacttagaagataagtttctttgcttcacttctcccaagactccctcgtcgagctggatgtcccacctctctgagctctgcatttgtctattctccagctgaccctggttctctctcttagcatcctgccttagagccaggcacacactgtgctttctattgtacagaagctcttcgtttcagtgtcaaataaacactgtgtaagcta

SEQ ID NO: 140747 - DNA, 1267 bp, Homo sapiens
cagaatctccggcagtttttgtacctcaagaagtaagtggaacacctttccctgtcatagttattttcatccagacatctggtggaagcatcagattccttacagatataagagaggcatcatttaaaaggtagaacaggatcgacaaacaaggatttatgtcaggatctctcagcctctgtgttaccgagggcatttctaacagtcttcttactacggcccgaccgcgcgctcgccccgccgctcctgctgcagccccagggcccctcgccgccgccaccatggacgccatcaagaagaagatgcagatgctgaagctcgacaaggagaacgccttggatcgagctgagcaggcggaggccgacaagaaggcggcggaagacaggagcaagcagctggaagatgagctggtgtcactgcaaaagaaactcaagggcaccgaagatgaactggacaaatactctgaggctctcaaagatgcccaggagaagctggagctggcagagaaaaaggccaccgatgctgaagccgacgtagcttctctgaacagacgcatccagctggttgaggaagagttggatcgtgcccaggagcgtctggcaacagctttgcagaagctggaggaagctgagaaggcagcagatgagagtgagagaggcatgaaagtcattgagagtcgagcccaaaaagatgaagaaaaaatggaaattcaggagatccaactgaaagaggcaaagcacattgctgaagatgccgaccgcaaatatgaagaggtggcccgtaagctggtcatcattgagagcgacctggaacgtgcagaggagcgggctgagctctcagaaggccaagtccgacagctggaagaacaattaagaataatggatcagaccttgaaagcattaatggctgcagaggataagcgcagaaggaagacagatatgaggaagagatcaaggtcctttccgacaagctgaaggaggctgagactcgggctgagtttgcggagaggtcagtaactaaattggagaaaagcattgatgacttagaagacgagctgtacgctcagaaactgaagtacaaagccatcagcgaggagctggaccacgctctcaacgatatgacttccatgtaaacgttcatccactctgcctgcttacaccctgccctcatgctaatgtaataaactcaccaccatgcctttttttttttttttaatgagacagggtctcatatgttacctaggcgcactatagggatcctctagata

SEQ ID NO: 140748 - DNA, 797 bp, Homo sapiens
  misc_feature (1)..(1): n is a, c, g, or t
naggcggtacggcccggaattatgggatcccgaccgcgcgctcgccccgccgctcctgctgcagccccagggcccctcgccgccgccaccatggacgccatcaagaagaagatgcagatgctgaagctcgacaaggagaacgccttggatcgagctgagcaggcggaggccgacaagaaggcggcggaagacaggagcaagcagctggaagatgagctggtgtcactgcaaaagaaactcaagggcaccgaagatgaactggacaaatactctgaggctctcaaagatgcccaggagaagctggagctggcagagaaaaaggccaccgatgctgaagccgacgtagcttctctgaacagacgcatccagctggttgaggaagagttggatcgtgcccaggagcgtctggcaacagctttgcagaagctggaggaagctgagaaggcagcagatgagagtgagagaggcatgaaagtcattgagagtcgagcccaaaaagatgaagaaaaaatggaaattcaggagatccaactgaaagaggcaaagcacattgctgaagatgccgaccgcaaatatgaagaggtggcccgtaagctggtcatcattgagagcgacctggaacgtgcagaggagcgggctgagctctcagaagggggcaaatgtgccgagacgagcggcaccgcgtgcttgaggagctgcacaaggcggaggacagcctcctggccgccgaagagccgccgccaagctgaagcgacgtgcttctctacagagcatccagctggttgaggagagtggat

SEQ ID NO: 140749 - DNA, 775 bp, Homo sapiens
  misc_feature (733)..(733): n is a, c, g, or t
  misc_feature (752)..(752): n is a, c, g, or t
  misc_feature (755)..(755): n is a, c, g, or t
  misc_feature (768)..(769): n is a, c, g, or t
cagaatctccggcagtttttgtacctcaagaagtaagtggaacacctttccctgtcatagttattttcatccagacatctggtggaagcatcagattccttacagatataagagaggcatcatttaaaaggtagaacaggatcgacaaacaaggatttatgtcaggatctctcagcctctgtgttaccgagggcatttctaacagtcttcttactacggcccgaccgcgcgctcgccccgccgctcctgctgcagccccagggcccctcgccgccgccaccatggacgccatcaagaagaagatgcagatgctgaagctcgacaaggagaacgccttggatcgagctgagcaggcggaggccgacaagaaggcggcggaagacaggagcaagcagctggaagatgagctggtgtcactgcaaaagaaactcaagggcaccgaagatgaactggacaaatactctgaggctctcaaagatgcccaggagaagctggagctggcagagaaaaaggccaccgatgctgaagccgacgtagcttctctgaacagacgcatccagctggttgaggaagagttggatcgtgcccaggagcgtctggcaacagctttgcagaagctggaggaagctgagaaggcagcagatgagagtgagagaggcatgaaagtcattgagagtcgagcccaaaaagattgtgccgagcttgagagattaaactgtacgacaccttaagnactgaggctagctagaggnctncagaggagacagnntaggag

SEQ ID NO: 140750 - DNA, 953 bp, Homo sapiens
cagaatctccggcagtttttgtacctcaagaagtaagtggaacacctttccctgtcatagttattttcatccagacatctggtggaagcatcagattccttacagatataagagaggcatcatttaaaaggtagaacaggatcgacaaacaaggatttatgtcaggatctctcagcctctgtgttaccgagggcatttctaacagtcttcttactacggcccgaccgcgcgctcgccccgccgctcctgctgcagccccagggcccctcgccgccgccaccatggacgccatcaagaagaagatgcagatgctgaagctcgacaaggagaacgccttggatcgagctgagcaggcggaggccgacaagaaggcggcggaagacaggagcaagcagctcgaggaggacatcgcggccaaggagaagttgctgcgggtgtcggaggacgagcgggaccgggtgctggaggagctgcacaaggcggaggacagcctcctggccgccgaagaggccgccgccaaggtacccggggcgcgcggcacggcgtggcgcacgaatggctaactctttctctttctctctctccctccctgtctttccctctgtctctcccgctgtccctgtccttctggttctgtgcacccacacccctccccttcgggatcacgctgcctgctgcacccccctccctccctgtaccccctggccaactcccagctggaagatgagctggtgtcactgcaaaagaaactcaagggcaccgagaagaaaaaatggaaattcaggagatccaactgaaagaggcaaagcacattgctgaagatgccgaccgcaaatatgaagaggtggcccgtaagctggtcatcattgagagcgacctggaacgtgcagaggagcgggctgagctctcagaaggagaggcaatgtccaggcttgaggaggagttaaaactgt

SEQ ID NO: 140751 - DNA, 189 bp, Homo sapiens
actgcacttccagcctgggtgacagacaagaccctgcctcaaaaataaatgaataaataaatgtatgtatttaacaaaacttttataaggcctatttatgtgtcaggtgtgattctaagtcacttccaggccaggcgcgatggctcacacctgtaatcccagcactttgggaggctgggcgtgcagtgg

SEQ ID NO: 140752 - DNA, 479 bp, Homo sapiens
aataactgaatgtagtcacagaggaaaaggaatttacaagactataacattctcatttacatacaaaaaatatgaagtcaaaatgtgtaaggaattaaaggttacatagtaaagatagagatatctcatttcttctatttaaggcctgttgtatgatcgctttttcctaaaaatagttttctcttcctggttttgcctttaactccttcaaacaatccattagcacttagagctatctcaaatcacatgccaacttaccaaagaatgaggtcattaaatgactgcagcacaaggacacacaatttaatagggttagctaatatttaatataagatatttactgtaaatatcagtgttttataagtactgatctgaaaagactgagaaacaagtaaaacaagtttgccaccttttatgaacactgcttcttgcatgttcaacctgttacacatggacatacatacgacggtataagttca

SEQ ID NO: 140753 - DNA, 370 bp, Homo sapiens
aaaattagctggacatggtggcacaaaattagctggacatggtggcacaaaattagctgggcatggtagggcatgcctatgaccataggcatagctacttgagaggctggggtgggaggatcacttgagcccaggagctcaaggctgtagtgagctgagagtgtgccactcaagcgtaagcaacagagccagactctgtctcaaaaataaaaaaataaaaaataaatatattgatttagatcaattattattttaatggctattcaatagcctactgcactaatatgctatagtttatccatttccctactgatgagcattgtaggttgtttccaactttttacactgataaacaaggctgcaataaaca

SEQ ID NO: 140754 - DNA, 405 bp, Homo sapiens
tgaggatcccatggagaccaggctgagcaacatagcaagaccctgtctctaaaaaaattaaaaacttagccatgtgtggtggtgcgcgcctgtagtcccagctcctcacgaggctaaggaagaaggattgcttgagccgagagtttgaggctgcagttagctatcattgtaccaccacaatccagcttgggctacagagtgagatcctatctcaaaaacaaacaaacaaataaacgaaaacccaaaaaagtcaaggaggtcatacaaatgggcaacaagtatatgaacagaagctcaacatcaagcatcatgacggaaattcaaatcaaaaacaaaatgagacaggaagatcgcttgaggccaggaatttatcaccagcatagacaacataacgagacccatctc

SEQ ID NO: 140755 - DNA, 451 bp, Homo sapiens
gctgttctagaggatcccaggcgtcaaagtaactgtctgttctactaaaatgttaagcaccatgagggcaaagcctagctctctcttgctctctgctatcccccgcgttcccaggtaggcactcagtaagtgcgtgatgaatgatgaatggatttagacaggcagacagttagaggcaggaaagtagttctctgaatccaacttgctgatatgacaaattctcttaaacccaacagctgttaccaatagaaaaaagtagtctctaaactctcttttggtacctctaagactctgtggccacagtgtgaggaagcagctagtgtcccctgtggaacagagctgagtatcctttgtttgcctgatgtctgggggctaggatactaaaactaagactgccagtatctacccctgagaaacatgggtctctgcatgacatggttacttgacgcgt

SEQ ID NO: 140756 - DNA, 153 bp, Homo sapiens
acatcaaagtaacaaaactaaagttgctaaaggtatcaaatccagaatagaggttctagctgatccttgcataatcctggtgcctgtagtgataaattaacacatattagtgttgtttttaaaaaaccatcctatactgagcagaataatagt

SEQ ID NO: 140757 - DNA, 607 bp, Homo sapiens
gctttatccataacaactagaacaatagggagccacattagaaagaaggtcatgtttgcgttatttttataggggctttatgttttattttccatgttgggctccttctagatctttggatctgtaatacagcctccctcgttttgtgactatgtttccaaaccccaatttggaatgaatgacctgaagctgattatcggaatacttaaaaccagttagaataatagcccaggcaagttggctcacacctgtaatcttaacactttgggagtctgaggtgggaagattgcttgagcccaggagtttgagaccagcctgggcaacacagtgagaccttgtctctaaaaataataaaataaaataaaaaattagcccagtgtggtggcatgtgcctatagtcccaacaactcaggaagctgaggtgggaggattgcttaagcctgggaggtcgaggctgcagtgagccatgattgtgccactgcacaccagccagggcaacagagtgacaccctgtctcttaaaaaaacaaaacggctggatgcggtggctcacgcgtgtaatcccagtactttgggaggctgaggcgggtggaacatctgagatcagg

SEQ ID NO: 140758 - DNA, 407 bp, Homo sapiens
gctggagtgcagtggtgtgatcttggctcactgcaacctctgcctcccagcttcaagtgattctcctgcctcagcctcccaagtggctggagttacaggcacatgccaccacgccgggctaatttttttgtatttttagtagagacggggttttaccatgttggccagattggactctaactcctgacctcaggatgcgcctgcctcggtctcccaaagtgctgggattatacagtcttgagccaacatgccctgcccaactcatttatttaaattttatccttcttaaactttttagtttgtttaaatgcagggatttatattaaatatattctccttctgtggctgttctgccattgtaactggttgctatgaagctgctgtttttccaagatttgaagtgcaga

SEQ ID NO: 140759 - DNA, 488 bp, Homo sapiens
gagtatttaacttacatataaggagttctaagaggagaacaaagagaacagaaaagagacaattgctgataattttgcagtattaaacaaaggtatgactcttcagagtcagaaatcacagcagatgcccagcagcacagatgaaattagcacccagatgcaatatagtaaaaccttagaaaataatagaacaattaatctgcaattttttttctttctctcctttcttgaaatccacagctaaaacaatatgtatgaatccttgttccaactgcctatgaacctgtggctattaactgtgcaggcttgctcttctgtcttccaccagacacttaaactctagggtacaagtgctaaattatctgcacggacctcttgaaccactgcactaacttggcttaagataagtcacaattgcccaacactgcacattacaactctctgcaaacaagagtttcagtaattcttcatagctatattggactttc

SEQ ID NO: 140760 - DNA, 268 bp, Homo sapiens
atttaggctgttatgattttgaaatttttatttccctggcttgaagaccagtacttgttctcactgccattattaaatatttccaactgagatgcaaaaagattttggcaccctctcaataaataagcacaaggtcagtttgtttggtttttcagttatacttctaaaaactaaaaagtattaacaaaccagagaacacagctaaaacacaaagttacatttcaaagtgcaagtgttctgatttaattccctaacatgaccttgagtt

SEQ ID NO: 140761 - DNA, 263 bp, Homo sapiens
acagccagagtgagttcttgtaagaacctgaccactctgatggcccctccctgtgtcattaccaatactgattcctccctagcctcaattctaaggttactccctctaggactcaactccaaatactctccaatcccagcaggagccgcaagccactgatcccaccactgcactgcccacccccatgtccctctctttcccagctcaccttctgtgctcctaatttctcccttgccagcaccctctgtgccctaggcccctcc

SEQ ID NO: 140762 - DNA, 422 bp, Homo sapiens
tgatcacaccactgctctcaagccaaggcaacagagtgagaccccatctcaaaacaaaacaaaaagagaacactaatgccgttagaaaagaatgctttcattactaacaccactggggagccaagcaattcaaacccgcctgactccatgtggcagcttatttcaagtacaggcaaggagactcaaaggaaataaacagtgtgtgggggttctagcgatgcaaacctataaggttcttgtaactatcataatgcttgatcaatacttattaacaaaccacattctaggaggaacaagttttaaaagcctgaaaattggacagccaacgtcctaaaggtgagtgagtagcagtgagagagagaccaaacacagtgtgtccctggggtgatgctgctgtgctttaggtgaaaatgtcagtaaat

SEQ ID NO: 140763 - DNA, 468 bp, Homo sapiens
ctccactcactcagagtatgtgactagatattggacaaaacagctagtttcaggccgcccccatgacacagagctgacataaccacagccctactacctaacaatacccctactagagcagctgacttcccctctgagaagaacttaggaacttgtgtactaaaccaaagagacgaccagataaggactccaagcactctgatcagcaagtccaccctggttcctctgtcccaagccaggacttaccctagtctagaggaagttctcaccaagcatagcctaaattcagctatcactttgcctccactttgagcccacatgaaggttggcagaagaccctgagggaaggggatattaatcatcttctctctggtcaggagtagctgataggaggccgggcgtcgtggctcacgcctgtaatcccaacactttgggaggccgaagcaagcagatcatgaggtcaagaga

SEQ ID NO: 140764 - DNA, 346 bp, Homo sapiens
attgctagtgagcttaagtaccttttgatgtctttattggccatctgtatttccttctctctttgtttctcttcccccatccctagatttctagggactgactttaatataggtatttcacatgcattctgaatcctaattctttatcacatatcaactaactcctcccagtctgtagcttgtcttaactggtggtgtcttatcagtcagatatttgaatgttggtatgtttttgtcaaatgtgtctatctttgtttatggctagtgtttctgtgtgtcttattttaagaagtcttgtgttatttaaaaagtaataattccctcttgtccttttcctttaggttct

SEQ ID NO: 140765 - DNA, 307 bp, Homo sapiens
gtttttctgctttatatagatgatgaaatagagccagaagttgtttgtcttagtttgtagattgctacaaagttgatgtcagcccaaatgatctgactacaactgactagaaaattaggtctatcttacaaccaagaaatacaatgtagccagaatgggcaggttagagcagccttctctggaggagtaaatgcctcctgttaatgttctgtaaatgttctgtcttggatcctctttactaaagtttcattttaagaatttaaactgtaaatgtaatgctgcaaatggacattgaggtagcagtgta

SEQ ID NO: 140766 - DNA, 130 bp, Homo sapiens
ttgcttgattgggaaaaataatactcccagcttgaacaccttgaggttgggaccacatgattggacatgctggttttaggatctctgtattaatctactgattcaaaatacagctcccaccaaaaacaaa

SEQ ID NO: 140767 - DNA, 236 bp, Homo sapiens
tttttgaagcgaggtaaaaataagatttggggtgtcctcataacaattataataaacaaaccctggaaagatgactgtaaacaaatttgtttcatttttacagtgtaatagtggtctagagtaaagatgaagaaagtttgaaggaaggaagccacatacagaagtgagagaaccaccttgaagatagtttcatcctctgaagatggtttcattttcccttgagaaccccactcctc

SEQ ID NO: 140768 - DNA, 357 bp, Homo sapiens
agggaagaaggactaatgtctgtggacactctgaggctcacagggagaagccacacactcgcagcaccagatgagtaaacagaggcttggaggggtgatgaaatttgccaacagtcatcaatcgttccaggaacaggtgatgcttcccggcagtgagactcgaaaccagcgggagttcccagccagagacatgatctaagtgccaatggctgaatgtctgtgagcatttcaagtcattttaagaataggcaacattagcggcaccattaaagcctgctgttcctccagcccatcactgccatccccacctattaaaataatggcatgaaaaataaacagcctttatgtacaatttta

SEQ ID NO: 140769 - DNA, 494 bp, Homo sapiens
atttactgatcacctgccgtgtgccaggcactgtgctaggcacttgagagacagaatacagcaagacaaacatagttgcttcctttatggaacttatagtccagcaaatatgagactccctggatttgagtcacaatggctgcctcctagctgaatgactttggggaacttacttaacctcttcagacctcaatttccttatctttaaaaccggaataatcatagtactttcctcatagggcagtatgactattgaattgttgatatgtgaatgcatgtgaaactcataaatcataagattggcacttacagcttgtttcactgggttgtagattaggtgtgcatgtatggtttcactaaaagcttgtacttgaggcctaacaaaattagcaatttaattatgagtgtttaataaacgctataattactggacacgactctaagtagcagaagatatggccggggcgagcagatagatgttagagagtacaact

SEQ ID NO: 140770 - DNA, 284 bp, Homo sapiens
aaaaaaagtaagttaacattcattatgccacagacacaggaagcctttcagtttctccctctctccaaagcccgcatatgtacacatggctacttgtccaagttttaaactaactttattgtagttttaaactgttctttttttatctaatcacttgaagttattagaaaaaaaaagaggacgaacagggacgacgagagagccagagacagacacatagagagagaaacagaaaaactaatgccaaacaaatttcatcttctggggataataacagctgactt

SEQ ID NO: 140771 - DNA, 348 bp, Homo sapiens
ttgcagatttcattcaggttgagagaggaaacaagatcttccttagaaagagaagtgagggtagagaactaacaatctggtctcaatgggatatccaatttgccctgagtggaaaccatagttaatgtaaggagagagacgtaccaagaggcttaggccataggctgggatgagtctagaagccaatgattcaactccacagcaaggtgcgtttaagaactgaccaaaggtctgcatgagaagcactcgcaaggccagtctctggcgccctaagttgggtaaagccatggactgtgtgtgtgcgagataaggtggcagggaaataagaaggcaagcaacgctctccca

SEQ ID NO: 140772 - DNA, 502 bp, Homo sapiens
gttaaaagaacctgctctccattatctcaagtagcagaatatgttccaaatgcttcaaaggaaatgctaaactgtcacagctgtagatcatgcgcttgccctttcgacccccacatcctcatcacctgtttctttgtttgatcaccaataaatagcctgggcttccagagctcggggccttcacaaccgccacacattagtgacagccccctggacccactttctctctcaaactatcttttctcattcctttgactccgctggactttgtcacccccatgacctggtgttgagtccgatcaacccaacagggtttctgtgtgaggtgatatcaaagctctggactaggtggtggtgatggctgcacgacactgtaaaagtacttaatgccactgaattatacgctttaaaatagttccagtggccgggtgtggtggctcatgtctgtaatcccagcactttgggaggccaaggcgggtggatcacttgaggttaggacttt

SEQ ID NO: 140773 - DNA, 519 bp, Homo sapiens
aacagtagactccctcatagagctgtggcgaaaatgtaatgggatcgtgtaggtaaagtacccagctatgtgcccagcacactgccatgaccaaataaatgccagctgctattatcattgctgctgttcttggtatttcctgcagagaaatcaatttcacaggaatgcagggtgctgattggtagtcggtgatcatgttgccagaaagcaaaacatttcttttcaaatgaaacaattgtttcttttacattttgccaatgttcccagtctccgagctcagtacggcacagaaatgcccttcaatgccgtccatggaagccgggacagagaagatgctgacagagaactggcattgctcttccccagtttgaaattttcagacaaagatacagaagcccctcagggtaagtcatcaaggcagacttggtctttattaaatcatagatacaaggaatttgtaactatgtgcttgagtgtgtgggggattgataatttttggtaactaagtcttcaacctaa

SEQ ID NO: 140774 - DNA, 517 bp, Homo sapiens
taaaatacactaaggcactacaaaaaggtgcaaaagcccaagtattcagctcaatgttttccatgagttgccacgtaactggcactaaaatcaaggagaaacattatcaggtcctcagaaaccatccacccaccccctaccaccaccatgtcttcttcacagacacttggaaaaaccgttcaataagtatctatcaaaggtaaattaacaaaatgggtttccaaagtggttgtactcccaagctcattcacactgaatggacaatgttgactgccttgtctgtttacccttctgaattacaacatcctggggtcacggactaccttttggtcgcctgtttacccccaacttctacaaagagccagcacatgaatgaacgaatcaatgaatgaatgagctaatgaaggagtgggatgaagaacatacactgtcagtttgagcaacagttttgattttcttctggtctttgttaaatgtgcctctctcattggaacccacagttacagaaagattctgg

SEQ ID NO: 140775 - DNA, 181 bp, Homo sapiens
ccatctctaagacatcttttaaaggttttgttaaaggatttgtttgcagcctgctcactggagatggctcttaaggattaacaatcaccattcaggaactgtgatgagtcagtaaatcagactttttctctctgctcagaagcaagtaagcatcagctggggataggtaagttaaatgata

SEQ ID NO: 140776 - DNA, 263 bp, Homo sapiens
agagggaacggatggatgaggccgtccccagagggaacggatggatgaggccgtccccagagtgaacggatggatgaggccgtccccagagggaacggatggatgaggccgtccccagagggaacggatggatgaggccgtccccagagggaacggatggatgaggccgtccccagagtgaatggatgagcacccagcctgagcccgggaaggtgctgagggttagcacaggccgcctgctgctgtagaagtgcgcctgggtg

SEQ ID NO: 140777 - DNA, 497 bp, Homo sapiens
aatgttcctggcagaaggaacagcctatgcaaaggtcctaagacaggagcaattctgtgtttgaggaatttttaggagccaatggctgaagcagagaagagtagggtgagtgactgagagaatagaggagatgaggttaggaaataagaggccagatcatctagggctttcaggcctttttaaggactttggcttttactcttagtgactgtgggggtacctcatagggttttgagtagggaacaatattgactaacttgcatttttaaaggatcactctcgctgctgttttgagaataggctaacctagggcaatgttaaagctgggaggccagtgaagtattatagtcattgtagagatgaatttggtttgaacagtgtgataaggggagaggtgacaagtggtcagaatatggatgtattttggagactgaatcaatagaattttctcatggagtggatgtgcggaagaatgaagagaggagtcaaggattcat

SEQ ID NO: 140778 - DNA, 450 bp, Homo sapiens
tgtttgagtaggcagggatgatccagcagagaggggagagttgatggtgcaggagacgatgcaagaactggaaagtgaggtatgtggagtcacatctcccttaaaaatagaatggggagattttgcatcaaataggataaaacagattattagctgtttagcataataatcttaaaatgattaattgatgattttgcctgaatcctcagatgaatttttcatcttgcagccttgtgtgctttttaggtaagagaacccaatggtcattgtatctgggagcgtttctttgaaagcaaggtgttttttgaaagtagcatttggccatattaagtccaccaaatcttttgaccactgttcactatacactggctttcaactggattcaccttttgttaaatgcggtcaaccacgggaatgagtgaccttgcgactttcacaggggactcactc

SEQ ID NO: 140779 - DNA, 362 bp, Homo sapiens
gacccacatcgctgacctcttccaggctggagagcagtggtgcgatcatagcttactgcagccttgacctcctcggctcaagcgatcctcccgcctgagcctcctgagtagctggaaagtgtgaactccatcatcccatttcatagaggagaaaaccgaggctcagagatggtcactcaccaaaggtcacccagctgggactaagtgacagagctgggactacaacccacatctgtctggctccaaaacctccatacctccatcttatctagaaagagtgctggatgaggagtctagaatcagggtctaagtcctgcctctaacctgctgtatagcctcaggtaagtctctttccctttgtg

SEQ ID NO: 140780 - DNA, 209 bp, Homo sapiens
gctgaggcaggagaatcacttgaacccgggagacagaggttgcagtgagctgaggtcagcgccattgcattccagtctaggtaaccagggcgaaactccatctccaaaaaaagggctgaaggcaactgccttgtctttccgcccatgaagacacattgagagccaccacctgtgcagcagggagcagccctccccaggcaccgcaccta

SEQ ID NO: 140781 - DNA, 183 bp, Homo sapiens
gggagctttcaggtttctacactgtgaggaaggtcttatggtttcaacaaatgaagaggcttatgtaaaagaaaactgagccgggcacagtggctcacatctgtaatcctaacactttggggggccgaggcgggcggatcacgaggtcaggagatcgagaccatcctggctaacatggtgaaa

SEQ ID NO: 140782 - DNA, 442 bp, Homo sapiens
gtctgaagctcaattcctggatctgaatgctatggccctttaagaaacaaggaagcagtttttcagtagttcagagtaatgaacaagatggggagcaaactattaatcaaatggtagactactcagatcaatcagatcagcccacatacaaacaggcaagaaatgctcagagagccaaaccccagagaagcagaaggcagattttcattccagaagattccaagagtggggctgggcagatgaccactggcagggggacactgggagcaaccccaaagactagtaagtaatcaggagggcatctttcaggtagcaggaactggccagttcctgcttcttgacagccgtatgggacaaaaggctacggttatggccagggcgctggcacgcttaacatggaccgtggcgagaggctgggcatcacaccagagagtgtacagcc

SEQ ID NO: 140783 - DNA, 315 bp, Homo sapiens
ccaatttctctgtcccagtgagatgttgacacttgtatgatccctgcttggagacttccctcttctggaacctgccctggctcaggcatgagggctgactgtcacccttcgataggagcccagcactaaagctcatgtgttggcagtgttcttgcgggaaggaaaaagaccagccagcccatttgttactgcacaagcaaacagcttctggtagctgtacagatacatgcactttctttcctcactgtgtttccatagacagatttagtgctgtagaagagtagagggcagtcacgggaaggagttcctgttttt

SEQ ID NO: 140784 - DNA, 392 bp, Homo sapiens
  misc_feature (318)..(318): n is a, c, g, or t
attgtcaaagtaacattgcttagatcatgtttagtcaggatgatttagagaaatagattagaactccttttatccagtctaatataattcattgtaaaagtacagttggtcctctgcatctgtgggttccatattcatggattcagccaaccttggatcaaaaatatttgttaaaaaggccaggcacagtgactcacctctgcctcccaaagtgctgggattacaggcatgagccactgcgcccggcccatatgacctgtttttcttttatagagtgggagaaatatgggaggtgacttggtgtcagtcatctgtgtnggttaaatcaagaatataatccgtgttttgcttctgaatagctctttataacagtgatgggttactttgacgcg

SEQ ID NO: 140785 - DNA, 502 bp, Homo sapiens
ggtgttctagaggatacccttcgacggtgtctgtcccatggtcccttttattcccgattcctagaggccagcttaacttggttggtttggaaaatctaccaggtgaagtcttctcctcagtggcccgtttcgaaagggacatgtcgggcacatgattgcgggtccaagcaagttcagccctctcttgctactgttacatacagaaaagaagtccttaatggttagcctccaaagttatgaggcagaagaacataatgttaagcacggaggaacaaaactccccaggataaaaatcctgactctgctaagttcctagctgtctgaccctgggcagctatttaacctctttatatataattttctcatcaggaaaattgggataataaaatcccctaacttacaggaatgttatgagaaataaattagttaattcataagaaggacttagcattactgcctggcacatactaagtgctcaataaataatagctcttgttattac

SEQ ID NO: 140786 - DNA, 181 bp, Homo sapiens
ccaccttggcctcccaaagtgctgggattacaggtatgagccaccacgcccagcctggctcagcatttctaaagattgctatacctcccccatcaggaggcagtatggtaaggtgggtgccttacccaccttacagaggaaagggaacgtgcactgaaaagttaataaagcaagagggcta

SEQ ID NO: 140787 - DNA, 350 bp, Homo sapiens
gttttaagtgacactttaagaaacactgataatattacaggttttcagtacataacgttataaaaacaattcaactaacaagtggataaagaaaatgtggtatttatgtaccatgtaatactactcagccataaaatggaacaaaataatggcatgtgaagcaacctggatggaggtggagaccattattctaagtgaagtaactcaggaataaaaagccaaatactgtatgttctcacttagaagtgggagctaagctatgaggacacaaatgcataagaatgatataatggactttggggattcatggggaaaggtgggaggggtgagcgaaaaaagactacacatag

SEQ ID NO: 140788 - DNA, 107 bp, Homo sapiens
ataggaatgttaacaggaatcacctcaaggggtgaggattcaataattgaatgttaagcatttagaactgtgccgggcacttaataagatgaaataaatgtctgtta

SEQ ID NO: 140789 - DNA, 165 bp, Homo sapiens
atcaggaagttaatttcaaatgattgtggtactgtgtcactgaggccacagagtcctaacaaaggttaggaaatgcagacagtgactctcagcatgagttttcttgcacagcaaatgtaaaaatttagaaacacagtcaagcacatattgtttatttctgcttta

SEQ ID NO: 140790 - DNA, 783 bp, Homo sapiens
tccaaccagccgcaaccatgcccaggaagaaggcggcggtggcggcctgggaggagctgagctcgggcaacggcactgcccacgccagggcccaggaaacgtggcggccccgcagccggaagcgcgagcctcccgagcgctgcagtagcagcagtggtggcagcagcagcagcggcgacgaggacggcctggagctcgacggggcccccggcaggggcaagcgcgcggcgcagcctgtggcagcaggcaaggtgggcggtgcggctgtggtggtcgccgaacccgagcacaccaagaagcacgtcaaacttgagacgtgctgtgtttactcaaggtttaatggatttagggctgtgcaggctgtgctttgttaaaaaagcgcttgaaggcagtatgcttggtaaaagtcatcaccattctctaatctcaagtacccagggacacaatacactgcggaaggccacagggacttcctcacaaagtgcaaaggggagcttttgattttgggggcaaccaactgggacttgattggtcgaaaataagtgcctaaacaaggccaggagtggtggctcaggcttgtaatcccagcactttgggaggccgaggcgggcagatcacaaggtcaggagatccagaccatcctggctaacacggtgaaaccccgtctctactaaaaatacaaaaaaaattagccgggcgtggtggcgggctcctgtagtcccagctaatcaggaggctgaggcaggagaatggcgtgaacccgggaggcggagcttgcagtgg

SEQ ID NO: 140791 - DNA, 226 bp, Homo sapiens
ttttacccaccactgtccctcacctatcagagcctgccagctctcaaaaaccttactggtgccagtgaactttctcaaagagaaatacacaccatttttctctctgtctccctctttataaaacctctaactttctctttatgttttggacacactaaagacacccattcttcatgtatgtgtcaaattgtaatacttgtatctcaaataaaacattttaatttca

SEQ ID NO: 140792 - DNA, 753 bp, Homo sapiens
acatagaaagacagcggaaaagcccactatatgggctttgaaatcccacctggaggtttgggctcccaaaacaactgactttggagcaactgtatcacaaacattctctctatatgtaagattatttaatctaaataactgcaatgtgaagtctggcagtaggacatcatcaattaaatttgaaacatatccagcttcagcttgatttagtaaccctaataatcataaaacccaatacaattgcttcaaagagaataaaatacctaggatacaacttacaagggatgtgaaggacctcttcaaggagaactacaaaccactgctcaaggaagtacgagggaacacaaacaaatggaaaaaatattccatgctcatggataggaagaatcaacgttgtgacaatggccatactgcctgaagtaatttacatattcaatgctatccccatcaatctaccattgacttccttcacagaattagaaaaaactactttaaatttcatatggaaccaaaaaagagcccatacagccaagacaatcctaagcaaaagaacaaagctggaggcatcatgctacctgacttcaaactatactacaaggccacggtaatcaaaacagcatggtactggtaccaaaacccatatatagaccaatggaacagaaaaggggcctcataagtgatgtcatacatctacaaccatctgatctttgacaaatctgacgaaaacaagaaatgtgggaaggattccccatt

SEQ ID NO: 140793 - DNA, 668 bp, Homo sapiens
  misc_feature (18)..(18): n is a, c, g, or t
  misc_feature (25)..(25): n is a, c, g, or t
  misc_feature (32)..(32): n is a, c, g, or t
tgcatgatacgatcgagncggaccntcgcgangtgttatccggagagtacttttcataggaactagtcctattaaaattacctgcagttattatgtcagtcagagaataaatattttgagtatcatatctgtacttgaagttcttatcctttacaaataatttatatttaaggaaacatgctttgacagaaatacacatgaagtctacattctctatctatttcatatcaggtgctctagtgttttgaatataacagttaagagatcaagtccctttaatcataaggccctgttagctagcgagctaaaccaaagagggaaacatttagcaaactatctgacgttctctatatttgtttgtcaacttgtttgttttttctctctgcaagtagaatatagaatttcagagagtgacaagtgctaagagaaaaaaataaagcaggataagggtagaatagggatatttcaaagggtaggttgccattttatgtagtgggtcctggaaaagcctcacttaagaggcatacaaaaaacctgaaggaaggaaaggagggcatcttgcaggtgtcttggagaagagagttctaggcagagggaagaatatgtacactctgaggagggagtgcgtgtttgtgggataacaagggagtcaagatggctggtgcaga

SEQ ID NO: 140794 - DNA, 209 bp, Homo sapiens
ggtgcttgcctatcatcctagctactcagaaagctgaggtgggaggattgcttgagtttgggagttggaggctgcagtgagccatgattgcagcactgcactccagcctgggtgacagagtgagaccctgactcttaaaaataaaatttaaaaaagatacattagttgtaattgggcacagtggcaccagctcccaaatggatacacag

SEQ ID NO: 140795 - DNA, 191 bp, Homo sapiens
aggcaataggaagtatggtattatgttcacgatctgatgatagcatttgttttaaaatattttaaaagattagacacaaaatgtgtaaaagacgtttaaaagtgaataaatataaatcaatgctgttgcaaataatttttttatcagtttatgtatctcactaggcttgacattaccagccttctgagctg

SEQ ID NO: 140796 - DNA, 224 bp, Homo sapiens
gataactacagcaacacctcagttatgactagaatttatattaacatataaatgcacatactttacatgaagcaaatgctcatcatttcccatttatctctactggatgataagaaccaatgaccacatactaaaattttggaactcctgagggttctataattatttcaaagggatatattaaaacgttccccctggctgggggcggtggctcatggctgtaa

SEQ ID NO: 140797 - DNA, 206 bp, Homo sapiens
aactctcctgctgaatcctcagctaacttctgcttatcttcttccacaaattgaacttttcaatcatgagcacagcacacaggaatgaaaagcagcttgtttgtgctcaactcaagccccatctccctgatcctgccaaatcatgagtttactttgatgtggtttccctttaagttctgcaagtcatgatttccctatggttgtat

SEQ ID NO: 140798 - DNA, 116 bp, Homo sapiens
catttgcaccccactaatttgccttaaaaacctcctgatctggaggcacaactcagagaggtgatctttgaacacaagttcactctttccccccaggttgttggctttgcaaataa

SEQ ID NO: 140799 - DNA, 417 bp, Homo sapiens
gcaaatactgtgacattttctataagggacttgagcatctgtggattttggtatctgcagggaatcctggaaccaataccccatggatacagagggacaactgtactaaatttggagactggattggcatgcctcagtgtcttccacagtcacctcttttcttgttaggtttcatagagaatctttgtgcatcttgaaagagaaatatttagacatgtttaaagagtttttgacacatgatctttgccatgaactattaggtaattttataagattcgcagttcatatggtaaattattttctcccaaagagccaaattaagattgtcagctggaaccaaatccttgctttcgttttaaagcatattaaatctgtattattgttggaaaatatatatagttattttccagcttgttc

SEQ ID NO: 140800 - DNA, 166 bp, Homo sapiens
agattgtgccgctttgtgatgaagtagagaatattgggcataattccatcctgatgttggaaggtgataggtgtgagtttagttctcatccctgcgacgcctctgggacgtcggttggtgaagagcatctgccttcctctagagagcctgagtcactttcacttaa

SEQ ID NO: 140801 - DNA, 131 bp, Homo sapiens
tgtaggctgcagccacacaaagctgaggatgaggaggaaggatggtctggggcaagctggggtaggccttgcatgccaggctattggcttctcgaacgttaccctgaatccctgggaatggaatggaaccg

SEQ ID NO: 140802 - DNA, 370 bp, Homo sapiens
agatagctctcactttagagatcccccattctgatggaggcagcagagcttctgcctcagttagcacccagatctcctgcccctggggaccctccagtctgataggggctccaacccacacctgccttccaagtcctgccatctctggctttaggagctcaggatggggagggctgttacgctgggctaaggccaggttgagctcaaagcttcctgccttggagaaggaatgaggagtaggatgtggtggttctgttggcaattgccctgggccaggagacaggcaagtggcatcaggcgccaggcagagcgcaggaagggtttcagcagccaggcatcaggcaagcaggcagctcatttctgtaggcaa

SEQ ID NO: 140803 - DNA, 648 bp, Homo sapiens
tatcaacaaagaatgggcttgaaacattataaaaattgacaatgatttgttaaatatgttttcttaattgtaacgacttctccatctcctgtgtaatcaaggccagtgctgaaagtcagatgctattagtacctacatcagtcaacaacttacacttattttactagttttcaatcatatacctgctgtgaatgcttcatgtgctgcctgcaagcttcttttttctcattaaatataaaatattttgtaatgctaaaaaaaaaaaaaagaacatagaagacaaacatcagaaataaacccatccactatggttaactcatttttgaatatggtgtaaagtcagtttaatgatgaaataatattattttcaacaaatagtacagaaattaaactatgcaaaaatactattaataatgatgttggatcattacctcacaccatacccccaaattaactcagaacatggcatacaccaaatataagagcaaaaactatgaaatttctagaagaagacagaaaaaaaattatgactttggcttagttgtttcttagaagtaacaggaaaagcataattcataaaagataaattgaaaaatcggacgtcatcaaaataaaaaatggtttatcttcaaagtcacctgttaagaa

SEQ ID NO: 140804 - DNA, 347 bp, Homo sapiens
gggtccagctgtagaagcgagatgggggcggttcgggaggcaaaagcaggaaggcagaaggaagcttggagctcatgagcccctctgtgctggcgcacggcccacgtcctctaaacaaaagggatgggctccttcagtggttccgtgggcccttggcaaagctcgtggaaacaccagctcctccccagcattcattaccaatgcgaagcactagccctttgcttggggcattctagacccccaggtgcctaggctgggagccctgggccaggtggtgggggggtcctggctgtggaatccagatgggacctaccactgcagctgggtattaggcagatttagccagg

SEQ ID NO: 140805 - DNA, 223 bp, Homo sapiens
ataacataaatgcccctcaaaaccaaaagtctcaaccagcaacccatcacctagcagaccacaagaaactcagatccaaaatgaccaagtatccccagtgggagaatccacaaaagaaaacccactgtaaggatggtacttcacaaaatccaggtggataaacctcaattctcaaaaccccctttatagtaccaccagcagccaaaccaccttcccaagtttc

SEQ ID NO: 140806 - DNA, 490 bp, Homo sapiens
ggtcagaggatccccgtcggatgaaaggtcatatgtttatgtgtgtaggtgtgtttgtgcatgtgtgggtgtgtgcatttgtgtgtttgtgcctgtgtgggtgtgtgcatttgtgggtttgtgtgtgtatgtgtaggtgtgtgtagtgtgcaggtgtgtttccacgtgtgcatatgcataggtgcatgtatgcatgtgtttgtgtgcacacatgtagttgtgtgcacgtgtgtgtatgggtaggtgagtatagtgtgaaggtgtgttttgagtatgtacatacaggtaggtgtgtccacgtctgcttgtatgtctgtgtgtgtgtgtactcatggctgcgtgtgtgtttctgtgtgtgtcaacaataagtagaaagtagacaaaacgctcggaacagctctgtgggccccatgccggcaaccagagtggagtcgtttccacaacctcagagccctgaaatggctgtttccacaacaggacacttgccaga

SEQ ID NO: 140807 - DNA, 199 bp, Homo sapiens
cttctggttgaattgtcttccacttcctctgctttgataacgttggcttccagacagcgtggtagaagagacagtgttgatgggtcttggagctagatgattgtgtaaggaatatttaaaaaaaaaaaaatgcaggtagtaggatgtcacaaccaacctttttaggaataaactagacaactgtatgaagaaattgttt

SEQ ID NO: 140808 - DNA, 319 bp, Homo sapiens
tagccaatgagatctatataaattatctcctggttggaaataaaaacaaagctactgttttcccagtgaaaaggggggaaactaggctacgtgtaccttttgtctttttctcttctttctgcctattctgtggcttaatatttgcatatgcaagaacattctggtgacaggcaagaggagagccgcctactccggtgcaacaagagacagcctacgtccatggtactgtcatgcagcaacagcagccctggatttattttttttttaaccttgggaaaatgacacctctttgcactaagccatggtagtaaggttgcca

SEQ ID NO: 140809 - DNA, 320 bp, Homo sapiens
ttcaataggagcaaaacagttaaaatttaggaataattacgacaaaagatttgtaaggcctgtacactgaaagctatagaacatttctgagagaaataagagacctaaatagatggagagataatatcatgttcatgaattggaagattcaatattgttaagaactcaattctctccaaattatctatggagttgtgatattatgttatctatacattgattttcatccatggttcctgactcataactcctgtagctcttgttataatgttggggtgctttaggcctcagaagcaggcctcaggaaatagaatctctct

SEQ ID NO: 140810 - DNA, 210 bp, Homo sapiens
gcagtgggccacgggatccctgtaagccatgggtgaccgggtgccctcttcccccaggaccctcctccccagggaccctcctcccccagggccctctttccccagactcttggggtagagacggcctgagtctcttgagatggagtctgaagcttctggtcatctgaactgcatgttgatgacaggaattgtcttcaggacgtcattagg

SEQ ID NO: 140811 - DNA, 344 bp, Homo sapiens
gaattgcttgaacccgggaggcggaggttgcagtgagccaaggtcatgccactgtactcctgcctggtgaccgagcaagactccgtcttaaaaaaaaaaaaaaaaagaaagaaaatttccagaaaataacacagggaaatcaagatgtagaaaatatggaaagaatatcaataaaaattctcatacactgcagaagggagaagttgtgctgtacgatcaatttgaaaaacaatttggcaaaatctagtcaagttgaaggtgcacacactctgttaccctgcattttcctattaaaatgtgcctgtggatgctaccgggcaccacccagatcccacccctcagga

SEQ ID NO: 140812 - DNA, 477 bp, Homo sapiens
cttaaccttctgcctcaggttgcccaggccacctctgaactctgccaagtgtcaatcaaaactcagcaacagataaagaaggcaataattaatgcagcagcctcacaagcccccagaaaggtgtctcgagtccgggtggtgtcgtccttgcagagttctgtggtggaaactttcaacaaggtgctgagcagtgtcaatccagtccatttacatcccaaacctcagtcctcctgccaatgcagggatcacattactgatgccttggtacaagtgcttggagtgtagggactcctttgaacttgaaaagagtctgacccagcactatgacagatggagcatgtgcatcgaagtaacatgcaacctttgtacaaagaacctcgtttttttacaacaaatgcagcctcctttcccatgcccgtgggcataaggagaaaggggtggtaatgcaatgttcctactcaattttaaagccagtcc

SEQ ID NO: 140813 - DNA, 189 bp, Homo sapiens
cagtcacatcactcagtacaccatcagttcagatggatcaggagtccatgccacatagtcttttgaatacatgaaagttttagtgttacgcgatgcagtctgtattctgtacctttctttgacccagagtattcctgagattcttccccatcgattgcagctctaggtaattgattttcattgtttgat

SEQ ID NO: 140814 - DNA, 395 bp, Homo sapiens
tgcaacctctgcctcctgggttcaagcaattctcatgcctcagcctcccgagtagctgggattacaggtgtgcgccaccacgaccggctaatttttgtatttttagtagagacagggtttcaccatgttggccaggctggtctcaaactcctgtcctaaagtgattcgcccgcctcggcctatcaaagtgctgggattacaggcatgatctgccatgcccggcctcctctacaattatcttaactcaatagttttttaataacgttgtttagtttcaagtacaggatttgtggttttctttctttcttcttttcttttcttttttcttttgaggcggagtcttgctctgtcgcccaggctggagtgcaatggctcaatctcagctcactgcaagc

SEQ ID NO: 140815 - DNA, 389 bp, Homo sapiens
cctgatccgatccatattgggtgtctgataaagtggtggtatgtagaacctgtatgtgtatacatatgtctgtgtcaatgatgtgggttctttctgaaacacctgaggtaggtaagaggtagccttacttgtttttccagatcttgctagaatagtagatttttagggtttgctttggattatggaacaatgtatgttgccttgaccattagggaggcttctgggtaatttccatagagattctggttggcctctttactgttgtctgaaaaaactagaccaaacattcggggctgggggtaggattcttattctctccaaagaactgatatgaatatgtgtgtggggggctagataggttcatgctcgctcacctcagcattgagggg

SEQ ID NO: 140816 - DNA, 437 bp, Homo sapiens
gaggctggtgggagaagggattggggagtggctgctaatggatgtgggacttttggggtgataataacattctggaattagtagtaatgactgcacaacccttgtgaatatactaaaaaccatgtacacttgaaaagtgtaaattgtatgctatgtgaatacatttcaattttttaaaataacagagcttaccgacaggggatgagtacaaaggggagggcgaaggaaaagatgagtgatattgggcatgttgaattccctgtactcatgggttgtcctggtggatatgacctgcaggcatcttgatatacatacatgtctggtgctcaggacagaagtccaggctagagatagacttgggagtcttcgatccatggacagccgaagaacttcacttatttgtgctatgggcttgggcaaactactttatctcacat

SEQ ID NO: 140817 - DNA, 271 bp, Homo sapiens
tccgcccgccgagcccgcagcctctcgaccccgcgcgtctgtgtcaaggcatggccaaagtgagaaagagccaagacaaaacaagttcaaatagcaatagcaaaacaaccaaaaggaaattcaaggaaagcaaatataaatgagaaaaatataattaagcaaaaatgaatgttcgcaaaggcaagacaaaaaaccaagtcaaggagtaggttcaaagaaaagatgaaacgtgaatataatttaggatatttataccgattcctattgaaat

SEQ ID NO: 140818 - DNA, 268 bp, Homo sapiens
gttgtggcgggccggagagtccccgagtgacttaacattctctaaaaataccccatttttgaacttcgacgacctgggttggcctgctcactctgtgtccctgcgctcctctgcttctctgctccttcggtcttgtgtgctggggacacgtgggcctttccagttccctgcagccacctttggtctgtaggaaggcagtggcgcagggagcggtgggagcccgggtctgcagggctcaaggtggcgacggcgaagcggtctgccccac

SEQ ID NO: 140819 - DNA, 550 bp, Homo sapiens
acggttgtgttttcagtgcccagcacatacgaggtgctcaataaatatttattgcacaagtgagtcaccacacctggttggattatttattcttggatttgtgcattgatggtgccaaataatattgccttgtcccactgatgctagtgagcatggggaggcacagagcctcttgccaggggtgggtggttgggggattcagtctgctccacaatattttccaatggtgtgaggcagaagctgctgatgaggttttgggaagaatctgcagagaataggtaaccgaagtcagcagtatagataagggaagaggtgctatgtacagctgcctaggctgtgcactgcataactcagagtggggccagtcacaaagactatgatctgaatggcattccctgatacagttcagtatgatgaccctaagatgggttatatttgctgacccatattgcagtggtgagaggaataacggaagtcaaaaggggcagaattaactgggaaggaaacagaactagaacagcatgtcactgaagtcaacagaaaagtttgg

SEQ ID NO: 140820 - DNA, 205 bp, Homo sapiens
gataagggaaccataaatgaaattacattaaaacaaagtgtgaaattgtttgttttgagttgtggatgttgtttgggggtgtttgtatgtgttttttgctgaggagcgggagctgtgttaagtttgagccataactgcatctttgatctttgttatttcagaaaaaataaaactctagaaaatgaagtaagggagactagtttaa

SEQ ID NO: 140821 - DNA, 464 bp, Homo sapiens
acagaacgagatcttgctcccatcccctcaaaaagtggtcatatcatagacaggttaaaaacaaagcaaagtgactgggttaaaaggggatttaattctggatgaagagcaacatcactgcagtggtttgaggctacatctcttgcattagccagctttgcttttgaactgaggacctactgtgtaattttaacctcttcagcctcagttgcttaatctgtaaaatggggataataatgtcaacctcagagggttcctgagaccatgtgagcgttgagcccagcgtctggcacatgttagcactctgctgctggcagctgggctcccatttctgctcacaaccccgtgcttttttttttatggaaacaaagtctcgccctgtcgcccaggttgggcgtgcaggggtgtgatctcggttcattgcaacctccacctcaaaagatcaagcaatactcctgcttcag

SEQ ID NO: 140822 - DNA, 616 bp, Homo sapiens
ccctcacaggctgaatggtggctgccctgagtgagcacagagctcacggggtgtgcaggggcaggcacggctgtcctcactgagttggctgccctctggggtaggcccagtatgaggtcccaagagctggactgacttagctcaggttcccaggcctagaacctgaacccagaccacctggcttgtcatcctgccttagcagaaggcctctctgaaacccacaagcagattcttgacccagtgagcatgagtcctttactctgcctgaaaaaaacaccaccaggtaacatcaggggctggtggtccctgatggcagtgcaatacattggccacagaggacatgggtattgtggaatcagaagatgcttgttgccacagcaaagaagagcatgatttcctggaaggcaacagaccccatggagatgaggctgctgtagcctctacctccctcattcatgctgcagaagtatagccttcctctaacagttgagggtctgaaacttctctgctttcctcagcccttgggagaaagcctaatgatccaaagcaagctgaatggagtcagtagacatggaaaactgggagccgtggtggccttcagagaagagaaccgatg

SEQ ID NO: 140823 - DNA, 332 bp, Homo sapiens
gacctgggttgctgatagaggaacactgttctgagtgccttgcaagggctgcctccttaaatggcctcatcaactctgtgagtagatactattgctaaactattactacgatctctgttttgcaaatggggaaactgaagactaagacttgcccaaggtcacacgggctcatcaatggctgaatgaggcttcaaacccaggcagtaggctgcctggctccatccctcctctaggctgctttatcagccacatgaatagatagaacgagggcaactgtggagtgtgtccctagagggagagcacagggctaccaggctgtggcaagcagcaca

SEQ ID NO: 140824 - DNA, 199 bp, Homo sapiens
ccagaggcaactaaacagaggcagctggcagccatggaaaatcaaatcccagagcttggggccattcctcctcaaatctctcccattcaggaagatgcccccacacaacctcagctactggggtgaaagtgccatgtgttactcagagcctcccaggacacgccttgggcctgaagctggggctaatccaatcatgata

SEQ ID NO: 140825 - DNA, 342 bp, Homo sapiens
ttgtattgttatgcacacacacacacacacacacacacacacacactctgatataagtgggttgtagtcctctggtgacttaggccgagatagttttttgaaaatgaaatgccataccttctttattgtagtggcaaatcaaagctaagtagcagtaaaactgttaatggactaggatacttgatgcagggagagggtcacagggcacaggcaagaatgcccttgccgtaaagattgcagagtagcagagcaggagcagcactttgtggaaagacccagcttaaccagaacaatgcccaaaaacctttgaagtgcagtgatgtgagagcgagactagaaaac

SEQ ID NO: 140826 - DNA, 305 bp, Homo sapiens
tttgtaactgcatccacttttcaagtaattaaaaaaatggtaagattactaaatgccttctttctctgttaaacgtggagtaagcttttcaaattgctgtagcattacttgaacatatcaagaacaaaatcaagagaaaaccaaaattgtaccactgtaggtttttactgaactgtgatagaaataggaatggtgattttagagaggaaaccaggtttgacctttcacttaaggtattttaaggttatgagtagggtgtggttcatattatgtacatattagtgttgaaatttataatagctata

SEQ ID NO: 140827 - DNA, 423 bp, Homo sapiens
ttctctgcctggtattcccatatctagatagctcctctagaaaacacacctccagttttttgcttgcagaggtctggctgcgtcacagagggaagacgggggtagtctcaccactttgcacatagactttcaaccaatccctctcttttcagcacatgcctcctctttatcttctctaatagtttctgatgcctccaagatctgaacctcttgggaacggcgagggacaatctacttatgctcatttgtagtctcttctacaggcactttagcttgtagcttttaaacttgctctgctaaaatggttacttctgcagttgtttttctcaacacaaactcttttcaaatctctaatctgctgatatttcttctgtcttcatcctcacagatttacacttttgaaatcctttattattcagttta

SEQ ID NO: 140828 - DNA, 476 bp, Homo sapiens
ctttcagttgcccgaggagaggagcttaaattcctagatttatggctctactttacctgaaacttttattttgcttttacttttatgtaccaatcgagtgtactctatttctgttggtgcttcctaaacagtctaagggagctctaaaaataagtaccaaccaatttatacagtaatgttcatagcgttgtttacagaatgcctcatcacaggtcggtatcctgggagaccccaaaaggtatgatactttcagagaggggccttagtgaaggaggtatagtttgcagtatgaatggtctgtctgtgatctctgaactcaattattctggtttttcaaaatctagtagtagtaaaagaagcaggcagagtgtagtagtcttgtgtcccgaatctctttactaacatgccatcttgctgcttctgtttggcctgattttcctcatcatgctctacatttctggaagtcctttggtctt

SEQ ID NO: 140829 - DNA, 395 bp, Homo sapiens
ccacaagaaattgctgaaaactaaggcttaggacagactggaacccagaaaagaaaggaaccccggtcttggtcatggttcatggcaccactcctttataacaatgccctagaagaagcccatgcacctcagtgggagcactcatgctgttcttggggaaccttcataggactgtgccctgccttgagctggaagtctctgcagtagacatccttccatattttgttcttcatcttctgaacgccttcaaggtttttcaattggaaaaattctatctgcataatcaacaatgtgctaaggaactctacttttagatcttcttagaattcatagttctttgtacatgaggattaaagcattcttctgtattctccacttgtgaaatagatttgagg

SEQ ID NO: 140830 - DNA, 373 bp, Homo sapiens
aggtcaggtgacgagacggtggaagagaatcccaggtggccgtggcagcatgtgcaaaagtgtggtacaccagggacttggacatggtgatcatggaaggtttgagaacaggaatagtggcgctcagtcagggccaggcttgaaggaggatcaggagcatggacttcatagggaaatcgttttgaagatgcagtttattaagcaaacaataatttgagtttttaaatgtgttgggtatttgttagatactgggatttttttttttttttttttgacgctgagtcttgttctgtcacccaggttggagtgcagtgagctgagatcacctcactgcattccagctcgggcaacagactgaaactctgtctcaaaa

SEQ ID NO: 140831 - DNA, 196 bp, Homo sapiens
ctgaggctctgagagagtaagtggccaggtcgctgtgctaagcaggggcaaaggcagaaggcaggtcccaaaggcaaatgctacaggaccaggcaggtcatataaatggatgaggtaggcagtggtgtggcaacagagcacagagggacccggagcacagaagggcgtgtccttggtctaaaaagagcagtaaagc

SEQ ID NO: 140832 - DNA, 427 bp, Homo sapiens
gttttcttccccaggacccagaacaatagatgcatacagtaggcactccactgttctataaaatgaatgaatgaaggaataacataaacagactgaatgaatagaacgagcagagatagtggtttgggaaaaaatttcctatatatcttcaactgctcataatacaccttaattcatataaaacaaacagaaactgcaaacaccgaacacctatgctatgttaacactatgctaacacatatacatatgaagcaggagcacttcttcatgagctgtcagaggtatgagaccagattaaaaaaaaaaaaaatcaggccaggcacggtggctcacacctgtaatcccagcactttgggaggccgaggtgggcggatcacgacttcaggagatcgagaccatcctggctaatgcggtgaaaccccgtctc

SEQ ID NO: 140833 - DNA, 169 bp, Homo sapiens
gccgccgcctactactactactactgctcgaattcaagcttctaacgatgtacggggatcatgccactgcactccacctgggtgaccgtgagacgccatcaaaaaaaaaagaaagaggaaagaaagaacgaacgaacgaaagaaagaaaaggtaaaatccctacttaaa

SEQ ID NO: 140834 - DNA, 808 bp, Homo sapiens
ataagacaagatgatgtactctagggcttttgctttaagtttgaagcacctggagtttctaatgctgatggtaattatagggaagacattaaaagggtaacttgctaaaggtcccataattgtccattctgtgaccaaagtaagtaaatttgcattaaaaatcactgagaaaatgatactctccaaaatttttccagagaaggttaccaaggacttggttaaagttagttagatgactaagaatgaaaactgtagaccatgaactgcatccactaaaataaaaaatcataagagaaattcctcaggattgcagtatcaatctggacaaaaaagatcattccaaattttgaatctacagagaccattctattattttccaacacttaagattcacattcaaaaatagaaaattctgcatgaaaaaagttttgctataagtatgtcatagaatattaaatgtaaaattcttctctaccattaagtctcctaaaaaatttacctctaagatacattttctctgaagaaatttcaaaattctgatattttcttcatatggtgctgacaatatgcaacccactcatattaatgctttacctagtcttagtgttatgcttaagacagttttagaatctcaaaaattttctttcataagcagaaaaacaatgctgacttctcttacctgtgaacactaaaagacttctcaagcaatctaaatgctgcattgagaagctataaataacctcaaacagtcccaattaggaacaatttaccatattaaaaaaagtcgaacctatcagaacctggaaag

SEQ ID NO: 140835 - DNA, 582 bp, Homo sapiens
ttttgtagcagtgcaagaatagcctagcataaaattgatactaacagtggggaatcactacaaagatgcttgaaaatgtggaagcaggtttggaactgggtaacaggcagaagttgtaagagtttggagggctcaaaagaagacacaaagatcagggaacgtttaaaacttcttagagactggttaaatggttatgaccaaaatgctgatagtgatgtgaacagtgaattccaggttgccgaggtctcagatggaaatgaggaacttattgggaactgaagctcaggtcatgcatgttatgttttagcaaatagtttggctgcattctgttcatgccctagggatctgtggaagtgtgaacttcatagtgacagagtatgtggcagaagaaatttctaagcaacaaattgtttatgatgtgtcctggctgctcctaacagcctgtacacagacacatgagcaaaggaatgacttacatttggaagttatattttaaaaagaagcagagcaaaaatatttggaaaatttacagcctgtccgtggggcagagaaagaaaaagcttttaattcaagcaggctgtg

SEQ ID NO: 140836 - DNA, 1032 bp, Homo sapiens
atcattaaaattagatgctcccaattcagggctcaaggcacacaagctattctccaagttgtttcctcctatagaacactccggtggctcagactgcagatgtaatgtgtttaaagttttagtttgcaatttatgttctgaatgatgcggttcagtagagaatactttagtagtaatatctgtatcattaccacagtctaacccagaagaagactggggattactgccaacagacaatgctaccaaggtagaagaggaagaaaaactggtttcaatgtcaagccctgctacatccattccatcacctgagtcatcatcttctgattcaggtgattctcctaaagtgagcccttgagtatcttctttttccttttccaattctctagatagtctgtgaaaatggccagaaactgtgatacggtctggttcagaagtgatttcattaattcgtgtccacttagtaaactctgatttgggcgatcccatcattttagacaatacggtttttccttcagattccatgagttcatttaatggccttttgccaaggggagaagaacacaactcagacttcccaggggcagcttccttctcttgtgcagggctggcagacaatctctcaatgcatagacctcgagtgagtttatgaatggtcttctcagtttgtactgacttatccatctccctaacctccatttgtgtttttgtctcatgtaaaatgtctctttttctatcactcatggatcgagatgctgtggtccagtgtttttcaccaactaaggagtgtgtggcagaagattctctcagtgttgctgtgaaagtctcgagtccagaagttgtcactttatttacttcccatgtattcagagcttggatagcttcatgtgatttgggcttttcctcccatgtgccacttcctttattttttctcaatgagccaaaataattctgtgattcagttgtatcatcttctgaaacagactcagcagaatttctaagctggactgagtcattatcgctggaatctgtata

SEQ ID NO: 140837 - DNA, 105 bp, Homo sapiens
attcttagtagaaaataaacataacatttatgcttgctgtatcataacatgatctgtgcagatatgcatcctaaggcttagaaaagaaagctttcgaagaatggg

SEQ ID NO: 140838 - DNA, 220 bp, Homo sapiens
cctggtgctcccctgtggtggtttcttggtggattaggtagcaagggaagaggtgagaactgtggcaccagccacgccaactatggcacagttttctcatcaaaaaattccctgtaattgatggcaaacaatcgaatagcaaagttctagttttatttatttttatatagtgagtgagtgatagtgataaaggataggcacaatttagtctcaatttaat

SEQ ID NO: 140839 - DNA, 367 bp, Homo sapiens
tatctgaggtggagtctcagtgtgtcaccaagcaggcacgatctcatctcactgcaacctccacttgagttcaagcaattcctctgtctcagccgtcccaggtggctgggactataggcctgcatcaccatgcccagctaatttctgtatttgtagtagagatagggtttcaccatgttggtcaggatggtctcgatctcttgaccacagatggtccacttgcctcggcctccccaaatgctggaattacaggcatgagccaccaggcctgtccttggttttctgttgttgtgttggtttgctgagaatgacgatttccagctgtatgtctctctagctacaaagtccttgcttgagagagatacat

SEQ ID NO: 140840 - DNA, 357 bp, Homo sapiens
gcgggcatcttggaaggagtctaagtagggagacccatgttcagctctgtgtttgaagacaatctgtgacagctatgaggagaaaggatcagaaaagatgagagtgtggggtccaagttaggaccaaccatggccatttaggtgaggaatatcaaatgcccaagctaaaacaaaagatcattagggcgagaggagacctgagcaagccaggcctggcttgctcaggtctgggaaggcagatgtgaggaaatgacatttatggtaaagtctgagggttgagtgggtaggttgggaagaacattccagaaagaagcacatgaactacagcctggaggtggaagaccttagcaagccagg

SEQ ID NO: 140841 - DNA, 177 bp, Homo sapiens
tctctcgtccctctcagtctgctaaagtgtcaacagaaggtttttagaaaaccacaattcccgcatctgtttaagtgttcctcgcatggtttgtgatctagtctgtgctgccaacataaccaccaagttcacgcttctcaggcaggttacccatatcacagtggtggctggtggatg

SEQ ID NO: 140842 - DNA, 240 bp, Homo sapiens
taagtacatactaactgattcatacattgctagactctctttctgcatgcactctctctcatgcatatgtgttttactgcagtactatctgtttccccaaatagattagaagttccataatgtaggggaagatattctgcccatatcattggaacccagcagaatgcttaaaagacagcatgcctaaaataaatatttagataaatggaatagatggatgataaagaagtaaattaaaaa

SEQ ID NO: 140843 - DNA, 513 bp, Homo sapiens
cagttagctgagatggtgccactgcactccagccagggcgacagagcaagaccccatctcaaagataaaagacaaggggagatagttaaaagtaaatgagacaataagaaaagaatattgaagcgagcagatctgagtacctataccaactaattcaacacaagaatggtctctatctgatttctctgtaattctgcagtccctttactggaaatctaggagataagtgatgttaaataacttgccaaaaagttatacaggtagtaagtatgtgctgaaggcacaattcaaaccaaaggaaatctagtcaatttaggcaagtttatatcttaaagttattttaactgaaatttaagtgaaagggatagagagagaaggatatatgatgcggaactcaggatctaaagttaaaattgtgggctgtgtgcggtggctcacatctgtaattccagcattttgggaggccaagacgggtggatcacttgaggtcaggagttcgagaccagcctggcc

SEQ ID NO: 140844 - DNA, 184 bp, Homo sapiens
atttactagctagaaaagaaggaggtcgggggtgaaaagtaaatggtgtatgaagcccagaaattcctccttgattatccaagtgatgctgtgaggcaaacgcttccacttaccaagaagagcagaaaaatgtgcactttccttctaccagttacattatagctcttattttaagagacaaatt

SEQ ID NO: 140845 - DNA, 528 bp, Homo sapiens
cctaggagtatgaggctgtagtgaaccgcgatcgtgccactgcactccagcctgggtgacagagcaagatcctgtctctgtaattgacaaaaacaaaacaaaacaaaacactaacaaaacaaacttaattccaagttaacaaaagctgaggagttattttttcccaacttcaggctgcagccctgctaggtttgcaaagaaatgggaaatttaaggataactctgaaggttgtataattcatgccactggttctaaaaagcaaagttgccttccccaccaaaatccttcatctttcagacaaaggcagggttttcttgccgtttccaacacctgacagtgtgaactaccggagtaagagagcaaggaccagggcccgctgctcctcagcctgaaaggcggggcagccaatcagaactaatctctgtgctggaagtaaattcagtgttctcttccctgatctggtgcggcggggggctctgacggcaggggtgggcttgcttcccttggtgcccccatcccatacccta

SEQ ID NO: 140846 - DNA, 795 bp, Homo sapiens
tctggaatgaagttcaataaaggtgatttataggtcaataattctggacggaagccaaggccagctctcttccctcccacatacccctaacccacatgcatatagtgttcattagtgacaagagggagataaggtcctaatcagtctaggcaggcaactgcaataaccaaggagtactctcattatctaatatgaagaaaagattttctattcaggtgagacatttggtgcttaagattcaattcagaagctacctctgtgcagaatgcaattacatacatggccttgaataagtcatttttttgtgcctcagtttcatcatctatgaaatgggactagaggggttgagaggaagagagactactatgtgacaacccattatattattctatacctactgaaatggagaagcaagaggaagaagagatgcctatgtttttcaaggacttggaaagcgttttgcttaggtctataaaatgtatatagaaagcattgggctacttctctaggactgtgttgtaattagaaggggttcataatgtatcttcgaacaaaagaaaatggagctttctgatggtatcagtttgataaccgtaaacagttcacagtaaggtaagaaggtacattttggcggaagccaacattgcatttgatgtattcttaactcagctaacaggcaggctttcaagccacgttatctgcccccgcatcttgacctcatttaacaagttgctatgggagcccagtgaaggttgatgcaattttcttatctttggaggaagaatgtaactgtgc

SEQ ID NO: 140847 - DNA, 1107 bp, Homo sapiens
atctcttctgatgcgaagaggtcactgagcttggctgtgttagccaggtttaggtggggctggaccgggtagggataggggactgtctgacctctcccagggactgtgttcagggaacccaagggaatctgagaaggaagagaaagttaccacctttgacacatgtggcagagttctctggaacctctcctctgttcctaccacaggaaggccacaggcacgcaccagggctgtactggcctaaaccatagttctgtgctgactgagaggttctgaaattagaaaagaggtctaaatcctgcttccaggtttttgtgaggtggagaaaagcagagtgacctgggagaagtggttatcaacaacacagctggtgacttcttccctggggtgaggaaggttttccctttccctgccccgagctgcagtggtgcagtctgttaccttggagaccagctaacacattcccgcagggcaagcttcgctgctgagttgcttggaggagcttggagaaaccagaagtgagatccaggagaagtaaggccctggagtgccaggagcccttctcccaaagatggagaaataaatgaagaaatacaggaaaataagcattgggtgttttgcaatggctacacaaactagtcatgtcttccatggtcaagaaaatatgtttctggaaaaccattgaggctgcaggggagtgagacccagtcttcagattgggaggactctgaagactggctttcggctcacagtttaaaatgtcagaaactcaccttggctgacctgataagccagggcacagaagtgctgtaagtctgaagctgttccccgcaccccccacagctgcagtgacacatgcaaccccctgggcccgagagatcccctcataaggctttgcttcttcagggaggagggcaccaatgtcgtgcagaaaatatgtttctccacccagatcatccgccattttgagtcaaagctttctgagtaagtatgtttctcactgtcctcccaacaccacagaactcaagaattatgtcatttcagtccgggcatggtggcttatacctgtaatcccagtactttgggaggccgaggcaggtggatcac

SEQ ID NO: 140848 - DNA, 689 bp, Homo sapiens
atctcttctgatgcgaagaggtcactgagcttggctgtgttagccaggtttaggtggggctggaccgggtagggataggggactgtctgacctctcccagggactgtgttcagggaacccaagggaatctgagaaggaagagaaagttaccacctttgacacatgtggcagagttctctggaacctctcctctgttcctaccacaggaaggccacaggcacgcaccagggctgtactggcctaaaccatagttctgtgctgactgagaggttctgaaattagaaaagaggtctaaatcctgcttccaggtttttgtgaggtggagaaaagcagagtgacctgggagaagtggttatcaacaacacagctggtgacttcttccctggggtgaggaaggttttccctttccctgccccgagctgcagtggtgcagtctgttaccttggagaccagctaacacattcccgcagggcaagcttcgctgctgagttgcttggaggagcttggagaaaccagaagtgagatccaggagaagtaaggccctggagtgccaggagcccttctcccaaagatggagaaataaatgaagaaatacaggtgagggtgagcatcacaagggttgacaggggtggtgagagggtgtcggggaggccagatactaagctctggactgagtgagaagatcgagg

SEQ ID NO: 140849 - DNA, 491 bp, Homo sapiens
gggcacagaggccgagggagccccagggagccacagggacagagacagaagcagagggagccccagggactgagacagagaccaagtcagagacagaggctgagtaagagacagaccaacaaaagagagacagagaccgagagatggagagcaaatgagagacaaggatagacagaccaagagatccaaagacgcagagagacagagaccgagatcgagagagacccagagagacacagagactgaaagatagaggttgggagagacccagagagagtcagagggcaagaatggccagagactcagagacagacactgggagagcagagaagacccagagacagacgcacagaccagagagacagagaacaggagccaggcactgagagtggcagggacaggaggtcagaggctgagggagaccatgggggacagagcagcagatgctgagccgggccctgtctgagctgcccggaaggaagcagccatcc

SEQ ID NO: 140850 - DNA, 336 bp, Homo sapiens
gtcatttcatttctaagactcattgttttaaaatttaactcttcatgcccaaagagacatcttctttcacaggccccttcatgatgaatgatactccttccttgactcttccaatgtacagtcattttccaatggcagactgcaaaagactagatgtttcaactaaaccaaacactaacagtcctttgagtgctgagcaccataactggtgaagacaatggctgcttggaaaagtgactttatccttaggagatttctccattcccttgagatttcttccctttcatacaactgtgaccactttgttcagatcttagaggctcaatctctctatag

SEQ ID NO: 140851 - DNA, 1113 bp, Homo sapiens
aaacattctatattttcttctttttatttaatgactctagaatctaatggattgtcgttgagaatctccccatacaaactccttgtttttatttgtctggtgctcatgctagagctataatttctttgattctcttttttgttttcacttcatgaagtgtttattatgtgagctggtcagaaattataagaatgatttttataaaatgtagtgaatgtaaaatttttagatgtaatttcataatatatgtattaagttattttagttagaacatttcattttgttgttttaatttaagaaccctatataagctgttttctttagttattgttcctttcagtttttgtaattgacataaatgagtttattttgccaatttgttcaggtaagtacttggaaaactttgtcagtcatggggatgttttgatctattattgtagtgaacaaacaaagttctgggtgtgtaatagatgcttcataattagccataaatattcctggagttagtttgtagctccaagtaagagattgaaaataatctgtggcgaacaaatggcattaattgtgcatgtggagaggacgtctgttctcaggctgcagaaccaactcattatgaatgtaaagaggatttcttttcttattttctaattatcttcagttttgtgatatctttatgatttatccccagctatgtatgcctcagagcctttcttcatttttgcgttatggctagtttgtcactgttctcttcattccacgtaatttcacgtggactttaggttaactggggtgtttgaggttatttataggttatcagtgcaacatttagatcacttgagataagagtaattcactatcaacaggtaagaggattaagtcagttggcattgtttttctgtgtttgtaaaagaaaaatttttaggagacaatggtaagtgaggaattttacatttaattttctgtgacatagcaaaacatttttccatacaaaatcttctatttatttatttattttagatggagccccactctgtcaccaggctgatgttgtgccactgcagtgcagcctgccaacagagtaagacccgtctcaacaacaacaacaaaaaaaaa

SEQ ID NO: 140852 - DNA, 1190 bp, Homo sapiens
aaacattctatattttcttctttttatttaatgactctagaatctaatggattgtcgttgagaatctccccatacaaactccttgtttttatttgtctggtgctcatgctagagctataatttctttgattctcttttttgttttcacttcatgaagtgtttattatgtgagctggtcagaaattataagaatgatttttataaaatgtagtgaatgtaaaatttttagatgtaatttcataatatatgtattaagttattttagttagaacatttcattttgttgttttaatttaagaaccctatataagctgttttctttagttattgttcctttcagtttttgtaattgacataaatgagtttattttgccaatttgttcaggtaagtacttggaaaactttgtcagtcatggggatgttttgatctattattgtagtgaacaaacaaagttctgggtgtgtaatagatgcttcataattagccataaatattcctggagttagtttgtagctccaagtaagagattgaaaataatctgtggcgaacaaatggcattaattgtgcatgtggagaggacgtctgttctcaggctgcagaaccaactcattatgaatgtaaagaggatttcttttcttattttctaattatcttcagttttgtgatatctttatgatttatccccagctatgtatgcctcagagcctttcttcatttttgcgttatggctagtttgtcactgttctcttcattccacgtaatttcacgtggactttaggttaactggggtgtttgaggttatttataggttatcagtgcaacatttagatcacttgagataagagtaattcactatcaacaggtaagaggattaagtcagttggcattgtttttctgtgtttgtaaaagaaaaattgtatgagattctatcataaagtgtgtaaaatgtaacaaaagttagaataagtaaaacattaatataagtgggttgtatattgtaccaccatatgaagaaacatcagaattttgaaatttcttaagaggaaatatatcttagaaataaaatttttaggccaggtggcggtggttcacacctgtaatcccagcactttgggaggccgagatgggtgggtcatgaagtcaagagagcaagatcatcctggcaaacatggtgaaaccccatctctac

SEQ ID NO: 140853 - DNA, 906 bp, Homo sapiens
aaaaaatgcaaagaatttgtaggtatgattagtgcattataggtgttttcaaatttctcctatgataaattaaaaatgtaatgttgggcattaatttcctaaacccaatgctcagcaattttctcaaattgtttacagtttttccaagagacttcagaaccattccctggagtgaattatttccaatggtgaagagtaatggatggatggcatgagattctcaaaaaaatcttgctcctatttcagaagtgtcactccagccccttgaaggtccaggaaacctggctgagtagtgtggtctatggaggtgcatgggcttcagaatcaggccaacgttgatcctgagtcccagccagctgcttagtagctgtgggatagttacacaagacacatctacaagaaaagtcatgataaaattgattgcaaaaacagcaatttgaaaaatttcttattgtattcatgtccttggaaatggcttttatagtcgttcctatcaagagacagattctgtttcccaaaccttgaacttctcttgacttatctgcactggcacagggtgccagtttggggcccaggtttaaaggtcctaaatgcttctgttatctttttcagaattcttccatctctatgacaacaagcccattttagctttctggagaatagcatctgagaaaagccaaagtgcctcagtttacagacagctcactcacagaagcagagccacctaattcaccagcatctaaccactcacacctgaaggagccaaactgagccagaagaatggcccggctgagcccagcctaaatttctaaccagctcaatcctgagctagtatgtttcgggattgttatgcagttataagttagtaatatatacacccattaaagacaggatctcaggacagat

SEQ ID NO: 140854 - DNA, 934 bp, Homo sapiens
cctgtagtcccagctactcgggaagctgaggcaggagaatcgcttgaacccaggatgcagaggttgcagtgagctgatgttgtgccactgcagtgcagcctgccaacagagtaagacccgtctcaacaacaacaacaaaaaagaagaaaatttttaggagacaatgtttttccaagagacttcagaaccattccctggagtgaattatttccaatggtgaagagtaatggatggatggcatgagattctcaaaaaaatcttgctcctatttcagaagtgtcactccagccccttgaaggtccaggaaacctggctgagtagtgtggtctatggaggtgcatgggcttcagaatcaggccaacgttgatcctgagtcccagccagctgcttagtagctgtgggatagttacacaagacacatctacaagaaaagtcatgataaaattgattgcaaaaacagcaatttgaaaaatttcttattgtattcatgtccttggaaatggcttttatagtcgttcctatcaagagacagattctgtttcccaaaccttgaacttctcttgacttatctgcactggcacagggtgccagtttggggcccaggtttaaaggtcctaaatgcttctgttatctttttcagaattcttccatctctatgacaacaagcccattttagctttctggagaatagcatctgagaaaagccaaagtgcctcagtttacagacagctcactcacagaagcagagccacctaattcaccagcatctaaccactcacacctgaaggagccaaactgagccagaagaatggcccggctgagcccagcctaaatttctaaccagctcaatcctgagctagtatgtttcgggattgttatgcagttataagttagtaatatatacacccattaaagacaggatctcaggacagat

SEQ ID NO: 140855 - DNA, 122 bp, Homo sapiens
ggatttgctggtgcagtacaactaggcttaatagggacatgaccagacacttcacaaaataatatgtacaaacagccaatgaacacattaaaatgtgttcagcatcatcagatatcaataaa

SEQ ID NO: 140856 - DNA, 128 bp, Homo sapiens
ggatttgctggtgcagtacaactaggcttaatagggacatggaaggactcaagtttacaactttacctcctacagattcttcctaattaaaaggaagtattactcgaagatatattcaagcaaaacaa

SEQ ID NO: 140857 - DNA, 238 bp, Homo sapiens
tgctttgcccaagctgcttcctctacacagaatgcttttcttccttttccacctttcaagctaaggcccagctgaagtcctgcatggtccatggagccttcacccaaatccacactgtcttgtcctaagaaagccagggatggcaataggcaatgatgtgtggaggcagctcctaccttctcactggttgttcaatatttgggaattttgtgaatgatgttaaaccattggtacctta

SEQ ID NO: 140858 - DNA, 451 bp, Homo sapiens
aaatcctgtttaatgtcttatatcttatctcgaaatctcagatcttgcatttaaggagtgttatatatatactttatagtatatgatgcattgtggattcattttttgcttgtttacaagttgtaaaaaaatatatatgtggtgggaatttgtggggttccaagaacagggttcctcaaggagtgtccttataaaacttaaggatgtattaggtccatatcagagaagctgctacttctatatgtgtttccaacctcagtagcttcaccaaaggcccatagctcctccctccatcttcatgttcttgtgaccaatgatttgaaaaacaattttgggaaaatccagagtaattgtgcatcagtaacatgtggttaagcaaaattggggtagcaatgctaatacttctgtcattgagcagttttatgtgtgttatggtaattttacattatct

SEQ ID NO: 140859 - DNA, 208 bp, Homo sapiens
caccatccaactgtaagtcgtatgaggaagggactacagtttccctcaccactgcatcctcagttctcacagtacttggaacataagaggcattcaataaatggaaatttttgtcaaggatttctttttcttttttttttttttttttgagatggagttctgctctgtcccccaggctggagtgaagtggtacgatctcaactcactg

SEQ ID NO: 140860 - DNA, 108 bp, Homo sapiens
cctacagagggaagtttaggaaatctaacttaattcattccacagccactcttgacatgacatatgaaccttcaaccagatgcatgtgttatgccttggtttaattat

SEQ ID NO: 140861 - DNA, 396 bp, Homo sapiens
caggatggggcaggaggacattggggggagcatgagcagaagctccccaaggaccacaggcgtctgcagctccttgtcttcatctcgaggccccgagtgccgatcactggtagctgcccactcaaacactccaaacacatagccagacacacccctgcttgttccccaggagtcctgccacctgtgcctggaggtcctctcctcacctcacagccctctttggtgtcagggaccccctgccccgaccctggccctgttcctctctgtgtcacatagtctgctgcctggggccgctgcttctttatccttggcaaatgtgtgtttgttgatagactgttggatctcgggctgacccaggagatgccagggccttgactgcccaggggcccaggcccc

SEQ ID NO: 140862 - DNA, 498 bp, Homo sapiens
aggcctaaggagccacaggagcctgggggtggggtgaaggagtgaccgagatgagatgctgggggaatcaggggtgtggctggctgtgtgtttggagtgtttgagtgggcagctaccagtgatggcacgcggggcctcgagatgaagacaaggaggctgcagacgcctgtggtccttggggagcttctggctctgcttccccccaaggcctcctgccgcatcctgccttctccatcccctccccgtgtgctgtcccctgcttgttccccaggagtcctgccacctgtgcctggaggtcctctcctcacctcacagccctctttggtgtcagggaccccctgccccgaccctggccctgttcctctctgtgtcacatagtctgctgcctggggccgctgcttctttatccttggcaaatgtgtgtttgttgatagactgttggatctcgggctgacccaggagatgccagggccttgactgcccaggggcccaggcccc

SEQ ID NO: 140863 - DNA, 251 bp, Homo sapiens
actacattttggagtgatgtgtgacacagccagagggaacaaaggcagtcacgcgggctggcacggaaagatgcaggagaagcggaaggaaactgtgtgtgatgcaccccgctgagaaacgaacagagtgggcgcccacggaggtgcagtgagccaggcggctggcagagcagcaccccgggtcagcttctgcctcccgcatttccgatggtctgaatcgtttgtggcagccaccatatattatttttgga

SEQ ID NO: 140864 - DNA, 175 bp, Homo sapiens
tcattgctacagatgctaatataaatcaattaggggctgacacagcaattggctgcctgacaaatgttccataataatgcagctcaagagaatgtggaatttctgaggtgctggttataacgctttcaataatagctgtaaattccatgccatgtcagcacaggtggaaagctga

SEQ ID NO: 140865 - DNA, 116 bp, Homo sapiens
gtcttccacgttcctctgggcagggacacacttcatatttccttgtgtaccctggcttagcaagtgtgttccataaatcggcatttcatatttatcaagtgagtggtgtccagtgg

SEQ ID NO: 140866 - DNA, 493 bp, Homo sapiens
tatgcagaaaaaacagggaaggggagcagagaaagcagaaggcagagagatagcttttattttaaacaaggcagttaaggtatatttcactgattaagtgacagttgagcagaaacctgaaggagataagggagaaggccatactgacatctggaaaaatgatgttcctggcagaaaaagcaactacaaaggccccaaggcctggcatgctggagcaactgcaaaggagaccattgtggctacagcacaaggggaagtggtaggaaatgaagtcagagcagctgggagagagtggtgtgaatcctacatggtcttatagaccatggtagggacactaccttttaatccaggtgggattttaatctgggcacccaggtgacagttttcagcaaagcagtgacttgatctgatatatacttaaaaggattattctggtcactgttaaaattagattgagggggcaaagagcaaaaggaggaagaccacttagaaa

SEQ ID NO: 140867 - DNA, 225 bp, Homo sapiens
gcctggggcctatagctgacgaggtaacaggtggaacgaagaaaatgccaacacccacggctacccgggatccacatcaacacctggggtgcagagggagcatggctctgtgcagacgctgcccgtccctggcgcggtcattacacccctccctcgacagcctaactccacgtggctttcccgcaaggtgtgaggaaggtgaggaagccacaccacagcccgggg

SEQ ID NO: 140868 - DNA, 390 bp, Homo sapiens
attcgcgccacacctgccctctgttcaatggcctgggcatgctccgggacctctgtcctccagttctccatcccccacccccgcctcttcatcctgtccagtggagcatggcatctgtgttctggccctaccccacttctcttttattctctcttctctgccttctccacccccatcctcaccctcacccttctctatccacactcagcccatttctgtctctggcagtctccacgtccaatcgtgtcatgggcttcttaccctgccccagctccagcctctgggcctctgagctcttcctcccttgaggctgtctcctctgagaagtcttcactgactccctaggctgagtcacatcttctagatccctctagtcctgcgtgccctcct

SEQ ID NO: 140869 - DNA, 411 bp, Homo sapiens
tgatcatccctgccacaggactcctgcatttccctattgtgtgtgaaactcaacagcatgaaaggaaaaagaaagttgaaagaagaaatgaaattggatccatatttttaatcattataagtatgagttatacttacaatgataatgttaaatggactttttctggggtcacagaattttggccaaagccccaaaggtgaagacaagtgacatgtaccccatgttgcaaaggagctgctagacatataccccaaatcttcaatgctgacaaaaacttccttcaggccgagcatggtggctcatgcctgtaatcccagcactttgagaagctgaggtgggcagatcacttgaggtcaggagtttgaaaccagcctggccaacatggtgaaacgccatctctactaaaagtac

SEQ ID NO: 140870 - DNA, 302 bp, Homo sapiens
ctgagtctgggagccccaccttgaggctgcactgcttccttttcaacaagcccctattctagaaattgaaagagtgttagggtagaatggggaggcaaaacttctgctgtggattaaaacatgtaaattctctccattttcacctcttttcatagcagcagccaagaaattttcccttcaaaaatccatcttgaggcattcccttctttaacaaaccagtgttatttcagctcaagatgattaaatgagggttctggggaagtacaagagtcccttcaaggaaatatcttagggccatggat

SEQ ID NO: 140871 - DNA, 399 bp, Homo sapiens
ttttcctcctccttctgcagcttagctactcttacttgtccttcaacaccttacaaggaagaaatacttatgaataaatgtgggctaataaaggaagctacagtggaaagacaggtggcaaaaagaagacaggcacactgatgaaaactcaattcagtatatatcctataaagtaactactatgtgtccactgctgtgctaacccttcagtgatggaaactaagtgacagaaacttaatccaaggaggaaaccactgtgatcaaggagataagatgtcacaaatgaaacaagccagaacacaccccagggtgggccatctggtaggtgctatgggcagtcacaagggaagagctcagtggggctggagttgtgagaaaaagcttaggaagaggtggcct

SEQ ID NO: 140872 - DNA, 108 bp, Homo sapiens
aggcttttgactgaaatccatgaatcatgccagtagtgaaggtcatgtcggtgaagatcagtcattcctgaacttaatcaaaattcttaggctggaaaggaatggtgg

SEQ ID NO: 140873 - DNA, 167 bp, Homo sapiens
aggccaggcacgatggctcatgcctataatcccagcacttgggaggccgtggcaggcagatcacttgaaaagccatccatgatccatccatgatccagcctcgccatccatgatccagcctcgcctctcttttcctcacatatcctgtctactttactccccacatt

SEQ ID NO: 140874 - DNA, 292 bp, Homo sapiens
ccagaggcaccaaggaggccagaggcaccaaggaggccagagtcccaatgaggcaggattggtggagcaagggcccgcaaaggcctcctcagtggcctcgactccctgctccaatcccttcacccagcggcgctaatctgaaaccttgatctgttctttattctcccggtcccggctcacacactgatggcttatactatactactatgcaacttccgcacaggacccaggcgggggcactgggctggtgccaggagtcccctccctgccttttcctgcactgggctaactc

SEQ ID NO: 140875 - DNA, 928 bp, Homo sapiens
agcaaatgttgatatattatagggcaaaaggctgcaccttgttcttctttaaaattatttcagatatccttgttcctttgctttttcatgttaattttagaatcatactatcaaattttaatcaaaattattttgggttggattgcatttactgaatttatagattaatttggagagttggagttgtcctttatagagtcttgagtcttcccatacatgatatctctctccattaatttggtcttatttcatatctttccataatgtttaataatttttcccatgaatgtcctggacatattattttagtgcataactcagtgcctgctatatagtagatatccagtaaatttttactgaataaatatgttttgttgctagtgtgaatggaataagagttcaacaaatgtttgtgtattgatttttttatctaggaacctttctgaagcatgtttttctatttttttttttttctttttgagacagagtgagactccatcataaataactaacttaattaaatgggtcctttcaaaaaaaaaaaacataacaaaacacaacacacaacaaaacaaacgagaccacaaaacaaagaggcggggggccgcacaacacatcacaagacgagagcctatataacgagacaccatttaatccacgaccgcgcaccaaaggggccacatacataacgacagagcacgactcaacacaacaagcagctagaaaaaaaacagcgaacgtgtcctgtggggagaacaacaacgggcgggcaagcggcaccccaccaacatgcacacgcaccaacataccatgggacacacaccacgcggagtcgcaataaataaaaaacagaaagcgacaccgacaaacccacaagcacacgatcgcaaaccaacagacccaaccaccaaacaaacaccggaagagt

SEQ ID NO: 140876 - DNA, 785 bp, Homo sapiens
acctactaccacaaaaacagtatgggggaaccacccctatgattcagttatcttcacctggccccacccttgacacttggcgattattacagttgaaggtgagatttgggtggggacacagccaaaccatatcagaggccaaggcaggaggattacttgagtccaggagttcaagaccagcctaggcaacataatgagatcccgtctttacagaaagtaacaaaattaactgggcgcaatgacacgtgcccatagtccagctactcaagaggatcgcttgaacccaggaagtggaggctgcagtgggccatgatcttgccactgtactcccacgctgggtgacagagcaagaccctgtctctttaaaaaaaaaaaaaaaaatttcgatttacagtgggtttattgggacataaccccattgtaagccgaggagcatctgtattgtttcctcttcagcttaaaggctatgtaacagagaaaccccaatgtaggagaatttagggactaaggaacttagtcattatgaaacaggttaggatgagaagcaccaggatttaggctgagcctatgaaagtattttctaagttcaataaagtaaaactataagaatactccatctgaatattcaatgttcttttgattttgtgattcagaaggtcctaaatcactattattcttaagtcacaacttgtagtgccttgtgattctgggattcttcaggtcagatcagagtagcgggaaaggttttaagattaaaggcagggccactgtggggtggggttaat

SEQ ID NO: 140877 - DNA, 442 bp, Homo sapiens
cattcccctcactcatttatccctcgtactttcatttctatggaagaacatggcactggcatatgtttgtctcttacagaacaagagaaagagaccctctagaaaggaaacatcaccaaagtgggcataacctgcacacaggtaagtcacaggggtaattcgtcagcatgatgtctcatagagctaggtggctaaggcactgctaggtgcacatgaatagcacaaagaagccatgtcaggttttagacataccctgttctgtgcttctgtgcttcggttcaacctcaaactgacaagatccacccagcacctctgcgccactgctgctctgatggcatcatttcatgcctcattcatacactgtgcagtggcacttaatgttcactcttcaaagagctagaccatccagacccaatttctccatcataagccagtgcacttt

SEQ ID NO: 140878 - DNA, 150 bp, Homo sapiens
acatatggtgatcctctataagctgctcagtggcagaaaatagctgtccagttgctaggtttattttaatttgcttatccaaatgttcagacagcagcctcaaagctcaactcttattattacaaccaaagatcaaattatggagttgca

SEQ ID NO: 140879 - DNA, 294 bp, Homo sapiens
ccacactgagacagacacatatacacaaagacacggagacatctgaggaagacagattcctcccccagatcggcacacactcacgcattcatccacccgaacgttacaactatacacagtacatgtatgcaggcgtttacaaggacaggacacacgctctcacagaaaccaaccctctagcaaacaaagaaacttgaacagacattcatatgggcagacacctatggagatgtacagactgcagatggaggaggtgtcctcttttagggggtgtctgggaatggatctgggtag

SEQ ID NO: 140880 - DNA, 309 bp, Homo sapiens
tgcctagtcatcgtattttttagtccatttttcttttttttctgatgtattatttgcatgctctgggtattaatcctgcattagttttatgtgctataggtttcttcctccattggtggtttgccttctttgtccactgtattaatgttatactttgggcagaagaaggcttttttccaggtatcccttgactttctatgttgttattaatacatttatagtctgtctaataagccttttacatataaatttttctaaaaggtgaaaatcaaccagtaaaataccattatgctcaatagaactgtctac

SEQ ID NO: 140881 - DNA, 209 bp, Homo sapiens
tccttgaaataaccctcccatcactacctttgtcaatattcttcctgaaacaaaatgaaagacatctagggatgcctgtggacactatgctgtgacatcccttgcatcttctaggcctgactgcataagccattgtcctttttctccaactgccttagacactgtcccctctccagcatcctcctctcggggcacccatcactggctcc

SEQ ID NO: 140882 - DNA, 833 bp, Homo sapiens
ttttgaagactcatttatacctggtccacattgacaaacttatttgcgatttgtatatttaaataattttttcaagatattaacatacaagttcaattctttcttgattgtaatacttcaatatttaatcatatttatattcatatatatttatgcgagcagcaaaattctgtggtttttggtgttctggagtgtacatattttagatttttactgacaaattaatttctactactagtgatcatttctagcattctcaactaacacacttttcaaaaatcttattgtatacttcattaaaaacaatacataataatggatattgaaaccaaaatttctgcatattttcaatttagtacctgcctattgaaacaaaatctgaagggtgtcagtaatcctaggttaactgattagcaaatttcttttaggatactataatactctgactagcatgtttcatgcatgaaaagttcatcggtgatatgcagactacagttttaaatattaaatttaaaaattgatatataaaaatgaaaacttgaccaataaatatatctcacctgtaataatatatttacataaattatccacacaaaaaatatgccttttaactttataaacatagaatattttttgctatattaacatccaaagtcaaaagggtgtatcactctgaaaattctaataatagtgaaagacttatagctatcaaatttatttaaatcctctgttttaatatctactttaaattttcacttcaaaatataaagttaatggtatatatttttttttatatagctgaaatctgcccttgctaaagtttcataagatat

SEQ ID NO: 140883 - DNA, 524 bp, Homo sapiens
taccaacaaaaaaaagttcagaaccagaaggattcacagctgaattgtatcagacattggaagaagaattggtaccaatccttttgacgctattccacaagatagagaaagagaatcctccctaaatcattctatgaagcctgtaataccctaagaccaaaaccaggaaaggatataaccaaaaaagaaaactacagaccaacatccctgatgaacacagatgcaaagattcttaacaaaatacatctaaccaaatccaacaacatatcaaaaagataatccaccatgatcaaatgggtttcataccaaggatgcagggatggtttaacatacacaagtcaataaatgtgatacactacataaacagaattaaaaacaaaaatcacatgatcatctcaatagatgtagaaaaagcatctgacaacatctagcatccctttatgattcaaactctcagcaaaattggcagacaagagacatacctcaatgcaataaaagtcatctatgacaaacccacagctaac

SEQ ID NO: 140884 - DNA, 1003 bp, Homo sapiens
taaaggggcaaacaagttccctcagacctcttgtataagagtcctaatctctgccctaatgacgtaatcaccttccaaaagtccccacctcttagtactatcacattggagattcagtttcaacataggaattctacctacagtggcaggttgcgctgtccagcctcggccccagactccagaatgtcagacgtctttccatctcttcagcccctcactccccatgtaggtcccagcagggctcggtgcagcctcccaggccacatctgctacccctgccctgacacagatgatcagagctggctggcagacactctggaacagaggcctgaggttgttattaatgtcatcctcctatatttcctactctttgccttccaggcatgtggtgggatggcagctccctgttcccttgtgattgggaggtggggtaacctggccaacaaggtgtgagaagtgacatctgtcatttgggctggagcacttaattgccagatagagatctctttccctctgccgtggcttctgacggcctttgagatggcagctgctccatcacccccagtcctggagtaaggagacatggggaccctgccagcccttgacgggtagtagcgtgcatgagaatgacacttcctattaggagccaccaagatttcagggttgtttgttgctgcagcataacctggcctaccttaactcacacacatctccaaaaagcaaaaccaagatggagctcagaaatagcatgaaggacattgtgtttggagaccaaacgctcatagtggacatctttggtgttcacgccacaggagggactggaagtggcaatagagttggccctttgtggggccttagtaccgttagggcaaacctcagagaaaatccatccaaactcttccctggccaaatacggagactgaggtccagaaagggcagggcttcacagcatgctatagtagaggctggcacagaacctgctaacaatagactgcctccattt

SEQ ID NO: 140885 - DNA, 300 bp, Homo sapiens
ctctcaaatggtctacttgagctcaggcatttaaagttgcgtattggcggccacagactttgggaggatgaagggtgaggccctgggagctcgggaatggggtttggccaggcagctatgacctggccccttctgcttcctcctggtttgtggctcagtttggccctgggataggcttctgtgggttccagacctgttcctctccctgcaggttctgccaacagcctccccactccctgctggaggaagtctagctcctcagccagcccttaaggcctagcatggttgtcccctgcccac

SEQ ID NO: 140886 - DNA, 467 bp, Homo sapiens
taaaattaaaatgctatcaaagtgaatttgaaaaatgaaaagggaattttgaaaaatactcaaaaaattaaatcacataaacctattactttcaaaggcaaaaactgcaattacttttgcaccaacttaatagtttcatcagacattaagacacatgcatgtatgcatgcatgctaattctcatggtttgttctgggcatgaatctgcctctatttttttctgataaccactgacaagaaggtaggcatatgattcccatagtcacctcagaaaattagaattcaaagtatagagtggcatttgtggagctgcatgaatttatgagtcacctttcctcttcatctttcacctcgtctctccacaaatcctatacaccaacatcctgggactccttattcatggtgcattccttcaaacagaaatttttctccctatcaccttctcccctggggatcgcatactcccc

SEQ ID NO: 140887 - DNA, 78 bp, Homo sapiens
gggaggggtgatcacaaaatgaaactgggagaggaagaggaagggagatggatgttgaacatccaaatgaccattaat

SEQ ID NO: 140888 - DNA, 398 bp, Homo sapiens
gctgctcttattagagctgttgtcttttcattgtcagttaaattgttttctgaaataaataggaatttaaaatgtagccatattttagaaaaatcactttgacagtgtccttttaaattagcatagttaatgtagcatacattgccagttttaccaaaaccaactcaagaataactgtttattacatgtgcttataattcacttttgcaataaaaatgcatatagacacctagtattttcttactatgatatcttaaaatgtaaaatcttcaacaaaacatgatcagtctcagaaactgcattggctggtataaaaggttgaatagcattataatcttttgcctaatgtggtagcataagcctggtttttttacccctttatagaattttgaatttgg

SEQ ID NO: 140889 - DNA, 464 bp, Homo sapiens
ataattacagagcccatttcttcaggctgctgtgaggattaagaaggttggtatgcggaggtgcttagagctctgtctggcccataataagtcctgaacagcctccactgacattgtctggaagataaggaggcatcacatggcagatggggagatggaggaaagggtgttctcggcaccccgaagggctcacagggagatggaggaaagggtgttctcggcacccggaagggctcacagggagatgggggaaagggtattctcggcacctggaagggctcacagggagatgtgggaaagggtgctcttggcaccccaaagggctcacaggtgtgaaacaccatggggatgaggcagcttgggatggctaggaggagatgctcccagagacaggaggaaggccaggcctggggaactgtggagggtggcaggagtccttccctcaggagcctcttccctgggcc

SEQ ID NO: 140890 - DNA, 530 bp, Homo sapiens
taagcccagtacctgatagttaccttttctgatcctctgcctcctcctggcctcccctggcaagtagactccagtgtctgtcctttccttcttcgtgtttgtaggttctcatcatttagctcccatgtgtaagtgagagcatgcagtacttttttttctgttcctgcattagtttgctgagagtaatagcctccagctccatccatgttcccgcagaagacatgatctcattcttttttatggctgcaaaagatgaactttaagtttggttaacttattcttttttgcaggcagcaaaagtttattgtttagtatcaatatagtatgtaattttttatatggattcatttatggtctgtattaacagtctcacatattggtacaatattgtacataaagtttggtaagacattctcttaggaccttgtcacacattttctttagtattgttgatatcatttgcttcctgtgtttaaaacgcaattcagaatgtgttttgaaatccagatagaatattgtcttaatctaat

SEQ ID NO: 140891 - DNA, 132 bp, Homo sapiens
tgcctcaggtacccccagactttcccaccaaaagatcccactgcacttgtgtcaactggttatgctgatcaaaccctgtaaaatccagaacaaaattttaaaagctaatcagacaaatcctaaaaatggtgg

SEQ ID NO: 140892 - DNA, 253 bp, Homo sapiens
agactgcctgatctcagaacttctaacacagtagaaaagatacacattaatagaaaaatcataaaaatgataaacaaagttgcaaactgtgatgtgtgctatgaaataaagtatagagtaccttaagagtacaaactgggctgggtgtggtagctcacacctgtaatcccagcactttgggaggttgaggcaggtggatcacaaggtcaggagttcaagaccagcgtggccagcacggtgaaaccccatctct

SEQ ID NO: 140893 - DNA, 196 bp, Homo sapiens
gaagcatgtcactggcatctacttctggtgagagcctcaggaagtttacaaccaaccatggtggaaggcaaaggggagagcaggaaacaggtgggggttgaggtctcatactcttttaaacaaccacatatagcatgaactaacttgtcaccaaagggatcattcatgaaggatccacccacatgatccaatcaca

SEQ ID NO: 140894 - DNA, 473 bp, Homo sapiens
aaatcccctgggctgatatttggagatggggccttggtgaggtaattagatttagatgaggttgtacgggccatgaggggattagtgtccttataaaaagagataccagagcttgctctcttctccattagagaatacagtcagaaggtggctgtgtgcaagctaggaagagccctcaccagaactactatgctggcaccctgatctcagacttccagcctccaaaactgtcagaaataaatttctgttttttaagccatccagtctatactattttgttatggcagcctgaactatgatgaggggagactgatgcattaacttcaaaaaccagaattttatcactcaaattttaactaaattgcccatttaaaataaaaaagcccaaatattcaccacactcctagttccaagtgaatcagcatccacaaaatataaaccttaaaaaaatttagtcacttccttccctcaat

SEQ ID NO: 140895 - DNA, 411 bp, Homo sapiens
caatttgcttccgggctgttcctcagacatgagaaattatagtaggaaaagaaatttgagagatttacaagcaattgactggatgtctttagaatcgaggggctttagactttgctatcattcccatcataataaacatactggaaacctggtgatctgtaggcagcatggaaaggaaggcccggaatctgtcagaacctgccaaagatgttcctgcagttatttggagaattaaagcaagcaacggtcagacaacattaaaaaaatgttgatctgtaatgggtggagaaagacctggcatgtatcagggacctgggtggaaaatccattaaaagaggcattatgaatagagtctgaagttctagagtaagaattcctgttccacttatatggcctaagttggtagtttgg

SEQ ID NO: 140896 - DNA, 274 bp, Homo sapiens
  misc_feature (208)..(208): n is a, c, g, or t
gagaatacaataacttttaaaaaataggcttgaacttctaatcctacctgcagggttagaaagcccctaaaatgcagctcagcacaaaagtgtttaagaggacagagacctcgctttttatgtgttcagttcagcagctctccttttctagaatatgtataattgtcattcttctaccaaattctaaacataccttctttgaaccagnataaattgtaatgcattataaaaaaataactcttttacctgttcaaatgataactcaggctcaaca

SEQ ID NO: 140897 - DNA, 423 bp, Homo sapiens
ggtctggaatcatttaacaaatatttgagttcctgctagtgtcaggcgttgtattatgaagaaacattgatgtgtgaggcctgaactttactctgaatatggttattctagtaggatgaaataggttgacatgtaaaaaaaataattcaaggaagagagtggtgtatgtcataaaaggtgcagattaggtggtctgagagttcagtaaaaagagcatgtaacttccaactaatgaggtcagataggagctaagggagttcagaagagctgtaaattctaattgaaggggaagttacatgtgatgattttcttagaaagttgttaatggttagatggaaccatgtgagatcactgggcatttttttttaagtcaaaaacactcaaatattggcaaatcggtatgattcaatctaatagtactct

SEQ ID NO: 140898 - DNA, 323 bp, Homo sapiens
gcagccaaaccctagtgggatcttttacttaattcagaagtatgtttttcttaatgtgagaaacacagctcagcatgagcttacaggaaaggtgggcttagtgttgcctgcaggcatcttctgggccttattggatggttgcaccatcctgctgggcttaataccccacactgcccatcccccggagcacctgcatactctggactttctctgctgcctttccatgtccgtggtgtgtagggaaaatgtcccattttctcagggccctgatagctcctaagctcctatattaactgtgctccagtattaataaatgtgtaggt

SEQ ID NO: 140899 - DNA, 379 bp, Homo sapiens
atcctctctacctctccacagagctgatcagccgtggctctgcaggaagtcctttgctcagagctcccgattttcagatggtattgggctttggaaagaatgccatccagactgacggcagcagattctaatgctttagcattttgaagagcatcattgaggtccttttctatcaaatcagactcgttcttattcatactgttggttgcttccactgtttgcctcagctggcggagaatgccggacagagaggcatggctctggaggaattctgccaaatgggacagggcaagctgccgcctctccacaacctggctggcctcctcaaacagctggaagcagtcctcagcctttccctgcaggaggtggaggtcctcag

SEQ ID NO: 140900 - DNA, 309 bp, Homo sapiens
gatttaagctagcatttattttaggagacataaatagctaggtgtgcatagggtaggaaggtggaaggaggtatactgagggcaggtatttactctaatttcatgtgtataacacttaaaaatttacatttttggaggaaatggtgtctctatcaggtttaaattttgaaattatgtgtcgattgatatttttaaaaagaaagacaagtcatacctgacttataaaataaatatgcattttagttaaattgctgtagaatagaattcagctgtcctagaagactatattaattacagattaattattta

SEQ ID NO: 140901 - DNA, 206 bp, Homo sapiens
tcaggaggctgaggcaggaaaatcacttgaacccggaggcagaggttgcggtgaacagagatcgcactactgcactccagcctaggtgacaaagggagactgtctcagaaaaaaatagccagagtgtggctgaggtggagatgaaagtgacaggaggaaagatcacttggtggtcttttaggctgttgtaaacatttactgtaagt

SEQ ID NO: 140902 - DNA, 189 bp, Homo sapiens
agagtagggggtgttttctggggtaacttggaatttctgaagtcttcacagacacaccaggttggggcagtggagcatgtgccttgcagtgaactgtgctcactgatagtttgtatattaagccatttttactttggagaaggtggcagtttaatttgccagtaactacaatgaaagcaatttctattt

SEQ ID NO: 140903 - DNA, 371 bp, Homo sapiens
gggaggctggttaggctcattgctagctaagggacttctgaaaaattcattagtaaaatcacagctctgggggtcagtcaggcagccaaatgatgaatgttaaatccattacaaatgcccatcgtctttctttacatcccttctaatgaaaaattcctaactgcctaaatagcaagtgttctcaaatgatagcagctgtttattaaagaaataacacctcaaattttaaaaaccatgagtcaaatattattttcttcctcccattttatatgtgtgcaacctaaagaatagagaatttaagtaatttttctaagtggcagagcacagatttaaatcctattaccttggcctcagagtttgtgctttatttt

SEQ ID NO: 140904 - DNA, 520 bp, Homo sapiens
aggatccccgtttggggcttgctctttggggacttgctctttcggggtcttagctcttttggggtctatgctctttaggggtcttagctcttatggggtcttagctcagttttgctttgtttaatccagggtttcctgtcccccaaccccaggagcagctgttaacatctgtggagcagttgtattttgcagaacattatttggtaaacattcttttgaggtgttatgtctcctcagaagcatgttttggaggaaactctggaagtgttccctgcccttagtacctgcaggagtaagccttgaatgatggcattgctggctcagcaacaggtagtgggtcatatgtatttgaaaaaagtcatcctaggtcctcaatatcattcctcaaagcagctaccagctctcctgtgtgtgggatggggcctggctctggtcagagagccctctgtggggaggtggtttgtctgggaccagcctaggcctagggtgtaggggtttattcccctttttgcaggctggg

SEQ ID NO: 140905 - DNA, 122 bp, Homo sapiens
ttgcccctccttttcccctttacatagctgcagcagcatttaccccagtggcccggagtttcaagccagacttggagagggccggttgggggttgtgtctgcaggactcttggttctgcagg

SEQ ID NO: 140906 - DNA, 192 bp, Homo sapiens
ttaaaaatcagctcacgccgaggagctagtggttggggagttggcccgtgttggacgtgtgttatgtatcacttacaagcacatttaattgggagataaagataaatcgatctttatgaatttatcgacccgattctttgaagctcttttttcgcgttcttcctctttctctcgctctagccccaaggcccc

SEQ ID NO: 140907 - DNA, 282 bp, Homo sapiens
ccacccccagggccccttcagggccaatgttttcttgttacttcaacgtggtcagcctaaaggatctcactgcctccctgagaactgctccggggccgcagatctcttgctctctgtcattcctttctgggacaggagaccctgctggttctggaggagtgtggggtctggtctcccctctgcttctggccaaggtgccttgagcatttgcatgaatcttctcttccccttttctcgcttctagacaccagcttagttccctaagggttcaggcctttaaga

SEQ ID NO: 140908 - DNA, 736 bp, Homo sapiens
tgcgaattgtgctgctataaacatgcttgtgcaagtatctttttcgtatgacttcttttcctctgggtagatacccagtagtgggattgctggattaaatggtggttctacttttagttcattaaggaatctccacattgtttccataggaccagcctgctgattttctctttacctatgtctcagttacctttgctgttttgtattctccctgactcctaagttgtccagtctctctgggatcattttctttctcaattttctctttagtcaccctcatatcctcccaagcttttagatatcatcagtatgctgacatgtctcaaataggtaccatgatggttttgttactattttttatcttagccattctgataggtgtgtagtaattatctcattatagtttgacttgcttttctcaaagtgctaatgatattaaacatcagtgcaggctgggcccggtggctcatgcttgtaatcctagcactttgggaggctgaggcgggtggatcacttgaggtcaggagttcgaaaccagtgtggccaacatgctgaaaccctgtctctactaaaaatacaaaaaaaattacccgggcatggtggcgggtgcctataatcccaactacttgggaggctgaggcaggagcattgtttgaacctgggaggcagaggttgcagtgagccaagagcatgccactgcactccagcctgggcaacagcgtgagactccgtctca

SEQ ID NO: 140909 - DNA, 641 bp, Homo sapiens
ctcttctttgaagcccttcagcttcctggagaaggaggagcagctaaaggaagctgctcgacagagagacttggcagccacagctgaagccaagatctccaagcagaaggccaccagaaggattcccaagtccattctggagccagcccttggggataaactccaggaagctgagctcttcaggaaaattcgcatccaaatgagagccctggacatgctccagatggcctcttcccctatcgcctcctctagtaaccgggctaacccacagccccgcacagccacccgaacccagcaggaaaagcttgggtttctgcacactaacttcagattccagcctcgggtgaatcctgtggtccctgactatgagggcctttacaaggccttccagagaagagcagccaaaagaagagaaacccaagaggccactcgcaacaagcccttcttgctgaggaccgccaacctgcgccaccctcagcggccctgtgatgctgccaccaccggaaggaggcaggattccccacagccaccagctacacccctgccaaggagtcgttctctgagcggccttgcttccctctctgccaacactctccctgtgcacatcacagatgccaccaggaagagggaatctgcagtca

SEQ ID NO: 140910 - DNA, 163 bp, Homo sapiens
atgctaatcagtctttttctcatttaaagcgttcatctgatgaccacaatctgaaacttctggctgtgacaaaggggaaaccattctaagatttcctgctaatttcaaacaccctcatcctcacatacaggccacataagggccagtttctaagaaaagagct

SEQ ID NO: 140911 - DNA, 346 bp, Homo sapiens
ttgcaattacgtatctaaaacagtgctaacagattggtttatttatttgagagtcactagccctagcccactaccatacacttagacaggactgaaaggagcccccctgcccccgactttttttcctgtgtatagtgtttggggaaagattacaaggcatacttagaatttttcaagttgaaaaaattttgttttgcaaaaaggattgcatgacctgcagatcgcacacagtaattccactttcatgtgtgtagcaaagacagaatatctcactggcggcgtacaacccaacaaagcaaaaagggatgatcctggaaaatgtatacagaagaaattttcacctccc

SEQ ID NO: 140912 - DNA, 193 bp, Homo sapiens
cacctgaatcattctggataaacaacattgctgctcctctactgattcatcctcgaggttagaactatagaatgtcacaacacagaccacgtcatctacacatggaagtctggggagctgcagacacaccttcggcatgttccttggctcagtgagtactcagcttctaccctgagctcccaccaggtaatag

SEQ ID NO: 140913 - DNA, 428 bp, Homo sapiens
ctgcgttttctctctagaagcttgtaggagtttctctctccatgtattgaaacttcacatttcagtactgggtttggatctatttttatccacagggttgggtacttagtgaatccttccaatcttaaaaactcctacccaaatctttcagctctcagacatcttcaacaattcatttgtcaacttcttcatcttcccttcctgtagggtccagccccatagggtcggtgagtttctccccgtgtgtggcgacgagagagtgcagaaataaagacacaagacaaagagataaaagaaaagacagctgggcccaggggaccactactaccaatgcgcggagcccagtagtggccccgaatgtctggctgcactgttatttattggatacaaagcaaaaggggcagggtaaagagtgtgagtcatctcca

SEQ ID NO: 140914 - DNA, 314 bp, Homo sapiens
gccaagatcatgccaccacactccagcctgggtgacaaagcatgactctgtctcaaaaaaagaatgagtttcaggatcacacagccataggtttgagtttcagcttcaccaatgactggtgtgtaaccttggcagtttacttaacctctcggttccagcaccctcatctgtaaaatagggagacttagctttgtggaataataggaggatattaggcagcgctgcacattgagggtgtaccttgtacactgtcttgggatagaataaatggcgtgtgtgtatttccctctgtagatcccctttccttatctacc

SEQ ID NO: 140915 - DNA, 311 bp, Homo sapiens
atacaacctctatgccatgtgagggactacagaattaactgatattaaaaaggaatcctcactgggcgtgcctatgatcccagtactttgacaggccgaggcgagcagatcactttaggacaggagttcaagaccagctggaccaacatggtgaaaccttgtttctaccaaaaatacaaaaaaaaataagccaggcatggtggtgcatacctgtagttgcagctactcaaagaggctgaggtgggagaatggtttaagcccaggaggcagaggttgcagtgagcagagatcacaccactgcactccagcct

SEQ ID NO: 140916 - DNA, 349 bp, Homo sapiens
aatttatgaaatgtttttctccttcaccaaccaagcccccactgcctcatctcaaagaaggctcttctgggcaagcatggtggttcatgcctgtaattccagcactttgggaagctgaggtgggtggatcacttgaggccaggagttcaagaccagcctgggcaacatggcaaaaacccatctctacaaaaaatatacagattagccgggcgtgatggcatgcacagtcccagctactcaggaggctgaggtgggaggatggcttgagcccaggaggcggaggtcacaatgagctgagatcatgccactgctttccagcctcagtgacagagccagaccttgtcaaaaa

SEQ ID NO: 140917 - DNA, 216 bp, Homo sapiens
aggaaagcatgagaacatcatttaactacactagaattgtaaattaaaacaattttatcctggctcacgtctctagggctgccttgaaccactctttagtgtagactctcctgtccaacctccctggagtttttaaaacacatcgccctgtctcacatttctgtcttcacacaattttcttttcataaaaattttcccaccctggtttttttttgc

SEQ ID NO: 140918 - DNA, 549 bp, Homo sapiens
tgaggatgcttaggcattgggctgtatttggttgtcactagtgggtgggttggaggcacggaggcatcctgcagtgcccagggtggctccccaggacgctcctccagccttgaatgtcctgcctgcaagttcgggaacgcctggtctgctgtccaggcattggccgcggagcctgagtcccgtcaccaaccccatggggcctgggagctgggcggggccggaagagtagcccggggaggcaaggcgaggctgaggtccacgctgctttgtgggatcctctcgggctaggggtgccgtgcccgctgcccaagcctgcacctccagaggttcgactcgccgtccgggaagccattcatgccctctcgtctacggaggatggcggccacatcttctgcaccctggagtccctgaagcggtattctcggtgagatggagcctaaagcgctcccgagggaaaaggaggagttaggctcggcccacttctcgcgtgtcctcaagatgtcttgcaagaaggttgacccagcctggttggcgctatagacccaatgg

SEQ ID NO: 140919 - DNA, 568 bp, Homo sapiens
aagtatacagagaagtgcaagcagaatgagatctgtagctgcttaagagtggctgataattaacccttctctctcttccccaatcccagtgggtccatgacttttggacaataaagcacccaacctgtgacagcactaagtgattcctgtgccacaggcgggaagcctctcagtgaggctgtgcacttaacagtcatcccaatgacagggaggacagtcttatacacaggaagtttataatgaactgaatttgacaatggcagcctgttcatgtgcagaaactaagatcagtgcctggggacaggcagtcaacttttaaatattaaacagcatataaatatgtatagccttgacctgaacacttgagttatacgttctgaataattatcatttctgaaagactaagggatagatttaccaaattaaaatacagaatctataggatcatgatgttctgcatttatagcattacacgatcaaagccccatctggataaaaggcaaaggcaacttcaaaaaagtccttagagattagatccttgaatctcatctgaagtccactggtttca

SEQ ID NO: 140920 - DNA, 345 bp, Homo sapiens
ctattactgagtcaaatttagatttctggcttttggttattggtgttctgaaacttttgtcttttcttctcaagagctggtttagcatccagacccaaatatgttataatgttgactttattatttaagtcatatattagttcctaaaaattatgaaatatcatcccaaactattgatctattaaaaagctaatttataaaaatgttatctcatttatccctctcctaaagagaagtaactagttcctatcgggaaaaaatgagtataaaaaacacagaggaaaacaggggaaggaagattataatttgcatttagaaggaaatagtgttttaaacctgttgctg

SEQ ID NO: 140921 - DNA, 304 bp, Homo sapiens
taaaacacgcctgtgataaaggcatatgtaaaagaatcagtggaaaaaaatagagtaacaacttttttcaaaaacacagaaaaaattacaaaattcagaatagtgattgcctctggggggaataaaagggaaaacagaactggggattagaacaaagtagatatcaaacttagtaaataaatatgacacacacacatgcatacatgtatatttaatatataagttaccaataagagctgaaccaaatcaccaaaacccaaactatatatttatatcttgttcatgttcacatctagctaaaaac

SEQ ID NO: 140922 - DNA, 314 bp, Homo sapiens
ccgagattgcgcccactgcagtcctggagtccgtgctgggcgacagagcgagactccgtctcaaaaaaaataattattattttattaggctgggactacaggcacccaccgctatgcccagctaattttttgtattttttagtagagacggggtttcaccgtgttagccaggatggtcttgatctcctgacctcgtgatctgcctgcctcagcctcccaaagtgctgggattacaggcgtgagccaccactcctggcccccactttttttttttaaattaaaaaacgcaatttctataagaagtctgtctccat

SEQ ID NO: 140923 - DNA, 123 bp, Homo sapiens
cccacctgccctgatacagggtaaaaatgctaatgactcctttcccagccttgctggcaagggaagcgtaagtgtatgccaagtgtagacactgagacacaagtgagacctactgggagcctc

SEQ ID NO: 140924 - DNA, 417 bp, Homo sapiens
tgccaaggagccaactccccagggcgagggtagagtgcaccagctcactaaaggggaactgagcagacaccagcagcatccttaatagcactgcccattcttctcatggctttggagaagtctcctgattgcacccactaattatttttccttgtggctaaaatatacataacaaaacacaccatttttaagtgtgcatttaagtggcattaagtacattcacattgttaggcaaccacccccgatatctatctctcaaactttttcatcttttgaagctgaatctctgtgccctttaaacactaactctccattccccactcccctcagcctctagtaaccaccattttactttatgtctctgtaaatttgactactctaggtacctcatcttaagtgtaatcatacaatatttgt

SEQ ID NO: 140925 - DNA, 213 bp, Homo sapiens
gatagaactcaaagaataaagccatgaggaatcgcaaaatgtttttgaacaaaggaaaatatatgtaaagtggtgtgttaggaagaattatcctctgtaggatgggtcagtggcgtcgagtcaggatcagatgggaaactcttatctagggttggccgatgggcatttttaaaattgttgaaaatactaataatgctttcttgtgcatcagtt

SEQ ID NO: 140926 - DNA, 460 bp, Homo sapiens
cagggaactggtgccaggctgtgggactgttgctgggggtctccagagcaccctccccattcgttcccattggactcagcccaacaatgactcctcccgcactgccaaggaggggctttcatgaccctgagtgcttggcagggtagagctccactacagttctcagtggcagttcacatccactgggtgggccgtttgggttttgcatgtcttctaatttatctgcagactctgggatgttactattttaggcctgccatctctaccaagtttccccttgacactacacgctcatcccactccagacgacagagcgaggactgcagatgcagttggccttgcttgatgcagcttcattgctattgcttggttcacaatagaagttaaaagtgatccccgttggccatttagaggagaagggtcccaaaatactttgggaaaaaaaaggacaggcctataa

SEQ ID NO: 140927 - DNA, 364 bp, Homo sapiens
cagggagggctacgctgcatcgtcctctctcatgaccatgtcggggacatctggagcatcacctgcttccaggcagggtgaagggaatgtggaatcactcgctgactcctgcatgcttcagctcggaagtggcacgcatctcttccactcgtatctcactggccaaagcagattacacagctgggcctaaccccaaatggaagaagtgtagcccttccctgtttccagaagaagagacaggcactgatggacaggggtgacagcctccccgctgctgttcctcgaacgcgccagacacgccccagccccgggcctttgccctggctgttccctctgcctggagtgcccttccccaaacacctgc

SEQ ID NO: 140928 - DNA, 274 bp, Homo sapiens
ccccctattgctggtgaaattgcttagagcaaggactgtcttacacatcacaggatctggcatagtgcctgaccgagggtgaaacaacaaatgaatgagtaattgaaaggagagagaaaaagagatagagaagtaaccaaaagaagaaagtttttaaaggttcagaggaaagaatgaggtcagttgcaattttttttaagtaagatgttggaaagaataaatgacatgatgaaaaggaaactgacatgattcctatcatgaatttgaaagctat

SEQ ID NO: 140929 - DNA, 514 bp, Homo sapiens
ttgcaggctatgggaaagggattggattgtattttgtttgtagggaagccatcgggggacttaagcagaggaaggattggcttcatctctttgaaaaagttctctctggatgctgatgggaggagaaatggaaggaaaagaaacacttttaggggcaagaacttttgagaagggtggaattgggagtgtggagttggggccagctttggcacaggaggggaagctaaacacgtggccgcatgagggcctgtaattctacctgaaatgggtaccatttgttagggtaaacaaatgaaccaaatgcccagtgatacagaccaagtgttggcaaacttcttctgtgatggcccaggtagtaaatgtctcaggcttcgcaggccatgtggtctctgttgaagctctgtgtagtagacaatatgttaatgactgggcgtgactgtgtgctaataaaagtttatttacaaaaacagcccgtgggctggatttagctcacaggctgtagtttgccaacctc

SEQ ID NO: 140930 - DNA, 394 bp, Homo sapiens
taagttatttcactggttcaataatggagttagatcattatgggggcagtgctcagggaaaagcccatgaacagggtgggtgatatggttaggcttcgtgtccccactcaaatctcatcttgaattgtaatccccaggtgttgaaggagggagctggtgggaggttattggatcatgggggcagtttcccccatgcctagtgatagtaactgagtgctcacgagatctgatggttttataagagttcagaagttcctcctttttcactcgtctctctcctgctgccttgtgaagaaggtgcttgcttccccttccactatgattgtaagttgcctgaaacctcctcagccatgaggaactgtaagtcaattaaacctctttcctttataaatga

SEQ ID NO: 140931 - DNA, 584 bp, Homo sapiens
gtccacaattccacaacacaacatctgaactggtagtttaacatgattaagggcatttgaacatactattaaataaataatcttgatgttttattagagaaaagtagttctgaaaatgtaatagatgccatacaagcacaatggtgcagttatgtataataacaaaatgtctaatatgtaaagacctgtagaagagtaaaagaccagttttctatgcaattttcccactgctattaaacagtcttgctaccatctgaagggaccctgagggggacacaatagagatccactcttcatatgtggcataaatgaaaatccaaggaatttcccccctttcactaagacatgtgaacttactaaccatagaaaaacaataataaaatttatagtttaatcatgcactttaactgggtatttttcccaatgtatttttaggtctttttaaaataaaaattcttaaatgttacaccatacacattagaattctgtaacacaatggctttttcttaatggaacaaattttagcgttaacacataccaataaaacatgaaaagaacaatgcagtaaaaatgtgttacggtaa

SEQ ID NO: 140932 - DNA, 291 bp, Homo sapiens
aatattgcacaggtcagagaagttaaaattttacttttttatttgaagagtaggaataaatggatctatagggcaaaacttggaattgaaacactatatagatatggatttccaaaacattttttttcaggagaatctcacaaaatatcaaccatcaaccacatcttcaacacagaagacagagtagaagctttttgggtttatgttgttgttttgtttgtttgttcaaaaaggggtctcactcggttgcccatgctggagtacagaggcatgatcacagttcactgcctt

SEQ ID NO: 140933 - DNA, 318 bp, Homo sapiens
cccataggaatctcttggtgttcataccaatgtgacccagaagtatgggtggcctaacacctgttgagttgttcttgagcaacagggaatgggtactgaaggatacttgtttcctcttttgtcctctgggtggacagttctgacaggcatttgatatggcttcttagaatgtccaacaacggtgagcagtggtcccatagtgggggcccagcttgataactcgtccttctattgtctgtccctcctgccctgttttactccctcagcccctcattcctgatctctgggatcacttcccaaagaacgtacctgcactta

SEQ ID NO: 140934 - DNA, 559 bp, Homo sapiens
gataataatagtgagtggcatgtgaggtatatgggaattttctctactaccttctcaattcttctgtgaggctaaaactattctaaaaaagtaaagtctattaaaaaatggggtaaaagaccatttgtgactaggatggagacagtaaggcggtatatgatgtgaactgaaccttaagaaaaaagtaggggccatataatgcgagacttcacagtcatgtcaaagattcttaattttttttaatcctaagaccaacgggaagccaggaaaatgttttatgtaagggagaaaataatccactctgcatttcagaaagctctacctagctgtaattggtagaatgaatttggcatcctagagtgaatgcaagtagagcaggcaacagatatcggcagcttggaccaagggttctggcagtgaagacaaatggaagaggattcacaagaaatataagaagtaaaatcaatagaacttgatgatgaattgatgttctttttttttttttttttaatcagactagccaaagattttctattttactggtcttttctatgagcta

SEQ ID NO: 140935 - DNA, 384 bp, Homo sapiens
ttggaaaacgtgagttggttttccaaaaatttttatgtctcaaactaccaaattctgttaaaaacatcaaggctcatcacagaaaagcatgacatacaatcattactgttgttctttttttagtgtaagcatgaaggaaagggaggccattggtaaaaccacctgacactaataaaatggaaacttaaaatcaatggcaaatgagcgtgattaattattaacattcttaatggatgtagtacctggtatggtactttgtagtattaggtactcgatacgtgtttatggaaatggcaaaggaacaatcctaacaatagtgactgttgattgaatttatattctgtgccaagcactatgctagagaccttacatcattattccgtc

SEQ ID NO: 140936 - DNA, 308 bp, Homo sapiens
ggcatttatggtttagtatactggttgcaagacaaaggagacaaggcaggacttaggcttcaagctgtggaaaagtctattgatcttggccaggcgcattggctcacccctgtaatcccagcactttgggaggccaaggcaggaggatcatgaggtcaggagattgagaccatcctggctctctatgaaaccctgtctctattaaaaatacaaaaattagctgggcatggtggcacgtgcctgtaatcccagctactcgggaggctgaggcaggagaatcgcctgaaccagggagtcggaggttgtag

SEQ ID NO: 140937 - DNA, 581 bp, Homo sapiens
tagatggtatggcccatacatctgttccaataagattcagtttggtatgttgaacattttatcagttaactcatgaaaaataaatgcttttgttttatctatatgttgagtatcctttgcttgcatatggtttgtctaccagtagtataagttggttatgtttagactgaagtagatcacgatgtggttcttggactagttcatagaaacctgatcttataactgtattaccttaatatctgcaatgaaaaacacttgagaacaaactatacgtgttgttagcattgctgaccctcagctccatgttaaagaaatcctatttcatggattcaaaaattaaataaacttgagggactaaggtatgcaatgctgttcagtaggggagaaataaaatgtcaaaaaacataaattgagcagctgcaaagtatattattacacacagtgctagaaatgaatgaagtggcttgatccttacctttcatgagcctataatcggaaggggaacctgagaagtaaagcaacagttatgcaacagggttatttatggtatgatcaatttcacttatcgcctgccttgttac

SEQ ID NO: 140938 - DNA, 102 bp, Homo sapiens
gtgaagatgacatgaaataatattcacaaagcccagacgtcatagtgttctagacaaaacactgatttggagagttcaacagatacacaagtttgacggttg

SEQ ID NO: 140939 - DNA, 310 bp, Homo sapiens
tctactgaatgttttctatctctcttacctcaaaaatagtatccgtgttaaattgcacaccctcaactcctcaaattagtatgtagtgcttttcttttcatcattagtacaaatcagaggtttttttaccctctaaaaatccatacatccttctctttctctttggttctccatttctggctttagagaatcctgggaggatgcatgagttcttctctttccttccttccagcaggactggcaaggcaatccatgtagtatcagccattggggcatactgattacttgctggttctgatcaacacagtgg

SEQ ID NO: 140940 - DNA, 262 bp, Homo sapiens
gctatcacttgcatagttttgacttttaaaccatgaagatattttacatatttgaaaaataaaatttaaagcaagctgactacaaaataaatctacttgtataccaaattgctaaccacaaggaaaattttaatttgaataacttttgaacaaagtcctgccactggatggctttgataggatatatcctaagaacaaaaataaattttgactttggtgagtttgttggtagaggtggtatattggtgtagcaattttggaa

SEQ ID NO: 140941 - DNA, 318 bp, Homo sapiens
tctttgagatccttattcataaggatatctttttagaagtcttctctgaactccccagtttaagtgaactgcttctatctccttactaccagtatttcccttgccaacttttctcagttatcgttcctaaataggacttattctgtccatttctactgctgttaccttagttcaaagctttgtcattttttgcttagataaccatagtagtctctgaattgatttctctgcttccagtctggcttccttccagtagagtccatacactgcaagcctcagtgggttttttgtttgttttgttttattttaattttcctt

SEQ ID NO: 140942 - DNA, 501 bp, Homo sapiens
agtgcaagtagagaacgctcacctgaaacttcccattcctaccagtgtgcatatgtgcatgtgtgtattagcatgaaataagcacgtagacaagcttagctcactgcctggcacagagtgggtttcaagaaatgttaattcctttgccctcattttatgtgtttgacctggctgctgcctccctcttcaaagcccttcacccatccaaattccacctgccttctcacttggtaggatcccaggaatgcctggaggaaatgctccttctcccgaattcttctagcacttgctctctggattatgtgatttaggactgaattacaccctgccttgcatggtcctctaattgtttctcatgtttgtgttacgtctctcctctacccccgaccccactatgagttcataagcacccctgaccgtaacggggagatgaactggagccacaatgccttggctcagtcctgaccctgccatgtactgaataaatcatttaatctctca

SEQ ID NO: 140943 - DNA, 239 bp, Homo sapiens
tacagcctgaatgttcttcctaaaatatagctcagatcctctcacagctcagaatctttaatggtctctactatctacaggatatggtccaaatgacttagtctgcatttctaattgagtcttactttctgtccaattatacaacacccacgaacagccataaaacctacagacttacttatacacacacacacacacacacacacacacacacacacacacacacacacaaacttacg

SEQ ID NO: 140944 - DNA, 572 bp, Homo sapiens
tggtcaaggcttagagacttgactgaggcctgtggaggtggatgtggctaaaatttgaccgggcagcctgtgggcgtggctgaagagcatgggggtgtggtcagagctggaggtgtggccgaagagtgtgggggcgtggccagggcgcctggtcttagacaagcccctggatgggagtgccaccaacatgtttccagcactggagccgtccttctcttctgtaagtgggctggtttgtcctctcccttcctccatctcttttttcccttccatgtgcagtgccctaatctgcattctgggaacactgccccatgtgaatagtaactgcacccctccattcctgactgcccccccatcagggcacctcgcccacctccacccccactgtcctctgaactcagagcagcttcagcctcagagaacgtctgcgtgatcctgctctccccagctccagatcctccatggctccctcacgccctttggaaaaactcactcttctcccccatgaccgccagacccctgggctcctgcattcactccatccagtcacagagctctgcaaacatgctgag

SEQ ID NO: 140945 - DNA, 253 bp, Homo sapiens
tactgggattacaggcgtgagccttgttggcccagccctcttggagtcttaggaaggggcgcaggttgcctgggtttccctccttgcctcttcctgcccccagagagcaccatgaagcccaatgaaggtggatatggggcaggagctcgctggggctctggtgtgcaggaaggtttccctgtttgtcttcaaaactgattttgtaagtgctgagagccgtgttttgtttctctacctctatggcctcatctgc

SEQ ID NO: 140946 - DNA, 445 bp, Homo sapiens
acaaagggaaagtcagggaagaagcaaaccattttcaagggaagcaacatttttcctggcaccatttgctggatgacatttcacatacggatttatttttgaaaaggatttaatggattttgacccaaagaaaaaattttacagaagatgttaaagtacattaatatggttatttcccaaggtaccttggtttgtaagccaaagacacaccaccttggcaaattcagggaaaatctaaaaccatgggaaccaaatttataatctaacttagtggttttcatatatttaaactgccaccttcaacttaaaaaatatgttttacattgcttttacaatgcacaaacacatctcaaacaaatatttctccaaaaagtatttcccttacaataagcaaagcatgttgatatgttctctatattgtacttcatttttcaaaatgtttttg

SEQ ID NO: 140947 - DNA, 214 bp, Homo sapiens
tcaaaggatccgtccttcactgcacttaacaaagcaaatatgttccaacacttcccaggcaacgttccatacttgatccttggtctataggtattcttgaaagggcacagcctatttcccacctcacacctgattgatggttctcactgcccgaagctcgtgagctgtcagagatcagctgtaatgagcgtccacacagaagttctcatggatg

SEQ ID NO: 140948 - DNA, 284 bp, Homo sapiens
aggcgacagtgacagataactgcaaacacccacggtgccatccccgcgctggcacaccacacagcttccactcaaaaaaaacggagtccctttcttcattatagtcatatagcacacaaaaatcaattcaccttgtattttaaaactcaatttccaaataaagccttcaggtagagtcctgttttcttctcaggcacacccagcctgggaccagaagccccaggtgggggtagagggtgggccaagaagtctagcagtcctgctgtgccatatacaggtgagag

SEQ ID NO: 140949 - DNA, 474 bp, Homo sapiens
tcaagggttcccccaaaccagctcaacccctccatttacattataatgcaaaagctcttccctgtgggtctcagggcctgtggggaaaatggaatctggctcaaacccaagatccaaagctaaagtgcccccaggttgggctgcctgacagttttatagatatggcattgagtggcctcctggcagtttggaattgtgaaggttcactcattcatttttcaacaaatattttgaacacctgccacatgctgggaacggttcttggtgttgggcatagaaagccttaaaaactccctgctcttgtggcaccccctttctagctggggagagacagaagatgcaccaataaatatgtgaattatatagtatggcaagagaagatcaaactgcctgcacgaaaataaggtggggaagaggggtaaggggtgcatggtgaccaggcttttaaataggataattagggaaggcccaatg

SEQ ID NO: 140950 - DNA, 205 bp, Homo sapiens
gagtgagccaggtatctgtctgcaaggggctctgagccccttctcttgggggtgcccgtccagaatcccgaccccacatgctgtcacctccaatcctgctccccaccaaaggtggggctctgtacccccagagctgggtacacagtaggtgcttcctctgtgcttaggggatgagggagggaaccagtgcatgagtgggtggcca

SEQ ID NO: 140951 - DNA, 500 bp, Homo sapiens
gtcttgaactcctgacctcagacgatccacccgtctcagcctcccaaagtgttaaaattgcagacacgagccactgtgccttgccggttttctcatctttaaaatggctatgactatgtgatgttattgtgcagttgttgcaaagatgaaatgaaatatgtaagtgagagccagtggtacctggtaaatgtgggttttcttcttctgtccctcttttcctccccccagcccgccctttcttctttccttccttcctggtcgacatctctgattacaatgtcagagaaccaggagctgtaggacaaagaagatagggcgacaatctcctccaggggactcagggatggaaaacgcttctcagactgttgcagcaggtgacagtcatctgctctgcccagaatctcctggcctctcccctgctggataactggccccatgccggccccatcagggcatcaggcccctggactgagatagaaagtggatcccaggaagcatat

SEQ ID NO: 140952 - DNA, 108 bp, Homo sapiens
taacctttatacccttcttcacctgattagccaatctacttttattcaagtgagtgctatgaaaatccatggtgcccagtgcggtggctcacacctataatcccagca

SEQ ID NO: 140953 - DNA, 315 bp, Homo sapiens
taggctctgacatattctgaaatccaggaatattggttcctgtttgactagaaagaataggtggtgagcataatctttacagtaatgcctgcctttcaaagtttatatcctttcttttgcatggttactacttactgaactcacagtactctatactttctattgcttgtatgctgctttcttacaatatgcttgtaatttttaccatgaagttagcctagaaaaacagtgattcccacagtatcttgtaaggtatttaagttaagcactccttcctggctcctcctcagcatcggtagacatcttcccaagtta

SEQ ID NO: 140954 - DNA, 288 bp, Homo sapiens
ctgcctcagcttcccaaagtgctaggattataggtgtgagccaccacatccagcctaaaacttttttcatgcttctactcttatctcatttgtgtttttatatttaaagtgagtcacttgtagacaacttatagttgggtttccttttagacctagtttgacaacctctgccttttagtcggagtgttgcatccatttacactgaacataattatcagtatggtgaggttgaagtctaccatcttgctacttattttctacctgtcacatctggctttttattcatct

SEQ ID NO: 140955 - DNA, 324 bp, Homo sapiens
gccaaagaattacagtccatgtggtgtagactgcctttcaagtttatttagtaccccagaaccctttagcccgtggtggtgaggctttctggaactcaggttctgactgctgggatgggcaagtcccctcttgctagggctggttgaaatgctccctctgggtgatggctgagttctgcctggtgttgctttctgccatgatgatgcagcactattttcgaatgtaaaaaattccataattactacagtctccctcccacaggacagagattttctctccatgccacttggccactgccaggggatgggggaggtgtggtgtca

SEQ ID NO: 140956 - DNA, 680 bp, Homo sapiens
caatgattaataatgtttatactaatgactgataatgtccatgataatctctgtatcgaatttgtattataactattcttattctagctattttcttcattatactgaaaccgtttgtgccttcagtctcttgcctcggcacctgagtaatcctttgcccacaagcttccccagtcttcacatcaccatgctgtgtttcagtcagttctcctttgctttttgcttctaagcttgctttcacatgctgttgaatggaagaaacaagttggagaacaataatacagtatatgaaaaaaatatcgtatttcctagggtatatacatatgtgggttggtttttttttgtttttttgtttttttttttgagacggagtctctctctgtcgcccaggctgtgcagtggcacgatctcggctcgctgcaacctccacctcctgggttgaagggcttcttctgcctcagccttctgagtagctgggactacaggtgcccaccactattcctggctaatttttgtatttttcgtagagatggggttttaccataatggctaggctggtctccagcttctgaccttgtaatctgcctgcctcggcttcccaaagtgctgggattacaggtgtgagccactacacccagccaaatacagtttcctcttaaatgcataaatgagcaaaaaaa

SEQ ID NO: 140957 - DNA, 506 bp, Homo sapiens
gctgtttataaaaatgacgtgaacagcagtttcagcctcaggaggctccataggaatgataaagaagaggattacagaagctaaagcttttgtttaaagagagattacaaagcatttatttcggatcaagtcagcctgaagcttagcagctaaaacttgcccttttttctgctccgtgatgagttttgctcttaaactgagtgctcaaatgagaagatgaagatgaggctttatttggaatgacctcaaatgaggccgttggtttttcactcttttgttaatatgaattcaggaaacacgaagattagtaaagattctaatcaattgcccaacattagtttttctagtaacaagggcaaatgtgctttttaagtacttgaaggtgaaaagaaaatcagacagcaagaaaggggatgcaacaaggttaatgcctcagagcttttcataaattgtggtttctgtgttggaaattgttcaaagtaaacactgcccatgttgggaaggta

SEQ ID NO: 140958 - DNA, 1460 bp, Homo sapiens
agcggaagaaaaaagagtcattcgatgtaacaataatgcaataagtagaggagaatctatatttcaattgagagaagataaaagttaaattaaggataattttggtcactttttcaagacagaaaaaggaaatatagaaagggatcaaaaatgacttcctgagaacaatataaatacaaaagtaaaataaaattaaaaaggaaagggagcaagagtgaaatgtgcatttaaagtagcttcttttttctgtgagaagtaatcttacaaataaaggttcaaaaaaatatgaatctgtagaaaatgaaagagaactggaataccaaagagatgaagaatatggatagaggagtaagctatgagcagaggtttgaacacatctgtgagaaatatgttctatttaattatataatccaaatatcacaaacacctctggtcacacatccacaatggttcttaattataaatattatttataatttttattactaatgatgatgtatgatatgttatctatttactatcattttaaaaatttggactctttttataaaattggaaaaattggaaaaataggcaaggtgcagtggctcacacttgtaatcccagcactttgggaggccgaggcaggcaggttacatgagcctgggagtatggtggtgtgtgcctgtagtcccagctacttgtgaggctgaggtggaaggattgcttgagtccagtaggcacaggtggcaatgagccaaattcgccccactgcactccaggctgggatacacagtgagactccatctcaaaaaatggaaaaataaaaaaacaactatcggcaatattgtttttgtaaatgtatgcaaaagcctaggactcagattccactgaagtcactgtgatgtgtatatacatcacagtgtatatatacatatatatatacacacatatatatatgctcaaatttttttaaatgctcagatttttaaaatcttattaaaataatttccagattttaaaatctgttaatacttatgagactacatttgtaaaaatgtattttaagaatatggtttactgacaaacataacaaaaatgctgacacaaattttttttaagaaacaaagaatattggttagaatttggagaaaaggaaacccttgcacatcgttagtaggaatagaaattagagccgccattattaaaacctatatgacagtttctcaaaagaattaaagatagaactagctgggtgcagtggctcacgcctgtaatcccagcactttgggaggccaaggcgggcagatcacgaagtcagtagatcgagaccatcctggctgacacggtgaaaccccgtctctactaaaaatacaaaaaattagccaggtgtggtggcgggcacctgtagtcccagctactcgggaggctgaggcaggagaatggcatgaacccgggagtcggagcttgcagtgagccga

SEQ ID NO: 140959 - DNA, 346 bp, Homo sapiens
tcagaaaggagagagaaaccatcgccttacctgagccatggttttgagatatgaaagagatgaccagtccttcctttggagtcctctttagaaaagaggcagttcctaaggaggcaaagccgagacaaaaaaagccacatgagaccacatgtgcctcacagctcttataattctattaaaattgcctccatttcccttgtattgatccttgtccactctgaacatgccacataaatatagatgggacaaccagctaggcaaattctgttttatccccaaggccagagatacaggcttttggggcagcaggatggattttgggcaagctcctctcccctcaagcact

SEQ ID NO: 140960 - DNA, 190 bp, Homo sapiens
tggcatctggcaaataatcaagaaatctttatggaataaacagaaaaaggtgatataaatgtaaaaggaaaaaatttctcagcactcctgtgcatgtagaggaggcaggtgaattccacatttatggcgatggataacctgtgcttagagtggacctaaatccctgaccaagaaaagaagtttggaaatg

SEQ ID NO: 140961 - DNA, 166 bp, Homo sapiens
catgtgtcccaaagggctcatgtctctgttgtactcaaagttcaaatggagcccagcaagccagatctcctttacttctaggttccctcaacagtttctcctctgctttagagactgccttgaaaatattcttgtcctgctgttgtgttttggctttggaatgatg

SEQ ID NO: 140962 - DNA, 507 bp, Homo sapiens
aaaaggcatctccctgctgtggaggaatgtagcatcaggttgaaaaatagattctgggagatcccaggatgcaaagaagcccagaagctgccatggggagctcagatgtcctccaaaagggtgggtcaccgactgagccttaaaggagtaagtaggactggtgaagtgcatggggctggcattccaaacagaacacaggacttgagcagaggcttgccagagactggggagcacaccaggctggctggggcttcatttgggtatggggaaagtttagttagaagagcagatcaaggttggattatgggaggcactgaatggtaaatttaagggggctggatttgcctgcaggcattggggagcttccaagggaaccagagataggacgaagctcttgggtaaaaatatgaagcaatattaggtaatatgatttgggtcagagtaggggccatagaaacgggaaggaaggaatgaaaggcatgaagaaagaatctgcaggattgagtg

SEQ ID NO: 140963 - DNA, 237 bp, Homo sapiens
ccactgcctctaacaattacttcatcattttcctcagtccagtccctgagatgttcttgtaaggtgggccccatcttcctggggtcgcctgtgcctcttgggcttcatggaagcccaccccacccctccacgcctgccagtgcttcctcacagcagccctaggcctgctgcatgcacagccccacagtgacggacagcaacagaaggggtgggaccaacatggaagggggcagggac

SEQ ID NO: 140964 - DNA, 318 bp, Homo sapiens
aaaaggaaatataggtaagtgggaaaatcacaagcttaggtatgaaaagattctgggttcaaatccacattctccttctgtatgatcttaagttatttcctatctgaaactcagtttccttgcatatacaaaagaactaattgccacatgagttattgtttacttactacttattcttctctagtcttcagagtatcttattttattgtagcaggtgaagatgctcccaagagatttaaaaaaatgtttttcaaaatatttttctttatatgaaaaaaactttttcttaaaataaaaaacagcatatctatctgaact

SEQ ID NO: 140965 - DNA, 239 bp, Homo sapiens
cccaccagccttctgggagattccagcaaagtggctctcctttcctgattttgattttgtgtagttgcccagtctggctcacactaacatcgacctgtgtttgtcaaagattctcctctggtaattcaaaatagcgcaaggagaagtgtgtgcgtgttcgagtgaagcaagattggcctagagctagttaagcaagaaggtttccaagctcaagtacctggagaagtgcgcatgcctag

SEQ ID NO: 140966 - DNA, 406 bp, Homo sapiens
ctaacatattttgtgtaatttctcaacaccatccttttgtatttgatattttcctgcaaggagagtgaaaataaatgctgtttcatttagaatttttccattgcttagtacaaatatctgtatataaatgtaggaacggctgggcgcggtggctcacacctgtaatcccagcactttgggaggccgaggtgggtggatcgggaggtcaggagattgagaccacagtgaaaccccatctctactaaaaatacaaaaaattggccagatgcggtggcaggcgcctgtagtcccagctgctcgggaggctgaggcaggagaatggcgtgaacctgggaggtggagcttgcagtgagccgaggtggcgccactgccctccagcctgggcgacagagcgagactccgtctc

SEQ ID NO: 140967 - DNA, 210 bp, Homo sapiens
cactgctggtgtcttctcttcaatgcagggaagctggtggcaatgttaaccagtggcagtggcctgaagccatgtttcagttgtacattaattagaatggtctaactgctgaaacagacatcaacgctcagtggcttatagtgatttgtatctcactcatcacactatccagggtgatttggtggggggctaatgaagggcagtgggctt

SEQ ID NO: 140968 - DNA, 264 bp, Homo sapiens
agtagaaacagggtttcaccaggttggccaggctggcctcaaactcctgaccttaggtgatccaccctcctcggcctcccaaaatgctgggactacaggcgtgagccaccgtgctccggccacagcgttatttttaataatgtagctagaaggttgcatatcagctcagaggaggaggtgagactggttgaaggtagtcgtggaagtataggaatcctgtgattcttgtgtgcctatgtgtgaaactgttgaaaccaaacagcc

SEQ ID NO: 140969 - DNA, 267 bp, Homo sapiens
ttagagtggaggtgtgcaggggccggttttgaaggaagaggtaaccaaacccagctcacagtgactcccctgggtccatagacccaaccaggagccctttccccagcctccaaatgtagaattcaaactgacttttgaaattggtaaaactgccacattagttcctaggagtcggtggtaggaactaccaccatggggaagttcaagtggaggccccccactcccagacacacacatcaatgcaggaaatcaaaaataatatcacat

SEQ ID NO: 140970 - DNA, 444 bp, Homo sapiens
ctgggggctctccctccagcccatagtgtcggtggcagggtgagggtggccgacagccctgatgggactcctttccatctgggagcatgactacttccagccttgctgagtctgtgtaggaactggcagaagcttcctcttgcttagaggatggaagaagatcagggtgggtgttttgcgcccactgtgtcaggaggagagaagtgagcgggggtgtttcactaccttgcctgggctttaaatggggaggggcggggagaagctggcaatggaccctcacttgacgggcccttctgtgagctgggggctttggctttcatggcatggtcccccgcacttggtataaagcgcaaggctcctgtgggtcctaggactcagtgctgctaatcagatgttcttaattagaatctgattttgtgtaattttcagtaagaattttagaca

SEQ ID NO: 140971 - DNA, 146 bp, Homo sapiens
tgtttttttgcattttgtattccaagcccatgcatgcagaaagacaattaccactctacctcaagctcaggagtatgcaatcaagactcattattctcctgcttctcatttcattcacaccctttatgtctcagaacaataatgaa

SEQ ID NO: 140972 - DNA, 567 bp, Homo sapiens
ccaggttcaagctgttcttctgcttcagcctcccgagtaactgggattacacgcgggtgtcaccacgcctggctaattttttgtatttttagtagagacaaggtttcaccatgttggccaggctggtctccaactcctgacctcaagtgattccccctgcctccttcccaaagtgctggggttataggtgtgagtcaccgtgcctggccccaatgttgtcttttaaaattggttaattgaaatttagaattctttctcaaagtccgggcatggtggctcacacctgtaatcctagcacgttgggaggctgaggcaggtggattgcctgagctcaggagtttgagaccagcctgggcaatatgacgaaacctctctccactaaaaaatacaaaaaataaactgggcatggcagcatgtgcctgactcccagctattcaggaggctgaggcaggagaatggcttgaaccctgggaggcagaagttacagtgagccgagatcacgccattgaactccagcctgggtgacagagcgagactccgtctcaaaaaaaaaaaaaattctttctc

SEQ ID NO: 140973 - DNA, 271 bp, Homo sapiens
cctcctgagaggtgggacacgggtgtgcgccatcacgcccagctaatttttgtatttttagtagagacgggggttttaccatgttggtcaggctggtcttgaactccggacctcaggtgatccacccgccttggcctcccaaagtggtgggattttcaggcctggccaacagcaactatcttaataagaacattcattgactcaagtaattgcaagtccagaagtagacaggtttgggattatttgggtgcacccattctgaaccagtcat

SEQ ID NO: 140974 - DNA, 168 bp, Homo sapiens
tccctgcatattctgggaacattcttttagattttgatttgtagtgtaatgcttttatttcggggaaataagttccttgagtttcctttaaccaagagcagtacttaagcaatgatatttaatgactacataactgagactcctaaatcacatattgaaatctgactg

SEQ ID NO: 140975 - DNA, 639 bp, Homo sapiens
ctttctctcttttttaccactcccatgtccaggtatgctcgtgtatggagagacaacattctacttaggttaaatgatctccttttcaaaaatgtggagtgtatttccacaaatctcagacactgagtaggtaggatattagagttgcaagaatgtttggacagtagcaactttaaatattgcttttctgtttgtggttctttgagacatatccaaacaactaatggaaacaattttttttctaagttttaagtaagctctgttgctttggtgtcagcagcctctactgctgcctcttgccagctttccacttggtagaagatgcttcctaaagatgcactttgtgaagtctctgcagaaccagcatagaccaagccaaatcatgatgaaaattcttgttgtctgctccttctcccagtgcagtcctgtgtttccacttgttggaaatatatctgcctgtcaatgtctgagaacgccagcaccttttcgatgttacgaactcacagtgctcctcttccagaatgccagcattcataatttttaagcctcaaactttcaagaaatggaagcaattgaattacactgcatttaaaagtagaaatggtactattacatagctagaaatttctgtcaggtatg

SEQ ID NO: 140976 - DNA, 245 bp, Homo sapiens
cagaatggaaaaatcctccttttcccaccaagcaaagacacttgatcatgatgtgaaatatactgtatatgagacttggtaacttcattctgataataatcttgggaagaagccagtgaagaacactgcagtaataaagctattgcagggacacaaggttcctcactctgtagtagtattaaaagaattgtatattattatgtacgggcctgttcagctgattaactgcatataaaaatagaagt

SEQ ID NO: 140977 - DNA, 607 bp, Homo sapiens
cacaccacctgagtcttcatttgtatttatttatttgagtggtattttcatttcctttgagtaaaaggagaaaggaagaagagttgctgacgctgtcatgactgaaggggtaagattaggcattgtggcacctctcagccagggctgcttccttacaggaagtgctccagagctgcggagatgggagtgatttagcagctgcctcccccttgattgaccgcatcaggctttaaaaatatcaatggattcatcagcatcaaccctttgcagaactctcttgaagactatcgtaatggaaacatgtgagagcttttatgagtgcactccaagatatgatttatgggaaatagtcgcaacaagtgtttgcttgaagtctgttagagtcattcctctgaactctaggcactatcagaacatcaataaagcatgaattttgagtaaagaccaaggcagataaataagtattggcgttggtatttctggaaatttttctggaacatttatcaaggacaatttgctagaagaaatggatagtaacctgatgcttaaaagttgaagagggagggagggaggagggaaggaagagataatacatttgactaggttg

SEQ ID NO: 140978 - DNA, 337 bp, Homo sapiens
tgtgtgtactggaatgggaacagagagcaggactgttaagtcagatgtctacaaatcacagtccatggccatcactgacttgtttctgtctctaaacaaagcatgtaaaaactgtttgcctctgccatgaggcaaaagcatgcgcttggcatttttctgaggtcatgatgccctaggatgtggcagttcacgtgccactgaatattgtttaccaactagctattcaggacacggggtccctcctggaggagtgcttactgctggcgtcgggccagtgtgctgataacctagttctctaagagattgaaaactctgactgtgtggcccctgccaattt

SEQ ID NO: 140979 - DNA, 884 bp, Homo sapiens
agggtgggcactgcacaaagatactcagccaggcagtcaagtgaggctgaagtacagcttactctcacttgaccagccatgtgtctggtgcatgtggcttaatttatctggggaaaatggtgctttttccttatttgcacagaggcgctatatgggctagtggtgtctctaaccagtgtggaataaataaacaactccatggttctctgagactctgcaccaagctggacaggagtctaggtgttcagattagtttccctgttcacctagggctagtggagatttaacaggtgtttgtgcgtgacacagggacccccctgggcttctattctctggagtaccatcagtgtctgggggtggggatggggaagtgttagatagaaagctgaatgcatggacctcatcttgtagcagccagtggttgctgggacccagagtactgttgcccccaagaaaggaaacatggccctggagaagctctggagagggaatcaggccaacaggggagcctctgtggggcaggcttttggggaaaggctcataggaattacagacccaggctctcagagggccagaccctgggcatgctgaaaggagcctcttcgggagaatcacttgaacccgggagggggagtttgcagtgagccgagatcatgccactgcactccagcttgggtgacagagcgagactccatcaaaaaaaaacacggagaaaacgaaacgcagggacacagggacgcgcgcgaaagcgaagggcaggcaacggccccggcacggcgaggggccaagccgcgcgacagacaacacacaccacccccgcgggagaaagaacaccggcgcaacaccaccagagaccagcaagcaaacaaccccacaccgcgaac

SEQ ID NO: 140980 - DNA, 310 bp, Homo sapiens
ctgatactaccaaaaaaaaaaatttagatgacatattatctcgatctgcccatcaaatcctcacagttgttactctgcatcacttcaacctgaccaccaatttgaaaagcaattctggagttctgaaggtacatatctatctaacatgatcccttcataatctggccaaattgtaaatttttataacaatgttgctgcgattcagcttttgtttttgctgagtattatttactcttgtaaaccttagaaactgtaaacatgcatctttttttctggtttataaaaggaggacatatgtcttacaaaaaaa

SEQ ID NO: 140981 - DNA, 222 bp, Homo sapiens
gaggcctccatcgttttacatacagtgcatatactgtatgctcctttctcaatgtatcagggggacaattatccatcttctccccttgaatatatgagtaggctgcagaggatttagtttgcttgtgctgcttctcagcttatcttcttctgatggttaatcattttaaacaattagttttagttctcttagctacctctagtcattgcaagacggctctca

SEQ ID NO: 140982 - DNA, 429 bp, Homo sapiens
tgttctagatttggaattagaaggcctggattcaagtgatgactagctctgtgaccttgtccactcaggtaaatgcaacatttagaattttggaggactgcagaaactgtttcatctttatcttcctcaacaatgctgtaaaactcattaataagatttccaatgctacttaagatactgaactttttaacctaagtatgcctggaaaaatatatctggaatgctacagctggctaataaaatacatgtcagcactgtgtagcagcaggctgatgggatgtccatggtgggtgattaatatagtatatcatcagtgttactactatcttacatgatgctagtactctatagtttccaaggtgatttcgtatctaatacctcattgaatttttccagcaccatgaaacaagtgggagtagatagcaatat

SEQ ID NO: 140983 - DNA, 433 bp, Homo sapiens
tcacatcttcatgggttcaggctcaggtctctgtggtcgcacagtgtgtctttttaccaaaaggaacacctcatgcacttttccaaaaggagaaaagtaaaggtttgaatggatttttagttctcggcatttttgaacagaaataatcaggtattaagttgctcaaagatgcccacaagctttcataggagaaacatctaattcataaccaagagtttatgttattaagtaagctttcctttaacaggatcaatgaatgaagagtttaaatactcgctctaatccccattcagtcatctggtatactctctgtgagatatactctcagtcatctggtatactctctgcgtatgccagatgattaaatggaaattattgcaccactaaacaccagtactgcaaactcttatttaaaaaatcaacacctaggaca

SEQ ID NO: 140984 - DNA, 348 bp, Homo sapiens
gtaataatttgagccgaggggtgggtcgttgttacttgtaaaacagggtctctagaagacagcagatggactgatcttgttcttttatccaacttgcaactctgtgccttttcaatggagcatttagactgtttacattcaaggttataattaatatgtgaggctttggtgctatcgtgaagttgttagctggttgctttgtagtttctatagtgtcattggtttatagtatctgtggctatatattcaagggtatgtcagttgttagaaggtgatcctttttgtctcttcactggggctttttgagtgacatgctggctcaagggaaagatccacagcaagggaaga

SEQ ID NO: 140985 - DNA, 364 bp, Homo sapiens
tttttgatacagagtctcactctgtcgacaggttggagtgcagtggtgtgatctcggctcactgcaaccaggctcgagcggttcttcttcctcggctcctgagtagctgggattgcaggcgtgcgcaccatgcctggctaagttttgtgttttgtgtagagacggggttcaccattttggccgggctggtctcaaactcctaggctcaggtgatccttctgcctgagcctcccaaggtgctgggattatagatgtgagtcaccacacccggcattaagctttgaactttggccagtggtatccaagagaaatacaatgtgtgctgcaaatgcaagccacatacataattttacattttcgaatt

SEQ ID NO: 140986 - DNA, 117 bp, Homo sapiens
acaggttatctttaccagctgcagcctccggagacccagtcaagggcaaaacgtattccaagtatgagctggagctctggggaacagggggatccactctcccgttccctgtcctgg

SEQ ID NO: 140987 - DNA, 411 bp, Homo sapiens
gacatggtttgtcacttgacctgaaaaatagcccgtgttggctatgttctgggaaataaatatgctcataaatgaccaacggaaagtaaaccggcacagctcttctggagggcaattagtcacttgtatcaaaaacttactggcttacactttgaatgtgcaattccacttctagaaattaaagaatgtgtgcccagacttaccaataaaatgttcattacaatgttgcataaaaatcacaaaatgattggaaatggcaaagacgtacaacaacaaggcagagatcaaatcagttctagtgtatgcatatactggaatgctacgtcgttattcaaatgatactgcagaggtaggattatgagttggaaaagtgttcatgacatattattgtattcattttctattgctgcg

SEQ ID NO: 140988 - DNA, 205 bp, Homo sapiens
ctctggtgcatttcggtaaagtactgattttcatttcataaaataaattttgctttaattaattctacacatcagccgaagcacttaaatttgcagttttacccaaacccagacagttggtttcagttgaagccttagtgtggaaggactggattgtggcaggagaaattgagttttgtcacagagactaaataactgtgtatgg

SEQ ID NO: 140989 - DNA, 778 bp, Homo sapiens
cttgcttagaacgctcttaggaatgtagcaacaaagtccatctccttgaagtgaatggggaaattgtttcctttggtgtgttatagcttgtctattcagaattcacttggcacagtatatcagagaagaatgactgtcttcatccttccttgggggacaaagttggcagacaaggctggtatggacgggcaataattaaattgccacggatagtgtctaatgtaactgagactaagaacttgtgcacatgtaccccaaacaaagcactgtgtcacacagaggatccccggagcctttgaaccctttctttaccatattatgagaagcaatatcttaacattagaaaacactttgaatagctaaaagtggacaaatgcgttgcaagaaagaaaacaagagtctctttctgcttagcagttttgaaaagcaaaaactgacaggcttaatttctcacttctttttccaattttgaagaaaatgaaatggaaacattttatataagattgaaggaaaaaagcagggtttttacctttgcttattaaaaatagtatcttaaaagccctcatttttatgttttgctaaggactgggggatgaggaagaggcaattcagaaaatgctaaaagcagtaaatgtaggtagtttcaaaattttaaacaggctttgccttctgtgtttttttaagatcagtggtgttaacagagcatattgcaatcacagataaatgggttgttcatctctttcctttgtgttgccacagaactttgaacttgtgttag

SEQ ID NO: 140990 - DNA, 325 bp, Homo sapiens
agtcagttgtgtctaaactccaaagcggtaagggtataatgaggtgtgtctgcccccatcccccacattatggcctgaactagttatgtaggtttctttagggtccccttggccaagaggcagttcacattccaagctgcagggcttagaatgctatttttggtttacaattctaatgtcaaaacacataagtttatcaaacacccaaaacaaccctaatatcagggccaagcaaaatgtgttcactggctagagagcagagtggtaaaatgtgttttggaagatggtttgacaacttgtatcaaaaatattaaacaaaacaaaa

SEQ ID NO: 140991 - DNA, 394 bp, Homo sapiens
accggggttcattcccttaacgagtcacaaaggactccaccaagaggcggattttgatcaatgggagttttacttggcacaagaaaggaagacactgggcgtattctcccaagtagtgtgtcccccagagaaagagacaggagggttttataaggtgatggagaaaggagagggtgcatgactgcatgtagagtaggggtcccagtgagtcatgatgctagcacataggctgcataggttgcataggttatagtcgtgaagctatagcttctcccggggtgaagactttagcatggtaatgaggagagttaacttgggttcatctacaagtaacctggggtcacttaggagctgatttaaacaaacagggtgacctcattccgcccagggttgg

SEQ ID NO: 140992 - DNA, 291 bp, Homo sapiens
tttccattgcaggctggactgagcggtttaccacattgaccctggagacacagaggccccaaataaggaaagccaactgtgactaaacttcctgacccagcagaaacaaagcacattcctgacattgactggcagatgtgagcccagcagaagtgcagacctctgggtcctttcctggggagcctgtctgaagcaggacaggcaacatgaataagtttcgagaaagccatcctcagtgaaacatttaagataggtctggggttagcctgggctgaaaaaaaactatatata

SEQ ID NO: 140993 - DNA, 182 bp, Homo sapiens
ttgctttggagtttggatattcagggatttaaatcctggctttcttgttgaattacatatgagaacgtgggaaaattatttaatctctcaaatgtgaatgtttttgtaaaatggggaaataattcctatcttgtaaggttttatcatttgtaactttagagctaatatggataaaatatctc

SEQ ID NO: 140994 - DNA, 705 bp, Homo sapiens
ggggccagaagtctgagatcatcttatggggcaaaatcaaggctgtggtccttctggtgtctctgcggggagaatccgcttccttgtctcttctggctgctggaagctgctcacggtccttggcccaaggctcccaggcagctgtcttgtcactcagcctccctctcccctccctcgctcctgctgcctagtgtgggcccttgtgatgacagtgggcccacctgggtgatccagcatcctctctgccgcttaacttaatcttatcacatctacagaatccctttgccatgggagaccatatttacaggctctgcggactcgtatgtggctttgtgggggccattgttctgtctgccacagccacagccacagccacctaggggtgtgctggctcccgggccataagctgggcatccctgggtgggtgggcccaggaagggctgccactcctgtctgccaggtggggtgctcctttgtgccttgcgttctgcccactggcttgcacccctggcttgcccaggcacctgaccaagtccaggctaggcagacatgagattaaggtagcacagatttttgcgcccaagtcaggcatattgcactccagtgcccagaaggcagcagtcgggggcttggccctggggctgcaggaactcttcagccctggctgtgtggggtcaaccctaaggtgtctctgggacaggcagg

SEQ ID NO: 140995 - DNA, 309 bp, Homo sapiens
gtgaaccgcaatgcttgggtagacaaaaagttctaaagatgagggaaagttatgtaattcagacttgaaccaatggtgtgtgtgtggcctagtggttttcgttaatttttttttttttttttttggggcggttttcaactttgaaacccaggcgggggggcaggagcaaagcctgggttttttgaaattccaatccctggggttaaggcatttttcctccctaagttttttggggggctaaaatggcggtttttgggcccccgggcccaaattcgaaaccagggccatggctttttcctggggaaaatt

SEQ ID NO: 140996 - DNA, 504 bp, Homo sapiens
cgtgaacgtgttaaccgtggcgactccgaaacttgatgtaacaccgcatcgcgaaaatatagtgatagacgtgtcagcgaatgactagatactctgcttcatttggaaatgatggttaaaacaactagttaccactacatacctgttactttgacgcacgcgtcaaagtacctggacaagactggcgatggagaagttagttttgaagaattccaagtattagtaaaaaagatatcccagtgcaggagaaaacaaaatagaaccctgagcactggaggaagagcgcctgtgctgtgctcttatcattgagtaatcctactccaggaagttgcaccttatttattttttggctgctcttacccgtaatgttttgtcatccatcctagttggataaacacatgtgtagcaaagttaattcttcaggtactaccttattatttttgtgggctatttttctagactgattcaactgaagaactataatctgtaaacagaatagcccag

SEQ ID NO: 140997 - DNA, 397 bp, Homo sapiens
tgcctccaagctgttgcacaagctgtcccttggaacactcaccccacatcctgcttctccttaacccgcttccgcagtcctcagcctgggtggcaccctctcctgcaggtccctgtagtaccctgcactttccctatgttagtatttatcaagttactgtaattctctgtttacctatccatgttcctagtatggatcatcatcaggtggtggcatcatctttttatctccagtgattaacgcagttacctaacacatatgaggctctcaataaacatctctgctgaacaaatgtagtgtttataagtcatatcaagcttttagagatgaaaagccccaagagtaaaatagttcattaaccttttcctttggctagattcccttcagtcagttacca

SEQ ID NO: 140998 - DNA, 166 bp, Homo sapiens
ggatgtagggaaagaagaagggtcatgagaaaagaaggagaggaatggtggacagagggaggaggaatgctgagagacatggagctgtgttcatttgtaagaatgaagatgaagtctttatttttgtgagttcttagtaagctcccaccccagttctcccccaaca

SEQ ID NO: 140999 - DNA, 348 bp, Homo sapiens
ttgggaaaaataacacctaaaatcttaaaataaaaaaatctaaattaagaaaacatttgaagattcactgacaccaagtgccaaactcaaacccaagatcccagttagagactttaatattagactctcttattgcagttagttttcccatatgataaatacaacactgtctgtttattgataaaggcctagcaagatattctatccctgaccaagagggtgtggtcttgctgactctagtgatcaagctgagaaccagaagagtatttctcacctgacaaaggaaccaaatatatgcacacaccggagcttaaccttagacccgagcatgggatcgccttctcctat

SEQ ID NO: 141000 - DNA, 326 bp, Homo sapiens
atgtatatttttactctcctcttattccctccaaccttcacccaagtctgtttcctggcaatttgagaagtgagaaatgcctgcgtgggggaaaaagtggaggcacatgttgtgttgtaattttaacggggaaacattgcccaatgacaaaaccagggaccgtcttgtgatgttgctttctgcccacgctaccttttcctcttctgagcccgctctcgtcccaccgaaggctgcaaggctgcctcgcatccagaggctgtgacctgctttaaatcaacaaagcatgatgatcttagtttgaagagttgggaggacaaccatatgga

SEQ ID NO: 141001 - DNA, 813 bp, Homo sapiens
tgctactgaagacagggaaggataaaaccttgcatgtcttgcacttacattaatattcccagctgtacctcgaaaaaaaaagcaggttatagaacacctgtggagacaaaatgacccatcttggatgctagtccaccatgttacttctgatttgcccctgttcaatgaatgccttctgatctctcatttatttactgtccttagtgtaaaatcatgtcaacctgggtgttaccacaaaaattacaggctatgagacaggtagtcctcctggattttctgccttcttctttaatttttcagatcctttggcatttgagagttgctttgtgtatacggccctttaatggagcaaatggccagccaggaaaccaaagtatggacaaggggaaagaagcatctgtggaggaagttttacaagcgaccctcctcatccatgtgggtggtgttgcccatatgctacatgtctgtggaccactatgtgtgtttaaagctttttagtaaaacgttactaaaaactatgactcactgtggtgaaaaaggtgggaaaacagtgacaacagtgagtttgctgctgttattatctatgtgagtggtcacaaaagcacaggtagcagctgaggcaagggtagggaagctaggaaaagaatcgcagtgagaaagggatgagaacttccatgtctgtgttaatgtctggttttatgataaacttgaaactcaagaggcacagttggaaattgtaccttgccactttgtgtggctgagagagagaaaaatgtgctagctgaatgtgtggactgtctttgccagtggagg

SEQ ID NO: 141002 - DNA, 672 bp, Homo sapiens
taaaaagctctaaaacaatggacaagactagaatctaacaacagggtctcaagccacccaggctggagtgcagtggcacaattatggctcactgtagcctcaccttcctgggatcaagcaatcctctttctgcagcctccagaggagctgggactgcatatcctttggcatttgagagttgctttgtgtatacggccctttaatggagcaaatggccagccaggaaaccaaagtatggacaaggggaaagaagcatctgtggaggaagttttacaagcgaccctcctcatccatgtgggtggtgttgcccatatgctacatgtctgtggaccactatgtgtgtttaaagctttttagtaaaacgttactaaaaactatgactcactgtggtgaaaaaggtgggaaaacagtgacaacagtgagtttgctgctgttattatctatgtgagtggtcacaaaagcacaggtagcagctgaggcaagggtagggaagctaggaaaagaatcgcagtgagaaagggatgagaacttccatgtctgtgttaatgtctggttttatgataaacttgaaactcaagaggcacagttggaaattgtaccttgccactttgtgtggctgagagagagaaaaatgtgctagctgaatgtgtggactgtctttgccagtggagg

SEQ ID NO: 141003 - DNA, 663 bp, Homo sapiens
aatgcatttaaatgttctattgagtgactgtggttctcagtataagcttccacctacagagaaagttattcaaggatgctggtctccccttagaaatcagtttcttaaagtattgctgaaaggttggtcttctggagcctcccagtgtggatcctttggcatttgagagttgctttgtgtatacggccctttaatggagcaaatggccagccaggaaaccaaagtatggacaaggggaaagaagcatctgtggaggaagttttacaagcgaccctcctcatccatgtgggtggtgttgcccatatgctacatgtctgtggaccactatgtgtgtttaaagctttttagtaaaacgttactaaaaactatgactcactgtggtgaaaaaggtgggaaaacagtgacaacagtgagtttgctgctgttattatctatgtgagtggtcacaaaagcacaggtagcagctgaggcaagggtagggaagctaggaaaagaatcgcagtgagaaagggatgagaacttccatgtctgtgttaatgtctggttttatgataaacttgaaactcaagaggcacagttggaaattgtaccttgccactttgtgtggctgagagagagaaaaatgtgctagctgaatgtgtggactgtctttgccagtggagg

SEQ ID NO: 141004 - DNA, 808 bp, Homo sapiens
ttgacttgatgggccagctcatggctggaaatgcctgttaaccctgaagtgacagaaaataccatgcgcagtcaagagctcatgataattagagatagaggctcctgatcctggggtctggagatggtgtagctcctgacccctcaggctgcttagacctccacaggacagaggacagggagttcttggatgatgaaatcttgcccggttttatgggaggcacctaagtggtgtaaaatgggctggtttgaatttcagctcctttatgttcccctgcccacctcctggtactgccactaatgatcagtaaaatggctaaaaaggaggaggagaaagagcaccagcagcagtgaggctgcacgtggtctgctcagggccagacggcctgacaagcaccctcactgaacaccggcccagccctggggttccaacaggggtgttggtgtcctgccccaggtgacttggtaagcaggccctggagtacagtcacatccaggactttgtgttgtgtccctgtgggtgggagtggggtcatcagatttcatttttcccagtgggaaacacctgcaaggatggttattcacttgactcagtgtccccccaacacaaaaaaataacattgtcttttaagatcctctgcaggcccaatccaccaggagaaaaaaaggggtttgtctctcagcctcgctgatttgaattgggaacttatttctaagcactatgaccaagttagctgaatgaaaaaaaacaggtgatttcttagtcttgttaccaatgtcaggcaggaacttgggtctcaatatttttt

SEQ ID NO: 141005 - DNA, 400 bp, Homo sapiens
atgggcagatgagcaagggagtgatagatataaagccagcaatctaagaacaatgcttacaagaagtagacaaactgtgtctgaagcaaaatcacaaaacatttctaagaacaggaaagaacccttgggaaaatggagaggaaatccatgacataggagagtacaagtaaatactgccaaggtgctccttctctccatcaatttatggacttcacatacaatcaaccccataaagggcctctgggtctgtgttttccttttcctttgcttccctttttctttcttggaacttagctacagtttttaaacttttggaagcataaacaaagcaaggatgcttttgaaaaatgaaaaagaagaattactctggaggatacatttacagtcttttttttttttt

SEQ ID NO: 141006 - DNA, 378 bp, Homo sapiens
tcactatgtgcttgggcaggtcccgtcaactccctgagctgtacttaaagcagggattgtcacgtatccccttcatgtgctgcagcccggagaacatccgggtggtaatgaggccagcttctgcaggctgcaggctctgggcttggaacttttgcacttgctgtcatcttgttgtcacaagcctgcaaagtagggactctcctcattttaggaaaccagttccacgaggctggtgggaggcctgagccagggtttgaatgcaggctgctgtgattcagggacctgagtcctgccctaacccctgtggccttgtaggtagtggcctcccattgactcccacttttaaacattggggcatatttaaacattggggtcatt

SEQ ID NO: 141007 - DNA, 486 bp, Homo sapiens
  misc_feature (351)..(351): n is a, c, g, or t
  misc_feature (420)..(420): n is a, c, g, or t
  misc_feature (459)..(459): n is a, c, g, or t
  misc_feature (479)..(479): n is a, c, g, or t
tgtagtcccagctactcaggacgctgaggcaagagaatcacttcaacccaggaggcagaggttgcagtgaaccaagatcgcaccactgcaccccagcctgggcaacagagcaagatggtgcctcaaaaacaaaagaggggacagggagtaccaagtcaaaggctatgccagcttatgaaggaaaactgttgcagaaacagaaaaccaaacaccgcatggtctcacttataggtgggagctgaacaatgagaacacatggacacagggaggggaacaacacacactggggcctattgagggtggggaggggggagagtgagagcatcagcaaaaatagctaatgcatgctgngtttaatacttaggtaacgagatgatttgtacagcaaaccaccatgacacacattcacctatgtagcanacctgcacatcccgcacatgtaccttggaacttaaaatnttaaaaaaaagaaagcatangaaaaaa

SEQ ID NO: 141008 - DNA, 571 bp, Homo sapiens
aggcgcccaccaccacgcccagctaattttttgtaattttagtagagacggggtttcactgtgttagccaggatggtctcgatctcctgacctcgtgatccacccgccttggcctcccaaagtgctgggattacaggcgtgagccaccacgcccagcctatggtatgggcctcttcatggtgtgggctgccatgggaagggcatgacctgtagcaaggcagcccctgaaggaattgatgttctgctgaccacattccctgctgctgctggcagcaagtccttccttgaagaggagatctaggtggcatgtctccctgtccacacactttcctaagaataagaaaatatttcctggaaatcatccatcagatgtgccctcacatctaagtattagattacattctgtgtcagagattcatggttacacatcatagcctttttctacttctctagtaaaaagaattctgattttttgatgggtacatgatcatctgggataacggctgcatttttcagccttcctctacttgtagacatgtcagtaacttctggctaatcgaatgtaagttga

SEQ ID NO: 141009 - DNA, 339 bp, Homo sapiens
gctggtctactgttggaggtaaaagacgctcggcaacttcactcttccagtcacctaagccaaaactcttggccttgctttgatctctttctttctctcacatgccacatctgcccaccttcacatcacctctacacttctaccttcagcctggctaccaccatcttttacctggtccactgcagtagcctcctaccagtctacctgcttctatctcggcccctcccctccagtaccccgtagtaccctcaccactttagccagtggctccttttgtcatcccaatggctcacaaggcccagtaggaactgcttcctctccctccatttctctgacctc

SEQ ID NO: 141010 - DNA, 332 bp, Homo sapiens
gaagaatagaatgtgactcccttgtttctaggttagaggagtaagctggtggtgccgtttcctaaagtagcaaaggagcatgtattttacaaatggcagtatgttcttcaaagggtgttgtctagcaagtgaacctgggagagagttgaactggggatggttagatatcagagtcatctgtctgcaggtgatatagtcccaggtaagtatggtaacatgaagtgaaaggggcaggtgaatgagaatatagagattaagtttatatatggaggagattcatctatgaacaagaacgccatttcactaatttttaaggtgaagatactgtgttg

SEQ ID NO: 141011 - DNA, 550 bp, Homo sapiens
caagacagacactctgggcaagacagacactctggggctctcagaggctgggaagcgggagggtggccaggctagtcaaggttaatgatcctttacatcttaacaaaattatccactaccctgactattcctggactacagccacatctcagtgccgcccttctccccaacctaaagcctccttcacgtcttcctcttgtatcccccaaccttaacccacaagtatgggacacttttactccctccctggcaaccaatcacacgcccgttactatcccattaaaacctaatcatccttaccccgacgtgctgcagaggacacagcagagacataatagcgggccatgtgccatcactgggaacacagattgtcctcaggccttgatgactcagagagtcagggctgggttggggacgcgtaaaggcttgggagcccacagtggttgcctcacccagcctggaaggccagcgatgtcttctaggagaagaagacatttgagctactatttcaagaatgaatgagaactgtgcctgtttcgacaaagctgaa

SEQ ID NO: 141012 - DNA, 115 bp, Homo sapiens
tgaactctaaacttgagttccctcttctttattacaaggggcttaaactagtggctgctaaaactttttccagagctgagtacagtggctgtgcctataatcccagctgaggctg

SEQ ID NO: 141013 - DNA, 176 bp, Homo sapiens
cctaaaagtcactgaatcaaatgtctttcagactaaaataagatgcctgtgtcatgtaatttagtgaattaattgaaaacagaaggataagcaaggggagaggaatggtgtaggttaacctacacctaggctagggtcaagcagaatggaaggactgcagtatttgagttcataca

SEQ ID NO: 141014 - DNA, 504 bp, Homo sapiens
tcaagaagcaagggggccggtggggtctgtttgtggcccccggagaccctgccccccaccctcctgggagcccaggttggcagctgtgcccagaaggctttcggggacagaaagtttggagacaagttcaggcctgactgagtccttgtcccctagagttggggtcagctctgtacctgctgagccgaagtgctgatggctgccgtccacaggccccggccaaagcctggctcaggagggagctaagagatgagactcccgtgtgcagagacaggtggccccggggaaggaagaggccactcggaggctccgagaacggaggcagcgcgggggcttcctggggcccgtgcatcggaggaacaaggccaagcggagggaagcagcaggaaccaggacccctgcagatggtggaggcaagaggctttatctgagcctttgggaccctggccacctgcccagctccatctgcatgggagaacctaggggaggggctggttctggtac

SEQ ID NO: 141015 - DNA, 298 bp, Homo sapiens
caactagtgctcagctttgccagttatgatgatgtgagactatgggcctaagactctctgatttttagagaagccagaaatctagatttttatatgtgcaatctgattttaaatatgggcaagtcactcacaaattttttaggtgccaaacacttgtagggtaaacttagcctttgagttgtcactttacagtctctggcttacaccagtaggacaggcagtccatttagtttctaggtagtcaagaagctagatctatctacaacaatccagaccaccagctctgagggctgagacg

SEQ ID NO: 141016 - DNA, 281 bp, Homo sapiens
catacttgcagcgccaggctcacctcgacctcctagagttaggcctcctcctcaggccaggccttagaggtcatgatacaggctgaggaaagagaggtccaggccagcatccatggaatctgtcccattagctcagagaaaacaaaaaggggacagatccagagggtggggggactggcaatgcaggacacaggaaaagctagactgaaagatcccgggcaccgggagatcaaagggccaaagcaagcagcagccagccctcagaccaaagactccccagc

SEQ ID NO: 141017 - DNA, 275 bp, Homo sapiens
gtctaggctgccggcccatgccctctggagcttgccaagcccagctgtgcatctgccgcgggccctgcctgaccttgcgcctgtggggctgatggaactcagctcgtggtggtcactccccacatgtggtcatgtggggtcccgtggtcgggcgctttgcctctcccagtcccagccagcactccaggcatgcccttccctgctgtggatggccccaccggctgtgctgccctcctccctctggcactgaccacaggctccatatgcatcttgtc

SEQ ID NO: 141018 - DNA, 441 bp, Homo sapiens
gcctgatggcacagagaagggtgggcactgcaggcggagggaagcgcgtggccccaggtgtggagcaaagccagtcgtgggtttggcacttggtctgggggccagggctgctggaggtggccaggagagcctgctgaccactgtccaggcggagacctttcagcagcagggacctgctgggaagcacgaggaggtgaggggagtggctccagggctcaaaactgagaagaggctgggcgcggtggctcatgcctgtgatctcagcactttgggaggccgaggcaggcgggtcatgaggtcaggagattgagaccatcctggctaacagggtgaaaccccatctctactaaaaatacaaaaaaaattagccgggcatggtggtgggcacctgtaatcccagctactccggaggctgaggcaggaaaatggcgtgaacctggg

SEQ ID NO: 141019 - DNA, 359 bp, Homo sapiens
ggaaggactgagggggtgaggggcacggtaacacctggcatttggctgcagtgccagatggatcccagagtgggccacaggcccaggctggacaggaaggggagtcatgaaatgtggccttcttggggacagcgtggccaagcagatgtcagcacagagcccacagcgccctctcttaggcctggataaggcactgtgggtgccaggttgcaggccctgcacagcagccccaaagcctggagccatcctgagtccttcctttcctcctcccaactcccacccttcaaatcttaccccagatagaagcccttccccacatccacttcctctaccttcctcatcctaagggcccgtcctcc

SEQ ID NO: 141020 - DNA, 564 bp, Homo sapiens
gtaactttcatttcagaaacggccacctgtggtaaaaagttatgccagtttatgtgagcagatgaaaatgatacacctcatcaatttttaaaattagggtactgacaatatagtcctccatgctgtccttttattgttgaaaacaaaggaaaactgagtatcagtggatcagtaagaaatgagtgttcccttttgtaagtggaatctgaccagctttgtctggaatttgactggttgtatggaaaaggttcctaaataggctggacacgcctgtaatcctagcactttgggaggcctaggtgggtggatctcttgagcccaggagtttaagaccagcctgagcaacaaggtgaaatcccatctctacaaaaaaataccaaaaaaaaaaaagaaacaagaaaagttgctaaataaaaactatgtttatcaagtaaatgaccatctttttcactgctaaagttttaatcatttttttccaattactatgacgaaggcttgccaatttacttgggtactatacatgtaaaataatggctaacatttattgatcacttgctacatgtc

SEQ ID NO: 141021 - DNA, 546 bp, Homo sapiens
aagataaactttttctttttaaaaaagaggtatgggtataaaggactccatttactattataaagaaggaatggaatatcaacattcagagatagctttctggcagctgccaggcacctctggtgcctgacagctggcaaactcaatacaggattctttctgagatttgacattttgctttcctttagtgcttatacttcctactgggaaaacagaccatggagtagaaatatgatctctgaaattaagaggaaaattttgttagctaatattcttaattcaatggtaattatttaatagtacagtattagaaataaaggcaagtttataaccattagaattaaaaacatgattgtacatttttgttgctaatgtaaatatttgattttcttcatagctaatttatacttgaactaataggtaaagcattcatatgtgaacttccatgaaatctcaattaactagactcctgccatttccaagtttaaattttatttataatctgccccctttcgttttacagcacatgaaatgttagaaactctg

SEQ ID NO: 141022 - DNA, 2516 bp, Homo sapiens
  misc_feature (1636)..(1636): n is a, c, g, or t
  misc_feature (1654)..(1654): n is a, c, g, or t
  misc_feature (1667)..(1667): n is a, c, g, or t
  misc_feature (1673)..(1673): n is a, c, g, or t
  misc_feature (1675)..(1675): n is a, c, g, or t
accatgccgactgtcagcgtgaagcgtgatctgctcttccaagccctgggccgcacctacactgacgaagaatttgatgaactatgttttgaatttggtctggagcttgatgaaattgtatgtattggatatttgtctatttttcaaagattgtgtgcataagcttatttttcagggttatactgtatttcatctttgttaccttatagttagactaaggtgataatgtttgtgggccatgatttctgtgttcagagggctaagctccatgtctgtctgttgccttgactaaaatctcaaaaggagttcatgccttattccatctacaatcaccttgttaccaggctcatgcctataataccagcactttgggaggctgaggtggatggattacctgaagttgggagtttgagactagcctgaccaacatggagaaaccttctctctactaaaaatacaaaattaattggatgtggtgagtagctgggattacaggaaggattccctatcttggacctgaggctgctttcttgaagaaaacttgactttatttcatttagtgggaagagcagcagcccagctattaagttctaatatgcaataggctgcaggctgtgaagttctgaagctaaggagctgagggcttaacaagtttctagaagctgccatcaacatgccaagtcagtaaaactgatagttgatcagatttcaaggtctggggaggatatccactgtgtactgggtcttgagctctagagagctaggccttgctaaaataaaagaattaccttacctaccatctttgttcaagtctcaatggaatttgttacggccctggctgacctccgagcagaggctagctgtcccatctgtctggactacttgaaagacccagtgaccatcagctgtgggcataacttctgtctctcctgcatcattatgtcctggaaggatctacatgatagtttcccctgccccttttgccacttttgctgtccagaaaggaaatttataagcaatccccagctgggtagtttgactgaaattgctaagcaactccagataagaagcaagaagaggaagaggcaggaagagaagcatgtgtgtaagaagcataatcaggttttgactttcttctgtcagaaagacctagagcttttatgtccaaggtgcagtttgtccactgatcaccagcatcactgtgtttggcccataaagaaggctgcctcctatcataggaaaaaactggaggaatacaatgcaccgtggaaggagagagtggaactaattgaaaaagtcataactatgcaaaccaggaaatcactggaactgaagaaaaaggtaaaacatagggcagaagaagtcaagtctgaatttgagcaacttaggttatttctccaaaatgagcaagagactgttcttaggcaattacaagatgaagagatggatattttagcacaactaaatgaaagcctaacaaaattttcagattatacctcctcattaaaatatctactaaaggagatagagagcatatatgtgaagtcagaactggaattactggcaaatgttaaggatatctatcacagatataagaatttaaaattccctgagctgtttttattcaaattaaaanaatatggttaccatctgnctccacaatattntggccnanacaaaattatcaagcgatttcaagtagatgtaattctagatcctgaaacagcacatcgtaaacttatagtctcagaagatagaaaaactgtgcgctatggaaatacaacacaaaatgtacctcataacccaagaagattttatctcctcccagctgttctgggttctaagggatatagttgtggcaggcagtactgggaagtagaagtgaaagacaagcctgaatggattcttggtgtctgtaatgactgtcttcccagaaggaggaagagtcaaccaattttagtacaggatggattatggggaatttggcgatctagtcagaataattatattgtattgggccacaaggaaattattctgctgccacaagtaattcctagtaagattggcatttttttagactatgaaatgaatgaagtttccttttataatttgaatgatagatctcttctctatacttttaatgataattttacaggagcactttggccttatttttatactggaactgactcaaaacctcttaaaatttctacagtaacagattctgaattttctttcacctagtagacataactgagccagtgaatctagttttggctattctgtattttgtccagtttttcccataagaaagcaatatttttttatctcagtttcagcaacttccaaaaaatgtgattatgggacctactttatattaaattatggggtcagtgacaaggtactttagaaattctacagtaaaatacttgaaacatatattactgaagaaatgtattatgtaagaaaatctattacttttgtaattgccaataaaagcccagtaatttttttct

SEQ ID NO: 141023 - DNA, 2279 bp, Homo sapiens
  misc_feature (1314)..(1314): n is a, c, g, or t
  misc_feature (1332)..(1332): n is a, c, g, or t
  misc_feature (1345)..(1345): n is a, c, g, or t
  misc_feature (1351)..(1351): n is a, c, g, or t
  misc_feature (1353)..(1353): n is a, c, g, or t
aataagtaatgtatggcgtgaatctctgcaatatgagaatcttgtttttccaagaacttccaccccatgattttagcattcattgatgattcttgtgtgaacgtttaatacatttgtgattatggaattttaacgtggtgtcttttcttactcataggaaggattccctatcttggacctgaggctgctttcttgaagaaaacttgactttatttcatttagtgggaagagcagcagcccagctattaagttctaatatgcaataggctgcaggctgtgaagtgttcgtggcagtagactctgaagctaaggagctgagggcttaacaagtttctagaagctgccatcaacatgccaagtcagtaaaactgatagttgatcagatttcaaggtctggggaggatatccactgtgtactgggtcttgagctctagagagctaggccttgctaaaataaaagaattaccttacctaccatctttgttcaagtctcaatggaatttgttacggccctggctgacctccgagcagaggctagctgtcccatctgtctggactacttgaaagacccagtgaccatcagctgtgggcataacttctgtctctcctgcatcattatgtcctggaaggatctacatgatagtttcccctgccccttttgccacttttgctgtccagaaaggaaatttataagcaatccccagctgggtagtttgactgaaattgctaagcaactccagataagaagcaagaagaggaagaggcaggaagagaagcatgtgtgtaagaagcataatcaggttttgactttcttctgtcagaaagacctagagcttttatgtccaaggtgcagtttgtccactgatcaccagcatcactgtgtttggcccataaagaaggctgcctcctatcataggaaaaaactggaggaatacaatgcaccgtggaaggagagagtggaactaattgaaaaagtcataactatgcaaaccaggaaatcactggaactgaagaaaaaggtaaaacatagggcagaagaagtcaagtctgaatttgagcaacttaggttatttctccaaaatgagcaagagactgttcttaggcaattacaagatgaagagatggatattttagcacaactaaatgaaagcctaacaaaattttcagattatacctcctcattaaaatatctactaaaggagatagagagcatatatgtgaagtcagaactggaattactggcaaatgttaaggatatctatcacagatataagaatttaaaattccctgagctgtttttattcaaattaaaanaatatggttaccatctgnctccacaatattntggccnanacaaaattatcaagcgatttcaagtagatgtaattctagatcctgaaacagcacatcgtaaacttatagtctcagaagatagaaaaactgtgcgctatggaaatacaacacaaaatgtacctcataacccaagaagattttatctcctcccagctgttctgggttctaagggatatagttgtggcaggcagtactgggaagtagaagtgaaagacaagcctgaatggattcttggtgtctgtaatgactgtcttcccagaaggaggaagagtcaaccaattttagtacaggatggattatggggaatttggcgatctagtcagaataattatattgtattgggccacaaggaaattattctgctgccacaagtaattcctagtaagattggcatttttttagactatgaaatgaatgaagtttccttttataatttgaatgatagatctcttctctatacttttaatgataattttacaggagcactttggccttatttttatactggaactgactcaaaacctcttaaaatttctacagtaacagattctgaatgaattattagaagactcagtttctttcacctagtagacataactgagccagtgaatctagttttggctattctgtattttgtccagtttttcccataagaaagcaatatttttttatctcagtttcagcaacttccaaaaaatgtgattatgggacctactttatattaaattatggggtcagtgacaaggtactttagaaattctacagtaaaatacttgaaacatatattactgaagaaatgtattatgtaagaaaatctattacttttgtaattgccaataaaagcccagtaatttttttctgtatttcttatatacttttcctttaagaaagattaagtctttattaaaggcattcatcattactaa

SEQ ID NO: 141024 - DNA, 2213 bp, Homo sapiens
  misc_feature (1314)..(1314): n is a, c, g, or t
  misc_feature (1332)..(1332): n is a, c, g, or t
  misc_feature (1345)..(1345): n is a, c, g, or t
  misc_feature (1351)..(1351): n is a, c, g, or t
  misc_feature (1353)..(1353): n is a, c, g, or t
aataagtaatgtatggcgtgaatctctgcaatatgagaatcttgtttttccaagaacttccaccccatgattttagcattcattgatgattcttgtgtgaacgtttaatacatttgtgattatggaattttaacgtggtgtcttttcttactcataggaaggattccctatcttggacctgaggctgctttcttgaagaaaacttgactttatttcatttagtgggaagagcagcagcccagctattaagttctaatatgcaataggctgcaggctgtgaagtgttcgtggcagtagactctgaagctaaggagctgagggcttaacaagtttctagaagctgccatcaacatgccaagtcagtaaaactgatagttgatcagatttcaaggtctggggaggatatccactgtgtactgggtcttgagctctagagagctaggccttgctaaaataaaagaattaccttacctaccatctttgttcaagtctcaatggaatttgttacggccctggctgacctccgagcagaggctagctgtcccatctgtctggactacttgaaagacccagtgaccatcagctgtgggcataacttctgtctctcctgcatcattatgtcctggaaggatctacatgatagtttcccctgccccttttgccacttttgctgtccagaaaggaaatttataagcaatccccagctgggtagtttgactgaaattgctaagcaactccagataagaagcaagaagaggaagaggcaggaagagaagcatgtgtgtaagaagcataatcaggttttgactttcttctgtcagaaagacctagagcttttatgtccaaggtgcagtttgtccactgatcaccagcatcactgtgtttggcccataaagaaggctgcctcctatcataggaaaaaactggaggaatacaatgcaccgtggaaggagagagtggaactaattgaaaaagtcataactatgcaaaccaggaaatcactggaactgaagaaaaaggtaaaacatagggcagaagaagtcaagtctgaatttgagcaacttaggttatttctccaaaatgagcaagagactgttcttaggcaattacaagatgaagagatggatattttagcacaactaaatgaaagcctaacaaaattttcagattatacctcctcattaaaatatctactaaaggagatagagagcatatatgtgaagtcagaactggaattactggcaaatgttaaggatatctatcacagatataagaatttaaaattccctgagctgtttttattcaaattaaaanaatatggttaccatctgnctccacaatattntggccnanacaaaattatcaagcgatttcaagtagatgtaattctagatcctgaaacagcacatcgtaaacttatagtctcagaagatagaaaaactgtgcgctatggaaatacaacacaaaatgtacctcataacccaagaagattttatctcctcccagctgttctgggttctaagggatatagttgtggcaggcagtactgggaagtagaagtgaaagacaagcctgaatggattcttggtgtctgtaatgactgtcttcccagaaggaggaagagtcaaccaattttagtacaggatggattatggggaatttggcgatctagtcagaataattatattgtattgggccacaaggaaattattctgctgccacaagtaattcctagtaagattggcatttttttagactatgaaatgaatgaagtttccttttataatttgaatgatagatctcttctctatacttttaatgataattttacaggagcactttggccttatttttatactggaactgactcaaaacctcttaaaatttctacagtaacagattctgaatgaattattagaagactcagtttctttcacctagtagacataactgagccagtgaatctagttttggctattctgtattttgtccagtttttcccataagaaagcaatatttttttatctcagtttcagcaacttccaaaaaatgtgattatgggacctactttatattaaattatggggtcagtgacaaggtactttagaaattctacagtaaaatacttgaaacatatattactgaagaaatgtattatgtaagaaaatctattacttttgtaattgccaataaaagcccagtaatttttttct

SEQ ID NO: 141025 - DNA, 415 bp, Homo sapiens
aaaaggcaccttccacaacacttaagttaatacttccacaatggcggggacatgccaagattattaactgccatcactctctttttaaatatctctaccccttgtttctcacatcaaattctatgcatatttcaagaaaaagcttatattcatgtcctctagaaatctttggcaataatgaattccgcgcgtgcactgtagctcttaagggacgtgccaactcaattacatcatcccagacaagtatatgctcttgatgaactcctcagatatactgtcataaaaatggcttttctggtctgggtgtggtggctcacacctgtaatcccagcacttttggaggccaaggcgggaggatcatgaggtcaggagttcaagaccagcctggccaacatggtgaaaccccgtctctaga

SEQ ID NO: 141026 - DNA, 395 bp, Homo sapiens
ctcttccccttggtgagctctatgatttaggaatctgtcttatctgccccaaacctggctcagtgcctggttcccactgtacactcagcaaattgtgatgatggagtgaggggctaaaggctgggcctcagggcatagcactgagggagggagactgtggcacagccgcttattgttgcacaggttgtgcactgcatacttctatgatacaaatggccttctctaaagttctgcatcaccttcacataggcagtagccctcggagacacagctcagtggctagagtcatggaaatcctggcctggccctgcagtcaagtgacagtgtgaggaaatgaagtgttttgaggccaagggtgtagtagattcctcacttcctcagctcctcccgtcctc

SEQ ID NO: 141027 - DNA, 448 bp, Homo sapiens
tactcatgaagttggtttactgaaaggaggagaaaacgcgaatggaaacagtggtgttatggctatgttagtgaaaccacgagagccaagatttcaaagacaaatgcacttagttacaactagatctgtactgtttgttgtattgggtagtttttctggcctcaattgtccaatcactatactcatgcaagccaagatctataaattgataatctgaaccatttgtcccaaggagacttgtgtcattgggtagtcacaagcctcctctcatgagttacacccttcatgaaatcgtagtttggaagcagcccaggaagtcatccactgtatttcctctggatagaataattccctccatgatttactcctcaaatgggattcccaacctgtaatgaagggagctcactagtcttctaggcacctgctacattttatgttaaactctggt

SEQ ID NO: 141028 - DNA, 562 bp, Homo sapiens
ctgtttctgactcttgcggtttcccgcatggctcccagcgagacgatcccgtccgggatcccatccggctcccatccggaggcgatcccgtgaaaggatcgcgtccaaaataaaagggcccgagacctatgcttatgtaattcctaatccgtgatcttttctaggggctgaactcccctccagcacagcctgttaccaggtgcttttcacaaacgccactggcggctgagttttcccccccacttccatttctactttacaagttgataacgtgggacgattacctaccaaatttcacatcatggcccagacatcgggtggattttgaggctctgtgatcgatttatacctatgctaaagttatcggtctgagaaagtagattagtggttgcctagggctaaggagtgggtttgggggtggggaatagaaaatgactgcttatgggtataggctttctcgtagcagcataaacatagtttaaaattagatcgtgttggcggttgcaccaccctatgaactgtatggtttgtgaattatatcttcataaagctgtttaaaaag

SEQ ID NO: 141029 - DNA, 168 bp, Homo sapiens
cttaaatgtaaattccagcatataaaagaagagcactgcactagaagtccagataactgccttctagtacttgggtttgccagcatcctgcacacaatgcctggcaccaggaaggtgctcagtaagatgtgcatgaatgtgtacataaaatttatatgtgagagaatg

SEQ ID NO: 141030 - DNA, 338 bp, Homo sapiens
aggttctatccaaaaaattagagtgaggaaaagttaaatgttaaaatacactgccttctatttaattacagagtaagcttcatcagctgtcttcaagaaaaaattagtgatagattccatttctctaaagtaggtacatttctatggtcaagtctctttattcacgataacactgataaaagagaatgtctattgagccttttctcatcattaaagacataagcaaatttggagactatttctcagccaatatcatgtgattgataataagttgtaaaagtgttcctatttctccacatcctctccagcagcatgtaccctaaaacttaaagtataat

SEQ ID NO: 141031 - DNA, 327 bp, Homo sapiens
ttccctgccttcctccctctgctctattatccagatggatttttggcggtggctgtttttgggaacatataggacctgatctgcctgggtatacttctgcatttgtaggcaaatgcccagtcattgcaaactgacatacttactgggtggaggcagagaacctaaacagctaaactgggttgggtaagggtcagctgaaaagcagtctcagtgctgtggagacagtaggaatgatggggactctagcgaactctgcagcacctgctccatctaaagcggggagctgcccacagatttagctcattactacagggcaggaaagagggc

SEQ ID NO: 141032 - DNA, 776 bp, Homo sapiens
ctaaggaagggtgacttgcgagtggcgcattcggaggcacggggtgggcagctgttgagcaagggaccagggctgggacaggctgccaggacccccacaaccccaggggaggaaaggggactcagccatcatcatgcctgactcccaggctcccggatgaggagcctgctagccagggcttgaagccctccagtgacagggggtgcattacttcctaagaagccatttccttggttcagaaacatttatccaaagactgagccgaaatctaccacctcacttaatgtttttggcacctggttatgacccagacctgcacagaataatttaactcttctgaaatagacttccagatatttggaagtggccaagtcaggtttaagagctcaggtctcccatttgacaagatttccatctcctcgctgtctgaacaggtttcagctgtggttatccaatccctcattcttgatgacacacaccaggctgaatggtctttagagttcccctcaagccgccaagcgctctgagacaggtttactagctttggtgagatgctgacactcctcacatgcacgtgcccctcccaactactcaagtgagttcgtggcaaatctctcatctgatctgcataaacggattatatcttaggcggtgccattgtctgcattttacaaataaggaaactgagcctcagggaggtgaagtcatttgcccaaaatcacagagccaggaaacgagagagccaagatccagaccccgcaagatccagaccccac

SEQ ID NO: 141033 - DNA, 527 bp, Homo sapiens
ccctcctttttactttcactctctttagaaaatgtatctcattgactcatagaaactgaattaattgtcctttaaaagtctcaatactattataaataacaaaaattattaaattaaaaaaaaggactaaccctggtgtttgaggcttaactttaaacttcagcaagtcagattatcactttggtattggaatgttctttgaagtatctggcatacagtccagtccagtgaaccataaaaacttcctacttggcacacatattgcacgttgtttaataagaatgcttattgcacattaataagaaggcttgtgcttagtgttttttgtttgtttgtttggagatatagctttgctcttgtcacccaggctagagtgcaatggtgcgatcacagctcactgcaacctctgcctcctgggttcaagcaattctcctgccccagcctcccaagtagctgggattacaggcacacaccaccatgtccagctaatttttgtatttttagtagagacggggtttcaccatgtt

SEQ ID NO: 141034 - DNA, 173 bp, Homo sapiens
tctatgaacaattttatgacatcaaattaaataacttgaaaaatacaaatacattcaacacaaattaccaaaactaactcaggaagaaatgcaataaatagaaaatctaacagaaatttaacaagataccgaatcaggaatcttgcctcaaagaaaagcccaagcccagcttg

SEQ ID NO: 141035 - DNA, 685 bp, Homo sapiens
agctccatgagtgcagagaacacttctattgtgttctctgttgcatctccagctcctggttcagggcttatcacatagtaggtcccattcatgtctgtttaatggatggatatgaacatcccactgagcctcagcgaatgtcaagtgggagccataatctcatccttatggtgctgtgaaatcattaaatgatttttggcacacagtaggtgtttgacgaatgagatacctattctcccattcctttcaattaaggaaaagttagaagcaggcatataggtagcttaaaggacagcatgttcatggataggaacccccaatattgtctagatgtcagtttttaccaacttgatttatagatttaatgcaaccccaatcaaaattccagcaagttattttgtggatataagcaaactgattatgaagtttatatggagagcaaaagacccagaataaccaacacaatattgagggagaagagcaaagttggcagactgacactacccaactttaagacttactataaagctacagtaattaatatggtattggtgaaacaataaacagagtaatggaacagaatccagaatccagagataaatcgacataaatacagtcaagttgtttttgacaaaagggcaaagtcaatacaatggagaaaaattcttttcagcaaatggtgctg

SEQ ID NO: 141036 - DNA, 402 bp, Homo sapiens
gagggcacacaggcaggcaagcatgagcagcgagaccagccgcatgtgaatccccaacaagcaaggaagagaaaaacaagctctgaccaaagtcagagccagcatgtcccgcctggcaggaccccttcgttcttcctgaggcccttgctcagatgtggttctgggcgctcctgctccaagggggcgatcagggcaaaactcatgggtttgaccagcccaaccctatcccagccaggtcccctctgtggggctgcgacatggggcccagaagacaggcaaggatgccaagtcctgtaagtttcacagggctgggcatgtgtaagaggctgggtgtccacatctggacatcagaatgggcataagctccggactgagaactcccagggcaaggaggacacagat

SEQ ID NO: 141037 - DNA, 340 bp, Homo sapiens
cttttttccaaataaggctggccacatccacaggttctgggatgtttacatattttttgtggtgggagccaccattcaactcactacaaaggccttggaaatacatcctaagagcttaacttctaggcgtcatagcatgttaagtccacgtaccaggtgaacacatcacctcatttgtctgtctgaccaaggttcacgggaatgactcattcgaggcatttcaggacaactaaagggatagaggacctggccgggtgagtggcagaggtggggaacctgttgtagtacacccctgctgtggggggtggagggagagatggccaggctggcatcatcatgt

SEQ ID NO: 141038 - DNA, 171 bp, Homo sapiens
aaacagtgctaagaaaagttactcaaagctggtaaaatagcacacttccctcaagtatcggttttattaaaacatttcagggaacaaaaacattaaaaaaaaatttttataatcctaagtttttgtccatacctgtgcaaaagatactaaaaatatctcttgaagaaaggt

SEQ ID NO: 141039 - DNA, 409 bp, Homo sapiens
gaacaaaccaaacgtacataagcagaaggaaagaaataataaagatcagagcagaaatatgtgaaatagacactagaaaaaaatacaaaagattctcaaaatgattgattggtttttgaaaagataaacaaaattgaaaacctttagctaaactaaagtgggcacaaaatcagaaatggaaaaggaaacattataattgataccacagaaatacaaaaaaatatagtggactactatgaacaattatgcactaaaaaattaaataacccagaagaaataaatttctagacacatataacctactaagactaaatcatgaagaagtaggtctcaatagagatttcccataacaagcaaggaaattaaatcagtgataaaatgtctaccttcaaagaaaagcccaggacct

SEQ ID NO: 141040 - DNA, 190 bp, Homo sapiens
taacaggaacaggtgccaggactagattttctagattttctgaaagttgaggagaagaacctttccactccacgcatctgtctaggtaggatgagtgaccatggcttgtggacatgggaaaacaaggcaacttctagagggttctgacaaggtcctagctcattcttgtgcaaaggggactcaggagtct

SEQ ID NO: 141041 - DNA, 181 bp, Homo sapiens
acaacgaaccaccccacattcaccacctccgccactgccaactaacacacactcagtaatcgctttcttctcaccatacatttactcatcaaatctcatcacagtctgagaggtaggtatgctgatcaatgcaatgtgaggaaaaagaaactggagcacaaagaaaggataacttgcctga

SEQ ID NO: 141042 - DNA, 167 bp, Homo sapiens
gaaccattcttcgtcctgctagatcctcactcttaccttgaaacgagaggaaataaaacaagaggcttttatgaaagaaccaactctgcaatgaccacggctgagctgggaaatggggcttcacctgctgccaggttgctcaggtcgctttttctctcttaattatg

SEQ ID NO: 141043 - DNA, 338 bp, Homo sapiens
cagtgagccacgatcgtgccattgcactctggcctgggggacaagagcgagactctgtctcaaaaaaaaaaatattttcaaaaattcccaaaccacttctgaaataagtactttaaaatatgagaataagggaaagcaagtactaggggtgggttcttagaataaaacacaaccataactagggagcttgacaaaattcagtaactgatatgaatcttggaagattctgatagtgaagagaatgaaccacacaagtcatagtaaatctgtaagttggatgtctgttaaaaatgtaaagaaaaggccgggcacagtggctcacgcctgtattcccagca

SEQ ID NO: 141044 - DNA, 119 bp, Homo sapiens
gtctggccgcagggtccctgcagcatggagccagtttacagccacgtctgcgcctgggctctcggcagtgtctgggtgggcatggagctctgggcgtctggccgagaaaggtggggcct

SEQ ID NO: 141045 - DNA, 304 bp, Homo sapiens
gctacatgggaggctgaggcaggaggatcacttgagtgcaggaggcagaggttgcagtgagctgagattgcgtcactgcactccagacttcactttctgacacctctcatcctttcatacaaagagaagaaattattcatttagccttcgtgttgtcttgtatgagctcttgtattgtcaaggacaagagaaatgtgcagttgcttttaaggttagatattccttctcattgctgggacttgagattttttaaatggattctcattcccaaaaggtaatgttaactggagagttcagttccaag

SEQ ID NO: 141046 - DNA, 455 bp, Homo sapiens
agtgcctgtagacgtagagcgggatgtggggggagaggtcaggagcctgtggggagctcactagtcaccatgaaggctctggcttttatctggagtgcaacaggagcagcacagaaaggccatgagtagagaagtgactggatctgacttgtgttctcagcagggacactctggctgctacaggagagcagagcatagcgggcaaagctcagcagccaggagacctggcttaggtttgttacaggaaccaggcgagagccggccctgactagggtagcagcagtggatgtggtgacagcagtgtgagctctgaacttgttttggaggatcggctgctggacagatgctgggctggagaaagaagaggatgactgtgtgggtgtggtcacagcaaactgaagcctggggctgcctgttcactgagaaagggaagattgtggagtctacggctaggg

SEQ ID NO: 141047 - DNA, 551 bp, Homo sapiens
ctcgttcctctgccatatgtggactaaaaaaggagagtctcctttccctttgcttaggcctgattcatgcaactctgaacactcttctggctcaaatactcccttggtcaaaagactgagccaaagctcatgcccaagaaaacccaatgggaacagactctgctcccgacctgggctgttccactctcactcaagagcgtgccaaagggaccgtcacaaaaaagcgggtccagatcagctcaagagaagtggccctggcttaaatatggatgactcaatcaccagaaatagatcactcctgagagtctaccaattaggttaccttccacatggtttctccaaaccctgagtataatcctttgccaagtaacccatacactggatgcagagaactaaggcccaagagatcctgctcccagctaaggaagaatcaccttcaaaatgacttccccccttaacactaggcgcttcgaacaggattcatgcagggaaaagtaccccttctgggggaagactgcttggctagcctgcgggaagcataacaggctgac

SEQ ID NO: 141048 - DNA, 250 bp, Homo sapiens
tcttcttgaaagaagaaagaagtatacccgactctggctaagaaacctctgaaacaactgaaaagtatacttgctagaaatctctagacccatgtttcagtcctggggcttccaataagttattatacgacagacaaaattccttaacttgtgtaggcttcatgttcttcttctgtaaataggccataataagctgcatgatgtgaaaaataaaaccctttctactcaaataattacaaatataaagagg

SEQ ID NO: 141049 - DNA, 289 bp, Homo sapiens
catttacaataataaaaaacttataaaatatccgggaataaactcaacaaaggaaacattcaaaatatataatgaaataaacaaaaaactacaaaaatattaaataactaaataaaattcaagtaaagaagacagacaccctttttcaggatgaaaagcctaaatgttatacaggtatcaatttacaaataatgcaattccaattaaaatcttaaaggattttcatggaacttgtcaagctgactctaaaatttatctgaatccccggaaccaagaacagtgcccagca

SEQ ID NO: 141050 - DNA, 108 bp, Homo sapiens
tcaactcaaaaatttcctgactcagccgggcatggtggctcacacctgtaatcccaacacttctgagaggtcgaggagggcggacctcttgagctcaggaattcaaga

SEQ ID NO: 141051 - DNA, 773 bp, Homo sapiens
ggcatttttaaaaagtgaagatagtctctgtatgtttagcttgtaaaaatttgttttaaatacctatttatcaaggatgatgatcttgaataattttctgttaaatatacttatctgtcagaaacaataccaataaaatgtcaatagagacattcgtatttatatacacacttatatacgtacacacataaaactaacaaaaatagaaatttcaatagaaatttggtattttcttcatgatttcattattaatcatctcttcttcagaaaatatagttcagaagattatttcatagtttaggtaataactggttcaaaagatgaaatgttaatgtactgctagtaattatctgtcggtgagatttggggactttttgatacatttctaaaatgttttcattttgaaagataaaatggtaatgataaatgcaatagtaatcacagaagatgggattattcaacaaacagtgctttttgaaaaacttacaattttgataaataggattaagattaatagattaaggtaaaagttatatatcaagaaggaattctgaaagcagagacaaggagttcaacctggttgaattaaagatgtattttgagaacatttgataataaagtatgaatattagaaagtcataatatataaagtttatttggtatttacaaagtgccagaaactactatcactgtacagttaccttgctatacaaatatttctcaattttcacatgagtcctgtgtgatatttttattatctcattttaccataa

SEQ ID NO: 141052 - DNA, 390 bp, Homo sapiens
aggagaggaagggcagaggaaggagagaaaagagggctagcagcaaggaatttccagagtgcttcctgcctcaagcaaaacaggaactgggaggggaggcatggaagagggggctggaacaatacgtgaggaagagagaggggcttcctttctcggtaggggaagaccccggcccactgcgagcgggcgctgacagctgcctcccccttgcatgcatgccttctccctgagctgcgttgctagggggtcaggcggagggacggagcacagcccacaaaggccaatggatatttattccttaattactgaatgcttttaagaagctggccactgtaaatcccgcatgcggggaggaggaggcagtggacaaggatttatgctagtggggca

SEQ ID NO: 141053 - DNA, 324 bp, Homo sapiens
actctttcattcactctctcatttactcattcattcactcactcattcattcactcactcatttactcatgcattcagtcactcatccattcatttatatactccttcattcactcactcattcattcactcattcactgacttgctaactcatttactcacaaattcaatcattcattcacttactcaattactcacatattcaaccattcattcactcactcatttacttatccatttggtcacttacttattcattcactcactcaacacatttcctcagtagcccttatgtgcaaagccctgtggcctacaggagctctg

SEQ ID NO: 141054 - DNA, 327 bp, Homo sapiens
aaaataccgtaagctggatggcttgtaaacaaaaatttatttctcatagttcctgaggatgcaaaggctgcatctttagatcaagatgtaagtagaggccaagtgcagttggctcacgtctttaatcccagctctttgggaggctgggtcggacggatcacctgaggtcaggagttcgagaccagcctggccagcatggtgaaacccggtctcttctaaaaatacaaaaattagccgggtgtttagtgcacatctgtaatcccagctacttgggaggctgaggcacgagaatcgcttgaacccgggaggcagaggttgtagtgagct

SEQ ID NO: 141055 - DNA, 197 bp, Homo sapiens
tgctgttgtctcatccttcactgccaaactataaaataaggatacatgaggtagccagaataaattgctggaggacatgattctgtcattgggtaacagtcaataacattaattggtgatgttgatcagcttcctgttgacaggcatggagaaaggctttctgcagaccttccctgctcttactgggaggcacaatg

SEQ ID NO: 141056 - DNA, 342 bp, Homo sapiens
tcaggacagggacttcaagtggagtaatcagagaataaagagattgggtcacaggtgatgatctataccaagacaggcagaaacgcactggaatgtagtcaaaagggctcaggtcccacaggactatcagaaaaggaagttgcaccagggtgtggggcaacaagtgagactgcccaggaggaggaggagatcctgggggcagggccaatgtattacattccttgccaagtgtgttcttttaacggggcagcctctctcagagcaatccgtacatatcagtgataacgatgataatttattgagcacttactctgttccagccatgactgtaagcactttact

SEQ ID NO: 141057 - DNA, 510 bp, Homo sapiens
cttcactatcttctttctcttatagtttcaattcctagcagtagatgtactcataaaggaatcactgagaatagagttttaaaatgcattacaattttttcaaatcctgagatttagttcttttctaattgtcacatattgtgaaatgagagaaagaagctttgagcaaatgaaataagggaagggctaattttgattaaggaaaattacatgattccttaaatctgtaatatgaggcctccaggggatgtcatcttgtagaattttatagcaagcactgggtaattttacagcaacctgaacatattgaaagctgaaaataatgttgagttgttcactagggtgctgaaaagatgaataagaagcaaaaaattaaattaaacttatgtaatttactaggatgacatagtttttatatacatccaatggattagttttttttttacaaaggtttatctactttgtgtttggaaaatcatgggaagaaccttttcagtttctggctgaaaa

SEQ ID NO: 141058 - DNA, 360 bp, Homo sapiens
cccactgaatcaagatgaaaaggaatcttagaataattcagacatccttattacattttatatctgtactaagtttaatcttaattctatttaatcttcctaagaatcacatatatgctttcacttatttatgtcttctttgaaggacataagacttctccttcaaaagagttttaagattttttttatagatgctcacactatttctaaatattttgccctttcattcctttataaatagaactgtttcttacattattatcttttctagtcactggtaagaaagctactgatggccggtcatggtggctcatgcctgtaatcccagcacttggggaggccgaggtgggaggagaggaa

SEQ ID NO: 141059 - DNA, 430 bp, Homo sapiens
agcctagtcatatcagagattctcatctaccccgtacctgtgtacaggaaaaactgggaagtgatcctgttggacattaaattaaggttgggctggtccacagtaataaaggcttaactgtgaagacgctgtctctagtcaaggaccacaactggaaaataaagcaggtcagcaaaaaggggaagacaaaaattacaatcaggctgggtacagtggctcatgcctataatccctttggattactttgggaggccaagagttcgagaccagcctgaagtacaaaaatgagccaggtgttgtgccgcacaactgtagtcccagctactcaggaggctgaggcacaagaattgcttgaacccaggaggtggaggttgaagtgagtggagatcatgtcactgtactccaccctgggcaacggagtgaggctctg

SEQ ID NO: 141060 - DNA, 362 bp, Homo sapiens
atgcctctgtaaaataagattgctgccctactcctgtagtttctgcacttctctttttagtactggaatgagtattctcagattaaatcttatttaaagcctagaggggagggggagaaatcacaccagtaggtggatggcatcattaaaatggaggtttaacattcttcactataaagttttaacatacattttccagaaataaaatagtccaactagtaaatgaaaaattctatgtatttcttagcaacaaaatacatttatctaattttctagcagtagctgcaaatgtttatttatcttttttttttgagaccgggttatgagactggctaatttttgtatttttggtagagatgagg

SEQ ID NO: 141061 - DNA, 473 bp, Homo sapiens
cttttttgcacaaataacttctctgtcaccttcattaaccatgttattgtaccttctaagaactgcttaaaactcacttccatgaagccatcccagtttactaccacctttctctagttactttatttcagaaactttcaacatcatattaatatttctgtgtagtgcaaaaaaaaaaagcctgtttatattaccctataaactatacattaaaacattcagagattatgaccttttctttcctaactaactctccacagcaaccagattagtgctttgtatttagggtatttttacagatactcttctatgtgattatttctaaaataactttaattttatatatctgtcatagattcctcaaggtgtacatcttaaaggtaaagcaagacaaaaaatcctaaaacaacctcttccagacaattctcaagaagttgctactgaggaccataactatagtttaaagacacctt

SEQ ID NO: 141062 - DNA, 623 bp, Homo sapiens
taagtgggttgctaaacattgcgtacacgtacacacacacacacacacacaccccatgttcttacaagtgagagctaaacattgcatacacacacatacacacacacacacacacacacacaccccatgttcttattctaagtggaggagaatcgcttgaacccaggaggcataggttgcagtgagccaaggtcgcgccactgtactccagcctggacgacggagtgagactatgtctcaaaaaaaaaaaaaaaaaaagaaaaagaaaaaaatatatatatatacacacacacacccatacataaaaaaacttaaacattatagaaaaaacattgcaagatataaaacaagccataaaaagaaattcatccttcaataaagaaaaatatctaaacgttgaaaaacttaagtattatggaaaacattgcaaaataaagcttttaggaatccaattctgttatttattttagtactgatgagactttgggtaaggaggcaacatcgtatcctggaaacaaaatgggtttgggagccagatgaacatagacccggcttcatcacttctcagatgtgttatctaaggccagcacttcctaaacattttgatctcaggactcttcact

SEQ ID NO: 141063 - DNA, 620 bp, Homo sapiens
ctctggcgagaattgatctaaatgaagccctcactcagcccgtctatgaccagatcgaccctgtttttggaagcatttttaggacggggaagcccactggttcagctctgatgcctcacatagatgcttttaagcagtccctaggagaatcgcttgaacccaggaggcataggttgcagtgagccaaggtcgcgccactgtactccagcctggacgacggagtgagactatgtctcaaaaaaaaaaaaaaaaaaagaaaaagaaaaaaatatatatatatacacacacacacccatacataaaaaaacttaaacattatagaaaaaacattgcaagatataaaacaagccataaaaagaaattcatccttcaataaagaaaaatatctaaacgttgaaaaacttaagtattatggaaaacattgcaaaataaagcttttaggaatccaattctgttatttattttagtactgatgagactttgggtaaggaggcaacatcgtatcctggaaacaaaatgggtttgggagccagatgaacatagacccggcttcatcacttctcagatgtgttatctaaggccagcacttcctaaacattttgatctcaggactcttcact

SEQ ID NO: 141064 - DNA, 319 bp, Homo sapiens
acatatgcagacagaacataaaggtagacattatttttagctatagacctttgtttaaatcccaatggtagggaggaggaagatctattaagaacccaaaagggaccataagatttgtctacattatttcaagtagatgcagataatttaaaacctatgaatatgtaatgcataacttaaaaggtttcaaatgtaagacgtaaatacattgtaataggcctatgcctcagaagacagaggaaaatattacaaggcctttagtgcatgttgataactctgcttctattaccgttagatcataactgcaaaaacccataca

SEQ ID NO: 141065 - DNA, 803 bp, Homo sapiens
  misc_feature (584)..(584): n is a, c, g, or t
  misc_feature (624)..(624): n is a, c, g, or t
  misc_feature (627)..(627): n is a, c, g, or t
  misc_feature (633)..(633): n is a, c, g, or t
  misc_feature (635)..(635): n is a, c, g, or t
  misc_feature (639)..(639): n is a, c, g, or t
  misc_feature (641)..(641): n is a, c, g, or t
  misc_feature (644)..(644): n is a, c, g, or t
  misc_feature (648)..(650): n is a, c, g, or t
  misc_feature (652)..(652): n is a, c, g, or t
  misc_feature (655)..(655): n is a, c, g, or t
  misc_feature (665)..(667): n is a, c, g, or t
  misc_feature (674)..(674): n is a, c, g, or t
  misc_feature (683)..(683): n is a, c, g, or t
  misc_feature (694)..(694): n is a, c, g, or t
  misc_feature (697)..(697): n is a, c, g, or t
  misc_feature (699)..(701): n is a, c, g, or t
  misc_feature (704)..(704): n is a, c, g, or t
  misc_feature (716)..(716): n is a, c, g, or t
  misc_feature (720)..(720): n is a, c, g, or t
  misc_feature (737)..(737): n is a, c, g, or t
  misc_feature (752)..(752): n is a, c, g, or t
  misc_feature (755)..(756): n is a, c, g, or t
ggcgggaggggaaacgtgcgcggccgaaggggaagcggagccggcgccggctgcgcagaggagccgctctcgccgccgccacctcggctgggagcccacgaggctgccgcatcctgccctcggaacaatgggactcggcgcgcgaggtgcttgggccgcgctgctcctggggacgctgcaggtgctagcgctgctgggggccgcccatgaaagcgcagccatggcggcatctgcaaacatagagaattctgggcttccacacaactccagtgctaactcaacagagactctccaacatgtgccttctgaccatacaaatgaaacttccaacagtactgtgaaacaccaacttcagttgcctcagactccagtaatacaacggtcaccaccatgaaacctacagcggcatctaatacaacaacaccagggatggtctcaacaaatatgacttctaccaccttaaagtctacacccaaaacaacaagtgtttcacagaacacatctcagatatcaacatccacaatgaccgtaacccacaatagttcagtgacatctgctgcttcatcagtaacaatcacaacaantatgcattctgaagcaaagacaaggatcaaaaattgatantgngagctngnaggngngtntcgnnntnacngctgggagtnnnatctatnctttacatnggatgcacaangtntnnntcnagaagaggcatncggnatcgaaccatagatgancatgatgcaccattnagnnaatccatggaccacagatgccataccgactgacgctgcctactcctc

SEQ ID NO: 141066 - DNA, 806 bp, Homo sapiens
ccacttgcccaatattactcagcaaaataagtggcagtgctggggcctccacccagtaggcaaccctgcctcttaaacacacatcttcagagagggggtgggtgggtccgatttagagcctcccacaatacctctcaatgattcttgtttttaattagcagaatctctggccatccctataaagctgtgacctaggaatacaggcaaatgaggatcctggttgtcactgctaccattggctgagggcttccaatgagttaccaaaagggcccaaagaccactcagagcaaaagctcctagtgtcctccctccaggatcagaagacctcttcaaaaaggaagccaaaatgcatgagactatcactcacagggggtaggagaaaagcaggcaggaactgcacaagctttgaaattcattcttgaccttctaattctcatgcttaggattaccaggagtctacatccccatttttacaaatgaagaaaccaaagttcagaaagatacaggcatgcaagtctctgaacaagaaatacaagtggccaataaacctatgaaaattatgcctggggccaggtgtggttggcttacgcctataatcccagcagtttggcaggccgaggtgggcagatcgtctgaggtcaggaattcaagaccagcctggccaacatggtgaaaccccatctgtactaaaaatacaaaaaaagcatccagatgtggtagcatgcgccagtagtcccagatccccgggaggctgaggcagaagaattgcttgaacccagaggggaggttgcagtgagcttgaggga

SEQ ID NO: 141067 - DNA, 471 bp, Homo sapiens
gggttctgatacggtttggttctgcgtccccacccaatctcctgtcgaattgtaatctccagtgttggaggtgggaggtgattgtatcacgggggcgaatttctcatgaatggtttagtgccatcccccttggcactgtcctcgagatagcgagttctcatgagatctggttgtttaaaagcgtgtggcacctcccctcattctctctcttgctccagctcctgccacgtaggacgtggctgctccctcttaaccttctgctgtgttcataagtttcctgaggcatccccagaagtcaagcggatgccagcatcatgcttcctgcccagcctgtagatccaattgaacctttggttttattctttataaattacccagtctcgggtatttcgttatagcagtgcaagaatggcctcattcacattcataaggcccgagtcctgcatctcttagggagcctctccctgtcca

SEQ ID NO: 141068 - DNA, 333 bp, Homo sapiens
attaataaggatgctttgaatgttcttatacaagtctttgcatggacatgtgttttcatttctcttggctacctatctgagaatacaattgttcagtaatagagtagatatatgtttaactttattagaaacatggcatatgtattttacgtactccctctataagaaaaacacaaaaacaagacatgtaattgttgcacaatactgaagtggcccaagaattagggttccttaaaggaagccttcttccacctgtattgatcatccatggtattgatcatccatggctcctcaccaggcatcattctttgggtcagctaggcagaatgactt

SEQ ID NO: 141069 - DNA, 588 bp, Homo sapiens
caggcaccaaaaattaaaaaatacattaccatttacaattgcccaataaaatgaaatacttagatataaatctaataaacatttacaggacacatatgctgaaaacagcaatggcgatgcaaaaagtcatagatctaaataaatggagagatttattgtgttcatgattggaagactcagcacagtaaggatatcaattctccccaaatcaatatacatgtttaacacactccttatcaaacttttttagacagagacagggttattctagattgaaaggcaaaaaaactagaataacaaaccattttggaaaagaataaagtgggaagaatttttctacctgattttaagacttacatagctacagtaatcactactctgtggtattggcagagagatagaacattgaaacaaaatagagaaccccaaaatatacccacactagtatgcccaacagctttttgacaaagatgaaaaagcagttcaccagagggaggatagcctcaacaaatggtgctgaagcaattggacatccttaggttaaaaatgaagctctactcaattctcatcccttataccaaaaaaaaa

SEQ ID NO: 141070 - DNA, 157 bp, Homo sapiens
tcaagtgacatttatatccagccaaggatgcaaccttctgtgataggatatcaataacaagaatttaaaacacacacacaccctcatagagaagaggaagagcttgaatctatgatgcctattataaaattgaaagagcattctaggatttatggta

SEQ ID NO: 141071 - DNA, 177 bp, Homo sapiens
tagaaaggttgacatcttctctctaatcctttctatgctaaacagctgtctcaccatgagtttggagaaaaaattaccaccagtcatgttacactatggtgtcatgcaggagactaaaattcagtaagctttaagcacttaggatgcaaaaaagaacagatgcctgaaataactaca

SEQ ID NO: 141072 - DNA, 306 bp, Homo sapiens
gtattttgctatttatctcacacttaaagattatacaatccattttcctagggcaagcacaaatggtcagttttataaatcttgatggactaagtcaagtaaaaaagcccactagttaagagtccagatatcgagagacacaaatctgaggaacgatcaattaggacaccgtggtagcttgtctccaagatgtccatcatcagctctttccttccctgcatgtttgtgctgttctctagttgaacggtggcgtctattcactcccttaaaactggactggactgtgacttctctgaacaacagtga

SEQ ID NO: 141073 - DNA, 657 bp, Homo sapiens
ataccactgctccttacccctgtacacaccttcgaatctcagttttgatacaaataggttctcagttttgggtgtgaagaaaactggttgatatttttttttaatctactaaatgttggccagagctgaaattgcctgaaagggaacttgatttagcagaattccttcttttcagaaagaaggacttagactaaattatatgaacgggaggagcctgtttttatctgagatggttgattggaaaaagaatagataaactaaggtggagagttgatttgaaaaaaggaaaaaagatagtcctgtctagtggtcagtcctaacagtgtggttaaaggggagctaaatttcaactttcaggggtcagctgagacaaccacctagattttccaagttagttccaatttcaagtacaataatcctttgacaacatagaaaagaattatagttagcaaaattgcaattgtcacagtcaaggtcttgttggtaatagagggttggggaaaaagttaaaacagcattaaatgaatatatttttaacataacaaaagttcccagaagacatccacttcaaattcaagccatattcatcaatgttaaaaaccttactcttctccctgatagtgtgaggaaaaataaaataaacttaaaataaaaaac

SEQ ID NO: 141074 - DNA, 207 bp, Homo sapiens
tttaacctggtgtctgacaggttttatctgcagcttgtcctgctacagttttaagccattaagtttgggaataatttgttacacaacaaaagacaactaatacagacctactgggaggggaggagccacagtattttgcagttcttccaatcaggaggtgaagtctacagtctagctctccactctagaatttggatttggctgatg

SEQ ID NO: 141075 - DNA, 201 bp, Homo sapiens
tagatacggggtcttgctatgttacccaggttggtttcgagctcctggactcaagcaatccgcccacctcagcctcccaaagtgtgggattagaggcatgagccaccactcctggtcagtggtgttttagtgtcaaatcctctccaaaggctcccaaccccccagcctctaacttcacagcacatttcacagagcaagaaa

SEQ ID NO: 141076 - DNA, 592 bp, Homo sapiens
tataatatgatctatgtgaaaaaatgtgagcctgaaagggccggtctttcaagttggatcccaagtggctaactgggcctaaatttaaaatagagcctagcaaccatttgctgactagaggtcattcacatactcttagttcctgaaaactcacacctctgcttaactttaggtatcactaattgaagagaagcagtccaaggtttttatttttaccttaaataattgagaaaacttttatttgttgttttagttataagttttataatttacatcatgtttgctatagactttaggaagcactgaaaatagtttctttgaggaatgccatgattttatcataaatattcctgattcttccaacttggtaaccaattctatacattattttggactagtaaacttaatgacaaaaactatagtttatttttcttttccctcaaaaaaaaaatagtttactcttttttttttgagacggagtcttgctctgtctcccaggctggagtgcagtggcacaatctcagctcactgcaacctccgcctcccgggttccagcgattctcctgcctcagcctcctgagtagctggggtt

SEQ ID NO: 141077 - DNA, 790 bp, Homo sapiens
gcttggaggaggccaaggtgcaacttccttcggtcgtcccgaatccgggttcatccgacaccagccgcctccaccatgccgccgaagttcgaccccaacgagatcaaagtcgtatacctgaggtgcaccggaggtgaagtcggtgccacttctgccctggcccccaagatcggccccctgggtctgtctccaaaaaaagttggtgatgacattgccaaggcaacgggtgactggaagggcctgaggattacagtgaaactgaccattcagaacagacaggcccagattgaggtggtgccttctgcctctgccctgatcatcaaagccctcaaggaaccaccaagagacagaaagaaacagaaaaacattaaacacagtgggaatatcacttttgatgagattgtcaacattgctcgacagatgcggcaccgatccttagccagagaactctctggaaccattaaagagatcctggggactgcccagtcagtgggctgtaatgttgatggccgccatcctcatgacatcatcgatgacatcaacagtggtgctgtggaatgcccagccagttaagcacaaaggaaaacatttcaataaaggatcatttgacaactgggaaaaaaaaaaaaaaaaaaaaaaaaaaaaaaaaaacgcggggggtttttgggggggggggaaaagagggataaaaaagggagggtattggttttcgggcccttttttgtgaaaggggaatagggggggcccaagagaggggggatatagagaagccggggctgaaatgagagac

SEQ ID NO: 141078 - DNA, 555 bp, Homo sapiens
tgggtttaaagggaaggtaattaatttggtttacagtgtaaggtgatagacagtcagcaggcacttggagaatggtgatgtatgttcagaagtgagataatggaggtgataatcaaaaccctttgttttgatttgagcctttgtgtgggagaaaggatatggcgagaagaacagaagatcaggaagccaatactgtagaccctcattccctagcccctgaaacaaatggatttgacttctctgtcatgacacctggaacaaatgtggcattgcttacttacttcctttgccatgaactcagtgaaggcagggacgggtcttggcttgtgtgtgtgtgtgtgtgtgtgtgtgtgtaagagactgggtctcattctgttacccaggcatgagtgccatggcataatcatagctcactgcagcctcaaacgaacctcctccctcaggcctcctgagttgctgggactacaggcatgcaccaatggccctggctttggtaataaacttttaccagacatagccatgctcatctgttaatgtactgtctacgactgcttt

SEQ ID NO: 141079 - DNA, 320 bp, Homo sapiens
ttttccactgaggaaggcctagaaggagcagtatccttttagcatatcaagtactcagatcttgatttctaaatgccactctactgaaagaaacagggcttcttggaggaatggctgatctcaggactgggacaaggaaagaacaaatgaacataaatcatctgattgtgccaggaagtaatgaagtgctgaaagaataatgagaacatgtcaaaagtacacagaagccaacctggaaaagggcttactcctactggtcaaatctatttttatttatttatttttatttttattttttttgagcatcaaaagaaatgatg

SEQ ID NO: 141080 - DNA, 162 bp, Homo sapiens
tatcatgcttcagaatgtgagttttgagatgcctgcaataaaatatagggttaaatgcctgaatgagatagtatagtcataaagttaagaaaaaagttaattttaaggcaaagatatgaaaaacatcatgaacgtagcaatatggaatttaggaagatgata

SEQ ID NO: 141081 - DNA, 122 bp, Homo sapiens
acagttcattgtgaaaatctttttaggatgcactcgtatgaaaagcataatgcaaaatgaaaattcatctataaacaaacagggcaaacagcatctatttgcggttttctttgcacaggtag

SEQ ID NO: 141082 - DNA, 286 bp, Homo sapiens
gacctggggcaggtcctctaacaccaagcccacccaggccccatctaacagtatgccgcattctacatgacctcagagttctttcggaattccagctgaaaagctgaaaagcaatactatatagttgtggtttccagctggcccatgttagtatgtatagcttttcttcctcgccatgaaagcactatgggagaacgaagcccgatgctgggcatgctttgccaggtgggtgctgctgaatcacagacctcagcaactgtgttccgcctccacagaggccggagat

SEQ ID NO: 141083 - DNA, 348 bp, Homo sapiens
actcccaaaccgtacgtcccacacttgccctctccagtgccaaccagctgcctagagggcatctcttttttgactatgccacaagcacctcaaactccacatctcaaccttctctgcctaaaccagctcctcctcacaggggaggcatctgtaacccaccagttcctcgagcctgaaacccgcgatctagcctagatttctccttgtcccctgtctgcattccaaggcaccgaggctgctgactacgcctgctcattgcttctccctctccccactgccttagtcctcctgcggcccccaaccaccaccaaaagagctttttagccgctctccctgcctgaagtctca

SEQ ID NO: 141084 - DNA, 522 bp, Homo sapiens
gattgaattccagcattccaggaaaccttggccccattgtagctgtgtgaataggagtagaagagtagatggagcagagaggcccctgagtgccaggctgagggctaggggctctgatgtaggcagggcctggcatcggcacacactgtcacaggctgggtgagataaagccaccacttcctgtgtaggcctcttggagcgaagcaaatttagtcctggctaagaaagcaggaagggcagggaagctgaggacgttacacctgtctgctttcctttggggttcttccacggacactgcttgtctgggcccacagcgtgtaccacccacttgtccccacctctactagagagcatgggacagccctgcctgaactctgaagaagcttagagccttcttagatcggagggtcccaccccttgtctttataacatgtgccagaggccaggggtcacttcacagatctggtcttgtcatccctgattcttggatttttcacctcaatggtatctgcaactcagctt

SEQ ID NO: 141085 - DNA, 300 bp, Homo sapiens
cctgctgtcctctcagccacagtgcttatccccagatgaaataaaaacaaggcgattattatgggtgtttggggattcagagcatcccctcggagactacatcaactggtggcaggaaaggatctttaagagagtaagaatgagagaggcttaaaaaaaaacccagcttgtcagcagtaatcggctcctgcttggccctctctctgctggggtccaggccaccttgcagggagatattttccctctaagaggctttatgatgctacagttctgaacacaggtgcccgctgccttaacttg

SEQ ID NO: 141086 - DNA, 380 bp, Homo sapiens
cagtggcatgtctgttaaaggagtgaatgaacttggaatgaacgagggatgctgtttctggccagctctgtctcagcgcctaactcttgcagcagcactctctccacctgcctggcaggaccaccctggctgttctgcctcccatcgggggctcacatcccagatccggagactgaggcccatcatgggatcatgtccaccatcccgtgacctcttagaggctggcgtccaggcctcccgagcctcccaccagcccgcctctcctgccacgtggaaagaagcctcaaatgatacaattgaacagcaacaacaaaacagctcctccaccctcaccttcatagtccacttccatattaattgtcgtatgcaggcccagtgag

SEQ ID NO: 141087 - DNA, 295 bp, Homo sapiens
ggaggaaagcggtcatacacttcaggaactcgagcacgtcgtcgggggaccaagatcaccggcgcctctggtgaatgtctgtgggaatgacgtctaacacggcctcccaagtgctgggattacaggtgtgagccaccacacccggcacattcttgatttttaaagcaagcctagaatatcagtgtagctcttttcatttatggagcagctcagaaatagatacaaactatcaacattttatgtagtttataatgaacataactaataaaaattgtcagtgtataaaaaaaccgat

SEQ ID NO: 141088 - DNA, 299 bp, Homo sapiens
gcaaaaatcatgagctagagaggtgtggagagagggatggctggtattggggacagattcagaagcagtagaagcagtgactgtgttgggggagcagtgaatgaagcagtgtcagagcacctgagtcatgggaatggtgcagcacccgaaggagataataacatggtccttatttttcagacatgacacaggcacgcctgttcattctctgcagcagcttctgaatcctgaacaataaatactattatggttccctatgacactagacattttgttgtggaacagttttcttgtcctgc

SEQ ID NO: 141089 - DNA, 351 bp, Homo sapiens
tgactgtgttcctttgtgtgttcctaaccctcaggcctttcttggccctgtgtgagtaaagagaaggagatctgtcagccaccatcaacttgaatacccagtctcaccctcggactggctttccctgagtccatgcatatgtgagagcttctgcccaggaactctctttccccccactgcaggaacagcagtgccctttgacttagttaatgccctcatgaccccttttttgcttattccccacttctttagaggagggtaaggagaaggccccagcctgtgcctctatgcccacttcctgacagtgcccggcatgtggcagtggcttcatcagtgtttttgaatgaatga

SEQ ID NO: 141090 - DNA, 216 bp, Homo sapiens
ggatttgctggtgcagtacaactaggcttaatagggacatgggctggataatgctctttggcccttagagacactgggcagctgagagaactcacaggggctgtctgcaacaacagtagccccatccaagcagcacattttgttcctgaagtccaacgaggtcttctcccaaccagagccacagagaggccacacagttccatagggccaaaacca

SEQ ID NO: 141091 - DNA, 167 bp, Homo sapiens
gatttgctggtgcagtacaactaggcttaatagggacatgagcaacaggctggccagtgcccaccgttaccatcagcagccacgacgaatccatcactcaagttctgaaactgatgagacgggagctccctccttcagcacaaaagccactgcatagctcacacaga

SEQ ID NO: 141092 - DNA, 429 bp, Homo sapiens
aacaactctaagagtagatatcattagcaccctcattttacagatgaggacacccgggcacagagaggtgatgtgacttgtctggggtcacactgctagtaagagacaaagctggctccggaggccaagcccttgacctcttctgtgtcagatgggttaggagctccagaacggagccaaggtttgagtgccacatctgccacgtatttgctgtgggactgctggcctgtgcctcagtttccccttctcagagaaagtaaaattatcaggaatagacagctccaagaaaaggaagctcaagatggctttcaacaacacaaagctgtcccactttgctctgattaaaatcagaaccatgatgagactgtttgtcacctatctgactggcaaaggtgagaatgtcaggtgacacccgtctattccagcaag

SEQ ID NO: 141093 - DNA, 355 bp, Homo sapiens
ctacccttcaacagaagcccaactcaggtttcatcaggggactcctccaccttccaatgtcctcaccaaccatcattcaggtgctcttggcccaattgctcggtgtcaacactgcaggactttcacactgtttgttcacccagaaagataatgctctccaccatatacaaattactgtgcaggagacaaagatcaatcaatacggagcctaccttaaaggagtttaccaagggagaaaacagattataaacaggactttttaaaaagtagcccggcacactggctcatgccagtaatctcagcactttgggaggccgatgtaggggaattgctcaagcccaggagttcaagacca

SEQ ID NO: 141094 - DNA, 239 bp, Homo sapiens
cagcggcccaagaacgacattccaatgtcactctccccaggcagacagacgggactcattccttccccgtgagaggaactaagttatgcaaatcaatgcacccatcaatcgagcatctcaaaatctcaataaacaggaggcaacgggaacacctaaaagagggcaataaaggagtgcaatttagttgtattctgtgttgcaacagagaagagcctcgggatcatcaaaccccaaatctg

SEQ ID NO: 141095 - DNA, 190 bp, Homo sapiens
atggggtgtctggggcatcagggagctcccttgcctggccctcagtggcctgatggagtaagagcgtttggttgagtgattcagatctggtcactatggtaggagaacaaaaatgcatattgtgtcatatcgtgtacagctccaaaaagaggcactagtcatgagtgccgaaggtgcgggcccacagaag

SEQ ID NO: 141096 - DNA, 243 bp, Homo sapiens
ctgcctctgccttccaaagtgctggggttataggtatgcaccaccatgcctggtcccctgaagtttcttgtaggcaacagatcattgagtcttgctttttaaaaatatatatacgtggagagtttggtctgtttaccttccgcattattagtgagtgtttgtttcatttacctgtagcattattattgataagtaaggacttactcctgccatatattatttgcttcctggttgtatagtgga

SEQ ID NO: 141097 - DNA, 478 bp, Homo sapiens
cttaacttcaatttaagctcttatcaaatagtctaaagacccatgtcattgtcactaggcttacattcaagcttgcagtattattgattctgcctatccactcagaatttattttgttaagtagtcactttatttaaaatattcagagctaaaaaaattagacagagctgttcctgtttaaatctgtaaagaagggaaagttttagaaacctgttatattgcactgcctaccctgacagcccccacccgtagtgccccctcttcaccttagggtattgctgtcaactctctaggttggaaaccaatttgatcaactaatccctgagataaaatgttatcccagtatgggtttaggagtgattcctccaggcatatttacattttaataagaggcccttaaagtcccaaatctgctaagatgtgaatgtgtctatctgtaccatgcccagcaggataggttgtggggaaaatcatctca

SEQ ID NO: 141098 - DNA, 382 bp, Homo sapiens
agctgggactacagctgtgtaccaccatgctcggatagtttcttttatcagacggggtctctctgtgttgcctgggctagtcatgaattcttgggctcaagcaatcctcctgcctcagcattccacagtgttgggattataagtgtgagccactgtgcccggccccaaatattttcgtaatgtttttctagttgaccacatctggaaagaatccatcatactctcacaccccatgatgggtatttttccatgccaggcttgtttacactgatcctgcactgctttgtaatccggcccttatttacaaaccctacgtccccacattgttccctagctggttgagggcatggatttattttatgaaggttgcatctcctatgat

SEQ ID NO: 141099 - DNA, 466 bp, Homo sapiens
tggggccgggcacgggggctcacgcctgtaatcccagcactttgggaagccaaggcaggtggatcacctgaggtcaggagttcaagaccagcctggccaacacggcgaaaccttaaaaattagcccggtgtggtggcacaggcctgtaatcccagctacttgggagcctgaggcaggcgaatcgcttgagcctgggaggcagaggttgcagtgagctgagattgtgccactgcattccatcctgggcgagagagtgaggctctgtctcaaaacaaaagaaaacaaaacaaaagcatgaggttggggtagggtccgggtttgaccctttccagctgtgtgggctgggccaagttacctggtctctctgtgactccttttcttcatctttaaatggagatagtagttcctgcctcagagggttgctgtgaggattcagtgagttaatacatgtcaaatattcagaaca

SEQ ID NO: 141100 - DNA, 393 bp, Homo sapiens
cacccggctcactgccttggacacacacatcactggcttgaatgtgaattattaaccctcttggggaaagaatttctaactaagcccatcttgcagatgagggagctgaggttcaaagaggtaaagtaacttgtctaaggtcacagagctagcaagcagggagctgggactcaaagctagtccagtctctaaagcagcgtgtctcagcctagaatgtgcataccaatcacctgggcatcttattaacatgcagaagctggttccgcaggcgagggctggggcagacagctccccagtgatgctgggctacagatggcactgagtggccaggctctgaagaccacacaacccagcccctccacctcacctctcccttcctgccccgagttctgc

SEQ ID NO: 141101 - DNA, 260 bp, Homo sapiens
actagtccacgtgttgtgctgctggcgaagtggacctcagacaaagttctgttcagagatttctttgattgtgtctccaaggcgaatatcagtccagctcgacagccatcagcccacacagagcatctcacagcctccaccacctccatcccttctgtggtctgctgggcaaggacagcctgggtcacagccgccccattctatttctaccgagtttcaaaccagccaaccgtggactagtagccaaccgtggactagtg

SEQ ID NO: 141102 - DNA, 309 bp, Homo sapiens
ctccacccgacggggtgctgacactgcctcctgtggatgggctgccagggcgtcctccatgcccccctggggctgaaagtggacctcagacaaagttctgttcagagatttctttgattgtgtctccaaggcgaatatcagtccagctcgacagccatcagcccacacagagcatctcacagcctccaccacctccatcccttctgtggtctgctgggcaaggacagcctgggtcacagccgccccattctatttctaccgagtttcaaaccagccaaccgtggactagtagccaaccgtggactagtg

SEQ ID NO: 141103 - DNA, 185 bp, Homo sapiens
gggcttcccaaggccaggcagaagcgtggggcagaccacacaacaactggttaaaagcaagggagctagccgggcgcggtggctcacgcctgtaatcccagcactttgggaggccgaggcaggcagatcacgaggtcaggagatcgagaccatcctggctaacagggtgaaaccccgtctctact

SEQ ID NO: 141104 - DNA, 244 bp, Homo sapiens
tagagaattttagaaaaggaaaagagaaacaacatagaagaaaagaaaaaagtatcacaagtaggggtccaaatatcttatttactgtgcataaaaactatcctcaagaaggaactatctaaaaaatgcatatactggccaggcacagtggctcgtgcttgtaatcctagcagtatgggaggccgaggcaggcggactgcttgagctcaggactttgagaccagcctgggcaacacggcgaaac

SEQ ID NO: 141105 - DNA, 405 bp, Homo sapiens
tgcttgtgtttttcagtaagtggttattagggttatatattctgggaatttagtatgtgtgtgtctgatagagagatgaggttctctttttatacaggagagtgggagagttgaatttatatgtattagaggtatgtgatatggttattggttagtacttggcaatgtgggagctggttcatactagattgggataatttgggattgggaactgtttttatgggtatttataaatgatatgctggagatatttctgtgcatcttgggtgtgtatactggtttgtgtgtatatttatcagcagatagatgaattatctaagtctgtttatagaatacgggattgttagtatttaaagtgtatttctttggagaatgctaggatgttcgtacatgtgtttgggcatg

SEQ ID NO: 141106 - DNA, 412 bp, Homo sapiens
cctatggagcacttttaaaactacatattttgacctatacatgggttttgattaccagtttttttaatgatatagaactaaaatcatcacacattaggcttcttattgattagtgaaacctttgtattatgtgtgtgtgtatttatacacatgtgcacacatgtcacacttgtatgcatatggcatgtcatgccaggttatgtcatataagcgtgtatgccaggtcatgatgttaaaatgtatttcttatcatggattgtggttaaaaaaaatactgatctctgggtatccccaactccaatctgaaatcattgtgattctctcgccttctcaatgtgactagtctttttaaagttccttttgatcttcccaaatggcatccctgtgtccactttacccacttccaccgcct

SEQ ID NO: 141107 - DNA, 651 bp, Homo sapiens
gttagacatttctgggttctatattcagcatcccaaccaccagcacattggagtgacacacacagtaggcgttcaacaatactttagttgtccctggacacacacttctcttcctagaaagggggcaggaatgttaacaacagggaattgactgagtcccaagtataagctgggtgtttgttttatttttccattttcctcactcactactttcatatgtagtaaagagagtacactgatgtatgaaggctttcagctgtatgtgcgaggaggtgagcttgtcttgccatcagctgttcaatgtaccaccatggccaagatttaggaggtttttctgaagcccttacacatacaaccctttctccctacatgcctcctttcttgcagtgagggattcagttggtcccagatttcaccattatctctaatggtccagtgctgttcaacaaaggttggtctgatttccttaaaggatggcttttctcactctggtccatgacatgactctaggatgacacaaacatcttcagaaaaccatcttggaaggcccaccaagtaaaccagcaaaagcccttaccttcaaaccaaagaaaatactaaatccatgaaatcacttaagccacccttccaaagagaaggagattcaaaatg

SEQ ID NO: 141108 - DNA, 593 bp, Homo sapiens
agagaattgaaataatcatgaagattgtcattagaaagcatggcaggatgacaacaatttcaatgaagatggcagatacggaagttatgcatcaaaggagcagcatgtgagcatctgtgtccttgagatggagaagagaaaataatggaacagataaagaacactcagagatacagaaaaatatttcctgaaatgaaacatttgccaaaccttcaaacatgagaagcttttacatccacgtatgtaaatggagtaaaagagatcccttgatctgacatgaatcttagctccattctttagtagctgtgactctgggcaggtttgtcaggctgattttttaatctgcaaagtgtgactattaaaaatcccagcttcatggtttgttgtgaatgggaatgaaatgaggtaatatatgtcatgtacttcggtgagttactggtacagaggatattcttttcaagtatcagctattgtttgtatcttggtaaagttcctgaacattatcgggggaagaaagaatcctgtacgaggaaaaaaaaacaaaagttgcattgcattcaaacttctacactgcatcagttagtgccagaaga

SEQ ID NO: 141109 - DNA, 126 bp, Homo sapiens
gtcatttattgaactaaggaaaatgcaaaagaagtaaatttggattaaacaagatgaaaagtacagatatagttatcaagcacctagtaaacagtcggatatgtgaatctggaattcaggagaaag

SEQ ID NO: 141110 - DNA, 345 bp, Homo sapiens
ggtaagataaaaacaaaagtctcagtctcctgaagcccattgtgagtttggaggaagccagcgctctggccaccctgtgctcctggcacttgctctgtgtggctcctatcaggaaccccacacacgttccttggccgaatgaatgaaaggatgaatggggaaggagggtggggggaagattgcaggccagtgtggaaagaggggaggttggatctgagccactgtgggatggcagagctggggtgcatggtgaggcatgctatctactccacctgccaggctgggcccccgggctgatgattttgtgcttctgcaatgttgaagcagctgccagtattttgaaaa

SEQ ID NO: 141111 - DNA, 353 bp, Homo sapiens
aggacacaggcctacttgggtaaaccacttgaagtgggtggaagtggtgagaccttccaaacatgttttgcttgagtaacagcaggtaagcactgccccctgacctgggaatgtcgatcaggttaattggaggggaggtaggaaagtctgggccagagctgacagcttgggcaaggaaggtgagaagctggaccctgcagaattttccatctcagcctttccctcacagggctcagtcttatctttaaatggcacagaatgtttgactgaagaggcatctaattatcaggcccccaggatccttgagacctggtctggctatgtggctgcctcagttccccagtccccatcac

SEQ ID NO: 141112 - DNA, 203 bp, Homo sapiens
tgtgtctcagatgcaacaacacttcctgcctctgagcctttgcattcactgttccctctgcctggaatgctctctgcacagcctgtcacaaatgtcagctccccaggggccatccctgacctctccatctctagtgatctccgtgcgaactcaattcctgaagaaggtggtccatgcaggtcctaagacctgagcaagccagg

SEQ ID NO: 141113 - DNA, 787 bp, Homo sapiens
ttgcccatctttgacagctctgctgctgtgtcccgggggaggcaggtttccaacataactgctactctgcctttgcctggtgagtgctgagatggagaggcaggctggtatctgtttgatctgatactccagaaaaatcgtaattttacattgtttttttcctgatttctaaacacatgaaaccagattcttctggagaaacatagagtgccttaattttgcctagttaggggctgttgggggtggtttttctaagcacccttctgtgtctagccaaccagtagaacctgatttttgggaggtgaattagccagggttctctagagggacaaaactaataggatagatgtatttataaaggggagtttattaaggagtattgactcacacggtcatggaactatgtgaggtcccacatagtccatctgcaggttgaggagcaggaaagccagtccgagtcccacagctgaagaacttggagtctgatgttcgagggcaggaagcatccagcacaggagaaagatgtaggctggaaggctaaggaagtctagtctattcacattcttctgcctgctttttattctggctacaatggcagcagattagatggtgcccacccagattaagggtgggtctgccttccccagcccactgactcaaatgttaatctcctttggcaacaccctcacagacacgcccaggatcaatactttgcatccttcaatccaatcaagttgacactccgtattagccatcacaggggcatgctaagcaagaattgtgtcta

SEQ ID NO: 141114 - DNA, 536 bp, Homo sapiens
cttacatgcatgtcattcacctttatgtaaaaccttttacctcctatctttacctatgagaatcctacctgaattttaagagtctgatcaaatgtcacttccacagaaaggccttctttggttgtaactggaactaatttttaaatctcagtctaaggcaaataagcacattagaaagcaataaataaataaatggtggccccattttgcagaggaggaagctgggcctcggggtggagtcattgttccagggcaccaggttggacctagacctgaagctgggtttggtgcagccctgcaccccaacccactggtgtgaggtggtcatgcaggaggggccagttggcgctttgctgtgctcctgggctcccggggtgggcctgagccggctccgttctgtgatcccctcgtgtgggcttcatctgctgatggtgctggtgcccggaggggtctcctggtgcacagaaatctgtgcttagtggcagttccaggggtgctgcggtacttcctgggctgatacaggctttgtgggagtg

SEQ ID NO: 141115 - DNA, 463 bp, Homo sapiens
gatggtaaatgtactttttttcataatttgtttttaaattacaaatagaaggcttattttaaaaaaacataaaagtatataaagcaaaaagtgaaaatcctctatcccagtgtttacttcgcaaaggaaactagtatcagattcctgtgcgtctgtacagaattttcccatgcacatatacatagatacatacatgcatacataatttttgatagtttctaaaaagtgaactcaaactattcatgctattttaaaattttctttttttcaagttataggttggtgcaaacctctacccagaaaacgttaaagtgaatcattgccccttcccgaatggaaagggttcagtgtagtcaatttgccaccaaatggccagttggtctcctggagggatggtgtcaaattgaggaccagttttggtctgtgttggaagcagattggatgttcagcatcagcatcagct

SEQ ID NO: 141116 - DNA, 179 bp, Homo sapiens
gaggtgaggaccgcatctgtgattctgtggcccgtgagagcagctggtgcgccctgcagggctgacagggccgaggatagaacgtgccgctttctaatcaccggtcagaagcgtgggccggaacagagggtcacgagccctgagcccacgcgcacacaccgccaaaagcttctagggtg

SEQ ID NO: 141117 - DNA, 667 bp, Homo sapiens
aatgagataatcagcaacacagtaatagtgggggacttcagtactccactgacagcactagagaggtctttaagacagaaagtcaacaaagaaacaatggatttaactggatttaaactgtaccttggaacaaatggacttaacagatgtaaacagaacatttcatcgaacaactgcagaatacacatcctattcaacagcacatggaactttctccaagatagaccatctgataggccataaaatgagcctgaataaatttaagaaaattgaaattatatcaagccctctgtcagactgcagtggaataaaactggaaatcaactccaaaaggaaccttcagaatcacacaaatacatggaagttaaataacctgctcctgaatgagcatcaggtcaaaaatgaaatcaagatggaaatttaaaaattgtttgaactgaatgacagtaatgacacaacctacccaaacctctggaatacagctaaggcagtgccaagaggaaagttgatggccctaaacacctacatcaaaaagtctgaaagagcacaaacagacaatctaaggtcacacctcaaggaactagagaaacaagaataaaccaaacccagcagaagaaaggaaataaccgagatcagagcagaactaaatgaaatttgaacaaaaaga

SEQ ID NO: 141118 - DNA, 284 bp, Homo sapiens
gactgctccctcttcacatcctcattgtccccagaagagtcagtagcacctggggatcttgctgtgccttcttatgctatcgctcagtgtagcagagtctgggtaggatatagaatttggcatccactgtgaaggaatgagcctcgggagttgtctcaacaaaatactctcactggaagagagggccagggaaggggcaggagtccagagacactttgtctgaagagggaggcggcagggggatcgcgcatgagcagtcgagctgactaggcattagaagcgta

SEQ ID NO: 141119 - DNA, 281 bp, Homo sapiens
gcaatgatcactgtgtgggtggattcaagaaccccctgcaacaacctgaggctctattggggcttgatccccaagttgggaaacaattaatctataataagacaggagatgggaagggtagcaatcatctttctgtgtttcctggatacactgcattatagtaacctccacgtggtagtgtgttgttaattcaagttgcctggtgtaaaaacaaacacagaaacaaaatataatgtaatataaataacatttcttcttcaaagaaaaaaaacctgacatta

SEQ ID NO: 141120 - DNA, 250 bp, Homo sapiens
ttgtcagtcagctgggtcatagatggaaagttaaaatgacctcctaaggtcaaagtttatatggctgcataatgcagtaaatgggtcgaattggtacccacaacttctgtcagtagggtcacataaggagtgtgtctgtctcattgactataatttatttcattcaacagcaaagctatatttgcggtggcactgactgtctgaattttgacaacttcattttgggctttaatagaaatgtagtttgctg

SEQ ID NO: 141121 - DNA, 449 bp, Homo sapiens
gttggatgccaaggtttctatgatcaagactctagtccaactcttaaacaagtcagcagtgttggagaagaagctgctgggtatcctggccccaagtcttcaggaccttgaagttttcctttagacccacccatctggagaagatgcaattggtggtaagcctttaatccagaagagattttcaagcagggtaggtatgagatgctgggtttttaaaaaatctttttattataatatttttcaaacatacagcacagttaaaaggactttacattgaaaaaatatacaatcacagcataattctatcctttatgttgtcctataggtgttttatcacttaggtatctatatattcccttattgattaatgcattttatctttttgatgcatgtgaatgtaagtttcagatgtcagtgcaattccccctaaatatttcagtatgcatata

SEQ ID NO: 141122 - DNA, 527 bp, Homo sapiens
tctccacctatgctagacttagatctcgtttccccgcccctgaaaggccctcgatgtctccgactgtccaaattccacctgcccatcttttatggaatgggtctcaaatggtacttccttttgttctgggtgggaaaataatagggtttagactcaaacagattcaggtttgtggtcaggtttcatattgtcccgggggcttaacatagggcaagttacttatattccctgggcctcagtttcctcaactgggttctcccctacttggaaagactgagatgatcacagaacacaatgtgagaagagaagccagcactctcctggcacagaggaggggctccacagacagctgctcacgcccatctcccaggaccacgtcctcctctcattccccctgcgcaaggcctttagatcctagttctctcagagccctttccaggccctattattctagtaattagattactagtcctctctccaaactccatccaactgtaagcacctccttttgtttttcacctaacaaa

SEQ ID NO: 141123 - DNA, 260 bp, Homo sapiens
atattttctattgtttatttaaagcatgcagtatttcaattacatttggattaaataaggtttttgtaagctggtcttgaaacttaatcaccgtctgtagcaaagtgttatgaagaaatatgttctaagactaacaaattactctctacaatacagcctgttgtaaactgaaaagtgtttcttataacatcgattttcatgtgtgggttttgtacccagctttgttaaattatagtttcacccagaatgttgcttttcag

SEQ ID NO: 141124 - DNA, 192 bp, Homo sapiens
ctcatctgtaagatgagaataataaataccactttgctaggcattgggaggatgaaatgatttcacacatggaatactccagcactgtgataaattccatccattcattctgctgccacagatcaagaggagttgaatgatagtgagaccatcattcacttgagccaatccttcccctagtgctacgattct

SEQ ID NO: 141125 - DNA, 226 bp, Homo sapiens
gctattgattttataacatctttaaaatcaggaataaatcattgtttcatgaacaaagagacatgtttatttcaaatttgggatttttatatgatttatatgtcattaacatgatacgctctactttccaaacttgcaattttagtggccaagtagagacttctagttcaacataactacagcagataaattctattacccacattttttaatgtttaaaaagaaa

SEQ ID NO: 141126 - DNA, 428 bp, Homo sapiens
cagtttcaccatgctatgaatgagatcatcctgttagataccaggaagagagagttttattaagtatataagtagaggcatccaggtggcagtttgaatcatcgctgctctttagtttgggggacgtgtagtaaagctgctcaccatgagaactttagaatcacactgccatgagttctcattttggctctaaatctccctgtggccttagagaagttaattcctctgagcctccgtgttttgtgggcttgaattcgtatatattataaactgctgtgtgtggtgcttggcacgtggtagcgtgagaacatcactaggttacgggtgatagttacagtcagagtgtgggtaagagctggggagagctttggaatgagaatagacatagcctagaataccaccctgggcagcatggagcaggagggaca

SEQ ID NO: 141127 - DNA, 266 bp, Homo sapiens
agaagaaaagatccagacatttaaggaaatttctgtcaggttacaggctgaccagagacaataaaaagaccaagaacctcaggaatacagacttcgcaaaaataacttggaaaattcactacacaaatgaactgcagccctcaacaagtaacagaagcaatccctgaggagagggataatctgatttccagagctactgcagtgtcatattcaaactgtacagtcctcaacacaaaattacaaagcacacaaataaaatggaaaat

SEQ ID NO: 141128 - DNA, 253 bp, Homo sapiens
agaatataagacatatttggagaatggctgaccattagtgacttgagtctaaaaagaataggccaagaaggtttggaaagtgattaggggccagattgtggagagcttttaaaaccatgtttaggaatctggattttctgtgaactttattattttgtattctctttggaacggtgccttagataaatgcattattttaagggtcacccacttcatttggaataatatgtgcttaacgtttcataaggcttag

SEQ ID NO: 141129 - DNA, 1213 bp, Homo sapiens
ctgactgctgctcacactatgcctgtctctgaatgcttcagaagttcatagacaaaatctgtcagttccagcctctgttgctgatttttacttgaaaggccatcctcatcccctccatgcctctgatcttcacatccttccagacccagatcatgtcccatctcatgaatatttacagggccacttcctcttctcttttgttctgttgtctaaactcttatagtctttacaacatttatttatatattgtcttagaatatcatttgatatggggtagtcttttctcctcctcatttaaatatggttctaccatccccaccatggccatctccaactacagcttttattaaaccacttgtagagtgaatatccatgcaggacaggctctctgtatttttaatgtgttatatctaatacaacaaccttttggataatgattttatctaaagtgtgcaattgaggaaattgaggtttagaaaggttaatagtgagtccaagtaagaatcatctagtaagaatcagagctaagttcaaagggctaacttcaaaatccctgatcttcccagactaaactcatagatgacacagagactgagcaagggaagcttagttaccttgacttggtattaaatgaaataacagtattcccatagttactactaaggaatcttgtcctttcttaagatgactaaaccacattggtagggagacaaccatagaaaaactgagaatttgcatccacaaagaggagattatattacataggtctcaaaattggagttttccctccatcaagagccactggtacaaaaccattaatggaagtatttaagagatgccctctctgtcacatatctgctgtgggatttaaggaaggaattttctcttctaaacactcacacatccaaactagaaatccatgtggaatataagccacgttatgcccctatattgacatattagttcaaaactctgatggcatgcagttgtgagagcagcagggaggaaaattatataacctgatggcaacttgataatttatactttgagataacttattctggattttcctcacttgtatttctccacttggccacgtacaaagcaacagctgcagtggtcgttttggagttcctccaggatgtgaatgtgagacctgccaatcttccctcctcctttcctgcaggtacctacctgcagtgactctattggc

SEQ ID NO: 141130 - DNA, 308 bp, Homo sapiens
agatacagaggctgcactgagtcgtgatggcaccaccccactttaaaaagaaaaacaaaaaaagctgggtatggtgacacccgcttgtagggctgagtgaatgggaagttcacctgggcccaagagttcaagactacagtgagctatgattgcactactacactccagcctgggtgacagagtgaggctccagctccaaaaataaataaaaaaaataaaaaccccaccattctaccattctcaaaggcctaaaagatcctcataaatcaatatacacctatcctataaattatgtcccttttatttta

SEQ ID NO: 141131 - DNA, 281 bp, Homo sapiens
ggtgcagtcacaggtcactgtggcctcaaactcctgggctcaacctgtcctcctgcctcagcctcttgagtggctgggactaatgcaccactatgcctggctaattgtttggggggccaggggggtggagatgggatctcactgtattgactacactggtctggaactggcctcaagccatcatgccatctggcttcggcctctcaacgtgctggcattacaggtgggagccatcgtgcccagcccactgagcgtatttattaaggaacagaagttggatt

SEQ ID NO: 141132 - DNA, 541 bp, Homo sapiens
aggccgaggcgggcggatcacaaggtcaggagatcgagaccatcctggctaacacagtgaaaccctgtctctactaaaaatacaaaaaattagccgggtgtagtggcaggcgcctgtagtcccagctactggggacgctgaggcaggagaatggcatgaacccaggaggcagagcttgcagtaagctgagatcatgccactgcactccagccggggctacagagcgagactccgtctcaaacaaacaaacaaaaaaaagagttgcagggagcccagactgacatagggaaacccagggaaaggagatagggaatagattaaaagatggataaataaatgacggggagttgctgatccctcttgtagccattcctttttactgtgttctgttcatattttctctctgattctctgactactttccttttgttttttaagtttctcccttttgacatttccctttttagttgtctaaatttttttaaaaaaattgttttggatgtcacaccttcaaggctaatttctcccaagtaaagctctg

SEQ ID NO: 141133 - DNA, 459 bp, Homo sapiens
ctcctaatctaatttcctattttcttaccctgatgtattcatttcatttatattgcactgttttattgtatgtctttaccataagctgcctcaaatatttgtgaaacagatggtatataaataaagaacattggaatgtttgagaaagttgttgttgacaagaccgatgaagatgaaaatagtgtagttctgagaaaatgttggttgctgtggcatctgctctttttttctcccttgcactcttatctcctggggtggtccatcttcgttaccttcaactcccatgacacccctgctgtggctttggctgcattctggagtcttctctatctccgccctcaccctggattcacaaatgcagatctgtatttctgacttccttcctattggatagctccatctgaatgtccctaagtccctcaactcaacacgttcaaaacgaggctcagcatcctttcc

SEQ ID NO: 141134 - DNA, 138 bp, Homo sapiens
gcggccgcctactactactactgctcgaattcaagcttctaacgatgtacggggccatgctgttattttaaaaaaatgttattacagaagtagtacaaatactttgggaaagtttagaaaatatagttaagaaaaata

SEQ ID NO: 141135 - DNA, 165 bp, Homo sapiens
tccatttgagaagaaaattttttgcctttcaccatagcaatcaatatacactccattgtcataatgccacaccttcaacatgaatttaaaggcataaaaataagtgttgtggaatcaattagcacaatcttttgggactttgcaccaaaacacaattgcacattg

SEQ ID NO: 141136 - DNA, 190 bp, Homo sapiens
ctgctagagttctgatgtttaaaaccacaggcttgcgatcaaaataacctctttaattttagattatcatgcagattaatttcttcagtttctcaggcactattctgttttttttaaaaaaagggtggggtttcaaaagaaaactaatactcattttttccccgattaaattgctcaaccattaaaaagg

SEQ ID NO: 141137 - DNA, 265 bp, Homo sapiens
ccatctcaattaaaaaacaaaaaaattgtagagatggggcttactatgttgtcaactcctagtctcaagtgatctcctaccttggtctcccaaagtgctgggattataggcatgagccaccatacctggcctggattgtgtttctaaagcctggcccatgaggagcatcttgtgctttaacaattcataattatggtacctgacatgtgctttagtactggtcggcggacatgaatcagtagcttcttttggtattactcttatt

SEQ ID NO: 141138 - DNA, 625 bp, Homo sapiens
gaggtttaagacacacctttttgtaagcaagtcaacaaactaaaatatgttttaataaattacgtaagaaacatggaagagggccgggcgcggtggctcacacctgtaatcccagcactttgggaggatgaggcgggcagatgacgaggtcaggagttcgagagcagcccggccaacatagtgaaattctgtctctactaaaaatacaaaaaattagctgggcgtggtggcacacgcctgtagtcgcagctactcaggaggctgaggcaggagaatcgtttgaacctgggaggcggaggttgcagtgagccgagaccgcagcactgcactccagcctgggtgacagagtgagactccatctcaaaaaagaaacatggaagagagagcactttcagcacatgctggagactgtctcttcctgggtaaaaataataaaaattaaagaaacatatccatcatattgttataaaaattcaaacaatgcccttgggtctgtagaattaaatataatactcttcactgacaacctaatcctctcatctactgtcactaacttcccaaagaagtgttgacaagttaaagcatatgttctagtaagtaatttttctattaatttatatacata

SEQ ID NO: 141139 - DNA, 256 bp, Homo sapiens
cactccacagtgtcctatagaccacaaattccacagggtgcagacagtcaagggaatggggacatggataccaaatcttaatagacgtaaagtcatattttgcaagtgtgtgaatgaggaaggagagataatcaggactgtatctgcagcctaccacagaccctcccagccctctttgccaaggctgaggatatttatcacgccccctggtaatcccccaaccctctcctgtggggcaaagagccttgcatcattc

SEQ ID NO: 141140 - DNA, 352 bp, Homo sapiens
ctctgtcctagtaaaagtaatcatgaaagattcatataaagaaaaatctagccatccatctgcttaagaaacaaacaacaggtcttagtgcagtgccgtcatttcaggccaaagacagagtgtatgtgtgtgcatgtatatatgtccgtatacagccaaagaatctagatgcatatgctatctatgttctcttagtcagagccaggaaagaacttggattctcagtagcagttcagttcagctttgtaattattggcagagagagaggcaggaggagggaggagagagagaaaggttcctcacaaagccagacccatctatcttgttcttctttctcagaggcagcaactag

SEQ ID NO: 141141 - DNA, 916 bp, Homo sapiens
agcggcttgaccttccattttcctccctttcctggttgttctgcctgtgccctcctggcacatcagcagtcactgcaggcacatcgacaaaagacaccccaccgccacctgccttgattcacaaggagcacaacctcgtctgaaggactccaatccacagagttaggaaccctcatgggaccctgctcatcctgagcccccagctagcatgtgagttccctggggctctttatggcacttccctcaagtggttccatctacttaatgagcctcatgtcaccttatgaaccactgcctttaatataccctaccctacacacacacacacaaactccatatcttccatctctccctacccctaccacaacccctttccttccttgcagaattctgctgataatttactagatgccatccttggggcttggctcaattcaatccacatgaagttcacaaacatgtattaagacaatctatttttgaggtatagaaggtaccccaggtgactaacacaaagttcttgtagccaaggagctcagagaacctgaagataccttcactgtccttcacagttatctcaaccttcagcattcccccagagaaatgctgccctctaggaagttctctccaaggaatcccacccctgtcctgagtatttctttaatctacaactttcctgaggctgtgtattgcacagggggcgtgccaatgggttctgcacttgtgtccaacacccttggtaaatcgacctttccagaggactttggagcccttcgaggattctcagcatctgcatctcccaggagctcccagcatgcagttggcacttgatgactgtttgtagctaaggtacttaggctgattttatttaatctttagtatcaggctgatattttaaaaattccaatttaaataa

SEQ ID NO: 141142 - DNA, 321 bp, Homo sapiens
ttttagtagagacggggtttcaccgtgttagccaggatgggctcgatctcctgacctcgtgatctacccgcctcggcctcccaaagtgctgggattacaggtatgagccactgtgcctggcctgagtaagaccctgtttcaaagaaaaaaaattttttccttttgctttctagttggagaccaactaaaccaagcctgtatttaagagcatatggttgaaagattaactctggaagcagatggacatcagtttgaatccctatttgcctcttcttaaccgcgtgactgggccggcccggccgaccccatctcttaaaaaaa

SEQ ID NO: 141143 - DNA, 502 bp, Homo sapiens
  misc_feature (32)..(32): n is a, c, g, or t
  misc_feature (51)..(52): n is a, c, g, or t
  misc_feature (83)..(83): n is a, c, g, or t
actgcggtttctggtgtgtggtgactctagtnctgagcaggttgtataacnnatcctaatctctaaatttgggagatcccttnaatctttccacatgctcccctaattagactctggccagtacatggcacagaggggctttatggtttggtacaggcctgcttttttgttgttgttgttgaaaagagggagttttgccatgttggccaggctggtcttgaactcctggcctgcctcaagtggactgcccgcctcggcctcccaaagtgctgggattacaggtatgagccactgtgcctggcctgagtaagaccctgtttcaaagaaaaaaaattttttccttttgctttctagttggagaccaactaaaccaagcctgtatttaagagcatatggttgaaagattaactctggaagcagatggacatcagtttgaatccctatttgcctcttcttaaccgcgtgactgggccggcccggccgaccccatctcttaaaaaaa

SEQ ID NO: 141144 - DNA, 257 bp, Homo sapiens
cagactgccacttccttgctctgaatgaagctcctaactcacagttactgtgagaattaaatgagttatacatgtaactcagagctgggccacaggaagcattcgaggaatgttggctcttactatagtaaagcctttcaacgtgatccactgccttcacaagaggtcagactctgtggcttacacgaccctcatgatatggcccctgctaagatcttcagtccccttccttaactccagacatcctaatctactgg

SEQ ID NO: 141145 - DNA, 185 bp, Homo sapiens
tctctagaatttcaggctcttctgtaaatgaggctgttggacaagatgtggcaaagattccaggaggccagggttttaaatttgagattagaatcttagtggaattttttgaattatggtttctctggctcgctctctccctacctcccttcctctgtctcgctctgtccacacacatataaaca

SEQ ID NO: 141146 - DNA, 437 bp, Homo sapiens
tagcagtcttccctccagtagcacctagttgttgggtccctcttgctttatctctcactcttggacaataattcaatgatgaggctcagagactgaatgtttcctgaaactgcactgttctacctggcaccaaaggtgccaggttctaaatatggtgctcaaggtgtttgggttctaaatatggtgctctattcaaagtattcttatcactttgaaaccccactgctccttgctaatgtttctgaaatcactagtactctgggggagaccctggttttcttcaagtgaagctatgtatcactttaggtattcctgaagaggtctgttctctcctgctctctctccctaccttgaaattttacttaacttttacatatacattgaactcaatttcagattaccactccacacctcaccattcccctagaacctgtttt

SEQ ID NO: 141147 - DNA, 262 bp, Homo sapiens
tttactccttttgtttttactggatcacgatctctacaaagagtgactgttttgtcttcatttgtttaaaataatggtttctaggcatcactgatagggtgagaactacaattaagagttttttgttgtcttgtttttttaaacaaagttatatgcgcctgccgcttagtttgtaaaaggcacacaagtgaacatttggaaatgtagtcacacaaatgaaaagcaggtagaggttatatgcatgctatttagcaatgaaaat

SEQ ID NO: 141148 - DNA, 374 bp, Homo sapiens
caatcatatcacccatgggtggtgattttcttccctttcttctctcagtaatggcactgagaacacaatgttctgaacattgtaaggcagaacacatgaaaattcctagagagaagatctgttctatccacccctctcctccattcagcatgctgtgttcccactgtggttctgctgttggatagcaaagtctgttttgagagcttcaaggtaagagggtctcaaattgtggctagatgcccaggagtgattaagcaattagaacattcagacattgctaattgcctacaactcagcagcagcagcccatctcctgggccactcagctccctaacaaacgagacctttgcagagccaccagggttctctttttt

SEQ ID NO: 141149 - DNA, 130 bp, Homo sapiens
gggggaactagtgctggcctgctgccactttcattgcataaaagaccattttggggactcagagccctgccagctaattgatatggacactgttaactcctcaggaatggagcctgaaaatgtggggcac

SEQ ID NO: 141150 - DNA, 153 bp, Homo sapiens
gaccagccgagaaggctgccaagggaggtagagacggaggaggaccggaatgtcggccacggttcaacccaggggccagcccgcctcggaaagtcctggggcggaagggcgaactaatcgtccccctaaaacacagcgtagacccacgcggcg

SEQ ID NO: 141151 - DNA, 305 bp, Homo sapiens
ggacatgcagggctttcaggaagcatgctactgagtctcacctagatcctgtgggctgtagggacagacccacaggagggtcttcagcagaggagggagcagatgggattcccattgggctactgggtaagaaatgaactgtagggatggggaaggagagggaggagcaggccgacctccatagtagttgttacagctgtgcaggtgtgacctggaacaagaaggctggggaagtaccagagctgtctgtagaccatgcaaaggtagcatcctattggcagcaggtatggaggagaggagggaag

SEQ ID NO: 141152 - DNA, 805 bp, Homo sapiens
agacaatgtccctccctctaggtcttctaaaaaaaagaccagtacatgaaaaataattgtaaattatgatacaaaacaaggagcagaatagggaagaactaaagcttggggcagaaatgaggctggctactttaggtgggatggccaaggataacatctctctgacatttgtgttaagaattaaagccatataaagtgcttcccagggtgccagaccaatatggtatattcttcataaatatgctacatgaagagtgggaagagcaaaagagcagaagagcattccagctggaggagcaaacatttgcaaaagttcaagatgggaagatctcggccctttccaggacttgaaaaaaggcccctggctggagagtcatgagagaagggaagcagcttcagatgaattcggagaggtagaagcagccagatcctctagagccttgtaggccacagtaagggggttgagttgtaatgcaaggcagagttctcaagctctatcatgaatcagaatcacctggagattcaatagagattgctggaccccatccctagagatggggaccttctaataagtttgcatgtggtgccgatgctactgggccagagaccagactttgagaaccactgctgtaaggcagtgagaaccctaacagaaggatgtttcatataattaatttgcaggacttagtaactgatggagtgtagggttaaagagggaaaagaatcaaagataattctaaaggtacagtcctgtgtgatcaggaggtaaaacatataggaaaaattcttgttttttgagacggag

SEQ ID NO: 141153 - DNA, 186 bp, Homo sapiens
tgagaatcacttgaacctgagaggcggaggttgcagtgagccaagattaccacactgaactccagcctaggtgagactccatctcaaaaaataaaataaaataaaattctgagtttcattttgaggtgttatcttacattacccaataagcattcctgaaaagtgtatgttttatactctatcttt

SEQ ID NO: 141154 - DNA, 487 bp, Homo sapiens
catgccctcctcatacctctacatatgcactcacccacgcactgatgtacacatttatttcagaacaagcttcctgagtctgtgcaagctgtggattggccagtgctgctccaacttggggccaccccctcctctcatctcccctcagggaggggttgtctgggtgctctctcaaaagtcctgttctccttcctcctccagccttgccatcctgcagccaggtggccacagggcaatgacttcatcctcccaagcccgtgtttcctcaatctgtaaattggggctaatggttcccaccctgcttgcctcacaggggggcaccaagcattcccatgagataagggacagcagagtgttttgtaaactgcaaattgttttccaaacaggcaaatggtgctgttgttttcccagctatggaactcaagaattcctccacccacaagtaaaccctgtccttgggtggaaagggatatagtggtgatggtga

SEQ ID NO: 141155 - DNA, 465 bp, Homo sapiens
gctctccatacttccgcacctggagaccaggctgagggtggggtggggcatgaggctggggggctgaacttggctcaggcaccggcaaaggactcagtggccccttggaccctctgcgtgtcctccctgaggggcggggtccagtcgagtcagttatcactgagtttcagcctttggttcccaccggtcaaggaggctgccgccttcctgtgctgcctgcatccgcagttattcgtcatttcccatgacatcaatctactctttttctcttttctttagagacagggtcttgctctgtcgcccaagctggagcgctgtagtgcaatcacagctcactgcagcctcaaattcctgggatcaggcaatcctcccacctcagccacaggagcagatggaaccacaggcgcacaccatcatgcttggctaatttttaaattttctagagacaggggtctccctacgttg

SEQ ID NO: 141156 - DNA, 469 bp, Homo sapiens
ttcgataacaggatataaaggtcccaatgacatggggacattttgaggtttttgtttgtttgtttgtttttgaggtgatagtatagttaagtcagcattgaccagattttgaaatgattaatattatgatgactataaaatctgggaaaggaacaatctccctgagtatagaaagataaagcagagaatttgagccagaaattatgtccccattgagagggtagaaggagaaaaatgctctaatgaacagaaaaacacataaaaaaaccttttgttctgaaatgaaaacgtggactctccactgtcaggtatgccagagaagtaaaaatttcaagggcctgctcaataaagcccagtgctgtagcaaaaatccaaaggccattatggattctggaaaagcctttatttttctatcttcaatctcttttccaactttcatttaatttctattttattgagaaaccctgtg

SEQ ID NO: 141157 - DNA, 284 bp, Homo sapiens
agacaagagagctaagattcagagctgacaggtcagctccagaggtgacggctttgacccttgtgcccaatggcagggtgccagcaaaacaccatcatattttgtctcaaaaggttatgcagcatgttggtgataagtccctagaataatgtttcccaaagtactggatgcttactatggggcacacaagccaattttaccaaacagcactgaaacacacactgaaacactgttccttttaaactcctcttttagtcctgatttttgccaacaagaaagcctta

SEQ ID NO: 141158 - DNA, 1154 bp, Homo sapiens
cactgccatcattggaggagaaaaaaacagggacagaacacagaaaaacatctgttaagtctgtctttttaaataaggaaacagcaaccacattaaccaaaatccagtatgtttcatagtattctcttgagattggcttaggaaactgtcagaggaacaattagaaaatagtgtcttaggctacattcaaacagtttaaacatctgatggtgcttttctctttcttacctaaaagagctagggtacatctgaatttttagacttgactgcttttctgaatggcattttgtaaacttcatttaaatttcaaaaatctttttgagctttttcaaatgataggtttttaaaaatatttttctatgtgatgttctgttcttcaaaaaacaaatacattaaaaactattattgtgggaccatattggcctgaaaaaaaaatctttcttaattgagcataaacaggaataaagattaattcaaaatagtttttcctccttcttttggaatgtggcatccccatcacagttaatgatgtaagtttttcaaaactgagtcagggactagtttatcccacaatgcgacaatgtgggcagggtaattgtaggttgggctcagttttcttgccagagttctaatgctgtttgtgtaacttacctctaagtggaataatttaggtacctataaagtaagggctcaataacaataaccttaatgatggctaatatttattgaacatttactgtatgataggaatttggcaaagttttttcatgatcttcacatcaactttatgaggtagataatatccacattttatagctgaggaaactgaaatgtaatggttaaataacttaactaggctcacacggacagtaaataagctgtatgtccaagattacaatctagacagtttaactgtggagcctgcaccattaattgctatacagtatcataatcatcaccaccaccaccatccctactgtctctcagatcgatttttaggatattggttagatgaaacagagtacatgtgatatatagccaaagctctcttctctataatattagctctcacagccattggggtcttcaaccattcagagctgataagcaaagatatcagcgtactggaacacagaacagtgccttgcatacat

SEQ ID NO: 141159 - DNA, 343 bp, Homo sapiens
tttgaatatgtctttacagtccaaattaaattaaatgaattaatttaactatcagtggaagagatcttcttctcatataataagtctgtaatttcatactgtagagctgatgaaaagtaggcaagacactcatgattttgactctgatggaggtgctgatcaaaataaaaattatttataggcagataacaggaaggagaaagaataaaaagcatgaaaagctaaaaaaaaataataagcctgcataattagctcctaagtaaggggcagactatacagtgtagttttgaaaatagttatcttagttgacctctggtattctggataaatgtcctaggggaat

SEQ ID NO: 141160 - DNA, 573 bp, Homo sapiens
ggaatgggtggttgaagtggaagtgcacacagatttgaaaaaaatcaaggccttgtaaggccaattgtaaggccatacttgaaaacattcagggtggcagaatttgggatgaagactgcaaagcagaattgaggcctcagtgactcctgcatagtgactgtgagattgatagataacagagaactggtgaagtaaccagatggcatttgggccttctgaccctttccagacttcatggaagtggcagaaaactgtagccaacatcagggcctcaaattgtggttccaccagtgactagctacatggccttgggccagtcaatttaacctctctgtgcctcacttgccttatcagtaacatgaagacataatagtatcctcaagtaaagtgcttacaataaggccagccacatgtaccagagcactaaatgtcagcatcatgaccatttctcatttgaacaatgagggctttgttaacagtctctaaggcacagattcttaaatattttggtctcagaatctttttacattcttaaaaattgtcgaagacgccaaagaacctttttttttcttt

SEQ ID NO: 141161 - DNA, 330 bp, Homo sapiens
caggagttgggcttagtagtaaaaagggggaacaaaataaaagaagatcaggagacaaagagcctacagtacaaaaaaggaaagacgaaggttgatattattagaaatacttcctgggcagccttactgtttgaattaggatcacccccacccccacctcccagaggtattagttgtaatgcagagacaaatggaaactagtcagatccttgggtcctagaaaagaccagctttgttcctggggtggtaacctagtacaacgtttccgttcctatttcttgacctctgaatggccccttctgctttgctaagtagatgatattattaggt

SEQ ID NO: 141162 - DNA, 191 bp, Homo sapiens
aaggtgtcacgccatgagaataattaatattttgatgagaattttctctttacaatgcatgtgcttctctaaaagtaaaagaaactgctctaaaagaaattttaggatcccatggagaaagctgggttcagggatgttgtgtgactagcacaggtcacataacaaagcaattcaaagcaaagaaccctgac

SEQ ID NO: 141163 - DNA, 419 bp, Homo sapiens
ctaaaattagtgggtgaaagttgaggaaaaacaggatatttatatgcctagcttacctcccccaaggtatttgtcaattacaaagggtaaattaggaccttacagtagagaaacctggtaggtcctgccctaaccaagtgatcaaggtcacgacataggaatgactatcagctcaagtatctcttgatatgatgtggagaggggcctatcgattctgtgttgttcttgccaaaaatacataactgcaatctaactgtgagaaaacatcaatcaaatccaaattgagggacatacaaagtaactgatcagtactcttcaaaagtctcaaggttatggccaggagcagtggctcacgcctataatcccaggattttgggaggctgaggcaggcagattgcttgagctcaggagtctgagac

SEQ ID NO: 141164 - DNA, 207 bp, Homo sapiens
aaagaatttgggtggaattcaagaaaagactctgggccaattacagttttagcaggtaaggtcccaaacaatgccagaccagacaaacagcttcaggctttgaaactaaagacagtggtctcaggttgtgtgacaaatagaattctatgcaatggcctgtctgtctatatagtctctcacacataagagcaatcattgccaataatg

SEQ ID NO: 141165 - DNA, 509 bp, Homo sapiens
tatcctgcacccctgggctcaagacctcactggggagggagtcttttgggccacccaccaaacagcactggcattatgcctctcaccctagaccatggttacacgtggtaaaacaaccccttctggtgatacattcacaactctctagtttcccccaaatggcactatggggagcgggagcttgccttttcctcagacttaaaacaataagttttccccgtgtttcccctctaatgctgttttcttttgaccaagcatgtctgaattctagagaagtcaggaggaacacacccattctcggtttgaagggactgatgttctgaagtacaactgggcacagtcccaggctcttcaggacgcttcctccattcacacagcggggatgtgattgttactgcgggtggtgtgtgctggctgagaagccactgtgaattgattcttcttctgaagtttatgtttctactttttggaaatgaataaattacagccagtccatcaaggaaattgca

SEQ ID NO: 141166 - DNA, 416 bp, Homo sapiens
agcgaggagtgtagagatggccaccgtttctgctagtagaacaaaagggaacactttattaatttcccttaattcttttcttcttttttttgagacagggttttgctctgttgcctaggctggagtgcagtggtgtgatctcggctcactgtagtcttgacctcctggctcaagcaatcttcctacctcagctttctgagtagctggaattacaggcacacaccaccatgcctggctaattttttttctttcttcaacttttattttaagttccagggtataggtacaggatgtgcaagttcgttacataggtagatgtgtgccatggtgatttgctgcacagatcaacccatcatctaggaatcaagcccaggatccattagctattcctcctgatgttctccctacacctgctc

SEQ ID NO: 141167 - DNA, 299 bp, Homo sapiens
tctacacacaacagaacaagttcgtgtggcccactcacaacacaatggcagctgcctcaacaacacgttcacaccaagcaaactacctgcttacaccattccaggtatggcttgctggaacccagaataagagttttcagtgttttgcttacatatatgtatttactatacaattgaatggcatcacatttttaataaagtggaaagctactcaaggcatgagattaagtgaaaaaggaaggatacatatagtctcacccctactatagtatagatacatatagtctcacccctactat

SEQ ID NO: 141168 - DNA, 322 bp, Homo sapiens
acattgcaggcacggaggctgggtgcagggccaggaggcagaaggtctcagtttcaggtttcaggcacaccctgaatgcactgggtgattcaatcatgtctctttccctctatagttttttaatttcctcatttgtactactcaccataatcccgaaacagtcttacttctgccccctggtatctgctcaccatctccttgcctagtacattctttcccactactctttgcctagctaattccttcccattctttaggtctctgctctttaggtcctattctttaggtctctgctgccttctggaaaccttctccagccact

SEQ ID NO: 141169 - DNA, 619 bp, Homo sapiens
agctgttctagaggataccttcccatttaatcctgcgagaagagccagaaacaatggcttcacaaggacctgcagccaagctgaacagcacagcacacacgaggaggtggtgtatttacaaataagcgaagaacgctgccgagagaaacacacagcaccggaagaccagtgtgcgtggaggccactgggccacacagccaggtgccaggagttgcaactcacctccacaatggcctgcctgctggcggggcaaccttacaaaatattattattatttactcataacaataacaattgctcggaaaataaaactcaaaacaggcaaaaccattggaacaccaagacgagacttctacaggttttattttaaacatatgtttctaaaacagtcagtggtgagtgccaaaaaacacagcatcaagtcgattttcctttttctgtgtacatgacttgctttggaaactgcctatacatgccctacatttttttctctcatcaaaaacaatcgaggaatggtacaaggagttctgaagcataacctagtcgtttcattcgagtggcgagagagggacgtgatgtgatgtgggtgccacgtaagtgtcgtgctgggggcagttgg

SEQ ID NO: 141170 - DNA, 335 bp, Homo sapiens
accacctagaaatggtgtttttaaatttcttaatatatctccttcttgtctttttctatatatctttatttcatagtcgagacaattttatactctgaatttttatcatataagtatctacccacattatcaggaatgctttgtaagcatcattttaatggcttcaaaatagtctatgatttagataacgatgatttggccatttttgtggtcacctaccacttattggagacatattatattctgagaatattatgccatttataggcattaattccaatatgcaaaagaactttgaaatgaaggcgttattattcccaattttacagatgctg

SEQ ID NO: 141171 - DNA, 616 bp, Homo sapiens
catggtgatcaaccctagagacctgtgtctattgtagatcgatgacattcaacagtcctgcagtgctggcatcattttgataaaaaggggtcaaagcaagtgggactgtgggcagatttttaatgcttagaacaattattccatcgaagttttcttgtgtcccttctgccttagcctttgtaggatagcatgcttgctaatttcttgctcatggggtaaggaaatgaagatttttgctaggtccgtaggattattaggactactcaggcctgaagctatgcctggatatagccagaaaactctcccatagcttgctccaaggagctgagatacagcagtacttccttgtaggtcatgattctgggtaacctggaagatgacctcattcatattctgtattctatgtgagacgttaagaaggtagaggtggccaagaaggaaattgttgctgcctttatggaacaaattatctgaaacccagctttctcgagggcttcattgaagtactcaactggggcacttaacccagtctaaggctggtcaaggaaggcttgctgggggaagtgtcttttgtattcacacctaaaggaggttattcaattagaattatccaaag

SEQ ID NO: 141172 - DNA, 299 bp, Homo sapiens
gtgaactcagtgcctccttcttcctagattctgcccagtcttcaagacagagttcaagatctagagcttccacatagctgtccctggctactctgacccacagggcttcccctcgtgacccctctgaggtctttgggttttacttggctttcactacacattcattatttggttatatggttatattttataagcctaaataaagtacaagcaactcaaaagaagggatgaatatggctgggcacagtggctcacgcctttaatcccagtgctttgagaggctgaggtgggaggatcac

SEQ ID NO: 141173 - DNA, 160 bp, Homo sapiens
aaggggggagactgcactgacagatggggtcctgcctctagaagtcaccaaaaggggccctgacagctgcccgtgaaccccagaagggccatcacagggaggcaggaaagctgaagtagctgtggggtggctacaaggagggcagcctcagaccacgtgg

SEQ ID NO: 141174 - DNA, 535 bp, Homo sapiens
acacaagccaccacaccagttgacttttgtattttttacttctactttttttattattattattttcatgtcttgagacagagtcttgctccatcggccaggctagagtgagcaatggtgtgatcttggctcaccacaacctctgcctaatgggttcaagtggttcttctgcctcagcctcctgagcagctaggactacaggcatgtcccactacaccaggctaatttttgtatttttaaatgtttgatggggaagtatgtgtaaagacagggttagaggttctgccatgttgcccaggctggtctcaacttcctctttttttttctcttctaatccaactttcagtttgtttccacagtacttagagtgacttgctattgttttaggttttacgttcttctctattttcctatgctcctttttgcatgctgaagtttacctttcagattttttctttttgtcacactccagccagagtgtgagagaaagagagaagattttaattgtgataattatcttttacctttgttcact

SEQ ID NO: 141175 - DNA, 718 bp, Homo sapiens
cacctcagcttcccaaaatgctggaattacaggcatgattctgattttaaatatttttgatacacagttggtcagattggtccgtgtggaactcagaaacagaaggccaaccatgcataacgaggcagaacttttggagatccttggtgacctcactgttgctgaataaactttagcccctcacctggtgataacaccaataccacctggttttcttccaggtatgtgcaaagtgtttcacttctgtgaacaaaaatatttgaaacaaaaaacaaatttacttcgttagcttgtagacatctgttgttattaaacagaccagtgccttccttcactgtccatgaacttttggtcctgttttttatgtaagcctatttctcctcatttattcactcttattttcaaagtagcatttgcccaacttttacgttgtcatgtattcagtattctccatcccaacctaacagtgaagagagcacattgtggcaggtgccttcctcttcttattgctgcatgattccaatccaatttcatggcttggtgcagggcctcttggtaaacgtggactccgttgttcaaatctagagcagacgccttctgggcggtcctacagatttacatcagtgaaagagatgagccggctgtgctgaccttttttgaggcttgcaatgtattcaaatgtgtgagatggttaatgcagctgtcaatattaatacta

SEQ ID NO: 141176 - DNA, 377 bp, Homo sapiens
caaaaccaatggtcactctgtttgggggccactaggagagatgaggttcagagaactccagtaaattaaggtcacaaggtcacacagatgaacagtggctaccactatcagctaggattcaacccaggtcggactctacagctggtgggatgcctcccttctcttagtatatgtgctctgttttgccgctcaggaggcaggaaagaaagatcaaggatgagtaggtgcctgtactcctagttaccttgcgtagcgctatgtgactcttacttgtatttcccaggcataaacctggctgcatggcaaagaaagccaggaaggcagcgttctccttttttgtgtagaagaaaatactcttgcctcagcagcagagaact

SEQ ID NO: 141177 - DNA, 416 bp, Homo sapiens
cagtggtggcagggagagttatgggatcacctgtgaaacggaccaaggcagggatgggagccctctgtgcagcaaaagtggatgcaaggcctgcctagaagcaagaggatgaaggaacctagttgggtcctggtccactgcctgcctgtgttcacaggtcaaccagtaaaggaggtggggtagagaattcaatcgtgggctatctatccagagatgtgtttacaggtgtattatttcacatttgtgttcacgtttggtgtcaaaaacacatttatacatgcctatttcatgtttaagtattttcacattttagttaacccttaaatatcattgttgaatgcggttgtcattagacataaacttgcatattcactgaagcttttgtttttattttaatcaaatttataattgtgcac

SEQ ID NO: 141178 - DNA, 302 bp, Homo sapiens
tttttttctttactaataaaagaaacacactcccctgtgacagaagacaacccaaaagatgaggcttggaagtcaaaaagcatgtctgcatacttaaaacggtgactctgtcctggggccatgttgttattgtaaagggtcagcaaatgcattcgtacaccaagcaccagcagtaggcagaataaatgtcacagaataatatattatgatgcccctaaggtacagagaagctactatatttaataaaacacaagtttatttcagagagttaccgagttcataatcattctgtcacaacatat

SEQ ID NO: 141179 - DNA, 466 bp, Homo sapiens
agaaagtggaaggctcatcaagtttatagacaacagacgtgtggcctgtcccctggctctgctgcctttctctgagattagaggagtggaaaaaactgtccaaacccaggaaagaagatgagagccaggcttgccccctcacctaggtttgttctgctgttcaagtataacatggaaatatgttgccccatacagatctagctttttccagaaatagggcatgcttactaaattgagacaatattgacgtacatgtgttagcttgtaaagggaagcaaaatacttcacagtgaattgttgctaccactctggtgtgtatgcgtgtaaatgtttcatgcagctgtgtgtacactttaaaacaattgttaacataatggcaccatactctatatttggggcttagattggccttatccattttcaaaaaatagctttattaagatttgaagtgtataattcagtggtt

SEQ ID NO: 141180 - DNA, 426 bp, Homo sapiens
ctcaactaccagcccttaaggcttatattccagattttgaattctttgtggcacctggacatttcttgttctttctttaaagcttggctctattaaaacaaatttcgttctattttctcaatcttgtagtggaaggaggggttgtccatgtcattttaatctgctatcatacatgagtgcatctgtgtatatttttaagagatatgattctaagtcacgttcctcttgggtttcaatatcttacccatcatccttttcatcatatcttaaattacaaagaaatttatttggatgccccttcttttcttgccaaaacacatgataaaatgagaaaaattgaaaagaatctttaaataatccataccctctggatcattggcttctaaacaaaatgcagattttttctttttaattccattgcttgaa

SEQ ID NO: 141181 - DNA, 246 bp, Homo sapiens
gtccatggtgactcagccagtgtaagccatttcaattctggttagatcatcattcctaagaccatcagtttgatgtcatggaccctaagcctccttgctgtttcctttaggaaaggcagtggaaatttacaggcactgaaggaccctgtcaaaggcaccaggctttggatggagccctgaatgcaatgtgtcacagtgagtatttacacaccaaatggaaggcttttcaagaacagaaggtgcaga

SEQ ID NO: 141182 - DNA, 587 bp, Homo sapiens
aagaatatgtacagaatgcaaagcatgaaatcacaaagggacagaaatgttttaaaaatgaaaggaactataatatagttactacactgtgatttgagcttagatacctcttgacatctactaaaaactacattgttgtggacccacatagcttcacctgctctacgcggtagccttgtacacgtgggggaaaagtgcagccctacataatggtagagttcaccagccactataatggtggtattctccatagcactgtagtatccaaatgttgctgtgataccattatctttttaaaaaatgctgaattatctgcctctcaggatcaaaatcaacgacaattatttgatctacatgaaaataagttaagtatctggacagatttgtgcatgcctgcgacagtcacaatactacattgtagcactgtaaaacaatcttctattgaagtaataattccttctaaagttcaaatgataatgctgaagcccaaccaggtaatgctgcaaggaaacctctgtctgcgaaagatgaaattaaacaaacaaaagctggaactacttccttaaaacacaaaacatgcagatctt

SEQ ID NO: 141183 - DNA, 403 bp, Homo sapiens
ccttgagcagtggcactgagtcctgtggctggcagggagggaagtgagacagccagcagcacaaggacagaaagaggaaagagcaagtctgcagctctagaagggaggggcaggcagcctggctctgaggctccaggtatgccccctgtgtggagctggggcagcggggcaggcagaccattcatgcagcaggcagtgaggcatgtacctaccatggctgatgctcctcaggggccactgatagtgattctgaaagacagcatcaaatcacatggcaggtcccatgcatgggtggggcaggcctgggggtggcggacacacgcacacgccagattgtgcacacacatgctgtgaggccccacggcccgcatgcacactctaacacatgcccacaaacaacacg

SEQ ID NO: 141184 - DNA, 425 bp, Homo sapiens
tatatgcctttaagaaaaattaaaacacagagaactttaactggcatgattttgaaactgaccactacacacatatgtatattcctgttttatcagccgagattacatgacaaaataaaaataaatctattttctattctatttattctgatttttacactttttattaatctacttgctttgttttgaaaccctctactaactgaaaactaaatagtttgccttaaaggaagataatatattgagtcagagaagcagctacaggccatggggtagtaaaattcaaatctgatccaaagttaggtttttcttttcattatattctctaacagttcaatgactaatgtacttctcttctgaggaaaatctgccccgcaaaagaaggcctgctgcaagctgcattaagaaggctgtcttcccctggg

SEQ ID NO: 141185 - DNA, 202 bp, Homo sapiens
caatccccttgccctccaccccctagattattttaaaccacatttctgacttactgttttaaatgcaaatatttcagaatgtatcttccaggaagaagacataatgataataccattatcatatttaagaaaacattaattcaataatgccgcctaatatatacactccagattcctcaattgtctcaaaaaatgccttttt

SEQ ID NO: 141186 - DNA, 389 bp, Homo sapiens
cgcccaccccagcatcagagccatggcaattcccaagaaaatatgagatgcgtgaatatgacaaatggtgtgtatgataacaaaaatctcagagttggagggaggtatctttagagtcatccaattacaacaggccactttacagactgggaaagtgaaagggaatgaggcttatgagagcaagtagaaagcaccccaatggggagtgtggccactgacaccgacgctccagagatgtccagcgaggaaaatgagatgttctccatagggctcagcaacatgggggtccagagctttgcagagcctccctgaagagtactgtggggacaatcctggtggtgacaatacaaatccagggacacatatgctgctgtgggcattcccttaga

SEQ ID NO: 141187 - DNA, 442 bp, Homo sapiens
gtctccaactcctgaccttgtggtccgcctcggcttcccaaagtgctgggattacaggcgtgagtcaccgagccctgcctttagtatctctttaattgcttatctactaatgatgaattctcttagctttgatttgaacacatcttcatttttaaagaccattttcactaggctagaactgtcaggtttttctagcacatcagctcttaagaatgcccatatgttgtcttccagcttccactctcctactcaaaaatcagctgtcagcctttttcttgctcttttgaaagatattaagtcttttttcctctcagtttaaaatttttctctttgttcttagattttaatagcttgaatatgatgtgcctaggtgttagttatctttgcattatattgcttagaatttgctgagtttcttggatccatagttaaggttttttgt

SEQ ID NO: 141188 - DNA, 461 bp, Homo sapiens
ttccttctagcttagggaatctgtttcggtggctcagagaaggatctgttgccaatcagccgatgccaggtctccggtgctggggatggttactaggcaggagaaacaccagtcagaaaaccctggactttcagaactgtgcatcaggcgtcctggcaacctgttgggcaggactgtcaggtggaaagcgggctcgtggggttcgcccctttctgtcggcttcacacatgatctcagcggaccttgcgtgtctgcacggcattctcatttcctggtaagctgtgttttgttttgttttttaaaatttcttctctacctgaggaccctcgccttttgttactagctctggcccatatctgtttttttgtgacggtggttactgtcttttcacattctgtagggggacctgtcgcagtatgtaacattgaacaaaatagacagcaagtcccggggtggccatc

SEQ ID NO: 141189 - DNA, 353 bp, Homo sapiens
ccttgatagctcacaactgtctgtagaagaaagtgccgtctccttttccttctgtgggggctcaaggccttggcactctcaatcttatgtgtcatttcaatctttattcccttggctccctaatctggagttggcacttctgtcaaatttcatgctttgtctctgtacacagcccaaattctccatgtcacaaagacattgctcattctagttcctccatcaaaaattcctcctggtgaggtatggtgactcacatctgtaatcccagcactttgggaagctgaggcagacagattgcttgagcccaggagtttgggaccagcctgggcaacatggtgaaacttcatctctac

SEQ ID NO: 141190 - DNA, 519 bp, Homo sapiens
acggagagccaggcactgcccagggcccaggaccctctggcttcttgcagctcagggcaagtgctgcctgcctatctcatgaaaaatccaggcagctggggaaaccgaggactctgactctcaacagagcatggcctcgttcgtgaccaaggacggcatctctttgcctggaggtcggtcatgtgaagcaggatacacactcatctgtctcacacgatttacagagtcatccatagagtcacagaaggtgctggcagcaccacgtccactcaatactgtggatatcggatagggaacggaaaaggcgacagtcaccgagagtgaatggtcccttgtttctatgtagacagcatgtctcttggtcttatcttattagataactttggaatcatatcaatcacccatcatccaactatctaccatctaccttactgatctgtcatctatcacctagaatctaaacaatctatcgtctgttccttttctctcatacacactaagtaagcaggagacatatgt

SEQ ID NO: 141191 - DNA, 548 bp, Homo sapiens
cagagaggccaagagagttgtaggaagtcatcattaagaaggctcccagggatccctcctcctggtgtcgcccaatatgtaacacctttcctgtgaatgagggctgatcctgctttaagtgaacagaatatggtcaaagtgatagaatgtcacttctgagattaggttaaaaaagactatgaattctgtcttactgtccctccgttcctctcgcttgctgtcttagctcgagctgctataataaaatatcataaactgggtggtttaaataacaaacatttatttctcacagttgtggaggacggggagaccaaggtcaaggtgccacaggtgtctagcgatggcttgcttcctggtttgtagatggcagccttctcactgtgtccttacgtagcagagataggaaggaagctccctcaggactcttctaaggataccaaccctctccatgagggctacacccttagcacctcctgtaatcctgattacctcccaaagaccctgcctgctaatatcatcacattagggagtacagtttcaatatgtga

SEQ ID NO: 141192 - DNA, 312 bp, Homo sapiens
gttaaaagaatttgctagcactttaaatgttggattgctggcgagaatagaaaagcctgtctcccttcaggcaaggtcctgccctgtgcttttgtgtgtacccctctgccctgagaatagctgggctattggaggttcacacagtcaataaccactgaactgcacccgtgggtagctctccagtgctgcctgctcatttaacaggtccttatggagatgggcctgatacacaagtgctggcgatcttcaggacaaacccaataaaatgagagaacctaagcttggcttctaaccttcctgggaaaaggaagt

SEQ ID NO: 141193 - DNA, 392 bp, Homo sapiens
cttaaagcaaactcggtacaacgtgatctgcacttacaaaactaataacaaattaataacaaattagatctctgctcctgttaccaatgaccaatattctatgtgcaagagagcataagtagaaggagacagactttttccaaacaaacagatcccttgagcaaatgccctttaaagtttaaaataacaacccccttgggttgtgcaggcctttaacttttcagagagctttaagtaccttaactcttcttattttattaaaacacccaggtcatgggttggttttttttctttccaagttagttaaataaataagcaattatgacgcagcgccacatggccaacagcttttagcttataaacatagagtttgaaaagcagtacttagaggc

SEQ ID NO: 141194 - DNA, 250 bp, Homo sapiens
taggctcagacatctatctgatggtgtgtgtttctctagcttaccagttcatttagagggactgcctatttagcagaagggaatttcacctaatgacacttgcttccacgtttctcaggcctgatacatttcagtaatgtataattcttttttccaccattaaccatggttttggtgtgtcttttagcaacagaaatgctattagctactgatatccctgaagcagagtccttgaaggaaaacgtgtttg

SEQ ID NO: 141195 - DNA, 433 bp, Homo sapiens
gatcaatatcaatatttttaaaactgcaatgaaaaagaaaaaatgagccaggcacagtggttcatacctgtaatcccagcattttgggaggccaaggcaggtagatcacctgaggtcaggaattcgagaccagctcggccaacatggtgaagccccatctctactaaaaatacaaaaattagccaggggtgatggtgtgcacctgtaatctcagctacaggggtgctgaggcaaaagaattgcttgaacccaggaggcagaggttgcagtgagccaagattgtgccactgcattccagcctgggcaacagagcaagactgtctcagaaaaaaaaaagaaggaaaaagaaaaaaatgggtaaataacaaataagtcatccaaagaagaaacacgaatgaccaagaaaatggaaacagtaaaagaggcatgcaaa

SEQ ID NO: 141196 - DNA, 1250 bp, Homo sapiens
gtaaccacaatcaagttaactaacacatctgtcacctcacatgtttaccttttctgtgtgtgtggtgagaacaactgatagactcttagtaaattgcaagcacacaatacagtatcattagctacagtcaccatgctatcctttgcaccctcagaatatattcatcttatgaatgtttgtactctgactaatacctccccagttacctaccccttcgccccaggcaaccatcatctactctctgcttctatgagttcaacttttcattgcagcactgttcacaagagctaagatacagaaacaatttaagtgtgctgtgatggatgaatgatgagaatgttgtatatatacataatggaatacgattcagaactaaaaatgaaggaaatcctgccacttgcaacaatgtggatgaacctgcagaacattatgctaagtgaaataagccagacacagaaagacaaatgctataggatctcacttatatgtgaagccttaaaaagaaaatgaccaggtgatatggtttggctgtatccccacccaactctcatcatggattgtagttcccataatctccacgcgttgtgggaaggacctggtgggaggtaattgaattgtgagggcggttatccccgtgctgctgctgttgtgatcgtgagttctcatgagatctgatggtttctgatggttttataaggggcttccccctacttcgctttgcacttctttctctcgccgccttgtgaagaaggacgtgtttacttccccttccaccatgcttgtaagtttcctgaggcctcctcagccatgctgaactgcgggtccattaaacctctttcctttataaatcacccagtcttgggtatgtctttattagcagtgtgagaacagactaatacaccaggcaaatttccctacctcatacttgctttctgaagtttccagagatttccatttgaaaagaatgcctcttccaactctgcctcacctagtaaccttctcatctacaccacagtgacttctcctgtgaagcgaccttcactcagttatttcaaggatttaaaatataaaaatgttttctaatagttgacaggggggtgaactagaaatatccattgtaaatatcttttaaatatactggaaattattgcttacatcttaaagccatttgtcactgaatactaaaacatcaaaccattgatttttaactgcttcattaaaatataattcacatactataaaatgtatct

SEQ ID NO: 141197 - DNA, 1063 bp, Homo sapiens
atgccagaggcagggcaccggggagctcgcggggaaaggtcggccgagagcgtgcgtccgcggggagtgcgcctctgagcgcagcacgcgggtcagaaggagcaaccgacctgctggtgaccagagaacggagattttaagaggacccgacccaaagaggaagaacatttctgggtgcgcgccccaggtctttgcttgcagacggggagggggagaggctctgagccagagacccaggagggactccgagaagccggccccagcacctggaggtttctttcgcccgccggccgcatccggggcgttctacttcacccggtggtccagtggcgcctcctgacagcaccccccgtccccctcagagagacaggcgagttctgtcccgtcaccatcctgcacaaagaagccccaccgcagccgaggacacttggcatttagtttccggcccgagggcagcggcgcccgaagccgggctgggagccgaggcggctgcttcggggcagtcgcttcctgcggggcggggagggggcgggaggcggccgcgctgggttcgccgccgccggaggctgcacctgcctcagaggatgcccaggagcccgcgggagcctctccggatcagaactttttaggccgcccgcccccatccccgcagtccccgggccgtgctccggtaggcgggggccgagggggcgccgcggcgcgagtccctctcctgccccctcccccagctcggccgcccgccgctttgttccgggtgcggcgagggaaggcgaggctgcggcggatcatgcccatggtgtagccgccaagcggaggcatggctgccggaaggttactgctctacactggcctctcgctagcgctctgcgccctcggcatgctggccgtggccatctgctcggaccactggtacgagacggacgccaggaagcacagggacaggtgcaaggccttcaacacccgccgggtcgaccccggcttcatttacaacaataacaacaacttgccgctccgggcgagccgctcgcgcctggaccgctgggagggcaaactcctccgggcc

SEQ ID NO: 141198 - DNA, 399 bp, Homo sapiens
gctcaatgaaccccaattgcaagaaacaggataaaaactacattaagaaatgttatgatcataatcaaattgtataaaaattcacataaagagaaccttaaaagcagcttgagggaagaaatcttccttatatacttaggtattttgcaaatacaaaagtgacagcatatttctcatgaaaacaatgcaagttgcaagacagtgcagcaaaatctttaaaatgctgaaaagaaaaactgtcatcctatattttatacccagtaaaaatacgttttaaaaatgaaggcaggctgggcgcagtgactcacacccataatcccagcactttggaaggccaagatgggcggatcacttgaggccaagagttcgagaccaaactggctaacatggtgaaagccc

SEQ ID NO: 141199 - DNA, 156 bp, Homo sapiens
atcacctaggagttaaagaccagcctgggcaatgtgctgagacccccgtctctaaaaaaattttaaaattataaaaattagctgggtgtggtggtacatgcccatagtcccagctgcttgggaggctgacatgggaagatcacttgagccgtaatt

SEQ ID NO: 141200 - DNA, 248 bp, Homo sapiens
tgagatcacagcactgcactccagcctaggcaacaacagtgaaactccacctcaaaaaacaacaacaacaacaacaacaaaaaaacagttaagagaatcgtggagctgtgtcctactcattgtatttactttcctaaaataaaacaacattatagaaaacattatgaccaggcgcagtggctcaaacctgtaatcccaactctttgggaggacgaggcagacggatcataatatcaggagtttcagac

SEQ ID NO: 141201 - DNA, 757 bp, Homo sapiens
gttgcctcctctgacgagttcctgtcactgtccctgagctccacggcaattcctagccaatgcccttggtaaagtggcacaaattcctctccatgggtctatgccccttcctgagagaagaacctgggtggtggtgccagatttaacttctgactgaattacattgattggacataaagccgctcctcctttcccctctgtgagcacctctggaatatctgcatcctaagggcggccgtgcgacgagccttcccagacgcgctcctcctaccctgaggagcccggccttcacctttaccgcactggccatcagactgctttcccgccaggctggctctatcttctcaccccgttagctccagggaaaaccgacactgtcctctgctgaaaagagcccagggggcctgctgcctcttgggaagcagtggaagggcaggaagtctcaccagggctccctctggcaggaataatgaagacatcaggtagacaaggagtcacctggtcccaggtcactaagagaaggtgaggaggttaccagctagacggaggaaagaggcgccaaacaccagcctccgcctgcacttctgtggctgggctggacgtcacccacagctccgtgccatcaggggaatggtggaaaggcctggcatcagcacgcggcctccctgcccaggtccagccctgtgggtctcgccgagcctgcagtcgccttcattctcaaggtggctatggcatcttcccaggcagacagcccttc

SEQ ID NO: 141202 - DNA, 316 bp, Homo sapiens
caaaaaataaatattaattctcactgtggcctcggtcccttagtgaagccatgcttactccaggaactgctgcgatgaagagtggtgaaaattctgaatgaaaagcagccctcaaaaacgttaaaacccatgctattaagctttacaccaaaaaataaattcgaatttttaaaaagtgagaaatggggaaaagaagaggaggcttaggatggtcaaggtggcacctttagcaccttgtacttaaccagataagttcaagactgtgtcttaggccgggcacggtggctcacacctataatcccagcactttgggaag

SEQ ID NO: 141203 - DNA, 210 bp, Homo sapiens
ggtagagatggggtgtattagtattttctcacgctgctaataaagacatactggagactgggtaatttataaatgcaaaagttttcattgactcacctttcacatagctttctctctctcccccactccctacacggcctccccgctttctctctctctctctccccaacaccccgcaaggcctccccaccccagctccccacagggcct

SEQ ID NO: 141204 - DNA, 477 bp, Homo sapiens
ccggtttgctgggtgtatcttatcacactgtcctccatatgtgaatcctaaaccttaaaaacaatgtttctttagatactttcatcaactcaactcgaaactaaaacaacaggctgggaggcagtgagtttcttgagggcagaggttgtgtcttactcatctctgaattccacatatttggcttaaaagaaacaggcaaaaatgttatttgaggataaagaccagagggaggttgagaaagggaagaaagaagccacaaccttctgtagcattatcttgtcaacgaaagttcatatattttcaataagcatctactaagccccgtaagagaaaaaggtttgttgtctgcttggtactaccttaaacattgggtgtttgatgcagacgctgcctttactgagtgggaaatagccttgagtaaagtgtgaagcaagacttcaataagtccttaacgacagtcacaaccatttgtaccct

SEQ ID NO: 141205 - DNA, 253 bp, Homo sapiens
tgggttttgaaaacactgtcctgagtgatattggtcaaacttccccttctctgcaaaattagcaggtgtgcactggtattcttagggcctgctgtgttactgacctgtagaatgtttgttaagtagaagagcaaatgaatgaataaagaaatcagtgaacagataggtggcactgtaccagttagaattgtacttggtgaaattgcagtgctgctgtttacttagccttgtcatctgtaaaatgggtacagca

SEQ ID NO: 141206 - DNA, 393 bp, Homo sapiens
agtgatctacccgtctcggcctcccaaagtgctgggattatagatgtgagccaccacgcctggctctctttttgtatactttcatgtgtattgactagttccctcttttgatgatctatttttgtaaaatgtcacatgaatttatcattggaagatgaggcaacacaactacatactttactgtctgtgcatgaatggaataacagctgcccagtgaccagtcactgacagacttagaaagaagtgacatacatgattggttgctgatcataatgcacgtcttactgacataatgatctatgtactgaagagctggtgttgttttaccaaatcatggtaactgaagtctgtgcctatcagagctatgcagaaatgaggaactgccagtgtgtg

SEQ ID NO: 141207 - DNA, 468 bp, Homo sapiens
ttaaaaggtgttctcaaagacccttgcctctcagtagccccatcccaaaaaggagacggaaatgtttgtatggccaggcagcaagtcctatccatcaggaaagccaggaactctcggattccccagaaaccttgtgtgccctcaggaaagactccactctgagactgggcaagagatgccaagttttcagttgtggatcttggcagctggcagggcactgtgattcaccagggtgcccactggaaatggcgccggggtttctgcacgctctgcagaggaaggcggtctggagagaaatctggaagctcgtgcccacaccagtctcagccaaggccctgggcaggccctgtacagacaagctggccctcccagggtcccgccgttattgcctacaggtagttcaaacaggaactgatttgtcaagatctgatcttaggaatgcactgtttgtatacagaacaccctctg

SEQ ID NO: 141208 - DNA, 589 bp, Homo sapiens
agtacaaacagcaggataatcatgcgttctaatgatgatgtacacttaaggaaacacgcatgtccgttttagaaactagtgtccgcatttccttcctcagagcatttccttccacttctttgggttgtttggactctaataaattcttctatgtgatctttattttattgagtgcagtggatagctttgtgcctgcagcagtaatactccgattgcaataaatcaaattcacttcacttagaatgcacctgtgaaaagttaatcaaaaaagcataaaatcttattttctttatagtaagtaaaatttcagattgtgtttaatatgatacttaacaggaagaagtccagttgtttacactgatgaggaggaaaagctgtctttttaccttaattaaatgtacctgaccaatgtacagcagcgctcccctttctaagacaaaccagacaatctccaattagaatgtgcccaatttccacttaacaatcattttctggaagttgagtgtccttgtcgtagatagcattcacacagaacaccatcctaactttctctttgaattggaatcaagtgctgctatctgctgattgg

SEQ ID NO: 141209 - DNA, 460 bp, Homo sapiens
aatgattatattaaggtgatggcattgttggaaaggaagttcctatttatttaaaattttttgtaatctggatattacctatacaataagaaatctggaataaaaccgtatttattagtctattgccgtgattgtttctgttctatataaaaacacgttttatttatctaataaagaaaaaaccacttttgaagatttccctgggtcacgttttcccgctgctgatcatggctttggcatcgttaaatgttttcctaccaattacaaataagcaatactctcagtatatgctttttacaatatattctcctcattgccccaaatttacctgatgctactcgaagtaatggctggatggtagccattactaactaatctgcaaagtaccatcagctctataattaaattccagcatctaacataaataaaaattagagcagatcaattccattctccccca

SEQ ID NO: 141210 - DNA, 471 bp, Homo sapiens
aaccagaacaatcaggcaagaaaaagaagtaaaaggcatccaaataggaagagaagaagtcaaactatatttgcagatgatataatgttataactagatcttggacaaggtagcataagaaaaagtaaatcgataaataaaaatacaaaatacaaaataattttatacctagaaaaccccatagtatctggccaaaagatcctagatcttataaacaacttcagtaaagtttcagggtgcaaaatcaatgtacaaatatcagtagcatttctatacaccaacagtatccaaactgagtgccaaatgaagagtatgatctcattcagaacagacacacacacgcacacacacacacacacacaaacaaaatacctaggaatacagctaatcagggaggtgaaagatctctacagcgagaattacaacactgctcaaagaaatcagagatgacacaaatggaaaaatactcta

SEQ ID NO: 141211 - DNA, 727 bp, Homo sapiens
gtctctagatgccaatgagtgcttacctcatcaggtcggggctctctctgcagacaaacctgggtcccatgaacctacatctttgaaatgaacacaatgggactgctggacttgtttctccttcccaatttccaccttgaaaaggcgcaatgagctggaggagccacaggacttggtaaaagcagaagcgcaagtgcctggaaactcaacactcttccggtcaaaggaggcgacgtggtctcgctctgtcacccaggatgcagtgcagtggtgccagcatggctcatggcaacctcgaactcctggactcaagagattctcctgccgcagcctccaagtagctgagaatacaggtgtgcaccaccaccaggcctggctaattttttttttttttttttttaataaagacgagatctggctatgtaacaaaaaaaaccacaaaaaaacacaaaaaccgtgtgcggccgccccgggccctgaaaaaagctgcaaacccaccagaggggccggggcccaagaggacagagacaggggccaacctggtcccagagaaaactccgggacaggaacaacggcgacgggaatacccacaacaaaaaaaaagcgcccgaggagaacaccgagacgttctgagaaaacacccacaaaaggagacacaagagagcacaaacaggcgactatacagcacgggggccacaaggaggcacatcacaaaacgcccacacgg

SEQ ID NO: 141212 - DNA, 558 bp, Homo sapiens
acagagttaggcaggtggccatgtgaggcaggctattacaatgtaagtctagtgagcagtggattccagcaggagaattatgtctatttgttttggggagagtgttttgagacaaggtctgatctgtcacccaggttggagtgcagtggtgtaatcacagctcacggcaacctcaacctcccaggctcaagcgatcctcccaccttagcctcccgagtagcacatgccactgtgtcgagccgtttgtttttttaaaatcctctggaaactgggaaattgactgaaaggtagtattcctccaagcccttgaatctaggctggccttgtgactactttgatcattacaaggcagtgggaaaggatgttctgggacttcaagcccaggcctcaataggactgccagcttctacttccttctcagaacactagctctgagcccaagctacatggagaggccatcgtcctagctgagaacctagccagctgccaccatgtgaatgaaccacggtgaacactcagcccattcaagcccacaaatgcccacagctccagccacat

SEQ ID NO: 141213 - DNA, 268 bp, Homo sapiens
ttgtgaatgaagagttgccttgtgttgagagggaattgtctctgaggaaatttaatgaaaggcattgagaagtgttcctgactttgagaaacttattttgaatgaagatttgccttgtgttgagagggaattgtctaaggcagatatggaattcaaatttgaaacttttctgttgaccaggttcaggattatcggtagcatggaattatcatgactcactgaactccatttaacctgaagttatagtcatttgaaacttgctgatatt

SEQ ID NO: 141214 - DNA, 249 bp, Homo sapiens
ttacagtttctgcctccaaatctgcctgagtcatctgtctccttgtacctcagtggccagaaacagctgaacactaggcaaggaagtgagcacaaaaaaagacaaatttggggagagaaggagactttgagagacaggctcaaggttgacaactctgggaagaccctcggccccctgtgcagaggctgttggtagggaggaggctggttcagtggagttgggtccccagtccatcctagaaaaccctgc

SEQ ID NO: 141215 - DNA, 381 bp, Homo sapiens
atcttaaccttggcaaaataaactttctaaattgactgagacctgtctcagatattttggggtcacacaaaggagataaaagtgaaatatgatccccagtgttgcaggtggggcctagtgggaggtgtctgagttatagggatggcttcgtgaatggcttcgtgccttcctggccgtaatgagcgggttgtttaaaacaactggttgttttaagagtgtgagatctggttaagagtgtggcacctttccctcctctcttgctcccttttttgccatgtgatacgatagctcctccttccaccatgattgtaagtttcctgaagccctcactagaagcagacgcctgcactatgcttcttgtacagcctgcagtaccatgag

SEQ ID NO: 141216 - DNA, 732 bp, Homo sapiens
cacacacacacacacacattcgtatatgctaagtactcaatgagtggtggagatgataatacagaagttcagaggaaggagacaactttgcaactgtgttggtttgagaatgttttataggctatgatgtcaatatgatactttcagtggtctcctaaatgagacagagcaatagaaaacttatttagtgattatgatatatcctaagtattaaaagaaggaacacccagatagcagacatttgacaaattctcactcggtgaatgaatttgtaaatttcattagcacatcaaaataagtatgttttaaagtaaatgtggcatctctgccctcagagctaagctttctcctgtcttccatgttaacccaccaaaggcattactgtttaccccacaacacagggtcagctcttcaacctcatctctcttctgtcttctttctttctttctttatagtgaatgtatttcctacagaaacagcctgtaattcaattgccagtgctcttctcaattctcagtgctatcacttttttctgcactatattgcttcttccctaaacctttctaaattggcttctggcctgtctctccaccctctactcactgtcagattaattttcctaaaatctaacattgaccatataatttcccagcaatgaagactttttgctttttaaatgaatttgtatttcttaatgaggcatttattatactctactgtctgaccttaacc

SEQ ID NO: 141217 - DNA, 142 bp, Homo sapiens
tgtgaccccagggtaggttaacatcgcagggttgtgacagaataagatgatgcctttaaagtggctgctgcttgcatccctcaaatacgagtgttcttctggcctgccctgttttgacctttgcccaggcatccagagtact

SEQ ID NO: 141218 - DNA, 242 bp, Homo sapiens
ggaaacccatgtctgacatttcagagcagggtaagtacccactaaagatgtctctaaaagtcttggtatatttctgacgccatccccttccactccaaggctcccagctttggacctcttgaatatacgtactcgttgtaaatacgacaagctttaactggaaggtagtaatggtaaccttcctttgagtccttactgtgaaccaggcagaatgctattttgtatgcatattctcagtttac

SEQ ID NO: 141219 - DNA, 199 bp, Homo sapiens
gtgatgaatttcccattcagggtgacaaaaacttacgcatctaacttccttgcgctgaaatccttaaaatttcttaatgactttcaacataataggcttaagaatcgttttttggttttttttttttcattttgttttttattgagatggagtcttgctctgttgcccaggctggagtgcagtggcgtgatctcagctc

SEQ ID NO: 141220 - DNA, 163 bp, Homo sapiens
tcctagattgggactcctttgattaaagggaaaacctaattagataattgtttccatagaaacttaggtatatttattattgcttttataggcctcttcaattactaaaatgaaggaacacactttaagcatggtccaagtttgcataggaggtgcatttctt

SEQ ID NO: 141221 - DNA, 698 bp, Homo sapiens
ccagcctgggtgacagagcaagatcctgtctcaaaaaagtaaaataaaacaaaaagttttcagtgaattgctgtctttgcttcacttcctttcattctttatttaatatttatttttaatttacattacattaagatttacttttttgaaagactgtctataatttttgacaaagatttagatccatataaccaccagcagaatcaaaatacaggacattttcatcccttcaaaaatttcccggctgggtgcagtggctcacgactgtaatcccagcacttggggaggccgaggtgggtggatcacctgaggtcaggagtataagaccagcctggccaacatggtgaaaccccatctctactaaaaatacaaaaattagccaggcgaggtggtgcaagcctgtagtcctagctactcaggaggctgaggcaggagaattgcatgaacttgtgaggtagaggttgcaatgagccaagatcatgccactgcattccagcctgggtggcagaaagagactctgtcttaaaaaaaaaaaaaagaaaaaagaaaaagaaatttacttatgccctcactcccttttatggtcaaatcttctcccattcctaacccctggtaaactcatttaagtccttacacttcttcctcattcttccttgaacccacttaaatcaatctttcatccttaccactccattgaa

SEQ ID NO: 141222 - DNA, 334 bp, Homo sapiens
agtagacatagttaatatagaaacagatgagcacagctgtgttccaataaaactttataaatggatactagaatttgaattttatatagtttttacaaaatactattttgatttttttaaaccattgaaaaatgttaaaaagaggccgggcacggtggctcagacctgtaatcccagcactttgggaggccgaggcgggtggatcacctgaggtcaggagttcgagaccagcttggctaacatggtaaaacctcatctctactaaaaatataaaaattagccgggcgtggtggtgtgtgtctgtaatcccagctacccgagaggctgaggcagg

SEQ ID NO: 141223 - DNA, 297 bp, Homo sapiens
tgcaatcagacatgctaatctatgtcagctttctcctttatgggattggcgtctactgagaaaaaaacctaacttttcttcataacaacaagattctgttctttaagaatatttcagcaccgttaattagaaagaaggttttattaaccataaggctagcactaacagaccacagagctgttttttaaagtactgtatgccatagctgccctgctttttctctgtctaaaacttcattttgttatacgctcatcaatcacttaagtcattaccgtaaatcctactgttgttaatttt

SEQ ID NO: 141224 - DNA, 158 bp, Homo sapiens
gtgtacttgaggacgccaggtgaggtttatggcaaatctgaggaagagaccgtggccaggtagtgtggcgcataccccagcttagtgacctgaggaggtcgtgagtgctcccgccaggagcctctggtttctaaaaggagctcctgagtttctgtttg

SEQ ID NO: 141225 - DNA, 345 bp, Homo sapiens
ggaaaggatactttcttttttcttccatctttcctttttatattttttactttgtatgtataacatacatgcctatatattttatacactgagggtagcccatttataaattaagagcacattatattcagaaggttctaacagggctggtcttaagtgaaccactgtgtatataaatatgttggaaaacagctgtatacatttttgggcaacggttatgcataatatttaccaggagaatttttttcttaacaagccaacatttaaaatttatgttttatgtcaataaaagaaaatatactttattgtgacttcaactatatttcttatcccttacatttttat

SEQ ID NO: 141226 - DNA, 115 bp, Homo sapiens
atttaacacttcagagcccagatgatttgactggcataggtttcagctgtcctgcccaaaacatctttcccattatcccgtcttaatattcaaatttgaacatttaagattattt

SEQ ID NO: 141227 - DNA, 462 bp, Homo sapiens
tcactgcaacctccgcctcccgggttcaagtgattctcctgcctcagcctcccaagtagctggaattacaggcgcccaccaccacacccagctaattttttgtatttttagtagagatggggtgtcaccatgttggccaggctggtcttgaactcctgacctcaggtgatccacccatctcggcctcccaaagtgctgagattacaggcgtaagccaccgcacccggcagggacacagttttcgaatccttgccgatttgagtctttactgagcggcttgatttatcttggcttgggaagttgtggatttttagaacattgggtacacttgtattaaaatagatgtatactttcttaagccaattgcacatttttctggagtatgcccaagatgagcttttctcaaggcatcgcctgaagaacagcagtcctgcacaatgttctgtggtgaaagggttctat

SEQ ID NO: 141228 - DNA, 154 bp, Homo sapiens
cttggtactgtgacatcagagtaaaaaatcaccgcgtcactgggcgaagctgaaatattcaaatgttacctagcacctgactagaacaaaaaaacaacactggtgaaaactacaccaaaatagagcaatctgtcttgtttgttgtttggttttt

SEQ ID NO: 141229 - DNA, 388 bp, Homo sapiens
cagtttggacacttagtgtgaatcaacaaggttaaataatgaggtacaggagaaaaggcacagactgtaaatgagaaagcctgtgttaagttggtcctatcacttaactgctgcatgacatcaggaatttaatctatgtcacaatttcttcattgaggggattatattagaaaaagcatatgaaagtgttggcaaaactgcgaagtgctgtaacagtactgaataggactgccattatgaatggagttgtaattttcagagttgatcatgtaacaccttaaaatatgttttactagtttttcccttcaagctggaaaatattagctcagttctgaaaatttagtcatcactgggaacttccaaggaaactgatgacagtggaagtcaa

SEQ ID NO: 141230 - DNA, 521 bp, Homo sapiens
aaagacataaattgctaatatcagaaatgaaagaggggcccatcactactgatcccataaacattaaaagaataataaatattaggaatacttccatgctcacaaatttgataagagatgaaatggaccaattcctagaaggacacaatctgttaaagcccatacgaaaagaaacacatcatcttagtgtagcctgtatctatttaaaaattgaatcaataattagtaacttttcaaagaggaaagcaccaggcctagatgggggatcactggtaaattccaccaaacatttaagaaagaagcgatactggctgggcgcagtggctcacacctgtaatcttagcactttgggaagctgaggcaggtggctcacaagatcaggagttcaagaccagcctggccaagatggtgaaaccctgtctctactaaaaatacaaaaattagctgggccaaggatgcctaatctttagccactgttagccttttgattgataggtgggtagcttagttactttgacgcg

SEQ ID NO: 141231 - DNA, 922 bp, Homo sapiens
cccgattcgaaaccagccgcgggagccgtgggggcaggcgggagagagggctgggcccctgtgcttgcgagaacgggtccttcgaagtagaaactggggagaggactttaagccaggtcccctgggagaaggccgggccaggtcgggagctccagggggcaaggctgggacggggctgggcggagattctgagggcggggtccgggggagggtctgggagggggctgcagagaggggagggctctatgggcgggagacgattgctggggggcctgctggcccggacaccacctggagttagatgtggagggcagccctcagccctcagccctcagccccagctcctcaggggactccactcgccctccctgcccaggttacgaggtttctccttggccttgttcccgctgcgcccactcctgaaagctccggagatgctgaagtctggactgttagttcccggtctcctctccatgaactttctccaaacccctgggttccagcttcctcccttctgcccctttacgggaaagggtgactgcaactcgggtctcttcccaatcccagtgctgcctgatcagccccggtttgaatccagagctgagtgaggctgggaaggggagggtgtgaatggcccttgagctcctgctaccacagcccaccacaaggatgagtgcctggaagagcgcccatcactcgggctcagctgtgaaggctcctctgcctccaggatgaagggagcacctggagtagcatgtgtcactgtgcgtgctggggtgtggccgagcacctgtgccggtgttgtgagacttacagtgagagtgtgcatgtgtgtaaaacaggaaaggggggtgtctgggtgtgcgtgtggctctttctgaggactccagagcaggagttgatcccagtcatccgtgacccc

SEQ ID NO: 141232 - DNA, 757 bp, Homo sapiens
gaaatctatcctcaaggaaacaacttctcagtgttccatctgctattctactactcctcagggattattcaggcaccctcccttccctacacatcaagctcgaagatttgcccccgcccaggactggcaaattggctttactcaacatgccctgagtcagaaaacaaaaatacctgttagtctaagtagacactttcactggataagtagaggcctttcctacagggtctgagaaggccaccacagtcatttcttcctttctatcagacgtaattcctcaatttagccttcccacctctatacagtctgataacagaccagcctttattagtcaaatcagccaagcagtttttcagctttatatcccttacagtcctcagtcttcaggaaaagtagaacggactaaaggtcttttaaaaacacacctcaccaagctcagccaccaatttaaaaaggaatggacaatacttttaccactttcccttctcagaattcaggcctgtcctcagaatgctacaaggtacagcccatttgagctcctgtatagatgctcctttttattaggccccagtctcatcccagacaccagaccaacttagactgtgcccccaaaaaacttgtcatccctactattttctgtctagtaatactcctattcaccgttctcaactactcataaatgccctgctcttgtttacactgccagtttacactgtttctccaatcacagctgatatctcctggtgctatacccaaa

SEQ ID NO: 141233 - DNA, 824 bp, Homo sapiens
cgcagccactgaaccacaaggcttcgcgttaactggagtgcctgggagtcgcgtgccaggagccgcacggccagggactgactgacagacagacacgcaccaccaccacaacacacgagacccgggcgggccgccgccgccgccgccggggctcttggcaaactcgccggtcgcagaggtcccccgcggagctgcgccacagtagcgccgggcttgcagctttcacgccgggcgaaggacccggcgctgcgctcgcagctgcgcggagattcccggcacaggccaaagtcacagcaacgctgaggcacagttagagccaactaagatgttcgtcaaatccgagaccttggagttgaaggaggaagaggacgtgttagtgctgctcggatcggcctcccccgccttggcggccctgaccccgctgtcatccagcgccgacgaagaagaggaggaggagccgggcgcgtcaggcggggcgcgtcggcaggcgcggggcttgaggccgggcaagggggcgcggggcggcgttggctgcggggtgcggagggctgccggcccgcacggctgctgggtctggtacacgattgcataacggtgcccttcccgggcgcgggccgtctcccgaggcgccaagacggccgagacggtgcagcgcatcaagaagacccgtagactgaaggccaacaaccgcgagcgaaaccgcatgcacaacctcaacgcggcactggacgcgctgcgcgaggtgctccccacgttccccgaggacgccaagctcaccaagatcgagaccctgctgtcgcccacaactacatctgggcactcac

SEQ ID NO: 141234 - DNA, 743 bp, Homo sapiens
gggaacgcaggaccgcccgcggaggcaggacccggctgactggcagcagggtcacagcgagcgctaggcgctgcctgaccttggttagcactgcctgggtttcttccttcgccttcctgctccgcgccattcggagctggtcttctcgggtgcgcgccggagcacgcccctgtgacacgaagatcgcgcctctgtttctttccttacacctcactgcctttttcccctttctctcttcggtaggatgttcgtcaaatccgagaccttggagttgaaggaggaagaggacgtgttagtgctgctcggatcggcctcccccgccttggcggccctgaccccgctgtcatccagcgccgacgaagaagaggaggaggagccgggcgcgtcaggcggggcgcgtcggcaggcgcggggcttgaggccgggcaagggggcgcggggcggcgttggctgcggggtgcggagggctgccggcccgcacggctgctgggtctggtacacgattgcataacggtgcccttcccgggcgcgggccgtctcccgaggcgccaagacggccgagacggtgcagcgcatcaagaagacccgtagactgaaggccaacaaccgcgagcgaaaccgcatgcacaacctcaacgcggcactggacgcgctgcgcgaggtgctccccacgttccccgaggacgccaagctcaccaagatcgagaccctgctgtcgcccacaactacatctgggcactcac

SEQ ID NO: 141235 - DNA, 397 bp, Homo sapiens
tttccgtgacctcaatttttctggtctgtaaagtacagcacttggttttttgcttgtttttttagacagggtctctgttgcccaggctggagtacagtggcatgattaaggctcactgcagcctcaaccttcctgggctcagtgatcctcccacctcagcctcttgagtagctgggactacaggtatgcatcaccaggcccggctatttttttgttcttttttgttttgtattattttggctttaaacattttttctttctgcttctattggaccaggggagtcagattatttacaaagtgcaggtaattttatgagaagtcaaactccttctgtgctgagccatgacatgcatgcagaatgaaaagtcagctccaacagtgaccaatcctgcattc

SEQ ID NO: 141236 - DNA, 353 bp, Homo sapiens
aaaccatgagagataataaatgatttttaaaagacattatttctgagtgatttgtttatacatcattagatttccaaaatagcagttacttttgccattctgaactgtgaaaagtatctagttttaacttacatttccctgtttacttgtgaggttaaacagtttttcaatattcattggccatttttgttttgtatttaaattttctatgtatatgtattatatataattatatgttaatatgtttacaatatgtaaaattgaatttatgtataagcacactcatacctttttctattggatgggttctttgttttgataatcatatttaatatccgagtctttttttttct

SEQ ID NO: 141237 - DNA, 352 bp, Homo sapiens
tagaagccgagctatggactgacattgggtattgatgcacagagcaagtataattgcaattagctaccagtgaacactgggcactgatatacagcagacactgcctccaacagacattttccctttgtggatattggtcattggtggaagctgtcattcatatgataaacattatatatcaaccaacatttgcaccctggtgaacgttagccaacaaggaacactgaacattgatgggcaaggtcctattagcctatgatgacctctgttgtcatagacagtgcccttggtggagattaggtatgagtgggctttagcgctggtggactttaaattctgtaagcacataaag

SEQ ID NO: 141238 - DNA, 313 bp, Homo sapiens
actcacaactgctgacctcttccctagttggttattccttatctcggattcttttttctggaattgtttgctcatttggtgaggtttgtttgagaataatggggcacagaattttagaattggaacattcccagaaatgaataatttggccataactacaaagaaatcatgtggaaaatgccagttgggaaagcaacagctgtttatgagtcccactttaatttctacctccctatatttgaacacctttgctgacgtggtgttttcaagggcagaaaggactgtgggattggcaggtttcccaagtaggtga

SEQ ID NO: 141239 - DNA, 367 bp, Homo sapiens
tgaatacagcaggaaactgagcaggagtcagtctggctgtatcccacccctgcacagcaagaaccaacagcaagctaccactgtcacgtaaaacctaatcaggccaggcgcagtggctcatgcctgtaatcccagcactttgggaggccaaggtgggtgggtcacctgagatcaggagttcgagaccagcctggccaacatagtgaaaccccgtctctactaaaaatacaaaaattagctgggtgtggtggtgcaggcctgtagtcccagctacttgggaggctggggcatgagaatcgcttgaacctgggaggcagaggttgcagtgagctgagatcgcaccattgtattccagcctgggcgacag

SEQ ID NO: 141240 - DNA, 323 bp, Homo sapiens
ttcaatactatattacagaggtgaacaaaacagaaaaattcttgctgtcgtggagcttgcatgctagccattatacctggcaggtagctaatgcttaataatggatagatggacaggtggatggatgataagagaaagaaatgacctcctaggtgggagaaatacagaagtaaagataccaaagaaggaatacatggcatctgctgccaaggcaatgagaaggccattcggacaggagtggagaatgagcgaagagacaaaatgaacatcaagatagagagacaggctgtagaccttgacagacagactttggataggtagag

SEQ ID NO: 141241 - DNA, 386 bp, Homo sapiens
ttttgaatctaaaatgtgcctccatatataacatatagtcagatcttgttttttatccagtctcataatctctgccttttgactggagactttacattaaatattgatacagtgggtttaccattttacttttcattttctatgaatctcctgtcttttttccctctgtttctcctgctgtactactttcttttgcattaagcaaatatttcctagcataacattttaatgctttcaataattattttcagtatacatttttagttattttcttagtggttactctaagacttatcatatacttatcaaaatcaacttcagatttatacgaacttaatcccagtgaaatgtacaaatgttacttctggataggtctgttatcttct

SEQ ID NO: 141242 - DNA, 482 bp, Homo sapiens
atgaatatcttcaaataagttaataaacaaaagaatacattaggcccagttcctgcatttacataagaaaaacaaactcgaatgtctgacagtttaataaaatgaaaacacttgtttggctctgtgtaacttactctgcacagtgagtgatggagctgggagtccaacctgcatttttgatattcctgttgcttcaccctggctcccccatagccatgcagagagtgctgcatttcagtacagtaacacaagagacattgcaaggcgggtgacagaggagagggagggaggcagacacaactcagaggggacgggagagaagaggggctccaaggttctggagggcgtcctgggtacgtgtatgcctcacacgccttgctgaggtccttggggggcttgaaggcagccagggccaaagggctgggcaggttaggatcccctggccctgggacagcttgttctgtggctgagtttcctcagtc

SEQ ID NO: 141243 - DNA, 298 bp, Homo sapiens
gtctagctaaagccagacaaaggcgcccagggcttcctcccccacccgcttcacctagatcaggttcccaagctgcaggtgcatgtgacgctattcctgagggcgggcagtgggcagcagggagagagggcggggtctaagcagggcagagctgaagaatttaggagccatgggaacagagcaccgggttatgtggagacagtggctgggagactgatgtttcagaggtttcacccagagctcccaatactccatcttgaggacaaggtatattgcaggtaactgtcttgcatctctg

SEQ ID NO: 141244 - DNA, 443 bp, Homo sapiens
catcctctgtcctcacaccacccactcttactgattttgccttctattttacagataatttagaagccatccagagagacattcccttgtctttgttacaacaaattaaaaccctgcttgcatctgtacccatcctctccctttccccctctgttatatcctaatattttacagatgatgaaatacaggtgcagagaagttacatagcttgcctaagatcacacagctagcaagtagttgagcccagttcccagcagatgaagcatccctcttacaaagggctgatacttttatattgttctatctctcagggatctgattatattagctattccccttctcttagttaatttttttttttttttttttttttgggaaagggagttccgcccggccccccgggggggagaacggggccaaaatccgggccccgggaaacctgg

SEQ ID NO: 141245 - DNA, 369 bp, Homo sapiens
ataatttgtactgtctccccctactagaggtaacttattttagtccaagaacattttatgtgtgttttgctcattactgtgttacctgcaatttgaacattgcgtgacatgtaataggcctttaatgaatgattgttgaaagaatgaatagtgattaaagcaaaggctctgacttagaaccgaaattgagtcctggtgctggcactcgtctgctttgtgatcttaggcatgtcattaacctatctggcctgcttactcttctctgaaatggagatagtagaaccaagtaggtttgtcttgaggattcaatgcaagaatctgtgtaaagctctcagctcagaatctggtgcataataaacagtcaataag

SEQ ID NO: 141246 - DNA, 598 bp, Homo sapiens
gaagggctcaaccaggcctttgtttcatgtccccaattatttaaaatatggtataaaattacctttagggctatgtgtaaaaggtgtaaatgaaatagataaatttcgtgtttagacttgggtcccatccccgagatatctcattatctttgcaaatattctgaaatctgaaaaaatctgaaatacgactggctgcaggcatttcaaataaaggatgctcagcatatactgacttaagtcccttcaaatctagtcctaatctgccctcaatttaagatctgaatttatcctgcattaagtgacatattgccagcctgggcaacacagcaaaaactctgtctcaaaaaaagaaaaaataaaataaaataaaataaatagaaacatcttttcaacaaataatactagaataattgaatatctttatggagggggaaaaaatgaacctcaacctgtgtttcacaccctacacaaaaaactgcttccagatggatcatagaactaaacataaaaactaaaaatttaaagctaataggagaacatcttcacaaactttgtgtgggcaaagattttgtagacaggacacaaaatatacaatttt

SEQ ID NO: 141247 - DNA, 405 bp, Homo sapiens
acatcctatctgcagtgcttcccacttttcaacacagaacactataaacatttctagttgggctgttctagttatcttcagtaaactaatgctgccttttgtgggtctctagttggtaaagattttcagtctttttgttgctgttggagttttctgtttcctagtagtgtgtagacctgttgtctgtgacagttttattggtggtgattgccaaaacatgattctattcttaaacttttgtctggagttaaacattatagtagttgaaaaactaaatacgttatttcaaaggggaggcaaattgcacattctagcaaatgaatgtgcaattgaatccttctctaatataccaggcacaaagaacatcaaaggagatatgcttagtttgcaagtttattggggagg

SEQ ID NO: 141248 - DNA, 320 bp, Homo sapiens
catgggaatttattttgggaataaagaaactgaatgtttagtcagggcctttatacaaagcaaagtgaaatcatattggaaagagaacaaagacatatgtgaaatggaatattaagaagagtcatcttaaaagaaatccagttggaccaagtgtttgaagacctgtggcatccccagcacagaagctccactaaggctttaaattgttgggatttccactcgggctggagcactggctcccccgtggtctaagctgccactatcactgtgtctttagtgtaggaatttttaacctggagtccacaggttcccaagtggtc

SEQ ID NO: 141249 - DNA, 429 bp, Homo sapiens
aatatagctggccccctttttgctcaggttcttgctcaggtctctcctccagccccacgggacacgcaccaggtcttccggcattcattcattcatgccactgtttgctaagtgcctatgctgcaccaggtgcagcaccaggtgctggagacacaggaggatgagagcagggctgctgtccacaaggactcacaatgcagtggggagacagcaacctgtccacgcccactaggaagtagaaggtaaatgatgggatgcaaacagggcttctgaggttggaagagaccctgctacaaagaggcagagccaagattcgagtccaggctgtgggctctaagctgtgtgatcatcaccctatgccaccacctcccacttggattttttctgcatttaaatccagtgtcgcagaccagacctgagcaagccagg

SEQ ID NO: 141250 - DNA, 125 bp, Homo sapiens
gacaccctactgtgcacccagtggagtaaataaaacttaaaatgttaagtcaaccaagtgttagcaaggatgtggagcaactggaactcccatatattgctgatgggaaggtaaaatgggtaagc

SEQ ID NO: 141251 - DNA, 457 bp, Homo sapiens
tatcctcagagtcggttggtagcatagtggctgcagtgattggggttcaccctcccttgctcatttcagctcatggtattactagtgagtagcaagatcacctaaaagaaggcaaaagcaaaggcataggtacagatctacttggtttgcagcaaatctgctttaggcaaactccttacattgctcaaagagttttcagagttttggtacaaacaccatataaccgtaataggagcaaccagccatgaaggataacacaggtctttagtggaagaccaaagatggtgaatcaggtagtatcactaaatgcacttttaagtcaaatacttaatgttgaaactttatttaaaatattatataggtttgtgtatatatatggggatgtaagagaaagggacatgcctaaataattacgttaatataggaaatatacctttttcaattctgccttcttcca

SEQ ID NO: 141252 - DNA, 248 bp, Homo sapiens
ctaatttcaggggtctctgaattatatgtgggaaacatcgtctaaaaaagtaattttatccttattcatgcaaccagacccacactcatagaacttttctttaaggggagtgtcttgcagatgtataaatgagtgttaacatctttaaaagcgaaactgaacaattctctggcatttgaattccctccttccttcccaaccctctccttttcattttctcatttattattaaaaacacttttaaagga

SEQ ID NO: 141253 - DNA, 385 bp, Homo sapiens
gagaagcagccccatgggacttcagaaactctcaccaatcctcctctagagtgaccagaaagtaccccttcctatcctaactaatgtgacacgtccttctgtgtggtccactctatgcaaaaccagaaattgacaagaatgactttgattgtaaagtacaaatagcttaccagttagtattcttagtttctctttagttataaatatcaaatgcaagggacttgaaacccagctgatagaagtgtaactatttttaatcaaacattttctgaaagctggttctcacatatgttgtctttcctgagtgttttatgttgagtggaagacgtgttgaaatgtttaggtcaacaacagcttttttgttgtccccttccactactgattt

SEQ ID NO: 141254 - DNA, 330 bp, Homo sapiens
  misc_feature (13)..(13): n is a, c, g, or t
gcttttttgttgnccccttccactactggtttaaaaaaaaaaaaaaaaggctccactctatgcaaaaccagaaattgacaagaatgactttgattgtaaagtacaaatagcttaccagttagtattcttagtttctctttagttataaatatcaaatgcaagggacttgaaacccagctgatagaagtgtaactatttttaatcaaacattttctgaaagctggttctcacatatgttgtctttcctgagtgttttatgttgagtggaagacgtgttgaaatgtttaggtcaacaacagcttttttgttgtccccttccactactgattt

SEQ ID NO: 141255 - DNA, 144 bp, Homo sapiens
aaggcaggggatacaggaaggagtggggtgagggctctgtatgtgcacagcctgtgtgaggagagccgagtaaggtgggaacattgtctctgattgacagtgtctctagttggacattgttgcagtgggttcagtgggttcaac

SEQ ID NO: 141256 - DNA, 456 bp, Homo sapiens
gatgtaggcaaggtggccagtagaaataactagcttaatctaccagacaagtctgagatctactgcttggaggctttttactgtagagctgctctgtgctatatgatagccatcagccacttgtagttatttaaatttaaattagttacaattaactgaaatttgaaattcagttgctcagtcaggtgaaccacatttcaagcgcttaataaccacatgctactaatggctagcgaattggatcgtggagctatgtacagaatgtctccatctctgcagtaaagtccatgggacagtgctgatcttgagaatctagaggtgtttaaatatacacttagagaaagacatactaaatttaatagaatcgttgaatttgggtttttttgtttgttaagtaaaatagagaaattcattatcttgtaaaacaagaactccagacacaacaagcctcaagag

SEQ ID NO: 141257 - DNA, 303 bp, Homo sapiens
gccctggtgctgcctggggatggtgttctaagtacttgattccatctgcaaggcaaaacgttttgagagagagagaggattctcttttaaaggaatcataatgtttttaatgttaattatacaggctactcgattaatcagttaagtgccatccttatacagaagggaaactgggaagtgtttcaaaatgaagagtacctagcggcttgaaagagatgtttgctctatatttatattttgggacttgggtaactgacgattcagacatctatcagatggagggctgtctgcttggagtcatgc

SEQ ID NO: 141258 - DNA, 149 bp, Homo sapiens
ctgatttttcactggcctccatctacactttaataaaagttatatatatacacacaaaacactgattaatttatatggctgatcatctttttattttttgagacctgtcttgctatcaaactgagaccagtttaagggctggtctcaaa

SEQ ID NO: 141259 - DNA, 371 bp, Homo sapiens
cgatggtcttgatctcctgacctcgtgatccacctgctttgacctcccaaagtgctggattacagttgtgagacaccgtgcccagcccatttgtctagcttagaataaattgcctatacgttaaatgtgaaattgctatatttacttgaattaacttcaaagagtgctttcaaaaatgttaatgggtatattgatacatcccacctcatcatgattggactggtttatttaaagagtataaggttctaaatgcctatccaggatagagtgagcaagttcaagcttaacttagtagaggttggccacataagaaactatgttttaatgctttaagatgttctcccagcccccaagtctgcaagaatcaaaca

SEQ ID NO: 141260 - DNA, 371 bp, Homo sapiens
taaattagaaaaaaaaagattctgacaacatatggagagatggcacagatagtaagaaattcaaaaacgttatttttagataattttaacttctttctccaccaaactcactactagaatgcctagcaagtttcaaaattggcacatttaagtttcacctcccttcttcttgtcccttattgaggtattgttaacaagcaaatgctagtaacactgctgacttgttatcagcaaggcaggttgctctcaagttgtttgcagccctgacaatggatttataaacctggggctactcaggctgtgagacttagagtcatgtttttatgctacagaatttttttttttttttttctttttttcctaataactgg

SEQ ID NO: 141261 - DNA, 344 bp, Homo sapiens
gcttaagcaatcttccttccttggcctcccaaagggctgagattacaggtgtgagctaccatgcccaggctttatttatcttatgtctggaattttgtatcctttgactaacatctccccattgcctctttcccctggcctgaggtgacagccttctactctctctttctgtgaatttgacttttaaaagttccacacataaatgagattttgcagtgtttgtctttctttgcctgacttatttctcttaacataatgtctttcatgttcattcatgttgtctccaagacaggatttccttctcttttgaagctgagtaatgttccattatgtgcatgaatatc

SEQ ID NO: 141262 - DNA, 405 bp, Homo sapiens
tgtgcagataccactgccgtccatttccagaattcttttcattgtcccaaacaagaactctgtacccattaaatggtcactccccatacttcccttccccgcggcctctgtgaacctgcattctgctttttatcttgatgaacttgctctaggtgcctcatagaggtggaataatcactatttgtcctcttgtgtcatttcacttattttcaaggtgcatccatgttgtggcatgtgccataatttcctttctttgtaaggctgaataagacttcatttatgtatatacaacattttgtttatacattcatccattaacggacatttgggtcttttccaccttttggcagttgtgactaacgctgctgtgaacattggtgtgcaagtatctgttcgagccccaga

SEQ ID NO: 141263 - DNA, 458 bp, Homo sapiens
agtacagtgccaaatattacacaaacaggagttaaaagtcagtgagcatttctttggttaatatggacataacagcatatgaaagcaggttgacaatttgtttcaaaaatggttttgtgcactgctattgggacttaattaacttgaaatacagatttgtagacgttattgaaagtggaagctgttggcctcatcccattcttctaaacctaatcctgctcctccttaccacccagcccccgactggacagggaggcttccatgtggccttcatccattctgtgatgcagagcctgttgaagaaaagcaggtgtctttacagagaacttcaatagaatcctgtcaagtcatttgtggttttggagcatagtttacttgctgatttgactacacccaaatttggcctgtttgaacccttttaaacagggttcaaatgcttatctgatgtgaagacaagc

SEQ ID NO: 141264 - DNA, 427 bp, Homo sapiens
  misc_feature (24)..(24): n is a, c, g, or t
  misc_feature (28)..(28): n is a, c, g, or t
cggagaagtgcaagcaggaggatngctngaggctggtctcgagctcttgacctcgggtgatccacctgtcttggcctcccagcgtgctgggattataggcttgagccaccgcacccagcagtattttttatttaattggagtgttgattagttggttagtttttattgtcgtctcgtgtaatggcagagtttcctcctgtgtgctggctctcctgaaccaggtgtgatggccatttttacacatcatccctgtttagcaggaaagaccataagaaacaggtgcaggacctgcccctgggcacgtatgagacatcacacttgcagcttgggagctcttcaagggcaagtagtgtgtcttattcttcacgttgttcctggcatctgttacactgtacttgctttcaccctcagatttgtggaaacatta

SEQ ID NO: 141265 - DNA, 725 bp, Homo sapiens
ggaaagtctttttaacaaacagggctagaactactgtatagccatatagaaaaatataaacatattcctgccacataccatacccccaccccaaattaacaggaaccaaagacctaaattcaaaagccaaaactagaaacttccggaagaaaacatagaatatctttatgacctcgggcttagcaaagatgttctatattaaatgtaacaggccagacacaaatgtctatgtattgtgtgaatctattatctatgaaacccaagaacaggtcagacttatatgtagtgatggaaatcagtcattgcttctggggtgaagagaaaggaacccaaagtaactctctggagtgacggaaattggggcattggtgacaggggtcatttgtcaaaactcattaaagtatacatttagtatctgtgcttgttgtctgtaaattatagctcaataaaaactgagttttggccaggtgtggtggctcacgcctgtaatcccaacacgttgggaggccaagacaggaagatcgcttgagctcaggggtttgagactagtctgggcaacataaggagaccgtgtctctacaaaaaaaaaaaaaaaattagctggtcatggtggcacatgcctgtggtcccagctactcaagatgctgggcgtgaggatcgcttgggcccgggaggccaaggctgcagtgagctgtcatcacgcccctgcactccagcctgggtga

SEQ ID NO: 141266 - DNA, 481 bp, Homo sapiens
tgtggggctgtatattctcagagggaacccatccaagagataaactctaggccaaaacttccatgacaaaacaagaaatgtacttgaccccaatttcctgagtagcagtatagcagtagtttacctgctactcactactctaaggaagcgatttaaatgtgtaataaccataggcaataatcttaagtgttttccacacactatttcaatcctcagaaaaaacttacgaagtagatcctacattatccttattttacggataaactggcaaacaatatcctgaatactcctcccagtaccaaaaaatgctgcctaaaagtaactgaagtgaacaaatcgatacattttaaacccaagattcccagacacaacatcctcaggaaaactgctaaacaaatgggagggtgaacaatggcgggatgtagggaaatttacccttctacccatctagattttagttctgggtaaaagaaaagtctct

SEQ ID NO: 141267 - DNA, 337 bp, Homo sapiens
acttactgaaaaacagttctcacaagttatatttttaagtcttcccttttgacaggtatgttatttttgtgagaaaaggtttttttcctctctgaaaaactgtcatgtgtctctacacatttgaagaattgtcatatattatcctattcctttgtatagattgtatgtagaggaggcatgtgccatgtaaatgaaagaaactatataaaaagcgttgttccttataatgttacactacatcactatgctgccatgaactttaacaaatagtcttatccaaaagaaaggcagaacatcttccttctatgttttatttgtattaaaacatacatttatg

SEQ ID NO: 141268 - DNA, 333 bp, Homo sapiens
ataactcgcggcaggttgcgatctgttagtagtatatgtgcagaagctaggactgggagagataggagaagtaggactgctgtaattaggacggatcagacgaagaggggcgtttggtgaatgggtaaatggttgatgggtggataaggtgggtgggtggatggctgatgagtggataaggtaggtaggtggatggagagatggagagatggatgaatggatgaatggatggatggatggagttagatggaggatggatgggtaagtaatgaacagacagatgggagctaagccaggaggagggaggcccaaagctccatccaacctcatgag

SEQ ID NO: 141269 - DNA, 433 bp, Homo sapiens
ctacctccgcagagttaaattcagacaaacgtgctatcacgacttactgcagttaccgggatctccaataggtggttctgagagggtgggtgggtgacccactattctgcttcacttggtggaaccccgctctgcttggcaatgtggtatatactcttagcttgcctgcatcatttgacttgatcaccctgatcacctaccccctgccttccacacttgattttagtagctgactataaaattcacatgaaggggaaaaggtgatcttcaagaacgtcatctatgattaaacttgacatgatcagatcttcgaacatcagtgaggatggctgaaggcacctcatgaaattcaaggctccacgtatcagctctgtctcataaaagggaaaatattccctaggactcttgcctaacatactgatataatatactt

SEQ ID NO: 141270 - DNA, 959 bp, Homo sapiens
agaatgccagttcctggtaagttttgagaagtactggtggcatgttactcagggttaaacaaaatttcaagatgtcagatttacatttgcctcatgaaaccattacttaatactgatttcagctataggttgttgcaggtctgtgatactacacagtgtgactggttttgagtatctcattccttccatctactcaacatactaatccagcatcagcctctctgtacctcattcccattagtcacaggagacccattttattgtaggctttcatcattataacatctgtgttgaataaatagaaacccaactagaatttctcaaatattccctgattttaaaaaaaaactaatatttcagagtcaagaatttgatactacaaaatcattgtatttattaacatatattaaatgtacatactttgttctgactttcaaacttaacaaaatgagtctaactgaatagataaatatgcttttcattaactcaggcttctggcaaaggtatttaacaggtgaaaatattaagggttgttccttcatctccttggtatgtgaaagacagaataatcttacttggggtagggcattgggcctgtctacatgcttgtgtttggtttgtgcattttcagcaccagactatgatagaatgttgccgaaactgagttcatgtgacacaacatctttctctttctctgtatcttcaggggtcactgacttggtttcatctcaaaacaccttttgatgaatcttgagctctttgacaagttttgctggtctgtttcaagacatcagtaacctctttttgcattctctgctgaaactagggaataaggctaatagtgctgcctatttcatgtatataagacacctttattaagatataattcacataccatacagttaatttaaagtgtacaactcgtctgggagcagtggcttatatttgtaatcctagca

SEQ ID NO: 141271 - DNA, 900 bp, Homo sapiens
  misc_feature (786)..(786): n is a, c, g, or t
tgttgttgttgttttcagattgtcccagtgcttcgcatgtttttggctccatgttcaatccatttgctgaacacagtgaaagtatccagtatgtctttccaccgtaccctagagttggcatcttgtttaccagaggggagcggtctgaaccccaaggttaatggcacaagagaagagaaaggaggagatgccaaatggacaccctcctccaagccgctcctcccagaagggctccaggcagctgccaggagcagaagctcgaactctgctgagagacttgctctgtggagagcttcaagaagtatcgctgggattgctgtctggagccaccttaccaagaagtcagctactattttccggaaccaagaactgtactatatttggacccataataaaggttccccaggcagcttcagcttcgtgtgttgcaaaccaaatttattccctcgcagtgccctccttttcttgcactctctgtctcagtgagtggccacactgtcctctcatctgctcaagccaggaatctcgtgtctagtttgaaccctgtggctgtagagaaagtcctcaaagaagctattatcctatggtagagtaaccctaattaacaaaaccctttctgctttgtgtgccggaatggcgggctccctggcctcactgacttcagaaagaaactcgggaactcgcggctccagaagtagacccggtgggttgggtttgcccagtccgtgtcaccccagggggggcccctctcggctcacagcaacagtcccgggcggagccagcacntggggaccttaaccccttaaggataagagggggtaccccggggcataaaacgtccagcgagagaacaacacacaagaacacacctcgggtagcgggaacaaaaccctcatcatt

SEQ ID NO: 141272 - DNA, 175 bp, Homo sapiens
gcgagccccatctagagcaggttccctctgaacatgccagttccatgcatcaataaagtctccttatgaatgaaaaagagtcctgaccaataaaactgttgtcagcctgtgcacctggtgagttgaggatagactggactttagcttgtggatacccaggctctcaaacagattt

SEQ ID NO: 141273 - DNA, 411 bp, Homo sapiens
gacaaaagagtcctgagagctaacaattcaaaaagtgctggaggtttctgtcattctgctattaatggtgacaaatcccatgttcattaaacttttcatcaatttctcaaagtttcattttcagaagtaaagtaaagttacttcttggtcagtggatgaattttagataaacacctaaaaagactggcatcactggcatagaaataggttttagacacttatcagacatgaagttctacaagtttattgtgagtatattaagttattgctatttcaagaaagaaaattcacaactgggttctaaatatattgactaatttttgtcagtttctgtgagctgcatgagttctcatatctcacattgtttttccttttttctcaccttccttttttctctaattgaaggtagac

SEQ ID NO: 141274 - DNA, 210 bp, Homo sapiens
cgagctcggaccgcaccaggcgcacttctgcagaagctactgagaattcaactgaaagacaatattccatgtaaatagacattgctctgtactcttacatacattgtccatgtgtgcccagcctgtctccccaaacaaattacaagacactcagtgactgggagctctgtcatatgacttcattggccatttagccctaacctagggtgg

SEQ ID NO: 141275 - DNA, 183 bp, Homo sapiens
gcgccattgcactccagcctgggcaacagagcaagactccgtctcaaaaaaaaaaaaaaaaaattgtatcttcatattagattcaattgtcttaggaattgaagtgaagaaagaaggatgaagaggaaattatctcttggattgctctccaggaaatccttctctatactttaaaagctcttg

SEQ ID NO: 141276 - DNA, 350 bp, Homo sapiens
gatctagtcatttgcgattatattatctcaacagttgctgagcaactgtgcatgctgttgttcaaagactggattttgttgtcttccctgaaagagtgttgagttctgctatggtaggcaggttacttgcaggtcagcttgactggtcaaggcttgggtttttaggctttgttacaatgggtctagggtagtgctgttcctgtggctggcttttctgggttctcaactggatgccagaagttctcaacacgaggatagcacctcgtgtttttctactctgcttagctagaactctaacatctcccattactggtgatctctgggatatccactcagctcacagcccctcc

SEQ ID NO: 141277 - DNA, 162 bp, Homo sapiens
cctgggtaaagacatttttattaccagtctccttccttattctgtttctggtgatctcagaactttggagaactgaattatagcttcccttcacaaaatgctgggggaactctttataatactttagctaagcattatggtccctgatgaaatgtgctaaat

SEQ ID NO: 141278 - DNA, 284 bp, Homo sapiens
gacggaaacactggcggcacatatgaggccatattccggatcagaccgggccgggtagaacagacaggacaagagcgagaaccctggccgaatggcgcgggtggctccagtacagctgctggtgacccatctggctctcagcagtgcaacgaggtaaaagcttccatactttttccttaactctaaacaaaagttactgggtacttggtgtgcatctgttactcttctaggcattgtgggaaggagatatcagaagagcccctgcctgcagggagcttacagtc

SEQ ID NO: 141279 - DNA, 683 bp, Homo sapiens
  misc_feature (683)..(683): n is a, c, g, or t
gtttctcctgcccagcatcaacgatgagccttggattcttgggatcaatatcagtcttccaccgtgaatgggaaacccatttctccctggagacaggttcctctgcaagaccactcccttattcttttttctttctttctttctttttttttttaaagtaggacgccttgttgctttagatggggtttcaccggtgttgagccaggatggtctcggtctcctggcctcgtgattcgaccgcctcggcctcccaaggtgctgggattgcaagcttgagccaccgaacccggcctgaagtgtatttttttttccttttaaagaccagggttagtagaagggtattttgaatatacaattagtttaaattggggtatagttttcagtggtctctgattaaggagatggtggaataccaaaaaaaaaaaaaaaaaaacaaaaaaacactctggtggccgcccagggccacagaaaagttaaaacacctcggtggggccaggggccccgaggcatacagaacgggacaacaggagccacaagaaacccggggacaagaaaaggccggagaaccccccgcaaaaaaacgcccgggggacacaccacctcctgaacaaccccagagagggccgaagcaaagcgggaccaacacgggggccagggcgcccaataaaaccccaaggcagaan

SEQ ID NO: 141280 - DNA, 404 bp, Homo sapiens
aagggtgctgagcatcagctctgtaaattgatgttccaccaagctcttgttttagaataaatgcgataacactgaaaaagttagagggtgggttttgagttgactcatggtagaaccaactgtggtgttgatcagccgagtttaaacaaggttgctttttgttttgttttagtagttgctgatgagaatgacccagcctgtggaagctgaccatgagatcatgatccttctctacaggacttccattaaaacttaaacatgcctttctcctccagcagggctgcctggtaccatgtcaaattgcaaacagggcactctgagcatgtttgcccgagaacaggctgaccatccacacaaaatggcacccaagccttgcctttctgttaactcccaaatctcaagat

SEQ ID NO: 141281 - DNA, 512 bp, Homo sapiens
ctaaaaaactagcaaaataagatacaagagccactgctggggctgtgaggaaacaggtgaggttttcctttgttggaagtactgattattggttcagcctccttggggcttagattggcagaatgttacaagggcaataaaactgttgatgtgccttgccaagaattctgcttttgacactataacttaactcttaaaggagaagaaaaaatgtagttgctacaaagatgtccaaagcactatttttaataacaaaaaaggaactagtttgtactcaaaaggagatagattattatacaaacacatcaatgtggcaaatattacataatcacctatttgtcattgtggtagctatatccataaatgaaaatgcgtgtgaataacaaagtaggaagaaaagtagaacaaacactgtgcacactctgatcacaaccatagaaaatccatcaatgtgttcactacctaaaattagaagaggatttggaactgtatgaatagaattattttttgtt

SEQ ID NO: 141282 - DNA, 463 bp, Homo sapiens
tatgtgccacattttcttaactttataacctgtgtggggcaggagaattaacctgcttttggattagaggctgcaaaaaagccagttctggtgaccacactaaaaagattaatgagcacttagcaccaaattaaatacccccctgcccccgcctttatgaaagtggagttcatagtacaaatgtgacagcgttaaacattgaagccattcgaaggaacctgggaagtactcaggcaccgatgagttaaaaacacagagacatccagtaagtgagttcccgctgggcacgggtctgtttatcttgcctttctgaagtcagagccaacattcttaatggttttgaatgattcagaatgtttcttttttggcagggccagtttccacgcatgggcttatgactaaaaccccttaggtgaggtccaaagcagaaaccagcctgggtgacagagtgagactatctcac

SEQ ID NO: 141283 - DNA, 317 bp, Homo sapiens
ttcttgatgttagatgtcggacctggtaggaggtgtttgggtcatggggcagagtccttatgaatagtttggcaccatcctcttggtaatcaaaatgtgtgcactttattaattcaaatgaaagctggtttgttagaagaacctggctccttcacctcgtacttgctctgtctgttatcttgtggtgtgtacagttaatcttcgccttcaaccgtgattgtaagcttgctgacactctcaccagaagcagatgctggcacagactttttatacagtctgctgaattgtgagccaaataaacttggttttttaataaa

SEQ ID NO: 141284 - DNA, 413 bp, Homo sapiens
aacgaggaagtggtgggggccgccgtgcccaggggcactggcctgggggcaggggagggaagagggatggcaacagagagatggatgggcaacatccgcaccatggagaggactctggccagcacttgcacttagcatcactgatcaacaaggcaaaagggtgggactggcctgggggcaggggagggaagagggatggcaacagagaggtgctgggatttctggctaaagagaccagaagacacccatggttgttcatggcaagactcccagctgcattcaggcatttgggaccttctgtcaccgtcattggtcattctgggtcttcagtccccaagcgaccatgcctactgctgctttcgtgggtcagccctggaaatgcccaggggcctaggggctggcctgccctcaga

SEQ ID NO: 141285 - DNA, 1569 bp, Homo sapiens
gcgcgggcgtggggcgctggggggccggtcgggcagcgctgcgggagcagccgccggcaccgccgccttgcaccatcgcatcatgtccgggcagctggagcgttgcgagcgcgaatggcacgagctggagggagaatttcaagaactgcaggagacgcacaggatctacaagcagaagctggaggagctggctgcgctgcagacgctgtgtagcagttccatcagtaagcagaagaagcacctcaaggacttgaagcttacactccagaggtgcaaacgccatgccagtcgggaggaggcggagctcgttcagcagatggcagcgaacatcaaggagcggcaggacgtcttcttcgacatggaggcctacctgcccaagaagaacgggctctacttgaacctggtcctcggcaatgtgaacgtgaccctcctcagcaaccaggccaagttcgcctacaaggacgaatatgagaagttcaagctctacctgaccatcatcctgctcctgggtgccgtggcatgtcgatttgtccttcactacagggtgactgacgaagtcttcaacttcctgctggtgtggtattactgcaccctgaccattcgggagagcattctcatcagcaacggctcaagaattaaaggctggtgggtgtctcaccactacgtctccacattcctgtccggagtgatgctgacctggcctaatggacccatttatcagaagtttcgcaaccagttcttagcattttccatttttcagagctgcgtccagttcctgcaatattattaccagaggggctgcctctaccggctgcgggccctgggggagaggaaccacctggatctcacagtggttctggcagctctacaatgccgtcacgctgtttgagctctccagccacgaggaatgcagagaatggcaggtgttcgtactggcgttcaccttcctcatcctcttcctcggcaacttcctgaccacgctcaaagtcgtgcatgccaagctccagaagaacagaggcaagacaaagcagccgtgagcctcgggctcctgtgccctcggcccggacttcagactgcagggggctcccgggctccttcccagcagccctctcaggcccgtggcatcgctgggagagggcccaggccctggtcccccagtggaccccagtggtctagaggaatgtgagccccgcctgtccgcacagtgtccgcccacctatttatgacatatttaatgctgggtcccccatcgtccctggaacccgaggcctcactcctgtgcttgaaggtggctgaggccgggccagtcttcctggggatggggcctgaagcctcagggagcccctctgttcccactcctgtcatttgaacccctctgggtggggtttggatgtgcctcgcggggttggatttatgctgacctgctacttaccaggcccaggctggggtggtgtgaaccctcagtgtcctgtggcgcccccaccccggggccactctgcttctgctgtgagccccctcctcgcccaccccgccacgtggtgagggttattttaagttctcagagaccca

SEQ ID NO: 141286 - DNA, 308 bp, Homo sapiens
gtagaaggtgggaggctggggcccggggagtccatagccctcctccctctgagtgacgccccttcccctgtgcctgcatctctgtccgcaggtgcaaacgccatgccagtcgggaggaggcggagctcgttcagcagatggcagcgaacatcaaggagcggcaggacgtcttcttcgacatggaggcctacctgcccaagaagaacgggtaggagctggcaacctccccacccctagcacaggcccatgcccaggcctagcacagctggtccatataactctcgccttcctgctggtgctcagattga

SEQ ID NO: 141287 - DNA, 1634 bp, Homo sapiens
gcgcgggcgtggggcgctggggggccggtcgggcagcgctgcgggagcagccgccggcaccgccgccttgcaccatcgcatcatgtccgggcagctggagcgttgcgagcgcgaatggcacgagctggagggagaatttcaagaactgcaggagacgcacaggatctacaagcagaagctggaggagctggctgcgctgcagacgctgtgtagcagttccatcagtaagcagaagaagcacctcaaggacttgaagcttacactccagaggtgcaaacgccatgccagtcgggaggaggcggagctcgttcagcagatggcagcgaacatcaaggagcggcaggacgtcttcttcgacatggaggcctacctgcccaagaagaacgggctctacttgaacctggtcctcggcaatgtgaacgtgaccctcctcagcaaccaggccaagttcgcctacaaggacgaatatgagaagttcaagctctacctgaccatcatcctgctcctgggtgccgtggcatgtcgatttgtccttcactacagggtgactgacgaagtcttcaacttcctgctggtgtggtattactgcaccctgaccattcgggagagcattctcatcagcaacggctcaagaattaaaggctggtgggtgtctcaccactacgtctccacattcctgtccggagtgatgctgacctggcctaatggacccatttatcagaagtttcgcaaccagttcttagcattttccatttttcagagctgcgtccagttcctgcaatattattaccagaggggctgcctctaccggctgcgggccctgggggagaggaaccacctggatctcacagtggaagggttccagtcctggatgtggcggggcctcacctttctcctgcccttcctcttctgtggccatttctggcagctctacaatgccgtcacgctgtttgagctctccagccacgaggaatgcagagaatggcaggtgttcgtactggcgttcaccttcctcatcctcttcctcggcaacttcctgaccacgctcaaagtcgtgcatgccaagctccagaagaacagaggcaagacaaagcagccgtgagcctcgggctcctgtgccctcggcccggacttcagactgcagggggctcccgggctccttcccagcagccctctcaggcccgtggcatcgctgggagagggcccaggccctggtcccccagtggaccccagtggtctagaggaatgtgagccccgcctgtccgcacagtgtccgcccacctatttatgacatatttaatgctgggtcccccatcgtccctggaacccgaggcctcactcctgtgcttgaaggtggctgaggccgggccagtcttcctggggatggggcctgaagcctcagggagcccctctgttcccactcctgtcatttgaacccctctgggtggggtttggatgtgcctcgcggggttggatttatgctgacctgctacttaccaggcccaggctggggtggtgtgaaccctcagtgtcctgtggcgcccccaccccggggccactctgcttctgctgtgagccccctcctcgcccaccccgccacgtggtgagggttattttaagttctcagagaccca

SEQ ID NO: 141288 - DNA, 680 bp, Homo sapiens
tatgtagagatgaactaacagtctatcaccatcctctgagaaaagccaacacaatgaaatagacaaattcagcaaataacagaactaaacctcagtattgattaatggggcaatgagtacaatagataatcctttaagggacttctacaacattagccactattgagttctgtggtgtgctgaatgctggcttgtctctaatatgactgcacattatgctcctttcagttgatttacatgtttaagagtcagttatacttaggggagatttacttgttgcagtttcataattttattcagtattacataaaatgatgaaatatgagtgtaagaagaaagctcctcccttgaaaaacaaggtgaatgctttgcaatgacagtagcgggttgctgcaaaaaaaatgaatgctgatgcgctcatgcaggacagctgcaaaagatttgagggcgtgcgtgaaagtctaggactctgcactgagattactttgcaagttctttaagttcttgcttcgctttaaagttctaacctctatgtcatgagtatgccaggagataatggaagggaaactgaagaaattaggaatgttttctagaactgaaaagaaaggtctgagtctaaagttgaaaggctttgcaagtgccaatcaggattaaaacacacaaatacatacacaaactca

SEQ ID NO: 141289 - DNA, 323 bp, Homo sapiens
ggttctatcaactaggattaagtttgttgcaataaaagacaagcccaaaattgaggtgcttaagcagcatggaaatttattttgttctcactcatagaaacaagcttggagtaggctgaccctggctggtggggcagtcccatggctggcagaggccccaactccttccagctctctcatgtccttaagggaactgcaccctcaggtcaggttgtgggtcttggaacttgggcatcaggagagagcaagcgggtgaggaagggcaggcttccttcctttaaggaaattccagtccctctgtccttggccagtgatcaggtaca

SEQ ID NO: 141290 - DNA, 837 bp, Homo sapiens
attcctgttttctaatggtttgatcatagtactgtagttaagtcgagtcagcatttgctaacaatttttttctttaggtctgttattgaattctttattttgaacttcttatttggctgaattttgtcaagtggacttttttgccctaattaagtgaagttgttacgtatgtatagaaaagtacatgaataagtacacttttacacaatactcatttaaacatcacccagatcaagatgtggatcattgccagaattagttttgcaatttttggggaaatttatagtaatggtatcatatattacatactcttttgtttctttcatttaattgtatctctgaatttccatgctgttgcatgtaacaaaaatttgttgtttttcattgctgtgtagtatcccatatgactataccgtaatttattgatggacattcaaattgttccagtttccggcagttgtgataatgctgttaagaacattattttaatttttggggggaaacatgtacatttatttcagattgggtctgtacgtactggggttgctgcagcctagggcttacttatgttgagggtttgtagatattgccaattttccaaagctgctctctcagcttacattcttatcagtagcatggaggagttccagttgctcactgacactagctcttgcattatatttaatttctcctattttggtggacgtgcactgatttgtttatggttttaatttaatctccttgaaaaatattgatttgaaacatttttgtatgcctgccagccttgataatcctttttttttggtgaagtacatttcaaatcgtttgcctatttaa

SEQ ID NO: 141291 - DNA, 281 bp, Homo sapiens
ctgaatcaaagcatatgaacatttcttaaagtcttttcataaatattgccaaattttgtccttaaaagtttgactaacatcaaactttaatatcaaatttgactaaaaatatgacagaatacacatttcttgtatatctttaccagcattatctgtctatccatctaccctccatctttccttccctttctataggaatcatcatatatttctttaattaattatgatggtaaataaacctggatattggacatcttctagtttatcttttgcccattttg

SEQ ID NO: 141292 - DNA, 104 bp, Homo sapiens
tagactgcctttgcaggactaacaaattagctataagattagaaattacggtttactagccacgcaacctctggctgcaagattctgaaccttcccaaattgct

SEQ ID NO: 141293 - DNA, 356 bp, Homo sapiens
ttcttcttcaacaatctcttctactctttcactcccccatgcccctaaagagagagaagacatgtggcttatcacaggacaggttacaggttctcttcccgtagcattccactgcctgtgggaaattaaatagcagttgtgttggtggatagtgtttagtttaccaaatgcgcacaggtaagttggcctgttggaaagcctgggaggagaccctgctcacatctgtgcacacatgcacatacacaggggcacccacttggcccctgggtcgggttgcctatcacttacccaagataaagcagaactgggcctggccagaacagcagaaccagtattaatacctgaaatgggtacag

SEQ ID NO: 141294 - DNA, 665 bp, Homo sapiens
gttcaaggattcttataccttagcctcccgagtagctgggtttacaggcatatgccatcatgcccggcgaatttttgtatttttagtagagacaaggtttcgccatgttgaccaggctggtctcgaactcctgggtttaagtgatctgcccacctcggcctttcaaagtgctgggattacaggcataagctaccgtgcccagcacatatagaacatatttatgaaaacattcagattaaatgtttttcatttttatgaaaacattcagattaaacatttttatgaaaacattcagattcttttgctatcaactttcagcaagagaatgggtctgcctgtttgtctctcctttcatacctgtttgcctctaggaagttactggaaagaaaaatgttgtttatgagacataatagcattaattttggcagaaattacagcttagacagggcctcaaaagcattttccatgtggctgtggacctcccaggaggcttgaaccttacctgggagagcccagctatcgacagcacttgaggctgttgctgatatcactttgccctttgtctgtccatttctccttctcccacctccttttattgtttgggttttttgttcttttctttttctgcctaagtcttagcatttctattaatatttaaagacttt

SEQ ID NO: 141295 - DNA, 289 bp, Homo sapiens
ttctgcatccccctaaaaatctggaggagctgaaataagatcaacaaccaaaagttaaaagaaaaaagctcaatgtgaaaagatctttataacaattacagcagtttacaaagaaagagggagcttctctgtgagggtgttaactacctatctccagaaatggtcaagaagctgtaataccaacttgatggcatagaggagattttgcaacagacagaaggctgggccaaatgcacaataagatctttttcagttctgagattctgatttttagataatctacctggga

SEQ ID NO: 141296 - DNA, 354 bp, Homo sapiens
tagatttttaatgaccatcatttcattgcaagcaaatttattaatccagtgatactgatgaaactaagaagctctttggggccgggcgcgatggctcacgcctgtaatcccagaactttgggaggctgaggcgggtggatcacttgaggtcaggagttcaagaccagcctggccaagatggtgaaaccccatctctactaaaaatacaaaaaaattagccgagcatggtggtgggctcctgtaatcttgggaggctgaggcagagaattgcttgaacccaggaggtggaggttgcagtgagccgagatcacgctactgcactccagcctgggtgacagagtgagactcagttta

SEQ ID NO: 141297 - DNA, 386 bp, Homo sapiens
cagatagccagttacaacagttctaatgagtcaaatcacactacagaagtagtttccattttaaatacattatggtgttaaaaaaagaaaaaacttaattccgaaggtattttatgcatggcttcctgaacatcttttctcttaacaaaagcttgttagctttgtcgagttaaggaagtcagcatagagaagctggtatttccttgatgctaaactataccagtgctaaaaacaaaacaaaacaaatcccaacctaattaattctattttgggtctagtttccaaggcagttttcacaaagactattctcagcccactgttcctagttttgtaacttcaaccttcagtagctggaaattgttatattttgggtaattccttgacac

SEQ ID NO: 141298 - DNA, 1112 bp, Homo sapiens
gattgtaaggcactaggacttcctttcttggctcctgaaagggcctcctccacacaggggcccctcacagtggagcccctccctctggggtgtcctatttcaatgttctaagaaagaggctgcctggagggtctatatttggagtatgactcctcagcggggacaggtggatgcgtggggactaacttctgcatatttggtccctgagttttgggattattctgaggggcttgtatgggaggtgcagtgaagttgtaacacaaggcaggacatgaaaaaacttctttttcttggcaattgcttgggatcctgtacattgcccttccacttgtgagggaaaaaaataatgacacggacatcaggtgtgttgcagtgattcacagtcatccacagaccctcaccaccatctccactggaaaatattgaacactcgccactgctagggtagtatgtagtacatgaatggcagacaccggcgagatctcaagtgttacgacggatgaaaattccacctgttaagtctcctttccatccaagctctagcagttggttgttccatgggtgtggtgaggctgatctgattacatgcttatgtaaaatccaaataaagccccttgaatggaaaacaggttaatttgggaagtcactagtaaagcaggttaatttggtaagtcactagtaaagcactaggctcatcaggagttgggtcttaaatatatcctctaggagtcttctctgaagaaggtcttagacacctgaaaaaagatgctgagttcagccagaacttcaaaagttacaaatcacctgtgtaaaattgtcaatattagaaaacgaaatgtctttccaaagattaacttatagatcatattgaatacgtgctggttttgtttaggacaattttgtatttaaaatgtcaagaattactagtcaattttgaaagctgtaaaatagtttgcagtaacagaagacattttaaaatgtggcacaaaataatgtaaacaaaagaatgagtcttttgttatttttacaccctgaatattttttgtgtcaaatgaaaatggctatactgtattttctgattacaatattagaaaagaatgtcatattaaaag

SEQ ID NO: 141299 - DNA, 206 bp, Homo sapiens
tgggaaagaagatttttcaggggatgggaattgtatgaggaactcctgatgccggacacctctgaagacacgtggcccacggcatacggaaggacaccctcaaagatgggtgacagctcccaggctttgtggagggcagaggagagggtccggagagctctgctctcaagtctgcgggcctggatctctaaataggtgccgcctgt

SEQ ID NO: 141300 - DNA, 103 bp, Homo sapiens
agatacacagatttgtgctttgggcatctggagctgatgctccgggtcagaagaatgagtttctccaagacgggcctgtaaatggttccctggtagaaaatga

SEQ ID NO: 141301 - DNA, 158 bp, Homo sapiens
gtttgtgccactgtactcaagactgggcgacaaagtgagatcctgtctcaaaacagaaaaagaaaaagtctctgtgtgtacttctatggtagaatgtgactgttagaaaatactctagaattggctgggtgtggtggctcatgcctataatcccagca

SEQ ID NO: 141302 - DNA, 268 bp, Homo sapiens
cagtagttcatcatgtagcccaagatagggtagcccaagtcagcctaaatctcgtggtgcttcagtggcactgaaagccaaccatagcttccaaacctgacgtagatactttaatgtgataaagtggagctaattttcccatttcatgtgtaagtagatgcaagagtgcactcacctcaatgtggtttgattcctatcccgcaaaagcacacttcagtctcagtattcatgatggtttcagttcacttattggtcattgtccctttgc

SEQ ID NO: 141303 - DNA, 149 bp, Homo sapiens
ttccaatctcagtactgttctagctgcgctttatctggggccagagtcactgtccccttggatctttcccgtggactttggtgcaggctaggagatgcttctgtgcccgctgccagatccgcacccttgagtctgatctgtctctttca

SEQ ID NO: 141304 - DNA, 183 bp, Homo sapiens
gagagtttagggtggtttttcttttggtgaggggatttgctctggtttcacatccattaacacaaaacatgagctagtcagggcccttgtggtctgcggtaaggggatgcctgtggagaaatgggcctgagtgagtcaggccaagagaatgtcttccttcagaatggagtcaactggataact

SEQ ID NO: 141305 - DNA, 184 bp, Homo sapiens
taatgcttacatcctctgtaaagaaagttatcaataccatttgtgcaagacatgctaagagatgaccaccaatgcccattcctcttaacgagtgcatttaagaaaagcctagacattctttaagacaaagcaaaacaaaatttgtctcttaggttggagtattagtctgttctcatgcttctaa

SEQ ID NO: 141306 - DNA, 257 bp, Homo sapiens
cttagaatcccactgtcttctttctggttctaacagaaagcatagtctctgagacatgagtgcccttgcctacttagtccatgcttgcttaccttatacttgctgtcttagtctgtttgggatgctacaacaaaataccatagaccagatagtttataaacaacaaaaattcatttctcagttctgaaggctggaagtccatggagcctgtgggtatagtatctggtaagggtctgtttcctggttcgtagataaca

SEQ ID NO: 141307 - DNA, 289 bp, Homo sapiens
ctccggcaggagcccaggtccggagcttcccacatccaggcgtcccgtccgggataggaatcccgctcccctccggtgcccagcctcggctcctcgcattgcccctcccgggagaaccccactccccgccctcgcgggttagtccttgcactgcctgtttggacacaaagctctgtccatactagcgatgcccgatctcctggaccttctttgcggaattacaccccggatcttaatacgcacgcgcgcctgcgcatacaccccaacacacacacacacatgctcacac

SEQ ID NO: 141308 - DNA, 810 bp, Homo sapiens
tctcggctcactgcaacctccgcatcccgggttcaagcgattctcctgcctcagcctccagagtagctgggattacaggcacctacaacagaagacaatccataaatgaccatgtgatgggtgctccatcaatgatgaaaggaatgaatgagtaccttttatggcatggtgggaggtggaggtggcgggagcacttgaaggtggaggagattggtacatgcctgccccttgtgactgaatctggaacaggtgcacgtttctgcctgcttcgtgaagcaaactgccaaagtcgaaccaaggccagtcaccctgcagggccctcatctcttttcttgagagagtccaaagactgtgggactaggcctgctggtctgctggtgttctcccatctctgcctctgagcaccctgctggaaaggctaccctgagatgttggtggactggatctctgatctagaaaaaactgctcagaggcaaaagctacaagaggcacgttctggcatgaatgatactggctcttccggcccccagattgcagatccacagagaagactatgggtgaaagatgaccccaggtgtagaacttcatcttaggaagagatcacccaaccagagacttcgtacacatcatttggttgattttagttaacgagagcatggaagatgttggaataattgctaacaatcctggccggggaaattaggaagcccatcctctaattaaaatttaatgtagaggaactgaccatcatgaatgaatggactcaattccttgagaagaagacagataatttcaaactatttcctagaa

SEQ ID NO: 141309 - DNA, 145 bp, Homo sapiens
ttcaaatgcatttgttttattacattcaaacagaaaaaaataaaaattttttgtgaataaaagttgatgcaacattccatttctgaacccataaaagtagataggattttcagagttggagcagagaggagaggtgattaaaggt

SEQ ID NO: 141310 - DNA, 314 bp, Homo sapiens
cactagtcaatgatggcaaatagctattttcagctgaagagggatgaacgggggttcaaatcactgaatctactatagatctgtcaggaaggaaagagactgctacttttctcataaaccttcatcccaaatcacgatttacctaatttaaaaaaaattttctttggcatctttatataaaaatgaattactaaaaaaaaaccaattaacaacacatgattcaggtagttctagctaatagaggtgacacatatagggaaagcaatgatcagaacagggtagaaagagaagataaaaagcaaatataattttac

SEQ ID NO: 141311 - DNA, 556 bp, Homo sapiens
actcactgctcagcaatcctcccatctctggcctcccaaagtactgagactacaaacatgagccatcttcccctcccctaggaacctttggggagattgatttgagtaatgacaccgtctcccacgtggcggtgttactggccgcaaatctgtatagctctgcagcaacctcagttctcaccttgtcagaagaaggaattcgattgaggggcataacgcagaagaagagaccgaggcaagtttcagagcaggagtgaaagtttattaaaaagttttagagcaggaatgaaaagaaagtacacttggaagagggccaagcagacatcttggaggtcaagtgccccatttgaccttggacttagggtttgatatgctggcctacttccagcgtcgtgcaccccttttccggtggaatgcccctggaaggttaccagttaaactccgccattttgcctctcaattcacatgcttgggcccactcacccagctcctgagatcttatcaggaagctgctgatcaccagcttgtgtttctagctcttgggaaactgcctttc

SEQ ID NO: 141312 - DNA, 2438 bp, Homo sapiens
ctcgcgaactgggcttctgtgtaaactgaggctaaacaaacacagatggagcgcagcgggcgttctccagaaatgctggcaaggaggcagcgacttcagatgacactctgagcgctccgggaacggacagcccggcggcttcccgaagccggcggcgcagctgcccggggcgagggggagaaagggagagagggagggggagggcgggcgaagcgggagagccagagactcctcggcgctgagcgcggcggcggcccgggcagccccacgcccctgcctcgcgcgccgcccgcgccatgaagcacatcccggtcctcgaggacgggccgtggaagaccgtgtgcgtgaaggagctgaacggccttaagaagctcaagcggaaaggcaaggagccggcgcggcgcgcgaacggctataaaactttccgactggacttggaagcgcccgagccccgcgccgtagccaccaacgggctgcgggacaggacccatcggctgcagccggtcccggtaccggtgccggtgccagtcccagtggcgccggccgttcccccaagagggggcacggacacagccggggagcgcgggggctctcgggcgcccgaggtctccgacgcgcggaaacgctgcttcgccctaggcgcagtggggccaggactccccacgccgccgccgccgccgcctcctgcgccccagagccaggcacctgggggcccagaggcacagcctttccgggagccgggtccgcgtcctcgcatcttgctgtgcgcaccgcccgcgcgccccgcgccgtcagcacccccagcaccgccagcgcccccggagtccactgtgcgccctgcgcccccgacgcgccccggggaaagttcctactcgtcaatttcacacgtaatttacaataaccaccaggattcctccgcgtcgcctaggaaacgaccgggcgaagcgactgccgcctcctccgagatcaaagccctgcagcagacccggaggctcctggcgaacgccagggagcggacgcgggtgcacaccatcagcgcagccttcgaggcgctcaggaagcaggtgccgtgctactcatatgggcagaagctgtccaaactggccatcctgaggatcgcctgtaactacatcctgtccctggcgcggctggctgaccttgactacagtgccgaccacagcaacctcagcttctccgagtgtgtgcagcgctgcacccgcaccctgcaggccgagggacgtgccaagaagcgcaaggagtgactggctgcaggcaagaccaaggccaccactgtgggccctccttccagtcaggcctgaggacaaggtgagctcgctgagtccagcctcgtggtcttctccaagatgccgccagatgcccagcctacagcctctcagggtcggatcggagcacgcctgcctccctctcccctccgccctcacccagccaatccgaggctgcttcgcactttgccctctgcctggtggggaggggagagctcagcccccgactcactcagaccccaaggcccactgtccagctgcagaaattcgttgccaaagattggacagagacaccgaaggaaatggggtggtgaaaccccacagcgaaaagccacaccgttgctctgtgacttttgctcctcctgttgcctgagccccatctcaagccaaagatgagtcagtggttctgctaggaactcatggaatggatgggcatttgatgacccctgggggtcatcttggccctctgacctggtgctctctctccactgggccttgtgctggctgagtgcaagacaagccttaggggctgtgagagggaggctggggtgcctgggcggggctgggagtgggacctgagatccctgcccactctctccccttcattggctgcccaggccactggccccagttctcagtgtcccttgggtccaggctccttgggccctaagcatcaccagaagggagtaagcagggagagaagcaatattactccctcccctacaccagggacttgccccagggcagctacctatgggtctttgcttccccagccagcctctcctcactgtgacccacccccatgggcccccgtcccaggcagccagcaccatgggcaggccctgccatggacagaaaaagagtttttctcttgttcagcctgcacgtggcctgaggaaggagtagaggctgggttggctggagccgtcctactgggcaagatggcgccccacttggagggcggtggtctgttacagggtgtgcaggggcagagaaggaagggaccaggggactgggccagtatgtggaggatggggcctgcgtgttcaaagccaaggcccgccccttccttgtgctcaaatggccaaagctgttcacgtctgtgctcaaccatctgcttcaaattgaagtaaaagccccaaaatgtcaagaaaa

SEQ ID NO: 141313 - DNA, 299 bp, Homo sapiens
  misc_feature (17)..(17): n is a, c, g, or t
  misc_feature (29)..(29): n is a, c, g, or t
atatacaatcagctcgntaccaggtcggnagtggcctgaggaaggagtagaggctgggttggctggagccgtcctactgggcaagatggcgccccacttggagggcggtggtctgttacagggtgtgcaggggcagagaaggaagggaccaggggactgggccagtatgtggaggatggggcctgcgtgttcaaagccaaggcccgccccttccttgtgctcaaatggccaaagctgttcacgtctgtgctcaaccatctgcttcaaattgaagtaaaagccccaaaatgtcaagaaaa

SEQ ID NO: 141314 - DNA, 1320 bp, Homo sapiens
aagtctgtcccttggagaagatgtgaaagcagatctgtcaaacgcaaggatgtccaggcttgagtgttaaagaaaacaccagtgcagcttatgatgcagcttgtacagcgtaattccacttttcgtaaaatactgtatgagtgactggctgcaggcaagaccaaggccaccactgtgggccctccttccagtcaggcctgaggacaaggtgagctcgctgagtccagcctcgtggtcttctccaagatgccgccagatgcccagcctacagcctctcagggtcggatcggagcacgcctgcctccctctcccctccgccctcacccagccaatccgaggctgcttcgcactttgccctctgcctggtggggaggggagagctcagcccccgactcactcagaccccaaggcccactgtccagctgcagaaattcgttgccaaagattggacagagacaccgaaggaaatggggtggtgaaaccccacagcgaaaagccacaccgttgctctgtgacttttgctcctcctgttgcctgagccccatctcaagccaaagatgagtcagtggttctgctaggaactcatggaatggatgggcatttgatgacccctgggggtcatcttggccctctgacctggtgctctctctccactgggccttgtgctggctgagtgcaagacaagccttaggggctgtgagagggaggctggggtgcctgggcggggctgggagtgggacctgagatccctgcccactctctccccttcattggctgcccaggccactggccccagttctcagtgtcccttgggtccaggctccttgggccctaagcatcaccagaagggagtaagcagggagagaagcaatattactccctcccctacaccagggacttgccccagggcagctacctatgggtctttgcttccccagccagcctctcctcactgtgacccacccccatgggcccccgtcccaggcagccagcaccatgggcaggccctgccatggacagaaaaagagtttttctcttgttcagcctgcacgtggcctgaggaaggagtagaggctgggttggctggagccgtcctactgggcaagatggcgccccacttggagggcggtggtctgttacagggtgtgcaggggcagagaaggaagggaccaggggactgggccagtatgtggaggatggggcctgcgtgttcaaagccaaggcccgccccttccttgtgctcaaatggccaaagctgttcacgtctgtgctcaaccatctgcttcaaattgaagtaaaagccccaaaatgtcaagaaaa

SEQ ID NO: 141315 - DNA, 2059 bp, Homo sapiens
ctcgcgaactgggcttctgtgtaaactgaggctaaacaaacacagatggagcgcagcgggcgttctccagaaatgctggcaaggaggcagcgacttcagatgacactctgagcgctccgggaacggacagcccggcggcttcccgaagccggcggcgcagctgcccggggcgagggggagaaagggagagagggagggggagggcgggcgaagcgggagagccagagactcctcggcgctgagcgcggcggcggcccgggcagccccacgcccctgcctcgcgcgccgcccgcgccatgaagcacatcccggtcctcgaggacgggccgtggaagaccgtgtgcgtgaaggagctgaacggccttaagaagctcaagcggaaaggcaaggagccggcgcggcgcgcgaacggctataaaactttccgactggacttggaagcgcccgagccccgcgccgtagccaccaacgggctgcgggacaggacccatcggctgcagccggtcccggtaccggtgccggtgccagtcccagtggcgccggccgttcccccaagagggggcacggacacagccggggagcgcgggggctctcgggcgcccgaggtctccgacgcgcggaaacgctgcttcgccctaggcgcagtggggccaggactccccacgccgccgccgccgccgcctcctgcgccccagagccaggcacctgggggcccagaggcacagcctttccgggagccgggtccgcgtcctcgcatcttgctgtgcgcaccgcccgcgcgccccgcgccgtcagcacccccagcaccgccagcgcccccggagtccactgtgcgccctgcgcccccgacgcgccccggggaaagttcctactcgtcaatttcacacgtaatttacaataaccaccaggattcctccgcgtcgcctaggaaacgaccgggcgaagcgactgccgcctcctccgagatcaaagccctgcagcagacccggaggctcctggcgaacgccagggagcggacgcgggtgcacaccatcagcgcagccttcgaggcgctcaggaagcaggtgccgtgctactcatatgggcagaagctgtccaaactggccatcctgaggatcgcctgtaactacatcctgtccctggcgcggctggctgaccttgactacagtgccgaccacagcaacctcagcttctccgagtgtgtgcagcgctgcacccgcaccctgcaggccgagggacgtgccaagaagcgcaaggagtgactggctgcaggcaagaccaaggccaccactgtgggccctccttccagtcaggcctgaggacaaggtgagctcgctgagtccagcctcgtggtcttctccaagatggcgccccacttggagggcggtggtctgttacagggtgtgcaggggcagagaaggaagggaccaggggactgggccagtatgtggaggatggggcctgcgtgttcaaagccaaggcccgccccttccttgtgctcaaatggccaaagctgttcacgtctgtgctcaaccatctgcttcaaattgaagtaaaagccccaaaatgtcaagaaaaaaaaaaaaaaaaaaaaaaaaaaccggtgtgggggcgcgccgggggcccgcgggaagaggttttcagagaaccatgcggtggggcggcggggggccccgagaggggagaagagggaaagagggggccaaagaggggtgttcccagaggagaaactcggggcccgagagaaaagagggcggggaattcctccccacaataaaaaaagacgccgcggggggcaacccgggagcgggttcgcggaacaacaaatccacgagagaggggagttcggaggaggcacactaagagggggaatcctaattaacagagagggagtccaccagagggcgggagcctggcgagatatatataaagatattaaagccccccgcgggacagcggggggacaacgcacgcacgcgcagaacacagcagaagcgaccagaagcacagcaaaacacacaaagaaaacgaaagcaaaacacacgaaccaacagaagga

SEQ ID NO: 141316 - DNA, 249 bp, Homo sapiens
ggaacagggggacagtgtgggctctggaggcagccaggccggggtttgaatcctggctcttccacttatcgaacccttcaaggtgggggcccctctgcctggaggactcagtgaagggacattctgcagctgtccagaaacaggaaccaggtggagcaggggcagcttttaatggctggtcatgtctttcaggagtgactggctgcaggcaagaccaaggccaccactgtgggccctccttccagtcag

SEQ ID NO: 141317 - DNA, 2919 bp, Homo sapiens
ctcgcgaactgggcttctgtgtaaactgaggctaaacaaacacagatggagcgcagcgggcgttctccagaaatgctggcaaggaggcagcgacttcagatgacactctgagcgctccgggaacggacagcccggcggcttcccgaagccggcggcgcagctgcccggggcgagggggagaaagggagagagggagggggagggcgggcgaagcgggagagccagagactcctcggcgctgagcgcggcggcggcccgggcagccccacgcccctgcctcgcgcgccgcccgcgccatgaagcacatcccggtcctcgaggacgggccgtggaagaccgtgtgcgtgaaggagctgaacggccttaagaagctcaagcggaaaggcaaggagccggcgcggcgcgcgaacggctataaaactttccgactggacttggaagcgcccgagccccgcgccgtagccaccaacgggctgcgggacaggacccatcggctgcagccggtcccggtaccggtgccggtgccagtcccagtggcgccggccgttcccccaagagggggcacggacacagccggggagcgcgggggctctcgggcgcccgaggtctccgacgcgcggaaacgctgcttcgccctaggcgcagtggggccaggactccccacgccgccgccgccgccgcctcctgcgccccagagccaggcacctgggggcccagaggcacagcctttccgggagccgggtccgcgtcctcgcatcttgctgtgcgcaccgcccgcgcgccccgcgccgtcagcacccccagcaccgccagcgcccccggagtccactgtgcgccctgcgcccccgacgcgccccggggaaagttcctactcgtcaatttcacacgtaatttacaataaccaccaggattcctccgcgtcgcctaggaaacgaccgggcgaagcgactgccgcctcctccgagatcaaagccctgcagcagacccggaggctcctggcgaacgccagggagcggacgcgggtgcacaccatcagcgcagccttcgaggcgctcaggaagcaggtgccgtgctactcatatgggcagaagctgtccaaactggccatcctgaggatcgcctgtaactacatcctgtccctggcgcggctggctgaccttgactacagtgccgaccacagcaacctcagcttctccgagtgtgtgcagcgctgcacccgcaccctgcaggccgagggacgtgccaagaagcgcaaggagtgactggctgcaggcaagaccaaggccaccactgtgggccctccttccagtcaggcctgaggacaaggtgagctcgctgagtccagcctcgtggtcttctccaagatgccgccagatgcccagcctacagcctctcagggtcggatcggagcacgcctgcctccctctcccctccgccctcacccagccaatccgaggctgcttcgcactttgccctctgcctggtggggaggggagagctcagcccccgactcactcagaccccaaggcccactgtccagctgcagaaattcgttgccaaagattggacagagacaccgaaggaaatggggtggtgaaaccccacagcgaaaagccacaccgttgctctgtgacttttgctcctcctgttgcctgagccccatctcaagccaaagatgagtcagtggttctgctaggaactcatggaatggatgggcatttgatgacccctgggggtcatcttggccctctgacctggtgctctctctccactgggccttgtgctggctgagtgcaagacaagccttaggggctgtgagagggaggctggggtgcctgggcggggctgggagtgggacctgagatccctgcccactctctccccttcattggctgcccaggccactggccccagttctcagtgtcccttgggtccaggctccttgggccctaagcatcaccagaagggagtaagcagggagagaagcaatattactccctcccctacaccagggacttgccccagggcagctacctatgggtctttgcttccccagccagcctctcctcactgtgacccacccccatgggcccccgtcccaggcagccagcaccatgggcaggccctgccatggacagaaaaagagtttttctcttgttcagcctgcacgtggcctgaggaaggagtagaggctgggttggctggagccgtcctactgggcaagatggcgccccacttggagggcggtggtctgttacagggtgtgcaggggcagagaaggaagggaccaggggactgggccagtatgtggaggatggggcctgcgtgttcaaagccaaggcccgccccttccttgtgctcaaatggccaaagctgttcacgtctgtgctcaaccatctgcttcaaattgaagtaaaagccccaaaatgtcaagaaaaaaaaaaaaaaaaaaaaaaaaaaccggtgtgggggcgcgccgggggcccgcgggaagaggttttcagagaaccatgcggtggggcggcggggggccccgagaggggagaagagggaaagagggggccaaagaggggtgttcccagaggagaaactcggggcccgagagaaaagagggcggggaattcctccccacaataaaaaaagacgccgcggggggcaacccgggagcgggttcgcggaacaacaaatccacgagagaggggagttcggaggaggcacactaagagggggaatcctaattaacagagagggagtccaccagagggcgggagcctggcgagatatatataaagatattaaagccccccgcgggacagcggggggacaacgcacgcacgcgcagaacacagcagaagcgaccagaagcacagcaaaacacacaaagaaaacgaaagcaaaacacacgaaccaacagaagga

SEQ ID NO: 141318 - DNA, 334 bp, Homo sapiens
tcacacgtaatttacaataaccaccaggattcctccgcgtcgcctaggaaacgaccgggcgaagcgactgccgcctcctccgagatcaaagccctgcagcagacccggaggctcctggcgaacgccagggagcggacgcgggtgcacaccatcagcgcagccttcgaggcgctcaggaagcaggtacccgctcgccgccgcacgccctcactgcgccgggggacgactgcgggaatgggtgggcgagtggccggggcgggatagaggtgtgtttaaggggcaagctgccccgcccggtccgaccctggtgcccagacaggtgtgggcagtccta

SEQ ID NO: 141319 - DNA, 588 bp, Homo sapiens
ggtcggtcctacttttcacaggagttacagtcctgttaggagacaaaacacaaatattagttcatttcatcctcacaagcaccatgctagctagcaaggtggtcttcatcctttcttagcagaggtgcaaactgagatccagattcaccacacactcctagtccatccacccccagccatgcaattgcttctctgaaccccaccacccccacagcagtgcttactcttgaactatttatctgacgcatcacatgtcactctgcagggatgcagctgctgaatctgggtactgggaatgccacaacctgcagttttgccaggtatgctcacctatcaggaaaggactgctccagtatgaaaagatgctataaagtaactcttgagcattgccctgaggttacagttactattagtatcattgatttattactgctgtacccacttgcttgctgttatagataaactccaattcagagagaagttgagaaggagagtccttggtgctctttctcctgtgccctttccatttctgcccatgaagatgatggctgctttctctgaactccttgacccttgcttagcaacaag

SEQ ID NO: 141320 - DNA, 900 bp, Homo sapiens
agtttgggactagcctggccaacatggtgaaatcccgtttctactaaaaatacaaaaattagccgggtgtggtagcaggcatctgtaattccagctacttgggagactgaggcaggagaattgcttgaacctgggaggggcaggttgcagtgagctgagattgcgccactgtgctccagccttggtgataaagtgagactctgtctcaaaaaagaaaaaaaaaaggaaagaagagattctggaggtagaaacaagaaatagtttcctgatctttgctgggcaaccgtacttttggtaatacttgattaactcaaatcctctattgctttctaggaacttgtttgactagattatatcgtatatcattagcagggtgacagttacctactaaattttgaagttatatgaataatctttattttcaagaatcttatgaattttatatgttctgcaaaaacaggtaaaacttcattcctcttttactctatttaaaaaaactgtaatggatggatatatataattgcgtgtgtgtaaaagtaatattaatatatcaatatcatgatcttactggtatatgtttttctaagagaatttttctaagagaattaggtaagcctttccccactcttttaacatcttagtataataaaaaattgagtgagagtattcacacccagagatactgtccaaagtagaagaactagcttcaagactgggaactgactagggtgctaattagagcccctctgtagtccttttatagaaaatggtaaactcaggccattgcctatgaaaacattgaaaagaagggaaggaggagaagggttctggaggaagcaaggaggaaactgccaatgatggtagtcattgttctgaagtcagtttggtgcccaatctaag

SEQ ID NO: 141321 - DNA, 693 bp, Homo sapiens
aaagctgagtaagattggaatcatggagttagggtggtccatccaccgccatttctttctttaccaagcatcacctggcagcaagaataaactagtactcttatttaggaaaacccttagaaaattaagagataaggaaaacccttagaaaattaagaggtatcaatgcaacctccatcaaaataccagtgacattcttcacagtcatagaaaaaagatcctaaaatttatatggaaccacaaaagagccagaatagccaaagctatcctgagcaaaaagaacaaaactggaagcatcacattacccgacttcagattatacaacagagttatagtaaccaaaacagcatggcactggcataaaaacaggaacagaatagagaacccagaaacaaatccatatgtctgcagtgaattcattttcagcaaaggtaccaaaaacatacattggggaaaagacagtctcttcaataaatgatactgggaaaactgatacccgtatgcagaagaatgaaaccagacccactacctcccaccatatacaaaaatcaagtcaaaatggattagagacttaaatctaagccctcaaactatgaaactactaaaaggaaatattggggaaactctctaggacattagagtgggcaaagatttcctgagtaatacctcacaaacagaggcagccaaaacaaa

SEQ ID NO: 141322 - DNA, 405 bp, Homo sapiens
agacacacaggtgcttcatcagaggtgctgctgtgtggggaggaaccttcacatgcacagaaggccacgtgcatgttttcccttcaatacccagtcacatcccagcacacacacccatagtcacacagagccatgccactcactgagttacacacacctgctcactgtgcacataaagatgaccatgcactggtctggctgtgcccacacacactcacatcacagacaggaagacaaagcacactcacccccttacactcactcacacacttgccggtcctggtgggtcatccacctcccacctaaagtcacttaatctcagcagagttcactctcatcagacaccaccacaccctcacagagggttacactggtccagggtccacagcctacacccacaatcat

SEQ ID NO: 141323 - DNA, 141 bp, Homo sapiens
agttgatggcagaggcagcagaaaactcccacccctgtctgaagtgctctctaaaaatagactgcaataaatggagccaaaataattcccccagcccagctgctggagcactctgggcacggtctttgacagcctcaccat

SEQ ID NO: 141324 - DNA, 111 bp, Homo sapiens
aagaacacagggattgttaagtatatgtaatgttgtcattctttggcatcactttggcgaattgcttttgtttttacccatgtgaggaaatgtagcaaaaagacagtatct

SEQ ID NO: 141325 - DNA, 359 bp, Homo sapiens
tggccgtgtggccgagtggggtgggacatcggagaaacggtgagtgttgcttcctcgtgcgtgttcacgctttctactctgaatcgtgagcagtgaatacacgagttgtgcgtgtggcggcagcagaagtgagaggtgccagtttcctcagctccatcctgggggctgagcgaggctgcagcagaaaggcctgggggcatgtggaaagaggatggctgaaggtggtgggtgtgctggcaggggagggatgatgaaggtctggcccaagacgggaacgaggatggaagatgagactgagggatgttcacgagccagagttgttggggccagggaagagactgggtgcagatgggatgggg

SEQ ID NO: 141326 - DNA, 364 bp, Homo sapiens
accagaggacacaagacagaaagatcttccgtgaaaagaaggggattagtgaatttctgcatgctacaagtggagaacattattctccttcttcttgctgggctgccagaacaactgctccgtaggtagaatatgacagtttggcttggttatttgttgcataagatgtgttgttgtgaattataagattgctagttactggaaaatggtacatttagatttacaaataaaaatggaaatatgacaaaattagagctcaggaaatgtaggtattttgaaaagtcactcttgtcttctaagcctttatttctacgtaataaataatgatgttctttagcagttatattattaaaaagtaaaaagt

SEQ ID NO: 141327 - DNA, 656 bp, Homo sapiens
gaaattttaaaacttaaagctgtctcgagaaattattcttttatatttggctattctggttttgtggtagcaggataagttctgttaaggatagtgtgtggctgggcatgatggctagtgcctaaaatgccagcactttggcaggctgaggtaggaggattgtttgaactcctgacctcaggtgatccatccgcctgggcctcccaaggtgctggaattacaggcatgagccaccgtgcccggcccgttttttaaatggtgacaagtccttgagtttttatagccgaaatcttaagacttaaaaatgctgttatatctatctgtggcctcatatgtctacaggtcactactgaacacatatcacatagtcatcacccctcttctgtaagtggggaaacagaggcatggttttcagtgaggcaggccataggttatttatattaatgaaatgacagagcaggtaatgaactccaggtgtcctgattcctttggagtaaccatgtgaagaaatactagagggatgccagattccacagtcaatcaggtggagaaagctctttctgtgtggttttggtgatgatctcgctctattgggaaacagtgtttatttctaaacaagcttaggtctctttagtgggaaagtaggaggtgaggac

SEQ ID NO: 141328 - DNA, 180 bp, Homo sapiens
caccgcccacaaggtgcaagtactggtttatccctggttttggataaagagactgaggcatggacgcgtgggtatcatagctaatcatggtggagtggccttgagcccagacagcccggctgcagagcctgtgctctgatgatggtgggacggccgcacccggaggccctgggatgtggg

SEQ ID NO: 141329 - DNA, 138 bp, Homo sapiens
ggacactgctgtgaccctgtagctgcagacatgtgacatgtgtctccacgaagggaagaggctgccgtccactgtcgctttctgcagtgacactgtgccctggcccgggctctctgctgggttgcagaagtgcctggg

SEQ ID NO: 141330 - DNA, 362 bp, Homo sapiens
tgggttgaggaggtaatagaaggtcagaaagtaaagatagtaaatatagaccattctttcaagaagtttggctgtggggctgggcatggtggtccatgccttaattccagtactttgcgaggcctaggtgggaggattgcttgagcctaggagtttgagaccagctggggcaatataatgagatgtcgtctcgacaaaaaaatttttaaaagtagccgaacatagtggtgcatgcctgtaatcccagctacttgggaggctgaggtgggaggatcacttatgcccaggaggttgaggctgcagtgaactgagattgtgccactgcactgtagcctgggcggcttagtgagatgctgtctgaa

SEQ ID NO: 141331 - DNA, 556 bp, Homo sapiens
gtgatgcagcatgggatgacagaaaaagcgctgttcatccaacctgcccctatctcccatgtatcagccctggtctgggtttgaatcctggctctgccatttacaagttatatgaccttgggcaagcctcctgagttctctgagctgggcgagggtcctgggggtgttgccgtttctgcgtgctcacatagcagtcgtgtgcctggcacgtagttcatgctgaatggatcttggcatgtttctggaacttatgtgctgtgctcctcaccttctccccagcctctgtgttgtcccacagatggctgtgagtggctgatcggtggaagtgcagacgtgagtagcacttggcatgaggtgggccccagccccaccctctctccttggggtacactctggcaggcttcaccttcaccatcggctttgggctctgccatggccacatccttggctgtggctctcaccaccattttgggacactttacgggtcccgcttgaagccaatgggaggaaacctaatttcctgccacaggaaattgttctgctagggaagaatata

SEQ ID NO: 141332 - DNA, 380 bp, Homo sapiens
catgattttaccgtccccttcctagagttctccctttctcccctgcccaggctgcacccctggagagcccagctcaggcccctggcccctatgaagcctctcctgaataatccatcagcctgccctgagctcatccagtctccagtgacgattgtgctctccaccagcaggacacaccggagcactttctctgtccctgagaattggactccattccacagttaggtcctgggtcacatacagacatttcacatcccctcctcagtattccccagcagcgtgcagcacagtgcgggcttctaggaggcagtcggtggatatttacccatgattttaagaggtctgtcttgaccaggaatgttgagaagtgcgcctgggtg

SEQ ID NO: 141333 - DNA, 210 bp, Homo sapiens
catgggttctgatgagcatgaaccaactggcatgaccaccaggagccaccatctctccagcccgggaagggcttgtgtgtgttgggggaggggagggcacgtgcggctggtctgaggttttctcccgtgtgaaatgtcagattcccaggacttttagagttccaggcatgtgtcctgggtcccttcgccagagcctacaccaaaggctct

SEQ ID NO: 141334 - DNA, 448 bp, Homo sapiens
attttttattatggaatatcttaaataaaaaatgataataaataataaccagtctatcacccagccttatcaaatcttactattttgctatatttacttctgaccactttttctctttaaaaagaaaatattggctgggcacagtgggtcatgcctgtaattccagcactttgggaagctgaggcgggtggatcacctgaggtcaggagttcgagaccagcctgaccaacgtggtaagaccctgtctctactaaatacaaaaaattagctaggcatggcggcgcatgcctgtaatcccagctacttgggaggctgaggcaggagaatcagttgaacccaggaggtggaggttgcagtgagcccagatcgcaccattgaactccagcctgggcaacaagagcgaaactctctaaaaaaaaaaaaaagagaaaagattatagatataatt

SEQ ID NO: 141335 - DNA, 456 bp, Homo sapiens
catcaagagggatgactggcttggcacacacagcggctgggatgaccctggaaaccatgctcagggtgagaagccaggtgagccagttcctacagaatatcctgaatgggaagacccagacacagaaagccactcaacggtcgccaggggctggggaggcgggaagcggggagcgaccgaggaacaggcacgcacggggtttcctctaactccaaagctgctgaatatgccgaaagccaccccctgaaacacacggagctcgtgctgtgacgactacacctcagcaaacctgcttccagaaaagtaaacaaccctcacctgtctcaaactcaactttctttgctggctatcgtcatctccaaatactaaagacaggtttctaaagaaacaacccaggggcaactggatgatgggactcagcatcaaggaaaaatcaatcccgtggggcccagctga

SEQ ID NO: 141336 - DNA, 543 bp, Homo sapiens
tctgtgacccatagttggagtcactgcaaacgtaacctctcttagtctcaacacacgtatgtttattagcatccttgaggagacctgcaatgaaaacaaaattacctttgtttaatctacttttccgaacttatttgatcccagggtcccccatctctctcttacacacacatacacatgcacccacacacacacaatgcccattccatactgaggaaccctgatccagtggaatttttcctatccttctgatctctcaggagaataagaaatatcgtctgaaaatctggaaatcattctgcttatctttcaagatggacacatatttctttgtctacgaaactttcctcagagaccactatttaataggaatctatccctttttctgcacaagtataagaattactaactcttctcatttttcatgtgtgttgtgtaatgcctaatatttatgggtttgtgtgtgtacagaatcctgaataatagagactcagtgatggagttaactttcttcttttttccactagagcataattttagatt

SEQ ID NO: 141337 - DNA, 385 bp, Homo sapiens
catgttgtatgcgggctagcggggaagtgtgtgagtgcatgtgaaagatggcggttccatggaggaaccaagtgcggggagtgatgtgtgggggccgcagttctcttagcgtagaccatacactctgagagaaccatgggactgaccgggactaacagtgttccacatatggcttagggaggtgacaatgaggtgaggagtgactgctgcctaggaggtcgttcaggagagggccaccctccctgtgcctgccactccctcggggaccaggagggtccagcgacatcatggggtcggatgtaggttgaagtctcagcagagcaccgtccacagtaggtggacagtcactcctgctcccaacagcgggaggtcacaggaaaccatg

SEQ ID NO: 141338 - DNA, 389 bp, Homo sapiens
cggagctaacctcctgccagtcctctggcttaagttctcctgacggtgctccagcctaatctcctgaacagtctactgcctaactactcccttgacgatccttctgtggctatggggtggttgcttcagtctcttgctggcctctgctctaaatcctgctgtggctccacattgcccccacgcttctgcctcttccctgttctggctttgctgctctttggcttccagtaatctcgatcctcctaagtctggctcctttctccctcttccttcactctcctgccatcctggatgagcctccctcccagtctatccttcaagacctcaccttctccaagctgttgctggccacccatgctcctgggtgtggggtgggattgctgatataa

SEQ ID NO: 141339 - DNA, 213 bp, Homo sapiens
tggctcctgaaatttagtgtatgcatactaaggtctacctctagtgggataggataaaacagtcaggaagatattttcctaaagtaaatactgcttccactcagtttttcattgcaaactggataatagccatctgcagataaaatttttgatgggagtacatgatgagagtactttaaattgtttgtagaaagaaaagctatatactttaac

SEQ ID NO: 141340 - DNA, 449 bp, Homo sapiens
taagctggtagggaaagctagtaatacacacatactcaccacacacacaggtgggtcagagaaaaaaaacaagtacaaatggcttagggacatgagaagtgtggccctaactttcgctgaaagggaccctattaacattaaccctcacctctgggtcagagagggttggcactctagggcctgccttgaagctttacctactgggaccaaaaggactgcttggaaagctattttaggccaggtgtggtggctcaagcctgtaatcccagcactttgggaggcagaggcgggtggatcacctgaggtcaggagttcaagacaagcctggccaacatggtgaagccccgtctctgctaaaaatacaaaaaattagctgggcatggtgggcacctgtagtcccagctactcgggaggctgaggcaggagagtcgcttgaacccgggatgcgg

SEQ ID NO: 141341 - DNA, 380 bp, Homo sapiens
tcgctagtgggcagggatacgtgcattcacaaagtcacccgctccttaagggagacgttgtctactccggacaaggctcatgtggaggggcctcttcccgttctcctcttcagaatgacaggagcctgccacagaagagtactcataagtggagcgactaccacttacggatgagttgttaaatacaagacaggcactacaccaggtgcacaagagcgagtcacccaacttgtcctcatcccggcctagcaagggaggtactgacatcatccccgtttcacagatgccaacactgaggctcagagaggttaagtcactgacccgagattacaccacatgcaaatgtggtgaaggaaggactctaacccccgtctctgcag

SEQ ID NO: 141342 - DNA, 531 bp, Homo sapiens
gtttggaatgtcaggatcaataatagtcctcagaacattgtaaccttactccagcaactatgctaacataaagcagagaagtctgaagtctgtccattagtattggtgacaaggtcatggttgcttttaaactttgcttgccaaaatacctggagggaactcaatgtgcatactcaagtttctgctgtggcaaattgactgttgctaccccaggagaccctaggaagacaatcagttcatgtctgactggagacattgcaactttatttgtatgaactatttgggtcaaatttcagggggacatgtcactacagaggggcagagggtcatgataatgaaaagaatcattacgttatattggtaattagatgtatgactctacaaacttgtttttccttgggtgttagtaacattctttttggagatagatggcattttacaaagtctatccacagaaaactggaagtatctaaagataatgataatgacgagaatatattcattgtaatctggcatacagaattttctctg

SEQ ID NO: 141343 - DNA, 232 bp, Homo sapiens
accctatagtagccttcgggcctcccctggcttctggctctagcgtggctcccatgattcagtcttgtttggagcctcctccatccctggcttgagatcctccctgtacttctggccaagtatctgggccacagcactagcccagcctcctgccccctgccccctgcccttgatcttgtccccagtctcctcccaaaggcttatctgagtccaaggttggcattgccgtaca

SEQ ID NO: 141344 - DNA, 395 bp, Homo sapiens
attgactccgacccctccataatgtgtgcccacaagatctctgaaagacatagtccgtcttttcaagtcaacgtaagaggcctctgggataaggtcctgccctcccacagcccaaggcatgatccctcaagtcccatgcttagtaaggggcacaagcccttagaaggtcacaagacaatatccaccaaatattgtctacatatttaatcctttgactcagtagtccatcctgaatattattcaacaaaccaaaatctctttccaaagatgctgtttacaaaaaattagccgggcgtggtggcgggtgcctgtagtcccagctacttgggaggctgaggcaggagaatggcatgaacctgggaggtggagcttgcagtgagccgagattgcaccac

SEQ ID NO: 141345 - DNA, 263 bp, Homo sapiens
tttattgaaaagactctccttttcccattgcgtgttattgatgcctttgtcaaagataaggtggctgtaaatgcgtggatttatacctgagttctctcatctgtttcactgatccatgtgtctgtttttatgccagtaccatgctgttttgattactatagctttgtaataaattttgaagtcaggtagtgtgatgcctccagcttcattctttttgctcaggattgctttggctattcatagtcttgtggttccatgtaaat

SEQ ID NO: 141346 - DNA, 579 bp, Homo sapiens
cgctggtggccctgtaatcccagctttcttcttggcttcctatcttgggtctctctctagaggctgccacattctctcacaccgtaggcccttctgggctctgtcttcctcatcaaattcccttcccagccccaccttccctgcgagcttccttagaacccatctccttggcctggctggtggccctgtaatcccagcactttgggaggccgaggtggggagattgcttgaggtcaggagttcaagaccagcctggccaacacagcaaaacccgtctctactaaaaatacaaaaattagctaggcgtggtggagtgtgcctgtaatgccagctacttgtgaggctgcggcaggagaatcacttgaacccggaggcagaggttgcagtgagatcgtgccactacacttcagcctgggcgacagtgtgagactctatcttaaagaaaaaaaaattagaacctgtctccctgccaaaggcatgagttgggtgccagccacccttgaaacatcactgcctgcacccctatgtcactggttagatgagaacacctcactatctctggaggatcgacacagtctt

SEQ ID NO: 141347 - DNA, 444 bp, Homo sapiens
  misc_feature (14)..(14): n is a, c, g, or t
ccctccccgggttnttgcgggggggcaatccccccgtgaggacccccccaacacttagacaggccgggtttgacaatatatatcaaacttacaaatgtatcttctcgtttctggaagtggatcctataggtaaacttaggaatgtttgttatgtgatatatacaaggtgattcctacaactattgtgtgtaacagcaaacgatttgaatattatcaacagtaatccaaaaagtttgttaacatttttctccctttttctattcatatctgcatgaggctggattttcttcatatatgccaagacaacatacagcatcagagtagggaaaagcccaaatgtccattaataggaaattggctaagtaaatcatggtacagcaatacaatggaatattacatagtcgaaaaagaatggtaggatgaggtccattcagtgacaagaaa

SEQ ID NO: 141348 - DNA, 488 bp, Homo sapiens
gtggactgcatctacccagcaggtgtgctgagctgaaggaagaagatggatggggacagagtatagaaaagaaagcaggtagcccagatagggtggttctcaaaataagagacaataagggtaggatctctccttataagcttgaatttatcctcctctaattcctagtggcactatacattttaatagtatttgaagccacgttagaattatgacagcatatgttaaaattgtgcaagtggttcagtaatataagctaacatttcctgaaatgatttaaaaatctggcagactgcaaagttatcctgataaggaacttggttttgattacagtaatgagatatacgggatggtgtcagaaactgtcttccagttgacacaataatccataatttatagattggcttaaaaattaaaagacaaagtcaattataactaattatgatgctacatttgctcgaggagttactatatcctttgggataaag

SEQ ID NO: 141349 - DNA, 310 bp, Homo sapiens
ctcactcaccccttgcccccgctagaaaggttgttcctgtctacactgaacagttccaaatcacagtaagcacatagaggtcagtgggtttggatcaaatcccagctcacccctcattatatgaccttacacatcacttaacctcccttagcctgtttttcttttcttcatctgtgtaacagcaacaatgcatgccacctgccacatatccctcatgggcttgttgtaaaattcagtgagaagatgatgggtttttcagtaccatgtccagcacgtggtacacatgcaacaaccacccaatctgatccga

SEQ ID NO: 141350 - DNA, 384 bp, Homo sapiens
gcaggggaatcgcttgaacctgggagatggaggttacagtgagccaagattgcaccactgcattctagcctgagcaacagagcaagactccaactcatatatatatgtatatagtaaatccatcgtgttctctatagatttcttgatgtttccagtttttctattgcaaatttatcctttatgattattcttgcatatgtttctttataacatataagaaattaatatgtatgcaattcagtataagatgtgtttcttatggtaggtctctagggcagaggttggcaaactttttctctaaagggccagatagtaaacattttagactttgtaggtcatactgtctctgttgcagcagttcagctctgcctttgtagcataaaa

SEQ ID NO: 141351 - DNA, 303 bp, Homo sapiens
ttactctattgctcaatggacctcatcacattgaatcctcacaagaggttatcatctttatagatgagaaaatagaaaggtcaagtaacttgcttatgattacaaagctactacattggagaatcagtattcaaacccacatatatctgacttcaaagtccaaaaaattcattaaggacaagggccatgttatctatctcactcttgaatccagagcttggcccctagtaggtgcttaacaaatacttattaaatcaatgtatgaacagcaggataggaagaaaacagaggatggaacgctgg

SEQ ID NO: 141352 - DNA, 483 bp, Homo sapiens
atacaagcgtacatgtaattatgtaacttacctttatggattgattgaaggttgaaaatcagaccatttcatttcttttatagagatatctgaaaatatcagtgttgcattttaaattttgtaaacttaaagtccattgtctataaatgatctgtttctgaccttcacagaaagtttgggagaaaagatttactctaatattcaccaatcatagttgcataaaatctagactgtctccagagtgtacaacattattttaacatacggcttgcattactaatagagtttatatgttaattcgtatggtattctagatacttaagttttgtacctttcaaaatagaaaagaaatataaggtcattttcttcacatatttcatatttaaatgattacttcgcttagcaaatataacttgttacatgagtaagatcaaggattattaagacactgtatctgtatctcagccatcctgaaaatttgtt

SEQ ID NO: 141353 - DNA, 111 bp, Homo sapiens
ggattacaggcatgagccacactgtacccggccagaaactttcttaaagctagtttaaaaaccgatcatttggtcctcatttcccattttggctttgtttcttcagtgtgg

SEQ ID NO: 141354 - DNA, 743 bp, Homo sapiens
ccaaagactgaaaatgatgcaaagtgaattgtttctatctttgcaatccaaacgttcctcttcgtttactctccagatcccttccagcaaattggtattgccactctccctccatccctgggttctcggggctaattctgttccagctcgctctgtttagctctttcttcgagcagaacccaagctaggatcttgccttccagagaatgctttaaaaagccttgtttcccaatatactgcgtttcagttttccacgagtgcagccatgctcgggagaggcgtacgagctgcttttacatgtgagaggtgaacaaatcaaaggtgagcccgttctgcctcagtgaggccttttgtgtaaaaagggccttctggagtaaagcaatcaggttgactgacaactgccgaggctaccagtgacagtcctgctccgtgggataacttggagaaaaatcagggccaaaagcagacaaaaggatgtccagaaactggaggtggggaagcctgagtgagatcaaacaacctgaaaatgtgtcttccatccatttagggctttatgtgcagcgaggttggagtggctggctgaggatgtcaacattttaaatttgtcactgctttgacttccctagctttatctcccttcagatcaaagcggggagactaggagttgtcactactggatttggtttcagactatgttggtgtacccttgctttatgaccttggggtttcctgtctttgcttgg

SEQ ID NO: 141355 - DNA, 643 bp, Homo sapiens
cctacatcgagcgtagacggacggataaacagacatggcacctacatccatgaatggatggataaacagacgtggcacctacatccgcggacggatggataaacagacgtggcagctacatccacgaacggatgaataaacagacgtggcacctacatccacgaacggatggataaacagacgtggcacctacatccacggacggatggataaatagacatggcagctacatccacagatggacaggcggataaacagacgtggcagctacatccacgggtgggtggacaaacagatatggcacctacatccacggacggatggataaacagatgtggcacctacatccatggacggatggatgggtaaacagacatggcacctacgtccacagacggatggatggacgaagagacgtggcacctacatccacggacagacagaaggacaaacagacgtggcacctacatccacagatggatggataaatagacgtggcacctacatccacggatggatggatggataaacagacatggcacctacattcacggacggatggatggataaacagatgtggcacctatatccacagacggataaacagacgtggcacctacatccacggacggacgggcagata

SEQ ID NO: 141356 - DNA, 489 bp, Homo sapiens
tgataaatttccttacgttcatttttttgctccattaggttagctcattactcgttttgttaatatctccgatttatccacggttcccgtcctctacccccttttatttgtatcttagtataagcggaacctaccgtagaactccacttgaggcattacactcatgaaggatggtcctaatcacctcggccctgttgtctgttctccgcatctagtgccgaaagggggatgtgcctgcatctatcatctattatcaccatcattttaagaagaaagaccattttgacactgaacaattatatttactaaagcatcagaggtaaccaaggtgttaatcatgaacacaggtcttcatgatgtggctgagagttcctggcttagggactgtggttactaatcatcaacattccctggacctgcagggctggtaaattctaccaatgccttttaagatcaacactgtcacccgggaggcggagcttgcagtga

SEQ ID NO: 141357 - DNA, 310 bp, Homo sapiens
aaactgaggaggaggtgggctgagtggaggtaattgtatttgataaactcaattactacttctcagcaactgggatgtgtcctgctaatacaatggaaaaaatgattatgtgttctatccctttgatgatccaagtgaacaaaagtagaaataacaaagtttctagaacctggcaacttcaaggcaagaccagatcctaaattatggaagatatttcagaactcattagtacagattggactgacctacttagcctgtttgtggatggcagatacctgaatgccaggaaaaaagggatgttggtagcccc

SEQ ID NO: 141358 - DNA, 437 bp, Homo sapiens
tagaaagaataaggaaaccagaacgcaaagggtcaagaggaattggccatgcacagaggttgatgaatcactttccatgcggagggaccacagtaacaacagcaagggctgtgagtagagtggcttgagtgagggtggagtgagacgagatgaggcaggtaggtgggaactgggtgatgtaggattttggaggccattatgagaaattcaaatattcagtgaaatgtgacactactgaaaaagtttagagaagggggcagtgtagcctgattcaagttttaaaagattgctgtggttgccatatggagactagtttaggaggaaacaggagtggaagcaggaaaagcagtgaggacaggctgctgctctaggccagacgagagtccccgatggtcaaaccagacaatgcatcagagaggactgagtggcttcaagac

SEQ ID NO: 141359 - DNA, 807 bp, Homo sapiens
tccaaatgtcatgattcagatgcacataaaatgcaaccacatccctattttgggatgaaagaagtgatgcttgggtgattaagaaatttacctatgggcacatacctggttccagaatcaggattaattggtctgacttaaaatgccatgctgcttacataactgagacaggtcaaaaagttaaagaggactaaatccagaaagacttcattagtggcttcgattagataggaatatgattttatgagcatctgagggagggaaacactttgctgtagagtttctcaaactgtgacctgtgggtcatttgcatcaagacatctggaatgtttgttaaaaatctccatttctggtttcttccccaaagctataaaattagagccagtaatctcagcactcttgggattactttgggaggccaaggtgggtggatcgcaacatggcgaaaccccatctctacaaaaagtacaaaatatttagctgggcatggtggagcatgcctgtagtcccagctactcaggaggctgaggtgggagaattcacttgaaactggaaggttgaggctgcagtgagccaagatcacaccactgcactccagacaaagtgaggtcctgtttccaaaaaaagtagagcctctggtggtgaagtttggaaatctgcatttttaacaatctccatgttttactgtaattaaagtttcaatatagtattaggaggcttatatgcccctttagataccacccaatgccccctcaccagagtccagggactcttacagtaactgtccccattgaacaactaaaggct

SEQ ID NO: 141360 - DNA, 771 bp, Homo sapiens
ggaagccaagaagctaccatctgtgctgtgtttatatctaaagaattatttagaagactgattactcagttagctgggcctcctgaccttctagtattacacttagaaaggtaactaacactttcttgaaagtcacttcacttttaataacccatataattccctcaatataaggtagggatcaaagtattgaccaaagcttcacactgagtctcatgtgttgtggatgctatgaatgatcacttgtggttaacagatagtgactcctaacagtgatatgttagtaaatatttaacaatgggctctctagggaaaaataactgattcatagcatttgccagtttccatgatggaatagtaagaacaattttataaattcaaaaacatagatgaaatatagaaattcctcaaaagacaataatgaccaaaatcaactcaagcaaagtaggaagcccaaatagccctatatttattaaagaaaatgaattcacaaatctgcccaccagaaaaattgcaagtccagatggctttactagggaagtatatcaattgcataaggaataaattacactaatcttgcacaaaacccttcagaaaatagagaggaaacacttcccaactcaccttttgattccagaatttatactgttaccagaattaggtgaagacattatgagaaaagaaaattatagatcagaaatcagtatacttcatgaatagagatgaaaagaaaattctttgcaaagtatcagcagattgaatccagtaaaa

SEQ ID NO: 141361 - DNA, 270 bp, Homo sapiens
gacctgtaatatgccaaaagaaaaaagataactgccattttagagatcaatacccacttaaaatagtcttcaaaactgaagatgaaatagacatttttagataaatgaaagctgagataatttattgccagcagatttagttatggttaatattagggtaaatacaaatgatcattttaaaaattcttttaatttcttcaaaagacaacagctaaaaggaaagttgcagtgttatattatgggttgtataatgtatgtacgttaaaatat

SEQ ID NO: 141362 - DNA, 754 bp, Homo sapiens
tgaggtctgaagtgggagtatgagtcgatacagtgaagcactgaggatgtgggggagaggaaacggttttggagggaacgagttgggtacggaagggaggctggtttgagggagtggtggggtcgtggaagggagcctggggctgggtagacagaagcctaagaaagggagacaggacatggaattgagaaaagacgagggaaggggtacacggaaggaaaagatgtggggaagagcgcgagaggcctggccagggttgggatgggtgggacaggctgagaaagtccattaggtgaaatcctaggaggcagcaggctggaaaaggttccagcgaaggtcgcaaggaaccccacaggggaaaacgtggtgggagctcagggtctcccagcaccctgccgccctctgctgggctctgcctgacaccggcgaggctcagtctgggaggaggtggagcccagggaagtgtagccaagcagggacaaggagagaccgcagcctcgtggaaaaccgggactggaggcaggaaacaggtagggagggaagggggtggccgcaaactggggtgggttggggaaggtgcgaaaggacgacgccccgtagcctaagggcagaatttcaggggggtggagggtgcagagtgaaggggagggcattgcagtgcgcgcggtaagggtttctcatctcacctgagtgtggcgttcgattcactggcagcaggaaagacggggatcagagaagagttaccactggcgcc

SEQ ID NO: 141363 - DNA, 308 bp, Homo sapiens
aaattcaaaaacctttgttcagtgttaaccttactcagtctctctgcagcatttggcactactaaccaagctctttttacttactttactcttcctgcctgggcttcagagaaaatatacatccttcaactttctcttacttcctattatttcctagcctccttcaccagctcttcttgaatggcccatacttaaacattggaatcccctagagatctctctttgtctctttattttcttactccatatatccaccttgtgtaatatgaaccactctatgacttcaacaacaatctctaggctaatcc

SEQ ID NO: 141364 - DNA, 386 bp, Homo sapiens
gtctgagtgccaggaacataagaggtgctcagatgaatgaccaaatgaatgaattaaaaataatgcacataatgactcaattaaaaaatagtagacatcttgctgaaggtaatctatgaatggctaacaagcagatgaaacgcaaattaaaaccacaatgaggtaccacatcatgctcacttggaaggcaaaaaaataaaataaaatcaagggctgggcgcggtggctcacgcctataatcccagcactttgggaggccaaggcgaacagatcaccagaggtcaggagttcgaggtcagcctggccaatatgatgaaaccttgtctctactaaaaatacaaaaattagccgggtgtggttatgggtgcctgtaatcccagctactt

SEQ ID NO: 141365 - DNA, 438 bp, Homo sapiens
tcaccttcctccaggccccacctttaacattccgatgacaattccacatgagttttggtagagacacagagctgaattttattattctgtccctggctccccaaatctcatgtccttctcacattgcaaaatacaatgatgccttccctacagtcccccaaaatcttatatcattacagcatttatacaaatgttgaaagcttaaagtctcatcagacacaaggctacagtttcttaggcccatgagcctctgaaatataacgcaagttaactacttccaaggtacaatgcttgtacaggcattgggtaagcattcccagccaaaaggaagaacgttgccggaaaaaaacaaaacacagataggacttaccggccccatgaaactacaaacccagaaggccagtcattccatcctacagttccaaaatcacccttttt

SEQ ID NO: 141366 - DNA, 496 bp, Homo sapiens
ctttttctcagcatgaggcttgtgagattcgtccaggtcaccatgtgtagtcgtagctcattcattctcattctaccttgagaatacacctccgtggcttacatcatttaaatggtggtaaaattcattccctgccagggtcatatttccgaggaccatcgagcctggccagagtccaacccctctcagactttatcctcctcgccactcttcattggtcctagacttgctgcatctcttctactcagttacccagacctgaattccaatcttgacttcaccaacttagacaatacttttgacatttctgaccctctgctttagcaattctcaacctttgtgccctgtctccctttgacagcatggtgacgtctatgggccccatcagtctaatgttctccaaattcattagataaaatgcactggattgcaaaggaaaccaattatgttgaaaccaattagaaaataaattcatgctgaaatatatgtccccttg

SEQ ID NO: 141367 - DNA, 167 bp, Homo sapiens
cacccaaacacattatactccttgctacaggtgataatgttcctgctctgtgatttttatgttaaccttaatttaagtcttccaacaaatgctgatgaaaaaaaaatacacaaaactttgtatttgcttttttaaaaaatgctagaacagtgaggtggtgtttaaaa

SEQ ID NO: 141368 - DNA, 450 bp, Homo sapiens
gaaaaaggaagtgtggaatgatggatgagaagttgtatgggaagatgaatagaagaataggtggttgaataaattaaaaggtgtgtggttggatgaatgaatgagtgggatgatagatggacctaagtggttagtggatggacaggaggatggatggatgtgagagccccagaaggacataaggaaagatgggtggatagatggatgggcggatggaaggatatttaggaggatgaatgagcatgtgtgtggagagaggtgcccattcacactggcttgaacacatgggttagctgagccaaatgccagccctatgacaggccatcagtagctttccctgagctgttctgccaagaagctaaaattcattcaagccatgtggacttgttattgaggggaaaaagaatgagctctccctctttccacttggaagattcaccaactccccac

SEQ ID NO: 141369 - DNA, 281 bp, Homo sapiens
ggtgatgggagggatttatacatagcagaggcaatatagtatgggagaggtagagaggtcttggcaaatgtggagacacaatgaacatgagctgactcttcctcagtactgtgtttctccacctgacctagaaaaccttgattcctgaaaagcctcaccctaactttgccacaacctggcgatccatccatactgttcacagccctcaggagagactggataattatgaacacaccttgctttcttccatcatttcccttttccccaagggaacatagctg

SEQ ID NO: 141370 - DNA, 710 bp, Homo sapiens
catgaagacactagaaggatactcaaaaataacaaaagtgacttgctgtttgaaaagggattaaagtttatgggagcagaggccaagacaaatgtaccagtggataatttctataccatttaccttttaaaacatatgaatatatgacttacaaataattttaaaggccctccatataatattatatactttctcttgattctgggacacatttgattctgatacacttttgaaaagtctattctgatacacttttgaaagatgtaaccaaacagctcttcaatttactgtgttttaattgtttacagtcatagcatcctgcttggaccagggcagtggcatgaagcccagcacaggaagtaacttagaggaatttcttactttatagttgatagataagacatatcagtgactcagctgtctttactaattaattgaaaactgatatagccagaatacctttatagtattaatatttgaaaatgaacacgtctaaaaatgaactatgactactggaattttcttagataagggatagcgacaagacagaacttatcagtgaattataaaagaaaaacttatgaaatagttgactttatttttttttaaataatcaacagggtgagtcacatgttgtgaagatgcacactgcttctcactttttgccactaaaataggacaggttttatctctgacttggaaattcatga

SEQ ID NO: 141371 - DNA, 189 bp, Homo sapiens
caggacacttgtgatgatagaggacagaatttgtggagagatcattagccccagatttatgaatttattgtgttgtttccgaaaagtggtctgctgaagagttcactatagtaatttcaaagtaatctttaaacttagtatgcacatatgcattttttcatttttactgtattaagttttctatttgtc

SEQ ID NO: 141372 - DNA, 824 bp, Homo sapiens
acccgtctctactaaaaatgcaaaattagcagggcgtggtggcacatgcctgtaatcccagctactcgggaggctgaggcaggagaatcacttgaacccgggaggcggagtttgcagtgagccgaggttgtgccactgcctccagcccgggaagcaagagcgaaactccgtctcaaaaagaaaagaaaagaaaagaaaagaaatatattgatgccgggtcccactcccccaggagtgtgatttaattgatctaggttgaggtctgggcatccgagttttagaagccctcctggtatcctaatgaaccagctctccacagccagcctggcatgacatttagggtgtcactcgacattaaacatctgagaagcaggtttaactttaggcttacacttacagattaataaaatggaattttttgactagtggctcatctaagcagggcagccatttactaaaataaccttgtgctagctagaatgttctttatgggggaggggagcaagttgctgttcccatgaccagtgtagtcggatgcatcaactcattgtgggcccctaggtattgggatagaggcacatccttaactaggtcctgcaccctgtggcctggactccctcaccagcttcttctagaactccatggggttctagccacaccatgggatgcatacacgcttcatctaactgataacatgctcattgtttagcatttatgttagacaatggttcccccccatggcagcagctccagacctcccagaccacgtcaaatcttcctgttatgtgctcatcattctagtcctactcctacacagccatgat

SEQ ID NO: 141373 - DNA, 151 bp, Homo sapiens
tgaggatccctgggagccttaccctgacaatgacggcctgcatggtccgggggtgagggcagagtctgctgtggacacctggctgtgggcatgaggggagggtgagggctcccggagtgtttagggctcccggagggttaagggctcccgg

SEQ ID NO: 141374 - DNA, 369 bp, Homo sapiens
atgtcccattcagcagcctaagactaagtggttggtactaacagctgagtcaatgggtgactcacagccaggacctaaccctgcctcatcttttctgcctttccgtgactaatgcctcatgcccactaaggtcagagacaggacagaaattcatgcatctgcctctttggcatatgtagttttatacctctcaggattttgtcaccatttttcattttctctgttcgttaactatgtaaattttaatcatataatcatcttttaaactttttcaataacaaaaaatctgaatattttcttttcatataaaaagctcttctaatagtatgcattattctaaaactcattttaacatccttacaacaaaat

SEQ ID NO: 141375 - DNA, 432 bp, Homo sapiens
accatattaagagggtaaagaagaatcacatgatcatatcagttggtacagaaaaggcatttgacaaaattcaacactcattcattattttttttaagttcagaaaaaaataggaatgggggcatttctttaacttgataaagagcttctcttgaaaagttagagctaatattacactcagtggtgatgctttctccctaattttggtaataagacaaggatgtctgctgttaccactcttatttgacaaagtgctgaaagttctagacagtgcagtaaagcaagaaaaggaaataagagacatataggttggaaaggaagaaatcaaactgtccttatttgaagatgacatgattgtctacatagggaataataagtaatttacagaaaactcccagaattcataaatgagttcagcaaggttgcagggta

SEQ ID NO: 141376 - DNA, 473 bp, Homo sapiens
ctttttatggctcttaagtcccgaacaattatacacacccattacagttttttggctgggaggatgagaatgttacagggactgatagagatttagggagtctaataatgtgctttccactacaggttttagtcctttatagcttctggttgttgatgatattatgcaggtttgataaagatttagatgggggccaggcatggtggctcatgcctgtaatcccagcgctttgggaggccaaggtgggcagaacacaaggtcaggagattgagaccatcctggctaacatggtgaaaccctgtctctactaaaaacacaaaaaattagccgggcgtggaggcacgtgcctgtagtctcagttacttgggagactgaggcaggagaatcgcttaaacccgggaggcagagattgcaatgagccgagatcacgctactgcactccagcctgggcgacagagcgagactccatctca

SEQ ID NO: 141377 - DNA, 410 bp, Homo sapiens
ggggtctagaggatcccatcagtttacacaaaaaaaatgctgagtaaatgtttgttctatgaatgtaagtgtaggaatatctggaattaatactttcagatagcgtctgttgaaacacaagtaggagcaaagtgctagaaggctaaatatggtcagggtttctgcagaggcattgtctcagaagttttaataagctgttgaaacacagttaagcaagagcaaagtgctggaaggctaaatgtggacagggtttctgcagaggcattgtctcagaagttttaataagctaaagaaatctggtcttgagtggctagcccccacctagagctcactgctcagtagatgtgaacatggatggtggtggtacacgcattgggtgattgattgtgcaagatgaaaaatagaggtgg

SEQ ID NO: 141378 - DNA, 283 bp, Homo sapiens
ctacattcatgccctcattttgattcaagatcttgaaatccatggtacattgtagtttaggttagcatatcacaatgtgaactcgaggccgagcgcggtggcttatgcctgtaatcccagcactttgggaggccaaggcgggtggattacttgaggtcaggagttcgagaccagcctcaccaacatggtgaaaccctgtctctactaaaaatacaaaatcacctgggcctggcggccaacaaactacttgggaggctgaggcaggagaatcacttgaacctgg

SEQ ID NO: 141379 - DNA, 282 bp, Homo sapiens
  misc_feature (7)..(7): n is a, c, g, or t
tgacacntcccacaatcctggctcactggtggtcatttctcccctcagtgggcatttcctggaagactctatcctttgagggatctaacccacagacctgaccacgagccccaagtcctcaggcttcacttccccactaggcctgactacgcaagacagagcctgatgctgggggtgggggcaggctgtggcaggcatggtggctcacgcctgtaatcccagcactttgggaggcagaggcaggtggatcacgaggtcaggagttcaagaccagcctggcca

SEQ ID NO: 141380 - DNA, 721 bp, Homo sapiens
caaagcattaaaagccagttaaaatgtatgtaaattacctgaaagagcaagcaaaacctaatactcagtcagtgaatttatttactacattagtataactttccctgaatcagactccaaaggaacacatcagggctggggtatgctgggtggccaggaggagtgggttcaggagcaggggaaagagtgaggaggtgaggaggtagccctgcacgggctgcagtggggaggaaggggaacatggacagcctaggggcagctggaggcctggatgttggtggctctgtctctctgcccttcgtagatgcctctgtcacagcactttatgcattttaccacctgtgtacagttgctcctctctacctggacttccagtgtctggaggatatggggccactcactgatctttgtattttcaatgcccagtatagtgcttggaacatagtgtcttcttaacaactgttgaacaaatatccacattaataattgtggagggtgtatataatgtgaagtggcccagaaaatataattctcttacataaaattttttgttctctcccccatccctccacttctgcccagaatataagctctacacaagcagagatctttgtgctgacatatgccaagccctataaataatgacaggcacataacatttgtttggatgaaggaatgacttcaggctactttttgttatgagcattaaataagataatat

SEQ ID NO: 141381 - DNA, 520 bp, Homo sapiens
aatatgaaggttttcattataaagacaataataaaagccatgagaatggagaatattgtttaaggagaaagtaaagagaagggggtttgatattaagttctgaattactattagcatttaaggatagaatcagaggaggatgaaggagagaagaggagtcaaagacatagaaggaaagccaggagagtgtggtgccctagaagctgctgtatccctcaccaatcccaggacagtgactggccaggacagtgttcagtaattattggttgaatgaaatcaaaaggagatcattttaaaaaagagggaataattaactgaattgagtgctgctgaaagggttacatgaactattcattggattggcagcatggatattgctgatgataggggcagaagtcatgtcggaatggttttaacagagcttgcgtaggaggtgagaaagtatgagaaagatagcaggttcttaattctgatgaagtttggctgtgaagggagcagaaaaatggagtattagctgaag

SEQ ID NO: 141382 - DNA, 531 bp, Homo sapiens
acaacgcccgggtaattttgtatttttagtagagacggggggtttctccatgttggtcaggctggtctagaactccagacctcaggtgatacccctgcctcagcctcccaatgtgctgggattacagctgtgaagccaccgcgcccggctgctgtgatagttgagatgtaaaccaaaaataaaattctaagccacccaatccgactgaatggacccttcctgttgagcaaggacattccaaagtaaactgaaaagaccagcttaggccatgatgggaaggggaggtgtcaacatgcctcattctaccttcctccctctggaatccagacacaactgaccagcattaacattaaaacagagatcttaagctgggcacagtggctcatgcctgtaatcccagcactttgggaggccaaggtgggatcacctgaggtcagaagttcatagaccagcctggccagtatggtgaagccatgtctctactaaaaatacaaaattagccggacattgtggtgcacgtctgtcatccca

SEQ ID NO: 141383 - DNA, 1243 bp, Homo sapiens
gaaaaaagaaggaggaggaagaggaggaggaggacacaggtgtgaccattgtcctccagagctacagattctggcattctaaaggaagaaggacaaagaaaccaaaaccagtttctccaaggcttcagcttttcagtctgaccatttgatctacattccattattttggcagcatggtgggagtggattcggaatggacaaaaacccttttcagaattagatcagctaattaaaatgcacacaaacttctttgttccttcacctcaaggagcgtccttggaaagcaaacatacttcggggcatttcagtgggggcgcagtgcgagggtgtcctttgcgcctcagctccggagaaaaacgaaaggtgggtgggaaactaggatagaggtgaaaagtaagaggggactgaatcagcgaatgacaaagggagcagggctccggacaggggtaggaggaagaagaggagtgactggggcttgtgtcaagcttcttctgaatggctagacagccgccaggtgggagaggcggagggtgaagaggcgggttccgcacgcggttagcctggggctgatctagtcttcagctttcaccggctgggagtccggagctgcagcagaggccacacccagggcttggtggtcccgcgctttccggagctcagcaggcgcttgctgcttgaaccggtcaaagaaggaacgaatgaatgacccttttgccaggatggagacccgggggcctcagggagctgcgaatcccatggactcctcccgcagcctgggggacctcgggccttttccgcgggaggtagggcgcggggctccgctagctccgggcgcccggaatcccgcgacggcaggggcgagccgaagccagggcggcggccacgaggacagaacggcagatcgggccctcggacctcgggccggggaggaattggaccgtgagtcctgggtcagagagaaagtgctctttctcctgcacccagagaggtggttagggactcgaggggaccctgcacgggaagaggtggccggtgcagaggaccttcctcatgcgggtggagaggaccacggcgaggagcccaactacccttctgtctttcaacgacaaaagcgaatttctggcaggcgtgtagccccgccgcgggacgcagcagacccacccaaatacgtgcttgtgcgggtggaggattatcaggtaacacaagaagtgttgcagacctcctgggccaagggtcgcatgac

SEQ ID NO: 141384 - DNA, 416 bp, Homo sapiens
gcttctaagttcccagccccagttctggatgagaaaatggagagcagcctcagtagtcactttccttcaacttcaaggctgccatgagatggtcaccacctcatgaccaggaaggagcatgctgctttggtagactacacatacctccctgtggcagccaggcccccaccacccattctcatcattccacacaaacgtgagcccctaccatgaacaagatgttgcatggagcactggcagaagcagagtgagttgaaggtggcttcctcccaggactgcatggtcacagaccccagcaccagcaaagtatggtcatcaggaccacaggaagggccagagatgggctatggggcactggggtcaggaagagtgccccatcttcctgaagggtgatactggacctggtccttggagaa

SEQ ID NO: 141385 - DNA, 427 bp, Homo sapiens
  misc_feature (14)..(14): n is a, c, g, or t
cagtgcctactacntagcagccattcaaactactatcaatgccttttacaaaatgaggtcattggattgcagagttggctttcgagaagattttgtggcctttctcagctgtctaggtgctgtaggtgctgtgtttctatggctgcaaggatgaagagaaacagaagatcaaacttaaagtcacagcaagtaggtggcagagtgaagagcagatccagcagattctctgaactctcgggtgagcatgctttcagcaccacaacacaccacaatggaacagcttatgaacttcttggaaactatttaaataacaaagagaatgacctttgtcttgagtcattcattatctgtcacaggagacatgagatatcatctttgggcaaggtcttcgccccgttttgtaatttaagtaaaactttaatgctga

SEQ ID NO: 141386 - DNA, 529 bp, Homo sapiens
tccccattcgcagccttgcttcccttatcctcgaatctgccctcctttcaaaaatgcctcctccttcaaatattcacagtgcaaatccccaccattcttctaaggtcaaccccacaggaattaatctgatacaaggattcgtttcattatctcttggtgaaggtcattcttaacaatacaattcctcaatctagatgaactctacgaacatcaactgttcataggaaatgtttcttctgtttatctggatattattcccctaaatacaacataatttacagagatccttgcctcaacagagaattatgttttaagttgtgtcaaccaaaatagtgccacctgccccttgaacaatcttgacccacagctgccacccaacaacccccatttatgtataagttatttattttctgcttctaaagttcacccccaactcttgaggaacaaagaaaaaaccctatgagtgtagctttttcaagccatccaaatctttgtctcctggaaactgcccagtaaaagtttcaaaatg

SEQ ID NO: 141387 - DNA, 210 bp, Homo sapiens
acataagaaattaaatctttttttttagatgtttctcagtggtaaatgtctttacttctcagaccaagtccacatactgtattttgtatctgaattattttaacagttccaattcatgtgactattgtgttttcagaaggtgtatttatgagttaaccttctagttaaataatcacattaattaaaaatagtgcctgagctattgtatat

SEQ ID NO: 141388 - DNA, 345 bp, Homo sapiens
tgtgtagagtgggatggaagagctttatgtaaggctgtggcattgagaaagtcacccaaacctacctatgcagcttaagtgggagtaggtagtggggaagtctcagtaaccaagagggtctcgggcagaaccatgcaaaggcttattggggaggagctgggtgtcagtgaggagtgcaggtgttaaaaatgctttagtaactgcagggtcctttgcatattgagaagatgtgaggctaaatccggagctcagacagcagaggcccaggtgtctctaggacaccttattattttttacctggtctacctgtacagaaatgaatatatcacaaaacagtgctggtcc

SEQ ID NO: 141389 - DNA, 356 bp, Homo sapiens
tgtgtagagtgggatggaagagctttatgtaaggctgtggcattgagaaagtcacccaaacctacctatgcagcttaagtgggagtaggtagtggggaagtctcagtaaccaagagggtctcgggcagaaccatgcaaaggcttattggggaggagctgggtgtcagtgaggagtgcaggtgttaaaaatgctttagtaactgcagggtcctttgcatattgagaagatgtgaggctaaatccggagctcagacagcagaggcccaggtgtctctaggacaccttattattttttacctggtgacacagcatggcatgacggggggtccgcaggctggcgcccaaagcctaaccca

SEQ ID NO: 141390 - DNA, 214 bp, Homo sapiens
ctttgcccttctttttctaatttcttaaggctgaagtttagcttattaatttgaaaccttctttaaatgcaggcatttaaagctataaagttctatctcaacacagctccactgcatcccatatgctattgtatatcaactttttctttccattcacccccaagtattttctaatttccctgtgatttcatctttgatccactggttacttagg

SEQ ID NO: 141391 - DNA, 271 bp, Homo sapiens
tatggtcatgcaatgttggctgaggcttcaggagaaagacagggtgagccatgtgttaaacagctgcttttcacatagggctctaacactgagcaacttctgatttctaacatctcctttaaattcattacaagtaaagaaaaccagggaggcaaggtaaggaggaagagtggagatttacactgattgggttcagcatataacacaaatcttctaagggaagatatactgggcctgtaaaattctctttttaagcggatgccagctgggt

SEQ ID NO: 141392 - DNA, 304 bp, Homo sapiens
tcacccctctgctcactgagataaatgcatgtctgattgcctcatttggagaggctcataagagaatgcaactgtctgttatctacctatgacttggaacttcctccccacttggagttgccccgcttttccagatcagaccaatgtttatcttacatatattgattgctgccccatgtctccctaaaatgtgtaaaaccaagctgtgccccagccaccttgggcgcatgttgtcaggatctgtgccatgtcatggatgcaagttcttaactttggctaaataaactttctgagttgattgtga

SEQ ID NO: 141393 - DNA, 652 bp, Homo sapiens
ccttttctctcagaaaaagtaataatgagcctagtgctctaacacttgggagaaaaatagataaacgcgaccaaacacaagactctgaaatgatagtccttgccaagtgtgtgcagatgggaaactggcttcttttgaatgtggaaggagaggtgtatcccatgtgaggggagcaccgttgtgattttgaaaattgtactgtacatcttcttgttggcatctgcttaatttctagcaatatctcattaacatttcttttgtgagtttttgtaaagcacatcttgaacttttaaacctttaagtgaataagaattctaagtgtatgaaattctttgattaaggaagtgaacgcccagaagtgcatacaatttcttgaaacacttttatcctctgttaaagtttgttgtagaaaatccttgtttaacattatacgccaaagacattctaagcttaatttcaaaaatattaaatgccaaagagcagaaaattcttaaaaacaaccacttctaacttgtcaccttattgttaacattgacagtttcacatggaaatggtcaaatttcagttttcaaagtcatttgactctttcactttaagtcaaatagtaaatgtgactgaatcttcagtattttaattaaaacaattttatgta

SEQ ID NO: 141394 - DNA, 326 bp, Homo sapiens
tggctgctgtatggagtatggatggggatggggaagcaggaccagttaagaagctgaggctgtcttccaggaaggtgcatgggcctggcccactctgtcagtgacagggacagtgacagtgtggacaatgacccacacaagacagtctgcagaggcaccttgagctgcacttgctggtgaaatgggccctcgggctcctgtcttgagccacccactcagtgaagccaggtactgacaagggacagtctcagggagggaaggaggcaggctggggcagaagctgagaattcatgcctggacctgccacatgtgaaatgtcaccagga

SEQ ID NO: 141395 - DNA, 220 bp, Homo sapiens
gtcagcttcaggctcccagctcccctctcctccacgacatcgtgacttcccaaggtccagggactaaggtcatacacaagtctcagggacgtgtatacatttgatttagggagaaatatgtagaataaactgcagcaaaacgactgaagccaaaatgatctctcatgagcatcttgaataacagttattaattctaaatgaagtgacctcctcttaaggg

SEQ ID NO: 141396 - DNA, 341 bp, Homo sapiens
ggctctgtcccgacactggctcattctgttctgtcctcctggatgtctccaggacagcagctccagtcctgaggctccccctagtctccacccatttctcctttccttgaccctgcatcatcattctagtgagagccatataatttcacaccaattctttcccattgtacagaattacattttcttaacatagatgaagatttaaaagcatccctggatctgtttctgtctctgttagcttcaactctatgctgcttttcagctcagcagtcacctcttcctcctctacctcgaaatatttgattcattctccatgggataattggtccccctctctctgt

SEQ ID NO: 141397 - DNA, 333 bp, Homo sapiens
agacctgtgttccctgatgcactggccagctgcttcccggggaggaggaggcagaaatatacagtaactgattgttgcctttggtctgtgaactgtactatggaacactggaacttactccttcacctgactgcatgtttgtgccccataaccagcctcactttctgtctgcctctcacccacacaccctgcctagcctctgggaaccaccagccaactctctgcctctgtaagagccactctttcagtgcccacaaatgagtgagaacatggtacatttgtctttctaccccggcttacttcccttaacatgacagccttcaattccatcca

SEQ ID NO: 141398 - DNA, 270 bp, Homo sapiens
tgctgggattaaaggcgtgagccaccgcaccggcctcaaacgttgttttttaaggaaagccattaggatttgactcaagtcattaagaaagaagaattacttatgaataacaacaataatagtaacacacattctcttagctgtgtattaggtattccactaagctctttgtacaaattaactgattttatctgtataacaactctatgtggtagatactgttattattcctgttttacagatgaagaaacaggctcaggaaggttaagg

SEQ ID NO: 141399 - DNA, 227 bp, Homo sapiens
gtttcaccattttggccaggctggtcttaaactcctgacctcgtgatccacccgcctcggcctcccaaagtgctgggattacaggcatgagccactgcgcccggctgaaaagcaaaattttaataaaaatcctgatgtttggttttcttgcaagatcaccagatccagcaatgttgtgccccagttcctgtgtgtcagcagttggctagaggtcaggaattagtgcc

SEQ ID NO: 141400 - DNA, 372 bp, Homo sapiens
ggcaagcagttcatgaatcaactgttgactacttctgaaacctaaaatgaaataatatatatgaaagctgttattcagtgatttatacttatcaaaatatacttgtcaaaatattaactgatttgtgtttgtcaaaataaatatattcatacatagcaccttggtaaatcacagatctagttgtattgtaggtgcctagaccaacatgacaacttgattatatggcttgagatatttacatcactcttaccacaaaaacgtcaataaacagagcttattaatcttttgaggaggaggaaatgaaggtgtaggaaagcatgtatgaagtgctacagcatttgtatacatccatctttgggaactgagtgagca

SEQ ID NO: 141401 - DNA, 358 bp, Homo sapiens
gaagtctgttcatgtgtgccctgggagagacttgcttcccacacaggccacggtggactctaacggacctgaagaaagggaggcaggcatgatgggaggaaaagctttttggtgaactctgagatcagaaaggtagcgctgtgaagactaataggctctgtttcaaaaaactagtaagttaaggaagattgtgctaaaagaggaaaagattgctgggaacagacatgagcaaacagttggaggcagctcaaggggcttgactgagagctgtgtacagaaaaaaaaattaaaaaagagagagggtgaagcatgggaaaatctgtcactgggacaccaagggagcattgtcacatggaca

SEQ ID NO: 141402 - DNA, 388 bp, Homo sapiens
ggcaaatggtagaaatatgatccaaatatgagccaaacctcattggagtcaatcacaaggtggctggcctcttcagagtgattggcctttaatcttttagaaacaagttaacagagaaggaccatattccttgggatttattaagataaaatatttaataattgttattgcctgtggcatttattgaatgcaaaccacggataaagcatttcacgtaaattctcatttatcttcatcaaacagtttcaacataagcattactatactcttgttacaagtgtataaacctatttccaaatgttaatttgttgaaactctttgaatcaatactgcatcagggattggatgtttggaggattcatatagggaggttataaaggaagcaaag

SEQ ID NO: 141403 - DNA, 326 bp, Homo sapiens
agtggaatatttctagcaattgtgacttagtcgtaaaaatattctcttatcttcttttatcttttaagtcatccaaaggccagatgttgagaaatcaggatgaaggccttccctttactgcaaacaattggcagcctataataagcttaattaaataattgctttggactgtcttgggtataattaatcatttagctctaaagaattgctggaaacaacagtggacacaaaattgaagcattcagggtttctgagatacattttgatgttctcacagcccttactggccctgagttagataagtgaatgtaatttgttttaagttg

SEQ ID NO: 141404 - DNA, 491 bp, Homo sapiens
ggtcctggggcactttgtctcctcgtctctgagctcccctgaccgtaggcctccaccgtccatccttccacccacccatctgtccatcctgtgttcatggggagaacaccctgcaggaggaagcattttaggcactagataggggaggtaagcagacccagatcctacctcctgtcgaggaggggagatcttttgaaggcagtggtgtcccagaaaggagcagtctctgtgtccctgtgagggcactgcctagggtagctgccaccaaggggccttgacaggtcttatggaggaatcggcagtgtctgctatgcctcaaaggagggaagccacaggcatgatgcttgttccgaaggccatcctagcagggcgtctggggccctgcacactgacctgcatgccctcgtcacctgcactctgcatgctcaccatctgacggactcctgcgagggctggggtctccgtgttctgagcctgtccagtggcatctg

SEQ ID NO: 141405 - DNA, 138 bp, Homo sapiens
gaaacagaattttactagtgttttaagttcccaaagcttttttacatatcatggagaacaaatccataatccagcccaaagtgttaataataatacaaagataagtatactatcaaaatctggtgtgaaattctgttg

SEQ ID NO: 141406 - DNA, 454 bp, Homo sapiens
gtatttctcacccaggctaccaggtttgagagaggttccactgcaggtctctctgaaaatagaattgtcagttgaacacttatttcaaacacagcactgtcttaggtgctgtgaaggtactaagaaatattctaatgccttaggtttgctgagtgctttactgttcaacccccacaggcattgcttcattgcaacctgtgatccctgttttataacatgattagatccttgtaatgccaaaccccaccaccctgttggctcctgcctccttacctggagcctccactgtgctaggcctgctgctttgtcctgccagatcaccccattcccacttctcaccagcacttccacgacaggctcacgatgtccccttctggaagcctccccaggccaccctcgctgagcacgcaccctactcaggctgcgctctgtgtgtcacgagtttggcacttac

SEQ ID NO: 141407 - DNA, 269 bp, Homo sapiens
agtcagtttcagctaccctggcccagggagttttatattactgtacactgattttccagaagatttagtaatcagaatgacaaattttggtgatgggcaagaggggggctctttgtaagggagcagatcattggggagcaggatgagaggaaaccatcttatcaagctgtccataacttgcagtgaacattgggcatgtatctcaggcttttcactggcaataattacactcgctaaattttgagtgctatgccaggtgttgggcagtg

SEQ ID NO: 141408 - DNA, 437 bp, Homo sapiens
ttgatatcacttataaggaccactggggccactgtgggaaagaagaatgatacccaaaattgtgaggcaggttcgaagtaccatttcactattcagagatttcaaaaaatggtgcaacattaattagctgtgaaagcaacaaagaggaaaacaccataggctaaagccccacaagctgagtgtccagttcctttatcctgattttgtttgaggcctgcacagagagatttaaaaaagccattgctgattcattgtcactaagaggcagagtatattgaagacaagtccatctgggggctcccctttccaactcttcagaatgcctgtgatgtgtcaagttctgttctaaggtgcagtgaccaacaggtaaaaatcttagctctccttagagcttacattctagtggggaagagaggcaagaaacaagatatattagt

SEQ ID NO: 141409 - DNA, 361 bp, Homo sapiens
agccccacggtagagtccactctgggtcccggccctgcgctgggcgctgtgctgagcgcctctgtggctgccatcatctgattttcagcgcactcacaggcaggcgccaggcttcactttaaagatggggaagctgagtctcagggaagtggggtctgtgccagggtcttagcaggacttctggggttgctaggacccccacggggctgggctgggggtcttcatgccaggcccaatccctttcccatagttccccccgccggcactacccaacatgtggtctccggtcatctcgtgctgtctccacccctccctccgcttctctgctggagttgtccctgtcaccttaccccagagcctt

SEQ ID NO: 141410 - DNA, 543 bp, Homo sapiens
ctgactcttgaggttttccgcgtggctcccagcgccacatccatccggaggcgatcccgtggaaggatcgcgtccaagataaaagggcccgagacctatgcttacgtaattcctaatccgtgatcttttatgggggctgaattcccctccagcacagcctgttaccaggtacttttcacaaacgctactagcggttgtgagtccctcccccctccatttctatgttacaaattgaaaacgtgggacgattacctaccaaatttcacatcatggcccagatatcgggtggattttgtggctctgtgatcgacttatacctatgctaaagttaacggtctgagaaggtagattagtggttgcctagggctagggagtgggtttgggggtggggaatagaaagtgactggtcatggttataggcttttttgtagcaccataaagatagtttaaaattagattgtggtggtgattgcaccaccctatgatttgcatggtatgtgaattatatcttaataaagctgtttaaaaagtctggtagtctgc

SEQ ID NO: 141411 - DNA, 436 bp, Homo sapiens
cagggcatctttgtaattatggcactgagtagcccaagtcttagattatttcattgtgatgtttccagtgtaccatcaactgtataggtgattagcatttgcctattaattccttcttcctctcttatcttcttaatgactcttatacattttgttatcttttcttactctccatgtagtagttcttactctgcatgttcagactctagtggaggtgctaggaagttccactttctggtagattatttagagtacaggatagtcaagggaataaggatggtgctaaggcaggctgtggtggtttaagcctatagtgccagctactcaggtgggaggatccctggagcccaggagttccagggtgtagtggagctatgattgtatcactgcactctagcttgggcaaaaaaagtgagaccctgtctccaaaaaaaaa

SEQ ID NO: 141412 - DNA, 338 bp, Homo sapiens
gcacaggaccagatgaacgtaatttccaaaacgggttcaaatggtaaccctgattatatcgctaaggctacttgtaatacgttttaagttaactgctgtatttccgacatattgctgacaacagtggattggttatagcatgtgttctacaataaaatgtactttccaaaaaatacctaaagaatatttttaaaataaaaatgtaatacaatacttgatcaataaattctattataaaatgaaaacattgggctgggcatggtggctcatgcctgtaatctcagcagtttggaaggccgaggtgggtggatcgcttgagctcaggaatttgagactag

SEQ ID NO: 141413 - DNA, 490 bp, Homo sapiens
ctgcttggtttctgggagtcgggagttggggaacacacttaaaggcactacggcacatgagttggctgacctgagctgtctcaggagttcctgtatggggctgaccctagaccaatgccccaggggctgatgagggagtgagggagggaggacaagataagacagccttggctgatgagcaggagaacgtgtgcttccctcatcactaagccacagaatcacctctcagagatttttctggtaagggttcctgaccacatgtcagtgggacctaagcaagggtttcctctatcccctgaccttcagctgaacctcaaatcctggtaggccaccctttggttctcaggggtacaggatggacagagagcaaagcactcagcaagtgaagtgggaggagacacagtttacacaactttctgggtgtcagattccgggatatgtgtaactttaggcaaattgctttacctttctgaacctcggcttccacatc

SEQ ID NO: 141414 - DNA, 380 bp, Homo sapiens
ggaaagcaaagcaaaccagttcatcagcaggttttctttgcctgcatgtgctgtgcccagccttgcagttgacacgagagaaatataaaacatggccctggccttccttcatttaaacatttctctttcccaagcacttactctgtgcaaggagctggagaagccaaagctggagaaaaacaaaggagggcctgccctcgagaagttagcggtctaatgttgtggttctcaaactcaggcgtgcgtttgaatcgtctgggggccttgccagaccacagaacccatcccctgagtttctgaatcaatgggtctgaggttgggctcgctgagaatttgcatctttataaattccagataatggtcttgcggctgggtaggca

SEQ ID NO: 141415 - DNA, 202 bp, Homo sapiens
ttgtatccaacaaacttgaggggaagaccaaaagatgatgatgatgattaatcatatttacaaggtactcttaatgtacattttctcaaaaagcttaaaatctaagcttcatgaaacaaatagattggcaataattacccagcaaaatacagtaagtgttataactaaaggcagggatgggagttgatataataggagatgg

SEQ ID NO: 141416 - DNA, 325 bp, Homo sapiens
aaaaaaagataaactgttgtttaccacactgttctgtctgctttggtatacttttactgaatttaggaatgtcgcttgattgtgttcattcatagaagaatcttgagagtgaaaatagcccatcgttttgatgaagaacagttaaagaactgatgggtgttacttatttgtgccacactgttgtttattttcccaaaacccactcatgtcacaggcttatagaatcacaattttcttaacaactaaaagatattccttcttcacaactctgtttttaattctatgtgtatgaaaatagtttaattggctgggcgcagtggctcac

SEQ ID NO: 141417 - DNA, 320 bp, Homo sapiens
  misc_feature (3)..(3): n is a, c, g, or t
gtngatctagaggatcccaattcctgcccttgtgccaacactgccgtgggagtgaaactaggtacagagaacagcagatcctctcctgccctgagtgaccactactgctcatgcaatacagagaaggcacagacctgagcccgccagtgctcccaaggcaacaccatcaccaatgcaaccacatacacagtcgccagcagcaggaattctcgcgggagcagcaggaattctcgcgggagcagcaagaattctcgcgggagcagcaggaattctcgcgggagcagcaggaattctcgcgggagcagcaggaattctcgcgg

SEQ ID NO: 141418 - DNA, 597 bp, Homo sapiens
tgagttgagacactccatgcccatatcagcccattgtgagcccgttgtgttttcctgtatatcacttgcactaaaattagataagggtgctgattttggagctcttggactcccgtgaattaattggcagtcagtgaaggtctgctgtttcctagcactctgctctgggtactgtggcttgtatttaggaatttctgtccacttgagatacatccatgaaatgtacattatattatgtgccttatatagtgagtgttgaattctgtagtcactaagcatacttaagataaagatggggttggtcagtataggctgttgtcttcagagacccaggaggaactgaaactgcgcttgctagctaactgttgcaagccacttttgatgttcatctgtaaacaccctacttctaggatattgatctccagactccatggaaatgtttattctcattagtccctgtccctgtccaaaaggtagttctttgccttggcttataccggctgagtccagagcaaaccccaccctcatcctatgagactagtagggtgtgggagtgcctttgattcttaaatccaccaccatgggtgctgttcttgt

SEQ ID NO: 141419 - DNA, 237 bp, Homo sapiens
tcttcatgccttcttataggtatgtttgttctctaccctctgacctgtatgttcttcctctgccttgttttcctttccctattcaagtctccagggcagtgatcaggttccttggtgctaggcccactcctgtctcagggcctttgcacttgcttttcactctgcctcttagaatcctccagatagcctcattacctgtgaccttacttctttacaaaatccgttcaaatgtcacat

SEQ ID NO: 141420 - DNA, 667 bp, Homo sapiens
tctctactaaaaatatgaaaattagccgggcgtggtggcacttgcctataatcacagctactcgggaggctgaggcaggaaaattgcttgaacccaggaggcagaggttgcagtgagccaagatcatgccactgcactccagcctgggcaacagagcaagactccacctcaaaaaaaaaacttttttattgatatctctatttaatgaaatatcattcttcttgttcttgttagctctttgtccatagtttctttagcttcttgacacaccaaagagagggctcaagcccactgtggcagctttcctgggcttaggagtctcaggttataatctagtgcttccagaacatctgtaagttgagagggaaggaaactaaaaaggagggaacataaaagtatgaggtcaaaatttgactgtaaagtcctctttaaaaaactaagaaatattgggtaaacttaagaactgggcagagatttgtatgtaggactagggaggagagtttgaagtccaaattctaccaagttagagaaccaaattacaatattgagctttatctacttgaaagcacattagggtcttggtttaggaattagaaccatatagctagactgaagaatgcatcatacaccagagagaaaatctgaaataggtcgactcaaaccaaac

SEQ ID NO: 141421 - DNA, 400 bp, Homo sapiens
aaggtagaaaaataactgagagctactgttgcagagaaatgagcaaactctagtaagtaacttctacctgatggagttatagttaactgcagttaacactttcagatttgccaaaaacggataggaaagtaggacaattcccaagaagcattttctcacatttaccattacccttccattcaaagttttcctaaaagtagaaataagagttctgaagtaaactaacaagtcatcttccaatatcttaattacagtcagccctccatatccatgggttctacatctgtgaatttaaccaaccaaggatcgaaaatatttgacaggaaatactaaacatgtacagacttttcttccttgtcattattccctaaagatgcagtataactactatttacacagc

SEQ ID NO: 141422 - DNA, 366 bp, Homo sapiens
ctttgtacagggttagggaatgaagttctgccatcataatgcaccactgtgctctttcagatatatgattaaagattgcattgtttccttttgccaacctgaaatttcagctcttaagaaatatttttgcctgctttaatgtaactcaagtcaagtacaaataaagtaagccatttctgaggagaaccaaaccaaaccagcagggagaagtagcaatttaaatgcagctccacctcaataaaacaaagctgacaaattactagaaatccattgcccacctaacgtcctagtgtcaaatctcctgattcctaaagccatctgttggaaaacaatttcagcaaataattatttcagcatgtttccgct

SEQ ID NO: 141423 - DNA, 194 bp, Homo sapiens
ttctcaccattgcttcctcagttccttagcatccaccacgcgcagaactttacactttacactcaaggggtgtatgaataaagggaatgcaaccaaagtttaaggtaagaaactcagagcttgttcagttcagttagtacttaattggctacccagccttgtgccaggtaccttgttctggggctagagagctg

SEQ ID NO: 141424 - DNA, 361 bp, Homo sapiens
ggaccaccttagagggcagctgtgaggtttggcagtaaccgatagccaatgggcagtaaacaggaactgctatttttgctctttatccatccgttcattcagagagcttccctgctccaggccaggctccctgccagatgctggggacatgaagatgaacaagccccagttgccttgaaaggtggtgtgtacctaccgagggagaggcctcgagtgcaccccctcagccacccaacaagtgcatgtgggttaattgccacaatggaggaattcacagtatgtgggcactgtgccaggggcaggggggcacagcagtgaacaagccagacgtgggccctgccctgggccaccaccagtctct

SEQ ID NO: 141425 - DNA, 121 bp, Homo sapiens
gtgaatttactgaggcctggtgatggtttgcttcttcccagttgcctgcggtgcttgtgatgggcaagcctgtttgggtctcctctgagctcctggcctctctgtttcagcaccttgtcca

SEQ ID NO: 141426 - DNA, 433 bp, Homo sapiens
ctcatcttttactactaatcaactgagtataaatatgaacatttcaatgagcaaacagaaggtgatttgggagttgaggtatttaaaaaactctacttttgtttgacagacgtgtatacaggcatgacttttttttttttaacctaaaacgatattgtctgctatactttaacttttacgtatgacttagaacaggaagttgttgattagaaaaataccacttatctctctaaagtacttatctcttatctctctaaagtagtactttagagagtgctaaatactctctaaaaatactacttacatctctctctacttatcattctacacaaagcttgccatgccttctgtaagcaataaaatagtagccccaaattgaccttaatagatatatgataaaactagaaaagtaaaatattattggtaaaaccca

SEQ ID NO: 141427 - DNA, 557 bp, Homo sapiens
tgtgttcaaggactcagtgctggaggagccctgggtccctataagaccccttttttaggcccaggccttgaaaatgattggggaagggaaggggccatcatctgtcaagcgacattttgatgccagacctgcagatgcagcacggggaatcggccacaggctgagattgaaacatgagtttcctcctagaaacggacacagcctccctccccaggaatgcaggaaggtgctgaaactggttactagcccggcaaaggaatagaaggaaacatttttttctcctatttgaaagaagagaggacccaggctgggccatcagaagccacctgtgcatcgtgtgtgtccctgtgtgagcctgcagacaaaagactgctgtcttgggctgggcgcggtggctcacgcctgtaatcccagcactttgggggagtgatgcggtggatcacctgaggccaggagttcaagaccagcctggccaacatggtgaaaccccatctactaaaaattaaactcgagcaagcttatgcatccgccccaattcaagctcacttggccaattc

SEQ ID NO: 141428 - DNA, 568 bp, Homo sapiens
tgtgttcaaggactcagtgctggaggagccctgggtccctataagaccccttttttaggcccaggccttgaaaatgattggggaagggaaggggccatcatctgtcaagcgacattttgatgccagacctgcagatgcagcacggggaatcggccacaggctgagattgaaacatgagtttcctcctagaaacggacacagcctccctccccaggaatgcaggaaggtgctgaaactggttactagcccggcaaaggaatagaaggaaacatttttttctcctatttgaaagaagagaggacccaggctgggccatcagaagccacctgtgcatcgtgtgtgtccctgtgtgagcctgcagacaaaagactgctgtcttgggctgggcgcggtggctcacgcctgtaatcccagcactttgggggagtgatgcggtggatcacctgaggccaggagttcaagaccagcctggccaacatggtgaaaccccatctactaaaaataacaaaattagccaggtgtggtggctcatgcctataatcccagctactcgggaagctgaggcagg

SEQ ID NO: 141429 - DNA, 731 bp, Homo sapiens
atttatctcacaacctagatggtaaaccccttgtggattacggatgtcagttaaatttctttaaattcattcatccgctctttcaacgaaaacgttctgagatcacctatgtgctagacacactattaggcactggaggataaaagtgactaaggcacagggtaatcagatagtgaacaacaccagtaccttgagactagtgctatacaaaggtatcagcagggcaccagcaagccctaagagactggggaagaccctcaggaagagctgtcgtagacgaggagactcctggttggtccacaccaccatacacattaacacccagtaaggaactgtttaaccaacgaatgaatgaaatttctccccacaggtagtgggcagtcatgaaggacacccagtgctccactagggtttagggcaactccagagtagccaagtcagattctgcataaaccaagaagacattgctggaacagtgattataacatgcttcctacactataacactctgcaatttcaaaatacgagggctaatcactttccaatccaaacaaactgtgctttattgtgagtaaagaaacagaaaggggtgggggagtctggaaatgactttgaggggaccattttaatgaatgtagtctttgaaattcaggtaaatagagcctctctcatttccagcacaagaagtcattcactgtggcagccaagtcggccatgagaaagttgtgata

SEQ ID NO: 141430 - DNA, 676 bp, Homo sapiens
ccaggctggtcttgaactcctgacctcaggtaatccacccacctcggccccccaaagtgctgggattataggcatgagccactgcacccggctatattcaactttttaagacactgccaaactgttttccaaagtgacaataccatgttacaggttggaggtttccgtcagcaatatatgagggtttcagtgtctccaaatcctggccttttatgagtcagaggaaaaactttcgcagaagtctacaagaggacttcccagggtaactacagtagcccatgacaaacactagtcactgataagcagacacatctgagaggcttagactggtcaactaacaccccaggcccgggaaggggctcataatgcttatcagtgcccagtgtcagaacacagttgaagggggatggctattggatacgaacccagcaaaggcattcatatgtccatgcgtcagggtaagcttggattattgatttaaacatacagattggagccagatgctgtgtgtatgtcacaatcatgattttattttatttatttatttatttagacagagtctcactctgtcacccaggctggagtgcaatggcttgatcttgactcacagcaacctctgcctccctggttcaagcgattctcctgcctcagcctcccgagtagctgggattacagg

SEQ ID NO: 141431 - DNA, 323 bp, Homo sapiens
accattctcagtccttaatcaaagttaccagcaggtgaattcacagcatttgccctaaggatgttgcaacagcttactgacttcctgtttcaatatgactgtcgtttcaaaggactactcccaaataagagaaaaaaaaaatccatgtacatgtgaaaggcaactgaatataatacatacaatcatttgtgtttttacaaatgaattgaattgtgaatcaagcttggggaatgtatttgattctcttgggattacatcacagataatttcatagccttataatgtgttttgaaacagacatttttcacgttcccaggggcaac

SEQ ID NO: 141432 - DNA, 224 bp, Homo sapiens
tacatgcacacacacacacaggggcaaagccttggaaaattgcaattttccattttaatttgagagacagcccggtcacattaacagaacccttgacggaataggttgaattcccttctctgtccctataaccccatggccttggacatatccttacctggtgccctttcctccctcttatggtccacttttgtgattctgattttaatttcagttctctgtta

SEQ ID NO: 141433 - DNA, 294 bp, Homo sapiens
ctttgtcccccatttccatcaacccttactatgcctcactcccaggaaacctgtgatctcctttttgtctctatagacatgtcttttctagaatattaaataaatggaatcatatattgtcttttgtgcctagttttttgcttatatttctgagatgcacccatgctgttgcacgcataactatttctttttattcctgagtagcattccactgtatggtcataccacagtttgtttatacattcacctgctgatggacatttgggttgtttccagtttggggctattacaaat

SEQ ID NO: 141434 - DNA, 440 bp, Homo sapiens
gtcatcccggtagataaccattggtttaggcaaaggagcagcaaggaatgctctctcataaaggtattttcctcatacaatttcaaaacacctttctattaggaagaattctttagggcagaaactctggccaaatccgtataagtgtgtcctaagaatcttatgattgaatacttcacacacacaaaaaaaaacaaaaacaaaaaaccttcctttctctagtaatgagatctcaatgggttagaatagagtttgaaaacaaattatatcaataccattaaaacactacaagaacagatcaaaactggactacaacaaaatttaaaattgttgtgctgcaaataatgccatcaagtgagaagacaatcccccaaatgggagaatattttcaaaccatgtatcacaaagggagcctgcatccaaaatatattaaaaaacgc

SEQ ID NO: 141435 - DNA, 302 bp, Homo sapiens
ggaagttggagccctgagtagtgtttggactctgccttccagaaaagaagggtttgctgcaggcctcaaatggggtgattggttcttgggtgagtaaataccagagtaaactcctctggtattgtaggacagtgttttggtcgatctagtaaagggggaaaacatccttactcacagttctggaattttatgtccagctattccttgtatgccatgtcacttaggaaaatttaaaaagtatctggctgggtgtggtggctcacacatgcctataatcccagcactttgagagaccaaggcag

SEQ ID NO: 141436 - DNA, 163 bp, Homo sapiens
agccttttcaaggtgacatcaagacagaaactacttgctgtggaaatcattgtacaaagtgggtaggagtgagaagcccactgataggatgagtcccctgggagctgatgaaagggtgagatccaatccatttttaaacagtccttttttttttttttttttg

SEQ ID NO: 141437 - DNA, 357 bp, Homo sapiens
aagtcagaacagtccatatgcttcttacaatatcagtgttttcagttgaattttctcctttagtcttaagattgattctattctgaaagtaataaaaaaataaataaatggaaaaaataccaaagcttgatttttcagattattacttgaagggtagtttggaaaaattctgttttcactttcagccccttctttgcctcagaacaaacatggctttttgtcataaacaaatgttatgacagaatgtttaaatgaaccctttgatttgcaaccaccttatcttcaaatgccactatatttgtgagaacttgtttcctttagtctgataatacagcaagacccagttaaaatagcagg

SEQ ID NO: 141438 - DNA, 293 bp, Homo sapiens
ctccagtcaaggctggcagatggggcggtccatccctagggcaggtgacagaagggaaaaggctgcctgctggcccccgagccaggtagcacatgcttgtgcctcagtttcccctcctgtaaagtgaggcgctggatccaggttctgtctactgggctctgcagcttggacgctcctaagaccaagcgacccaccctggggagggcagctatggctttggaatagctgtccaggcccgggtgcctccaagacggccaccacaccctgcctgtgctgcaggggtgcaggggtaa

SEQ ID NO: 141439 - DNA, 447 bp, Homo sapiens
ctgagagccttccagttgaactggtttgactgcagacccttacatgaataccgagtcttacaaatctctacaagaggtagcagccagtaggtaggtgcacatctctgtattgctaaattccttcctttttccccaggcttgcactagaaaggacaccaaagtgcccttctaatagcttcccctctctggttttcccagaggtttctgttgttcgctccctccttttaatgtcctgtttttgtttttctgggagagactcatatttactttccaaactctcccttgatatgtctcatattagtgttatccaggagaaatcctgggctggtcctaacctcctgtcttgatcaggtctcctatctctgtggaccttcacctgtctttcccagactgggccaggccttgccaatgatgttgaccagacactgggggaggggacaggaggag

SEQ ID NO: 141440 - DNA, 408 bp, Homo sapiens
ctacaaaactgagaagaggaagggagggcccctagcaggattcttcttcctttgtacccatggagaggaaatgcctcctttccctgctgtctctggggtggctcctagattcacccactctcctcccagaactccccagtgccggactaaaaccgaactctgaaacgtgcccactgacttcctgagcaacagatgcggatgcgtttccccagtcagcagcaggccctacccaggccccaaagaccacccctttcttctaatgatgacaacggcaaacatttatggagtgcccatacagtgctgggccttgtgcctggccacttgcggactgtctgtcctgcgtgcactgcaactccccaagaggtgaagtaactccctgacagctgctcgggcctctccttcagaccc

SEQ ID NO: 141441 - DNA, 361 bp, Homo sapiens
ggctttctcaggtgatgagaatgttctagaactgcacagaaggagaggttgcacatcgtgaatgtaacaaatgccactgaagtgttcattttaaagtggtaattttatcgtatgtgagtttcacctcaatttttttaaaaggcaaaaagagttaagaattgattcttagtaaaaatttgtcttattttggcgtgacattgtacaaaaggagaaagcgattctaaagggcatttcaagaaccatttccttcaaaccaagctgtcgaatgaagtcagaaatgaacaggtttctaagacgtggaactacttctccttccaagagcaggaagccaccttccgaccctggagacaccaaactcccc

SEQ ID NO: 141442 - DNA, 175 bp, Homo sapiens
aggcccagggtgagggtagctgcccgaaaaagggcagcagacatgcagccaattagatcttggcatgaagaggtcaaagaggggatagaatgaaaaaaaaaactgtttagcgaccaggtgtgtgagagcaaatggagcatgaacactggccgagcacccactgtgggccagccat

SEQ ID NO: 141443 - DNA, 299 bp, Homo sapiens
tccatccatccatgcattcatgcatccatccatccatccatccatcattgagaacaaaagatatcgttatgctgttaatgagtatttcattttagacacaattaagtatggaaatgtagattcaggattaagactatacataaaggtatcatggaaataaaagaattatagtgcaagagctgattttctggtgagcgaatgggaaatgggttctaaagaaaatctccacagaattttctagaatggttattaagaatggctacatccctggacaagtattctgcatgtcaggagtctac

SEQ ID NO: 141444 - DNA, 463 bp, Homo sapiens
tgctgtgataacagggtgagccactttgcccggccaagtgtttctttttggtgtggtaagaatattctggaattagatggtggtaatggaatggttgtacaacagtgtcaatatactaaaaagcagtaaattgtatactttgaattggttgatttgaaatggtaaatttgaggttacctttctggggtgcagccttatctatctctgcccttgtgacacgacctgatcatcacaaattcccttttaagccagggccaagtggttttggttgcttgtaattgaagggtctaaattgtccaagcaactgacccaagggcatcagacttgacagaccagagtctgaaccctcagaaatcacatgtgagaccatgtcaccgagggaaccgaagcaggggcagcatctgcaccctcaccctggggggttcagccctcaagggccatagcctgtttctccgtgtgccca

SEQ ID NO: 141445 - DNA, 424 bp, Homo sapiens
cgtccagtgtcacaggcacaggccacgcccactcccttacaccctggctgagctgctttcacaccatacgggccgcgaagggcggttgcatggcctgcaaagcctgaaatatttacagagaaggttgtgctcacccctgccctaggggcaaagcccaaagtgtacccttggggcaagacagaaaaagctactaaaggcgatgttgtaataatagcatcgtcatcattacattattgattatatcaaatgtctgcttactctgtccataccctgtgcgaaggactctgcacctaccaactaattggatcctcacaatcttaaaactatccttgctcaactgatagggaaactgaggcacgggacggtaaggccacttgccccctgtttcacagctaggacatcactggggcaggatgtaaatgca

SEQ ID NO: 141446 - DNA, 398 bp, Homo sapiens
cccaacttggttccactgagaattctaaacttactctgtaaccatcccaaactcctcccagccacagtctggcagaggtcctgctattccagatacctggaggaaggtgcccatttacatccatgcaggcaggcctgcagatctgggcctttactggggtcactgaggcagttcaatgactcagtttcagttacccgagccactgtttatggtcagttctccctatatagaaacccacacagttacctgaggaaatgctctctggtactcactgaaagccatactcatcaacatcctgatacaaggtccaccatatgcagaccgaactgcaaaaacttgccctagtgtttgccctatggagcaaagccctgaaggatattcagtctgtccaaaaatga

SEQ ID NO: 141447 - DNA, 911 bp, Homo sapiens
gaccagcggtctcaaacatcagaagttctacttttttaaagacagagtacacgattctccttcgtgtccatggagaagagcagggtaccagcccagtggaaaatgaagccacctacactgaagtctccacgtttaccagcttttgctctttcctacttacagcccatctgttgcacagcagcctgagtgatctagaaaacataaattagatcatgtcatctcctgctttaagtgggctggtggtttcctttgcaattagaatggcttcaaagctcttacacggccgaccaggccctatgttatcctgcttacacctcagatctcacttctgacccctctctcttggtttactcttctttgaccccatgggtctttacaggggccctgtactatgctgaataccttcccactgcaggcccttggcatctgctgttccctcttcctggaaagcttttcccatctcttgggtgttcagagtggccttttccatccatcgcctccatcagatccccctgttttctcctctttctggcagttctcaccacctgaaaccatgggtctatttactcactgtcatgctcactccattggaatgtcagctctgtcttgatcaccctgaacccccggagcccaataactatgcattgggtgaatggctgaggcatggatggtgagctgtgttttcgagttgggtgttgtgtctgggctgttttgcctcgtggaatagatgaagggaggaagttgctgggaaatgctggagggaggctacaggtctttgtgaccttgatttcaatagcaacagcttgcatctaaggcaacatctgaccatggacaaggagggggacaattgtcaagagaacaggctgagtggcagcttaggctgacgccaggtaggggttagagagctgaga

SEQ ID NO: 141448 - DNA, 545 bp, Homo sapiens
ccaacctctgtctgaaacggagggcagtatcttagctaacttccttttaaaggtgctctctcaagtctctccagaatgggctccatggaaagttaatcccacaggctaaggggtctcatcttcacagtatccaactgcagcatttaaatgcacttcatcttccctggaacaacaggaaaatacagtgaaagctcaaaatgaggcaggtgacagggactgggaagaagggcttgtactaagcgtggaacaggtgagatgcaacaccatgccctgttctgccaaaattaagaccctcctgccacagtttaagctaaagtctgtgtactccctcattcccacctcctccagaaaagggcacttgcatgctttctgttaaagtgagatggttttttcccctattccagtggaatacggtaaaatccttatcccttcataatgggcttacctgaaagtgaatgaggcttcctgggaaaacccttctaaaggagtgtcggatgcctcagaaagaactagagttaccttcctcctttctgtttcatcaaaat

SEQ ID NO: 141449 - DNA, 672 bp, Homo sapiens
  misc_feature (498)..(499): n is a, c, g, or t
  misc_feature (506)..(506): n is a, c, g, or t
  misc_feature (529)..(529): n is a, c, g, or t
  misc_feature (574)..(574): n is a, c, g, or t
  misc_feature (578)..(579): n is a, c, g, or t
  misc_feature (581)..(581): n is a, c, g, or t
  misc_feature (596)..(597): n is a, c, g, or t
cggacgcgtgggctcatcatgacctaactctgtttacttttccagtttcttatctgatctctgctgtaaatacgatgtgtttcagcaatttgatacccttagcagttcctccagagtgcttttactgcttgactgtttcttctccctgaaatgctgtccccatctccaccgtatagactcctacttgttgacctgtttgcttttttgattttaagcaaatgagctctttgaggacagagatcttattaatgcttatgtctgactcatagtacacatttagtaaaaatttgttgaaagcataaatgaacatttaaaaaacgagaagagactgggcacagtacactcccagcactttgggaggctgaggtaggaagattgcttaagcccaggagatcgagaccagcccctctggacttgaccccaatgcctctgtttaccagcccctgaagaaatgaaggccagctgtgtgttgtgcccaaaaattggttaccggaaggnntgcaaangagcgtctctggcagtcaagaanaaaaaacagtttctatgtatttgtggaactgtatctgtgtcattnttannanggggggaaaagatannatccagtctgattagaactggccatcagttttctgtaaatttttagaagactcacagaacttacagttatttctg

SEQ ID NO: 141450 - DNA, 156 bp, Homo sapiens
ctggagcacagccctgtggttggtggagcagcttctccagcccctaggattcctaagagggcccaggaccccagctgctggtagaggaagagcagccaacccaggacaggacagctgaccccacccctgtcccgcctcccacaacagcctcatttc

SEQ ID NO: 141451 - DNA, 483 bp, Homo sapiens
ggcaaacagagccaggcaggtaccgatgacaccaaagcatcatccaacaaggaaagctggactttcacttctgaatctgcacacaaaaaaggcatcagatgtaaaattcagagagtggacactttaaaagatcagggcaaagttaaactttcaaagatcactgaggcaaagtgcattcattcaaaaagcatttaccaggctgggcacggtagctcacacttgtaatcccagcactttgggaggccgaggcaggtggatcacgaagtcaggagttcaagattagcctggccaacatggtgaaaccccacctttactaaaaatacaaaaattagccgggcgtggtggcgtgcgcctgtaatcccaggtactcaggaggctaaggaagagaattgcttgaacccagaagacagagaatgcagtgagccaagactgcaacactgcactccagcctggacaatagagcgagactccttctcagaaaaa

SEQ ID NO: 141452 - DNA, 683 bp, Homo sapiens
agcaaaggactttggagcttggccatgttagtcctagaagccacggagaaggacccttctgattggctttcaggacttatctaactgctaagtgaagcctctttgaaagtttcttatgtgtacctcctccccactacctagctctagcttctgtccaacctggcctattttccatccttcaaaacaaaccccaatgtgtatggcttactccagctgcttccttaccttcaggtttgtgggcttcatttaagccatgggaatgccagcttaattaatgcagattaagataagaacattaaaccccaaaaatgatgggaaatcactctgtcttcaaaacaatagaaaataataaaatctagttataaagattatataccattgtcactagtaagaagtggcactcttatttacaaaacataaagaaattagggtttaggtctggcatggtggttcacacctataatccccagcactttggaaggccaaggccagaggattggccaggagttcgagaccaacctgggcaacatagacaaaattagcttggtgtagtggtgtgcgcctgtagtcccaactactcaggaggttgaggttggaggattgcttgagcccaagattttgaggttacagtgagctgtgatcacatcactgcgctccacaaggcaacagagtgagactctctt

SEQ ID NO: 141453 - DNA, 511 bp, Homo sapiens
cagtggagggcacagggggcagcctcatagacaatgaaatttcctgtcctgtgtcacagtcttgaggctgggggatggagtcagcaggttgttgtaataatccagactagaaatgtaaacaggtcaccattctttctctcccagctcttccctgaattctcatgccattctgaaaaacctgcctaaaaccctttatgaatcagataagggccagattccataggcttctttcaaacttttttttcatattttttcatttacattctgcctctaaatgtcaatcttctaccttcttttctctctctgtgtttccctcctttccactgtttgccttgctagtgtccctctggcatctccattacacggactattatgcagctatcagaaatgatgtttacaaagactgtgtaataaacatggaacatgcttaggtttaataggaagctggtgcagagttgtatagacatatgattacagtcttataaacataagtctatatagttaacaaaat

SEQ ID NO: 141454 - DNA, 225 bp, Homo sapiens
caggcgtgagccaccgcgcccggccttgttttcctttttactgaatttaagtgcttagggttattcacaatatttgactcatgacattctttcatcttcagttggaccttgtgcaacctgcatctggtaatttgttatttatctgtttgtgtatttccttataatacagtcactccactgcacgttcttcccctgtgtcctcccttcctattactttgccttccc

SEQ ID NO: 141455 - DNA, 1364 bp, Homo sapiens
ggcgggtgggtgggttacctggcgcggccgggcgcgtctgccgggcaccagagcaggcgcagcagcagcagcagcagcaggctggcgagcagggcgagcagtgcgccccccggccgcatcctgagccacaggcgccgccgccaccgctgctgccggggcgaagcacagcccgggcggccccgactcgcggctcccgccgccgccgccaccgccgccgtggccgcagccccgcgcacccacagcgttcacaggcggcagcgaggggcgcccgcagcccacccggcagagtctccgcggcgggcggagaagaagccgcgttcgggctcgccccgggctcccggccccggcccgcggagcgccgcgatcggctggcagatgacgattcgccgagctcgccgcctgtcctcccggaggcgctcggagctgctgcgggctccggtcgccgctgccactgctgctgccgccgccgccgcgcggggtcacctgaaggttggggcgcggaagctcaactccgtgctgattgggctccaagttttctgcgccctcgcctcgtcccgagtgcccgcgaatcccccggacgcccacgcagaccacccagccacaccacaactctgcctgcggagagaggagaggagaaaaaggggccgcttcaaaaactttcaaaactgtgcagtcgcttggctggatcctcccacgcatgaagaaagctggggactggggaattgctgggtggatcatgacactgaacagaagcagtaacctgtgcttacttcaacccagattcagagggacagcgaactggtatgaggggctaggagacctttaggcatgagcacattactacctggagacccgtttagcccctgcctgtatttgcaaatagttttattggaaaacctccatgcccatggctttgtattatcagtgactgcatatggctgtatgatctagggctgcaagggcagaattgagtagtgatgacagaggtggcatagcccacagggcctaaaatatttaccatttgaaactttccaggaaaagtttgcatactgctcttaaataagcaagaggccattagcttgaggctgtctctgtacgttgagttcccacctaacaatggaaacctacattaggctgtaatgaacagggggctactggccaatcatgggcaaccaactcattataccaggccccacaaggcagcctgcatagctatagccaatcagtttctccactgtgcttctgagtttggcctatcaggctttgctgctcacaccatggggtggacctcactggacctcctctggttgtgagtgctgcccaattcatgaaccctttgctcgaataaactgtgctaaatttaa

SEQ ID NO: 141456 - DNA, 487 bp, Homo sapiens
gctacaagaatggagacgagtagaaggtttaagctggggctctcatccagcttggagaattccctgacactctctagtaccaagggtcaagagttgactatcctttgcaaatatttatttatggagttattttccaaattaagcaaactagcggatagttttgtattttcccctatccctctcccctgcaacttctacctttagatctttagatgattttatagaaggatgggtttttttttttggtcatttttaagttactggaattatctatgggggaaatgtgtacgtttttatatagaaatatgaagattttcttctccagcattctccttgtgagctctttggatcttattttaatatctatatgcaagttccccgcgcccccccccccatgtcaatagcaaatgttagccttctggaagaaaaataagaacatatgaaataacctgacttctgtttataagtaatcttaaccatttgtgtt

SEQ ID NO: 141457 - DNA, 521 bp, Homo sapiens
ctgagtcctaagaggccaatgaaaaggaaaacacgttaaggagccagggcgcttcttggatatcagcctgaatagttctgtttcatctggaccccaattttactctcctgctgttttacacggaactaaaaagagctttacagaggaccagatagactgcaggtccctaggcagtcaggggccaggcaaggcataggagggtgtcaggcctctgagctcaaactaggccatcatatcccctgtgacctgcacgtacacatccagatggctggttcctgccttaactgatggcattgtcttgtgaaattccttctcctggctcatcctggctcaagagctcccctactgagcacgttgtgacccccactcctgcctgccagagaacaacccccctttgactgtaattttcctttacctacccaaatcctataaaatggccccacccctatctcccttcactaactctcttttcggactcagcctgcctgcacccaggtgaaataaacagccttgttgctcac

SEQ ID NO: 141458 - DNA, 346 bp, Homo sapiens
acagaggcacatgaagagcaccatgtgaagatgaagccagaggtcggggtgatacttctaagagctgagaatgccaagattgtcatgaactaccagaagccaggggaggggcccggacagagtctccctcatgggcctcagaaggaaccaactctgctgacaccttgatcttgaccatccagccccagagccattggacagtaagtttccgttgtttaagccacccagtttgtggtactttcttatggcagccctaacaaactaagacacaggaaagccttgggggaaggcgttgcatctgtctctgagaggacatatttgggaccaagtccctcctgtgacatca

SEQ ID NO: 141459 - DNA, 397 bp, Homo sapiens
tttcttactcttcacctgatttggctattccctaacattttctgtccctttatcttcaccgaagtttagcttagctttctgcctttaaatgtgttctttaagtaatgacagatcatccttattctaggctgcaaagattgtagtaaatatactctttctagacaggcagaataaattttgatggctcatttttaaaaaatttatatctttttgaggggtttggttagcttttcaaatttgaattagtcaatattttaaatggcttaattatttttaaaattttttaatattgtaatatgtaaatattgtcatgtttcgtattgtaaatgttacagcatttgtgacaatgaaaataagtcttaaaacatatcccagaaataaaaccacttcatcatgt

SEQ ID NO: 141460 - DNA, 292 bp, Homo sapiens
accaggtctcctgtcctttaacatattactgtattattccattagtattactgcaggatgtttgttgaaggccttgcaggcttcagaaacattaacttctaggtcttaattctttatggattattttgctcccatatgaatttctgagtttctctttcactgttaaacccagcctgaagaaagccttctgtggtgcctcttgtcaccacatgaggtctccataaatcctgacctggattaagcagaagtggaatccactatagccaatatccgagtctcctattatcttgca

SEQ ID NO: 141461 - DNA, 265 bp, Homo sapiens
aggcctggagtcatgaaggtaaagaggaggacatggcccgtcctgtcaaggggtctcagcctagtcaggatgaagacacactgccagagtgagctccccccacacagacatagcaggtgctagggcagaaggaagaacaacatggtaaaggatgaaggggaaggtcccaagcccatctggaaaacgaagggtctgagaagctttctagggggacatgagatgagtcttgaggggtgggtagctaggccaacaagcgcctgaagga

SEQ ID NO: 141462 - DNA, 367 bp, Homo sapiens
gccctccgctttttgtggccaaacccagccacgcagttcccttcctgcggcgtcctccacacccggggtctgctggtctccgcggatgtcacaggctcggcaaccgccctcctgtcggcggggagtcccgcgacgcccggaaatgctccgaagcctgtcgcccagctgccagatctgcgtctgtgtccggttccgtcactgaggtcgcccctgtccggcccttccaccctagttctcttcaccgtccgcccatcctatcgcgcgcggcctcaggtcccgattcggcatgtggcttgtcttccatcgtccccaccctcgcccctcttggcccctcagggcagccctgggattcggcagacgccagtcc

SEQ ID NO: 141463 - DNA, 207 bp, Homo sapiens
gaaattcacagacatgtgaaatataaaaccgtattcatttagcagatactgataggcatataaaatagaaccttcatcatctatctttagaaaaagaagattaaacagaagtgtaattaatttgccaactctgcttcccgattgagacatttatcaaagttgatctttaatcattagtttcctaatctgtaaaatgaagtctattat

SEQ ID NO: 141464 - DNA, 502 bp, Homo sapiens
tcgcatgcatgtgtctttatgttagaatgatttatattcctttaggtatatacccagtaataagattgcagggttgaatggtaagaacattggtttttaaagttaagttaaaagagaaaatgtaatcctttaaaataataccagtccaatctcactatagcaaaattccaagggactctcttccatttccataatgtgtacttgatattgctggaaataaacgaactatagtctaagacttagacgtcttttatgtcagactgagatttttattgtaatggttattaaacagattttttgaaaaatacatgtaatactaataatatatgagttaagaaactttagaacttaatttaaaaataattaaggctggtatagtggttcacacctgttaattccagcactttgggaggctgaagagggaggcttgcttgagaccaggagttcaggaccagcctaggcaacatagtgagaccttgtctctacaaaaaaaaaagaaaaa

SEQ ID NO: 141465 - DNA, 168 bp, Homo sapiens
gatatgacaattgttttgttttcatagatctggcctagcagcttaattgtgcagccagacctgggtaatcctggagcaagagtactacccctaaattcctaaatgtactaccttaaatgcaaaatatagatgataatgtttaggtgaacatgactttcagccacaaag

SEQ ID NO: 141466 - DNA, 481 bp, Homo sapiens
cctcctaattctcatctacttctcccggatggccaaatacgctaacctggctcaggggtgtgcttcacttctggcatcctgcttccagcatcacttgccatgatcattactatcaagccatgctaggcatcatgacctctatgcagatagaaattactggattgtctagagaatactttcccctcttgcttttcttgactgccctggcagttttcatgaaaatatagttcacctcatgagtatggctccctcccactttccaccccaacttcctttggattcccttcccagaacttcagcattgtctcttatggtgggcaagtttctccacagttagcaagtattcagtagcaaccaaggttctacaagacttctggggacctaagaaacactctcaaactacccactatcttctcaccgaaagtaattctttgcctctacttcctatccccaggcctctagtgggtcctatcagctttct

SEQ ID NO: 141467 - DNA, 654 bp, Homo sapiens
tcttgagcacgttcatcagcgtgtgcaaaaggtgctctttgcccaaataaattcgggcacctgctggacagaacacatctcagcagagatttttgttgaaggacttttcggggcctctgccgtgcctgtgtgtgtcgtgactccagagtgggaatctgcagggtgtcacaaactgacttagtcagagtccgtctccacccacccgctagccccctgaagcccacccacagcatttttcaggatggttctgcggcgcatatttttgaaaatacgtttgctttttccgttagtgggttttccctgagtgcttttaatattgtcacgaggccgtgtgcccagcgggaaagatgctcctcctgcttcaacaaaaactccctgagcctccagaccagggctggcttctgagcacttgagatgtgcctggtccaaattaagaagctgaaagggtaaaatacacactggattgctaaggcttagtatgaaaaaaattccttaatactttttttatattgtatcttttctttgtttatattaatagatgttgacataatattttgggtgtactggattaataaaatgttactaaaattacatatgtgaatctgagcaagaatttttatggcttaaaccaagattgttctcaagtttatatgg

SEQ ID NO: 141468 - DNA, 302 bp, Homo sapiens
cagtgagttgcttaattatgtcagtttgttgtctgtagctttcagtcttggcaacacatcagaattgctcagccagggaactttgaaataatactgatgcctgggtctcaacctcagcctgatttcagttgtcctggatatggtctgggtgtgaggattttaaaggttctccaggtggccaggcatggtggcttatgcctgtaatcccagcacattgggaggctgagacaggaggattgtttgagtgcaggagtttgagaccagcctgggcaacatggtaagaccctatctctatgaaaaaa

SEQ ID NO: 141469 - DNA, 396 bp, Homo sapiens
ggcaggcatgaacaatgaaagctctcactgggtagaaacaattttcctagattcttcaagaacaaaagcaaatatgtcctggcgaggtggccgacacctgtgatcccagtgctttgggagtccaaggaaagaggattgcttgagcccaggagttcaagatcagcctgggcaacatagtgaaacctcatctctacaaagaatgtaaaaaattagctgggcgtgcttgcgcctgcctgtggtcccagctactctggaggccgaggtgtgaggattgcttgagcccaggaattggaggctgcagtaagccatgattgcaccactgcactccagcctggacgacagacagagaccctgtctctagatataaaaataaaaataccttttttttttttttga

SEQ ID NO: 141470 - DNA, 860 bp, Homo sapiens
ggcacatgccttgtaattccagctactcaggaggctgaggcaggagatagcttgggagtcagaggttgcagtgagtcggaggttgcagtgagccggaggttgcagtgagccgagaccactgcactccagcctggtgacagagcaaaagtccgtctaaaaaaaaaaaaggtgctttctggcccaaagcttaccctaaaaatggagaaaacacagggcaagttaggaaaaaaaggatcagagaaagaaaaaagtagatgggcaatggtcagtcaggtcaccaaaaatacctccgggacatttccacccaaaattgcctatctgagctaatgctttggaattaagcatcctttgctaatatgacatgaaatctgcttttagattaaaaaaagaaaaattcatggcttaaagttttgcaactgccaccttttgtaaaggcagttttcttaatgcactggagttctaacatgtttatggcccacacatacatattttggggctcctgctatttggtgagagaagacacaaatgcatgggctatgcatggatatgtttccatggggcctctttgctttcatatttatccagaacgtggtacatgctttcctttcaggctgcaattcacagggtttgttttgttttgttttagaacatacgttttcaacgactgtatctttaaataatctgtttgaatttagcttttctcttccttgggaatagctataaatgttggatttttctttgcttttcatttggtattctcacccccattgttttcatctctcccttcttttctgttgtattttgggagagctcttgcatctgtccttttcccatcagtgattaaattttcagcaatgtta

SEQ ID NO: 141471 - DNA, 237 bp, Homo sapiens
tggacctaggacactagtgcaggcagtactcctggatcaattgacaatttgtctctcagatagattcagttgaggaatttgtccctggatatttgtactacaacatactaaaatcaaaagtcaaaacatcatattagttaacagaaagggttatttatttattttttcttagaggtctgtcacacaggctggagtgcagtggctcaatcacagttcactgcagcctcaacctcctgg

SEQ ID NO: 141472 - DNA, 443 bp, Homo sapiens
cagcctagagggtttaacaggaaattagcctgtgctattgcactgaattatgacgaataactcttgtaactgtacaatatttgttttttccatcttgtacattgggctcctgacaagattttatgttttcctcaacagtttaagaatctccaggaaagtgagctgcactcccttggtactttgtttcccctgatcaggggttttggtcagttggggatgcttcaacaaggcgccgtagactaggtggcttgtaaacgatggaaatttacttctcaccattctggaggctagaagtccaagaccaagatgccagcatggtcaggttcaggggaaggccttcttgcaggcagcagactgccaactgcttgttcttctcatgtggtggaaagagagctcgctaacttcctggggtcccttttgtaagggcataaattgcattcgcg

SEQ ID NO: 141473 - DNA, 302 bp, Homo sapiens
atgtggggaatgggagttgagtgcatgatggaatgggagagcctttcccttcttgtcaaagggtgctgaaatccctcttctcctggacagggtggctcataatcggccagccttctacttccttgttcctatatctgggaagaccttttttttttttcggagacagggcctcatcctgttaaccatacaagagtccagtggtgcaatctcggctcaccacaacctccgccttcctggctcaagggattctcctgcctcagcctcctgagtagctgggattacaggcgtgcgccaccaccgcc

SEQ ID NO: 141474 - DNA, 550 bp, Homo sapiens
tgcatgtttcactgctgtgaccttggtctctgtattgagattgggagctcctggtgggcagctcctcacctcagagacctgcttatgactaagcccaggataagggcttgttgagtgatactatggaattcaaggcctagtgccttgaacaaactcactatgtgtcttaaggagagcccctgctctcttctggtggccaccaatcttgaagtctcatttacctgtgctgggattctgtcctgagagctgatagtggaagagactggcacactctcacatcaggctggcaggaggctggtgttgagggaattagctcagggagcaaaggcatgggtagggaaaggtgactaggggtaggaaggagatgaatggggatggggtccatagaccacactgtctgccgcagcatccccagctggacttggtggggcccaggcagggaatagctggcatccagacgtgctaacaagtattcctgagcagtctgtgtcaatgcaggtgggggataatgacacagaggaagacagagtagagagagctgatggacccc

SEQ ID NO: 141475 - DNA, 262 bp, Homo sapiens
aagaccagcctagccaacacggtgaaaccccatgtctactaaaaatataaaaattagccaggtgtggtgacacacacctgtaatcccggctactcaaggaggccgaggcaggagaattgcttgaacctggaagggtgaggtcgcagtgagctgagatcgcaccactgcactccagcctgggcaacagagcgagactctgtctcaaaaaataataatttattgtggtgaaattcacagaacctaacagtcaccttaaagcagc

SEQ ID NO: 141476 - DNA, 445 bp, Homo sapiens
aggccccagcgggcgcttgtgctggtactgtcaggtggcaggaagcccaggaaatccagccctctcttttcccgctttctgggtgggagctggacagcggatgcagatgcgcaggccttcaggcagagcgggctgatcctccatcaagttcgacagggttgttttttagaggtcttttttttttagcatggcattgggtttcttcccccactctctctcgcctgatggaccccctcccctggccaggatgggctggtggcagcgcacaggactcagtgagagctaatgataaatgtaatagtgtgtaacagtgatagagggccgctggagcctggttgtcacacacaattaatatcccccgccgttctgtctccgtttgtttgttcccccgtgattcggctccccgttaactaatagcacatgagcccggacataaattgtattt

SEQ ID NO: 141477 - DNA, 314 bp, Homo sapiens
ctgtgtgagagaggtcacactgtcccatatgctaaggttggccagccatttaggggatacgttttccattctgctggcggcattttagaagaccactgaatagtctcagaaatatcatcaagaatagttttaggggctgggcgtggtggctcatgcctgtaatcccagcattttgggaggccaaggtgggcagatcacctgaagtcaggagttcgagaccagtctggccaacatggcaaaaccccctctctactaaaaattagctggtcgtggtggcgggcacctgtaatcccagctacttgggaagctgaggc

SEQ ID NO: 141478 - DNA, 223 bp, Homo sapiens
  misc_feature (169)..(169): n is a, c, g, or t
  misc_feature (209)..(209): n is a, c, g, or t
tctctatgccaagctacttctacctactaaatagctattttccctcaaatctttcttaactcctgtcctccatccctgccttgcttaccagagtattatgttgtttgtgtgtttgtctccaccttccctccctccttccatttgctgctttaaagaaaggaagacagtnaaagtggagggctggggacactatcagcatcactgcattnagtctcaacatttg

SEQ ID NO: 141479 - DNA, 263 bp, Homo sapiens
ttttctccagctactaacagaagaccaggaatagaagaggaataaggacaagagagaagtgacattttgcttcgtttagccctggtaaacactcggaagcaactcagctttaaaaatcttttcatgatgcattttagtccatggagatgcactcagcactcaagagttgttaccagagaattccaacattggggacaggcacagtggcacatgcctgtaatcccagcactttgggaggccacggaaggtggatcacttgaggt

SEQ ID NO: 141480 - DNA, 573 bp, Homo sapiens
atccaccctgttttcactacctacctagcgagcagatccaccctgtctactctacctgcttgtccagcaggtccaccctgtctacactacctgcctgtccagcaaatccactctgtctacactacctggctgtccagcagatccaccctgtctacactacctgcctatccagcagatccaccctgtctatactacctgcctgtctagcagatccaccctgtctatactacctgcccatccagcaggtccaccctgtctacactacctccctgccaagtagatccaccctgtctacactacctgcctggccagaagatccaccctgtctacactaccttccttgccagtaatgcacgctatctacactatctgcctggctagcagatccacgctgtctatactacctccctgtccagtagacccaccctgtctatactacctccctggccagcagatccaccctgtctatactacctgactggccagcagatccaccctgtctacactacctgcctgcccagaagatgcgccatgtatacactacctgcttgtccagcagatccaccctgtcta

SEQ ID NO: 141481 - DNA, 382 bp, Homo sapiens
atccatgtgtgcacagcaggatggtctgtctccagctcctcatggtgctcattgttgacactgactcaacaagaaagccttcattgagccaaggagaaaagaagagtacaaacctcagagcccccctgagttacttttattacagggtaattatcagtgaaatgcatccactattttttaaaaacaaaacaacacttggtactttctgagaaatgtagatagatttgcagataactttttgctacagttttatagtatacaaaactatacaatatgtacatatattgtaaatccttttgcataacaaataatacattaaattttaaaaaatctatataaggatagcatactaggagtatcaaaaggaaaataatcattgatc

SEQ ID NO: 141482 - DNA, 789 bp, Homo sapiens
tgtcttctccttctctcttccttgtctcttttctttctttctttcttctttttttcctttctgtttcctctttctccctccacttcttcctgtgtctcttctctctttaactctgctcctctttctctctggctcttttctctttgtgtgtctctctgctgttttcttcctcttttgccttctttctgcaccttttaattttctccgcctggaatccagcctcatttctgtgtcttttctctgtctcttcggtggctgtctgtcctccatccaccactcctgttctgtgagtcatcccttccccagggagagaaggcaaccaacattctccttgctaggccttgattttttattttattttattatttttttttttttgagatggagtttcactcttggcccccagtctgcagtgcaatggcgtgatcttggctcactgcaacctccgccttccgggttcaagcaattcttctgcctcagcctcccagtagctaggactacaggtacgcatcaccacgcccggctgatttttgtatttttagtagaaatggggtttcaccatgttggccaagctggtctccaactcctgacctcaggtgacccgcccgcctcaacctcctgaagtgctgggattataggtgtgagccaccgcgcccggccactaggacttaatttgaatggaaggtgattttgcctctcacaaaggacaaagctaacagatctccgaagtgggagttgcctggtaagccaggttgacccaggcactctgggcttcaaggattgggagac

SEQ ID NO: 141483 - DNA, 214 bp, Homo sapiens
atggctgtgttcccggggcctggggtgcaggccaaagccctcagagctcagtctctgtggtccatctcaccagggagcagggtggcctcccatccctgtgacctgccctggccatacccacctcctaatggtgggcgaggtgcagctttcggtccattggtgacatctgcctaggtgcccacgagactcaccatctgcattgcagttagagtcc

SEQ ID NO: 141484 - DNA, 164 bp, Homo sapiens
cttggccatgatgatcccatctttctggtatgataaggggtggagacgggacaggggaccctggcagggaataggaagggggcataagattgagggaaaattggtgtgatctggggatactcaagaacctgatacggtgaataaaaaaccaagaatcaaccctg

SEQ ID NO: 141485 - DNA, 388 bp, Homo sapiens
ggagcgcagtggcactatcttggctcactgcaacatccgtctcccggctcaagcagtcctcccacctcagcctcctgggtagctgggattataggcacatactaccgtgcccggctagaggattatagtttaataatggatttatttctaagtgtaaaaccagatgaaaagcaaaggccaaactacctgccatccagttagtttgaaatgatccttcatttatgcaaagagaccgacacagataatccaaaaactattctttttactttggaacgtgaaggcaatgattttttaaaataattgttttgcgttgaacaacatcaaaatgattctgttcctaacttcactagatggcagagagactcaaagcatttgagatagcagtagc

SEQ ID NO: 141486 - DNA, 125 bp, Homo sapiens
tcatgccatgttgaacacatccattttcagtcagttgaccctttttacccttttgtgacaccaacaagacatgagatgaatcaaaaggacttcccacccatcaaaatcacagcactctgcctacg

SEQ ID NO: 141487 - DNA, 416 bp, Homo sapiens
aaaacaaacatacaatctctataaaacaaatatttttaaaacataaacatcacaataatcttggcatgaaacagaaatcatgaaaaatacagactttaatgagtgttcatcataaacttaatgatttttgcctaccagaaacaacctggcaacagaaataggaatttacttttattcctttctaaaagctggagttgggactacctctatgaaacagagcaggcatgtcttacacatgttaggacatcaagatgaagtctccactagcaacagctaattcctctcccccttcttttcacccttctaggaacaaagaatgcacttagaatttctaaacttaagaaaacgaaaaagtctttggaaggaaaatagcttatcaatagataagagaaaattctaagggaaaaggaaaaaga

SEQ ID NO: 141488 - DNA, 260 bp, Homo sapiens
ctaggcaagattattacagtagcgctttcctctttttagaatatacccttgtctagcccctaccccatcttcaggacagtaaaggttctcaactcacttcaaaccctcctagccgtctagaacagtggctcacaaccgcagacccataggaaatgtagggccatctatgtaataaatttatccggatgtattataacaattttaaggttacacttgtcctttcttgaacaggacaattctttattctaagactatatgct

SEQ ID NO: 141489 - DNA, 289 bp, Homo sapiens
ggtttttattaaagactgaaatttgacatggtggctctttatgtaagtaacctgttgtggaggctaaagtaactccatcttggatgctaatccactatgttgacttgtgattaaccctggttccaggaatgcctctgagatttccagttcatctattgttccttgtgttaagagcacatccttaccataaatcctgcccttagatcaaactcctactcattccctctgaaacacgtgtaccttttcctgtggtttataatccctgggtctgggggtggggggtaatggt

SEQ ID NO: 141490 - DNA, 231 bp, Homo sapiens
gctgttttcctttcgtttctttgtatttcctcatagtaaataacctggagccagttcaaacctggtatccagttactatcgactgaattgcatttattgaagactcattttagacaattgcaagatgaagcttttgagaaatgatgaagaatctcggatactctagtgtactaaagagaaagtatgctcttaaaatgttcaacttgttttgtcttgtttatatatccgtaa

SEQ ID NO: 141491 - DNA, 190 bp, Homo sapiens
tggaacacagagaggcgctcttagcacatgaacacaaccccagaccccaagaagcatatcctccagcactgtgataacaatttaggaaaaggtcaagctccacacaggcacttaactgagatttaccaaaaaaaaaaaggaatgctaaaggataaggcattaaatatcaaaccagtaacagctggctgga

SEQ ID NO: 141492 - DNA, 197 bp, Homo sapiens
catattttggtaccatgtgagttggataattttcaccactaacaatacgatctaagaaacatgaaactgcagcatcaaaaaagagctttctgatcctgacacctgcctggagtgaactccatctgaaaaatcctggtctattagccctggcaggtgcttctcagatctactaggccagtgtttcacaggcatcaatt

SEQ ID NO: 141493 - DNA, 714 bp, Homo sapiens
gagacttagatgatagagagtccaataatttgctgattgctgtatatatttatctggttgttgaaaaggagcttaagctagaagatgttgggtaaatttccatggctcagcctaaatctcacaatttgcttttcaaatattctgtatgtctatgtcctttcaatcgaggtcatgtgacaaattgtttctgtgatagaagataaactttctgagggagaggcaagttgaccccataatctcaactagtcagagaaatcatttaaagaggaagcaatttggaaactaaaaattagttcactctctattccaaaattaatatcccatgctaatgtgaaaaattgaactatggagtccattttactaagaatactgcatacatgttttctaataaaattacacttttctacatatacatacatttataatgtacatataaattttaacaattttgacaatttggtattccagtgatttccctcttgacttcctgtgcccaaactactttcttttaaatatctcacctgctttatttttttattttcgtcaaaataggtctttaaaaaattagcattaccacacagtgtattgttaatataatgtaatttttgtttaacttaggaattatttgaaattggttccagatgtgaaagccatggagattgcatgtaaataatattgtgttttgaagccagttatactgtgttaagtggataa

SEQ ID NO: 141494 - DNA, 279 bp, Homo sapiens
tggggttttggtctcctcccactcggggctaagggctcagaatgaactggaacccaacctttgtcaggggagcccagcaatgtctgcacgacatacgcccccaaacagcgtgggttcaggaattgtaagtgtttgagaaagaaaaactgttaggattctagtttcgttgaaaagccattttgcctttgtcttcctctgggcacctgaccatccattcttagcccacctgagtattgagcatacactatcgtctctgcagtggaggtgggaggagaggaa

SEQ ID NO: 141495 - DNA, 242 bp, Homo sapiens
aaatgcatatttgaaaccagtgtgcagataatctgatttaatacagctccttttgactatcatttgttgttagaattgttgacatgctaggagttggaagggaatggctgtttatttttaaaacaattttgtgacatatttaaagatataatggctgcactgaatcaatgattattacctatcatgaaactttcattacaatatggataccattttgtcttttagttcttttccatgtgtct

SEQ ID NO: 141496 - DNA, 298 bp, Homo sapiens
catgcccactcggaaggagactggagaaggggggtctcccttaacggagagtgggttgtgttgttggctgaggaaggggcagtggatgctaggcaggcagaattacaggcatcctttttcactgtggaacaggggaggctcacttatcagggtgaccattagaaagtcatcctggcgtcagggagactagcagtgagctgttgcagcagttcagttgggggtttctggaggcaaaagtggtgattataaccctccccaagcgaagcatatgtgaatttccagacctgagcaagccagg

SEQ ID NO: 141497 - DNA, 594 bp, Homo sapiens
acatatgctgccttgttcacctctctccctccacctggctaactcttacatatcctcataacactcaattccagcatcaccccttcctccctgcagaggcaaaaaacaaatttggttttgaagctactgagatctaaatgaccacaggacattcaagtagggaaaaacgattagtagctatccataaagaactagaacgaaggagaaagaaagggctgatttcagatctggacatatcaaatgatagcagaaaacaggacaatccacaagtctaagaatatgtagagggacaagggtccaggatccatgactggaataagaataggcaccgaaatggaaacgttgactggagacacagagaagacaagcatttagagcctgtgtagaaagaaatcaagtggattagtaactagatgggagcaagagaatcaagttaagcacatccccactccactctcacagcaggagacgcgcaggcacgtgtttcaagacagaagcaccaggtagatggctcagcatggtactggttacagaagtttgtcagatgaagaaatgagaggctgaaaataccaggaaagaagctcccagaaagat

SEQ ID NO: 141498 - DNA, 155 bp, Homo sapiens
cctcaccagtctcttatatttcctttattatccaacttacagtctgtggttcaatacttcagccgactcttccaacacatgaccttctttcggtaggcttttttcagagtttcccttttgtacttgcccttatgtaaatctgtggcacagtcagg

SEQ ID NO: 141499 - DNA, 188 bp, Homo sapiens
tgcaaattctgtgagatgagaaatcaaatttgggcctgttagtttatctgaacacaagactttccacatgttgggcccatttatctgtcttagaaaaaatctcaaaaaaaaatgcccttgtgtttccgtctccttcatgtgactgagttcccttgctctgcagtgatgccattgttctgccgctcatg

SEQ ID NO: 141500 - DNA, 123 bp, Homo sapiens
tcttccctcagaagttggcaggaacggcaacaagacaatctgttaggggtgacagctataggctcttctcttttttaaaaataatatagtcaatattcaacatggttttctggggtaaaatca

SEQ ID NO: 141501 - DNA, 391 bp, Homo sapiens
cacccctttgtaaaaaccaggaaatcttgccgtctcacattttactggccaggacacatgcccaccccttaacttgtcactggcaaaggaggcaggtttaccatgaatggctttcactaaccagaatggagctctccccacagcagatggctgtgcagaggagagtgggcaacagagggcgggggcttctcttgccaaggagaagatggagaagcctgtgggccccactgccaccatctgccccagcctctcatatcccttctgcctgggtgcctgcctcagtgtccctttagtccctctttcggtctgtcttgaggggaggccatggcatgtgaggggtatcatttaggctctctgtgttcatttcctgtggctgctgtaacaaatcgcc

SEQ ID NO: 141502 - DNA, 836 bp, Homo sapiens
gcatttttcttttctgagacagcatctcactctgttgcccagtctggagtgccatggcacaatcaatcttggctcactgcagcctcaacctcctgggctcaagtaatcctcacacctcagcctcctgagtagctgagactacagacaagccaccatacccagctaattgtttaattttttgtagagatttgttgaggtctcgctgtgttgtgtgggctggtcggaaactcctgggctcaagccgtcctcctgccttggcctcctaaagtgttgggattacaggcatgaaccactgtgtctggccatgaatgctgcatttaaagcagggatttaagaatgtgtcaaaagtgggaatgaagacatgttgcacagaatgaaaagggtgcccggatcatgtctgtctggctctccatgaccacagacaagtgatttcacctttctgagcttctgtttcctcatctgtaaaatagaagtgccttcttccttgtgctgtgcggggttttgagaagaggtaacttagtttggaaagtgctgagcctggtggttcagagccggggttggaaaccatgccaccgctcttgtttttgcactgctggagagccaggaatggttttctcacatttcaagtgttgtaaaaaatgaaagaataggtgacagagaccacatgtgacctgcaaagccactttttcctcccaggccctttgtagggaaaagtttgtgttttagtttagagatgggctttgaaatcagacgcttgtgttcctgggtgccctctgcctcatataagcctcctgaccttgaccaagtactctgtgatatagtttggctgtgttccc

SEQ ID NO: 141503 - DNA, 155 bp, Homo sapiens
accattctcctgcttcagcctcccaagtagctgggactacaggcgcccagcttagtttgaacacaacctttacacgcttagtttgaacacaaccacatttgtagttgcccaaaaccaggcgcccctggttagccttcagaattgtgcactccctg

SEQ ID NO: 141504 - DNA, 231 bp, Homo sapiens
tgaacccccagaggaagaacggtctgatggaggcgctccccagagcaggcgccgcgtggtgtggccctgttacgacagctgcccgtggtcccacctctcaggtgggaccacggggaggagacaggaatctggagacttgagcaatggtggggaatccattgcagtggagctgaaggacaaatggggaaaacgggggaagagagagaagggaagagactcaagtcagagaaa

SEQ ID NO: 141505 - DNA, 500 bp, Homo sapiens
tctcagaatatccagtttacacaaggaaatattaaaattaaattattgtgaaaatctattttctgctgggaagaactgacctgtgatgtggcatgatgttttctagaaaagcatctcgattttgcctgttcacagggaatcatagctggacctcagaggtctacatgtcgggagatctgttggtttggcaaaatgctttctctcttcttccacccatgtctggagatgcattataattagtccctcctgggttctgttctctatttttctgattttttaaaaagtactttttaatagatgagctctctctgccacccccagtcaagactttgcagtttctgtaatcacagaggtaggaaatcaaaacaacagaggagatttggctctgagcttctgtgtgtgtccctagcggtgggggacattttgcccaacagatttaactggtacctttgtgttctgaagataatgctactccattatctgctattgtgataaacatt

SEQ ID NO: 141506 - DNA, 110 bp, Homo sapiens
catgtggaaacaaaagttagagctaaaatccgtaagaggaaggtgacaacgaaaatcaaccatcatgacaaaatcaatggaaagaggaagagcgccagaaaacagtaaga

SEQ ID NO: 141507 - DNA, 237 bp, Homo sapiens
tccgtatgttatccaagagggtctcctggcccgacacagagcagcacccactgctcacctggtcaggcaggtgctgaggcatcagggcaggtcgctcaccacagactcagccaccagcggcagtgctgggtcgtccagtggcttctgaccccaacgtgtccccagagcacagcttcccatgggccctttcttcccactacagcagaaggcttttttttttttttttttttttttttt

SEQ ID NO: 141508 - DNA, 440 bp, Homo sapiens
gagtgtgcgtggggatgaagagcaagcagggagggagcctagattccctgctgatacaccaaggaaagtctctcccttgcactgccacaccctgtcctgccgtgccagccaagtgtgagtgcccctcatctcctgagaaatctggcgtggccttagcatttcattaggcaacttggtgggaagacacactagaaaacatgaaaggtgagatctctttgattaaacaagaatgtttgggtacaactatttaccactaaaatacacttagctactaggcatcattctaagcaacttaacaaactgtgatttatttatacctctcattagagaagtgctgtatgtattcccagtttacagatgagaaaactgcaacatggtatcttgctatgttggtttccaaaagtggctgtaacaaagtaccctaaagggagtggcttaaa

SEQ ID NO: 141509 - DNA, 295 bp, Homo sapiens
aaggagatcacaaagctagaagaaaagaagggacttctaccttgtttttccacttcctgttttcaattttacttcagttagcagcacataactgggcctagctccagcttctgagtattctcagtaccaaccttgctgtgcctcccctcaagccccaggtgccagcagcagccatgccacaccccctcacctgctgggctgcaccccagggaggtctgagcacctgcagagccacgcccctttggtggaaaccccatcgctacatcaccatcatcaaagacctgagcaagccagg

SEQ ID NO: 141510 - DNA, 263 bp, Homo sapiens
gcataattttggaggcaggcaagtcccaagatctgcagggtgggccagacccaggaaagcttatggtgtcagttccagttctgatgctgtcctgcttgagacccaggaaaagccaatgtttcagtctgatctgaaggtgggaaaaaatagtgtcccagcttgaagacagcccaacaagaggaattctctcctatccaggggaggggtcaggctttttgttttattcaggccctcaactgattggacaagggccacacaaattg

SEQ ID NO: 141511 - DNA, 383 bp, Homo sapiens
gagatataattcacatattattcatccaaagtgtacaattgaatggtttttcaaatattcagagtgtgcaaccattaccacaatcaatgttagaacatttcatcacaccccctcctcaaaaaactatacccaggccaagtgtggtggctcacgcctataatcccagcaatttggattatttctactttttggatattacgaataacactactatgaacattaatgtataagtttttgtgtgaacatatggtttcatttctcttgggtatacacccaggagtagaattgctgggtcatatggtaactccatgtttaagctgtgggagaacagtttagattgttttccaaagcacctgcaccattttacattcctaccagcagtg

SEQ ID NO: 141512 - DNA, 795 bp, Homo sapiens
cgagagggacgcaggagataagacgccgggagccgtcaacgatggcaggtcccacagagctccgcagagcgggccaccactgcccagttcgggaaatgagcagcactcatcagcctccatcttcgagcacgtggacaggatctcccgccccccggaggctagccggcgggtccccagtaagatccagcttatcgccatgcagccgatcccggcacctcccgtccagcgcccctccccagccgaccgagtggcggaaagcaataaaatcaacaaagagattcagaccgcgctgcggcacaagtctgagatcgagcaccatcgcaacaagatccgcctgcgcgccaagcgccgcgggcactacgagttcccggtggtagacgacctgtcctcgggcgacactaaggagcgacaccgggtgtaccgcagggcacagatgcagatcgacaagatcctggaccccacggccagcgtgccctccgtgttcatagagcccaggaagagctcacggataaaacgttctcccaagcctcgccggaaacaccaggtcaacggctgtcctgccgacgctgagaaggaccggctcatcaccacagacagcgatggcacctacaggaggccccccggcgtccacaactcagcctacatcggatgcccatcggatcctgacctcccagccgatgtgcagacaccatcctcggtggaactggggaggtatccagcccttcccttcccggcctcccagtacatcccaccccagccgtccatcgaggaggcacgccagaccatgcactccct

SEQ ID NO: 141513 - DNA, 599 bp, Homo sapiens
cgagagggacgcaggagataagacgccgggagccgtcaacgatggcaggtcccacagagctccgcagagcgggccaccactgcccagttcgggaaatgagcagcactcatcagcctccatcttcgagcacgtggacaggatctcccgccccccggaggctagccggcgggtccccagtaagatccagcttatcgccatgcagccgatcccggcacctcccgtccagcgcccctccccagccgaccgagtggcggaaagcaataaaatcaacaaagagattcagaccgcgctgcggcacaagtctgagatcgagcaccatcgcaacaagatccgcctgcgcgccaagcgccgcgggcactacgagttcccggtggtagacgacctgtcctcgggcgacactaaggagcgacaccgggtgtaccgcagggcacagatgcagatcgacaagatcctggaccccacggccagcgtgccctccgtgttcatagagcccaggaagagctcacggataacacgttcgcgagggataacacgttcgcgagggataacacgttcgcgagggataacacgttcgcgagggataacacgttcgcgagggg

SEQ ID NO: 141514 - DNA, 608 bp, Homo sapiens
cgagagggacgcaggagataagacgccgggagccgtcaacgatggcaggtcccacagagctccgcagagcgggccaccactgcccagttcgggaaatgagcagcactcatcagcctccatcttcgagcacgtggacaggatctcccgccccccggaggctagccggcgggtccccagtaagatccagcttatcgccatgcagccgatcccggcacctcccgtccagcgcccctccccagccgaccgagtggcggaaagcaataaaatcaacaaagaggtatttgcttttatttaaaagtctgttacttaaaaaactcggctaagcccggtggcttatgcctgtaatcccagcacttgggggggccaaggcaggcagatcgcctgaggtcgggagtttgagaccagcctggccaacatggtgaaacgccatctctactaaaaatacaaaattagctgggcgtggtggcgggttcctgtaatcccagctgctcaggaggctgaggcaggagaatcacttgaacccgggagggggagtttgcactgagccgggatctcgccactgcactccagcctggttgacagagtgagactccatctcaaaacaaaaa

SEQ ID NO: 141515 - DNA, 574 bp, Homo sapiens
ccacctacaagagtcttcttgtagctccatagttttccatgtgtttttctaacaatttctgtctcctcaagtaacctaagtatgctctgtaccttgccaagtaaaagagcctaagtaacacggtatctttgtcaagtccacaccctaaactgttggagtgcctgcatattgcatgggagtaagcacgcatacagtgagccagcatgcagtaagccttcagtaaagtttgctgaataaagctgaggggtgtgtgattactttgggaatgactgagtccatgttaggctggcaaagagtatttctatatttggatcaaggtgtacccaaagttatctgaaaacttgcgggctggagcaaaagtgaagctttgtgagtaagtgaaggaagaaatagtttaagtgcaacattaccaagaagggcctcaactcaaaatatttttgcctccaacttgccatactgcctaaaatatagacacgatattaactccttcaatggaaggcactggctatctaagtgctcacttataaagtatttatgttcagagacaggagtaacacgtaaaacttatcatatt

SEQ ID NO: 141516 - DNA, 645 bp, Homo sapiens
ggcggagcttgcagcgagccaagattgtgccactgcactccagcctgggtgacagagtgagactccgtctcaaaaaaaaaaaaaaaaaaaaaccaaagcagtagataatgaaaacattagctaagtgatcttggacagttaatttttgtggaactgtctgcccatctgtgggatggagatgatatcacatagcttagagagttgaatgtaatgacataatgtatatacagtgcccagggatgtcactgacatttattaatttatacgagatttaatttatagaatcctatatatgtcaggccctgtggtttgagatatagtgataaagaagtcattctttcacagcccatattaagcacttcaaaaatgttagttcctttcctctcctaacacaacacgcggcacattataggtgcttggtgcttgttaaactgaactcactataacacacagagtgtaagctaaataacatttttgctctcctgattctaaattcatttaggcacttactctgtaacatacaaaccaccatttaaagaatccacggatagcttgaaaatgagctcttgcttaatacttctggggccccacctctgaactggcatgtcgctgtgggtattagatgacctgttgtccaggttgaag

SEQ ID NO: 141517 - DNA, 205 bp, Homo sapiens
tgcccaggctggtctcaaactcctggactcaagcatcctcccacctcagcctcccaaagtgctgggattacaggtgtgagccccaggagcttcttctgcatcagctatttctcagttgtcttcagctcaaaataatcttatttgaaagtgacatatttggggtggggtaggatgttctaatcccctgcaataccatttattgcat

SEQ ID NO: 141518 - DNA, 345 bp, Homo sapiens
accgccatttacaactatctcgcctttacaatatcttattttctatacatttactggaaaactgtccatgagcattttcactaaagttttcatattttaaatttgcaattatgtatactacagctactgtttaatactaggctgaggttagagattatccaccttacattattctgagttgatatggagagagatgtgaacatgaaacttctgaattaatatgaacaaatgtctagaaaaatgattatttaatatctgaatgatttattttacaaagtcaatccctagtgggatacaattacaaagagcaacacaggaagaaataaagctgactgcctcactgtt

SEQ ID NO: 141519 - DNA, 479 bp, Homo sapiens
gtttaaagttttgaagaattgccaggctgttttccacagtggctgtaccttcttgcatgctcaccagcaaggcactagggctccaatttcttcacattctcaccacagcttatctttcgttttttggaattaagggtttgattttaacagttgttcagattatatcacattgctccatggcaacagttaatgacatattctagatatacatttgattaaaatatgtactgcttccaagaagcctttctcattttgagaattgagattcagttttatagattcaaacaagaataccaatcaaaatttcagcagactggattggtagaaattgacaagctgattctaaatggtatacagaaattcaatggctcacacctgtaatcccagcactttgggaggctgagacaggaggataacttgaggcaggaatttgagaatggcctgggcaatgtagcaagaccccatctctacaaaaataa

SEQ ID NO: 141520 - DNA, 401 bp, Homo sapiens
ctcatctccctcggcttgcacctcccaaattaagtatctctgacagaggtcacacagtaaggtcacagaggttacgcactgcttacccttgttttcattttttatttgttgttattgttattgtttcattggtattgttattgttctgttggtattgttattgttctggatgaaaagaaacaaacacctgagcaaaaccctaagtccaaaatcaaagacacaacttttggttaaacatggtggactgatcacatgagttattaagaattaattcccataaaaatgattttaaagtaaacaaaagaataaagatataaaggggaaaagaggtagtagagatcatttctatcaggttttgacagctaaaaagtggatggtcagaggccgaggtaggcagacca

SEQ ID NO: 141521 - DNA, 245 bp, Homo sapiens
agggtttcactgtcttgactaggctggtcttgaactcctgacctcgtgatccacccacctcgtcccctcaaagtgctgggattacaggcgtgagccaccgtgcccggcataaagtaaattcttaatgatctatgaaaagaaaatggcaggccgggtgtggatcccacctgtaatcccagcactgtgggaagctgatgtgagaggatcgcttgagcccaggagtttgaaaccagcctgggaaacat

SEQ ID NO: 141522 - DNA, 400 bp, Homo sapiens
ggtaacaaggcacctggcacatagtaggatctcagtgtatgttactttcttatccttgatgtcacacctgaagcaggtcagcaagcaaaggaaacgggctgggagtccaagatctgggtttgagtgtcagcacgtcctctcattagctgtgtgccctcaggaaaaccacttaacatctctgagccccacgtttctcatcttaaaggctggaaataattgcaacttttacctacctcgtggggtggttgtgaggcttgaatcatcaaatgaaagggctttgtaaatggcagaactccatagaatggtagttcctcctccttatcattgcggttagtgataattgtgtatctttttcatttgacttgggtaaatattagccaattcccagtcatgactcaaa

SEQ ID NO: 141523 - DNA, 439 bp, Homo sapiens
taggtttaggatctcttttgggctgggtacatttctcttcataacttaatcttcaaggcagaaaaaccatttaagcaaacccttgttttaatatttgaagagaatcaacgtgcattgaccatttccacagaaagctgaaactcattgcacagaaattttaagtcatggccatgagattctagaatctacatctagaagccattttcaactataatgttaactagaatgccttttagggaaaattaagaagcaaagttctcctggcccctgccctgcctttctctctgtccttctttgcctctggagtagacctgaggaaatttttaatactaacgagaacttggtgctgcgtagcctctgagtctgaaatgcctgagaaagcagtccagattccaactgtaaaacattccttcaccaagccttggaaactaacatacag

SEQ ID NO: 141524 - DNA, 852 bp, Homo sapiens
tatcacacattttaactatatttaagcgtacaatcaagtgccattaattcacagcatctgcatccatcagcactgtctacttctagaactttgtcgtcatactaaattaaaaaatctgtacccataaataataactcccaactttatttctgtaaaattggtgttgatgttcccattttcatttcttattttaataatttgagtcttttcttttttttcctagtcaagctagctaaagatttgtcagttttgtttttctttgaagaaccagttttgattttgctgattattgtttttctattctctattattctattattctctattatttctctcttacctaatctttatttttttccgctagctttggatttgatttgcttttttttctcttttccaaggtgtaaacttaggttattaatttaaaagtttttttcttttttactgaatgtgtttacagctgtaaattttcctcttagtgctgttttcactgcatgccctgggatttgacatgtcgtgttttcattttcactcatctcagtattttctcatttcccttgtgtttttgttccgtgttcctctcttgtcccccttgcaaacacctacctcctttctaagagtcaacttacccttcacctcctgtctgcaatcttgccttttcctgtcttctagacaaggaagttgcgtctgcactcccactgcactccacctcttctatactttgttgcacttactttaccaatcaatcctcctaaacttttgcttctgaccaagacagagtaactgatatcagacttgccctcctgccataaaaatactggaacctgacaatttatgaaacaactgttttcc

SEQ ID NO: 141525 - DNA, 384 bp, Homo sapiens
cctcaggcaggtcacagagcccatgggccttactttccttggccacaaatgcgaccgcttctgggctcgctgtggtatgcttggctccatgttcccacttacatatcccatcactgccccaaacccaaatgcttgagattggattcaacatctttcttcccaaacaggcctttattttagttgaagcttccccaggagagccccaagcttacaactctggagaggcctttgatttccttactctgtagatccaatcgggcctcaagccctgtcactcttcctctacaggatccacaaaatctttccttcttcttcactttatcgccaccttcaccatctaacccaaaatgttaggattgctgcgaagagctctcctcctgccaa

SEQ ID NO: 141526 - DNA, 313 bp, Homo sapiens
agaacagcattttgcgatagtctgagcttcttgggaggagaggcattttgtacggaggttttaaaatcagctaaattaccttctttctgtcattgctatttctaaatccaaaaggtgcttatatttgtccatcttacccagtccctcagtggactgccttgcccatgcagtgcatgttaataactagcagaggcacagacctcaacccttgtaggcccactgcttccttttccacagggtcactggtccctgacctggctaacctggctcccagggctttccctccacctccacaccttgtcaacaccttttt

SEQ ID NO: 141527 - DNA, 394 bp, Homo sapiens
aggattagtaatctggcatgtcaaagttcaggaaaggaaagcagagtgtccacatgtgggagtagtctagcaaggtgtgtgagaaccataacagattgaggagggtgacccctgcacaggaacaaaccagcttgggcctaggtgaggtgagacgtatgtctaggtatgtggatgggtccactgcaggaaatcagagctcaagtgaagtaagaagggcatccatgcagcaagcccatggaagcagagatgggatatttgttatatacaggggactggctaaataaatatattggataatataaagaaagcccaatttcccattgtcagaggaggaatttataaatatagaaagggaaaaaattagaatgaaccctgtagtgttggattggaatta

SEQ ID NO: 141528 - DNA, 98 bp, Homo sapiens
gcacacgggaggcgggcggatagcgcgaccacgtggcgggagcgggccagcccagggcgtccaccagccgtgtggggttggggtggggttggggggca

SEQ ID NO: 141529 - DNA, 810 bp, Homo sapiens
ttttatatagtgggaggggttcttaaaacgactactgtttcgcactgaagtctctgagcttcacagatcattaaaggtttctgaaccacagagaaaggagggcagagttaaggaaataaatcaaaagttcctctgggacgcacaaatgcctacttggaacaggctttcagcatgaatatcctccacattaaacaacagggaggacttttcaaaataaaagcagaaaagagattcattttgttacaagcaatgcactttttccttttggtgtaaaggttatgtgtgctataaaaaatgactcctgccgtgagtgctgcggggaggtggaggctgggcttggggcaggaggtggtggtggtcaaagaaaacaagtagaagtgaatacaacgcctgagaatgctgtgtttgggggtcccccaaacaagtctaaatgtcccgcaatgatttgggggtaggatgtgaggtaggagaatggtatcagaaaggaatttcttctacatttattccttgccatccttgcccaagaactgaaatcatttccccacagccagaaagaactgtcttctttgtgggtgtgcaacacacacagttgcagatctggggaaaagagactgtgccgttttgaaggcagagcctcacacttcttaaggaaatatcagttgtctcaaaaccagcagagggagtacaacgtttgagaagaggaatggccaacccgattcctgaggattcatgtttagccccgacaatggttgtaaagctgagctatctaccgtaacttctgcccttgctctcctgtcacccagcaatagt

SEQ ID NO: 141530 - DNA, 193 bp, Homo sapiens
gggactggagtgagagctgagccctgcaacctcagaatcaccttcggggcattcttccctcatcttgaagggtggtaaaggttctcgcccaggcagctctggtttctgtgctgtggaatcccagcagtctgatgccttccttcattctgtccccaccatgtcccctctggttcaagctggagggggccgcgcg

SEQ ID NO: 141531 - DNA, 317 bp, Homo sapiens
tgtggtgcatcccagggtccacaggaacaggccttgggccatcatgactgtccttaggaggtgaaggagggtggcagccctctgctgaggaccggcatgcccgtatgtcctggcacaggttgcctaggagcctgcagggttgcagcaggccaggcagtccccaggcatcctgtccccggatcctcccgggagccctacgcggcaggaggagccctacgcggcaggaggagcccacgcggcaggaggtgccctcgcggcaggaggtgccctatgcggcaggaggtgccctcgcggcaggaggtgccctatgtggcagg

SEQ ID NO: 141532 - DNA, 470 bp, Homo sapiens
tctttcgctcattacagcttcttcccttcagccgatcagacctctacctccccatgtgtggggagagctttcactgtgactgctttccggtgcctgctgttcccacctagatggttccactgtgcctgcagtttggaggtatgcaccaatccatcttgtactctcaatcactcacgggttagaagcctagaatagatggccctctgatttctgacctgcagggcgcaaactgtctttacctggtgaaatgcagacaggccagctggtcctatgtcccaccaggagagctcttcatttgccagtgtccccaaacatcagtgttacggaaacaacaaacatatctgccacctgctcccaccctgggcaatttccagaatctgaagggccttcttcactatcaaagccagtctattctgctgggcaccatggctcatgcttgtaatcccagcactttggggaggctgaggcag

SEQ ID NO: 141533 - DNA, 165 bp, Homo sapiens
agctaggattacaggcatgagccaccacacccgacctggttgtcctaaaatttaaaagctaccaaattcttatctcaacttgattgctctttttgctcttactgtcgcccagcagcctggcgaaagaaacagcctgggcgaaagaaacagcctgggcgaaagaaa

SEQ ID NO: 141534 - DNA, 439 bp, Homo sapiens
taagttatccagtcttatgcttttattagcagggtgagaacggactaatacagtaacattgggtcataatgaacatgataagcaaagctgaaagagttagttaaattattccagggatcacgtctatcctatcaaacttacttttttccttttgggaatcacttttaaaaatacaagggctttacatgtgcgttactcattatagcagccattacaagcatattctgaatctgacatctaagcaacattttgacatctacgacctgcagagttgagaggcaccaaagagaccatttcacttcacaggtggtaaaactgtggcccaggtaatgtgcgtaaactgttgaggatttcatggtttgaactggaacttctgtctattagattgagtggtatcaaattttatttggaagatgaatattgatatcttactctgctc

SEQ ID NO: 141535 - DNA, 206 bp, Homo sapiens
ctaggagcttcaggagggcagggatctacctgccctgtcagccgctgcaggcctagcacccggcacagagcaggagttcaataaagtatctgtgaatggatgttttcatgatgccagcctggaacttccatagccctgttttccagattcaagaaataactacttctctaattcagctaatctccctaggagaggcagaatggccc

SEQ ID NO: 141536 - DNA, 416 bp, Homo sapiens
aacacacatgcgtcttaaatatttgaggacctactataaaacaggcaatgtactttgcagacatacatcaattcacctaaaaatgttgatgagagatacaaaaaagcaagtctttttattcagttcttttccatttgttgcataaattatatgatcctgcatctctcacaattgtgcttaagatgagggacaatataaactttaaatcatgacaaaaaaaaaatcaggagaaatgcctgctaattaattcaaaaaaataattcatccctgcccttgaggaacatctagtcttgtgggaaagattggtaaacataattataattgaatgtgtacagtgcttaaatagaggaatattaaaaagtgctaaggaaacaatgtcccctgagtgaaaagaatgctttaaagagaacatctga

SEQ ID NO: 141537 - DNA, 417 bp, Homo sapiens
gaaaaggcaggaactggtaatttacaaaagaggaaatacagttcataaacacgtggccaaaaattacttcatcttactagtcatcaaagaagtgcaaattaaagcagcatgacagagagtgctgtgcgccgcctgccccaggaaggaacagagtctaaggactgccctgcgcccagaagcccccactcagctggccgcccttcctttgagggtctgccccaggaactcaactgacacatggcaagctggtgccccaggtctccatcctggtggtgtctaggaagcagagccttgagagtgcctgtcctaccccaggaggggccattcagcagcacttggcaaatgctgcactgggcactccagagccaaggcttcgaggacggagctgcagggagcacagagccgccccatggggag

SEQ ID NO: 141538 - DNA, 231 bp, Homo sapiens
accctcccacctcagcttcctgggtagctgggaccccaggccctctattccttgtgaggagggcagcgggcacgggtttctggatgcagtctcatctgctgtgacccttctcagaggagcagccaccattcctccatcctccctcagagcaccaaatccctgcccctgcccggtctctgaacacagtgctgggctctgccaagccctttccagcacgctccagccctgggg

SEQ ID NO: 141539 - DNA, 259 bp, Homo sapiens
cctcaatccagattctgaacagttataacatgaagaggtcccttatgttgccgtcttaaaaccacacttcctcccttcccattcccctttctgtacctgattcctggcaactactattctgccctccaattctaaattttctttcaaaaaccttatataaagggaatcatatggcatgtgacttttagggattggcttttctcttggcataattccctacagattcatccaagtcatggcataaatcaatagttcattc

SEQ ID NO: 141540 - DNA, 387 bp, Homo sapiens
tattactctccttttatagataaggagaaacagaagcacaggagattaagtgtctttcagcagtgaaagggacagagctggaacccagccccaggcagcatggcctctgagcccatgctggggaggagagggtctccacacagagcagggaggaagcttattgcaggctgcctggctgccaggcccaggaatggagcccatgccacctgactgccagccagggctcctcccaccaccactgtgccttcccgacaaggtaggaaggcaggcagtggccctcaccccaccctccttccttctctgcccctctacaccatgaatcagtaaaggggctgtctcagctccttgggtctctccacccagctaccaacggggcagtccccagaa

SEQ ID NO: 141541 - DNA, 511 bp, Homo sapiens
tccttcagcgctaaaaccagtcttgtcacactgcaggggcaccgtgtttggttttaataatctcatgtcattattagtagtaaaatataaatctgtttcttagaactttttagaaaagaattttgaaaaggttatgaaatggtactcaatgctcatctttcaggaaagaggtggagggggtgttaacttgctaactgtcattacactgcttgttttcagtttcagattaatagcaggtggtatgcagttttcaaagcaaacaggcttttttgttcggttagaaaaagcactaattgtttactgtagcctagaatattttgtgcaaagtgacaaatggcaaggatcacaaaacatttaacatttaaaataaattgatagctggctaatattgtaaattttttaattaaaaattttcttaaattgatagataacattgtatgtatttatcatgtacaatgtgatgttttgaagtatatatcatacattgtggaatttttaaatccagctaatt

SEQ ID NO: 141542 - DNA, 198 bp, Homo sapiens
ccgtctcacactcatccagtcagcatgtcactgacaggctgttgtattgactttttttttttaattgaacatacgttgttttcactgatttatgttttttaaattgaacatacattgttatcactgatttatgtggtcagctgccgaggttttcccactcattaccgctgacctgctcttcatcccttctttcaattc

SEQ ID NO: 141543 - DNA, 375 bp, Homo sapiens
ctgagcccaaagtcaggaaaagccttcccactccccacattcctcctgccgctcctctccatcacttgagtcccaggtgccagtggacaacaggcctctctctccccagccagccctgtctactgacgacagcagtctctcaactgatcttctggtcctagaccccttccttctgtccagggcccttatcaccagctgtgctgccatgggtcctgactttttccctcactggtctcacctcctgtggctctgccctccataccatccaccaggcggaggctccacaaccactcttgggtagcctcatctcatctgccctaggacagagtccaggccaagcccaggtggatgagtttccactgtgtgcacctctcc

SEQ ID NO: 141544 - DNA, 389 bp, Homo sapiens
caaagaagaaatcaaatactaattaagctataccacaggaccgacatgatcacaatgtatattcagaatattttcccattattcaattccattcacaaatgtcatctacagataggagaatataacttgaagcaatttttaaaaagaaggtaagttttgtgtgtactgttgccatcttttctgtcagaatcagacaaagtactggctcaaataaaattcagtgcccttaaaaccaaccagaagaacatatttacaagatatataaccttggaaggtctcagtctagccttaaccaaaggtcactatatggaatgcaattatttttatttttgcaaaaacgtgggctatattattattttgagatggagtctcactctgccacccaggct

SEQ ID NO: 141545 - DNA, 241 bp, Homo sapiens
tctagaggacccctcctacgagcgctactttagagtaatacttatcttgaaacagattagatttggggaggaaagaagggagacaggaagagaaaaaattttctgagagacaaacgtaattattcatttttctctataaatgttttaccaaatcctagtatgttcacttaatctttatactttcattactgttggcagtggaggcaatggaatatattttattttgatggcgatgcttctg

SEQ ID NO: 141546 - DNA, 117 bp, Homo sapiens
ggtgtatatcatattgcatttctatctaatatgtacctgcttatgggaggagtcaacaaatgtttattatttctaaatattcctatttctcagacattaaaagatgttcaagaagta

SEQ ID NO: 141547 - DNA, 320 bp, Homo sapiens
tcatgttactaagtgcaatcaaaagtgcgaagcaaactgtcccacaaagagtggatcaatcttccaggcttcttaaccatccccacccactgacgtatatatatgtctttttccccgtcaatgacagagccaaaagctaaatgctttcaggctcaatctcatattcttctaaaaacatcattagaagagaccataagaccatctcatgtcaaggaaaacacaccaataaggtcatccagttctcctagaacagggatgtctgatagaactttctaccatgatgaaagtattctgttatctacactgtccaatatggtagc

SEQ ID NO: 141548 - DNA, 327 bp, Homo sapiens
attctcctttcatctgtggcctcggaggctccccatgttttctgaggtgcacagaacatggaggggtgctcatctcatgtcagatattggaaggatgtcgtgcaggaaggttcgagggtctcggggtggtcctgagaagccgatgtgataggtgcggcagcttcctcttcccctgagcgggggcttccagagcctccctcccactggtgcccatggggtttgagcctgatagctccgcaggattcagctgctgtgagtcacagccaggatggagaggtctaaggcaggcctgatgccgggcagggcgacatttctagaaaaggtttc

SEQ ID NO: 141549 - DNA, 327 bp, Homo sapiens
tgggagtcctctgggactcctccctttgtgtcatcttcatacacaactcaccaactagtcttgtcgattccattagaatcaatcacttctctccatctccactgctaccaccatcctagttgaagtcatcattatgtttttgtctgtcaacagtaaccactaaaatgtgtggccccagaaaggggatagctggacaatgttccatgcttgcctccctacaatccattttccatgcagcagccaagtgaatatttcaagcataaatcagctcatatccttcctatggttaaaacccttcagtggcttcccattgaacttaaagtatca

SEQ ID NO: 141550 - DNA, 381 bp, Homo sapiens
atctaggatacctgtgagagtgacttgtagattttcaaattttctcctaatattttcacatgcacgaaccgaaaagagtttaaatcatgttgctccaattacttttccaagaaaaagcaccaaaaagaggaaaaccttttcccacatcgtcttcgtggcatccgctagctgaagaaaatggtttggccatgagaaactgatcacatgatttcttatgcttcatgtctgtgtattggctcccattttctcttccagagaaaatggaaaacattttcacattgtccagtaaacaccatacagcaatgcatgcagttatttacttgctttctttgaataatgggaaaaacagcggggtgctgcaagtgaaataagtccaaacgg

SEQ ID NO: 141551 - DNA, 676 bp, Homo sapiens
cccttccagtgtatactctgaaagagcgatgcctccaggttgtccggagcctagtcaagcctgagaattacaggagactggacatcgtcaggtcgctctacgaagatctggaagaccacccaaatgtgcagaaagacctggagcggctgacacaggagcgcattgcacatcaacggatgggagattgaagatttctgttgaaacttacactgtttcatctcagcttttgatggtactgatgagtcttgatctagatacaggactggttccttccttagtttcaaagtgtctcattctcagagtaaaataggcaccattgcttaaaagaaagttaactgacttcactaggcattgtgatgtttaggggcaaacatcacaaaatgtaatttaatgcctgcccattagagaagtatttatcaggagaaggtggtggcatttttgcttcctagtaagtcaggacagcttgtatgtaaggaggtttgtataagtaattcagtgggaattgcagcatatcgtttaattttaagaaggcattggcatctgcttttaatggatgtataatacatccattctacatccgtagcggttggtgacttgtctgcctcctgctttgggaagactgaggcatccgtgaggcagggacaagtctttctcctctttgagaccccagtgcctg

SEQ ID NO: 141552 - DNA, 295 bp, Homo sapiens
catttctcaatcacataccgttcccaagtattctggaaagggtctctaatctcctctctaggcctgaccttcaatacatgcataatgaaatagctgtccacaaatgcaacagcaatgactgtcatggcaaaacctattattcatttcctatacctttcactgcttttctctttcttcagcatctagcacagtgtcattctaggtactgaataggtatctgttaacatctgtgcagcatgcattttaacatcatactagatgttaaggtactgggtaaagttgccaaaagtcccca

SEQ ID NO: 141553 - DNA, 484 bp, Homo sapiens
catgttgccaagatggtctcgatctcttgacctcaagtgatccgcctgcctcggcctcccaaagtgctgggattacaggcgtgagccacctcgcccagcccatgcttgactaatttcttgtttttggtagagacagggttttgtcatgttgcccaggctggtcgcaaattcctgagctcagatgattcccctgcttcggcctcccacagtgctggaattataacagtgaaccactgggcctggccttgcatatctctgtcatactggttactattaccctggcctcaaactgtctgtcagtcacttctccccactagactgagtttttgaggcaagcgttatctcattatccccaatccttggtgtagtacctggtacatagtcatctcttagtcaatatttattttaaaagtaccattgccaatattttgggcctgctttactctgtttcgctaccataaactgttttcctaatccctgaaaa

SEQ ID NO: 141554 - DNA, 228 bp, Homo sapiens
atctggctgggcacagtggctcatgcctgtaatcccagcgctttgggaagccaaggttgaaggaccgcttgaggccaggagtttgagaccaggctgagcaacgtggcaagacctcatctctacagaaataaaattttaaaaattagctgggcatggtggcatatacctgcagtcccagctgcagtgagctataatcgcatacctgcactccagttggaagacctcttt

SEQ ID NO: 141555 - DNA, 216 bp, Homo sapiens
ccgcagaggttgtgagtgtgtgtgtgtgtaggtgttgtaggtgtgtgcatgtgtgcatgtgtgtgcgcacctgcatgtacatgtatgtattatagggcacaggactcatgaagtgacagatcaccatggggtccccaaatccacacccctcaccccagcaactccaaggggtagcctggagataggaagggcacccaggagggagagaagggggtt

SEQ ID NO: 141556 - DNA, 532 bp, Homo sapiens
tgtgtgtgtgtgtgtgtgtgtgtgtgtgaaatgaagactccttcttttgtatttttaggagagacggggtttccccatgttggtcaggctggtctcgaactcctgacctcatgatcctccctccttggcctcccaaagtgctgggattacaggcgtgatccttcaatgatacaagagactgcccatggtagtaaaggatatcgcatatttaaggcacagactcgagaccagtgtgtcttttgctaaaagagaagcccaaggcacagcttgccatgaaaaaaaaatgtgataatacacataaagaaacaaactaaaataatcttgtaagaatgtcatctgaaaacattaaagtgagtaagatgcattatttccttatatctatgtgacattctttgagttattcccaaaaagtctccaggaagaaattctgagtgtggtggcacttctcatgagagttccataggctgaggattttcagaacttgggagctgctgtacacccctctaggacctgcctcacatgacaacccata

SEQ ID NO: 141557 - DNA, 197 bp, Homo sapiens
accgcaggatatcatctcatgccttcccactgccaggtctttccataggaaatgttgcctcttcttattttgaagttgattgtttgaaactcaagtcaaggatttggggctttttacctttgtctcaaaacttatgaccccagttgacctcaatttacatttgtactcaattttggaaaaatacctcttctacctgg

SEQ ID NO: 141558 - DNA, 381 bp, Homo sapiens
ttaatatctcctacaataaaccttttttactaaacaaaaagatgtattcaactgccattctgaacatagtcaatcttgcacctcagcagaaccaattctcaggtaatacacacagcggtccatgctcgggggttaacaacaaaaatgcattgttacgaaggtcaggccatgcgccactgtcactgcaaagagggtcgtggaaaccctgaactcccctccttcagataatcctgcactgctcagacagctacgctccattggttgttaaaaacttcactatgagttatgtgctcttggaagcaagacccaaaagagcaaagaccccaaaagagcaaagaccccaaaagagcaaagaccccaaaagagcaaagaccccaaaag

SEQ ID NO: 141559 - DNA, 433 bp, Homo sapiens
tgacgtcgggagttcgagaccagcctgaccaacatggagaaaccccgtctctactaaaaatacaaaattagctgggtgtggtggtgcatgcctgtggtcccagctactcaggaggctgaggcaggagggtcgcttgaacccgggaggcagaggttgcagtgagccaagatcgcgccattgcactccagcctgggcaacaagagcaaaactccatctaaaaaagaaaagaaaagaaaagaaagacagacagacagaaagaaagaaagagaaagaaaggaaagaaagctgggtgaaagaaagaaagaaagaaaaagaaagaaagaaagaaagaaagaaagaaagaaagaaagaaagaaagaaagaaaggaaagaaagctgggtgtagtggctcacgcctgtaatatcagcattttgggaggctggggtgggagga

SEQ ID NO: 141560 - DNA, 566 bp, Homo sapiens
tagaactgaccctgggaaggtgcatgctcctccatttttattctcactgccaccctgaccattagctcgaggactattcctacatgctcgtaacctcagcaactgcttctacagtgacacaatccagctgaaggacatgcagagagagaatgtgacttcctcaagtggtgaatctcacctgagtttccttgccagtggaaactctgtcatctgtaatgaagtatctcgggtctgtagctaggagaaggaggggcatcctcttcaggggacacgttcctatgaatactcacactggctccatcctccagcctgcaaagcctggctgcctgatgccgtgagccaacacaccacagcataaatgcaacaggaagaaacaatcaaagtgtactgtgagtcttctcagcccccagcaacctaagataagtatcacaaacaagaacacgaggtcatttgagaggattctgctaatcaagaccgaattagatactcaggtatacataatgcggaaatcaggaatactcactttccataaataagaacctgtcaccacttggccctgattagca

SEQ ID NO: 141561 - DNA, 117 bp, Homo sapiens
caaacaagaattgtttggaaccagatgctaaaatcgagagtggtctgtttatttcagttcagagtgttataaaaatgttaataaggtatttttatgtctattacccagctatatttg

SEQ ID NO: 141562 - DNA, 336 bp, Homo sapiens
gagtttttatgatctttgcaattagatcccttttaaaataattatcagtggatagacttactctgaattgaaggtcatatagactacacttaagaacacacacatacagtcttttcatgtgaagtgtggccagaaagcaataagccaggagcagagataatttgatcctctttgtaatttaatgattgactaattgaatacctttggcaaatcatgtagctcttcagtgcctcaagtgcttcattctgcactttcatttgcagaatgaagatgatacttgctatttacctgctgatctaccttacaaagccattgtgaggaagttgaattggtgtt

SEQ ID NO: 141563 - DNA, 510 bp, Homo sapiens
ctgactggcccaggcactgtctctacctggggtgtcatagagactgctcctctgctcctcagcctaagggttggagcgctcctagcaatgtaaataacaagcgcgttatccccgtcttagcgatgattatttttgcctctcaccttgccactcagtgctcaccttgttaccagccagcaagctttctaccctctagaatttaaaaatcaaatggaggcgaaaacataaagtaaccactcaaagttcatagtccttttattttgaaacgtattttctcaatgtttgcaatacaccaaatctttaaccaatttgatcacacagagatcctagcgcctattcctttttaaaaggaatttctgtggttcacttggttttcatatgtgctctgcatttctctaccccagtgccaattaattctcatcctggggattttttcctaatagttagcaattaattacctgcaaaaattctatccctgacatgggtagatgtataagacccgctatttaa

SEQ ID NO: 141564 - DNA, 121 bp, Homo sapiens
atgtctccattgattcccaccagcacagacccacctgcctacatctgggcctacagacccactgtccctcatgctgcctgagatggaccctgagctcctagccaaggccaacccctccacc

SEQ ID NO: 141565 - DNA, 587 bp, Homo sapiens
tttatttccactcttttaaaaaagcgtattcgcatgcaaggctttattatttttgatgattatggcagtcagtatccggaattctatcagcaaatgtctgaatggttgaaagacggaaaaatcaaatataaagagcatatggtgcaaggtttagataacacgatcaatgctttcaatggtatgttgaaaggcgaaaactttggcaaagtggttgtaaaaatttaaaaaaataggaattatcatgatcacactacatcatttagatcaatcacgttcttttcgcattttgtggttacttgaagaaatcaagcagccctatgagctgaaacgctattatcgtgactcaagcacgcatttggcccctgactctttaaaaaccattcaccctttagggaaatctccagtattggaatgggatggcaaagttattgcagagtcaggcgcaatcgttgagttattaattcagaaacttgcgccgcatttagcaccagatatggatgaatctacctatgtcgattatttacagtggattcatttctcagaaagctctgccatgctgccatttttgttaaaaacgtttaatacga

SEQ ID NO: 141566 - DNA, 508 bp, Homo sapiens
atcaataaagagacagaaaaccttaaaaggaaattctggagctgaaaagtacaataattaaaatgaaaacttagattcaaaggcagatttgaacaagcaaaagaatcagcaaagataggacaatggagattattaagtctaaggaacagaatgacaaaaattgaagaaaagtgaacatagcttgctataggttaaatgttatccctgccaggtgtggtgcctcacacctgtaatcccagcactttgggaggccaaggcgggtggatcacttgaggtcaggagtttgagaccagcctgcccaacatgaaaccctgtctctactgaaaatacaaaacttaactgggcatggtggtgggcccctgtaatcccagctacttgggagggctcaggtaggagaatttattgaacccgggaggtggaggttgcagtgagacaaggtcacaccattgactcccttgcactctagccttggtgacgagcgaaactctgtcgcaaaaaaaaaaaaaag

SEQ ID NO: 141567 - DNA, 323 bp, Homo sapiens
atgctatggcgaaggcagcaccaacactagccagtgaccctgtggtcactcatctaaaacagaaaagggagtgaacaagcactggctctgaggatcagaaggggaccaggcaggaaggcaccgaggaagagccagcttcccaacatctgcttccccaagacctttccagcaactcccctgtagccagcagcccccatactgtctgtccgttagggggaaaaaatgaaaccagatgtcgggtgaggcaggcctgagtgaggatgccggggcagctggtcctggcttgctcaggcgtgccctccccaggggcagtgacaggccct

SEQ ID NO: 141568 - DNA, 303 bp, Homo sapiens
gccccatctccagaactccctcttgatgtaaattttagactggaaaagccaagaaacaggaatgtttgctatttacctggctgaaacctgattttacaaaaattaagagctctataggaaaaagttcacttcactaaaactgatatttaagttatatatgtatacatacattgatttgaggtgttttctctgacctcaaatcaatgtatgtataacttaaatatcagttttaaatatcagttgcttcacagtcaactgaattcctctcttctcaaaccccagctaccagatgtgctcccagtg

SEQ ID NO: 141569 - DNA, 224 bp, Homo sapiens
tatatgtttatggggtgcaatgtgatattatgatatatgtatacaacgtggaatgattaagtcaatttaataaacatacccgtcatctcatatactcatcatttttgtggtgagaatatttgaaatttgctctcttagcaattttgagaaatttattattattaactgtagtcaccatgcatgcaatagatctcaaaacttattccttctaacggaaacttgta

SEQ ID NO: 141570 - DNA, 1047 bp, Homo sapiens
aacttcctacttaacatctgttggcttcccattctattaccttatctacctgtgctaagtgggttagtcctgataatttctgggctgctttgaatggtggctgcttttgaaatatgctttttgaaatatgcgaaaaagcaaacaattaggtcatcattacctctttcattgactgtagagttattccggttctctctatttccactcctttctttgtttttcttttcccactgttcctattttttccttctccttttgtcaaacatacatgaattgtttaatgtagcttagtttagcaaacgtttattgtgcatctactctgtgccaggtattatttcagacactgtgggtagtgatacatagatgaattacatggtctctatttccagaagtttatagctcagttatgttgtatattaggatttgtttgtttataaatgacagaaatctaacttaaattaatcttagggaaaaatagtttattgaatggataatggaataactcatattgctgggaaggggaaggatatacctgggactcggggacaattggaacctggaacaacttgtagttctatcttttgcttttgtttcttattccttattagttccattttttcatattgtcttactccatttgttgggtttcatagttacaggtagcttgcatgtctcacatcacatattgtgcctcagagaaggaaagaactctgaaaggctggacttcacccagtgcctgtcccagggctaacatttattggggttggttgggtgaggacagattacatagcgcagatgtgacagtgaggctgtcttctgtgtttaagagtcctttccagagaagagaggttctgaatgactggcatgcctaaatatatataatgacagctagattttggaagtgcttcaataaaggtacaatgtatttattaggactaagaggtgataaagttggctgtgtgtggaaggggtacacttcacagaagaggtgggattttcaccagaactttcaacaggtaggaggcacttttcagggaaaagtgttcg

SEQ ID NO: 141571 - DNA, 128 bp, Homo sapiens
gttcgtatatttcagccagtttcatgcactttgccctctcagtttgcttcactttctggctcagtgaacctgacctgcaagtctccctgcagtttccctcagcaagtgctcactgggcagccccaaca

SEQ ID NO: 141572 - DNA, 470 bp, Homo sapiens
ttgggaacatatcaaatatgtggaacagaagcttaagtgctgcccataccacacagccttgtactcactgctcctacacatataaatgagtgaagaatggttgaatagaaaatctgcagcaaggcaacaatagtccagtttttaaccccagcttctctgtagctaacatgaataattcatggtaagctggatccttacagtaatttatcgatgagtagtataatcatttatttcaagctgaacacatttctctggctctgcttcatccaccacaagatacttccaggcagctctgggagaattggaagcatgtttttcttccagtatttgcctggtctcatagagcagcaaatagtaatataaagagctcaatctgtatgcacaaaagcagttgatgtagactacttttaggttcaagttttgagcaaacaatatacagaaaaccctttgcaattaatactaagactagg

SEQ ID NO: 141573 - DNA, 528 bp, Homo sapiens
gaccaatctctaatttcgtgtttgtaatgttacattacttaagagtcttcttaaagaaagactcctgccagagtatatcagcttcaagcttcccaaaatcaggatccacctgatcttgggcagagacagaatggcctcccctcgccactcagacttgctcagcaccctcctgtttcttacttgccagagagggtgaggtatccttcctcacctagctttcgagcacccagccttgaagcaccccacatctcctataatctccataacctctccaactgcagttattttatggggaaaagccctcatccctccccatcctctgacctggccgtttcctgtttgtccttgaagacttagctccaacatcttcaggaagttctccctgatcagctgcagggtgagtcatgggctttttctctgtgttccttggctttctgtaattcctgtacattagcacttctcagagtaaattataatcaatgagtcattcccagggctctagagctgcatcttttctattttagaccc

SEQ ID NO: 141574 - DNA, 347 bp, Homo sapiens
tgacagatgatactgagcatctttatttttctttttcagtattgttgtggctattcagtgcctattgcagtttcatatgaatttaaggatcagttttccgtttctgctaaaagaggccattggaattttgatagagagttcattgaatctgtagataactttgggagtattgctatcttaaaaatattgttttcccattcatgaatatgggatgtctttctgtatatttaggtctactttaatttctttcaacagtgttttgtagtttttagagtgcaagctgcatttttttgttgttgttaaatatgttcctaagtactttattttttttggtggtattgtaaatg

SEQ ID NO: 141575 - DNA, 659 bp, Homo sapiens
gagcgttgatttcttgagctctgaagtggaaggagtctgctacagctccgctgcttttcttcctcctcagctgagggcagtttgtcagttttgtgctcatcagcatttggataaagtcaaagtcacaatccactaattcaactatttattaaaagcttagtatttgtcaggtagcattcaagcgctgaggatacagttgtgaacaaaaaggacaaaaatcgtgtgtttattctcttcagttaggggagtcagactgtgaacaataagaggtgtggaaggccagatgcagtgcaggctgtggagaataataagctgggatggggatggatgctgcccagagtgatcttaaatcgggtgatcaggaaggcctcatggattggatggtgtttccagcagagatccaagggagggaaagagtgagttgggccgggcgcggtggctcacgcctgtaatcccagcactttgggaggccgaggtgggcggatcacgaggtcaggagatcgagaccatcctggctaacacggtgaaaccccgtctctattaaaaatacaaaaaattagctgggcgtggtggcgggcgcctgtagtcccagctgcttgggaggctgaggcaggagaatggcgtgaacctgggaggcggagcttgcagtgagccgagat

SEQ ID NO: 141576 - DNA, 209 bp, Homo sapiens
cattgggggaagctgctgatgatttgggaggatcaaaatgtaaatgcaatcttgtgatacaaatagaaagatgttttagaaggatcattcaggccggtgcggggtctggattaaagctaggttatactggtagttgggagaaaaagacaggtggctaaaacatcttccagctgtgaggaagggagggcctgagctggtgcagccatgtg

SEQ ID NO: 141577 - DNA, 249 bp, Homo sapiens
tttttcatttacaaaacttaactaaaattaaaaagaaacatgtaaatttctgaccttgtttaatactgtgccataagtaaaaggattaaacaaaaataataatagctccttcttggtataactgttgctagagttttgcattcaaccttttaaaagtgattaaagctaacagtggcagacatcagagaaaaaggcaactatttcccatgtggaaagctggtccctaaaaaaatgaagttaaacagaaat

SEQ ID NO: 141578 - DNA, 698 bp, Homo sapiens
tattttcagtagagacggggtttcaccatgttggccaggctggtctcaaactcctgacctcaggtaatccacccacctaggccttgcgaagtgttgggattacaggcatgagccactgcgcccggccacgtggttcaatcttaaagtagccaatgatgtggacaagcttgtccaatccaccttattttgtagttgttgttgttttgttttgttttgttttaggcttttaacagcctgaagccatgggttttagtttctgtctctagtggttaagtggaaaagagggatgaggaagaggctttactggcccaaccagaaacagaaactaagaacccatgactgtattctctcccttggataccctttcagaactttatttataccctctcattgttccatatagaattcaagacaactggtttgagaactgtgttttaaggaccaaatatcctctaaatattaaaatgtttatctttcattacgaaataatttcatttttgtaaaaaaaaaaaactacaaaataatacaaagaattcccatgtacccattacccatatttccctattttaatgtcttcaataaccatactgcaattatcaaaatcaggaaattaacagagggagttactactactagataataatgctattatctaatttatatagaccttattcaaattttcccaattgtcctttttt

SEQ ID NO: 141579 - DNA, 119 bp, Homo sapiens
ggtctcaaaggtctcctagctctggcagagtggaaattctctttgcttgcttaaaaaatttttttaatccagagtcaaacatcacccagctccactcctgccagctctcttagcaactg

SEQ ID NO: 141580 - DNA, 381 bp, Homo sapiens
gtacctttttttggcctgcgtctgtccatggtgacaagacccgagagaggggtttgcagtctctaagcgcaatacagtggacgaggataatcctattagccatgttcttgaaacacaattatagcagagagcagatgcaaataaggacagaagagcaacacatcataacctaatgagaagctgattaccaagaaaagaacaaaacgcagcaagactcagccatgaacgcagccccgagtccaagggaccattctgtgcctgtgaaggtgctctttgttcgcagcaaaactgagatccaacagtcctctcagaagacccagataaacgggcgccacttaccacaaacacccacgcaggagagagagtacggtctcatgtccg

SEQ ID NO: 141581 - DNA, 357 bp, Homo sapiens
caggctgcccatgtgacaagaccccgcacaggttttcagctctaaaaagcaaaacagtacaaaaacaacaaaacgccatgttcttgaaacacaattatagcagagagcagatgcaaataaggacagaagagcaacacatcataacctaatgagaagctgattaccaagaaaagaacaaaacgcagcaagactcagccatgaacgcagccccgagtccaagggaccattctgtgcctgtgaaggtgctctttgttcgcagcaaaactgagatccaacagtcctctcagaagacccagataaacgggcgccacttaccacaaacacccacgcaggagagagagtacggtctcatgtccg

SEQ ID NO: 141582 - DNA, 323 bp, Homo sapiens
acacacgcactcagaacacccacagctttaaaacggcaatcttactacaaaaatgacactttgcatttgcacagcactttgttttttgtgtactttacacatttattacctaatgactgtgttttttgaaatctccaataactctgggtggtggtaagaataggcatccttaagccaccttcccagatgaggaaacttatctgtgttcccctccttcttctcaacagccggctgatggaacccaagccctccacaccagcagtggggccagctgcacagagcggccagaagggagaggccccggggccacgcccttctctcta

SEQ ID NO: 141583 - DNA, 346 bp, Homo sapiens
tctttcctgaattaatgcttaggatatagtctgtgcattatgagccattaatgcaagagaactgatgttccacagatgtccactctgtcctctccgagttccccaactcagactctaatccacggaggctggttcaggggtgtccaaatggatatactgattgcctctgacccagctgtaacccaagacctctcattaatcctgcatctctctcatgaggtgagtgatgtctacgtaattaaaacttaaagcaagaaatggccaggagattgaagggtgaggaagctgaggattcagatggctccaacacaacattcaccctttagcaaccaacattgccattcaa

SEQ ID NO: 141584 - DNA, 343 bp, Homo sapiens
tgctggaattacaggcatgagcacccagctgaattgaatttttgtaggcaaataagcgttttaagtatgagaatgatttagtaggaaggaaacaagaacaagttgggaaacccaggttaaagtcctcggtttgcacttaacaagctatttgtccttgggtatgttgctaacaaagagcttttgtcttcagtgtttatttctttaacataaaggatttgaactggaagacttctaagttcaacaaatatatagcctgaattttttgaacaatattgatttcagatttcttgtgactttaatgtctgtaaataaaaaaaaagtctcagattccaatatttgagac

SEQ ID NO: 141585 - DNA, 409 bp, Homo sapiens
aaaatgttcacacctccatagctggaggccccaaagactgataaatatgtagtgtataagctcagttacatgatgttgttaacattaacagttccaagattaaattcaacaggtggtcctaatccccagcacctgaatttcacaaattacagcctgtctgcaatgatggtcttgtctcatatggctgcagactgaattactgttgagattaaatcactgtgtgcttttgttgaaatatatgctgcaagtcaagtcagtgatgagcggcatgtgttgaggcttaaaatatcacttttcatggtcatattctctacttcctctttcacaaactatgtgagctgcaattgtaatttcagtatcactaaatgaaggctacatggagtttcttgtcataatgaaggcattttct

SEQ ID NO: 141586 - DNA, 150 bp, Homo sapiens
caaagtgaaaatgtttggcatgtgtaggaggtggaggagaagcgaacttcagggagatacttggaaaatcccagtcctggaggcagacctcttgggttagatcccacctgtgccaacttcctcctggtactgggtccaacaagcgcctgg

SEQ ID NO: 141587 - DNA, 678 bp, Homo sapiens
cgaggtggctcatgcctgtaatcccaacactttgggaggccaagaagggtggatcacgaggtcaggagttcaagaccagcctagccaacatggtgaaacctcatctctactaaaaatacaaaaaaaaatcagccgggcttggtggcaggcgcctgtaatcccagctacttgggaggctgaggtagagaactgcttgaacccgggaggcgaaggttgcagtgagccgacattgtgccactgcactccagcctgggcgacagagcaacactccatctcaaaataaataaataaataaataagtaaataagaatatataaagagctctcacaactcaataataaaaagaacaattaacttttaaaaataggttaaagatttgaacagacacttcacaatggaagagacagcaatggccaataattatatgaaaaagaatccatgaggaaccacaatttgcaaatagaaagctgaatacacagagactaaattttctgggcatcattaatcaaaacagtgatctaattaacctacccttaaagtgaactatgaacctgcctggtacacagtggagcatgtctgcagagtgtctgacactaatgggcacgacccagaaactgctaacagtaagctcaatatccattacatattcttaacaaacctaggtacagctattattat

SEQ ID NO: 141588 - DNA, 327 bp, Homo sapiens
gctcccactcaaaaagacaggacgctgggcagaaaggcaggtgctgcccatccatggctgcatctatctgcacctgccccgggctggatgtgtggcctgaacagttcctcccatgggagggttcggctggcttctcttcttagcaagatggcttctctttaaaaaaaaaaaaaaaaaaattgttggtgaggagctggccaaatccatacgttgcctttgagtagctgggcaagtcctggataggtcctttctctaaggtgaactttctcagtcctgattccctatctgatcacagaggctgctccctactaggaccagtgacccata

SEQ ID NO: 141589 - DNA, 232 bp, Homo sapiens
gaaaagcaggttgtgttagtgatgatcatggggttttgtggtcattgagtaatgtggactgttgaacttcaagaaaatactgattttcttatatccagcgagcttcctagattttgtggggaaccagtgttctcatcattggaagatgtgctctctagtgtgaagcagtgattttcacatttgccctgtgattcggttgtgtttatgttgtggagcagaaagacctagccag

SEQ ID NO: 141590 - DNA, 358 bp, Homo sapiens
gagcatcatgcctcactgcagcgtcaaattcctgaactcaggcaatcctgccacctcagtctcccaagtagttaggactcctgagtagtagttaggtagcacatgctaccaaacctagctaattttcttattcttattttttgtagagacagggtctagctttgttgcctaggctggtcttgaactcctggtgtcaagtgatcctcctgtcttagcctcccaaagcattgggattacaggtatgagccactgaacctggccatattgaggttttagagcgagaaattactacttatttgaagagttgggatactacagtagtcttcccttatccacaggagatatgttccatgacccc

SEQ ID NO: 141591 - DNA, 201 bp, Homo sapiens
aagtggaggcaggatgctaaggagtctggggtagcagctgtgagccttggctgctggccagccccattccctccctccaggtccacatacagcacctccccctgcccactctcccctcatcaacttgcagctcctgctgagctgatgtcaccagcagcatgtatcaagaatgactcctaatctaaaataaaagttgaaaaa

SEQ ID NO: 141592 - DNA, 255 bp, Homo sapiens
gtttgggcaagttactcaacttatggtttgggggaactggttactcggcttgttgtctaattagatctcaaacagaatctgagcaagtcacatgtgcaagaaagaagctccgcctccaggccccactgtaaaccttctcgaagtgcttcctcccgctccatctcctttgccacgcccccagttccagtccatcagggcaagactagctttccactggtccttgtcccctaaggcagaaaactttcctgtattctt

SEQ ID NO: 141593 - DNA, 218 bp, Homo sapiens
  misc_feature (169)..(169): n is a, c, g, or t
tcagagttccctgctttaatctttctctagaacttggggatccaagcagcagaaaataaagaactttccatacctattccagtccccacagctgtcctgactcaaaactaaaacccccatctatgcctcatagagaaatggctccagtggaggccagggacatgggccnctgagctgggtgatccctgtggcttggacaccaatgtgttgagaagtta

SEQ ID NO: 141594 - DNA, 104 bp, Homo sapiens
tcagcagcacgccgacccgcccctcttccccgctgcacaggccacctactctgagtgtgcatgcctggctctgggcggagcacctgctccagctctgcaggccg

SEQ ID NO: 141595 - DNA, 227 bp, Homo sapiens
ggtccccatctgagaactgcctactgccgtgctggtacttctatatactgaggaaataaggttttcccatgttctagcaaatacccgatgtttcctcagcaatgccttcacagtatcctgccccacttgcctcttaatcactccatattatacctccccctaattgcctgccacttaatttgctcagcataacattcctttgacaggcgtcaccatgacagttgtgt

SEQ ID NO: 141596 - DNA, 487 bp, Homo sapiens
gtcatgaggcagatgaacactgtttggctccggaagggaaaatgtgataaagacacattgcttttagaatattcctgtctgggatgcataatccaggcattagacgaaccccaactgaggaatgatggacaaaataactggcctgcattcttcaaaaacaccaatgtcatgaaagacaaccagagacagagaccccattccacgtgaaaggctactcaacagatgtgacggccacatgcaggatgtacccctgaactggaccctgggacacagtgaaacaatgccatgaaggatgctgttggcagttaacaaaaggagagtatgagctgcagaggagaggacatactgggtctgtgtgcaatttcctgagtgcccttggccctggactgccacaggagaacccctcaccctagggaaagacgcccagcagcagtaagcagccgtggcacatgctatgccactatgtgaacaggtttcagaagaaaca

SEQ ID NO: 141597 - DNA, 262 bp, Homo sapiens
cttctctattacacttactcccttgttgatcccattcttatggttttaaatgccatctataatctaacaattcctgcacttcatatattcagttcagaaaactcataaatccagtccaaactcatatcgaattacctatttactatattctcttgagtgtctaacatgcttctcaaaattaacgtgtctaaaactgaacatagccatcttccaatacctacttcttcagcagtgttccctatttcagttaatttctattctt

SEQ ID NO: 141598 - DNA, 118 bp, Homo sapiens
gttgaacttaaaccagatgttggtatgaaggcattgacattttatgtggagcatttgctcgccagaaatatttatattttccttttctattttggaactgtgtatccagtatggacat

SEQ ID NO: 141599 - DNA, 137 bp, Homo sapiens
caaagcagagaacagtaatttctttccttatttatttaacagcatagtggtctcatccaaaaatctcttgaggttcttttaccaggacctgtctctatctaacacccccccaccccacctttaccccaataattgca

SEQ ID NO: 141600 - DNA, 200 bp, Homo sapiens
gcctttcctcatatccaggtatctgctcgccactctcggtgcccactcccccagcaacctgtgtctctcttctcaggaccttccccctggcacctgccctctgccctggcagccccacacctctgtctcccccttttctctctcccaccttgggctttcttccacgtgcacctgtgttcgcacaccctctgtaataatcc

SEQ ID NO: 141601 - DNA, 666 bp, Homo sapiens
ggagagtacgtcggcggtgctctcgggctttgtgctcggccgcactcgctttccagcacctcaacacggactcggacacggaaggttttcttcttggggaagtaaaaggtgaagccaagaacagcattactgattcccaaatggatgatgttgaagttgtttatacaattgatggagtctcattctgtcgcccagactggagtgaagtggcatgatctcggctcactgcaacctctgcctctcgaggtcaagcgattctcctgcctcggcctccggagtagctgggattacaggcacacgcaaccatgcccggctaattttttttgtatttttagtagagatggggtttcaccatgttggccaggctggtctcgaactcctgacctcaagtgatcctctcacctcggcctcccaaagtgctgggattgcaggcgtgagccaccatgcccggccaaatgtgtatactttttatttacacaaatgggatcttactatatgtgcctaatatctcccaagatatcacaagtacagaatagtatctgtgtgtataattcatcactctttgttttttttttttttgagatgaggtcttgctctttcagccaggctggagtgtagtggcacaaacactggtcactgcagccttgacctcctgggcttaagcaa

SEQ ID NO: 141602 - DNA, 843 bp, Homo sapiens
cctgacgtccagccgactggcggcgcggtcgcccgggagaccgggaaagccgtttcacacccgtcctagtcgaagtcgagatttcctttggcttcaaagctctctcaccatattttgggaagttatggatcatcacattcccatgcatgcgttgcctgaagaaatccaaaagaatttacgatgtaggcatgcagttaaaaagtcaacaaaatgaatttcagaaagtaaagaaacaactgagtcatttgcaagatgagctaaaaattaaatatagacaatcatacatcttcagaaatagacatactgaataaaagtttgacagtatcccagagaaataaagtatgccttgaaaaggaaatgaaaaatctgaaattgttgtcagatgcagccatattgagatctcagcagattcggacatctagacaacaggaagtaaacttgcaaaccagatgctatgatttgcaaaaagaagtactagatttacaatgtctagtagaggcacttggattaaaacttcagaaggcggtgacagagatggacaactataaagaaatgcttatgtaagatggagaatattaaacaacttataacagtgctctgtagatgtgttacaaaatggcaagaattaggaagaaatgacaagaattataaagaccctggtgtgttctctgtgattcttttggcagtgatttactggtgtgggtaatagtttactgctgcttttcttgcccactttactggcctagattatatattgaagaacctgtaaatatttttaaatacatggaggatttctttctctcaataagaaacttacttatccatatattaaagctttccctg

SEQ ID NO: 141603 - DNA, 775 bp, Homo sapiens
ttctttgtatttacttaatcttattttattcaatagcaaaccagtctctttgcctgctacagagccatcgatgttttctttggttcttggaagaactgtacttcgaccttatataatcctcagaaaggcaagatctggactacgaatgagtcacctgctaattacaccaatggctgctcctgccttgaccagtcacagagtatcaccctatctcggtatgctgctctgcttgtcgcgtagtaggtctataaatacttgttttatgaatgaatgtatgaacaaagggaagttagtcacgtgtaagggtgggtagcctgcgataaataaagtgtagactaggaggtctcaaaatactttttgaactaagcccttaatcttcactactttggactagaatggaaatgtcaccaacgccttcccaattaatttgtcctggctgtaatgactgaaaccagaacttccctttacacccatgacctctacaggcatctctttttcctctgctcaagaacagtaactgctcactgctgtgtctaccacataggccccagagcaaggggtgataggtagggctataggctcccgactcccgactcccggcagtgcctctctccaaccccccacgaggctgggacagctccctccatctcagcagtcgctaccaagcacccgacccactctcgcccacctcatccctcgatccccttccctccctctcacagcattccgcgtaagactagcccagccttccgagccccaccaccagttttcccac

SEQ ID NO: 141604 - DNA, 558 bp, Homo sapiens
cctgacgtccagccgactggcggcgcggtcgcccgggagaccgggaaagccgtttcacacccgtcctagtcgaagtcgagatttcctttggcttcaaagctctctcaccatattttgggaagttatggatcatcacattcccatgcatgcgttgcctgaagaaatccaaaagatgttgcctgaagaaaaagtttgtaagtactgtggagtcagctatctaattcttcatgaatttaaggctatggaagaaaaagtgaaagcaatggaaaaagagatgaaattttatcaaggaagtgtagatcgtgaaaagagacttcaagaaaagctgcattctcttagccaagaacttgaacagtacaaaattgacaacaaatccaaaacagaaagcaaaatatacttcagactcatgcttagactggaagtagaacattgccagctgaaagaacgaatgccagatctacaacattctgtcactgagccatacataggtctgtgatttgttttccttagcttttcttaataactttgtttttgcaaaataaatatttttttgaaatg

SEQ ID NO: 141605 - DNA, 1689 bp, Homo sapiens
cctgacgtccagccgactggcggcgcggtcgcccgggagaccgggaaagccgtttcacacccgtcctagtcgaagtcgaggtgagggacgatggctttcctcagcctgggatgacccggtcctccaaatgcagttccggagtggaggcgtgctcgcacccggggagagagccagaaagctgagccgcggcgccccagcgagagcacgaggccccgggtctggactccgccaccacgctcctctgcggccccttcctggtgtctgccagcccgcggggcccaggcgcggtccgccttcctcccagccccggggaacgcgcggctctgcttcctcacccccgcaccctcctcctcctcctcttccggccactgcaggtccagggggaacggggttagaaagggacagatttgaaagccattccagcagttttgtctggccttgcggttggtttctgtgtggaagagcctgccgcttcaggaaagtcttaggatgtgaacttccgccttcacctgcccctgacctgctcgttgtgggtgattcacgccatgggaatggttctttacgtaagggcttgaaagctgaacgtgagttaatggcctgacgtgacactagtgtgagaaacggaattggaaacgaacaaggacgtgtctgcattttaaaaaatgtcttttcggtgatcttgttagagaggaggttcacaaacacccacgtagctgcagccacttatcactgcacctcttgccaaagtgcggtccacatacgtgcaatgagaaaggattaaagggacttgtttgataacacacgcaaaactatatttcctttggcttcaaagctctctcaccatattttgggaagttatggatcatcacattcccatgcatgcgttgcctgaagaaatccaaaagatgttgcctgaagaaaaagtttgtaagtactgtggagtcagctatctaattcttcatgaatttaaggctatggaagaaaaagtgaaagcaatggaaaaagagatgaaattttatcaaggaagtgtagatcgtgaaaagagacttcaagaaaagctgcattctcttagccaagaacttgaacagtacaaaattgacaacaaatccaaaacagaaagaatttacgatgtaggcatgcagttaaaaagtcaacaaaatgaatttcagaaagtaaagaaacaactgagtcatttgcaagatgagctaaaaattaaatatagacaatcatacatcttcagtcaaagattgtcagagtacaaatatttctggaataagactctttcattacttacttttactaaaagggaactaaccagtattaaaaatgaagtatatgataattaccaaaactggacttcattgaaaggagcagtttttctacaaattaaatctataagtgaaacagccttgacagaaatagacatactgaataaaagtttgacagtatcccagagaaataaagtatgccttgaaaaggaaatgaaaaatctgaaattgttgtcagatgcagccatattgagatctcagcagattcggacatctagacaacaggaagtaaacttgcaaaccagatgctatgatttgcaaaaagaagtactaggtaaagaaaagtcttttgctgtttttggtgactagttatataagtacatgaataaatgtttacatttttacttataattacaacaaa

SEQ ID NO: 141606 - DNA, 1390 bp, Homo sapiens
cctgacgtccagccgactggcggcgcggtcgcccgggagaccgggaaagccgtttcacacccgtcctagtcgaagtcgaggtgagggacgatggctttcctcagcctgggatgacccggtcctccaaatgcagttccggagtggaggcgtgctcgcacccggggagagagccagaaagctgagccgcggcgccccagcgagagcacgaggccccgggtctggactccgccaccacgctcctctgcggccccttcctggtgtctgccagcccgcggggcccaggcgcggtccgccttcctcccagccccggggaacgcgcggctctgcttcctcacccccgcaccctcctcctcctcctcttccggccactgcaggtccagggggaacggggttagaaagggacagatttgaaagccattccagcagttttgtctggccttgcggttggtttctgtgtggaagagcctgccgcttcaggaaagtcttaggatgtgaacttccgccttcacctgcccctgacctgctcgttgtgggtgattcacgccatgggaatggttctttacgtaagggcttgaaagctgaacatttcctttggcttcaaagctctctcaccatattttgggaagttatggatcatcacattcccatgcatgcgttgcctgaagaaatccaaaagatgttgcctgaagaaaaagtttgtaagtactgtggagtcagctatctaattcttcatgaatttaaggctatggaagaaaaagtgaaagcaatggaaaaagagatgaaattttatcaaggaagtgtagatcgtgaaaagagacttcaagaaaagctgcattctcttagccaagaacttgaacagtacaaaattgacaacaaatccaaaacagaaagaatttacgatgtaggcatgcagttaaaaagtcaacaaaatgaatttcagaaagtaaagaaacaactgagtcatttgcaagatgagctaaaaattaaatatagacaatcatacatcttcagattgtgcttttgctgatgtctgtaagaactctgtctaagccggtcagaaggattttctcctgtattttcttctaagtgttttatagttttagctcttctttagatctatgatctatttcagctaacttctgtgtatgatatgaggtaagaatctaaattcatcctgtttcacgtggatattcaattgttccagtgctgtttgttagaggccaatttttccttattgaattgcctcagcatctttgcctaaaataaattcaccataaatgtaaaggattatttttggattttctattctattccattaatctatatgtcttatgtcagtgccacactctcttaagtactacagtttttaataaattttaaaatcaagaaa

SEQ ID NO: 141607 - DNA, 886 bp, Homo sapiens
cctgacgtccagccgactggcggcgcggtcgcccgggagaccgggaaagccgtttcacacccgtcctagtcgaagtcgagatttcctttggcttcaaagctctctcaccatattttgggaagttatggatcatcacattcccatgcatgcgttgcctgaagaaatccaaaagatgttgcctgaagaaaaagtttgtaagtactgtggagtcagctatctaattcttcatgaatttaaggctatggaagaaaaagtgaaagcaatggaaaaagagatgaaattttatcaaggaagtgtagatcgtgaaaagagacttcaagaaaagctgcattctcttagccaagaacttgaacagtacaaaattgacaacaaatccaaaacagaaagaatttacgatgtaggcatgcagttaaaaagtcaacaaaatgaatttcagaaagtaaagaaacaactgagtcatttgcaagatgagctaaaaattaaatatagacaatcatacatcttcagattgtgcttttgctgatgtctgtaagaactctgtctaagccggtcagaaggattttctcctgtattttcttctaagtgttttatagttttagctcttctttagatctatgatctatttcagctaacttctgtgtatgatatgaggtaagaatctaaattcatcctgtttcacgtggatattcaattgttccagtgctgtttgttagaggccaatttttccttattgaattgcctcagcatctttgcctaaaataaattcaccataaatgtaaaggattatttttggattttctattctattccattaatctatatgtcttatgtcagtgccacactctcttaagtactacagtttttaataaattttaaaatcaagaaa

SEQ ID NO: 141608 - DNA, 621 bp, Homo sapiens
cctgacgtccagccgactggcggcgcggtcgcccgggagaccgggaaagccgtttcacacccgtcctagtcgaagtcgagatttcctttggcttcaaagctctctcaccatattttgggaagttatggatcatcacattcccatgcatgcgttgcctgaagaaatccaaaagatgttgcctgaagaaaaagtttgtaagtactgtggagtcagctatctaattcttcatgaatttaaggctatggaagaaaaagtgaaagcaatggaaaaagagatgaaattttatcaaggaagtgtagatcgtgaaaagagacttcaagaaaagctgcattctcttagccaagaacttgaacagtacaaaattgacaacaaatccaaaacagaaaggttgagtatgtttttcttttctatcatttatttagttgaaagacagctacaggaaataaatacactttgaatgtttttctaaaatttctctacatcaggtatagtttatactttaatgcatttgtttcttaattatattaataattactaaatataattattatagtttgctttcttttgaggcatatatttactatctgaaaaattagaaaccaattaatttagtaaccacca

SEQ ID NO: 141609 - DNA, 1619 bp, Homo sapiens
cctgacgtccagccgactggcggcgcggtcgcccgggagaccgggaaagccgtttcacacccgtcctagtcgaagtcgaggtgagggacgatggctttcctcagcctgggatgacccggtcctccaaatgcagttccggagtggaggcgtgctcgcacccggggagagagccagaaagctgagccgcggcgccccagcgagagcacgaggccccgggtctggactccgccaccacgctcctctgcggccccttcctggtgtctgccagcccgcggggcccaggcgcggtccgccttcctcccagccccggggaacgcgcggctctgcttcctcacccccgcaccctcctcctcctcctcttccggccactgcaggtccagggggaacggggttagaaagggacagatttgaaagccattccagcagttttgtctggccttgcggttggtttctgtgtggaagagcctgccgcttcaggaaagtcttaggatgtgaacttccgccttcacctgcccctgacctgctcgttgtgggtgattcacgccatgggaatggttctttacgtaagggcttgaaagctgaacgtgagttaatggcctgacgtgacactagtgtgagaaacggaattggaaacgaacaaggacgtgtctgcattttaaaaaatgtcttttcggtgatcttgttagagaggaggttcacaaacacccacgtagctgcagccacttatcactgcacctcttgccaaagtgcggtccacatacgtgcaatgagaaaggattaaagggacttgtttgataacacacgcaaaactatatttcctttggcttcaaagctctctcaccatattttgggaagttatggatcatcacattcccatgcatgcgttgcctgaagaaatccaaaagatgttgcctgaagaaaaagtttgtaagtactgtggagtcagctatctaattcttcatgaatttaaggctatggaagaaaaagtgaaagcaatggaaaaagagatgaaattttatcaaggaagtgtagatcgtgaaaagagacttcaagaaaagctgcattctcttagccaagaacttgaacagtacaaaattgacaacaaatccaaaacagaaagaatttacgatgtaggcatgcagttaaaaagtcaacaaaatgaatttcagaaagtaaagaaacaactgagtcatttgcaagatgagctaaaaattaaatatagacaatcatacatcttcagattgtgcttttgctgatgtctgtaagaactctgtctaagccggtcagaaggattttctcctgtattttcttctaagtgttttatagttttagctcttctttagatctatgatctatttcagctaacttctgtgtatgatatgaggtaagaatctaaattcatcctgtttcacgtggatattcaattgttccagtgctgtttgttagaggccaatttttccttattgaattgcctcagcatctttgcctaaaataaattcaccataaatgtaaaggattatttttggattttctattctattccattaatctatatgtcttatgtcagtgccacactctcttaagtactacagtttttaataaattttaaaatcaagaaa

SEQ ID NO: 141610 - DNA, 1021 bp, Homo sapiens
ttctttgtatttacttaatcttattttattcaatagcaaaccagtctctttgcctgctacagagccatcgatgttttctttggttcttggaagaactgtacttcgaccttatataatcctcagaaaggcaagatctggactacgaatgagtcacctgctaattacaccaatggctgctcctgccttgaccagtcacagagtatcaccctatctcgatttcctttggcttcaaagctctctcaccatattttgggaagttatggatcatcacattcccatgcatgcgttgcctgaagaaatccaaaagatgttgcctgaagaaaaagtttgtaagtactgtggagtcagctatctaattcttcatgaatttaaggctatggaagaaaaagtgaaagcaatggaaaaagagatgaaattttatcaaggaagtgtagatcgtgaaaagagacttcaagaaaagctgcattctcttagccaagaacttgaacagtacaaaattgacaacaaatccaaaacagaaagaatttacgatgtaggcatgcagttaaaaagtcaacaaaatgaatttcagaaagtaaagaaacaactgagtcatttgcaagatgagctaaaaattaaatatagacaatcatacatcttcagattgtgcttttgctgatgtctgtaagaactctgtctaagccggtcagaaggattttctcctgtattttcttctaagtgttttatagttttagctcttctttagatctatgatctatttcagctaacttctgtgtatgatatgaggtaagaatctaaattcatcctgtttcacgtggatattcaattgttccagtgctgtttgttagaggccaatttttccttattgaattgcctcagcatctttgcctaaaataaattcaccataaatgtaaaggattatttttggattttctattctattccattaatctatatgtcttatgtcagtgccacactctcttaagtactacagtttttaataaattttaaaatcaagaaa

SEQ ID NO: 141611 - DNA, 303 bp, Homo sapiens
acccaccaccatgcctaatttttgtatttttactagtgatggggtttcaccatgttgaccagggtggtctgaactcctgacctcaagtgagccacccaccgcagcctcccaaagtgctgggattacaggcgtgagctattgtgcccggctcgcctagaagttttatcatttaaaattttatatttacatttattatctgctttgatttaattttcctaaatggtgcaaggtatgcattgagtttatttttttgtggatggatttacaatttttccagcaacagtttttgaaaagactgtcctt

SEQ ID NO: 141612 - DNA, 236 bp, Homo sapiens
caagagcccacctccctgcagtctgctcaagggaaatcttgtacaatttgtgtggacaatgaaatttataattttggcttcaagcttgggtgactttctcctctctgattataggaaaaaatattataattaaattaggattacgcactttttcccctcttcagtgtccttacataggacagacatccttcttgtttggtgaccacagggaccagtgacatcctagttttcttgga

SEQ ID NO: 141613 - DNA, 177 bp, Homo sapiens
gaaagatacccaaatctggcaaagaaatccaaacaccatcttagaaaaataatagatcaatagtctttcagtcaattccaaaccagtttttgtttcaaactcttggaaaatttgaactaaatgtataatttttaacaggataaagaatagctttatttggtaaccaatagcaatctc

SEQ ID NO: 141614 - DNA, 729 bp, Homo sapiens
aagaaccatcatctctgttcagccttgtctctcttctgtggaatcttccccatgttgcataactatcttggagggagacatgttctctcccatttatataaccttgttctcttctagagaaacagctctgtgttaaagacacttgagggaaaatggcattactgatgagatgatatttagttgtcccttcagagccaaagggcagtgattcaaaaacatttagggaaatagaagtaactctttgtaagctaaccaaacagtgacctgaactcttttaccttgtgatttcttatgagtgcttagtttagtcgcctgaagatcaatcttgaaattaacaggctattttggattataacaagattatttagagactcaaacattccagagttcctttagtagatgacttctatcatgacaagcaagctaaaaggtcagtggtcccaaagtggggtgcacatgatctattgaggtacagaaaaagagaataataaaaatatataaatgtatcattattaataaatataatctttaaaaagatgaatttttatgaatgatttatattattcacaataaattaataatgattatgtcattcataaataaaaacatagatatatggtagtacatgcttaaattttatttaaactagtaagaaggtgggatcaaatacagtgaaagtctaatggttaggtaacactttggctgtaataccctcttccctctaatcaa

SEQ ID NO: 141615 - DNA, 488 bp, Homo sapiens
ttgggtgttctggtggcccttcccctcccagactgagctctgtctaggattatcaggcaggtgttcaaataaataatgcagctaaaaatacttccagcagcaactgggacttctgtagctctgagatggtcggagtatgcatttcagctactcgagcaggtgtgcagtggctccagaaacttagaacagacacacccctgacacatcctcaacatggaccaagacctcatttccaatggagaaatgaaacaaagcatttatttcatctagtcttacctggaaacaggtgtgccttggctgaaggcgtcagaggtagagctcaaaaacaagttaatagtcattgtctaggggaagatggtggtttcagagcagtaagtggtattaatattacctgctccctgtccaggacttgttcttcactaagaagtagtacctagcataacttcagtgagaagataatctataataacataataataacaactgtt

SEQ ID NO: 141616 - DNA, 481 bp, Homo sapiens
agtatttgctttatcaggttgaggatgaggataaaaaaatatgaaagactttataagctaaaagagttataatatcactaagcttaaaaagaacactgctgcttggcattgggatatggaacgatattattatagtagttctgtgtgtattgcctgtggggacaaatccacaggagtaactagacaggaaaatgtatctgagaggaagttctccctcagtttaaaggaattaactaaattggatgccattggaaagtgcagacagctcagagatccgtggtgtgttaatctggtactttgttatgtttcagaacttgctcaagcctcctgagcacacttgtgacttccaggcattgttcttgttgtcccttttccaggccacacaggactgcataagggcgagctacagttcatcttacacattctatcgccaatgaaaacctttcatagactgaagccatttgggacagaatctgtgttt

SEQ ID NO: 141617 - DNA, 379 bp, Homo sapiens
agaatactatatattaacaaaagtgaaaaagaaacatatatgagtacaatttagcccactgttttatttagaaggaccagaaaggaatgacagtagaaaaaagagacagtttgactaatctatattatgctaactaggtattaggtgctctgagaaacataataatgaataagacatggattctattatcaagaagcttttacagtttattagaagagactttagtgtaattaacaaaagtaactgaaaatctggtattttaaagtacctctgtatgttttaacatggaaagatctccaaacacatcaatgaaaaaggtaagctggccaggcgcggtggcccacgcctgtagtcccagaactttggtaggccaaggtgg

SEQ ID NO: 141618 - DNA, 151 bp, Homo sapiens
tacagatggcacagtcctgagaagaaccagcacattctaccctgggcagtgtagggaggtacagagtaaagacttcacacctgcattctgtggtagaccctcatggaaaaactgggtggtggccagggaggcctaggcacaggcaggggag

SEQ ID NO: 141619 - DNA, 154 bp, Homo sapiens
aactaccatttcccacttaaattagagagctaagtttcacccatctagtaaacaggggacctaccagattctacaaatgttaactgataatgacatcactctcaaatgctgtttcagcaggacagagtgggcccttcctcttccccctacctca

SEQ ID NO: 141620 - DNA, 737 bp, Homo sapiens
aattcttagccccttgatgaccatgatggcttattctctttcccaattttgcatgcaaaatgtacgaatatatgtatgtttttctgagaggcaagtttagggttctcatgggattttaaaaagagataggtgactccccaccttaaagttatctgctggtcttttagaggtaaccagtgagaaggagttagctattttccaagggtgttttcatttggtaatggaagactttttgctgtggttctcatccaggagtattccttagaattgcctttaggattgttgaatcataaacatgcctgtgtccaccttatgcttaatactgactcagaatctctgggatctgggtctggacatgcatgtatttaagtagcttcccggatgattctgattcatagctcgggttaagaactccaccttaggaagttaggtggaaaaatactggatagtagtttctcagacaaaagtgtcagcctaggaattctgaattcctcatagtcctgaaaggacagttctttgggtttgatgtttgagcagatcataatgttaaatgatataaccccctggaaggcaggctgctgtgttttagagggttattctaggttctagtcccatctttaaccctttacattgctgagtgatgtggaacaaatcactgaattaaataattgtctctagagagcagctggggattttaagcaccctggagagaggtgcagaccctgccaggatgataa

SEQ ID NO: 141621 - DNA, 469 bp, Homo sapiens
tgtagtagagatggagtcttgctctgtcacccaggcttgagtgcagtggcgtgatctcggctcactgcaacctccacctcatgggttcaagcaatgctcctgcctcagcctgccaagtagctgggattacaggcacgtaccaccatgcccaggtaatttttgtatttttggtacagacggagtttcaccatgttggccagaatggtcttgatctcttgaccttgtgatctacccacctcggcctcccgaagagctgggattacaggtgtgagccaccgcgcccggccaggggatttctcctgtgtgaattcgctggttaagtgataattaactgcagttaaaattcaggtcaagcatgtggctcatgtctgtaatcccagtactttgggaggctgaggtgggaggatagcttgagtccaggaggagttcgagatcagcctgggcaccatggtgaacccctgtctctaaa

SEQ ID NO: 141622 - DNA, 101 bp, Homo sapiens
gcccatcccacatttttttatcagtgtccccagcacaggccctgtgttgggcacaaaacaacctaaagagaagaggcagggctgcttccctgaggggctcc

SEQ ID NO: 141623 - DNA, 440 bp, Homo sapiens
accaggctgaggtgcgacgatgtagttgcaggaaaacaaacttaacacgcccactaattctacattatgctcctaccccccggcagcctctccaggcccagaactttctccagtcagcctctacagaccaagctcatgactcacaatggcctatttaggcccataccctatgtcacggcagcctccgcagatgaggctactgcctcacaacagcctccacaggcacagctccatcgttacaatgggctctttagaacccagctcctgcctcccagccttctctccaagccctgaactttctcaagtcgacctcaccagacctgttgagatcttcttcacggtgtggctgtagcagaaaataatggtgacatgatatggctagacagggggggcttggtttaccctggttcacaagtgtcacgtgaggagaatttggaagt

SEQ ID NO: 141624 - DNA, 404 bp, Homo sapiens
cctggcttgctcaggtctcccaaagtgctgggattacaggcgtgagccaccacacctgggcaacttgtgctaatattcttaaccttcatgtgaatcattcctgccctcaggctagcataacccatacagccttccttataggaagatttcctactgggagtgaatttgtccagtgattcccccaagatatcccccaatcaaatattttaaaagtcatcatttacatgtaaaaactatgtaacaagcatggtagcagcagcgttaaagaaatggcagtatggcccctgtaagggaaggctccagaagatgagccgcactcagcctctaggtcacagctaccttaggagtttgcagttgttcctggggaagtcagtagacaaagctatctctcaggcctgggcaag

SEQ ID NO: 141625 - DNA, 516 bp, Homo sapiens
cttaagggtgaggaagaaagagccaaattagtaacaatgaaaatggctaaatctgcatacccacaagttctcttaactcctttcaaatgcctcccagctaagtgaggaagttccagaggtttcccaccggtgttcctttaggtatatttccaagttccactggagcctccctattctcctgctcctgacaatgagcatttgtatcctcaagccatgtagaaaacattctagcaacaaccagtacaagcattagaagtgcagaaaccaggccaggaacagtgactcacgcctgtaatcccagcactttgggaggccgaggtgggtggatagctttgagctcaggggcttgagaccagcctgggcaacatggtgaaaccccatctctacaaaaaacacaaaaattagccaggcattggtggcacatgtctgtagtcccagctactcaggaggctgaggctggagaattgcttgaacctaggaggcagaaggttgcagtgagctgagatcacatcactg

SEQ ID NO: 141626 - DNA, 353 bp, Homo sapiens
ccccaatcccacaagagataccctcactctgtccttggaaactagcacctcactcatccccccaggtacctagtactattcagtatttctttccttccttctctctctcactttcaaagatgaagtgtatgtatgtatttctttcctgttacagagaagttacaagaatagttcgataaataccctatgcccatcacctaagttcactaattgttaacattttgctgtgtttgctttttccctctctgtccctttttctctccaagttgctgatatcataaaccttcatcttaaacactttagtattatatatggtagcaagggcattcccctacattactacagttatgacc

SEQ ID NO: 141627 - DNA, 411 bp, Homo sapiens
gagtgggcaaacagggctagagcaatggaaactgacaagaccactcagtcagtctttattgagagccttctgagtaccaatcagggtggtctcagatccactttggaagtcactgatccacctgactcgaggtgctgagcaggtctctaccaggccaatgttgggggtagatggcaagaactgcctctactgagctgtgacagagaccctggtgggtctagcagtgcagtgaggtcttagaattcaagatgtgctttaggcctctgcaaaggaaaagctggtcctctgctaagccacaggaaagaaacacagtcctggggcggaactggtctttgagagaatagggtcaggtctgtctctgattaatagggtgtcagacaaagcttgcttgggtatcagtatcagcactgg

SEQ ID NO: 141628 - DNA, 558 bp, Homo sapiens
tccctaaactcccactgtttccccactgtttctctcagaaagtttgttctgaatttgcctgagatgaactcgggctctgcactcccaagctttgtggccctgaggccgtcattcccttctcctagccttagtctccctcatctttaaaatgggacggctagaattcatcattggctggggcacattggctcaagcctgtaatcccagcactttgggaggcttaggtggaaagatcgcctgagcccaggagtttgagaccagccctgggaacataatgagactttgtttctatttctatttaaaaaaataaagaagaacccatcactgtgaactcttgtgagaatccagtgaggagacgtgtgtaagtgcctgccacagtgcctggcacatggttggaaccccagagtgtatatggtcccagtattattgtttctatgctgtgtcccaaaaggctgacttatgtcaactgtgggagcccaccatttcagaaattactgaataacctgtggaatttccccttagttacaaaggttactcttttaaaaactctgtcctcgg

SEQ ID NO: 141629 - DNA, 195 bp, Homo sapiens
gtacaagctcggtacccatgtatgtacataacactctaagaaagatacaaagaatataatataccatttctgttccataagactttatgatctagttggaaacaagatatagatgcaaaaaattttgcatacaaaacaatatgggttaagtggtacatatattatgtaatatgactgatacaaaatataagtgga

SEQ ID NO: 141630 - DNA, 304 bp, Homo sapiens
caagcgggctgcggtggctgagggtcgtgcgcggcctcagtggtgcggtgggacacccgagagaggcgtcccgggggagcaaggcctggggtcctgcagtggaggtcagcccccaattgtgggcgcagctggagagggggcgccctggggttcacgaggccttgaagagcgcacacccttggccacgccctgcctgccgacccctcccggttgtttccctctccggtgaatctggatcacagccctcaccgcccctccactggtttcctgctggcaaaggcagaggggcgctcagcaggagctc

SEQ ID NO: 141631 - DNA, 231 bp, Homo sapiens
gttgattttgtttttaaagttggtgtcagagcagctacaaacttttttcagcatccctgcctggctgccaactggagctctctgttcacttcctcaccaacttgaaccacccccaaactgagagtaagctggagttagacagcggcaggaactgacacactttcaagaagggtttgacaccgcagaaaactttcacttctccaacccttccacccaggggctctggccctt

SEQ ID NO: 141632 - DNA, 503 bp, Homo sapiens
tgagtctggtagaatttatttttcataaggcaggagacaggccaaataatgtcagtgttctgtgagtctttgtgttccttgacctctcccctccccaacacacacacatacctctccttccttttccaaccaccctcagattttccaggacacacaccttcagagccacatctcaactctggtcatccctacagtgtaacagtagaatgagtgtagtagtcctcccagttgtcacattttaaatagggcctttgggaagaaaccaccagtggcactgagtgaaaaggaggctgaggcaagggggactattggcagctcttaggtcccaccagcagccagtggtccctcagccttcctacagcgatacagtggtagaccagttgtctttgctcagcatatgttttcagaggcagctgaatgtttgggttgtatttttcacagtactgatgtcagggacaccaaagggcaggagcatagggaaagggctcttggctgactaatga

SEQ ID NO: 141633 - DNA, 285 bp, Homo sapiens
gtcgaagctgcagtgagtcaagatcatgccactgtactccagcctgggcaacagagcgagaccctgcctgaaaaaaaagaaagaaagaaaaaaaaaaactgtctcctcaaaaaaattagatgtagtcagcccagttccagtcttcagtccaaggtccttccattcctcagtgcaaacatttgggataaatcttagggaagggtgcaatcaacttctctttgcctctggtgccccctggtggactataggggttcaaacatctctatttccttcatttccagcctc

SEQ ID NO: 141634 - DNA, 404 bp, Homo sapiens
tagccgattgtagctagatagtgaacaatttctcaacaatcactgatcataataagcgtttacaggcactcccatatcccaaagcagaactgactattccccctcttttagtcctaatgttaccagtccacagttctctgaagctctaaagtttttttcatttttctctttattgttcagattgaaaaatttctattgacctatctttattcactctttcctctttcatctccattctgttattgagtccatccgcagctttttaagttatagttattgctcttttagttctaaaattttgtttcctctttaccttttacttctttgttgatactttagtgtaacatttgttgcagaaatgttcacagttgcttatgcaagcattttcataatggagggtttaa

SEQ ID NO: 141635 - DNA, 354 bp, Homo sapiens
tgtagaaatgtgattgggcaaaaagcgtttgatctcagtgacagactgaatggagaaacccagcaaggcctgtgcagatgcttcttggcctctctgtgcagcattccctcttccaggatatagggcaggaccccttttaaaatggaagtcttccaacccacaatcaggcaaggtaggtcagagaacattttaatgggaagaggggaagattagagtcctgccttggggagaaaaagaagcgggtgaaaggagggcaggagaaagtcagagagattcagtggcctaaagctctccaacattttaacaaaagactgtaataagggctgtaggagtcataagcgaggaaccgcggat

SEQ ID NO: 141636 - DNA, 436 bp, Homo sapiens
acaggcccaagctatcctgctgaaggtgagaaacgtagaacagagactagttgccccagttatcccaacttaggtcaacctacatcagccaaatcaccccagacatggagcaagtccagccaaaatcagcagagctgcctagtcaacaacaacacagctgactacatgagcaagcctagaccagattagctgaacctcaaactcttgagttcaataaatgcttctagttatacatcactaaggttttgtgattgataagcaccattactgtgacatcaggtaactgaaacactatcttattttggtaggtgaataaagaaaataatttttattcttccgtttatgatgttaaaaggtgacaacaggctgggtgcaatggctcacacgtgtaaccccagcacttgggaggctgaggcgggcagatcacttgaggtca

SEQ ID NO: 141637 - DNA, 478 bp, Homo sapiens
tacctttggacacatgctgtctaatgttgaagtctattttgtgtgcatatatcttgtcttcctgagtagatcatcaatttgaagggaaaattcatatcttttgattctctgaaaacccacaggtgtgtcacaatgctaggaacatagtggttcatcattaaatacttatatcactgaattccttaattcagagcctctaaaaagagtagaaaagttagaaataaaaatagcaaaagctaaaaggaaggtgcagattcaagaaatactctcagttgtacctgtgtgggagcttcttgagaccaggaaagaccacatggggactgaccacaggacatttaaaagagagaaagtcaataggagggaggaaggaatgctcacagtgttctttggaggaatattcagactcatggaaaagagttagtctaacaagcaaaagagtgtaggctataaaggtagagagaacctagaggaaaagaaa

SEQ ID NO: 141638 - DNA, 360 bp, Homo sapiens
cttttatttcaactcatttcccacaaccctgtctactggacacttccaattaaatgttcactctcacctcaaaatgctttgagctatctccattctctcctcataaaactggccactgcaccaaaactttcccttctctcttcttgacttctaattgacttttaatttcatgccaagccatctgggatggaagcctaacgtcagtatcactttcctctcccttatttatatatttacgtaatcactaagcttcgacaactctttattccagattctctacgcacatctcttccttatgcatcttcacagccatgactctagaacagtttcattttgtgaattattataagaccctcccat

SEQ ID NO: 141639 - DNA, 1730 bp, Homo sapiens
agcgggttgagattagcagtgacataaggcagaacatccagtcagcagttcacataaagacctcagagttttggttcaacacaagctcaaggatgggcattatcatgtaatgggggaaaaacaacatttagattcaaacaaacccaatatcaaatgctaatttcaccactacattgctatgacccaagtctttgtctcataaaatgggcatactcactcataaaatgggtgagtatgaacaagataacacatgttgagcatgtgtgaacagtgcctagaatgcatgggagatactcagtaatccacaccccacatccctggaacctggcacgatgccccccccccatcaatacatttagtaggagacatcatagcactttccaaataatctattgaaacattcatttttgcctgtcctctttatttaggatgccggaagaaatgggaagacattaaggtttatgtgctaatatttgagtcctttcatggcatttacatggcagagccaaaagcagaagttgacaaccatcagaagccaaaccagccccacaaaatacctagccttcaagagagaaattggaccaatctatgaaaaatgttgctggtgtgtggggatggggaggttggaaagttgctgagacttcgggaaggaatggaggctcatgacagatacttgtgccacattccatgtagaccttcctaaaatgtggcaggcctctaatgggcaccatcagaaagccatggcaactgacgatcaaaagatctgccttgaggccatggtccctgtgcccaagctgggctcagaaatcatggagtctcccgccttcaagggactgtgtcgatttaggcagtgagcacagccacagccgcccgtgtggatgtggactgaagtccagttctcttcatgggtgcttggctgtgagacacctctaagactcttgcacaaccaagcagcaggggaagaaggatattagaattgaatgtgatgattgagatttaatttactggttaaatgggtggggacatgcagcagatgggccgattgtaaaggaataaatataacatttattttcatccaagtactagggagtattttttttgtatgctttgtcagagatcagttggttgtaactatttagcttcatttctgtttatcacaccataattcacaattgcaaagatatggaccaaactaagtgcccatcaattaatgagtagataaagaaaatgtgatacacacacacacacacacacacatatacacatacatacacacaccatagaatactaagccataaaaaaaaaatgtattttgcagcaatttggatggaactggaggccattattctaagtgaaataactcaggaagggaaaaccaaatactgtatgttctcacttgtaagtgggagctaagctatgggtattcaaaggtatacagagtggtataatagacactggagactctgaaagggagagggcgagagaggagtgaggaataaaaaaatagtatactatgtacactattcaggtgacaggtaccctaaaatttcagatttcaccagtatataattcatccatataaccagaaaccacttgtacacctaaagttattgaaatttaaaaattgtaaataaaaatcccacatatattagggagtataattcacactctctatgaagtaaaaagggcttatacagtaggccaaactcaaccctaccactgtgatttaa

SEQ ID NO: 141640 - DNA, 478 bp, Homo sapiens
caggttctgcagggtgcactgcctccttttctttcctctgggctgcattaggaggagggaggtgaatggggagaaggaatcaatcttcctgtgttgacattttccagaccctgagaaacgttgagttgaaagataagtgtgaaagcatctctttcttttgatggtgtgtgagatgaaaagcacttgctaatagcccctcaggtcaaagtaacacatttgacaaaaaggagcctcaagcttttgcttgtcagtgtccatatttgattggaaatttcaatctgagatttggtgcttggattttcctagaatttgccaattacttgttgctctggttccagctgacttttagtcttcctttgggtactaccactgggtgcagtttgttatcagtgagtagctcttctctatcgggctgtgtaaatgtacccctatttaattcattcaacaaattattttttaaatacttattgaatctggg

SEQ ID NO: 141641 - DNA, 370 bp, Homo sapiens
cagatagcagctgtagccagtcaaggatcagatccccttaaggacgaagtgcaatctacagaggtttggggaggagaaaaggacaccacaaaggaagagctagagggtgaaagaggccaagcaggaaatgttgccacagaagccaaagagagagcacagaagagaggggagcggccaacagtataaagtgctgcacagaggtcacgtaagatgaagacctgagcgaccatggattcagcaaacagcaggtcatggtggctttgttagagaagccaggctgcagttggacaaggtatgcatgggatattcttagaagaaatctaactgcagaaaggaggagtgttctggctttataaccatgcacagaata

SEQ ID NO: 141642 - DNA, 162 bp, Homo sapiens
cttcccactgcacatgactgggtgaaccagggcagccctctctgtgtgtgtgtgcttcataccagctgagccactgaagcaggccctggtcagcctccatttccttgccattccctgtggggctcatagcccctccttgtgcttgggcccccacttccccca

SEQ ID NO: 141643 - DNA, 395 bp, Homo sapiens
gaaaatggctttcagaaagttccaactacccgataggagttttgttttcttagacaacagacaagggtccctgccacccacagcacttctctcttaggctatgcagcagcactgaagcgtgctgactccttgactctgagcacccaaagacaagagtcaaaggaagtagataggggccatagagggacagatatgactcatgactacacaggctcactctcaaagtggctagattccaggaaaggttcccaggaagcagagggaagccccagaacctttcactcagaggcaaaaatagggtggctgagtagggatggggatgtgtccagtagctgtggacctgccactctcttgctaaacagcagtcatgtcaaaaacagcttaggtttccaaaa

SEQ ID NO: 141644 - DNA, 223 bp, Homo sapiens
ccgcccgcctcagcctcccaaagtgctgggattacaggtatgagccacagcacccggccagtagtcttgtcttatgggctgtgtcccaagatggggagggctacagtagagtggttctgcaaatgctcaatgccttccccaggcacactggatccttaaaacacagttcacggcagacccactcctgctggtgggctggggctttttgagctcatatgccttg

SEQ ID NO: 141645 - DNA, 487 bp, Homo sapiens
atctcttgaccttgtgatccactcgcctcagcctcccaaagtgctgggattacaggccacgtgtttttgcaatataaattagctcatgatgattgataaataggagaatgatgtcattataatgcaaaagttcatatacagttttccctagcatgttaatgatttggactgccagtaagcctcagtttgtaaatcaatcctatgcatcccacattcttcaaattagacttgatctggacttgcaataaatctgtaaactgtgaaggaaagagataagccagtggttgtagttcagtgtggatagtcctatgctaagggaaggcacagaatactaggaaaattcaggggaggtgatgagaaagacaggatgggtagggtgaccagaaaaggcttccaaaggagattgcattgagttgtgttttgaaaggtgctagctagattaagaagctgggaaaggcattcctggcaaagggaacagagttgataa

SEQ ID NO: 141646 - DNA, 231 bp, Homo sapiens
atttacttggtggtcagtaaatggaatcgattatttaaacaatggattcctttgagtggagatacagtgttacgttttacttatctcatttaatcttaagttttgtacatctttaattttttaagaaacagcctttttgggattttggtacaaaattatttgatttcagaatatttatatgtgggtgtatgctgtgtgattaacttcttaaaagtacaggagatctcagtt

SEQ ID NO: 141647 - DNA, 234 bp, Homo sapiens
catttccctaatgaatatcatttcccttttgagcatctctccttcattcattggccatttccatatcttctttggagaacgctttgtccattttttaattgtgctgtcttttttattgagttataagaattctttatatcatgtagatatggcccttaacagatacttgatttgcacgtatttcttccattgtgtagattgtgttttcactttcttcatggtgacttttaaagc

SEQ ID NO: 141648 - DNA, 255 bp, Homo sapiens
tgactgaagttttactcatctcccaaaatctaactcagacattgcctcctctagaaaggtttcccaaaatgatcagccacccccttcgtccaccacttttgcaatgcttctgttctttatgaatacttttattacctttgccagatgtataacttgtttttctgtctgccacccctactagcctgagtatacggagaatataattgtatatcatttccatattgataaaaaagtgattgaataaacaaaacaata

SEQ ID NO: 141649 - DNA, 491 bp, Homo sapiens
gaacggtctcccgatccaccttgaaatagattccaaccctgctctgaatggcattgctttagcaaagccccagataaaatttgagttcagtgaccctcctagacgtggcccatgatgatgcatatatcccctatccctttctccctgttgggtctttggctacgaaccccaggcacactttagcttaaagtcagattttgtaaagtttaatttacctaagtgaggaggaagacacaacctccttctcacatcatcctcttctcatatttacacttaacacctgaaggtgctgcactgacagcgtgttcagagggagaacgcgctttggcggtggataatcacacgctgtgaagaacgtgagaagaggagagtcatgagctattaggcggtgccacagtgccagctcctgcccaagcaattccctctagacagactgtttagggaggctgttaccagataacaccaattacttctaaaggaggaggggtgtt

SEQ ID NO: 141650 - DNA, 504 bp, Homo sapiens
ggaaggtattcttgatcacagtgtccagtgattgagataatgtgtgacatatttccattaggtcttttctaccagaaagctatgcaactcatcttactgactatattctactaaaattcaaattccataacatagcatactcacagcttgatttttaagggcttataatttcttgagtcagactgagaatagttaagatggtatctatttcataaaacatactttatttgcttaccaagttctttggaaaaagctcacaagattaagaaataaatctgtcatggtgcttcttgtctcccccaagctgcctgagatacaggtggcatagatggacttgggcccataagatcttttaagaatacttttaagagtattcttctatcagtggcttaaactgaggtagagatttctgagaactgcacaggtggagtgggatgccctcccttggatgtggagctacccgccgttgggcacttggaaggaaatggccagtggagacggtgc

SEQ ID NO: 141651 - DNA, 450 bp, Homo sapiens
tgggtgacagcagctcagggttagatggtgcagtctgcagcagctgctgaaacacacactctctctccttatgcgccctatttccagagtgtcactttggtccccacggtcatagatggcttctgccttctaggcgctgagtgcacggtcggggcgagagaagacaaagggaaagagacatgtatcagccaactctgattcaaagcacaatatgtgctatgggaaaacaacagttggccaggcatggtggctcacgcctgtaatcccagtgctttgggaggctaaggcaggaggatcgcttgaggtcaggagttcaaggctgcagtgagctatgatcatgccaccaaactccagcttgagtgacagaatgagaccttgtctaaaaacaaacaaaccaaaaaacgctcattgatttttgcctgattagaagtgtaatatgtgctaatttta

SEQ ID NO: 141652 - DNA, 210 bp, Homo sapiens
ggaaacgccaggcagagagactgacgtgagcaacggctggagtccacctggagatgcccattagcgtcgcactgaagtctggaggtccctgccagaaattcggatggagatggcaggtcggcagtctagaggcagaagggaagtctggctggagatgtaaattccggagtcatcagcccaggatggattttaaaaccactggactggaca

SEQ ID NO: 141653 - DNA, 812 bp, Homo sapiens
aggttctttcccctgcacagcccgtttccctttggggcccagtgaagcatctttctcatgcatacttttttcccagaacgaatgatttggctttaaaaagggcagacatccaggggaatatgcccttatctgctggtgccagaaagtttggagagagaacaagcagttgggttatcaagagccttaggcacagaattaataggaacacacgggcctaggacttggccctcttcagacagagcaatctggcatttggcactgttctcatggcccacacaggtacacccacacatgggcatgcgtgcacacacccacatgcacacgcacacccacacaggactgcactggctccaggcacaggcgttcttcactatgcagactttgttccaatgacagaaacagcctccttgcagaattcctataaagcttataccccgtctcttgcaatgctgggaagcacagaagggaaaaattgactggatgctgtctataaatgtacttttgtcacaaaggtggactgaaccttttcttgaatcccaggggctaaagaaaaagaaagaaagaaaaggaagcctttaaaaggtataggaggctgggcacggtggctcccgcctgtaatcccagcaccttgggaggctgaggcgggtggatgacctgaggtcaggagttcatgaccatcctggccaacatggtgaaaccccatctctactaaaaatacaaaaaattagctgggtgtggtggcaggtgcctgtagtcccagctactagggaggctaaagcaggagaatcgcttggacctgggaggtggaggtt

SEQ ID NO: 141654 - DNA, 540 bp, Homo sapiens
tactgatatataaaagaaacttaaagtctattttagccttttacctctgccatttagttgcagagcaggaaatacaaccagatctcctgatgatcaatttagtagtcttattatttgtactgtggagatacctaacaaacattcagattaagaaattaagtttttatacagttacatagaaattaaacagcctggtcctaaatcgcttttgggcaaagaatgaaattaacacaggtttttttttttttttgagacagggtctttctctgtcacacaggctggagtgcagtggtgtgatctcggctctctgcaacctctgcctcctgggctcaagcaatcctcttgcctcagccttctgagtagctgggactacaggtgtgcactaccacacctggcaaatttttgtattttttgtagagactgggcttagccatgttgcccaggctggtctcgaactcctgggcccaagtgagctgcctgccttggcctcccgaagggctgggattacagggatgagccaccatgcccagcctcaaaaaa

SEQ ID NO: 141655 - DNA, 748 bp, Homo sapiens
cacaagcatggacagattttggatatttttatggttcaatcttggtaattgtttgtgtctaggaatttgttcatttctcctagacttttgtaaattttcagcatacagtggttcatagtagccaccgatgatcctttgcatttctgcagtatcaattataatgtctccttttacatatctgattctatttatctatgttttctctcttctttttagtatagctaaaggtttatcagttttgtttatcttctcaaaaaaacccaactttttgtttcatggatattttgcacttttattttatttcaaattcatttatttctgctctaattcttatcttttctttccttccactaattttctgttcattttgcttttgcttttcttatttttaaagatgcattgttaggttacttatttgaggtttttcttttttgttgtcagcacctacaggtatctttttagtgctgctttcactgaatcagttaggttttggtatcttatgattttattatattttttgcaagaaattttttaaagtttaaaaattttttcattgatccaatagtcgttaaaaaatctattgtttaatttctatgtttttatatggttttcaaaatttctcttgttattgatttatagttttattccagagtagttagataagatgcttaatattatttcactttttttctaaatttttaaaaatttgctttgtaacttaatatatggtatctcctcaagaatgatc

SEQ ID NO: 141656 - DNA, 391 bp, Homo sapiens
gtcagggttcgcatgttagtattagtgtgtctctcacttgtgtgatactgtgacgtacatatggaaggccagaatttctaaacatgagcactcaacacaacagacccaccttttggctctgcaatcctcagagcccaagagaaccttccggggcttctgtgagaatgtgaggaaagtaacaaacagcaagtgtctaggagaagggttcacctggattctgcaaaccaagtttacttgtggagctttcactttcctgttggaaagggagtcagacaatagacctgacctccatagagcactgcaagagggagcccctgtgagtcagataaagcaccggatgctgatatgtgtcccgtgtgacgctggccacacaaaaagttctacgctgcct

SEQ ID NO: 141657 - DNA, 109 bp, Homo sapiens
aagctaagactgtgtgttttaaattggtttaacaaactaatttatttgaccatcttaatctggcctttgagccagattataatgatagtgataatgatagtgaatattt

SEQ ID NO: 141658 - DNA, 263 bp, Homo sapiens
ggccagcctctcctgagcagctaggcccaggggcctgggagtgtgtgcagggaggggccgacatctgtcgttttacccatgctcctgcccataccgcccccacctcagctccctgccctgggcaggaggtggctccaagcagcagtgggagggtttggagctggaggcccaatcgcctagaaactgcacagtggtagctggctggctatgggagcgatctgtggggtaggggtcagccaggtcgtgttgacactgtacatgag

SEQ ID NO: 141659 - DNA, 185 bp, Homo sapiens
ccatctcccacccaaggcagcacccacctttccaggccacgaactccctgccagccacatagtccttgtgcaagcagagaccccgggtgaagttaaagctctgggcggaagtgaagcgggaggtgaatatgtccagcacagcctgggagaagggcccctgtggggtgaggagcctcgttcgcagc

SEQ ID NO: 141660 - DNA, 276 bp, Homo sapiens
gatcaagagccatacccctatcagagccatacccctacccacctgctgaacagtttcatgtttgatgttgttcccacagagtggccttccctgaccaccctatctcaggctccctctggtttcctctgtgagtatatccccttcactgccttcacagcacttcatcacagttcgtaattttatatacgtgtttgtatgtgggaacatttggacacacacacttctaatatccactattgcattctaacctctccaaggacacaaggggatctcttt

SEQ ID NO: 141661 - DNA, 860 bp, Homo sapiens
gcggccgactactactactactgctcgaattcaagcttctaacgatgtacggggacatggccccagggtcagtgcttcccagaaacctagctgactttgatggtcagtagaactcatttgccaccttttaaacaaaaagtttgtagactttgcaggctctccatctgtctcaccaagctaggtgcagttattgtgcagaaagtttgcttaggggcagaggaagccttatctacgtaagtatttagaatttgttaaaaaaaaaaaaaaaggaaaaaggaaagcagtttatagatgaatacttaaatagtttcattttgtacaagtcacctggttttgttcccatgtgttaggaagaaatgagttggacagaattagaagtcttgtcactgaagtaattaaagttattacagagcagcttttttagattagaaaggaagaagctagaaattagtcattggttgctttcattatctattatttgctttcattttatttttcttacaaaactgctatcattacacagatcgtatacaactacaagccttttattttattttattttatttcatttttttttttaaagacagagtttcgcctttgttgcccaggctggcgcgcaatggtgcgatctcggctcaccgcaacctccacctcccgggttcaactgattctcctgccttagcctccctacctggtagctggaattataggtgcccgccaccacgcccagctaattttgtatttgtattagagatggggtttctccatgttggtcaggatggtcttggaactcctgatctcaggtgatccgcctgcctcggcctcccaacgtgctgggattataggcatgagctgctgcg

SEQ ID NO: 141662 - DNA, 521 bp, Homo sapiens
tcaatccttcaaactctatccttcatttttatctaccaatctcccctcctctcaggcttcttgctcagaatgtagatgccaaagaaagctaaagatgggaatatacccatgggctccagagaaacctttctccagttaccaaaattttctttgggaattattgaactcatacggattgtaaagaaacaaactgcccagacacggcagctcacacctgtaatcccagcatttgggaggctgaggcaggtggatcacttgaggtcaggagttggagaccagcctggccaatgtggtgaaaccccgtctctactaaacacaaaacttagctgggcgtggtgatgcacgcctgtaatcccagctactcgggaggctgaggcaggagaatcgcttgagtccaggagttctgggctgtagtgcgctatgccgatcgggtgtccgcactaagttcggcatcaatatggtgacctcccgggagcgggggaccaccaggttgcatgataggcgggggggggtaccgagct

SEQ ID NO: 141663 - DNA, 364 bp, Homo sapiens
ggaaattctaaagcacaattgtaatcgaggtgagaggagatgctcctttcattttgcttttctgttttcttgttttttaaaaaataaaataaaataaccacactgcctccctcaaatctcagcatttcttttttcccagccatttaaactgaagactgagttttaactccttataccctggacagggcttgtcttctgtggtttttcattcctttctgctcctagtaataaaacgttctgtctggctgggcgcagtggctcatgcctgtaatcccagcactttgggagaccgaggcaggtggatcacttgaggccaggagtttgagaccagcctggccaacgtggtgaaaccccaactctacta

SEQ ID NO: 141664 - DNA, 204 bp, Homo sapiens
agctctttttcttttaaaaagaaaaagggaaggggatgtgcgttttatgcaatgagatcgctgcaaaaggtttgtattcgttttgctcagtgctaatccccacattcaacctccacgctgctgtcgctgagtcagcgccgttcctttaagtgacctgattctgtaattccattattaatattatgaaaatggctttcctctaca

SEQ ID NO: 141665 - DNA, 459 bp, Homo sapiens
ctgttactgtcagcctaatgtccaagccacttaccagctctgtaaggcccacctgacctggccccggccccccattgcctgctgctgtctgcctcacccctagctacatcccaataccccaagactgcagagctcttcagcctgaggcctgtgcactaacaaagccatcttccccagatccaggtgctcaatctttgctgaaatgtcacattcccagtgaggccatcaaccactctatctaaaataaccccatacccgtctccttcaggttctgtccctttccttgcgctgttttcttcatgtctggaatcaatttccactccgtccatgtttttgagcctgtactgtgtgccaggcactggtctaggcacaggggaacacctgtcaggtgctgttgagaaaaatcaagcagtacaaagggctgagaagtgatgggccgacctcttagaaagggtggtc

SEQ ID NO: 141666 - DNA, 543 bp, Homo sapiens
  misc_feature (505)..(505): n is a, c, g, or t
  misc_feature (520)..(520): n is a, c, g, or t
agttcgacggagactctcctggaatatatcattataattccaaggagagcacttaagatttttatttcaattagtaatctttctagatgaggtgattattttaggtaagaaatgctgtgtgttttatcaattgggtttattgagtcaaatattgaaaagaagagggtttgggttattcttgtagttaatgttactgttgatttaaacattaatgaacgtaaaaggacaatcaggctggagataaaattatttcttaataactgattttaaatcaacttgaatgagttaaaattcacactcaacaaaatgcacccattaaaaacttttatttctagataattttagacaacaaagttgcaaaaatagtacagagaattttcatgtatcctttattttactttccctagtgttaaaaacttacaataccatggcaggggtgagctcctgcacctggcctgtatccccgtttctaatgctgtagcagaaggatactgtcatccctgtncacgtgctgtgtgtngccgggaatgccctcccagagag

SEQ ID NO: 141667 - DNA, 127 bp, Homo sapiens
atgggatgatctgaaagtgggtttctcagactttcctgtcacctctctccttaacctatgggccctttcctccagccaccaccactgcctcctctatgctgagtctccttatgcaggcctctggggc

SEQ ID NO: 141668 - DNA, 836 bp, Homo sapiens
atatttctgctcataaaaacatcacctaatctctaaagaccccaaacatatttttattaagcattaaaataaatgtgattgttacatacatttaggaaagattcataaaaacaagtaaggtaattatttgcccagttttttgatgaatcagtgagtgacgggggtcatagtgctggtgggttaaatcaagaaataaatgtttacaaagtgaaaattgtaaggagcacctcctactaccaagcagttcaaaaacaagctgtcacaaatatggcaggctccttgagcgctatcatgccacacgtatccattactgtcatgtacctgtatgattatcatctaatttgccaatttttatttttacaaatatttgtatttgtacacttattttccaacttgttaattccagttcagtgtcttgggtggctggagcctgtcctggcagttcacaacacaaggctggtactgaccctgggcaggactccattgcatcacaaggtgcacccacatacacccacacttacagaatctggggcaatttagacccacaaatttacctaacacgcatctctttgggatgtgggaggaaacagaagttctgggagaaaacccatgcagacagcaggagaacgtgcaaacttcacacagacagtggccctggcctgcaatcaattctttttcttatcaactttataaagaaaggatgttgagaaaaacaatgttatttgaggacctgctgtatttcattgaaaagttttatgtaaatgaggtttcagaatagaatcttgttttcacatggatttatctgaagtacaatttttctcttttttattcctaaa

SEQ ID NO: 141669 - DNA, 210 bp, Homo sapiens
ctcagaattcctttcatttctttcccaaatagcattatcttttctatcagtgaattgtacctcccacatttcataccctcttggcccatgggtgaacatgtgacccatgccaagacaataatagtttctcttgggtgtttaaaccttaaacatgtactcaaatgagtagaaaatggtcagacctatgatagtccaatggtagtaaaataa

SEQ ID NO: 141670 - DNA, 224 bp, Homo sapiens
tgtgtttgagctgtctaaattcaggagttggtatggtctgaaataccaaagaaacagaactccgagctcttagcatttatttgacttagtagttacatttatatctataatattcaataaaagcctccaatatgtgcctgggagtgtacatgtacatgtgttaggggaaggagtatatgggaactatatgcaggcacattcagtaagtcctttaagaatacaga

SEQ ID NO: 141671 - DNA, 303 bp, Homo sapiens
ctgaagtctatgaaatcgaggcttgaaaaacagtacaaaaaaattaatgaacccaaaagttggttttttgaaagaataaataagattgacagactgctcgttaggctagtaaaagagaagattcaaataaataccagaaatgacaaaggagacattaccaccaaccccatagaaataggaaaaacattcagagactattacaaatccctctatgcacagaaaacctacaagatatgagtaaattactggaaacacaacctcccaagactgaaccaggaagaaattgaaaccctgaacagacca

SEQ ID NO: 141672 - DNA, 128 bp, Homo sapiens
aaaatgatagaatcttggatttggaagtgtagtttacattagaggtccacaaccccagtccagatgtcagtactggcctgtggcccgttaggaaccaggtgagcggcagctgagctagtgaagcttca

SEQ ID NO: 141673 - DNA, 364 bp, Homo sapiens
caggcctcatcctctatcactgcagcatttatctctgttgtcacattcttctgcttaaaacttttcacagcttttcacgtacccagggcaggcattcaaaaatattgaagcagtagttttgatgtcttttctgagctttcaccagtatttttaataggcactactgcctaaatgtcaaatgccttatagccaaaaacaagtaatgatttcctgtaatctccaaactgattcctcttcctcttgctatgtcttggtatccctgaggttaccatcattttatccatgtacccatgctagatgcctcaaggtcatccttgactcctcttccttctctggtttccatttggtttctaagctttgatga

SEQ ID NO: 141674 - DNA, 298 bp, Homo sapiens
atttttaaatactatattaattatatataagacaatttaataacatataattttttatcattgctataatcctaatagaattttccaaagtagtttatttcctaggttgtaaagcatgtattatagtctactaacctgaaagcttactcatccctcatgagatagctaaagggccagcccagcaggacagccttcccaacattctgagccttgctggaaactctcatcccatcctattttagcatgctaacatttctctttaccacattatggaataaatttttactttacatcgctg

SEQ ID NO: 141675 - DNA, 343 bp, Homo sapiens
agaaaacaaggtcatctattgaaaaggttgtggagggaacaaacaaagaataaattcatctataatgtgatgtgtaagtgatacatgctaacaatggttagcatttataaatggttgaagggacggaggagtggtgatggagagggagtcgtcagggaagacttgctatttaggaaaattttgagcagatacctagagggaagagcattccaaacagagggaactgcacgttcttgtgctttaaccatcctaaaacacagtcccgactctatcacttccctcgcggggtcaacagcagccacgtttgactgccattctgcgctctccacgaactgtctcccac

SEQ ID NO: 141676 - DNA, 263 bp, Homo sapiens
aaaccactacctattaaactcatgtagcattgctaagagtatctacggaattttcacatcgatgttttcttgcgaaagtggaaatcaaaagcacagagaccctctttaacaatgaaccgctgataagcaaaatataattataataacattccacttacgtgcatttgtgagcattaatttacatcaggctttccaatttaccaacatttatagaatttcttactagtgagagttttacaaaacttttgaagtaattgttaaat

SEQ ID NO: 141677 - DNA, 513 bp, Homo sapiens
gggataggtgaagtgggggcattaaaagtgttaagagccgagtcaggttcagatttgtaaatgccttgttgcagctttcctggagggtgttcagcttcatctcctagagtatagaggagaggaaggattcccacaggtcagcctagcttggggactctcccccaaaatcagaagcctgtgccttctcctactcttgggacaaaactcgtgtttgcgtatagtaaagtcccaatttttcctgagttcaatgtctgactgccttcactttggattttttttatttctttaaatctagatcttcattacaaaatcttgtggggttgattttgtgtggatggcacttttgctgtgctgctgtttaaagcttaggttggttactgttacccaacctggctgccagagtgtggggtttaaatttgtgagctggttggggggcagaaagaaaggaaacatatttgtactctatagggataaacatctctaccttcatggtatgtccacaccaagtccccg

SEQ ID NO: 141678 - DNA, 420 bp, Homo sapiens
ccttcattgtatctaggaagtaactaactggcttttgattttacaggctcataggtggaagggacttgccttgtgtcagatgagactttggactgtggacttttgatttaatgctgaaataagacttcgagggactgttggaaagacatgattgtgttttgaaatgtgaggatataagatttaggaaaggccaggggcagaatgatatggttgggctgtttccccacccaaaatctcatcttgaattgtagttcccgtaatccttatgtattgtgggaaggaccaggtggagataattgaatcatgggggtggttttccccatcctgttcttgtgatagtgagttagttctcacaaaagatgatggtcttataagaggattccccctttgcttggccctcactttctctttcctacctct

SEQ ID NO: 141679 - DNA, 304 bp, Homo sapiens
tttcgagtcccagtgggcatttatgattttggcaattagacaggaaagagctccaggaggaactccaaatacccatcctttatggaggctcttaatttgcttaccgaactttcttgttatggttagactggctggcatccataatttccatacttgtgattatttaaattaatggaaatttatcataatcccttattaaaatttcttcgctgcactgaaattcaacactgagcaaatctgttacctaggacataaagaaaaacattcagtccacgtgcggtggctcatgcctgtaatcccagca

SEQ ID NO: 141680 - DNA, 447 bp, Homo sapiens
taactaaccatatacatgaggatttatttctggactctcaatttaattccatttatttatacacctacccttgtgtctgtaccacactgtcttgattactgtagttttgcagtaagttttgaagttgggatgtatgagccctccaactgttctttttaaagattgtttttcagtttctgtgaaaaatgcctttgtaagtttaataaggatagcattgactctgtagatcacttttggtagtatggacatctttaattcttccaatccatgaatgtagatctttctatttatttgtcttcttcactgtctttcttcaatgttttatagttttcagtgtacagatcttttacctccttagttaagtttattcctaagtatttcatttttgtaaatgagattgttttcttcatttctttttggatagttcattgttaatgtatagaagtg

SEQ ID NO: 141681 - DNA, 355 bp, Homo sapiens
gagagggacgctgcaacctccctccatttgtaagaactatataacaaatttcaagaatccctcaggactctctttgaaagggcagcccacgcccccaaccaatgtcaggacgtcaaggggaggtcgtctcacatcggcttgagaggcacagcccgtccgacatgccacatccccaaaggacgcccctccctgcgactgccctcacagatgcactgatgtgacttatggggactgctgcgatgcagtctgttaacactggcaccagctgccacgggcgagtcatctcaggaacctgaccttggcaaagcgtgtttcacactcgagcacagctcatccgggtggcctcgagcagggg

SEQ ID NO: 141682 - DNA, 244 bp, Homo sapiens
ctgccttggcctcccaaagtgctgggattacaggtgtgagccactgctctcggctgaggtttagcttttttacagtcttgtaaagccattctaagaactttgccaagagttttgaacagaagagtgacatagtctgctttcagtttcaagtgatcctcttgcggttttaggaactcagccatgatgtctagaatcctgggtcagactgctagatgctggaacgtgtgggccagttgcccaagcc

SEQ ID NO: 141683 - DNA, 469 bp, Homo sapiens
atgggaaccagggcatgcaggactgtggcagagtgctcctctgccacctgtgcagcctccattctgggtctccatgaagcttagagagtcatgacccttggctccctttgtctgccattaatggatatggctttgacaacaggcaggatgactggctgttcttttatacaactcacagtggtatgtagatgggcatgaatatttattgtctccagatgatgtcactcttgataaagtgaagttggacatcaacattctgtaacctcagcacatgatctcattgctactgccaggaatgggcaccccactctccccagaggccccaggacaggctctttaggagggggtgaggtcaggcaaacatgctgggtctctcctgctccccatctacgaaaagcaagcccacagcaagcctctaaggtgctggactcagggaactgcaacgctaggtacggtgcatctcttcatg

SEQ ID NO: 141684 - DNA, 186 bp, Homo sapiens
ccttcacctcacagttatgatttgctattgtgagaatatttaagatgtattttcatagcagttttcaagtatacacaatacattatgctaagctgtagtcactatgttatacaacagatctctggaattgtagatctgttttattttagacattttaataggtgtgtagaagtatagaaatgcagt

SEQ ID NO: 141685 - DNA, 306 bp, Homo sapiens
agggggttcagacagaaaatgagaagtggctgtgagtcacaggatgttctttctagatgggccttgggaaacattccatcggtgcctgaagccaggaagtggagtgaatctggcatttctttcagaagccctcttgtctcctttctcatcccagccagcccatgccccatgtcctgtgactttagggaagcttctggctactcagagctgctctctttaggatataacaacaacagagcacgagaaactggaattctggtcctattactgccccttgccagctgtgctttcttaggcaagttactt

SEQ ID NO: 141686 - DNA, 572 bp, Homo sapiens
accaaaagccccaggcacctctccaagaccccctacagaagcctaaacagcccttacattcattgcctttggacctacccgaagtcaacaagttccaaactcgtcagaaactgggagaagtctcagccccaaatcaatagcagccgttgtcagctcctcccagctcaaagtcccccagagatcggttccctggtctgagtcaggaacgagagactgaaaagcatggggatctggtgctttttcttcgtagggttagtcgctttccccaccaaaaaacctaccaactgaaagatcactgattggatgggtcaaccagcctcagctaccagatgtctttgagatggggagccagccccctaaagctgagtctctgtgtgtggcttccaaatacctggtcccctgggtgcagacagaagagaggacgcagaggctggacatctcccagaggagggggagactggctggtcaccagataatcttgcttccctctctgatgtcataggaacatgaacagacttggagatgctgattgaaagtacatgtcacctgaaggagacattggttccagagcc

SEQ ID NO: 141687 - DNA, 257 bp, Homo sapiens
aaggaaaaaaatgtgtcgtgttagccaaagagcaatgtgctttctcttttttattagacagggtctcaatctctcacccaggctagagtgcagtggtgctgcacagctcactgcagcctcaaacttctgggctcaagcaatcctccagcctcagcctcccacgtagctggaacttcaggtgtgcaccaccacacctaatttttaattttttgttccagagatggggtcttgctaggttgcccaggcttgtctccaac

SEQ ID NO: 141688 - DNA, 267 bp, Homo sapiens
caggggagggcaaggaacgccgacttctgggcaccatcagagttgtcgtctctcaaggacccccagcatcgcaatcacaggggtgctggttaaagtgcaggtcctgaggcccccaggaaatctgcattttaaacaagctttccagctgcttctcacacacattaaagttagaggacaacacggcccgagctcagtggctcacacctataatcccagcactgtgggaggccaaggaaggcagatcactcgaggtcaggagtttgagac

SEQ ID NO: 141689 - DNA, 219 bp, Homo sapiens
atagatataggcatcaatgagctgatgcacgtaaagcatttagcatagttaagaaagttcagtgaataagggctgcaattatcccctactctccacctaactcagaatgaatgacatcagagctgagaggaaccttgctgatcacccacgcctgctcctcactgacggctggagacacagaggcccagggagaaaaagtgagccatcaaggtcacacag

SEQ ID NO: 141690 - DNA, 531 bp, Homo sapiens
gtgctgacttgtgctgtgagcatcatgtgaggtgaccacgtgtgtggacaccttaactgctgagtccccggctgccgcccccgccgtgctgccagcttgtggggcagtgtttgtgtgcggccctatgccctcagccctcctcctcaagagctaggaatgtcgcctgctgcccctggtgttccccagcccacagtgcccatgcagccagctcaccagggttcagctgagtagcgaaggacccctacccaggatgtgcaggcaccaccgtggtggggctctggcgccccaaggtgcccgacccaggaactgcaggtgggagtcctcattttgggacacacggactccctcgctgacatctaagaccccatatctgcggggcctcagggtctttgctgaggcctaggagaggaagggtttccttcttggaaactgccaacccaagcagggaccccttcctcaaacctccttccgcttaacttcccttccctaaaggcactgtggggtctcagcctatggtggaatcaggagcgt

SEQ ID NO: 141691 - DNA, 427 bp, Homo sapiens
ttttctctctgttactttggggatgacgtagagtttataatgtagtttaattgagcactcaaggttaaagtatttaatggcagaattggtgatcatgatacaaagagatctttaaggacactggtattcaaatttttaaagttaaattccaattttaagagtcagttttttatatgattactattaagtttggcattttgagacatgtcttaaatcgatatctgtaatacttacaaacatcagtagagagaatcatattgtaaacacatattcttgctgtagggtacattttaaatgtctaaacactaatcaatatagcaaaattaagtattgactaaaatagctttataataagtaattattggtttgctcttttagaaattagacattttcactttgggaataaagagtaaatttactgtcatga

SEQ ID NO: 141692 - DNA, 536 bp, Homo sapiens
tcctgatgagcaaggtggttcagtaggagaatctgagaaggttctgtgtattgtttaggtgataaggggtatgaggcctgtctcttagtgtgctcttttttatccttaccttactccttgttctcattcccctagttttttttgcctactcagagtagatatttttgccctaggcattccacagggctattgtgtttaattggggttcttgccccttgagaaagtaggcaagtccaaggaggtatgagcaggtggtggggcagccacctttatccaaggtagactgccatctttgggcaccatccccagctctgctgccagccacctgtgtgatcctgttctttctggggacagctatgaggaagaggaaacagctgatggggctgaatgatagtgtcatgatagaacactgctatagggacaccctatagaggtcaaagcccttaagttctctcgctcccatgcctggcctggaaggctgaggcaagctgccaagacagccactgcagggtgatagaaccctgggaggaggggct

SEQ ID NO: 141693 - DNA, 886 bp, Homo sapiens
ctaatgtccaaaaccacacagatttagaaccaaaacaaaacttttgttcttttttcaataaagtacctcaggaatttgctaaaatgcatattatcaggattcatagacagataattgcatttgtgtgatctcagctgggactcagaaaacatatttttaaattatcctatcagaagattctgaagcagatggtccatggagagtttttgatgatatatttctctagaataataatgtgtttctcgagacacctattacactagcaatttataactttaatcgtaaagacagtgtcatataacactttctcaataaatatttttgagtgaataaatctacataaaattatttaaaatatattgtttatttccaaattaggaggtgtaaacactaatagttttataaaaacctttcgatcggtctcaaaattgcaaataatgtactcttaaaaataaaaattttgtgattttttttataacattaaacttaggtttgcttataaaaaaaaaaaaaaaaaaaacaaccacaaaaaaaacaaacacaacaacgcaaacaaccaacaagaaccccccgcagcccaccccacccccaggcacgtgtgatccgactattaaaaatacttgtcgacggaggcgcgcaaaatatgacaaccagacaaggagtttatctgaagcatgttaccccatgaggtgggagcagattaaattgacaacgcacggagtgcgacaaatcagtacgcatcagcatgtagcgagtataaatatgagcgtgaggcgacgatagctaaacaaccaccatcggaggtcaggaacacatgtggctgacctccacgacaagaaacatcactccgggtggacatactagccgcacaagggataacctgtgt

SEQ ID NO: 141694 - DNA, 350 bp, Homo sapiens
ttcaaagtgggctgtgtgctgcctgcacactttcccagcacagagcctgaagcccggcacttacctgcctcacttctcccctggggtgtccgagggccctctcagctctcctgagtctgatctctggccccaagtcttcttcatacatttcctgcagttgagagggacctggtagccaggaggctaggagagcgaagggtcttgtccagaccctcctcctcgcccatgtagcaccttcattgctctcctcccttactgtggtcagcacaattgacagaatgagcttactaaaaccattccacggctccttctgatggggatctggccctagcccaccactccaacaagag

SEQ ID NO: 141695 - DNA, 169 bp, Homo sapiens
ctaaagtggtcatgaaaattcagtgtttgtagccactcaaactaattgttccattgaaaatataatgaagaagccataaaggaattcacagatttttcaaagtgctggagcaataaatgatccctcgtgtttcctctttgaaacattattttctgtgcttcacagctct

SEQ ID NO: 141696 - DNA, 225 bp, Homo sapiens
aactcctgaccttaagtgatcagctcaccttggcctcccaaagtgttgaaactgcaggcatgagctgctgcacccagcccttatgtagcttttggaaacaagtgaggagtgaacttagggctttatgggaagcatcaatacattacatcaataaaccaaatgtgagccaacagaaagcttccgggttggggtgcagtctgggctcaccacagctctagcagcgac

SEQ ID NO: 141697 - DNA, 497 bp, Homo sapiens
gccttcagggcaaactggggtggggcagcactgggcagaggctgtgtggcaggccagggtctcccagaaggtggtggctggccgggtaagcccagctcagatgctggggagacatgggggcatggcacacaggccacactcagcctgggatcaggccccgtctgaggacaccgggtccagttttccctgggccaggcccttggaaaggaggagggagttggggagggagaacggaaccctggttctccgacaggccccatccacccacggcctgtgggctccagggagagcatggccagggtgcccaaggagacgaggaggaggctcctcatgcttcatgacccctcctgctcgttagggtttatcaacatcatttaagatcagccttgtgctgtgggttcctggcgtgctgtggataacactgtgcccgggtcagcccaggcatgaggggcggggactaggctggaaagaggaggggcttgcagagggctgggctt

SEQ ID NO: 141698 - DNA, 801 bp, Homo sapiens
ccagttgtgtccgatgctgagctccaaatgccctcttggggtcttcctcccccatcttctttcccagctggtatgggggtccctccgtctccatgtttccatctcacaccaatcccagcatggtagattcgatagtagcacagaagtgaatatcaaagactagaatcagagaggcctgttgtcaagttccagctctgtcacttacatgctgtatgattttgggcaagtgacttcactcctccgggcctcagtttcctcgtcttgaaaatgggaggagttgaaataatgtccaccccattggattgtggtaaagggttagtgagtaaggacaggggaagaactgagcgcgggcagtttcggaagtggggtcgcagcacccttcctctcttccccttagctacactgtttaatcgacgcctgcaggcttatgcaggccttggcggggaggcagcagggagagacacattggacccaagctcctctgagcacacgattgttctgggaccgtctgagggtcactttgtcctgcgcttataaagcaactttttccctgtgaggtggaagaaactcacctgtacctgctgcttggtgggcagcagtgcccagggcccaggcagtcagcctctcgtcacttactgcgaaggacaggctgggaggatgcaagggaggacccggggggacggtgggggccaggagtgcccagtgacccattttgacatccgttcaccctcaacatccagctccgaggcccccactgacagcagatttaactgcccagatagacggtttcatttaagcggc

SEQ ID NO: 141699 - DNA, 361 bp, Homo sapiens
actgtgggatggaggatggggctgtgctggggactctaaccagcccctggcctgagctcccccagaccaaagaaagcagccactgtggtctgctttcaggcttccaccccagcaaggggcaggctgctggtgggctcattggcctggcccaggctgagctgatgccactgctggaataccatcacctccaagcgtgtgctcttgctcctcctgccctgtgtggcctcgtcactttggctgccagtttctaaatggcactggctcgtggctgatgagccattcctgtctcctccggggcagcgcctcacattcatctcccctctagatcacttccacctggcttcagcctccagaatcaatg

SEQ ID NO: 141700 - DNA, 301 bp, Homo sapiens
gagaggaggggggacgctggctctgctcctgagatgccccatctgggacacggggacagtaacacaagtcccatggggaggatggggacgaccgcgcctgcccagcccgcagcatggagcctgcctacaacggccccactggtatcatccttgagaggagtggggccgctcggggccaccaaccacagagatcccagcagcttctcggttggagaaatacttcgtgaaggaccaaaatggaaccacaggcacaaagcctggggcgcgtgtgttggaggcagcacaggcagggacaggattg

SEQ ID NO: 141701 - DNA, 697 bp, Homo sapiens
aggagagccccatcttggtgtagacattcctttgcctcttgtgtttgttggaggtattcagcttgtctaatagcactgtttgcatatctcttgcttttgggatatgcttcttccatcccttggctcagaagacagttttctaatctagatcccatgagccctcgagggctcaggtttaatctgggagcccaccttcatggcatcagagctctgagaccagggtctgtgaggagtcacttagtccacttttcttcacatcatgagaatgtttctgtacccctgtatgcccccagagaatatgtgatgaaggagttgagggtgggaggttatcttgaaagacataaaagcaagttgtatccttgtaagaggagaggtgattataggtcctcttgtcctgttctagattttagtgtgattcaaagtccatcctacctaagatacttatagctcagctctccagctttcatgaccatggtttcccccaaacagtacagaagtacacgaaataaaaaagtgcagctctacttcacccccacctccctctccgtaaagtacacacgtgtgtatatatatatacacacacaaacacacacctatatctatatttttaaaacataaatgagagtttgctatacatgttctaccccttactttttttcaatcagtgtatgatggagatctttccgtctcaggagat

SEQ ID NO: 141702 - DNA, 195 bp, Homo sapiens
cctcagagggaggcaggcatgtgctttggggagccgggggagcagggtgagcgcgctcatctttcctgctgtaggagatggtcttcaggagtgtgagagttctaggtacagctgcacgtatttgctaggtggcacattttggtacctaaaacattttccctaagaagtaacaaaccacccgtcgaacaccccctc

SEQ ID NO: 141703 - DNA, 349 bp, Homo sapiens
tgataaaaatgttctgcagtcaagatagtggtgatggttgaacaaccttacgattatgtgaaaaatcacaattgtgcaattttaaataaattttatagtagacaaattatctctcaaagtttcacaaaaacataaggtattactttcacagttccataaatttgccaacttcattttttgtgatcaaggaagatctatagatattcatgtaaaagaaaaaaactaaaacataccaaagaaacaaacattctccagattttcggacactacccaccttcgctggatgctctgctccccactttagactccaggcaccatgacagaagtcagggttctcagatgccccatt

SEQ ID NO: 141704 - DNA, 154 bp, Homo sapiens
gctgggattacaggcatgagccactgtgcccagcagacatctaactcttaacgatgttggcctcagaggtgactccacagttcatccccagcatgatacagggcttttggtcagtgacttattgtgagaatgagcacccagctaacctgaaggt

SEQ ID NO: 141705 - DNA, 420 bp, Homo sapiens
ggagactgcaggactgaggacaggaggctttgggatagtacagtggttaagagcacaggtttaggagggtccagtctgcgctggaccctggctgggccacttgctagatgaatgaccctggagaagttgcttaaccacactgagcctcaatttcttcatctgtaaagtgggaatgatacccaccccacatgattatgtgaggatcaatgtgaacatcttcgtaaaatatctgacacaatgacaggctctagaggggcttagaatggcagctgccatgactgcctttgtcaccgtcactgtcctcattatgtgcatccccggctgcatccttccacccagctcacagtagttatggggcggatgcagggaaggtggagttgccagagccagtgaccccaagtgtgaatctgatcgcattac

SEQ ID NO: 141706 - DNA, 384 bp, Homo sapiens
ggcacgcagccagtgcggggcagagccggggttagagctcagatgagaacatggagacccccaggacgaaggcctttgcccacggccaccctcaggctggctccatctgtcgggggtgctgaccaccaggaggtcctggggttgggaattaaccaggttatgccagcagggtcagtctgggagaaaggcggccaggcgagggcagcagctgtgggtaggggcctggtcaggggctttgtctcaggggtggggctctaggcagcagcccaggtgtgtaggagcctcggggctgttttggcatcaggcgacagagcggcctcatccggagggtcagggccatgcatctcttctggaggccccgccagaccctgctcatcccctctt

SEQ ID NO: 141707 - DNA, 655 bp, Homo sapiens
tgcaatggctcacacatgtaatcccagaactttgggaggctaagacaggcagataatttcagctcaggagttctagacccgcctgggcaatgtgatgaaaccccatctctacaaaaaaataaaattaaccagacatggtggcacgtacctgtgtggcacgtgcctgtagtcccaactacttgggaggctgaggagaggtttacttgagcccaggaagttgaggatgcagtgaaccatgatcacgccactgcacttcagcctggatgacagaacaagaccctgtctcaaaaaaataaaataaaagaaatattcatttgtctagatggtttttagtttctcacctttagtaatatggtagatgacattgatttttctgatattaaacctttgtattcttacttgatataatttttaaggaaattattttatcaaatattaaaattaaaagggtaacatgcagaaacctagctgtatacagaaaaggcaatattaccactatttggtgaggtgtgctgcgtgacgataacctgaaaagaagcactaggtcataagactggcttcagttcctctgagaatttacaagagccttttctggggagatcactgggcaagaccctgagcaaattctgagaaacattgggttatccataattag

SEQ ID NO: 141708 - DNA, 102 bp, Homo sapiens
tcccgaggcgcacgcacacacagacggacagagacagaaagagagggccacggaaagagcgagaagggagagagagagagagagagagagagagagagagag

SEQ ID NO: 141709 - DNA, 119 bp, Homo sapiens
gtcagaatgacaagccccacgtataattcatatttttagacttaactattaatattttagttagaaaaacttgagacatatgcacagacacctgtaaacaactacttgttcactgaaaa

SEQ ID NO: 141710 - DNA, 135 bp, Homo sapiens
gcacctgccagtctgcactgggccctatttgctatatggactgaccagccccaggggatgcccagagctctggacctggtagtcgtctgcctggggaggctgaggcctggcagggcccccagcacatcttgctct

SEQ ID NO: 141711 - DNA, 418 bp, Homo sapiens
atctagaaaggaaggagggatgcaccctcatcccaggcagaggaaggaggaaaggacaggagggaattgtaagagggaaagaaccatagctatttctaagtgaccagagcaaaaggtgggcagtgacaatagcaacagagaagactgagagctagaaggacccagtgtccggttttgttttgttttttaaattaaaaaaaaaaagtttttgggggccaagtgcggtggctcacgactgtaatcccagcactttgggaggccaaggcaggcagatcacctgaggttaggagttcaagaacagcctggccaacatggtgaaaccccatctctactataaatacaaaaattggctgggtgcagtggctcacacttgtaattccagcactttgggaggccgaggcgggtggatcacctgagg

SEQ ID NO: 141712 - DNA, 489 bp, Homo sapiens
ccggcccccccttccaattcctaaagaatccgttgttactgtgggaagaggcctggagaacaaagccaagtatgccatacaaaggcatggcaggacatactaaggtacaggtgctttatttcatccagatgagaaaccatggcaaagtgctgtagggttttcaagaaacagaaaagccatgctggaaaataccactccatctcacagcatgcctcctctgcactcccactatctcagtagttagattaacttcataggaatatgttacagactccactgcaagcgatacttaataaccatcactaatatagcttttctaagtcccacaattagtatggtccaatgtctttctctgccttttgttaatgatgtccacaaagtaaattaaactgtactctgagaagcagagccttcactttcatgtatgagtgtggggtagaatgtttcaaaactgcaatgtggaaagaaatgtctcaaatactcaaaaag

SEQ ID NO: 141713 - DNA, 161 bp, Homo sapiens
ctgccatttgcattgtattttttaaggctgggatataagtaatagaattaaatccgttggtaggcaaagtgtgctatgaattgtggcagttttctgaagaatttaagccaagaggatatttttggtttgactaagtaatataattcaggccaaaatggctt

SEQ ID NO: 141714 - DNA, 203 bp, Homo sapiens
aatttgagggcctcttgcaaaaaagcatacaaaattcacattcatatttgctaggcccctccctcttaggacttatttctaacagttttcattcgtaattttatattctttctctaggaacatctgcccctgtgcccacttcagtgttaaccatgtgctgagtgtagcatacccattagcatctgctctttccagcagcaccc

SEQ ID NO: 141715 - DNA, 552 bp, Homo sapiens
tttttcatagaaatgctacttccagcagtatggaggagtaggtactagcaagaaggtgacatcagtttacaaagaaaacaccagtagactgacagccaacctgtcaatatcaacagtggcagctagaagacaatgggataatattttcaaaatgctgatagacaatgtccacataaagctgtgtggtcactcactataattctgtgaaataccttcaaaatattgacaaaaataaggacagttttgaacaaaaactgagagactaaaaggaaattctaaagcattcagctaaaagattccaacttattattgctgagttaaaaatagaacccaaaatgatgatctgagctgtaatatggaataatgactaaaaaaaggcattttataaaagcgtgcacattttcttcttaaaatactattaatacggtctgattgataggatttttatacaatgatagagctgaagtattagactgtaataacatttaaatttggagaggacattgggagttagtttctaatgtccttatatagtttgttaattatacttgt

SEQ ID NO: 141716 - DNA, 966 bp, Homo sapiens
  misc_feature (614)..(614): n is a, c, g, or t
  misc_feature (701)..(701): n is a, c, g, or t
atttacttcactcccttccccaatcttgtattcccctgtgtctactgttcccatttttatgactgtgccaacaataattttttttcttttttctttaaatagagatgggggtctctatttaaagagcctcccaaagtgctaggattacaggtgtgatccattgcacctggcccatgccaacaatatttgaaacccttatctgcgtgtacaagtttgctactggttttgttttgctcattaatacatcccaagcatctatacctggcttgtagtaccagcatgtagtaggtgcttaataaatatttattgaataaataaaaaaaaaaaaaaaaaaaaaaaaaaaaaaaaaaaaaaaaaaaaaaaaaaaaaaaaaaaaaaaaaaaaaaaaaaaaaaaaaaagagagggggggggcgcgcaccacaaaacatccccgcgcgggggggccccacagttgcaagcgaccaccctgttcttttttaaacagaaaggggcgcccacaaaaggggaggagctattaaaaacagaagccggaggacgggcgcggtaaaaacaccagggctggagagggcaaacacagctgtagggagcgcacatctgggagaggagacacccnacatcggggggggcgggagaacaatctggggggaccacccaccgacggcagatattaatagggggcgagggcgacaaaaaaaacacnggagaggggagtcgagtgggtaacacccccgccgtcctattcgtgggcagaaaaaacttcgggccacgcagatagatctatagcgcataattattacggcgcgcagcctgatctatagaatatggcaaacagtccgcatggtccgcactgaagcgagtggtcaagtacgcaggaatgtagctggaccagtcataactagcagctaaagctctgccgacagtggcagtacgcatgcacccaacagaacacgcagcaccagcagagc

SEQ ID NO: 141717 - DNA, 397 bp, Homo sapiens
gagcaagtgccccacgcagaggccctgaggcaggcacctcaaagaaaggtgatggcttcaccagctgagctcctggatctgaatagctttgtcagctggagaactgcacaaagggtttgatgttttctaggataaggggaaggatgactgctttcacaccggggtaatactagacactgtgctgccgccatgggatttcctgtgattcatttcgcaaaccagccaagagttggattttatttgcccatttttataaatgaaacatgcagaggttctctgactccctcagctatacagcttataaccagcaccatcaagattcaagattcagactctgctccagggtgcatttcaggaatagctgaggaggagcacctggtgacaccctccctgccca

SEQ ID NO: 141718 - DNA, 454 bp, Homo sapiens
atggcgaaaccctgtctctactcaaaatacaaaaattagccaggcctggtggtgcacgcctgtaatcccagccacttgggaggctgaggcaggagaattgcttgaacctgggaggtggaggttgcagtgagccgggatcgtgccactgcactccagcctgggggacagagtgagactccatctcaaaaacaaataaaaaaaaagtgtcttcattgaggagtttggtggaaaaccctaccagtttttttatttgtctgagaagggttattttcaccctcatttaaaaagtctttttattgtaaatttcaagcatatacaaatgtagacagactaaactccaacatatatcagctcatggccaatcttgcttcaatctgtacccccatctattccccacccccaaaatttaaaagataagtactctttgtttaaaaaaaaaggatactacagttat

SEQ ID NO: 141719 - DNA, 434 bp, Homo sapiens
tcccaggttctatatagcatttcttttctggaggtctttaaaaatattctgggagatctgtctggaatgcttgagtacattcatttattcctgtatgcatagagggcccagggacctcccaggctctctgagccctctgattcttagagggttaaactattatggaaacagacattgcatctgtgtcttctcttgtttcctgcatgcagcagtgacctttggagtacattgttcaggagaccgacccttttctaccatttgaagtctgctattctcatctctctaccaaaagagaaactaaacttcattgtcgtgattaaggtcacagccaacagcagttaaagaagccgttggtcttcccactcataccgctgccctctccctagctctcaggaggaagagctctccaaaatggaagtgtcttgggaaagaaa

SEQ ID NO: 141720 - DNA, 368 bp, Homo sapiens
gaggggacgggctcacgtctgctcctcacactgcagctgctgggccgtggagcttccccagggagccagggggacttttgccgcagccatgaagggggcacgctggaggagggtcccctgggtgtccctgagctgcctgtgtctctgcctccttccgcatgtggtcccaggaaccacagaggacacattaataactggaagtaaaactgctgccccagtcacctcaacaggctcaacaacagcgacactagagggacaatcaactgcagcttcttcaaggacctctaatcaggacatatcagcttcatctcagaaccaccagactaagagcacggagaccaccagcaaagctcaaaccgacaccctca

SEQ ID NO: 141721 - DNA, 191 bp, Homo sapiens
tcactcaaaaatcaaccacttcatagaagtacaaagataagattttttcatagacttttcccccaacattcttttctgaaaaattcaaatatatatacattaaaatcaaacaaattatacagtaaatacttatatacatactacatagattcctcaattaatgttttactacattttccttttctcttaga

SEQ ID NO: 141722 - DNA, 545 bp, Homo sapiens
ctttttagttgcctggaccaatgcacttgctctttgtcgcaaccatttgggttggaaaacaatggatacattagctgttggccagggatgatgaataaactcagttgttagaagatgattcacagtgggcacccaagtctcaggattaagaccaaagccttgttgtgatttgtgagacttgaggtcagagataatctccttctgaatcccaaagtactgggcaagaattatttaaatttcttttgctgaagattagaatttgtgctataattttcagtgaaatttgaatctgcagatggacaacaaattggatgagagaaagatgagctaagagacaagctgggcctgaattcatttataacactcccaaatttgatttattcttagaattgggaacaaaggttttgggtgggacccaaactctaattttataatgtatggcaaaggaaaatataactacacataaataaataaatagttaaaaatatttttccactggaaaaaagaacatttctttttatgaacctgaatggataattcattcc

SEQ ID NO: 141723 - DNA, 421 bp, Homo sapiens
gattccttccacatgtttttaagtgacatctaagaaaattttttttgtgtttaagtagcttccagggattaatttctgctgtccggtatttggtatacatgctttcagggccattgctagcttttccagtgcctttctgcaaattaggcaaaggtgcccttctgggaaaaagcaggttttctaggaatggtacccctgtgtaaagaaaaatgtgctccttcctctggatgaggaggagagcctggccagtggattgcaggctgtatttcagcctctacatatcccacaaaactgcacaacgaagtttcagcccttcacttgtccccaaagctgtacaaaccatacacaaaagctttgtagattttaagttaaaaaacaaacaaacaaaaaccttggcatacagacaaagatcattcagttt

SEQ ID NO: 141724 - DNA, 1091 bp, Homo sapiens
tttattaccaaaggatcttattttgttacagaacacaggaaattgttaaaccttataatgttgcaaaccatgcattttccttttctcttttccataagatttttttattgtagtagtgccctggcttgtaaacagtggacatcactgaaaggatgaaatcaagtaggcttgtttcaaagagactcctgtgaatcaactatgaatatgaagtatctcccagaacaatgttgagtgtttcaggagactctgaaacagggcacccattttttttttccttcctcaaaatagtctccttgaaatgtgagcaaagaactatgatgatgcagtccaggtatctaatagctcaatcaccaacaccgctgagaattgttcttataccagcaaaaagttcaaatacaataacctgggcaatgccaacagaagacacttttaatcatttgcagacctttcttgttgcaggaaagtgagggcaaaaacaaactggtgaaaaatgttcaaaaatagatctttttgatgttcatagccagtattcagtatttctgtattgtttacaattgggggaaaatgtctgttaaggctaatcatctgagtgatttgagtagcaattaaaccaaagggaaacttttaataagttattttaagccctggtttatggctagttcccttttgctcaggaaaaatagtactactttatggtttatgaaaacctatgatttatgttgcatcttccggggaaggtttaacagtacaaggagctgaatcctacctgaaattattaatgcttaatatattgcttctgtttgattgataaaggtgcttaatcaattgaaaaaaaaacgcataatgcttcaaggtaaaattccgttgattctgaatttaaaaagatactacagaatgcgtcagttctcctgttgtatttttctcagttatgagagcaaggctattttgtcagtttagattttgtgtctttttctgtcagtatgtatggctccctaattgaaaacatcttaaatgaactaatcaaacacttattgtgtgaaagctgaatactttaaaaagcaaccttaattataaactcatcttggagtagc

SEQ ID NO: 141725 - DNA, 701 bp, Homo sapiens
tgagggtggaattgttagtgtcctggggctgtttcttgacttggtcaaataaaacatctggatataggtaagaagtgccttaattgtaaaggagtattgcaagaggaggaaagcaccaactgtaagatatttgtggatctcacagttgaagcagaaaaggcctttctttcatagggaggagcaaacatgattcaaggtgggaggggaagggcacgactcctggactaaatcagatccctgatcagagaatgtttcaccctgaagtcagcctgttcttaggaggggcataaagaggggttgaatgttgactcaggctgtgggtgggacaaacctcaggcaccttggagaaggggagaaatttaagcaactttggttaacacatattttgttttgaccatcgaagataaaactctttatttaattgcttatgagggggaaaaaaaggaaataggagagtttgtggctttgtgatacctaaaacagggagcatcatctaagtcataacaggaagaagattctttgcagtaagctgctcttgaagaacaaaaaggaagggggatttctttcatcacagctgcttcccagggttaactacctactccatcttttccccactcctttctcttgccctacacatctcttccattaggctgagttgtatcttttataataaactggtcaatgcaattacagtctttgct

SEQ ID NO: 141726 - DNA, 352 bp, Homo sapiens
tcccagctacttgggaggctgaggcaggagaatcgcttgaacccaggaggcagaggttgcagtgacctgagatcgtgccactgcactccagcctgggcgacagaggaagactccgtcaagaaaaaagagaaaaggcatcaggtatgccagggtgtgcgggaaaaggcatcgggtatgccagggcgtgtgggaaaaggcatcgggtatgccagggtgtgtgggaaaaggcatcgggtatgccagggcatgtgggaaaaggtggtaagattcctcagcctcccagggttgggaagcctctggccgagtgaagcataccctgggtgggttttaagacaccagctttccagtccag

SEQ ID NO: 141727 - DNA, 373 bp, Homo sapiens
cagccaagcagcagatgcagagtcccacgcgctgcctgtggccatcaagtcgatatagagcctcgtggcggcttggcccttgtgaatcttccacgtatcgatggcgcacctaccttgtgccaggcgcagggatcccacaatgtaaaagaagaggaaatacactgcgacatgtgatatggagagacatgaaacaaatcagcagaggcaagatcatggagtcactgaaggctttcaagcaagggattattagcagcccaatttgctgggttttagaaagacaccggctgcactgtggccgacagaggaaaagccagagacagggagatccgccccctaaatgggagagggtggcctgaactagagtaaccgcagg

SEQ ID NO: 141728 - DNA, 122 bp, Homo sapiens
aggaggcaggggagaggggagagatggaggaggaagagaggtaagaaggagggggagagagtgcgagagaacaggatcatgtaggcaagagagcacgtgtacccggaacaatggttagaaac

SEQ ID NO: 141729 - DNA, 356 bp, Homo sapiens
gcggccgcctactactactactgctcgaattcaagcttctaacgatgtacggggacatgttatattcttcagttcactagtttctttgaagccagagatcacccttgaggtgatcttattatatttgcctttcaggcatttgctagagggcccagaaaataataggatttaaatagatgttttttgataaattatttctcatatgacaaaatataccactcttcattaggatgagaaatttaggtctactctaaacagtgtttcagcattgcttggtaaatagaactctaaggagtattactgaggcagagattgcagtgagccaagatgccactgcactccagcccaggcgacag

SEQ ID NO: 141730 - DNA, 434 bp, Homo sapiens
tgtatctgatgcagctcctctaaagtaacttgttctttacacagaatatatatttaaatatttgttgaagcaaacattgaaaagattgaattaaaagaaagttatttttgtaataaaacttttgggataccaaattgcatcactgtcacaatagaattcatgatgtcctgacttttgcatgggctggaccagatgtttagccattttgtgaccttcctctcattcaattctgaggaatgtcaattcagcttggcttctgttagttggatcaatatcaagatcaagaccaagtaaaacatcccagcataaaggacaaagacagatcctcagtctttatataacagatcagggaaagaaggtgtaagggagccagtgtcctcagcacagggcaggaaactgtgaatgataaacagaaccactgtggattctgtttc

SEQ ID NO: 141731 - DNA, 453 bp, Homo sapiens
tcccaaatgtattatttctagtccagacttttcctctcaactccaggtctataaattgaattgcctacccctctttcgtgaggatttacgtctcttcaaatttaacatgtcccaagataaattcttgacttatgcttctactaaatctacttctcccaggtctttcccaacttagtaaaagttcaggccaaaagctttggaataattaccaaatcctttttctctcacacccatagccagtacacatgagtaaaagctgtcacttccatattcaaaatatattcaaaatctgattactgtccaccaccccaatactacaagaaccattacctttcacctggatcactccaacagtctcttcccttagtatcttatagtatactctcaaaacaaaagtcattgttatattttaaaaatgtaaattcacaacatgtcttttattgcctcaaaact

SEQ ID NO: 141732 - DNA, 262 bp, Homo sapiens
cagccgtgactgaccttagcttggcctctacattcttcagaccgtgggtttcttcccccagccccaggggtgggggctttctgaagccttctgtgctgcagcagagagaggctaagagactggcctgaggtcgctcagcaggtccgggggacagatgggtctagaattcctccttttttgtctccagtttctttccatgatcctccatcctaggtggtctctctctaggcagaatatagccttccttattcctgaacgttta

SEQ ID NO: 141733 - DNA, 343 bp, Homo sapiens
catggatcgggggtgagtggggggagtcacagacttcttggccaataccacatttctctccgggatttagactgaatgaaataggatagcttagttcgggttcagtaccaacaacattttctgttctggtttggttttacctctgacatttgagacttatgtaggtttgattctggcttcaactggcttattaaaagattggggttgcagacagggaaaaagaaaaaccttcagattaggtctctgattcagtaaaatattaatggttgggattggtcctgaccgaatgcagcagacaatgtgatgataagttgtctttggttcaactccagctctaatcttg

SEQ ID NO: 141734 - DNA, 500 bp, Homo sapiens
acttagataagaacctaaagcctcctctcaaatctagaatgtcttagtgggaaggtgggagataaggagcttgtaaatagcaaaatcaagtgggattttgagtttacttgtccctgttctacccatagccaggaaacttaactggagttttaataaatgacactatctcttactcttttctctttttggccacatctccaactgataaaggaattagccatgtgggtgagaggtgagactgaagtgattgtctgctgcactgattctcagaattgtgcattacagtgacctgaggacattttgttaaaaatctacaattgtaggctttcccctgaagattttgatgtaatagacctattaaggcctgaacgtgtttaaaaatgttttcttgaagctgggcacagtggtgtattcctgtagtcccagcttgagcctaagagtttgaatccagcttgagcaacatagtgagactcttgtctctaacaacaataatagccaaa

SEQ ID NO: 141735 - DNA, 204 bp, Homo sapiens
attattgcttcagtggaatacttattcacccacattcagagcattgaaacttagctgacagcttttatttacatcagctttgatatcttccactttcacccacttctggggcacaatctcataagcacaactgaggtttgtcatcatcagattctttcaacttcatttacagtcaccatttttctttcttaccatctccctgaa

SEQ ID NO: 141736 - DNA, 509 bp, Homo sapiens
atcaaaaaggagactcccgaatagtcaaaggaaattagcttgccgacctggcagccaagcaagccacaaaaacattggactctgaggctttcttagccccactaatacctcacaatgatctgaccaagttccaaccttgctataccaaaggagatttaaagtgagccaaggaatggggattcacatcccagccctggcccatccaggctggaaatgtaatctggaaggtatcgtattggttcccagtgccctccttaaagatatagtgagctagtttcatcaaagcatccattacagaaaagatgcaacccttcaatggcatgtgagttcttgattgaccccgacatgcaatggggtcattcaaaatgtgatctatcaatgcatgctttgtgcccaaactgccctaaaactgaccccacccctgttcaagggtacaacattgaggagactctccatgcaaggactggcaagttaatttcaccacaatgccacgggtgcctggaggctac

SEQ ID NO: 141737 - DNA, 430 bp, Homo sapiens
gcagcctatattttttaaatattcgtttgttttctgtatattgttggttgttttttctcatgtgagcaattatcaaattttatcatgggttctaaatagaaactgtctttgaaaagtgtgttgatgtatatttactttggtcatcaataatgttaacattctaataattcctcaataactttatattttggataagtaaacttgattttacttataagaagaaacattccaacttctggaaaacccagtgtaaaaaattctttccacttgttcatttgttccggatcagcttgtagaacccagcaaattaggctaatgtaaggtattctatgtttagatttttggtttggagaatttcaattttctggtaagaaaaaaatgaaggcatattttattgtaagggaataatgtaataaaaataggaatagct

SEQ ID NO: 141738 - DNA, 319 bp, Homo sapiens
gcaagctctccttcagtcctcccaacgactataagtgaggtgttaatatgcctgttttacagataaggtaactgaggatcaagaagttaagtgatttgttcaaggttgtcactgcagcagttttgtggtttcctctctaagatggagagaagttacaccaggacttagtgcctgggaagcaaagaggtgaaattactcggccaggattgcacagctgacagtgatgataccgatggctgtgcttttagtagctgttaggtaccaggaactgtgcttggcccttgacacatataatttcacggaatcctcacagcagatt

SEQ ID NO: 141739 - DNA, 613 bp, Homo sapiens
ggtaagaagtgcctttcacctcccgccatggatctgagtcctcccaagccatgtggaactaagactctgccttgctagcagaattgctctacagtttttctctcctttctggctttggagacacaagatgccgtgagtcctatgcctgcaagaagatgaattttgccaacaccccagtgagcctgaaagtgaatctttctccacatgagctttcagatgagaagtcagtcctggctgaccttgactgcagccttgcacaggactcagccaaagctgtgtctggattcctgactcacagaaaccatgagacaataaatgtgtattgttctaagatgctaaatttgtggtaacttgttacactgtattaaagaagcatacactagtgttcttaaataaacatttgactatggtgttggtgttcaggacatccacccaggaatctggatggaagatgccatagtcttctgacttccctggattggcacacatacacattgaatgctgacttttccaaagcaaggaagaacaagaagaaagaaaagaagtgggctctatattcctattattaagtctaataatgtgcacgtttgaattattgaccaggacatttgtg

SEQ ID NO: 141740 - DNA, 618 bp, Homo sapiens
tttctaggccacagagtatggagacggtgatgcaatactactcttgtgattatatttcattttagaagactctgccttgctagcagaattgctctacagtttttctctcctttctggctttggagacacaagatgccgtgagtcctatgcctgcaagaagatgaattttgccaacaccccagtgagcctgaaagtgaatctttctccacatgagctttcagatgagaagtcagtcctggctgaccttgactgcagccttgcacaggactcagccaaagctgtgtctggattcctgactcacagaaaccatgagacaataaatgtgtattgttctaagatgctaaatttgtggtaacttgttacactgtattaaagaagcatacactagtgttcttaaataaacatttgactatggtgttggtgttcaggacatccacccaggaatctggatggaagatgccatagtcttctgacttccctggattggcacacatacacattgaatgctgacttttccaaagcaaggaagaacaagaagaaagaaaagaagtgggctctatattcctattattaagtctaataatgtgcacgtttgaattattgaccaggacatttgtg

SEQ ID NO: 141741 - DNA, 509 bp, Homo sapiens
aagaaattagtaacagaaagataactagcaaatccccaaacgttcaaaaagtaagcaatacatttgttaaaaaaaaaaaaaaacctacaggtcaaagaataagccaaaataaaatctgaaaaacatttttgcataaatgataatgaacatgtaacataccacaatttgtgggatacagctaaaatgtgttgagaggaaaccctatagtcttaggactaaacatagcctagtttcccaattattattaacaaccaattcaaaatataagttatgttagggtacttcaatctagttagctgccattcaacaacttttttagggacagatttatattagactacttaaattattcctagataatgactatgatatttcctttctctttgtatacttttttaaacatggattaatcttaatcagtaaaatttcatcataagcaaaacccattaaacaaacaatatctttgtttatctacagcataaatatacatacacagtattctacagaat

SEQ ID NO: 141742 - DNA, 453 bp, Homo sapiens
atctccacatccctatctgtcggcctcacagatttgagataagtaccaaagatagcatcaggaaaattgtttgggaaaactatgaaggattgcacagctctagtatgttgtgttgaatgaaggatgattagctggcaaatcacatcgtatgtctcttacaagtcctgcttcatttgtatttccttatttggaaaggctccaatttagaactgcaactggattttttccaaaaaatacagatctagcatcttgcctttctgttgaatagaattttttaaaaataacatttagaaggaaaaagaggaactttaaggaagaaggtgtcaatcataaaacaaggttgctaaagtcttactctcttctcccactatgcagattgcctactatgctcctgtcactttttggctagttttaaggcatttccttttagaactcactttcaggaactttata

SEQ ID NO: 141743 - DNA, 415 bp, Homo sapiens
gggtgatttgctttattagatattaaaatttgccacaaaacaatgaaatagcatgagaaaagattagaaacaaatacagaaatagctacaaaaatatataaaagttatatgacaaaatagacatttatgtttcagtagcagaatgacttacttaataaatagcactaacgtaattagccagccattcgggggataaatataaaagaatgttaattcatgctattcaaaaatatattccaaatagaatgaagtttgaaatgtcaaaagtaaaaattaactcactgtaagacaaaatgaaaaaaacaacttgtacgatcttggtttaggaaaaatcttcctaattattaacaaaaaaactcccaaagcctcaggaatcatagtgaaaaagataatatatttgattacatgaaaatta

SEQ ID NO: 141744 - DNA, 130 bp, Homo sapiens
tggagctcacggagcctctggtcctaggctaggggcagcgtcacattctcaggcaggggttacatggaaacatctcagggaagagcgttccaggcagagggaacagcaagtgcacagaccctgtggcaga

SEQ ID NO: 141745 - DNA, 754 bp, Homo sapiens
agcggaaaaaaaaattatgtcagactattcatattatttgacaagctgcatttttctatttcctggatcatggatttctttccattaccagcgcagagctctgcctcaaacacgactaatatgtattcataggacttattgttaagaggctcatcctctgtaacttgcctggtctctcatttctgtgaatcaaaatgggaaaagcgagtaatgtgaaactgtattttgacaaatgaacagctgagaggtcgagtttgagaaactgtttgccattcctcctgtcgtgtacctaagtaggcccctggctgaactgggctcctagggaagttcgttgcagggcctttggattaggcacatgatgcacctgagggagactcacctggacgcgacgactcatcgagctcctgagaggagagaggttgattagggtggatgctattctctatgttccccaggagtgcgagagtcaacaaaatcccagccatcaccaaggaaaccattaaaaaatcccagcactttgggaggccgaggcaggcggattacgaggtcaggagatggagacgatcctggctaacttaaaagtatacaaaattggtcaggcgtgcttggtgggcaccggtaatcccagctactcgggaggctgaggcaggagaatggcgtgaacccgggaggcgtagcttgcagtgaaccgagatcacgccactgcactccagcctgggcgacagagcaagactccgtctcaaaaaaaaaaaaa

SEQ ID NO: 141746 - DNA, 177 bp, Homo sapiens
gtcactgcattagcaagtgtgtgtgatctgaaagagatctgtgtgtgtgtgtgtgtctctaaccgtatatctacagatgtgagtgtttgtgactctgcacttgaggctgtaagggtgtcagggtgtgggtctgtgcatgagtggggctctgacagtcgctgaggaagatgcctgagg

SEQ ID NO: 141747 - DNA, 408 bp, Homo sapiens
aacatattgctttaactggacaatctgtaactttgtaaaaggactctcttagtagccttgaagcctattctaaattattctaatagataggagggtttctatactggccaataagtaaagatatgatattcccaggaatatctggtacctaggaaacttctggtacctctccactcttattctagagtgtggtcctccctgccaggcaatttcatttcctctaggacagtataaatgaacaagccccagtgatttgccagggaatacatcacaggtcaatagcatcatttaattattttgagttccagcctaattgtgtttcacattgcctgttctttcctaccaccaaaagctacgatgatgataaacacactccattaatataaattgctttttcagataatggaa

SEQ ID NO: 141748 - DNA, 428 bp, Homo sapiens
ggctaatttttgtatttttcatagagacagggtttcaccatgttggccaggctggtctcgaactcctgatcttaggtgagccgcccgcctcagcctcccaaagtgctgggagtacaggcgtgagccactgtgcccgtcccccatcctttctgtctctgaatctgaggactctggggacctcctaggagtggatcacacaggatttgtccttctgtgcctggcgtctgtcatagagcacgacgtcttcaaggcgcatctgcaccgggtcctgcatcagagcctcgttcctgtttgtggctgggtcgtgttccagtgcgtgggtggtcgcaccgtgtctgtcaatggacgctggttgtttcccccgttcggagttgggaatcgtgctgctgtgagcaattgtggatgtgtttttgtgtggccgtgtgttc

SEQ ID NO: 141749 - DNA, 260 bp, Homo sapiens
tggattaacaaagcctgaggatacagaatatttgaaatccacacagaaacttggtgcccttcctgtcaccgcggaattagccctgggatttacagtcatgcactgcatactgatgttttagtcaatgatgaactgcgtatgcaacggtgttttttttttcctgagacagggtctcactctgtcacccaggctggagtgggaatgcagtgtggcacactctcagttcaatgcagcctcgacctcccaaggctcaagcaatc

SEQ ID NO: 141750 - DNA, 460 bp, Homo sapiens
ttaaaggagagagcacagaacattcaaggaactgaaaacagatttctctggattgaatacatgctgtaaccagagaaataggaggaggtgagaaggagtcaagccacaaaaagcttatatatcacttaaaggcatttaatcaggaaagagacataataaaatggacattgttgaaagactcatgagtatagtccagagaaaaatggaagtaggaagggctagatgcagaaatatcagctgagaggtactagaaagacccaagcaatggcagttttctcctgaattaaagtggtgagagtattaaggaaaaaggatggagtcaagaaatatgcaggatgctgattcaatagaacacacatggcatctgcgcaaaacaaaggaggctgcacttctaccttgggaacaggtggatgggggtgctactgaggctaggaatccagaaggaagatcctaacttcaa

SEQ ID NO: 141751 - DNA, 535 bp, Homo sapiens
cagtggtggccacatgaaaaagtttgattctgagacatcacatgccattaggccgagaaaaatggttccaattcagcaaaagctgacactaaatgtatttcacttactgatttcagacttccctactttttgaactgagaaaattctttttataagaaggatcatagagatgtagagaaataaagccccagaattaaccagaattggtaactttttttttaatagcaaaatagttttatccttcaatttgcttgaatttctcgttttcttttccaggtgacaaacccatggggaaatggagagtatcacacctcctaaaatcatgataatgtcactgagagaatctggctggttatttaaaggccctactttcctatctttagagacaacagaaataatcaaaagagaaaaagaaatgaactatctcaggtgcagaggtaaaagccaatgagctctaacaaactgctgcgtaaataagaattcagaacatttgggaggtgtcccttactttgatttacacttacataaaaaaata

SEQ ID NO: 141752 - DNA, 174 bp, Homo sapiens
tttttcttggagaatggtacgagaaaccaatctgggcactaggtatgttctttgctgctggagtgtcattgcttctgggctctgtccgccagagtaaggaaatacacatgtagcttgttttaatatagagaatgattgctatgatcattttaaaagcatataaaatcgtaagag

SEQ ID NO: 141753 - DNA, 458 bp, Homo sapiens
gtgttttgtttccttttcataaactgtcctccactaaacagctcaagatgattctccagccaagtggtagaaaccttctctcccctaagggaagaaggaatgcttagggaaacgtgtagacttggttttagtatcttctcctctttctccctcttattctttccttcaggaataactgagtggcaaagactgaactaactgttcctactcttctagctgtgtgtctcttccattgagagcctacagtttcggcagaaatctattttactcttctggccaattttctcttagtcttgatggttcgtttaaccccccatctttgaggaagaaagttggggaaggagggggagtacacggaaggcatttggggctaccagcacctagccagtttatttagggcaggctttataactcatccctttacaagctaccattagacataaaaatcaaggctcaaa

SEQ ID NO: 141754 - DNA, 451 bp, Homo sapiens
ttttccaatacaagcagagtgtctgagctagaggtaatgtaagagaatcttaggggccgaaccaaacaagttgaacctctcatcctcggggaagccagcagtgacatgccatcactctcaacaggaaggacccagaggcagcccacaggcctgacttggtgactacattatgacacacccagaaatcaagggctgtggaacactcagctggccatgagcaagactttttttggggtgggggtagttctggactctctcatggcttcaacctgggaggcacatggaaccctcagggtagagggaagcccagggccctcgatggaggccactcacactaggccttgagtgctgtctgaatggtaaaaattaaacagacctgatgcggtggcttatgcctgtaatctgtaatccaagtactttggggggctgaggtggaggatcacttaaggcc

SEQ ID NO: 141755 - DNA, 755 bp, Homo sapiens
acccacgcgtccggacccacgcgtccgcattgacaaactatgatactaatgacataacattttaatgcttttattttgagaaaacagatggcttgtaatctaatctaagaccgtagtttatgttctatgatttcatttcaaggtttttctcttgcattttccttacatggagaacatcaaggctgtaaaaaatcagaaaattttaggttctctcaataggaaaggaagaccattgctacaaaatactttttcagttatagatattaacttaaatgtaggaaaggattaagcttccaaaagagggttaaaattcaacaggacaagttattcacacgccagtacatccattctcataatagaggtatctttcattaaggatggacttcgaaagtaactgaaacacctgtgtgaagggatgtgtgtgcctgtttatggggaaggggttaagagaagaagaaagggattaaaatatcatttctctttatatccagactgaaaacagtcaaaactaatacatttatacataaaagggattctcaaatacaccctgccaaatataatttataaagaagaagaatggcttataaataagtcaaatataataaaattgactcattgcaaagtaataaagctccatctgatagcattgggaataccaacttatgatttcagcaaatatttctgatttcactttagaaacagccttatattcccttaattatcttacctgataaattatctcagtaagtccaaag

SEQ ID NO: 141756 - DNA, 3504 bp, Homo sapiens
cctaagataaattggtaggaacgtgtaaggtaatgttaccactttcctttagtattaaattttttatggttataataattgaagtgtatacgtgcatacacttcacaaccagtatagattcctttatgactttcaagttatatttaaaatatttggttgtttcagtgattcagaatattcaactttaagcagaatttgtcttacagaatgttatatacaatcatataaaaatgttattttgttggataaatttgagttcagaaggcaatgacttgaccctggaagactcagtttattgctggggaaccaagttaatatttgtcaagccaccctgtgtaaaaaactgtaatgggtagaagttttctcttttgagaagcttattgaaatataatgacatctactgcaaaataggactactaaatacatatactttacatgcaaagtacatttcttaaagaattatttctggtaatttttgatgactttattacttgataataagtattagtttaaaattttccaaattattctttaaatagttgttaggtaagaatattcagtaagccagtaattcagaataactattgtagaaaataataataatctattaatttaatgaatcacctctaaattactaattaacttcttttacaacataaataacttgttatcaatagagcatttttgtaaaaaacaaaagaaagaataagtttaattattaaaatttgctctcttaccaaatgaatacaagggcttttgaataatctcattgcataagaggccctcatttcacagaaatggtaagaactaaatcaaaagattcaagggttttccctttataaagaatagatcagaaaatttgacaatccagacattcaaaaaaacattctgccagttgatttttttggactactatttgattagatgatcagttctgaaatttaagctgcatgtatgcccaaattaaattagcataggaaagtcaatgtgtgtggttttttaaaagtatattttagcatattaatggagcaatttaatttacattcagttacaaacctcattcttattaataggtttagggaatgttcttgctggtgtgctgattaccatattagagaaaaaataaactctccatattataattcacctgtttagtaaggtgagtttcttacttgtgatttgagtggattatgcctaaaaattacaagtatatttgcactaagcgacaaaatatgtccctgaaaaatcttagcgtacttgaatcatcaaatgtaatggattgtattgaattctaaatgttaagaagtaagtggatttagggttttgtctttcttttcttatgtcctctctcattcctttatacctttcttcctttctgaggcctatgtttatagcatgacttttaatgtgctgaaagattttccttctgttttgtgtacagagttgtttttgatgagtggtacgctcagaaggaactagttctgactacaaatcccactacttgaaatagcaatattgtacctaaagtagtcaaacagattttgctagacaactaagcaacatctgaatacaaatgtaaagtatgctggctcagtgtatcttttaggtcactaaagaggacacatcagtaaataaattgttttcagtgtaatatttttacataaaaatagatttcccccccaaaatttaagatttatttagattcttgagacatctttttatgaaaaggaattaataacatacatcatcaaaacttttcttaggagcgttgaaacaatataagaaggttacagaaggccttctaaaatatgaattcccatctgtatgaggtacttctttccaactcagtgactttttgcccagagacttggaagactgggcaatgttttctttcccctttcccaactcctggagacaaggccctaggagcaatttcctccagtagggcaggccgtagtcctgctctgtcttacttcccactgcagcaggaacatgtcctcgcctctgattccttctgtaccaagccattggtccattgaggtcaattgaggactcactgtaaattttaaatctgttaataaagcaaggatattggcatgttcctcttctcatcaatatcctaaaagacatttattttttacacactccttgggaaaaattaactttttttcactgaaaatatttccttttttggttatcttgatctcagattattttgtgaaagaattttactgtacttagttcaaaagagtagaaagaatgatttactattgcagacatatgtagggtaaaatcataatttatttaaactgactgtacaacaccatttagagttgatattgacataaatgttattagcctactaatttggaactgcatttctcaacaatgctggcaagcatcttccgtacttagcataccaagttgtaggggagagactgtgtatatattttttaaaagcaatccaatggatttgtttttgttcatattttgaaaacaactcgaaggatttttcttattttagaaggtagaaaatatgtggacctgtgttttaaattaatatgtatttataaattataacattgaatgatacaacagagctctaatattgatgttctcactttctgatatttaatttttataaatgtttttgtaagtaactaattgtagtattgcttttaaatagttttaaaatctatctcaaataagttctgcccagacctatttccttaggacagtattctaaagttcagtagtccagtgtgagcttgaaatactcctagatcccgtcagtgatttttatatataccaatacacaagcaaattattaatataccaaaaacctaatttctgcattgcattaataaaatacttgttattttgcctttatccaattcagttgattaggtgaaatagaaaattaatcttttcaaatgtgcatatgatcataatttttcaaaatgttactgtggtcatttttggtgcatgatgccaagtttatctttagttagccattgccacctgatatgtaatgacaaatgttttactatctgatcattgggttgtagattaaactattttttttctctgtagattctcactacattttcaaatatgtacttggaaaaagctgcaaagtgctacctataagcaaattagtaactttggccttatctatgcatagtgttcgctcagtttggttttgataaattgattgacttgcagttcctttgtagtattttaacttattgtgatgtaatgaattttttgaaatgtttatttgattagctgttaaaatataggaaagaatgtagctttgcatgaaataaattacatttctacaagttaataagaattttgctgattgtttatatattttacttcatttgagattaaggttcttttaagtagattcaggcgttctttgttccttatcaatttattagcaaatatgacaaatgttttaaaataaatatgtgtactttagttttcacattacttttt

SEQ ID NO: 141757 - DNA, 3348 bp, Homo sapiens
cctaagataaattggtaggaacgtgtaaggtaatgttaccactttcctttagtattaaattttttatggttataataattgaagtgtatacgtgcatacacttcacaaccagtatagattcctttatgactttcaagttatatttaaaatatttggttgtttcagtgattcagaatattcaactttaagcagaatttgtcttacagaatgttatatacaatcatataaaaatgttattttgttggataaatttgagttcagaaggcaatgacttgaccctggaagactcagtttattgctggggaaccaagttaatatttgtcaagccaccctgtgtaaaaaactgtaatgggtagaagttttctcttttgagaagcttattgaaatataatgacatctactgcaaaataggactactaaatacatatactttacatgcaaagtacatttcttaaagaattatttctggtaatttttgatgactttattacttgataataagtattagtttaaaattttccaaattattctttaaatagttgttaggtaagaatattcagtaagccagtaattcagaataactattgtagaaaataataataatctattaatttaatgaatcacctctaaattactaattaacttcttttacaacataaataacttgttatcaatagagcatttttgtaaaaaacaaaagaaagaataagtttaattattaaaatttgctctcttaccaaatgaatacaagggcttttgaataatctcattgcataagaggccctcatttcacagaaatggtaagaactaaatcaaaagattcaagggttttccctttataaagaatagatcagaaaatttgacaatccagacattcaaaaaaacattctgccagttgatttttttggactactatttgattagatgatcagttctgaaatttaagctgcatgtatgcccaaattaaattagcataggaaagtcaatgtgtgtggttttttaaaagtatattttagcatattaatggagcaatttaatttacattcagttacaaacctcattcttattaataggtttagggaatgttcttgctggtgtgctgattaccatattagagaaaaaataaactctccatattataattcacctgtttagtaaggtgagtttcttacttgtgatttgagtggattatgcctaaaaattacaagtatatttgcactaagcgacaaaatatgtccctgaaaaatcttagcgtacttgaatcatcaaatgtaatggattgtattgaattctaaatgttaagaagtaagtggatttagggttttgtctttcttttcttatgtcctctctcattcctttatacctttcttcctttctgaggcctatgtttatagcatgacttttaatgtgctgaaagattttccttctgttttgtgtacagagttgtttttgatgagtggtacgctcagaaggaactagttctgactacaaatcccactacttgaaatagcaatattgtacctaaagtagtcaaacagattttgctagacaactaagcaacatctgaatacaaatgtaaagtatgctggctcagtgtatcttttaggtcactaaagaggacacatcagtaaataaattgttttcagtgtaatatttttacataaaaatagatttcccccccaaaatttaagatttatttagattcttgagacatctttttatgaaaaggaattaataacatacatcatcaaaacttttcttaggagcgttgaaacaatataagaaggttacagaaggccttctaaaatatgaattcccatctgtatgaggtacttctttccaactcagtgactttttgcccagagacttggaagactgggcaatgttttctttcccctttcccaactcctggagacaaggccctaggagcaatttcctccagtagggcaggccgtagtcctgctctgtcttacttcccactgcagcaggaacatgtcctcgcctctgattccttctgtaccaagccattggtccattgaggtcaattgaggactcactgtaaattttaaatctgttaataaagcaaggatattggcatgttcctcttctcatcaatatcctaaaagacatttattttttacacactccttgggaaaaattaactttttttcactgaaaatatttccttttttggttatcttgatctcagattattttgtgaaagaattttactgtacttagttcaaaagagtagaaagaatgatttactattgcagacatatgtagggtaaaatcataatttatttaaactgactgtacaacaccatttagagttgatattgacataaatgttattagcctactaatttggaactgcatttctcaacaatgctggcaagcatcttccgtacttagcataccaagttgtaggggagagactgtgtatatattttttaaaagcaatccaatggatttgtttttgttcatattttgaaaacaactcgaaggatttttcttattttagaaggtagaaaatatgtggacctgtgttttaaattaatatgtatttataaattataacattgaatgatacaacagagctctaatattgatgttctcactttctgatatttaatttttataaatgtttttgtaagtaactaattgtagtattgcttttaaatagttttaaaatctatctcaaataagttctgcccagacctatttccttaggacagtattctaaagttcagtagtccagtgtgagcttgaaatactcctagatcccgtcagtgatttttatatataccaatacacaagcaaattattaatataccaaaaacctaatttctgcattgcattaataaaatacttgttattttgcctttatccaattcagttgattaggtgaaatagaaaattaatcttttcaaatgtgcatatgatcataatttttcaaaatgttactgtggtcatttttggtgcatgatgccaagtttatctttagttagccattgccacctgatatgtaatgacaaatgttttactatctgatcattgggttgtagattaaactattttttttctctgtagattctcactacattttcaaatatgtacttggaaaaagctgcaaagtgctacctataagcaaattagtaactttggccttatctatgcatagtgttcgctcagtttggttttgataaattgattgacttgcagttcctttgtagtattttaacttattgtgatgtaatgaattttttgaaatgtttatttgattagctgttaaaatataggaaagaatgtagctttgcatgaaataaattacatttctacaagtta

SEQ ID NO: 141758 - DNA, 3450 bp, Homo sapiens
cctaagataaattggtaggaacgtgtaaggtaatgttaccactttcctttagtattaaattttttatggttataataattgaagtgtatacgtgcatacacttcacaaccagtatagattcctttatgactttcaagttatatttaaaatatttggttgtttcagtgattcagaatattcaactttaagcagaatttgtcttacagaatgttatatacaatcatataaaaatgttattttgttggataaatttgagttcagaaggcaatgacttgaccctggaagactcagtttattgctggggaaccaagttaatatttgtcaagccaccctgtgtaaaaaactgtaatgggtagaagttttctcttttgagaagcttattgaaatataatgacatctactgcaaaataggactactaaatacatatactttacatgcaaagtacatttcttaaagaattatttctggtaatttttgatgactttattacttgataataagtattagtttaaaattttccaaattattctttaaatagttgttaggtaagaatattcagtaagccagtaattcagaataactattgtagaaaataataataatctattaatttaatgaatcacctctaaattactaattaacttcttttacaacataaataacttgttatcaatagagcatttttgtaaaaaacaaaagaaagaataagtttaattattaaaatttgctctcttaccaaatgaatacaagggcttttgaataatctcattgcataagaggccctcatttcacagaaatggtaagaactaaatcaaaagattcaagggttttccctttataaagaatagatcagaaaatttgacaatccagacattcaaaaaaacattctgccagttgatttttttggactactatttgattagatgatcagttctgaaatttaagctgcatgtatgcccaaattaaattagcataggaaagtcaatgtgtgtggttttttaaaagtatattttagcatattaatggagcaatttaatttacattcagttacaaacctcattcttattaataggtttagggaatgttcttgctggtgtgctgattaccatattagagaaaaaataaactctccatattataattcacctgtttagtaaggtgagtttcttacttgtgatttgagtggattatgcctaaaaattacaagtatatttgcactaagcgacaaaatatgtccctgaaaaatcttagcgtacttgaatcatcaaatgtaatggattgtattgaattctaaatgttaagaagtaagtggatttagggttttgtctttcttttcttatgtcctctctcattcctttatacctttcttcctttctgaggcctatgtttatagcatgacttttaatgtgctgaaagattttccttctgttttgtgtacagagttgtttttgatgagtggtacgctcagaaggaactagttctgactacaaatcccactacttgaaatagcaatattgtacctaaagtagtcaaacagattttgctagacaactaagcaacatctgaatacaaatgtaaagtatgctggctcagtgtatcttttaggtcactaaagaggacacatcagtaaataaattgttttcagtgtaatatttttacataaaaatagatttcccccccaaaatttaagatttatttagattcttgagacatctttttatgaaaaggaattaataacatacatcatcaaaacttttcttaggagcgttgaaacaatataagaaggttacagaaggctttttgcccagagacttggaagactgggcaatgttttctttcccctttcccaactcctggagacaaggccctaggagcaatttcctccagtagggcaggccgtagtcctgctctgtcttacttcccactgcagcaggaacatgtcctcgcctctgattccttctgtaccaagccattggtccattgaggtcaattgaggactcactgtaaattttaaatctgttaataaagcaaggatattggcatgttcctcttctcatcaatatcctaaaagacatttattttttacacactccttgggaaaaattaactttttttcactgaaaatatttccttttttggttatcttgatctcagattattttgtgaaagaattttactgtacttagttcaaaagagtagaaagaatgatttactattgcagacatatgtagggtaaaatcataatttatttaaactgactgtacaacaccatttagagttgatattgacataaatgttattagcctactaatttggaactgcatttctcaacaatgctggcaagcatcttccgtacttagcataccaagttgtaggggagagactgtgtatatattttttaaaagcaatccaatggatttgtttttgttcatattttgaaaacaactcgaaggatttttcttattttagaaggtagaaaatatgtggacctgtgttttaaattaatatgtatttataaattataacattgaatgatacaacagagctctaatattgatgttctcactttctgatatttaatttttataaatgtttttgtaagtaactaattgtagtattgcttttaaatagttttaaaatctatctcaaataagttctgcccagacctatttccttaggacagtattctaaagttcagtagtccagtgtgagcttgaaatactcctagatcccgtcagtgatttttatatataccaatacacaagcaaattattaatataccaaaaacctaatttctgcattgcattaataaaatacttgttattttgcctttatccaattcagttgattaggtgaaatagaaaattaatcttttcaaatgtgcatatgatcataatttttcaaaatgttactgtggtcatttttggtgcatgatgccaagtttatctttagttagccattgccacctgatatgtaatgacaaatgttttactatctgatcattgggttgtagattaaactattttttttctctgtagattctcactacattttcaaatatgtacttggaaaaagctgcaaagtgctacctataagcaaattagtaactttggccttatctatgcatagtgttcgctcagtttggttttgataaattgattgacttgcagttcctttgtagtattttaacttattgtgatgtaatgaattttttgaaatgtttatttgattagctgttaaaatataggaaagaatgtagctttgcatgaaataaattacatttctacaagttaataagaattttgctgattgtttatatattttacttcatttgagattaaggttcttttaagtagattcaggcgttctttgttccttatcaatttattagcaaatatgacaaatgttttaaaataaatatgtgtactttagttttcacattacttttt

SEQ ID NO: 141759 - DNA, 468 bp, Homo sapiens
ggcaaggcttgtctcgaactcctgatcccaggcgagccgcctgcctcggcctcctaaagtgctggcattgcaggcgtgagccactgcgccctgcaatgagtctgttttatagtttctctagaattgaaagagttccactcaaaattgagcttctgtttaccatttagtttgagcatgtgacgtgaattattcctccacttgatagtggaaagaaagaggtgcagaggtctgtaattaggctttaggctgcattagagttgggattgattgtggctagcataaactccaatggggatgaggtactaggacattaattttttatttctcagtcaaagaacagaagtcttgagggaaccatagttcacagattcttttctgctgctcattctttaaatctgggactgagggccagagaaaaatgtcctagggcaaaaggcagatagatgttccttacgtacatctgggatg

SEQ ID NO: 141760 - DNA, 419 bp, Homo sapiens
gaaggtaggtatgtaggtaaggataggtgcatcttcatcagaccccagaaaccgcgaaattgagtacttacttaaaatggcacagatatgattgaaattagaatccaattctccaagatcacaataagtgctccatacaaccaccaccacaatcacaaccacgacaaaatggtctaattatgtggatggattactgtgaaagcagttctagctcatggtgacagatctgtttcaagggtctgtcacagtgcacagctaagaatgacaaatttgtaggagcactaagccatcatttcatggtgtaaaagccattactcacactcaatcattactggccagagttttggaggaatgccaagcacaaaaaatagaagttcttgaacttcacaatagtgaattaaaattccatagaacagccc

SEQ ID NO: 141761 - DNA, 304 bp, Homo sapiens
aatttttttatatttttagtagagacggggtttcaccatgttagccaggatggtctcgatctcctgacctcgtgattcgcctgcctcggcctcccaaagtgctgggattacaggcatgagccaccgtgcccggctggggttgtccttttcttaataatatatgaatactctttgtcagttaagaaattaattagaactatgtctgtcatatgtgtggcaaatattttcctagttgactttctgtcttttatcattgtgtgtgtgtcggctttttttcatctatagctgctttagaatttttata

SEQ ID NO: 141762 - DNA, 206 bp, Homo sapiens
ctagacacagggaacggtgttcttgaatgtgggaacattctgagtaggaaggtgtaaataattctctattagagagagctttttatacctttggtcttagctttttcctttatctgcctccatatttctgtttttagtccagattttcttatctctatcctgtacaggcattacattatagagtgatatattaatgtggtagattg

SEQ ID NO: 141763 - DNA, 149 bp, Homo sapiens
cattccaccagtctctgaaaggggtgactcatggccctttgcagaagcacttgttgatagtacaggcttccctccctgacattccagtggcaaatcaaccctttgctggcctgactaaatttatagtgggctggccccagcagctggtg

SEQ ID NO: 141764 - DNA, 220 bp, Homo sapiens
tgtaccgtagggagtgatctccagaatatgtcttgagttgaaaaatacaaagtagagattcaacctgagaaagctgattgaagaaaataaaaaaataaaaatgaaaaaaaatgcaaagtagagaaaagtatatatggcatgctgctgttaatcgaagaaaggaggaaagggaccaggatgaatatgcacatgtgtgtgtgatttgttacatatatatgtg

SEQ ID NO: 141765 - DNA, 524 bp, Homo sapiens
tctactttaacaaaaacagattttcttattttatgagcttacacctctctcatgttcacataccaaagagctataactacatccatgactacaaaattgatcccaaaccagacaaaatgcaagaaacagaagcatcagctactctggtctaaatgttgtatgaaaatcttgttggctgattcaagtgggagaaaagcttgaagttataagcatcattttgactgttttatacccagttgcacaatcaaaaagtgcctcatttatcagtccctgctctcaacacaacaaacagatgcttgtaatttgaattgtatgactctggtatcaccaccagacactagatccttgaaagcactttaacccttgatagttaaaataggatatttatctccctgcccccaaagaattccatgtcttaaatgtaaagtcagaatttacaatgcagtagaatccttggggtagggctaggatccacaaaacagactcccaggaactagacagtgaactaactgaaggattatcat

SEQ ID NO: 141766 - DNA, 515 bp, Homo sapiens
ggaactcgtagaggcggcccacgcgctggaacagcaggatagctggtgctcatacacttcctgaggcagcgcccgatgaacacctctgacccagccggcggcgggctgcccacccagcctgggggtggcccgccatacttcctctgcccgttcacctgcaccaggcgatgcctgtctgcctgacccacgcctccagcgccgccttcaccctctcacaccacagctcacaatcccgcttggactgcatggctctctattctcttttttttttttttttttttgagacgtagtttcactcttgttctccaggctggagtgcaatggcgggatcttggctcaccgcaacctccgcctcccgggttcaagcgattctcctgcctcagccttggaggttgaggctgcaatgagccatgatcataccactgcactccagcctaggcgacagagtgaggcccatgtcaaaaaaaaaaattatccccaacatttagcagcttaaaacaaaaaacatttattat

SEQ ID NO: 141767 - DNA, 452 bp, Homo sapiens
ggcacgaggcctgtgggtatcagtagaattttggtgaacactgagaagtctctgagtttctttcaatctgggcttctttcagttggtttgcaaactggacttgtggaattagatgatctctcatgcccattctatctttgagttggtattatttttgccccgtattaaagaaaaactatattgatatttctttctttgcttttgttatttcactatagaaaattttgttttaacattcggttggagttgatgatatacaacccaattatatggatttgttatatgcaaacataaggaagtattcacaaatttaaagaccaagttcatgttgttcaagataatgtgaacccaaattcattgtgctcaggataatttggaactaatttcatagagtttaagatatattatagtaattaaaatcatggattttgggagcacactcccctgactct

SEQ ID NO: 141768 - DNA, 386 bp, Homo sapiens
gtctctcagcatcacttttcttttctcatcagtaaaatgaacgtgtgtgaccagaccccggggtttctccacctccagatagtcttgtatggccccggtggttctttcctgatcttcgtaccgcctgtactgtgatttacttcctatttaacatttcaactctctttttaaaagtttgaatacttttaaactttttattttgaggggactttagacttacaaaagagttccaaaaatggtacagtttccctgtatccttctctccctttccctgcagtgaacatcttacccagccatgggaccagtaccacaatgaaggagttaacgctggtgccgggctgctgactaaactacaggctttattcaaatgtatttaaccagtgttc

SEQ ID NO: 141769 - DNA, 841 bp, Homo sapiens
acccggcgaggacgcagggagccgctggcgaaccgcccctgggaattcagataaacgtagggtcgcttcctttcgggggcccactccgcattccagaattccttcttctaaaagaagagccggttctaagggcgttttcagcagccattagcatctggtgtacccgcccgtgtcattggcaaagctggtctcatgaaaaccatttcctaaaaaagggcagcgaaagggtcgcattcttgtgcgaactgatctgtcaagatgggggtacaagaactgtagaaagaggaaatgatttcggtgaggactgaattgtgccagcgtctctaggcttcctctaggctcttgtggaacctccggcaggctcccatcatcggctcccatcaccggcctcttccaaaaccatcccttacgctaactcgattgtccggttggcttagaattccagaggatctgggaaggccctgccctccctgctagcccctggcacagatccgcacagatccccacctcctccgacttgctcagccacagtcaggatctagtctggtctttctctgttgacctttttgtgtggcaggagtgggttttcctgttccccaggccctctaatatttccagacataaattccaggaatcccatgcttccctcttgaggggccatttcagcctcaggaaaggccttcagagacttagaaggaatgtcgtgttccaaggaatgaagaggcagccttgatgtgccgtgtttgtcaggactggccttgggaaaggtgaaataggacatatttttgcctttttttctgcaactcttttctcttgacttttactgaggtggtccaagccc

SEQ ID NO: 141770 - DNA, 325 bp, Homo sapiens
cctcctgccaagcatgcgttgttcacttgctggttttacctgtgagcattacaaaggactgaggagtaaaaggaatggcctattgctgagaccaggccaagcctctctagaaagtaacaagattacctgcctctagtggagcgtgccacccctctgcagaccctgatccatcgctgctgtcagcacgtcaagttttagcacctcaagggatcagctcaggtttatttttcagtgacacctgactcttctctttcctagagtacttaaaacttatgccttcaagacactaaaaaccactcaaggatttgagctgaaagagttgcct

SEQ ID NO: 141771 - DNA, 132 bp, Homo sapiens
tatctcctaatcctattatgagggttaaatgcaataatataaaaagcccagcattttaaatgggaaacattatgattctcccaagaaaatttctgtgacatgcttctaacatattttggtggcacttcattt

SEQ ID NO: 141772 - DNA, 304 bp, Homo sapiens
cctggaaaaggtcagatactcttctagcacaggggattgactgaaggtcaaatagcaggagattccagagctacacggaggcagagcttactgccccaaaacacagaacctcggaatctcagaggtggctgtcaccaagtccaattcccacacaattcttgcatcttcaaaacaacatgctgagtgtgcaagtctctgctgacatactcaggtgacgagctcactcccccgggaggtgtcttccactaattaacattcctcagctagaaagttcctccttacattcacttccaatcactttttt

SEQ ID NO: 141773 - DNA, 207 bp, Homo sapiens
aatatacagcaaagaaggcaagagccagggaaggccctagggaagttctggacaagaagttagttcccctcacaactgggcagccccctctctatctccccagcagtgtgtccccctgacttccttgtaccctctggcctttggtttggccaagggcacaccctaccagtccaataaaaccaactcacccaatcacattttccatat

SEQ ID NO: 141774 - DNA, 507 bp, Homo sapiens
tatagctgttctagaggatacccgttcgacggtgtctgagccaacttcaacagctgagaaacttggcctgaaaaagggtcctcgtaaggcatatgagttgtcccagcggtctttggattatgtagctcaattacgtgatcatggcaaaactgttggagtagttgatacccgaaaaaagactaaattaatttctcctcagaacctgtctgtcagaaataataagaaacttctgactagtcaagaacttcagatgcaaaggcagatcagacccaaatcacaaaaaaatagacgaagactttctgattgtgaaagtacagatgttaaaagagcagggtcacatacagcacagaattctgacgtatttgtaccagaatctgataggtcagattataattgtacaggaggaactgaggtacttgccaacagtaacagaaacccttcgacggtgttctggtaagcacgaaggtgcttgtgaacagctaagggcatgtgtgtggtggggtttgg

SEQ ID NO: 141775 - DNA, 673 bp, Homo sapiens
ggcagaggcgggcggatgacttgaggtcaggagttctcaaccagcctggccaaaatggtgaaaccccatctctactaaaaacacaaaaattggccgggcgtggtggtgggcacctgtgatcctagctagttgggaggctgaggcaggagaatgaatcgcttgaacccaggaggtggaggttgcagtgagctgagaccgcaccattgcactctagcctgggcgacaagagcaaaactccgtctcaaaataaatacatacatacatacatgcatacatacatacagggattaaaatagtctagtactgacacctgaacagacagattgatccaagaaatgaaacagaaattccagaagttgacctgaatacacacatacacacacacacacacacacacacacacacacaaggcttcagggacacgagaagggacacacagcaagtgtgttccatgtggcacctggcacagagctgggcgcacacgcacaggcacgcaagaacaagggttgtcaggaaattgagctgaggttgcacagaaggcttgtactgcctctcctaacttactgctgagaccccatctgtcaagccaatttctatactcaagagggcagcagagagcaatgaatggccctcattcatttgagatcttcagcaccgggccaataaccaccac

SEQ ID NO: 141776 - DNA, 710 bp, Homo sapiens
ggacgcgtgggctccagcctaggtgacatagcgagactttgtcccccacaccaaataaataaataaataaataaaaaataaaacaggagttcaaactctctaactccctagactttagagaagtttgtttggtgtgtctgggataaatgagagcttcccgcccctgtccccttttgaaacggagtctgcactccagtctgggcgagaagagtgagactgtctccctgctgcccccaccttccccccaaaagtaattatcatcaggtttgagtatgttaaatcagggatgcatcttagaggaggtaaatactatgtttactttttagaggaaatgaatttttgagtggggaagatgggaatgtcttcttcaagatttattgtgggcagcaggaatttaaatcttcataatttgtttatgtacttttactttgatttatgaagtaggagagacagaagatgctgggattacgggcatgagccatctcgcccggcgccattgatttacagacggttaagggttctcttgcccaacatcagttggggaagttagtcttcaaattttacttaactatagccagtttagccaggttgcacacctgtagtcctagctgcttgggagactgaggtgagaagattgcttgagaccaggagttccaggttagcctgggcaacatagtgagaccctgtctcttaaaaaaaaaaaaaaaaaa

SEQ ID NO: 141777 - DNA, 842 bp, Homo sapiens
tctcaaaaaaaaaacaaaaaaacgaaaaacaacaaaacagtctgtggctgggacagcgctgttaaaaaaagtaattattaggctgggcatgatggctgtcgcgtgtaatcccagcacttgtggggccaggacaggcagatcagttcaggagtttgagaccagcctggccaacttggtgaaaccccgtctctactaaaaatacaaaaattagctgggtgtggtggtgtacacttgtaattccagctactcgggaggctgaggcaggagaatcgctggaacccgggagatagaggttgcagtcagtctagatcacagcactgcactccagtctgggcgagaagagtgagactgtctccctgctgcccccaccttccccccaaaagtaattatcatcaggtttgagtatgttaaatcagggatgcatcttagaggaggtaaatactatgtttactttttagaggaaatgaatttttgagtggggaagatgggaatgtcttcttcaagatttattgtgggcagcaggaatttaaatcttcataatttgtttatgtacttttactttgatttatgaagtaggagagacagaagatgctgggattacgggcatgagccatctcgcccggcgccattgatttacagacggttaagggttctcttgcccaacatcagttggggaagttagtcttcaaattttacttaactatagccagtttagccaggttgcacacctgtagtcctagctgcttgggagactgaggtgagaagattgcttgagaccaggagttccaggttagcctgggcaacatagtgagaccctgtctcttaaaaaaaaaaaaaaaaaa

SEQ ID NO: 141778 - DNA, 220 bp, Homo sapiens
attccacctgagggtccattgttgcagccctgttcctggaactagtttgtatgtgtgtgtttgtctttcagattgttagaaaaatagaacccgatgatctcatataattgggggatattgtaagaatgaggcctcagctcttccttcttgctcagccattctgatgcctctctcacctctctgttggcctcttgatctctttctctgtatttcatcttca

SEQ ID NO: 141779 - DNA, 522 bp, Homo sapiens
gataaatttgactatagaaaaataggttcactgagcaacaacccaaagtcaaggtcaaaggacaacatgctggggaaattatctgcagctcataaacaaagggctgattctcctaatatatgaagaactcctatgcattgatgataaaaagaccaagggccgggcacaatagctcacacctgtaatcctagccctttgggaggccgaggtgggtagattgcctgagctcaaggagttgagacccacctggcctacctggtgaaaccctgtctctactaaaatacaaaaaattagccagacatggtggtgcatgcctgtagtcccagctacttgggtggctcaggcaggagaattgcttgaacctgcgaggcgggggttgcagtaagctgagatcatgccactgaactccagcctgggtgactgagcaagattccatctcaataaaaaaaaaaaaaaaaaaaaagaaagaaaaagaaaaaggaaaaaaagaccaagaacatgtattaaaaagtgagcagaaga

SEQ ID NO: 141780 - DNA, 411 bp, Homo sapiens
cagacactgtcagactaaaagcacttaagaggactgcggtataggttttgttctttccaacctcgaaaacttcacatgggtccttctcacctccttcctttctctccagccctgttctgcttcactgtcccgaatctgcttcatactcccctcctccatgaagccccccaaccccccaccaggctcctcaacatggatatctagagtttctagctgctcctttctctgccctttgtgtgtctttctggcatgcaatttgcagtttcagactgggggtgccacaaaatgtggggccatttctcttccttactcatggtttgcctatcccagtatccaaagcatggtccccgacacagagggggctcaaggaagggtaattgacggcatgggctgggggaaacccaggggcag

SEQ ID NO: 141781 - DNA, 858 bp, Homo sapiens
gtcattccaatgtatatcaccacttctttaagcgttttatgtcatgggagacattaaccagtgtctaagaagcacatagaagccagaaataaagatgtatgtgccaatgtttttctttaaaaaaaaaaaaaaaagaattggcaacttacatttgtgtgtgtgtgtgtgtgtgtgtgtgtgtgtgtgagagagagagagagagacagaatgtcattctgttccctatgctgaagtgcactggcatgatcttggcccaccacattctctacctccacagttcaagcaattctcctgcctaagcctcccaagtagctaggattacaggtacctgttaccatgcctggttaattttgtttgtaaatgtaacctgtatttatcagaatctagcaattgaagtaatgtgttcttattgtttctttcagttatgtgttttcattttgcccaagatgaggttacttcgtggtgtggtaaagtgtaccctggtatttatcagaatctagcaattgacagtacaggtgtcttatggtcttctcacaggattatgtgtttcatttgggcccaagacctttgtccagagcagagcctaaagattccttcaaagagtgatagtgaccagtatatgaacctcgtgaaattttggccaatttagagttaaccaaacgcttgtgacagtgtggctggagggtaagtcccacagaggtttatggctcaaccatgttgcagctacccaaaaagatttcaagggacctagcgaacgcccatatttgaatcccgactcacagaataggaaaccctccatttaatgtgaattaaaggcaaccgtgaataaacggcaaccgaataaagacatcaacacat

SEQ ID NO: 141782 - DNA, 567 bp, Homo sapiens
ggaggctgaggcaggagaatcacatgaactcgggaggcggaggttgcagtgatccgagattgtgccactgcactccagcctgggtgacagagcgagactccgtctcaaaaataataataattttaaaaaaagaaactgaggtgctgaaaaatatctagtcccaaaacttgtaagggtcagcgtggaacttgaactcagtttggacccagagttcatgccactaattatccttctataattagtgagtgctatttattctgaaagtacatctactattgaagatcatctactgtgccatccgatatgctatgtcctggggctttgggatcaagtgacactttggttctgccttcttggaacttaagttttagcagaggagaccaaaattacacatagtttcctaaataagtatattaaagtattgttggaagtactttgaagaaatgaggtacgttgtgtgattgaaccagggaggaacatctaggggataatcaggaacaatttttctctgaggagaaagcaaagaaccgaacaatgaatagagttaatttggtccaagaggcagtg

SEQ ID NO: 141783 - DNA, 272 bp, Homo sapiens
gtctaccttgtttatgtccatacttggagggcataccgttcttattaaatgccagcaactcacattttaggcagcagtaaagtcccctagctgtgtccatgcagtgaatctcgttgggctgtaagttagctgcaataaataacattggctctgcactccacttagagaagatgggttcactgtgaatcatgttgttggcggtttggactttaagctgtccaggttgtttatggtggtgtttgccagcatgtagacctctttcaaacaattta

SEQ ID NO: 141784 - DNA, 509 bp, Homo sapiens
aggacttgaataggcacctcaaaagaggaaatttaagtggccaataaatattttatttcagtcatcagagaagtgcaaattattttattatacaccccaaattaagaaccctgataatattagttgttgataagatgtggagcaactggaatgttcttacactgctgttgggaatgtaaattgctgcagccactttggaaaacaacatgacatcagtaaagtagaagataagcagttccactgtcgggtatgttccctaaagatactcgtccacatgcacaccagcatccatataaaaaacatttctatcagcattgttcatgatgaccccactggtctatctagagtagaatggataaaataatcatggtgtaatcagaaattgtaatattaatcagtaatgaaaaggagtgaggaattttcacttaaaaatggttaattttatgctatatgagtttcatttcaattgaaaaaaacaatgaggccaggtgcagtggctcacacctgta

SEQ ID NO: 141785 - DNA, 170 bp, Homo sapiens
tgaggaggaatttcaatggccaaggttttatagatgatcttccctttttctatctttcttactctagctggtcgactcacaaatctatcatcaggcaccactcattgaaatgaataaacacttcctaggtttgaaaggtctgaaaggccagacttgtaaatctaccattt

SEQ ID NO: 141786 - DNA, 130 bp, Homo sapiens
cagtttttatcaatacattttgtagatttttatagactagtacagaagttgccaaactatggcccaccgcttgttttttaaaataaagctgaagtaaataacaacgtcattgagatacgatttatgtgcc

SEQ ID NO: 141787 - DNA, 129 bp, Homo sapiens
aatggggtcagggagaagaggcttttttcatttaatacctttctgtactgttgaaattttctaaccactttcatgtactatgcattctttcttaaaatgaaagtcactgggaactgattatcttgtgga

SEQ ID NO: 141788 - DNA, 406 bp, Homo sapiens
atctcatcccgcacacggagaactaactttcccaaaacacaaaatggctacttatttatttaggcagaagtcacgctctgttatccaggctggagcacagttggtattcataggcacaatcatagcacactacagcgtcaaactcctggactcaagcttttttatttcttcttttctgaattttaagtaacacatttatcgacattctgtgtcccaaactaaactacaaactccctaaaagcagagactgttcttgatcatactaggacatactgtagtacagtatatgctgtcaaatcaaactagttttggttattaatagaaagttataatttcctactttacaacatagtactttcctagaaaacaagctgaaagttaaatatgcaaaagtcaaatgattgac

SEQ ID NO: 141789 - DNA, 755 bp, Homo sapiens
tcatttgtgacatcataggtaaacctggaggcattatgttaagtaaaataagccagacacagaaagacaaataccacatgttctcactcacatgtggcattttagaaagctgctctcatagcaggagacagcagaatggtggttaccagagacttgggtagttaggagagagaggaatggggagatgtggtcagaggattcaccatcaaagataggaggagtaattttttttttttgtgagacagtctcactctgttgcccaggctagagtgcagtggtataatcatggctcactgcaacctccacctcccaggctcaaggaactctcccacctcagcctcccaggactacagtcatgtgccatcacacccagctagttttttgtattttttgtggagatggggtttcaccatgttgcccaggctggtctcgaactccagagctcaagcaatccacccgccttggcctcccaaagtgctgggattacaggcctgagccaccgtgcctggccaggagaagtattatttcttttttaaaattgtccagaatctttgactttcttatcactgaaggtagcaactttctcagtgggccagctctgtgatgtttttctgagacttattcctggaaacactgcctagagcctgctcctccagcccttccaacaatttcataaacacctaactccccacattaaattcctgtttcaacttgctagaagaggctcagttatctgcaattctaccgacacaaac

SEQ ID NO: 141790 - DNA, 408 bp, Homo sapiens
aaaatcacatggatatagaggagagcacatcagttgatggctcagaaaacaggggttctagttcttgcaattccattacatagttttgtcacttggtcccaggacatctattggaagctatctctaagatgctgtataacttgagaagggcactgggatgagtgtgtaatttcacagactttgcgttgccccctggtggtattttaccttagtccaaaactagagctgtggtcactttacaacctgatcctgtgatccagtggtgacctacttcatggataaggattatcctctagggagccaaactttggtgcttttaaccagcagttagttaatagagaagctcagtgaaagtgggacctggaagtttgggaaattagcacatcttagttagaagcaagaagtcac

SEQ ID NO: 141791 - DNA, 688 bp, Homo sapiens
acacatacttggaattttctcgctcttgcagtcctgtttcccaatgactctcctgtgaaagggctaaaagtgctctgctgtaacaggacggcgggcacccccacctgctctctgtactctccagcaaatactagaacggcccattgtagtaaaaactaggagcaactctctactgaagaccttctaggtggcacctattgtgcgaagcaatttctctttgatatttcagatcctttcttcaactctgagcagtgggcttcatcttgaaaatgagagatgagaaaccgtgtcagaaactgtaagaaaaattgcacaagatgacattgttaggaagaggtggctggatttgtctcactccaaaatctgaagtctcaggacttgatacctgcaggagggaagaagccaactcaggccagggctgagagtaggtggagaatatggagtgtatctctgtatttgcctcttccctactctcctcccctccctgggtgctgaaagaatctcaccataacattccctgatttctttgggggatctagagtgttatcagtgggctctttacttaatttttactttcatgtctagatctctgttcatgctcttcttatactttacaacaaatctctccttttttgtcttgaactcttatctccagaatagtgatgacactggttctaggactttcccc

SEQ ID NO: 141792 - DNA, 415 bp, Homo sapiens
gcagggacatacttatgttcaccgctcactgttgggaatgtaaacttgcccacctttatttgaggacaacttcaccatatctttcaaaatcagaaagaacatatgacactggtaaaatgtgcttttaggaatttatcctatacacttagatattccttgtgggagtagatacaacattattcattgcagtgttcgtgccgtaggataaaattagtgccatgatcttccattaggagatgccacaaaatcagagactattcagacagtggaatcacacacatccctagaagagggtgcaaacagtctcactgctgacatcaaaccacctctgagatcttccaggtgcacaaaccaaggctcaggacagcctggacagaccctggttgattctggggacacattttactgtgaattt

SEQ ID NO: 141793 - DNA, 278 bp, Homo sapiens
gatctgctaaagtggatatcaaataaatacccaaacttcttttcttgaggcttgtgtgcccacctggcccattttggtgacaaggaagactaaacagatcaactcgctattcaaaggaagagcatttcaggctatgtgaattgtttcccattttctgctttgaaaatgatcaccataatatttccgcaggtgtctgaagggcatgttcctcaagctaaactactggaacacaaagataggtctccaggtgaaagaacttggagctgattacatagacg

SEQ ID NO: 141794 - DNA, 491 bp, Homo sapiens
gcaggagtgaatgtatgtgaaatgatcaaagaagccaatcaaactgggggaacaggagggacagtagggtggcaagctgctgatcttatgggactaagagggagtgtggcctaaaggaacatgcagacacatcctgaggtctgctggagtctccacaggcctcctgcctgcagaatgcttagcttggtaacacactttattactgatcttcaggacatggtgaggaatggggcaagagtccatggaacagggaccagaagaggtagggtagggtagttgggaggtaggtgtggagaacagtgcaaggagaaggaaccatgcatggtaagggtgacacagcaggatccttgggtgtgtccacgttctagaacctcaactgttgccacatctgtctgtccagacatcctggcagcagtaatgccctgagagcaaagtgccagtgcctaggcctgcttgacacaggactgccagattaaatgcagccccaccag

SEQ ID NO: 141795 - DNA, 299 bp, Homo sapiens
tacagtttgcatttgtcatgtcccttcagtctccttaaatcctaagtaacacttgaaagactctttcaggaccctggcaccattggagattattataggccacctattttgtagaatatccctcaatttggctttagtattttctcttgattagatttaggctacgcatttttagtgagaacagcacagaagtaatggtcatttcttctcattatatcctatcaggtggtacacattatggatgatgttcattttgatcccttgattaaagtagtgtctgccctcctcactctgcttag

SEQ ID NO: 141796 - DNA, 302 bp, Homo sapiens
gagtgaaggtattacagtaacagatggaaggggtggggtgctgataacagacggcagcgtttgaatgtttcagaggtagtagagattggtgacagcaaggcctagggtggtgatcctcaaacttcagtacgcattggaagcacctggagggcttgttaaaacacagactcctggccccagcccacagttcctgattcagcaggtctgaggtggggcctgagacattgcatttctagcaagctcccagatgctgcacttgtggctcagggaccacaagtgaatggaagtactaggtaaggtgg

SEQ ID NO: 141797 - DNA, 385 bp, Homo sapiens
cctgtgtactattcatctttctttccctgaacaccaagcagtgtctgacccatggcagggactctgggaccatctgctgagagctcaagtgagtgaatgaatcaatgaatgaatgaataaatgaatgaatggggtgccctcccttgcaagcagttttggtgtagagaacatgaaataaactttggagtcatattaatttgggttcaaatccaggttttgtcatttactggctattgactttgggcaaactcctcaacttctgtaaatgtgtttctcatatgcaaatagatgtaataaaatcaatgtcaagggctcacaatgcctgtaaagtgcttagtataacacctctaaatgctcaataaattgtaactacttctctcttcac

SEQ ID NO: 141798 - DNA, 592 bp, Homo sapiens
aagtgtctcaaagtcaagtgtctaaaatttgaataaaagaatggtgaagtggaagttccaatccctggaagcttgagcagcagtatgacatccctacatgattgatggtgactccatctcccttggctcagccatccatgatttcacccaggcagttcactgtcccttcatcctggcccagtgcttacctggtgccatccctgtctttagggctcatcaagttcctgcaggagtacacacagaagaaaatgtttccacagccccctgccatgtttccaactctaatttgctcccaaaaagtttcaaaccacagggtcagtacccaggacactgatggggtccattgctagtgggaggggtcattttgtattatagatcagtgctttggtctctccttcatctcttgcatccatgtagaatgcaggccaggtcagtccatttgaatctctcccccacctcactttctatcccacctttatactggaacataggctggggtttgtgctccagatccaggcagcttcaatttagggcagagagaggagaaagtcccatttaaacatctacaaattcactttctccaatctagttt

SEQ ID NO: 141799 - DNA, 281 bp, Homo sapiens
agtagagatgaggtttcactatgttagccaggctggtcttgaatgcctgacctcaggtgatccgcctgcctcagcctcccagagtgctgggattataggcgtgaaccaccatgtcaggctgcctgttcctttttcaaagcaggtgagcacacagcagttttaacaataagctaaagcaagctcttttctaatgagagagttctgttaaataaaggtcaacaagaaaagtaacaacactcattgtctcttgtttacggtccatctgagcatcatgcaaactt

SEQ ID NO: 141800 - DNA, 412 bp, Homo sapiens
gggatggccgtgctgaatcaggatctcaggcacccagcattgttttaggtgagcattccttctttttacagagtggactggcatctttgttagcagcttgttctgtatctttcccacgtgtagcggttcacaatttaaaaacaatcctcgcagtaccaaaaactgatttcagagggttctagaaagatagtggggcaggaagaccaggaattcatctcctcacctagacaacagttccactggcagaatctgtctgatgtaactattttggaactctggagtctactgaaggtttgcaacttctaggcgggaagctgggacggttaatttcagtcagtttcagctctgctgcccactgccttcctcagccctgtggtgcagggtgtgcggtgttcctggaacagtgtgcgtg

SEQ ID NO: 141801 - DNA, 177 bp, Homo sapiens
tttcttcctcctccaggctgcccctgcttgtctccaacctctgtgttcctaatctcacttgcttctctcaaaatgttcctgtctcacattcctttcctgggtttgatagataaggggcactagctagttagggagatggattactccacaggttaaagtgacttagagaaagtcact

SEQ ID NO: 141802 - DNA, 904 bp, Homo sapiens
ctcggcacttttaactgatttacacattgactttttattttttttgagacggagtcaagtgattctcttgtctcagcctcccatgtagctgggactacaggtgtgtgccaccacgcccagctaatttttgtatttttagtagagatggggttttgccatgttggcccggctggtctcgaactcctgacctcaagcgatctgcgcacttcagcctctcaaagtgctgggacatttttgaggcaaatactgagcctatggaggaattccggtttagtatttttggcgctctcaatagagaacaccatatttttgtcccttaaatgtaacaatcacaaggacatcttctttgaggaattggaagagaggcctgaagggtagagatttcagataaaaagctgaagagaaagagttaaagaagcatcctcctgaagttactaaatgtatggctcataaatctatgggctctatagggaaagggttaactgccaacttagtaaagctggggaattttagcgtgagcatattagttgaacaatgtgaaaaatcagcaaaactgctgtgccatgagcagcgagtccctgaaataggctctcatttactttccatttcttctgctttccagtctcttctctttgaagcagctcttgattagtttctttttaattgccatttaattgggaaacaaaattagaacacttatttgatatcagtgatgaggtttctctttccattctgctttgatctagttttgaaaaaccaaaagttgaagggagaaattaaaaaggaactaaaaagatttcttatttccaagagctagctgcagctataagccatcaaataaatagggaaagaacgactcttggagaagctgaagaaaaaaacaaaaacaagtaaggctagcttt

SEQ ID NO: 141803 - DNA, 781 bp, Homo sapiens
tgagagctgattcttgaggatccacggacgcgttgctatggcccggctggtctcgaactcctgacctcaagcgatctgcgcacttcagcctctcaaagtgctgggacatttttgaggcaaatactgagcctatggaggaattccggtttagtatttttggcgctctcaatagagaacaccatatttttgtcccttaaatgtaacaatcacaaggacatcttctttgaggaattggaagagaggcctgaagggtagagatttcagataaaaagctgaagagaaagagttaaagaagcatcctcctgaagttactaaatgtatggctcataaatctatgggctctatagggaaagggttaactgccaacttagtaaagctggggaattttagcgtgagcatattagttgaacaatgtgaaaaatcagcaaaactgctgtgccatgagcagcgagtccctgaaataggctctcatttactttccatttcttctgctttccagtctcttctctttgaagcagctcttgattagtttctttttaattgccatttaattgggaaacaaaattagaacacttatttgatatcagtgatgaggtttctctttccattctgctttgatctagttttgaaaaaccaaaagttgaagggagaaattaaaaaggaactaaaaagatttcttatttccaagagctagctgcagctataagccatcaaataaatagggaaagaacgactcttggagaagctgaagaaaaaaacaaaaacaagtaaggctagcttt

SEQ ID NO: 141804 - DNA, 373 bp, Homo sapiens
ctggtctacaaactcctgacctcggcctcccaaagtgctgggattacaggtgtgagccagcacgcccagccgaaacgaaccacttttccactgaagtaaggaagcacaatccatcccacaagtgcagggtgttctgaatttatgaggtgttaccgctcacgttctgtccgatcagaattatctttagaaatgactaatcttggctgggtgcggtggctcagggatggccgggtgcagtggctcacgcctgtaatcccagcactttaggaacccctcacctgaggtcaggagttcgagaccagcctggccaacatggtgaaatcccatccccactgcctgcctggggagtggccatgcaggcatgggcctgagg

SEQ ID NO: 141805 - DNA, 473 bp, Homo sapiens
aaagaaagagggataggacagaaggagagggaggagataggagagagggaggagaagaaatagagagggagagggaggctcagaacacaaacacagctccagatagaatatttggtcctatggaacgctgtggctccatttgttcgggtgtctgacccggatccagcaccaaggtttgtccaggactgctccatgcactgtgctgacctgtgaccaacaccaggcagccgggctcggagactgagattctcctgcctttcttccccatctccctgcaggggcactcaagctgaccttggccttcacagtggcccggggctggtcatttgcaggggcagcatctctgcctttccctgttgtcaaggggcagctctcagggatgcaggcctcccctcagtaatgagaggctaacgagagtgaccagtgatgtttctcccatctcagccccgggtagaccttgaggttgacccctt

SEQ ID NO: 141806 - DNA, 316 bp, Homo sapiens
accactttctcactgataaatatttatgttatgatataaaaatccttatttgattgggctgccaatgattctcagtgagctaaatattttttataacagctgaatgtcttctctctcttgcaggtagctttggtgttcctgatgagtgtgctgttaaagaaagctgtcctcaccaatttggttgtgtttctccttaccctcttttggggatgtctgggattcactgtattttatgaacaacttccttcatctctggagtggattttgaatatttgtagcccttttgcctttactactggaatgattcaggtaagag

SEQ ID NO: 141807 - DNA, 159 bp, Homo sapiens
ccatataacaaccagcttgagacaccttttcactatgtacaaagtaagtccaaaatctttcattctggcctgctttatgctctacttcatgatttgttctcattcagcccaggtctatgatgactttaaaggctcatttcacaacttggggtctgtcgc

SEQ ID NO: 141808 - DNA, 133 bp, Homo sapiens
atgggaggccagagtggtttaggacagaagttattaatttggtaatggccaagctgagtttatggtgacagccctatgagggtgtcctaaaggtcactgaactagatcagggctagagttctaagtgcaaagt

SEQ ID NO: 141809 - DNA, 429 bp, Homo sapiens
agtaactcagcactttgggaggctgaggtgggaggatcgcttaagcccaggagtttaaaactagcctgggcaacatagggagacaccatctctacaaaaaatttaatttgccagccatggtggtatgtgctataatatcagctacttggggggctgaggtgggaggatcactggaccccgggaagtcaaggctgcattgagctgtgatcaagtatgtactccagcctgtgcaacagaatgagaccttgaaaataaaaagaagaaagaaagaaagaaagaaagaaagaaagaaagaaagaaagaaagaaagaaagaaagaaagaaaagaaagaaaaagaaagagagaaagaaagaaagaaaaagaaagaaagaaaagaaagaaagaaaaagaaagaaagagaaagaaagaaaaagaaagaaagaaaaaga

SEQ ID NO: 141810 - DNA, 421 bp, Homo sapiens
tgtgccctgggcacccagtttcagaaatgagtaaaacaccggccttgccttcaaggaactcaagagaccctgcggcagccacagtcttacagagcaattaccaccctgggttgcaagagcctaacgtagggtggggacaggggaggtacaaaatgctatcagagctggagacgaaagtctctaatactcggagtggggctgtgaaggtgactttaaagttgtgccttgaaggaggccaggagcgcaccaggacaaggccatgggaaccgccggtgcaaagcagggagacctggaacagcaggctggtggggaccagtgactgaacagcacagcgtgaacccaaagagtgtttggcttaagggtggggagagctgagccgactccctgaactgctaggacttaaacctgagaaggcccagca

SEQ ID NO: 141811 - DNA, 446 bp, Homo sapiens
attgaacttctttaaccctaactttcatcctctccacactctcttttgccttcaaataaaccatctgctctctctggaacaatgttccttgccttctttgctgaactagctccaattcatcaaacttcaggttagtagacattcactcagataagaagaccttttctttttttttcttttttctttttgagacagggtctcgctctgtcacccaggctggagtgcagtggcatgatctcagctcactgcaacctccacctcctgggctcaagccatcctccacctcagctcccaggtagctggcaccacaggcatgtgccaccatgcctagctatttttttgtatttttggtagagatgcggttttgctatgttgccctgggtggtcttgaactcctgagctcaagcaacccacccgccttggcctcccaaagtgtgggattacag

SEQ ID NO: 141812 - DNA, 269 bp, Homo sapiens
ctaatttgaaatattaagccagttcctgactgaccttatcctcgccaccctactggcctcaatttctcccatctggcctgatttctaagaaacccacatatgctttgcaaaaaatgctccacttcatatttcttaccaatgtgttgtaggaacctaccaagctggaaataatatgcagagataaacgtgtttaaagacagactattctccaaaatagtctcatttttttgcctaacttattatgtattttctgtcacttttaataaatt

SEQ ID NO: 141813 - DNA, 272 bp, Homo sapiens
acaaatagcaagtggtccctgacttatgagggttagacttaagattttttgactttacgatgtgggaaagcaatacagtttcagtgtgctcctcaatttattatgggggatatatctggataagcctataagttgaaaatattgttaagtaaaaaacatactattttcaatttacaacaatgggtttatctggatgtaaccccaatgtaagttgaggaacatctgtaatggatgaggtgataaaattattctctatcttgatgaaggtagag

SEQ ID NO: 141814 - DNA, 549 bp, Homo sapiens
gaacctgggaggtggaggttgtagtgagcctaagggaggagaccacccctcatattgtcttatgcccaatttctgcctccaaagaaagaaaaagtaaaaactaaaaggcagaaatgaaatccacaagcagacagcccggggccacaccctggacctggtagttaaagatggacccctgacctaattggttatgttatctatagattccagacattgtatagaaaagcactgtgaaaatccctatcctgttttgttacgacctaattaccggtgcatgcagcccccagtcacgtaccccctgcttgctcaatcgatcacgaccctctcacgcacacccccttagagttgtgagcccttaaaagggacagaaattgctcactcggggagctcggcttttgagacaggagtcttgccgatgcccccagccgaataaaccccttccttctttaactcggagtctgaggagttttgtctgtggctcgtcgtactacaagccaagatggtgccattgcactccagcctgggcaacaagagcaaaactctatctca

SEQ ID NO: 141815 - DNA, 296 bp, Homo sapiens
aataccccttctccttgcttcctcagtagcagaatcccaggcagttgcccagctcagaggctatgttgcctccctgcatttgcggggaggtgtgccgccacgactgaagctggcaggggagaccaatgtggaagtgcggtgtgggcttctgaaaagttgtctcgaaagtgaaaaggcagccgggcgcagcgactcatacctgtaatcccagcattttgggaggccaaggcgggcagatcactgaaggttgggagttcaagaccagcctggccaacatggtgaatccctgtttctac

SEQ ID NO: 141816 - DNA, 340 bp, Homo sapiens
gtggcttctgcccgagacggccgtttttcccgttataagagggggaagatgaaaatggccgctgcgtccccgcggtgttgggggaggggagcgatatcttatttcggcgttgctctcctgcgaaggtccgccgcagccatcttgggctggcgggctgggcgagctgccagaggcacaaaatggcggagaagccgcgcggcaacgcggacccgacccgcagcgggccgcgcttcgtaaggccgcgtggtggggtgcaaggggacagacgacgttcttttgggtctttgggccggtgtttaggttaacgaaggaccgtctttgcctccacggaaaggacgga

SEQ ID NO: 141817 - DNA, 663 bp, Homo sapiens
gctggagtgcagtgacacgttcacagctcactgcagcctccacgtcctgtgcttaagcgatcctcccacctcagcctctcgagtagctgggaccacaggtgcgagcccctacacctggataatttttgtatttttagtagagacagggtttcacctggtcttaaactcttggattcaagcgatcctcccaccttggcctttcaagatgctgggattacagacatgagccaccgtgcctcgccacagccaggatttgaacaaacttggtattcaccaccacattctttgcctctattccaaaaagatgcttcatcagatccttcctgggagcctcacattcaagggtctgacttgtgagacccttgggaaaaaatgggcatgtttgaccatatttaacacagagtttcccaaagttttggattagaaagctcggccgggctcggtggctcactcctgtaatcccagcactttgggaggccgaggcaggcagatgacctgagtttgggagtttgagaccagcctgaccaacatggagaaagcccatctctactaaaaatacaaaattagctgagggtggtgacgcatgcctgtaatcccagctactcgggaggctgaggcagagaattgcttgaatccgggaggcggaggtggcggtgagccgag

SEQ ID NO: 141818 - DNA, 256 bp, Homo sapiens
aactcctggactcaagcagtcctcctcctttggcttcccaaagtgctgggattacaggcatgagctactgtgcctagcaagcctgcattcttaacaccacattaaaagagagaagagacttagcttagaggtctgggcaattctaatagttacagataggatagagaaggtagagctggcacaggaaatgggaaaggaatgattagagaggcaggaaggaaccatgccaggccagagtgttccaggtaggctgcca

SEQ ID NO: 141819 - DNA, 261 bp, Homo sapiens
ggatggtcgttctagaggatcccttacagaagaaagtttgctgactccaggtttagatgacaaagaactttcaagaatctgtactgaggaagcaaaaatgggcttaagtacaataggccctgccttaaagtagagagaccggtcaaacgtaagccccagcgccaaaaaagacaaggtctcactcatcaatccccatcttacaatcaagaggcagaacttaaatcacttaaagctgttttttcagatttgagcagtaaaata

SEQ ID NO: 141820 - DNA, 424 bp, Homo sapiens
tgtttccactgcaacatcttccctcaggaagtggctcagaactctttaagatgttcttggaagaacatggtttgtcattacagtaacatcagaggccacatgtgtcattatgcaaacttgtatctctattattaactgtgttgattggaaatgtttttcccaagtaccataacagcattttgactttttatagtaatcttgttgaaaagatgtggtcttcaaaatgacccacctagttagagcccacagatgggatttctgttaaaagattctgtttgggagggatagataaatgaggtctggcaaagagacagagatcccgtgttgaattaccagtgagttaggaacaaagacaatgttttctctctccctttcttagatgtgatgtttccaagaaaagaaatttcaggtggggaggacagag

SEQ ID NO: 141821 - DNA, 400 bp, Homo sapiens
ccagcagaaatgcttatctgatctctgcgagaacaggaagcagctcagtgggggccttccttgctaaattcttcatcaagctggtctgttatctgccctgagtcctgcaaaaacatctcaagaaaaatcccaaaaacatgcaagacaaatgagggtcctcccttagcatgtcttgaagcactgaggcacctgaaagttacatatagtttccggggaaacagttttttaggaaatgtagcacagacactaactattcttccagaagagccccttcctgacatgaaagatcttacttagcatgacagagaagcatctgattcatcatgaggacctatccagccagcagcaggggccccagtgccagtgtccacctcaacagaggagacacgggggacatgca

SEQ ID NO: 141822 - DNA, 336 bp, Homo sapiens
tgtgtgggctgagtccagagaaaatgttacacctggctaacctataacaagaaccacctttttaaaaaaaattggaattgcctctaagagaaaaagcgaaggcttagagagtatgactgagtttagcacttcaaaagtggaagagctaacaatatgcattgtaagtattatttgttgtttttgccctgactcctttaaaaagtagatatgaggacttagaaaagagatgccaagagtttgtgcctcacttcctatatccacaaaataagaatagtcacatatgccccctacaattattcagtgtgatgctgcagggccagctgcaccgccacctcc

SEQ ID NO: 141823 - DNA, 439 bp, Homo sapiens
ttgtgaagagagtattcatattccatctccaattaactcaaaatgttggctaaagcttcaacatagagtcattctaattaaaactgctattcctgatgtggtagctttaccattggcatgattcttggcactggggataatgcttcctctctggcataaattgttttctctataactgtaaacagagaatatcaggcacaatttttctttcatatgtcagttacaagagttaaagattctcattgtattctgggtttaagtaatttctcagcatctgtgctacaatttattttacaaggacgtagatcatctcactgtgccacaggacatattttgttaatgacatactctgaaaaatatgaaatgtgaaatatgtaaaaaaacacgactagcaggtattctagcttctggcctataccttaagtatgcatgaggactg

SEQ ID NO: 141824 - DNA, 259 bp, Homo sapiens
tccctcaaaccttctagaacagtagtgcctatatattgtaaagaccgtgtccttgactatgggtaacttcttgcccaccccttctcccagcctccgggcctgggaggagccctcatatacttttgtttttaaagactgatttggctgggcacggtggctcacgcctgtaaccccagcactttgggaggttgaagtgggcagatcacctgaggcaggagaatcgcttgaacctggcaggcagaggttgcggtgagccaag

SEQ ID NO: 141825 - DNA, 297 bp, Homo sapiens
gggtttggtccttcagactctgcatctgtccggtcactgatggtcacaaccagcagttccttaaaaacctgaaattgggccgggtgcagtggctcatgcctgtaatcgcagcactttggaggctaaggcagtaggattgcttgaggccaggattttgacaccagcctgggcaacatagtgaggccgtctttaccaaaaactttttttttaatttattgatggaaacagtctcactcttatcaccatggctggagtgcagtggcgcgatcttggctcactgtaacctccacctcccta

SEQ ID NO: 141826 - DNA, 317 bp, Homo sapiens
atgatatgtagtaaaagggttttacaaattgtgaagtgctatatgaatgataaatattgtgtgaaagtcattggaattcctagtagaagaaggtctttggagataattatgaatatcaatgaaattatctcatggaacaccaacatctcacaaaattctatacccaaaggttttgagggagttcacgtcaccacaagcaaaggaagaaaggcatatcttaaagtctatgtcttctgtttagacattatcccaaatgtcccactgaactaaatgtaaacttctcagaatgccttaactgattctctttaccgctacta

SEQ ID NO: 141827 - DNA, 437 bp, Homo sapiens
ggctctgcagcttatgctggttctcatttaatcttcaagtgtaacagatgaggaaacaggcttgtggatggaggaggagctcaaggtcattctgctggtggtgctggctcagaccaggcctgccgctgtcccccagcgcttccctgggtcctcagcctgtgcagatgtggtggccgtgctgtcacagcattagttcaagtcagtcttttgataggtaccactcggatggccagcctgccttggcagctttattccaggcgcgctcccaaatcctcaggttattttcactggtgaatcttgatactgcagacagcggggtcggagatttaagcacaggatttgactgatgaccctttcctcttctagctaaaatagatttccagggagccagaggctccttcctggaagtcagggggcttccagtagcaggttattga

SEQ ID NO: 141828 - DNA, 266 bp, Homo sapiens
ggctctgcagcttatgctggttctcatttaatcttcaagtgtaacagatgaggaaacaggcttgtggacaattaatatttttatactttgcattgaacatattcctaaaaggacagcagctcttgtctgcctgaaccaactatcagaaagaagagcaaggtggaggctgacctggagcatccacaacctcctgaagccacggtcaacccacaagccacaggtcaacccacaagccacggtcaacccacaagccacggtcaacccac

SEQ ID NO: 141829 - DNA, 286 bp, Homo sapiens
ggatctagagaaaactgaacagtcaaaggtttgaagttcaaaagagatcaaagaattacactgggagttgtgttttaaaaaaacacgaaggaggaggaggtgggggagagagagaaagagggagagacagaaagagagagaggaagagaaagaaggaaagaaagaaaaagaaagaaagaaagaaagaaagaaagaaagaaagaaagaaagaaagaaagaaaagaaagaaagaaagaaaaaaaagaaaagagaaaagaaaagagggaaggaaggagggaaggaggga

SEQ ID NO: 141830 - DNA, 145 bp, Homo sapiens
gaagaagcagagatttattgaggatcaaaaatattcctaatgcacccggacatttccttatcgctggcgttggtggttcttcaagtcagggaaggtatggactccccagaccacacataccaggagctctgcaatgagctaggat

SEQ ID NO: 141831 - DNA, 386 bp, Homo sapiens
taactttgaaaccttgggtaacatgaaattgaatcaaaatattttcaagttatggaacatagtgttattaatagaatggagtgttgaaaaagcactggattatgctttctgtaacttttagttctgggtcttatgataactgtgaccctgagcctcagtgttttccttttaatctgtagtgatattttttagttcagtctctcattttaaactgcttttagctctaaaattttatctcagtgacctgttgagttatataacaatcgtatcaggtaacctagataagaagaggaaggcagtaacatttcagaaatacagtttggggttgggaatccttaagtgatccagacttctcctttggtccgaagatagttgtaaatggcgga

SEQ ID NO: 141832 - DNA, 451 bp, Homo sapiens
agcgacaatggcgactcctcaaactggcatttgtcatttggtgagtggactatatttcacttagttcatagccctaatggttcactggtattttagacatatgtcgtaattggcaataactttgtaaggctgaataatactgtatcctatgtttacagcacattttgtttatccactcatctgctgatggacacttgagttgtttctaccttttggtgattgtgaataatgctgctatgaacatgggtgtacaaatatctcttcaagacccagctttcaattttttgtttatagtcccagaaattgagttgctggatcatatagtaattctaactttacgttttaggggggaacttcccatattgttttccacagcagctgcactagattacattcacaacagcagtgcataggtgttctagtttctccacattctcaccaacacttgtta

SEQ ID NO: 141833 - DNA, 462 bp, Homo sapiens
acctgggctgggctacatgacatgatgctactagatgaatggcagtctcatgagtgaatcaaggaactgtaaagatgaatttcaggcctttgtgaaaatggcttacaagtgatccccaatttcaaatgattgtcatttctgtttctgctcagacattctgcatccgaaacagatctgctcatgaatccttgcaagaaaatctaacagagtacagcagagtgttccctttcctggtgagctaatgcccaagaatatccattctagagtccatggtgtgcatggaatgatatttcttggaatttcccagggactgaaacttctccaatgactattcagctgggctctcagaattaggaataaacatgtcagagccagagggtggggtctgaaaatggaaatcctcaagatgagacaatattagttagttggaaagggtgataacttttctctgtccctagttca

SEQ ID NO: 141834 - DNA, 864 bp, Homo sapiens
attacatctatacctaaatattttactttttgaataatcataaatttttttttgaggcaaagtctcactctgtcacccagacgagtgcagtagcaagatctcagctcactgcaacctccacctcctgggttcaagggattctcatgcctcgggctcccaagtggctggaattacaggcatgtgccaccatgcttggctaaattttttgtatttttagtagagatgaggtttcatcatgttggtcaggctggtctcaaactcctggcctcaagtgatctgcccaccttggcctcccaaagtgctgggattacaggcatgagctaccaggtccacggcctgtaaattatttttttttaaataatggttaatatactttaaaagcacataaaccaatttcagttctgtacactttttagataagctgactttttttccctcatcgcaatatttccttaatgagagaagcagcttgctgatttacattctgatgccagcagcttatcctgaactggcattttgaatggctctacttcagaggtccacaaatcctcaaagacaaaacaaaacaaaaccacctcaggctgggtgcggtgactcatacctgtaacgccagcactttgggaggccaaggtgggtggatcacgaggtcaggagatcaagaccattctggctaacacagtgaaaccctgtctctactaaaaacacaaaaattagctgggcgtggcaacaggcgcctgtagtcccagctgctcggggggctgaggcaggagaatcgcttgaacccaggaggcagaggttgcagtgagccgagatcatgccactgcactccagcctgggcaacagagcgagactcagtctcaaaaa

SEQ ID NO: 141835 - DNA, 348 bp, Homo sapiens
ggggttggggagccctgggaccgagcagagctccctggcacctctttacggtccgcgtcctggaaccacgagcgctcctaggccactatctaaggtcaggatcaggttttagtcccttaatctttagccaaaccgtggtacgataccagacatcgccaggaccatccctgaggcctaatgtgcagtgcccggtgcccatgccaagctggtgcaatggcacttctgcgccaagctggtgcaatggcacttctgctcggctctggaggtccatctttcctcctaaccttcccctgacccttccggcggtggcaggaggagtgagtgctctcggaaatcaaattcactgtg

SEQ ID NO: 141836 - DNA, 439 bp, Homo sapiens
ggtcaagagttcgagaccagccaggccaacatggtgaaaccccatctctatcaaaaaaagtacaaaaaattcactgggcatggtggtgggcacctgtaatcccagctacttggaaggttgaggcaggagaatcacttgaacccaggaggcagaggttgcagtgagctgagatcacgccactgcattccagcccggtgacagtgtgagactccatctcaaaaaaataaaaaagaaaagaaaagaaaagttagccaggtatggtggcatgcatttgtgatcccagctactctagaggctgagacaggaggactgcttgagcctaagaagtcaaggttgcagtaagccatgatcatgctactgcattccagcttaaacaactgagatgctatctcttaaaaacagaagtagaagcaaacaactataggggaaaatgagggat

SEQ ID NO: 141837 - DNA, 122 bp, Homo sapiens
ccacaatgaaataccacttcacacccactaggatggctataatttaaaacaatggaaaatggcaaaagttggcaaggctaggaagaaataagaacattcatatgttgcaggtaggaatgtaa

SEQ ID NO: 141838 - DNA, 466 bp, Homo sapiens
tgatagtcaccatctctgaggatttttaggaaagctccaaattgcccttggttctaatgagcaagaaaagggtcttctctgtataagctctggtatcctctattttaaaacaaccacgttgggtataccaggctacaaacacatgcttgtttaatgagatccatagtaagataacctttctgaaagaaagtcattgattctattgggtaaatatcctcaacttccacaggcagtaccctgaaatcttgggaatggagaaaccattctagatcagctcctagatactcctaagaggggtcaactggtgtttgatcctgcctgtggggaagcagcatggccaaactcatttaaacatctgcgtaactggagctaggatgatgcatagcacatatgtcactaggaatgagaaaggaaaaagctttgggaaagtagctaagcagaggatgcttcttaaaaaatgtcaaaa

SEQ ID NO: 141839 - DNA, 246 bp, Homo sapiens
cgctgtgcaagtatgcctggtgttgccaccacgactactggaattatgggtattctgctgacaccctgcctctccttagctgcctcggtttctcaggccctctcttttcccacattcttcttaactctagcaatttttattgtcacctccttgagccccaatccctgcctcggctctcaggcctggacctaacaggtacagatgtggtgagcccctatccaaggtccagacctgagcaagccaggt

SEQ ID NO: 141840 - DNA, 211 bp, Homo sapiens
agggactcttaaatggtaattttggtgagttggtaaatttggtgggactctgagtgtagactagcttgagaattaagaactcttttctgcagacaaaccagaccagaatttcattttaaggacagagccttgggagccgattattttgattaaaatccctgctcatctataaaatggttaataataatacctaatttataaagtttagagg

SEQ ID NO: 141841 - DNA, 653 bp, Homo sapiens
cactgccatatgagatgtgcctttcattttccaccatgatcgtgaggaactgtaagtccaataaacctctttcttttgtaaattgcctagtctcaggtatgtctttatcagcagtgtgaaaatggacgaatacaatgattattactaaaaacattttgttgtaaatggggtatgtgtgataaaaaggaacccactctgagcgtgaagtacattgggcacccactgcagatgctcagacatgcctcatggatatcagcagaggaaatgcttcctggctgcctgctaccttcaggggactgtgctgagtgacttgcagacattgtctcatctaatcctcagaaaaacatcattttagaaatgagaaaacagctaagagagccattcacttgcaagaggagaagctgagacttgaacccatgctaagaccgttcattcactgtcatctctcagaaaggccttggtttgttgaaagtgatgcgttttgatcctgcctgcccagagcaggcaagggcaagattcctggatgcaacttctctgctgaagagaacattatcggctcctgagctcggactgagacacgcatgctgactctccccactggctccccttggatgccttcctccggccccatctgtacccctgcaaaggcaaga

SEQ ID NO: 141842 - DNA, 412 bp, Homo sapiens
gcctccccggctcacgccattctcctgcctcagcctcccgagtagctgggactacaggcgcccgccaccacgcctggctaattttttgtatttttagtagagacggggtttcactgtgttagccaggatggtctcgatctcctgacctcatgagaatccctttattactatattataaccataaaatggtagcagtaggttcttacctgtcaataatcaccttgaatgtaaataggttaaattctccaatgaaataaaggggctgaatggattaaaaaataagatccaactatatgctgcctgtaggagactctcttcaccatctttaaggacacacataaactgagagtgaagagatggaagaagatattcaacacaaattgaaaccaaaagagagcaggggtagctatac

SEQ ID NO: 141843 - DNA, 578 bp, Homo sapiens
tcatacagtatctatatatggtggctaaaacataaacagtctgtgaaatgcaatggctcatagaagagcaagactcccagcattgcccagagcaggtctaaagatccagtgaacacctccaccacaccagaccacactcacatactcagctgtgccctcaagtgctctttcatcctgagaccaaccacctgagccccagatctgagattaagcacaggggtttgtcacgcgttctgatgcagatgaggcgtaccacaccctggaaagttgacacaaccaccacagagggttaagctgtgacccgaagctcaaaaatcaggtcctggtcgaagacctctaagaaactgatgcagcaatgataacttgcttcacacaaggaggagctggtatcacctgatcctaattttgggcatatcatgtggaccaagggacctggtcaatgtcacaggctcaggatgacagaggactgcatgccagctttccctgaaccctgctgtcagggtggcatgccctctctgagagctttcagggccatgaatctctccaaagccatttctagtttcagtcaatgaccagct

SEQ ID NO: 141844 - DNA, 1683 bp, Homo sapiens
tagcctgaaaagccacctcagattcagccaacaaagattgctgatttgctccttaagcaagagattcactgctgctcagcatggctcagaccaactcatgcttcatgctgatctcctgcctgatgttcctgtctctgagccaaggaggcccatgctgagttgcccaaggcccagatcagctgcccagaaggcaccagtgcctaaggctcccactgctactactttaatgaagagcatgagacctgggtttatgcagatctctactgccagaacatgaattcaggtaacctggtgtctgtgctcacccaggctgagggtgcctttgtggcttcgctgattaaagagagtggcaccaaggatagcaatgtctggattggcctccatgacccccaccggatcagtctgctgcatcttctacctcctgattatcaggttccagagggtctgatgtctggcacctcaagcatcagtttttactatattatgataaaagcaacctctctataaatcatataatgtaaaggatatcaaggttctccataggttcttcgagataagcttaaagctgaatttcctgtgtgtttcaggcattcacagataaactcattctctgtacttctagggtagcatctttatgtatctattatgtacctcttatctattgtgttatcatctctgttatagaagagccttctgtagaccatatagaaaaagattatagaggaggagaatctactgctggcaattgggaaccgcaaggtatactaaataatatatcaacaactaatggccatctaatgctatgctggatatgaacttttggggcctcaggaaagaaaaaccaggaactagtttcaataatgaggtgtcatggttccctgtggcaaatttagaacacttatcgtttggcaggacacagagaggtaggtgaacattccaggaaagaagcagcttagagaaaatgtggaggaaataatatgacacttagagaaaaaggaaggtttattcttgtcttatgtcttgacctgtttctgagtgcgaacacaaaccaggtgtttctgtctctttctgagtcacgtctgcccctgttctggcccttccccatctagaactgccattatcagtggagtagtgggtccctggtctcctacaaatcctgggacattggatccccaagctgtgccaatactgcctactgtgctagcctgacttcaagctcaggtgagaggcacagaatccacacacttattgccatcctctcctatttatctctgaggatcgaccggggactgggatagaggaagggtgagctcctcattcaggaaatagaggagtgtttcctctttatttttgctgagtcctgcagccaggagggtaatacactctgatcccctcagtctgaatcttctcattgtcttataggattcaagaaatggaaggatgattcttgtaaggagaagttctcctttgtttgcaagttcaaatactggaggcaattgtaaaatggacgtctagaattggtctaccagttactatggagtaaaagaattaaactggaccatctctctccatatcaatctggaccatctctcctctgctaaatttgcatgactgatctttagtatctttacctacctcaatttctggagccctaaacaataaaaataaacatgtttcccccat

SEQ ID NO: 141845 - DNA, 506 bp, Homo sapiens
tggttatatgagtttgtgaaattacaaacctaatttctgggtggtgtcaaagatgggattacctgaaacggattcccacgttgctttgtgatttggtgattatggttcttgacttctctaagagaggaataaaagtgccacactcactaatgaccaaattggtcagttccactcatatgccccctatagcctctttaccatctagcctttccagagttaacctattgtaaaattagattgtaaaaatggacagagtggccaccactctgggataagggtgaaggactcatggtgtcatccccactaaatactccagtggaaattatcacttaattatttgtgatatcacccagctccccaaagagctggccttccttttcagccccagttatcttttggaagtgtaactctttcagtttgattgtcctgggaacacatgcagttttctcttgatggggaaacccctctctgaaggtctgcgttttaagtggcagagatgcaaaaac

SEQ ID NO: 141846 - DNA, 584 bp, Homo sapiens
aagtgtcctgtttggagttggtaagaataatcagcaggaaggaggggagaagaagaaatcatggccatcaaatggtagcctgtttgtggctccttctgtctataccaccacggcccagagtgcttactttcaggctgagaaagagaactactatggtgagctttggcgggcatcttgggctaaggctgacagaatgaagctccacaacctgcccatgagggggactcactgggcaggtttctgcctgcctcccactctagtagatggctcatcggcctgtcctggaggtgagatgtgctaagctgtgctaagcgaacagctgtactcttgaaaaggaaacctgaggccactatcaatctgggttcttcacttgtaactacaacctgataaccaaggatttccacatagggtaaaatgtcctcaagtaaagaccgcaatgaacaaatcaaagattgaacccagaaaagccagataattcagggaacaaattattttagaaaatgttagcatctgcagctgatatctgagaagatatcacaagcctttccttccattaatagaccatgcaattcagaacagccttc

SEQ ID NO: 141847 - DNA, 131 bp, Homo sapiens
gaggaggggtggtggtggagcaacagggagataataaaagtcactgagccagcgagaatagcagaactgcatttcagagacattgctctgcagccctgtgaataggagttgtaacattattattattatta

SEQ ID NO: 141848 - DNA, 488 bp, Homo sapiens
gataggagtgctgcttcctcatgctgcattccagaatcctttctagatgccttcaagatttatacccttaaagttggaaacctggggggcaccttgtgcccaaacagcgctaaattccaggtaacacatctccattcacaacctattgtgcgtagaccctcctggacactgctattgaccgttgactgattatgtgatcaaagattgatgaatctggaagcactggagggatagcaaaggctttcatttttttgtttgtctttttaaatcctgttccatgttccactttgaactggattgaagtcagcagtgaaatcaggagtgtggaagctgtggtaccagaggagagaaccagtgagagagacttggcttatagcaatcagtccagctccagtcagataaaggagacaccagtgagggagtgaacagaatggtagagaacaacccagctgagattccagcatccttttcttctatcatcagataca

SEQ ID NO: 141849 - DNA, 256 bp, Homo sapiens
cctgcaaaatgggcaggaacatctgagcacatgtctttgtgtagacatgattttatcactaagtgggtgtcagatattgtcaaatacttttctctgtctatgaagatgatgatatagttccggtcctctattatattaacagggtggattaccttgactgaaatttgaatgttaagccaatcttgcattcctagaataaatgtcacttggtcatgttgcataacccactgtatgtgtcgctggagggggccgcgcg

SEQ ID NO: 141850 - DNA, 110 bp, Homo sapiens
taaggacctaaaggggttcaacatgtttgtctagacgactctgtggtccttggaccatgtagtccaacctgtgtctttgacctgtgtgggacaagaaaaaaaaaaggcag

SEQ ID NO: 141851 - DNA, 581 bp, Homo sapiens
atgtaccaccatgcctagctaatttttgtatttttagtagagacagtttcgccagatggccaggctggtctcgaactcctggcctcaagtgatctacccaacttggcctcccaaagtgctgggattacaggtatgagccaccacgcctggcctgcacaagattaaatgagataataaatgtaaatgactgaatgaatgactagataaatctttgaaagcctgtttcataaatttttcttggttctcatagtaccttatgcagttttctgaatcaaacctatcaacttgtcaaaattaaatgatcctaatttagggatagtagtgtgtaacattttattattcctctttcaaatcatttgatgttgtttacatgtattcaggtcctttgttctataaatcattcattaaaagcagatgctggaactcccataacattccctcccttagatcaaatgttttcagaggtttgactttggtcttatattcatatgtagttgtaaagaggcctgttgactattaggacccactacaagtgtggtagtccattttcaatatttcacatataatatggagttcttttt

SEQ ID NO: 141852 - DNA, 343 bp, Homo sapiens
agtttttattgttatctgcctctgtgtcacatttcactctcttgattgcttattcggtttgctgaaagtgaaagaaaagacattttcatggtggtgtatttttttagatgtgtttctccctctgatgccttcttatatgcagactcttctgtttgtagcaaactgttgattatagatcacccttgaagctgtatcctcaattcagtttaacatttaccaaacacttctccgtggcacacaaaggttgggacttttaagatgagtaagactcgttgctcatcagagaggcagacttctagtctaatactaatatattaatactaatatattagggtctgtgctg

SEQ ID NO: 141853 - DNA, 185 bp, Homo sapiens
ataattagagcccaataagccctctcttcaacttcaaacttcaggcatgcatgttcaagataaataaattaccattttaatgttgtatttcatcaaatttaagacaatttttttacacattttagcatcagtgaaatagggatgcatcttacaatagatgacaccttagatcagatgaatgtggt

SEQ ID NO: 141854 - DNA, 460 bp, Homo sapiens
agaagagttcttttaaagtctcaattgggccagaaatctgtgtttttgaaagtcatcaagtagttgtgctcattcacatgcagaaagtaatgatgtggcatgacctatagcacaaatgtaagtcagaattccaaagagtgagcgacctctaaaatgtatttagttattccgaacacaaaatagtttctccaaaataaaaccacaattctagttaaaatacaaagtaaaactgaattcataatgcagcaaaaaacattaagaaagagctaccaaattacaaggaaggactaaagccgggtcggtccttcaaggctggcattgttgacattttgggctagataattctttgttgatggagggtgctgtgtgcactgtaggatatttccatcatttgaacataaagtgtgtgaaagtattgctgtaacaaaacaattagtaattctgctgacctctacccatt

SEQ ID NO: 141855 - DNA, 344 bp, Homo sapiens
cattttggctagctcactgcaacctcaaactccatggctcaagcaatcctcccacctgaccttcccaaatagctgggactataggtgtgcaacacaatgcctggcttttttttctttctttctttgttttctttttctttgtagaaaagcggtctcactatatttcctaggctgatcttgaactcctggcctcaaatgatcttcttgcctcagcctcctaaggtgctgcgattacagacatgagccaccatgactggccagttattttcctttgataatgctgtgtttaagttctgtttgtttaaaaatggacccagtgccatccccaaacaagagaccgcctt

SEQ ID NO: 141856 - DNA, 313 bp, Homo sapiens
aaaaaatgtgtacattcaggctgggtgcaatggctcatgcctgtgaaatgggatagtccatgtttcacatgactattttgaaaatagtgggttgagaggccgggcgcagtgtctcacgcctgtaatcccagcactttgggaggccgagacgggcgggtcatgaggtcaggagatcgagaccatcctggctaacatggtgaaatcccatctctactaaaaatacaaaaaattagctgggcgaggtggcgggcgcctgtagtcccagctactcgggaggctgaggcaggagaatgtcgtgaacccagggggcgga

SEQ ID NO: 141857 - DNA, 216 bp, Homo sapiens
ggaaagacttgccccagtgattcaattccctcctaccaggttcctcccacaacatgtgaaaattcaagatgagatttgcgtggagacacagccaaaccctatcatatggtcttctgtatttctgaccttgaaatatcttgagagtttcctctgctaacagagtgaaagttgctcctggccagaactttatttctgcattttaatggacaaacataa

SEQ ID NO: 141858 - DNA, 646 bp, Homo sapiens
ttttcatagaaaatttagttttgccatgtagaattgaaaaagtgatagatggtgttacttccaatggaagtacttacacacgcaatagaaaaatatggttttcatcagctggctgtttaggcagggattgactgtgagtctattaatagatggcattttcatgaagaagtctatttatgtattgcactggcttaacatttgatgcgtgtgcaaaggagctattcctacaaaaggtgtagtaacacttcagaacccaggaaagtcctcagaggggaagcccacagcttctgctggaaagaagaaagcagctcaaaagagaaatacagaaagttaacaataagttaagaccacatgattatgaaatcaaatgtagtgaaactaatttttataaaagcagaccaaagataatatatttaaaggaagttaagcctgcttcaatcaaattagttatattcttgttctaattatgttgctattgcccatggcacattcttttgaacatatttagtggcagatgtttgtccagtgattttagtcaatactttacataatttggaatcatcttatgagtaaaactttatcatttacctggataaatgcatcatatttatgtaaaaatcatcatatatatataaatcatcataca

SEQ ID NO: 141859 - DNA, 302 bp, Homo sapiens
gtctctttgtttacttaggtcttctttgatttgttccatgaacatttgttaagtttatacctatgaatctcattttcttttgagcaattgcaaatgatgatgcattttaaatgtaaatttccaggtctttattgttagtatgtaaatttttgtgtgttgatttttgtatcctgcaaccttagtgaattcatttgttgtgggaggttttttttttttttttttgatatgaagtcttgctctgttgcccaggctggagtgcagtggtgcaatctgggctcaccacaacctccgcctcctgggtt

SEQ ID NO: 141860 - DNA, 399 bp, Homo sapiens
gaagaggcagaaacttagagggagagagagaagaacagagagccagcaagagaaagagcagagacagaggagggaaagagacggaagagggggaaatacaccagagatggggagaaggggaagaaggagggggaaatacaccagagatggggagaaggggaagaaggagggggaaatacaccagagatggggagaaggggaagaaggagggggaaatacaccagagatggggagaaggggaagaagaagggggaggggaaagaggttgtcagagagcaaggaggagacagactcagatgaaagggcagagacccagagaggaggcaggacaaagcgggttgcggggagggagtagaggacagggacacaagacccagggagtgcggtacagagccccag

SEQ ID NO: 141861 - DNA, 338 bp, Homo sapiens
ataacaggccactgtgcataactttatgtcaatacattaaaaaatccaaacaaaatacacaatttgctaatacaaataatcaaacctgacttaagatgaggaagaaaactggccaggcgtggtggctcatgcctgtaataccagcactttgggaggccgaggcaggtggatcacttgtggtcagagttcaagaccagcctggccaacatggtgaaaccccgtctctactaaaaatacaaaaaattggccaggcgtggtggcaggtgcctgtaatcccagctactcgggagactgaggcaggagaatcgcttgaacccaggaggcagaggttgaagtga

SEQ ID NO: 141862 - DNA, 1488 bp, Homo sapiens
  misc_feature (1006)..(1006): n is a, c, g, or t
  misc_feature (1009)..(1009): n is a, c, g, or t
  misc_feature (1012)..(1013): n is a, c, g, or t
  misc_feature (1015)..(1015): n is a, c, g, or t
  misc_feature (1488)..(1488): n is a, c, g, or t
tgtttccacagtactttcagtttctcttcgtttgtttttcttttatttttcttgctcctctttctacacactgaagttgctgttgttttacatttaccttttatttatttgtagtttttgaggcaggttggagtgtaagaatgcaatctcggcttacagccgcctcgactttccaggactccctcaggtgatcttcctatctcagccttccaagtggctgagactacaggaatcacttaattctgtgatgtcgaagctgaagtgagccgtgatgatgccttgccctccagtctgagtgtttcagaaggtggagtttcgctcttattgcccaggctggagttcagtggcgtgacctcagctcaccgcaacctctgccgcctgtgttcaagagattttccagtcttcaccctttcgagtagctgaaaccacaggcaaacacctccaggcctggctaattttttttttttcatagagactaggtagctccataatggtcaggctggtctagaacacccaacctgaggcgtaccacccaacttgaccacccaaagtgctgagattaaaggcgtgagctccgcgtctggccataacatcttatcctatagaagcccagagaggttaggcgtcatctcacgtgtcgaggtgatctcgaacttttaggctccagagatcctcccgcatcggcctcccggagtgctgtgatgacacgcgtgggcacgacggagtttcactcttgtcgcccagggtggagtacgatggcggctctcggctcaccgcaccctccgcctcccaggttcaagtgattctcctgcctcagccttcccgagtagctggaatgacagagatgagccatcgtgcccggctaatttttctatttttactacagatggggtttctccatcttggtcaggctggtcttcaacttccgaccgttggagaatcttaactttcttggtggtggttgttttccttttacttatagattcttttcttttctttccttctnccnccnnanagagacacaccctagaagagtcatcatcaaacaacatccatacagtcagacaagaaaaaaagaacagcaagagaccaacgaagaagaaaaaccgggaacaagaagaaccaaaacatggacaagaagacaaacacagaacatacgagacaggaaggacgcgaaggacgacaacaacgaaaaaggaaaaaggagagaaaacagaagaaggaagaaacaaacaagagcaaaaaacaacaacaagaaaacgagggcaaaaaagcacaacgcaagacaaagaaacacaagaaaaaaaagggaaaaagaggaaaaaaaagagagggacgagaaggagcagagaagagaaacagagaaaacgaggaaagaaagaagaagaaaagagagagaacaagaaggaaaagagagggagaagggaggaaaagagaaagagaagagcgagaagggaagaaggagaggacaaagccgccagcgcacan

SEQ ID NO: 141863 - DNA, 1312 bp, Homo sapiens
  misc_feature (830)..(830): n is a, c, g, or t
  misc_feature (833)..(833): n is a, c, g, or t
  misc_feature (836)..(837): n is a, c, g, or t
  misc_feature (839)..(839): n is a, c, g, or t
  misc_feature (1312)..(1312): n is a, c, g, or t
tgtttccacagtactttcagtttctcttcgtttgtttttcttttatttttcttgctcctctttctacacactgaagttgctgttgttttacatttaccttttatttatttgtagtttttgaggcaggttggagtgtaagaatgcaatctcggcttacagccgcctcgactttccaggactccctcaggtgatcttcctatctcagccttccaagtggctgagactacaggaatcacttaattctgtgatgtcgaagctgaagtgagccgtgatgatgccttgccctccagtctgagtgtttcagaaggtggagtttcgctcttattgcccaggctggagttcagtggcgtgacctcagctcaccgcaacctctgccgcctgtgttcaagagattttccagtcttcaccctttcgagtagctgaaaccacaggcaaacacctccaggccgtcatctcacgtgtcgaggtgatctcgaacttttaggctccagagatcctcccgcatcggcctcccggagtgctgtgatgacacgcgtgggcacgacggagtttcactcttgtcgcccagggtggagtacgatggcggctctcggctcaccgcaccctccgcctcccaggttcaagtgattctcctgcctcagccttcccgagtagctggaatgacagagatgagccatcgtgcccggctaatttttctatttttactacagatggggtttctccatcttggtcaggctggtcttcaacttccgaccgttggagaatcttaactttcttggtggtggttgttttccttttacttatagattcttttcttttctttccttctnccnccnnanagagacacaccctagaagagtcatcatcaaacaacatccatacagtcagacaagaaaaaaagaacagcaagagaccaacgaagaagaaaaaccgggaacaagaagaaccaaaacatggacaagaagacaaacacagaacatacgagacaggaaggacgcgaaggacgacaacaacgaaaaaggaaaaaggagagaaaacagaagaaggaagaaacaaacaagagcaaaaaacaacaacaagaaaacgagggcaaaaaagcacaacgcaagacaaagaaacacaagaaaaaaaagggaaaaagaggaaaaaaaagagagggacgagaaggagcagagaagagaaacagagaaaacgaggaaagaaagaagaagaaaagagagagaacaagaaggaaaagagagggagaagggaggaaaagagaaagagaagagcgagaagggaagaaggagaggacaaagccgccagcgcacan

SEQ ID NO: 141864 - DNA, 671 bp, Homo sapiens
gtccagtgcttctgtattgatgtagaatgttcactgagcagcttgtaggagaaaaagactgccttaatttttgggcaaaaagttagaagggaaattgctttgcatttttctctccataatgttaatgaggaaaagaggcaatgctggaggaaaggagataaatggatgtttcctcccttccctatttaagctgcctaagttgactaaagttcgacttgataaatgtcctagttaatttaattttgtgttagtgcctctcctcccctcgagtgtccagtccattttcagctgacttgcagaaaaaccaggttaatgcaaatccatcagattctgcatgcctgttaaaatgcttaagcattctacatggcgtgggagacatgatgcttgcctaaaagggtccctggagagataaagtatattcctgccagtgcatttagggagttatacatatataactgtctcatatgatttggcattgtcacatactgagcactgggagagccaaaggaggtctggggttggtaggctgtttggaggtaaaagtttactactggaatagtccttccagctcagccgcttccatttccacattgcctcagaagttgcctaaaggatgtgcatcttgttggcagccccatgactttctagaagccctgttgtgtctgtttagt

SEQ ID NO: 141865 - DNA, 599 bp, Homo sapiens
acaggcacacaagcagggcctagtcacatcattagtctaaccctgaacactctgcatttacccctgtcaagagacttggggttcccgaggagaagaagcaggaatctactgtgtgaccacctaggcagtgagaagtcatgggaaggaggattaagacaataatgaggtctggcaggtgtaatctatcttgacaaaaaggccaagtgacacccacaaaagtactaaggaaaggcactatttccatgaaacctcaacatattttatcttagggttgacatgttatttctcacagtaagaatctgcgctttagtggtttcataattaggtagaagcagatgcggttataaatgtaagacagttataattgttagtggtctatgccatcctccatgttcattacccagatttaaattagcttttcaagaaaaccctgatgataatgcaactatgtaaaaacccacccgagatctgagcctagaaacaggagttttcctatcttccttgggtagcttgtagacaaaggtattatgagtcctctggccaaaaagagaataaaaagccaggtaaattgtaacatcctgcactgcagaggcctagca

SEQ ID NO: 141866 - DNA, 330 bp, Homo sapiens
cccaagtagctgtgattacaggcatctgccaccacaccccgctaatttttctatcaatacaggcttatatggttcccctctagaatgtagagattcctgaggcggtgccagactaggtccctaaactcacagcatgaagggcttttgagaattctttcttcctgttgggagaaagtgagaagataaaaccagaagttgcccagacgtgaaagggcagaaaaagccccagcagggattgagaaggtccctctactactatgccaccaccttacctgcttgcctctgagtttaatctttgaaaaaatttgcattgtaaggttttagaggcac

SEQ ID NO: 141867 - DNA, 153 bp, Homo sapiens
tgtttctaacctagagtattcccagattacccaagcttgtctacattgctaattatgaaccaacactgacttgtcctctccaaatggtatttaatgaatacagaaatcaagaatagaaggatgcctaaggaatgtagaatataaaatttgata

SEQ ID NO: 141868 - DNA, 545 bp, Homo sapiens
aaaccacttggttggaaacttacgatgaatccacgggtgcgtttcctcacttgtgagaaccgaagcctggctaggtccttgctgccggggtcaggttcctgtggctgttcaaacgcccctgccctcatcaccagggactgaccccctctagtgctcccagcactcaagtctgggggtgtttttgaccttctgaatgtgggctttcttttcgaactgcggggaaggggactccttatcttaactgatcagaaagtttgtgtttcttccctttggactccttgatcaaatattaattctagccacccttaattccagtttcccttcgctctgggtaattttgttcccttgcgtgaatgtgtgcgatttttagtttctttggtttctggatggaatttattgtgagcttgttcaggttcttttaaattttcttgtttgtgtgtgtttatctgtgtggtttctacccaagagatttcgcctatgttggagtgccatgatgatgcaaaatctctgtatgtcatttgttccgtatataagtggttccttgt

SEQ ID NO: 141869 - DNA, 283 bp, Homo sapiens
gtttcctggggaatgactgtgcagccccgtgagcaaatccagaggggccctatcctccttcctgtcccttgtacctatggaaaaccaacaggttccctaagcccaaaagcagaaagccgaagtcaactttcacctactctggaaacaccctcctctgtcgtctaggtggaaaacaaagctatttttaaaggttttttcaagaatttcctagaatgttttcttccaggataccctcataataccctagaccaccaagtcactggggacccagagaaatcatctg

SEQ ID NO: 141870 - DNA, 207 bp, Homo sapiens
tgctcaggtctccagcctgacgcagatgttgagtgagcacacacactataggctgtcctggatagtgggacagtccctgctatacaagcaccattcagtggacactggaagtgaacagatgagaccaaaccgccctgcaggtcctaagacaagggcagcacagagccctaggggacatgggtcccatccagacctgagcaagccagg

SEQ ID NO: 141871 - DNA, 463 bp, Homo sapiens
agtaggcacagaccacagtaggagtagcgtgatacagggtgatgagtgtggggaggaatggggtgggttagtatgtcaacactgtcattttatttatacgtgttaaatacggggccagtggagcttagagtggacactttacctgagacggattttggagtcttgaatgtccaacccaggaaagagaagcatgttgtctgggaattgggatatgactacctcatgatttcactgtgaatttaaacagattgaaggagaacaaggtcatttttcaaggaataatttacaagatttagcaactgaaggagaggataatgaataaagagagtcaaaatgacactaaggttttaagagtgtgtgactgggagaataatgacatcttatctcctttataaaaaataataaggcccaggctcagtggctcacgtctgtaatcccagcactttgggaaaccgagacgggt

SEQ ID NO: 141872 - DNA, 136 bp, Homo sapiens
ataataaaattgccagatctacctctgtgacctctgtcatccagcagactacatctcttgtttagaaagggccttttttacttcacagttatgcccattaatagtgtggcatttctgaacaacaattttatcaact

SEQ ID NO: 141873 - DNA, 526 bp, Homo sapiens
tatcacccccaccctgtagagttcagcaaataggacattttgtctgaagctgcagggctgctacatgcctcaaatgcccctgccaagtggccatggtggaggggacggcatctgcaccctggatattcctgacctgtcccagaagcaggcaggtgacaagtgaggcctgagggggaatgacttgtaaaaggctgctttgggccggggattccagcagaatggggcaggctcctgtttttgagagtcaccggcataaggaaatgattgcaggggtgcccaggaaaccgagggctccaggacactgggttgggttgtagctcagcctggtccctgggagcccagtggcagctcatggccaaaatcactcagcccctcttcacacccgaacccagcttccttctccggagccatcactttttgagcaccaatcatatccaaggcctggtgtaggcctgtccagctgagttccacacccccaggctggccggcactcccagccctggcagctttctagggcagaagctca

SEQ ID NO: 141874 - DNA, 308 bp, Homo sapiens
tcgttatcattctgtttgataaacacctctggtccacaggacttttggcctagcattacagtatgcaatgtttttttcccttctgtaaatagccttggtcaaaaagcaaggaaacttgtgaattctctggttctgtgagatgctgtggaatacatccttttgttcttccccactcaagaaaactcttggttatcgcgtcattgggaaggaacacgttgcatggcaactgaagacactcacatccagacttgactgttgagagaaaggagctggcccctgggaaatacagaggctgctgagtccttaga

SEQ ID NO: 141875 - DNA, 428 bp, Homo sapiens
aaaacagtgatgggtcactggtgattattctttgcccagtaacaaaaacctaggagggacagaagctcagagtgatgatttttgctttcttttactctcaatgtagaactgaatgtgtagctgggaagtgagctagtttatttaaaaatcaataaattgtgagctagccaatttgttgtgtttatctgcatgacttacattgcagtgactagattattcactattacttctcaattggaaaggaaaaatactactggtcaaaagggaggaaagtagacatggatggaattggagttgaaaacaggcatttttagccatgtagagttcttatggttctctttggtagtttttctttagctggtcagtttgtattgtcctcatttagtagacgtagatgcacgaactgattaattcatttgttctagggc

SEQ ID NO: 141876 - DNA, 359 bp, Homo sapiens
ttcgacggtgttctaaattctccatgttaggccgggtgcagtggcttgtgcctgttatcctagtgcgttatgaggccgaggccggcctaattgtttcttgacagttggttattagtaggtagaaatacacttgagttttgtaaaccaacctcatatcccacagcgttctaaattctccatgttaggccgggtgcagtggcttgtgcctgttatcctagtgcgttatgaggccgaggccggaggatcaccaggagttagaaaccagcctggatggcgtaatgagacctgcctctgccaaaaacagattctcttgaattttctcttgcacacactgctgtgtcatctgcagataaacacag

SEQ ID NO: 141877 - DNA, 526 bp, Homo sapiens
gagctttggcatctatctatccatgccagaccttacgctgaccagggaaatcactaccttttgggggagggttcctggattatcagccttaaaaactcactcagtccctcactgtgagggtcgtttctaacatgacaccggggttcttcactggtgaagcagattctctgcttctacttgtaggtggtccttagcatttaccacaaatacctattcagaaaatctcaagtaacatttgtcctttgattttcaaatgagagtacttttttttttaagaatgcaataatttccctttttttcatttttttctgccttttagatgtttgaatttatttattatttattttaccccaaatagtcataccttcatatttcacatgtcgcttcttcttatgtatttcacagacttctagaaagtttttgttttgttttttactttgctctgtgcttggcttaaagtatgcattcagctgagattgttgctgcactgggaaactcttattttgactcaaaagtgattcgttga

SEQ ID NO: 141878 - DNA, 296 bp, Homo sapiens
aagagggggagtctcaatgtgttgtccaggttgcacttgaacttttagtgtcaagtgatcctcctgcctcagcctcccaactacctggggctacaagcacacactactgcacttggccatgaatttggttttattactcttatcattaaggtactgttaagagctgtctattattgatgagatcagttgattcagtgcagacagttcagtgctaagttcctgaaaatattttgcaagtttaactcaacttaaaattctaaaaattgttaagtagaaataagctatactcttagaaa

SEQ ID NO: 141879 - DNA, 292 bp, Homo sapiens
tcaagaggataaaaaggtgaaaaggcaagttacagaattggagaaaatattttcaagatagatatctgacaaaacactagtatctagactacatactttctatatatgcacacatacatataaattttatgatacatagtaattatatatacatacatataacgtgactctcaaaactcaacaggaaaacaacaaagagtacaattagaaaaagagaagaaaaaaagaaaaagggtaagcgatatgaacagatattctataagccaccaagaggcttacacagatgacaaat

SEQ ID NO: 141880 - DNA, 117 bp, Homo sapiens
ttgataaacattagcatatgagtggaccctcaaaatcaaacctgtgttgttcaagttttaagccctgagagctctaagagtttaaagctaaaaacaattagaaaaaaaagggcggtt

SEQ ID NO: 141881 - DNA, 453 bp, Homo sapiens
cagtgtgccaggctgtgcatgaggcactggggtatgctgctcctcccatcatgagaagtgaccaccaagaaaatgggcaagcgtgatgggcgctagaagaaaatgaaactgggtagcagaacagagagggaccgaagcagttactttaggtggaggggtcagagacaacctctctcacagggtgccgttttacaaggagcggaaggacaaaaagaaccagacaggcaaagatctggaggaagatcatgccaagcagcaagaacagcttattcaaaggctgtaggagtggacccagctcagtgggtagaagaaacagaaaggtcgggagactggagtacagtgagccagagaaggggtggtgaggctggcaagggttggggccaaatcccaggaagcctctggagagcatggaaaagcatctagaatgagcgtcttaataaatgctttttccgg

SEQ ID NO: 141882 - DNA, 326 bp, Homo sapiens
gcctctttatgttgcttgcgtagcagtcatccactgaacatcggcatatgtgtggcccagtgggaatgttgcaccctaagttcctagcaggacgccaggcagcaactgtgcaatccaactccttggctcatcatctccatcgcacataagtgagcacacacactcactcattccacaaatatgtatgagtgcctattttctgccaggagctgagcaatacggtatatgcccaacccatacagggcttagcaaagtgcctaggtgccaaacagccaggaaacacacatgcaaaatatatacggccatacaacacagggactcctttc

SEQ ID NO: 141883 - DNA, 400 bp, Homo sapiens
taaagctgaacaatgtactctatgcctccgcagttttgttcctaaagtatacattgaacagaaatgcatagagatgttaccaaaagacacacacacaaatctagaatttggtcaggtgcggtggctcacacctataatcccaacactttgggaggctgaagtgggaggatcactggaggccaggaatttgagaccaaccttgacatcatggcaaaaccctgtctctacaaaaaaatacaaaaaattagcccggtgtggtggcacatgcctgtagttctagctaccctagaggctggggtgggaggatcacctgaagctgagggagttcgaggctgctgcagtgaactgcaatcgtgctacttactgcacaccagtctgggtgacagagcaagaccctgtc

SEQ ID NO: 141884 - DNA, 491 bp, Homo sapiens
aggaggtcagggtagccagaatagaggtgagatcagagaggtaacaggagactgaaatgacccctccaggccatttgtaaagacttggtttttactctgagtgagatgggaagctattagaacctggcacaataaaaggtggcagtattattgaaatgtctcaactctaaacttgtttgaaaactccacaattatctttttaaaaattcaggcaacttaaaacacttctgcttttggatgaaatcgtatccacttatggcagtgatgatataattggaatttctgggctagcacactgttaccaatgataccagagctgtggctcaggagtttattcatccatttattcagacttgaggataaaagacaagagtgacacatataagaagctcaaggatagtggaggaagacaaatatacataagcacaaaaagtcactaaagcaccatgacagacaactgtatcatgtgcaaaatgacctcacaaaacaag

SEQ ID NO: 141885 - DNA, 543 bp, Homo sapiens
cctaatttagaaccttgtctatgaaaggtacctaatatatttctatacaataaataactagataaatctctctgtcttgggacagaaaacactgaagagaaggtatattagagtcagaccaatgatcagaacagaattggaagaaaaagaaaaaaaaaaggtaagaaaatccttaatatggcttataaagcttgaaacgatttagcccttgcccatcagaccaagcttctttgatgctttaaacctgccatgcttcttttcccttcaaggtctctaagccatacatagttctaacaacccattatttttccctaagttaattctactcatcctcagagctctgctcaaatattacttcctcaaagtagctgtccttgaccatcccccactctaactaagccagctaccactataagaagttcataacactctgtacatctccttatcacaattttaaataaaggcacctttcctccctacaagaatataagctgcatgaaggcagaatcctcatatgtttgccttactgcagtgattaaaata

SEQ ID NO: 141886 - DNA, 678 bp, Homo sapiens
ggtctcaaactcctgacctcaggtgatccgcctgcctcacctcccaaagtgctgggattacaggcataagccaccacgcccggcccccaaaatcaactttttaactacaattgtagtaacttcttattatatttaatatgactcatcacaaacaacagaatgaaagagtatatcataacatttaaacctaactaatatgaagacctacttctctattttaaggcacaggaaccttaaaaacatggctatttcttgaaacaacaaattacaaaaaataaaaataaaaaaataaaggagaaagctatagattgattttaaaagacttaagggttatatcaaccagatgcaataaatcaacgttgtttaaatgctaatttgaacaaagtataaaaagaactgtaagataattgagaaaaatttgaatttgaccagcaggtgtgagccactgcacccggctgatactatgatttttttaaatggtcatttagagatatatattgaatagttttggatgaaatgtctgcagagattcaaaatgaaccagtagattatgtgttgataattattgaaactgggtgataagtattaatacatagtgattcattatattctctccacttttgtagagatgcagtttaaaagaatcagctggaagacaaaaaaaagcaaaaagatttg

SEQ ID NO: 141887 - DNA, 126 bp, Homo sapiens
tacccacaagaaaaggaaagcagccggcccggtctaaatacaaaagatttactgtcaacaccttgaaacttggaaagggtccattacatgccagcatcagacttttggtggagaagcgcggtggtg

SEQ ID NO: 141888 - DNA, 436 bp, Homo sapiens
tgcttccatttctctaaggtaaatatttaagagtagagttgttgggtcatacagtagatttatgtttaagtttcaaactaccaaattattttccagattataccattttacattcccacaagcaatacataagagttccaatttctccctttcctcaccaacacttgttatgatcagtctttttaacattagacattctaataggtgtgtaatgccacttcatggtggttttaatttgtattttcctaaagactaatgatggtgaacacctttccatgtgcttacttgacattcatatattttatttggggaagcacctgttcaatctttcacctgtttctttttcttttttttttttttttttttttggacccagggggacccccgggtcccgcccccaattccgaacccgggcccttccctgtcccggggggga

SEQ ID NO: 141889 - DNA, 167 bp, Homo sapiens
ctacttgcccttgagtccttgactccgcttttggaagaacccaaaccaagatcatttgtatgtggatgcacgtgtgtgcacgtggagagggtcagcgtcaggacgggtagaggcggggagttgctgacttcctggctggggaatggcactggtagacgaagattctg

SEQ ID NO: 141890 - DNA, 291 bp, Homo sapiens
gctcttcctgatcagtggcagtgggggttggggagtagagtgatggctgcatttctcttcccgtgtaagtgtctgagtttgtgcaggtgccaggcagagtgtgatggggtggcatacatatgtttgtgtagactttgtgactaaggaattgtgaatgtgcatgggtccacaagtaggagctatggggtcccagagactttttccttctctctgaggctccaggatggtgggcccctgggctcagtaccttgtggttcccaaatttgtgtgtctgggcaggatgggcacagg

SEQ ID NO: 141891 - DNA, 416 bp, Homo sapiens
caccctcccaagtaactgggactgcaggccccttccaccaatcccggctaattttttgtatttttagtagagacagggtttcactgtgttagccaggatggtcttgatctcctgaccttgtgatccacccgcctcggcctcccaaagtgctgggattacaggcgtgagccaccgtgcctggcctacaatggtattcttactaatttaactctctattcccatcattgcagcccaagactgtgctgatacacttctttctcctctctctcaagtgtctattctgttccaaatactacattagtagctgaagacaaatgtgtgaattaagacaaaagctttgtcctaagtacccctcaggtagaataaaatacatgcaagaaagttatggataagggtacaaagaggacaggaaggag

SEQ ID NO: 141892 - DNA, 509 bp, Homo sapiens
gattctcctgcctcagcttccggagtagctgggattacaggcatgtgggaccacgcctggctaattttttgtattttcttagtagagagatggtttcactatgtttgcaatctgcccgcctcagcctcccagagtgctggaattatgtgtgtgagcccggccaggggagaacttttgaacacttacctgtgttctatgacacagatcctttgggggataacaaagatcctttgggggacccagggtggactgcagggtggagtctgaggaaggagagcacccagtccaagggagagatggtgaagccagaatgaggcaggtgagtgggcgtggggatgctaaacccccagagccagtaggagccctccctagcaggatcaatcagacgccatcaggccttcccttcacggagggtcgactccactgcagactgtttcccaaaaggccaaatggacggacacatggcctttttgctatctcagccctcatgccttgagaacatattttac

SEQ ID NO: 141893 - DNA, 470 bp, Homo sapiens
aactcctgacctcaaatgatccacccacgtcggctttccaaagtgctgggattacaggtgtgagccaccgcgcctggccagaattatgtttttgattgtcttttagatgaatcttttataaatatatggtaaatagtctggtttaaaatagctcttatatcttgtgtttcttttcagcctgttgatttagttaaaagtctcagatgagaaggagatttgcaggataagtgccaatattatgacttaaaattactgctctgaatgaacattcaccccaaaataggaccagtctgcttttcagcataatcatactgtatgcattttgagtggcagggcagtagtcattgaaataatacattccttgtataaagttttcatcccgtacaaggtgcataagtgggtcaggggcaatattgagccatagcgttgagcagcgttgagtggatgcttggctgtgcccagtgacccac

SEQ ID NO: 141894 - DNA, 143 bp, Homo sapiens
ttcatgtttgtttccttccctttgagtctctacccacacgtgtcacaaagcagtgaccgtgagaccaccttacgtcttaatgtctaatattcctctgagtgaattaagcatttaaatagccattcccgctctttatttaatat

SEQ ID NO: 141895 - DNA, 332 bp, Homo sapiens
gaacagcgctccatgggctgttggatcaaattgattcctagatcccagtgctgtggaatctcagaatggttcatatgaatcagtgtgatgatggctaagggatagtttggtctttttgtacctgatgcagcctcttggctgggaacaaagatggaggtgccttggcccacttcgagttctgctttccccggccttccctggtctccaggctttgaagtcccccatgttgtttgaatgtctcagaagaccatcacagtctaatggttaagaattgggttctggggccaggcacggtggcctgtaagccccgcactttgagaggccgatgcagg

SEQ ID NO: 141896 - DNA, 388 bp, Homo sapiens
tgccctccccttttctacctaaaagcagagcataaatttcccataagtaccctccccgtaccaggaagaagagtagaacattcttatcattggagatggagagttgatactgagatgaatctataaaaacaaatcttactaaaataacttatatcttccattagtttctttatatattttatagtcacttttccacaattcactacccctagcccaagcctttttttcctttgtcttgccacatctttacaatttattgccctttgttaaaatggtatatgagcccctaggtctaacggtcctttggattttcatttttttctatgaagcctctcatgttatataaaaatactaattaatatcaaataaaatgtgtatagttttcctc

SEQ ID NO: 141897 - DNA, 427 bp, Homo sapiens
agccagagttcacgagggcaggcgtgtgctttgggtgttcagtgggtgtccacaggaaccacacagtggccagtgtggctcaggtttacagaacaaatgggagtgtgtcagaggccaagttgtctagggctttgggagttgagcctaaggagcctggccttcatctggagggcgctggaaccacaggagggtcccaagcaggaggggaatgctcacttgttaaaagtgtagaaattggattgaagtggagagaaaggaggtggggaggcagtggcagaaaaatgtaaggttacagactcagaagagatctgactgagtgtggtggctcacgcctataatcccagcattttgggaggccaaggcgggaggattgcattacccaggagtttggcagcttagtaagaccctgtctccctgtctctactta

SEQ ID NO: 141898 - DNA, 478 bp, Homo sapiens
tctatattgctcgacactggtttttctttcttttaaattcaacacaatgctattgagatctatccttaaaccttctggacagtgtcgtcctactcacatcatcttcagacaatgtcacatcaaaagatacttatgtaaggtgccatatgcatagacaaccagagcaagctctaagattaactactaagcaggcaaaatttagtcttcagtgttgctagaataaatagttttcctttatcttgcttcctctgcaacacataccaagatgaaggaactccaggcctcctcttcctctccttccacattcttcccaagtaaagaacaagaaaatccacttataaaacttaacgctgcacattttagggagacagcatcaatttaaaaaagagggtttccgggttggtcagagctgggctataacacatccagttgttgcatttactaattgtgtcatcctggccaagctactcaccctctc

SEQ ID NO: 141899 - DNA, 673 bp, Homo sapiens
gggactgttacccaggcatagttctttttctccagtgtaactaggtaaaaaatcagtgggaagctggttagtgagtgaacaagactgaggtaagaataatctatactattaaggaaacctgtgaacttcttgtatttctaattcagattttgctatcaaacatataactgatatgagaagccactttttttaaataatcaaagctgattagaaaaacaagagtttagaacacaactaaacaaatttactgataacatgctgttacaaataaagtactgtaaatggctttgagtttttgcaaaatccagatttaagctgctttataaaaacgagatttctaaaaagtcatgtgacaaaactgcatgacatgtaaataacatatcacattgttgagagtctaggggagctgttttgacactgtgtatatcattggattcactcagtcttccagaagactaccgttggtccagaaaactgtcatatcaatggatgttggttttccaggaccttttttttcacatataataaaacttattgaaacgtaacagagaagtgcacaattttaagtgttcagcttagtgaattttcacaaaataaagacacacattggccaggtgcggttgctcatgcctgtaatcccagcactttgggaggctgaggggggagcggatca

SEQ ID NO: 141900 - DNA, 525 bp, Homo sapiens
atgccaagaatgtataaccagacgtctaatgtctgttgagagtgctgcgtggggatggggcagtgctttggggaactggaggacagttctgtgcacagaagcctctgagtgaggaaaagagaagttgggaactcatattagaaagttcccaggagccaggtggattgcccaagggtttgtggggcaccgcatgggcttggtttttctcagaagagcagaggttgcataagataatcaacgggtataaatgttcctggcaagtgttatctgtttgctgctgatatctttaaggtgacccagctggttgcaggacttctgcctgtaagagaaagttgtaccttggcagaagggcaaaacctccaaggaatgaggctgggggagagaatagagagggaggaagagacagtgttgtcagtggcagtgctggtatccagttcatgtggccacagctgctactgatggtggaggtgatggtgatgatggtggtcacagccagcctagaaaaaggaatttggacttcttctc

SEQ ID NO: 141901 - DNA, 348 bp, Homo sapiens
attccccaccacccagctaccttttcagctccagggaagaacagcacaggaagcacagcaggagccctcaagaagcccccaggttcacttccccaggctggaggaatgcgacacagaccagcaggcactccagcctggggcacgcatatgcagggcttggaggtgccacagacacgggtggcctgggcgatcttgctgtagccaaagcaaccgagggacaccccaatccccagaggctacaaagcagagcaaagctgcttctggtggactagtctgagttacatttatttcctgaaggctgtgatatgctacagaaatgagaattcatttcttcttctttttcttttc

SEQ ID NO: 141902 - DNA, 682 bp, Homo sapiens
agagtttcctgggcagcctaccaggaggtgggaggaaggtcctcgttagcacttttgtgaggctgctgggaagccttggatattgcgtgaaacagccaaggtgcagaagtgtccgaagtgaggcgcctagctgtagaactgcccgagagatttgagaagagcagagagaaaatgaaaaatatatatacagcctcggtagtagaatgaaatacataaaaatatacatttatttataaaatattaggttggtgcaaaagtaattgcggtttttgtctttatttatctattttgagatcaagtcttgccctgtcacctaggctggagtgcagtggtgcgctccagattttctgcaacctccgcctcccaagttcaagcaattctcgtgcctcagcctcccaaatagctgggattacaggcatgcaccaccatacctggctaatttttgtgtttttagtagagacggggttttgccatgttgcccaggctagtcttgaactcctgggctcaagcaatccacccgcctgggcctcccaaagtgctgggattgcaggcgtgagccaacacacccagtcggtttttgccattttaattgcaaaaattacagttacttttgcactaacctaatatttatagactatggatattagttacattaatataccataagtatactgtacgtgtt

SEQ ID NO: 141903 - DNA, 224 bp, Homo sapiens
gcgtagtgaactgcttcggatggtttctgcttctggggaggctcaggaaacttaaaatcacgggagaaggcaaaggggaagcaggtgcatcttatatggccgaagcaggaagaagagaaggggggaagagaggggggcagagaaggtgccacacacttttaaacaaccagaacttgtgagaactctatcacgaaaacagcacaaaaggcggaaatccgccccca

SEQ ID NO: 141904 - DNA, 533 bp, Homo sapiens
tattgcaagacagtacataaaaacagacatacagcaagtttaacaaaacaatatttaccttatagcttgtgatttactctggtacttgtattttattttttttcaaaaaaaaaaattacgtctcatgaaattggtcacattacccactaatggataatgattctcaaagtgagtcactagtgcggagaaaagtgaatgggacttggccagcttggacaacacagcgaggccccatttctttaaaaaaaaaatttatagccaggtgtggtggcacacacctgtaatcccagctactcgggaggctgaggccagagaattgcttgaacccaggaagcggaggtttcagtgagccaagatcacgccactgcactccagcctgagcaacagagcaagactccatctcaaaaaaagaaaaaaaaaaaggccttggaatggccaataggggaaagcccagctccacctttctaatcccattgaggaagtttattagggacacccctaatgagccccgagcctgtaggtaaggctggggg

SEQ ID NO: 141905 - DNA, 107 bp, Homo sapiens
agaagccgtcctctgagggcacaggaaggggatggggtcaagtgcagaggctgaggccagaacaagttcaaagcagcaggaaggagaggatgttggattctcttaat

SEQ ID NO: 141906 - DNA, 834 bp, Homo sapiens
gtggtgacatgcgcctgtaatcccagctactcaggaggctgaggcaggaaaatcgcttgaatccgggaggcggaggttgcagtgagctgagattgtgccacagcactccagcctgggcgacaacgcgagaactgtctcaaaaaaaaaagaaaaattaaatttcaaaaaatattaaaaatcaggaaaaagggatagtgagtgattgagatgttactgttgtagacagggctgtcagagagggcctttctgatggggcgataggtaagtagagctttaactggaagcatctggaggaagaacttcatcgttgggcgctttctctttggggctaggctatgccttctatgagagcagtgggctgggcttgatgtctcattcattgctgcgctcctggaccctttgtcagttcctggcagagagtgctcactcattcctctgagtgactggttacaagccactaacctaaaaccaggaagaccgtcttcctcggtcccttcttgtatcatgtgtagacagctcatccaacatacatttcctgaagattggctgtgtactaggcactggccttcacagcttctacaggcagaaagggcaaagatgaaagccccaaggaagggttttatccaatgagattataaacccagtgacagatgggcatggtggctcacgcctgtaatcccagcacctggggaggctgaggcgggcagatcacttgaggtcaggagtttgagaccagcctggccaacatggcaaaaaccctgtctctactaaaaatacaaaaattaggccgggagcagtggctcacgcctgtaatcccagcactttgggaggccg

SEQ ID NO: 141907 - DNA, 421 bp, Homo sapiens
cgcatcacttaacgacagggatatgttctgagaaatgccttggaaggcaattccatctttgtgtgaacatcatagtgtacttacacaaacctggatggcacagcctcctacacacccaggctagatggtgtcacctttgctactgggccccaaacctgtaaagcacgttgttgtgctgaatactgtgggtagctgtaacgcaatggtgaggatttgtgtatcaaaacatagaaaagtaaaaatacagtagtattaatctcatgggacactgtcatatacgtggttcctcgccgactgaatgtcatcatgcagcgtgtgactgtgtgtaagcatgaaggcctactcagaggtaccctggacctccaccctctccctgcatcaaggtgacagattctggcatccctgcttctggccctgcatt

SEQ ID NO: 141908 - DNA, 127 bp, Homo sapiens
tgctaggattacaggtgtgagtcactgcatctgaacagtcatcaatatttaaatcacccaagaggctataattttctaatgagtaatgattggaattgtccactttgaggtgaagtaaagggggaaa

SEQ ID NO: 141909 - DNA, 1189 bp, Homo sapiens
ccactgctaggtgaaataatcaaattttctggagcgtttaatatatttgagaagcttggtaaattatctgtagtggataagaacagatttttgtactctagaaacagatgttttcaacataatatgcagcaaaattattctatgcctattccctcctaatttaagggcgtgcagatgaaggctgacatcggcatagaaatgtgctaaatttcaaatatggttgttcaataatatatttttaattgtattttaaaacatccctttgtagggaatatcagtagaactattgaattgatgttgtatttttgcattagctgtcctttaattttgctttccatgtcttgatcttgttaccgaaatgcattctgtgtaatttcaacgtagactacgttcctgagtctgatgatgtcattgtaaataatcattcctcatgttgctctcacgggtttgacattggaggatagatgtgccatcaactttaaatagagtttccatcttttgtcagctctgcatgtcatacagcaagatggaacacaggttgcaagaaagaaccaacgttattcctgacattctattgatgtgttttgagcagcaatgtgtaaccaggtgtttctgcttctaatcttgattctgctgatgaccatttttatactttatggcaaagcctcattgcctcagtttcctgtctggaaaatgagttcatcatctacctcttgggcaattgagagttttcattttgtgtcttttaaacatctggaaaatggaaaacactgagggctaaggataatgatattgtttaatgtaatttgtcatcagaccggcctcctgctcactatttctttttttttagatgctgtttttttagaatattaaattaaaggagtgctgttaatatgtaatcttcaactagttccatggaggaaagtgatgttttatgaattagagcttaaattcctatctaatttctgaagactgcattcttttcaaagacttgaaattaaactcaggaggatacattttgtttgttctagggggaaacgtaatagaatggtatgagatgaattctatccttttacaataattattactataatattgaagtattctatgcctttctgaaacactttattcagaaaagatcattttttggcttccttttaaaaataagcttgaagtagggaagcatttg

SEQ ID NO: 141910 - DNA, 115 bp, Homo sapiens
ccctttgctggaccatacttcagcttgctcaggcttcctaaagcacagcactgtcaggcaggcaccacctgtgtccctctctgcctgcctagtcatggctgccaacaattcggct

SEQ ID NO: 141911 - DNA, 761 bp, Homo sapiens
cgttcacgtcgactggtgcgccactgcgccgcgcgacctccaccagctgcagcgccatctcgccgtcgccgctcttggcggcccaatgcagggccgtgaagccagacatgaagtcgcgcttggccgccaagccgcggtcgcgcagcagcagcccgtgcagctggtgggtccagcggcccccggcagtccgcacgagccactcgtgctcggacggctccaggggcaccgcggacggcggcggcgcggcgggcaactcctcggcgtcagggctcagcagacgcgggccggcgcgcgacaggcgcctcaggtgcggggagcggcccgggcccaggccgaggcccagaccggactcttccaccgagagccgcctcagcagcagaggggagctccgcgggctcggctcctccgacagctgccggcgcaggccgggctcctccgcccggaggcggagcgtggcgggggccgggacgcagcgcaccggcagcatacagggcttctgctgcggcggccctttcgctgccccgggcccgggctccgcgtctggcggatcagagcagggcgatgccgcctcagaaggggccctaggcggtggggccgcgtctgcggagggtctctcggtggcctgggctagctcaagggctggaagcggtgggtcggcggaccgctccccgggcggctgagcgggctcggaggccggcccccccggggtgtcctgtggctctgttggcagacccaggtcccctggcggctccactggccgc

SEQ ID NO: 141912 - DNA, 326 bp, Homo sapiens
aagtacatattcgttatctgcgtgagacagtacagattggtgtatagtattttacagccacttcattatatgctatttccgtgtactggcaaaaaagagaataaaacttcctaggatataagtacctactgctgttttggtgcatgtccagttaggcttttctctttttatttgtttgtgtacctgtaactccatataagcatatataatcatgttacatatgtttaaaaggcgtcattttgcaatgcagttttatcactagttttttctctgtcaagggatgtataaaaatggatcacaaatctaaatttaaaactataaaactt

SEQ ID NO: 141913 - DNA, 559 bp, Homo sapiens
tcatgactggtctctctactctcaccaatgtcattctacagtctattctcaacacagcagccataaaaatccttaagaaaacttaggtcaggtcagccttctgcttaaacctccaaatggcttctcatttcaccaaaagtaagagccaaagtccttcctatcacttaaaggcctacacactttcatctcctgctgactttctgccctcatctccaaccatgtcctccctggatcattctgctagaaccactcagatcttgctgttcattgaacaagccaggcatgttgtggtttatggcctgcttgacctaaccctacagcattttcccaggaaactactataggaaaacatgctttttatgtattacttaataatgttctgcacaccacacccctcatctttagttttaatacaatcagactctcacatagcatatccagttaaaacaaaacaatgctatgtgagagtctccgtcgaactagttcgacggagactctccattggttttcccaaaaacatatggagagtccatgttgtacttagatgggcagcggcatt

SEQ ID NO: 141914 - DNA, 793 bp, Homo sapiens
tcatgactggtctctctactctcaccaatgtcattctacagtctattctcaacacagcagccataaaaatccttaagaaaacttaggtcaggtcagccttctgcttaaacctccaaatggcttctcatttcaccaaaagtaagagccaaagtccttcctatcacttaaaggcctacacactttcatctcctgctgactttctgccctcatctccaaccatgtcctccctggatcattctgctagaaccactcagatcttgctgttcattgaacaagccaggcatgttgtggtttatggcctgcttgacctaaccctacagcattttcccaggaaactactataggaaaacatgctttttatgtattacttaataatgttctgcacaccacacccctcatctttagttttaatacaatcagactctcacatagcatatccagttaaaacaaaacaatgctccagaaaactcttgttattcctcagcatcataggcagaaacatcaagaggccccaagcagtgttgctgttgggtcactggaaaataccttcaagccccaggcaggcaataaaataatgaataacagggcaagaaataataaggcctttctacatgaatcaaactcagtgtggcccttcttatactgtaacccggaattttttattaataccactggtgtgctggttaaattttgatttagatcaaaatcaaatggtgaactaaactagtttagttgttatctgatagagccagtgctttgtagctgtgccaatgatttgaaaacgtgacagatg

SEQ ID NO: 141915 - DNA, 139 bp, Homo sapiens
catgccagcattgcttcaacccttggagatatacagccctaggacattgtcctcaaagaacagcaagagtgtagtgtgagattttttaaaaaggaaaagatgaaggcaatatggcagtggttgagggagggctttccag

SEQ ID NO: 141916 - DNA, 433 bp, Homo sapiens
gcttatctgcagaagtgtcattttttgctgagagctctgattcacaaatgggcaccttcccagacaagaccagctgggcaatccagaatctgtcatggattatttgatgccgtggcttgggaattgatgccggaatagatcttaggaaggtggaaggaggaggagtccttccaaagcataaggttgttcagctgttatttgacatgaatgtcacatggagtaagttaattgtatctagatcccacattgctgaaatactttggaacagaggtagaggagagaaggaacatttatttttgtgtctgaattatacagagttcaatcactgagggaactggcttacttttttagtgaaagctttgagatttgcatctgaaaaagtgaatttgtgcttaaatgcatgtggcctgcctaggactttagcatccagaag

SEQ ID NO: 141917 - DNA, 543 bp, Homo sapiens
gccatgtggattgaaataattatatcttctggccaggcgcagtggctcacgcctgtaatcccagcatttggggaggctaaggtagatggatcacttgaggtcaggagttcgagaccagcctggccaacatggtgaaaccctgcctctactaaaaatacaaaaatgagccaggcatgttggcacacgcccgtaatcctagctactcaagtggctgaggcaggaaaatcacttgaatccaggaggcggaagttgcagtcacctgagatcacaccactgctctcctacctgggcaacaaagcaagacactgtctcaaaaaagaaagaattctctcttcttccaattgtgctaaaggcttaaagatgtagtagaaagcagcaacatgcagagtgcatgcattccttcatctttatttcccatctctctttcccaggaactgatgaattagacttagcaaagaaacatgaaaagcactcctcccaggcctccttaccgcaagactcactaaaacatctttttcctagctcttgaggtttttggctata

SEQ ID NO: 141918 - DNA, 177 bp, Homo sapiens
gtgggcccaggctgctggcactgaccaggctcaccttatcttggctcctgggctgaatggctgagctttccaggcttgggctggggaggtccctcttatttagcttccttgtcagcagtttccagaaggtgaaagttacctgcccaaggtagtaaccttaaactgcaatagaaataa

SEQ ID NO: 141919 - DNA, 797 bp, Homo sapiens
gaaatctctttctcttaatctaactgtaacttacaacaatttagtagattatacttttataaatagaaatgaggcatttatctttttttccctgcctgatttttccagaattttgaaatccttactgaatactcatattttcacgatgatatagttgttagcaaaagtccaataagaatctgttcaccttataacggacataattggaaattttggttatattatcaaggtttttactggaatatcatatttaggaagtgtacctaagatcatttatgaccagcaattttaaggaagtaaggttgacttttatggaaacaatgcttacaaagcactgtgagaaatgggaaagttcttcttcaaagattataaagtcacaatttcttactataagattgctatccactatttatgtgtgtgtgtgtgtgtgtgtgtgtgtattccaaatcacttgtcctagcttgctccagcatgcctggacagaactagacaagccccagcccatagtgcatgccattccttatttggagatccttccttaactatccctgggcaacttccttttctttctttcttctattccccttacctaattaagaaagttttaaactaacagccaatcgggtaaagtgtaaaatgtgaggtcctattccagccaatggaaactggacacagcactagggtagacacatcagattataagtaactctgtctcctttgtttggtgtgctcttgtggctggacagctattgagtagcaccctttctgcagaaagtaaagcttgccttgctaagaga

SEQ ID NO: 141920 - DNA, 728 bp, Homo sapiens
ctgagtgtggtggcatgtgcctgtattcctagcaacttgggaggctgaggtgggaagactgctagagcctaggaatttgcagctgcagagagctatgatggcatcactgcactccagcctgggtgacagactgagaccctgtctcaatcaatcaatcaatcaatcaatcaatgtcaatcaatagacctattgtcctaaaagcaaagctagcctgtttggcttctatagttattattttaaaaatggctttatttatttaatttagctttcttccatggacaggattttcttctagattcaaaaggaaaatttttattccacaatatagaaacaattagttcaaatgtaatagaattttgattaaaatccaaaccttctgttgaatattgaatctgatatttaagtataacaattacatcaggtttttaaaataataacattgtctaaacaactttttactttttatcaaaagtggtttatttttaaactatagaaagatataaaatatatgctatcttgaaatagttgaggatatcagaaaagttattggtcaagcacttggtaataatttctaaaaagaagagcatcaattgtagaataagtgaagacttgtttctttaatttactttaatgttacttttctataagggtgggctcttaaagcttgatgtaggctgagtgtggtggctcatgcctgtaatcccagcactttgggaggccgaggcggg

SEQ ID NO: 141921 - DNA, 164 bp, Homo sapiens
catgttagagccaatgatacctcacaaacagccctggaaaacctgttcacagtacttcagtccatggtttaacttctgaaaagctcgtgagcccaggtctctccttctgaactcaggaacatctggatggcaatggcttggccttttacattattatccctcaa

SEQ ID NO: 141922 - DNA, 802 bp, Homo sapiens
gagactgggaaggagaagcctgagaagagggaaagctggaaagaagcatcttggatgccaagatcggagagaattgcaaggaggaggcagtggccatgccagatgtagtggagaggagagggaagttaaagacggaaaaaacgtccattggtgttagcaatggagagttcattgagggcctctcccacagcagatgtggggaagcaacagggtatggagttgagtggatggagtaaggaatggatgtgagaaggttgcagcctggaggacaagttattcggcagtgaagaggaggaaacggacaacaggctcggggagtgatttttggaagatgggtggatgtagcaagttcatttctagtccaagggctgagagcccacagagaaggtgaagggaggggccagcttccagagcaataaagagatttaggaacaatgaaccaacgcttgtggtccctacctcatggcctctgctgccttttggagaggaaggtagtaggttatagagtttcaagagaatggtgtaattttggaatatctcttgtgggaaatgggagaaagagttgagaaagagcccatgtaaggattttcaagaaaccctggaagattttgtgctcaggagcaaaaaagaaaagaaaaaggtagattgttgtaccagggttaaggttttgtcatgtgcgtgaggtggaaggaatcaaaggccgaggaatctgggagaaagcagttccgatggtgtccgtggggctaacgcatgagggaaagacccaggtaggaggagtgggtaacaggtaggaggagtgggt

SEQ ID NO: 141923 - DNA, 291 bp, Homo sapiens
attttgactacgccacttccttgatgtgtaacattaaataactgattaaaatgctcctgtgcctttccacagcataacacaaacagcacattaggatagcgaaaagaaccagagtccttcctctgtttttgtgatgaaacagattcaattctagttaacactcagtgtcattctgtgtggtgagaggctgggaaagtctgggagaatttcctcggcgactctaagattagggatggcctgcggctgcatccgacttcctggagctactgaagtctgaactctggtctcatg

SEQ ID NO: 141924 - DNA, 224 bp, Homo sapiens
ggctgctccggggaggggtcagaaccttggctaaggcagtttgtctttggctgaggatggttcctggggaggcgccccacaggtgacactcctagcagtctcagccctgaaggggactccatcacttcctacacccccactgcaaaccttcttctccacatcaccaggtcccttaactgaattgtcaatcgtctcctctatgtgatgtgacgttgggcctgctg

SEQ ID NO: 141925 - DNA, 895 bp, Homo sapiens
attgtgggtttctctggaaaatgtaaattcaaacctgctcttattgacctcaatatgtcattttaaatgtgaaattaaaattgtgtctcatcaaaaactaaacttatcacagattatccaaacacaaatgcacacagtttacatttaccaacatcagtttcaaacatcccaatagtatgctttagaaagtgttttagcatcttaagcacttatgttccatattttaaggactacttcagaatctaacagattttttaaatcctctaaatcaccccaaatactataaatggtaattttaaataaaaaagattaaacatcccgttgtatgcagctctcaaaccaataagccagataacgctagaaatcggcataaaagctctccatccaccacctgccacgacaacgtgcacactggatctgccaagagggccccgagcatttcaggggtgggtgggatgcctgactgctccgcttgctctatagcccccaaataagtctaaagccagctggcgttcttttcaaacacatacccaccatcgccagcttcccagcccccaaccactgtgcattttgggagaaaaacaaggatttaacttaaattttagaaaaactaaagtttagttttatgaagaaagttatttcagtgcatgccatatactttttggcatataaaggaaaccacgtgcacataatgtaagaagcagaaaggagtaagttgaggggaagatggcctgtggatgaagtggcagcaggtagtgactgcaccgtccccctggggcatgtgtggtgtattaaaaggccgaagaggtctcctctgggggagatcatgagacggatataggatccagactggttttttttttaatggttctagggtacaaaaaaaaatggtaga

SEQ ID NO: 141926 - DNA, 182 bp, Homo sapiens
gcggccgcctactactactactgctcgaattcaagcttctaacgaaatatcggggacatgttaataatgacaatcccattatttccttgcagtaggcaggaaatgctgtctacacccattagatttgtttgagtggcccctggctggaaatgaagaaaatttaattttctaatttgcaggga

SEQ ID NO: 141927 - DNA, 131 bp, Homo sapiens
gcaatgctggatccctgctgtgacacttcagaccaccccagcctccctatgaaaactgtaacaaccaaaaatgaaacccagacacctgctgggctagaggagggaaactacagaatttatgcttggagaat

SEQ ID NO: 141928 - DNA, 270 bp, Homo sapiens
actgatggggaagcagaggcctcatttaagtaactttcctgaggtcacacagctactaagtggaggaggcatgtgggagggattaaaatccagttattgttcctggtcctgaggagaaaataaaaatccagttaggtctgttatgtcctgcctcagcctcccaagtagctgggactacgggtacatgccaccatgcctggctaattttttttgtattattagtagagacagggtttcaccatgttggccaggctcgttgtgaactcctga

SEQ ID NO: 141929 - DNA, 328 bp, Homo sapiens
gaggaccttcagctttaagcacctaggaaggccctaactacggcgggaaggggcgtggattagaggactggaacacagagcactccagtgaaatgcagtgagggatgggagagcgattggataagaggccagagaggtgcttaggggctagatgtggggcctttacagagaacatgggaagggttttaaatatcatcccgtgaataataggccagtgcgtagttttaattagagtagcgacatgtttgtatgttgcattttttaaacagggcaaaaattattgtctagtctctacacaacagttttgggcatattttaaaaatgagaa

SEQ ID NO: 141930 - DNA, 118 bp, Homo sapiens
cccgcctcagcctcccaaagtgctgggattatagacgtgagccaccgtgcctggcctatcatcttgtttttactttttatctgcattacatgtgtagcaaggctttgctctgggtttg

SEQ ID NO: 141931 - DNA, 607 bp, Homo sapiens
accaccaccacccagataccacctaatagcttactgaattccagaatcacactatgtactttatgtaataagcccctttaatcctcctaaaagccccatgaggtgggtggaattggccccatttaactggataggaaacctcggcttgtcactttgtaactatctaaggtcacccagctaataaattgtggtgtcacattttgaacacaggtgtgaccccctaagtatgaggcactgaccatttggcaatcagggtgggaaagggaaagatatttggagtcttctggccccagccaaattagaggaagattggaaatagttaacttctgacccaagggctttgaattcctattctctccacaggcccctgctaatcgccaggagggttggggttggcaggcacttctgcccaggacctctggcctcccttttaagatatgggggaacagggagggttcagataccaggtctgagagcactcaaactgacagccctctgcagagaactgtcaccccacccccacctgcctccagcagcaaagacctcccacctcttgctctgggtagaagagcttgacagacccttcctcactcgctcctcctccccc

SEQ ID NO: 141932 - DNA, 121 bp, Homo sapiens
tctgtaaatacaatagtgttgtttagcaggaaagaccaaacatatctattggaatagaagatatttctaaatttaaagatagttcactgctttaagtggagctttgtgtttgtttttggtt

SEQ ID NO: 141933 - DNA, 412 bp, Homo sapiens
ggctcgccgagagataccagcccagacgtagtgccctcttgctctcttccctcccaaatcagctctcagcagcacctctggagaccatgtgttgaactgtttgttaagatgtggctgggcatgccatttccactcctgttttgctgtgtttacaaataggttcttaagtcagatcaagtacataccccagcccagcccctgtaactggttccatgggtgtgaggtaggccctgagaatctgtcttttgaaccagcaccccaggagatcctaatacgggaggtttcgacaactctttgggaccctagcctttgcctctatacacagacatatacattctctgctcaatcacaaatgttggccaggcatggtggctcacacctgtaatcctagcacttcgggaggccgagacag

SEQ ID NO: 141934 - DNA, 210 bp, Homo sapiens
tggattgtaaaggggcataagtacttttggggttgatggaaatgtttgacattttgcttatgatagtggtttcatgggagcatacacctatcacaaattcattgaattgtactttttttttttgagacagagtctcactctgtcgctcaggctggagtgtagtggtgcaatcttggctcaccgcaacctctgcctcctgggttcaatcaa

SEQ ID NO: 141935 - DNA, 288 bp, Homo sapiens
ttctattaacaattgtaaaagccccacaaagcgtttacattttggccaagcggccttaatattttcagaatatgtaatctcaaactatttcttcattaatttttctggaagcatgtactgaccacttactgtgttctctatgaggcactgggagaaattaaagtcatagtctctctctttgaagagtttccagcatcatgtcagggaaggacaattttaagaaagtctaactcaggcaagtgttttgccaaaggtaagctcaggattttggaatcaccactttgagag

SEQ ID NO: 141936 - DNA, 452 bp, Homo sapiens
cgtgcctgtgagggagtctatagaggatccgcgtctcgccgagcagacactcaacgcccttgttctgactcaagagggcagcagcgtgtgcccccaggccaagaccttagcaccactgacacctgtggctgcatgattcttggccatggagggccgagagccactgccccccaaggagccggggttctgcagagaaacagctgactccacggtgagcctggagcacctgccgtgcagaacgtgatgacgtgcccaggaatgagaggacacatcaaagggacgcaggccagcctcaagcggcttccaccagccaaggctgggaccacctgagaaccagaataacagagcagattacagcctatcaagtggagtaagactcctgggtccacgccgttaaagcaaatcaacaacgacgcagggcaaaggcgacagggaaagccaccactcacagc

SEQ ID NO: 141937 - DNA, 198 bp, Homo sapiens
ttttatgtaacagaagaggaaactaaggtatcaagagattgaaaaattggcccacatgattttaagtggcagtgtcagagttccaaatctagtctgtctctacacatagtacatttaacccttggtctatactgcctctgtttgcctggtgactataatgggctgaattctcttcccccaaaaatcatatgttgatgt

SEQ ID NO: 141938 - DNA, 495 bp, Homo sapiens
taagctacttgtctctcttatttaaaaaaaaaaaaactagaaggttattccctgttctaaacttctcagagaaatgtagtcatgaattaatatgcttatttagaagtaaacagaacaataaataaaacaaatataaagtaaaagcttagaagatagaagttgagggtcatagtttttatgctgcattagcataaatgatgaaccatgtctattctcaaccacgataatcaagctttgtgaaaatcgtctgaagtttgtaaacaaattcaccatagaagcaatgttgctcttagtcaaggaagcccttaaactgtggaaacaaattaacccccaacactcagtgacttaaacaacagacaatttctcctggtggaaaacgcttcctctatcttatttaatcaggaacacttggcttccaaggttgctaaggcagaccagagagggctagaagtttccttggacatttactctgctaacttttacccagtagattga

SEQ ID NO: 141939 - DNA, 332 bp, Homo sapiens
gcttaagcactactgtttttatgtacataatttaatgctggaacttgatcacctccggccctcctgctgacagcatttcttttgctagaaatacccacctttctcagagcctgtgtctcctttggttttggtttttactccatgatatgttaaggactcaccagatttaaatgtgaaatttatcttcaccactaaaaagcccacttgtcttggataaatcacttggtttctttaactcctcaaaaagtacaaagtcagggggttttgatttttctctcttgaaaatttggcttttaacaaaatttgtatagcaaaaacaggttacccgctcc

SEQ ID NO: 141940 - DNA, 738 bp, Homo sapiens
gtttggaatccccgccccagacatcttcacggtcaccgttgctattggactagaccaacctaagattttatattaacaaagacaatgggagcaacaacttctcttgtcatgttgagctgtctttcgtttttccaaagccttcataaaccagcgtagaccggtgcctgcagtttatcccacagctcagccctcccttgtggctgccaggaagaggtctgggtttctgactaagcctgggctagagcagctgggggctgtgcccagactcattttattgttgactcagggaattctcactgcagtgcatgttttgcatctagtctgtaaagctagctaatgctgcgactatttgattcactttaaattcctccccagggtttgccagggcaggcttcttgaaatctgcatctttggcccagtcaggagggcttcctacttagtgtaaaattttctgcactttgaatgatttttttttccttttcaaattctcccgaagccaatgacgccttggtggcactgttgagctgtgagtggataatggcgtgggaagggccagggctgcctgtgatgcccagagcagtgcactcccgcggcagatcatactcgctcctgggatgtttattaaacacctgccacgtgccaggtgccgttctaggtgctggggacccagcactgaacaggagtagagtctccctggtgggccccagcggggggtgtggaatggcaccaggaggtggt

SEQ ID NO: 141941 - DNA, 265 bp, Homo sapiens
gaggagcctttcctccccttttgcctgcgctccggcgcgcggagagcctttggaaggaattgggccatgagaagagccctcatgaatgggattagttcccttataagaagagacaccaaggaagtgatctttctctgccctctgctatgtgaagacaaggtcatctgcagttttttgttgttgttgatgatcttcctgtcatagacaatgctgtaacaaacagactaattgttcactgttgacatatagaagtactactgattgg

SEQ ID NO: 141942 - DNA, 293 bp, Homo sapiens
ccagaggcacaaggagggaggaccgacagtttgaagtgacccagctaggatggggtggcatgagaatcgaaccctggcaggttgcttcaggtgagtcctctcagaagctcacgcaggccccgggggaagcctcatctgagggcccgaggagggtgggctgctggcgcccaatgtcctttacatcttgggtggcattcatcggcagagccaggctgggcaccagggcaagaggcaccactgggaagaagggagtctgtgaggcctggtcagccccagcctcctggagttgcatt

SEQ ID NO: 141943 - DNA, 391 bp, Homo sapiens
agtgcaagactctccgtcttctattgatgagtatagattctgcctcaaagtcacagggaaaaaatcccttcctgtaaccatagctggattacatgatgattatgagtatgagttttacactcattctgttctgggttcaagtcccacctccaccacttatatagtttggatttttgtccctgcccaaatctcatgttgaattgtaatccccaatgctggaggtagggcctggtgggaggtgtggatccctcatggcttggggctgtctttgtgatagtcagttcttagaagatctggttgtttaaaagtatgtgatacctccctgctgacgcgctctgtctctgtctctctcttattcccaaaggggaagtaggccatgtgaagtgcctac

SEQ ID NO: 141944 - DNA, 355 bp, Homo sapiens
tttttttttttttgagacggagtctcactctgtcacccaggctggagtgcagtggcatgatcttggctcactacaacctccgcctctctggttcaagtgattctcctgcctcagcctcccgagtagctgagattacaggcacccaccaccatgcccagctactttttgtacttttagtagagatgagttttcaccatgttggccaggctgatctcaaactcctgacctcaggtgatccacccagctgggcctcccaaagtgctgggatcacaggcatgagccaccatgcccagccacatatttactatttttagcactctttattcctttgtgtagctctaaatctatctctggt

SEQ ID NO: 141945 - DNA, 173 bp, Homo sapiens
tccagcctgggcaacagagaaagactccgtgactttctaactgtttcaattatggttatctgaaatccagctcatactgaaaagtcaggaaaatgcttaattatttctctttaattctccatttttacaattatattgtattaaatgtggtatttctgaatgtatattgtcat

SEQ ID NO: 141946 - DNA, 189 bp, Homo sapiens
ctttgcttttacaaatgccaccaagaccctggctgggttgccagaggcagacaccccccccggccttaagtgcttaaggatgtttcccgaagggagtctgttttcccttggacaaaggcagcccatctgattgcccaggcacggggagtacatgctacaaggtgcctttggagacccacagatggtgcg

SEQ ID NO: 141947 - DNA, 200 bp, Homo sapiens
cgcgatgttccccattgtcgtgatatattgtcaatctgaatatctgtattccttacatatttaataagtaaaaggagaagaaagaaaagaaaatatggccaggcctggtggttcacacctgtaatcccactgtgggaggctgaggtgggcagaatgcttgagtccaagagttcgagagcagcctgggcaacatggcgaaa

SEQ ID NO: 141948 - DNA, 142 bp, Homo sapiens
ttttcaaagttgagacggaatttgggtaggggcagctgtttttcccttgattgttagctaggatatttgtcaagtaaactttggtgacaatcactctcttcccttttattcctcctttccttttcctttcttcccttttttc

SEQ ID NO: 141949 - DNA, 302 bp, Homo sapiens
atcccaactacttgggagactgaggcaggagaatcatttgaaccggggaggcagaggttgcagtgagctgagatcacgccactgtactcctgcctcggtgacagagtgagactccatctcaaaaaacaaaacaaaacaaaacaatccatgcttattttagacactgtttgatgtaatgaaatttctctgtaattctaaacaacaaacatcaatctgctatgagagtttttcataaattaatactcattttcattacacgacgtgctaacttaaattttaccacttggctgggtagggatcac

SEQ ID NO: 141950 - DNA, 173 bp, Homo sapiens
ggcagaggtgcaggtcctggtgcttgatggtcgaggccatctcctgggccgcctggcgaccatcgtggctaaacaggtactgctgggccggaaggtggtggtcgtacgctgcaaaggcatcaacatttctggcaatttctacagaaacaagttgaagtacttggctttcctcc

SEQ ID NO: 141951 - DNA, 234 bp, Homo sapiens
accaccgtccctctcgcccgtagatactggatcatgttcttcccactgcctggagagcgctttcttcccatctcagcttcgcgttgcctgctcttaggcgtccttcaggagtcctcttcggaattacttcttctgccttctcgatttttccaagatcccacagcaccccatcacagcgcttgtctgcctgtttacaggtctgccccctctcctaggacgggcattcttctcggg

SEQ ID NO: 141952 - DNA, 411 bp, Homo sapiens
gaatggttttccttatggcactggctagtagcccaactgaatcctgaatcaggttgtggtggcctgtcacctgcacccacacacactcagccgcagtgaggactgaatcaggttgtggtgacctgtcatctgcccccccacacacagccacagtggggaatgaatcaagttgtggtggcctgtcatctgaccccccacacacagccacagtggggactgaatcaggttgttgtgagctatcatctgagcccacaaactcagccacagtgaggggactgctgtgaaaacagtcgacatttccctttagaagctttggtgggaggcaagagggaagtgctgccctgcaggcctcgtctaagagttggtcattcccatggggggcctgttacagttctgtgattagtgcccagt

SEQ ID NO: 141953 - DNA, 246 bp, Homo sapiens
tcctccgtttgtcttaagagtcatagtagtaatagagggtgttgactgcacatggtcagtctcgttgctatggtggaaggctgtcttaacgtctgagtggttaaggattgaggaagtgatatttacttacatgcagccggtttctcctctcggcccgctgttccatagacacccataatgtcctgaaacgctggcccgaggagggtcccggctgtctccatctttatccacacggtcggcccccca

SEQ ID NO: 141954 - DNA, 1445 bp, Homo sapiens
gccccagctgtgccaccagccgccctgatttgcttcagcctcagttcctgctgcggccctggtaggatccaggagcactgaggcctgcaggggctgccgtgggggctggctcagggccttcaccacctgggggtctgtttcccttccagtctcccctgccatcctcagtgaccagggacacagatggccctggcaaggcccccggcctgctcctcgcctgtgggctgcaccccccctaccccacccgttgccctcaccctacccagctgctccacacccaggcagcccactgccttgctctgggggcggagagcagagggtccttctgcagggaggagacgcggagtgggcccagccctgaagctcttgctgacccggaagtgagagaggtcctcctttgttgctggaagccctgggatttgggggttggttttggactgtgaatcagtgactgatcagtccttgttttcaggttgtggaaagcaagggggtggtgcgtccccaggcccctgaggcccagcttggctccccctgcccgagctccccccgtcccagggccctgcagggcctcgctggcccatgtcctgcagcggggctgggcaggctggatgtggtggtgtaccccactcagagtgtctgggaagtgcagagcaggaccactctcagctcccaggcgggggcccagcaccctgagccttcccaggctgcctggggtgggggtggtcccaggactctggggcctcctggctccaggcatgtgggtggcccctatgcacagcccctcttgtgtgagcccccatggtccgacctcctctggccttgctgcctgctcagggttcatagccccagcagccccgccaaggatgcctggcgagtgggtggccgaggcaagttggagcctgtgtccctgctgttcagtgtcctggcccttccctgacacgagcagacacggcatccacagagacagcccggacaccctccaaggccccggccgatgggacagacgggcgtacaggagccataggcagcagatcccacgctccctcggcggggccagcttggctgcccagccccagctccttagagaacgggcttctcgcttcagaggagctggtcacaaaccagtggtcgcgacaaaaccattcctgtggtggagcgcgtgtggggcgcgtgtggggcgcgtgtggaacgtgtgtggggcgcgtgtggggcgggtgtggggcgcgtgtggggcgggtgtggagcgcgtgaggggcgcgtgtggggcgggtgtggggcgggtgtggggcgcgtgtggggcggatgtggggcgcgtgttgggaacagcgtccgggatgcacagagcacagcgcggtggggaggcggcaggggcggcttccacttcctccagcatcccaatcccaccgtctgggtttcttgtgaaaaacctggccgggcgcagtggc

SEQ ID NO: 141955 - DNA, 559 bp, Homo sapiens
ctttggacagtgctaccttatagatcccataacttctccatggttttgacaatcacggttttaatttagcgtcagtggaactccttaagtgctgggattgcattcatgggctgtgttacccccaaatacaaatctgtaaactctaaactcacatttgaagcagcaaattgttcatacgacaaggggcacgttggaatcaggaatggttcaaggaaaagaagaaaagatctatgctccttgtggtcatgctccctcagggacatgcacttaatatgaatgttagacaggattaaaagcgctatttaaattagaatttccacttcccactcttgcccctcagattacgcttctgattaagttcacttgcttaaatatgtatataatgctactgtagtatcatacaggataaaaaagaagcaatttcaggttcaattattctcatattgataacatatagggtgactattctattagagtcagatcctcagaaagaaatggcccagatatgtcaactctctgtaaaagtttcctctctattaattataccaacatcatttat

SEQ ID NO: 141956 - DNA, 485 bp, Homo sapiens
aataaatgagttttccccgacgttatgttgtccaggtaaagagtaactgaagtaactcaaagtgaacattcagagagggcaggcaggatgccctgtccccgcaaccttctgagctctgatccctgtggctagacaaacatgtatctagcaccttccttgtccaggagggacctggttcaaagaaggacaaactctgcacagagaaataaatgcccacttagagcccagcatggcaagaggcctcaggggcaggagggaacttccttggggaagcggggtgaagggataacatccaaattaaagcttgaagaagaaggatgaattcagagcaaaggaggaagatggggagggccctgcccgggcaggtcaaaggcccgaaggtgagagaaagtgtgtcctctttgcagcaccaaaaactactcactggagtcaagggggcaggcgagagaagcaggaactagaggccagggagccagccccctgca

SEQ ID NO: 141957 - DNA, 276 bp, Homo sapiens
acacatgatggtaagaggaggaggaggagaaggaggaagaagaggaactgggaggaagggttcaaaaaatgaggaaaggaagaaaaacgttgaaaaagtagggaacattagaatttgttagctctcctaaagtatccaggggttacacttgtgtgggcacacctagatctgctgcactcttggggttttgattgttctctttgttggcaacattctcagattctttccaagagacatcaaaataacttctgagagcctcacctcatttctaagaga

SEQ ID NO: 141958 - DNA, 523 bp, Homo sapiens
catcactttacctgacatattctattatatagattgaaatttatttcatgatgctggtgttttgttcagtttttaaaaatgaaataagaggatatttgaatagtcatgagaatcagctagagtcagtattctctccttgttatctctttcatgtttagttccttttaagtcatctccccactgaggtaggtaatggtgaaataatgtttccctgcctgtaaagcagcttaaattaaaagtagcaagtgtgtgccaggtacactacatgacttctcttcttgaatctgtggtccacttgaaatagcatttttttccccaaaagttgcttcccatcagtcttgtagttcttaatttcatttgtcaggtagtcacttagcaacttgggaagaatcatactattttgacagatactaacaggttttttggcatcttgttgcctacagttattgctttatgacttaaaaagtaagttcatactttttttgctatctcccgaaataatataattttccctcctgtctgt

SEQ ID NO: 141959 - DNA, 446 bp, Homo sapiens
tcaggacacactccctagggtcaagtacagatggtagagatgtgcttagatattcctaggcttgcctatataactagtctatgcatctatttgattgtgctgagcgctatttctggtcttaatctcaacagacacagacacacacaccttcggggccagagcaggacaagtgaaatgacaagcagagggcctgacctgtgagcgaaaattacgcagctgtcacaggccctgaatggagggagaggtggtcccgccagaaacagtgtgcccccgcaaggtgggtacgcccacggttctgggaaatgcatacctcaggtaatacaggggtgcgatccccccctactgtggtatggttgggtgctgaattttgttgtattaactttaaatatatttggcattgttctcctaggatgcagttaagttccttggaaagtaaaccttttgag

SEQ ID NO: 141960 - DNA, 738 bp, Homo sapiens
gtatcactccacaccccaggttcagtctctttgcgctttgcgttgcgtcagttctgggaaattaaaattgaacttggctttgttaagtgggtagtccccaactagaagcgtggaagcagagtggcagacgctagccttcaaatgatgcaagcctggaggaccctgtaaaagttttcacccaaatgaggaaaattagttccgggacacgtgtgtgtgtgtgtgtgtaagttagttacgggacacgtgtgtgtgtgtgtaagttccgggacacgtgtgtgtgtgtgtgtgttttctgaggtggggacggcgactttctcaaaggatgtccggagctgtgtttcgttaccagcaagtcagagttcttttaaagactgtccaggctgggcgctgtaactcacgcctgtaatcccagcactttaggaggccgagatgggaggattacttggagccaggagttccagaccagcctgggcaacaaagcaagacccccgactctaccaaaaaaaaaaaaaaaaaaaaaaaaaaagctcgaaaaatggacccgggtgtgtgtgggggccccccaccgtgtttttcccagctacccggggggcgtggggccaaaggaactcggtggaaatagaggccgcagggttgaccctgataatgggggccatcgtgcctataacagccggggggtgaacagaagacccccattctctccaaaacaataaacacaacaacacaaacaacaggggg

SEQ ID NO: 141961 - DNA, 369 bp, Homo sapiens
tcacaagcccatcatatccctgcacatgatgtgggaagcgaagtgcccatttgttgacaaaaatcacaaatcagggcacaatcaagatactacaagcttttcaggtgctcaatgggtataaatgataccaagttataaattcttctttgcaaggaaaatatcaaccacaagaataaattaagataaaaatgtgccctgttactcctgctcccactttccctcccaaaaaaatgcacacagcacacatctcaatgtttagaggcattttggcatatccagttgcctttcttgtgggggctggccaaagactgactcagctggtatgaaacaaatcagcaagtgacctcagtagtgacccctattttccaa

SEQ ID NO: 141962 - DNA, 386 bp, Homo sapiens
aattattaagagcacagccatagagccagaaagcctgtgctcaatcctgactttaccattttccagcactgtgaccttgaacaagtaacttaatctgtgcttcagatttaccacctgtaagacaggcctgaaaaactgtacttacctcatcaaactaacatcttatctatggctgtttttgtgctatgacagctgacttgagtatggctcacaaagctgaaaataccaacactctgaccctgtacagaaaaatgtattgacctctgatatagaccaatgaggttcattaaattttaagacatcatttctaagatacaccatttttatatgtgccacattgcatatacaataaaaagcactgctgattaacaactgtaaaatgccat

SEQ ID NO: 141963 - DNA, 229 bp, Homo sapiens
ttgtctacatgtatgctgggcatatctttaagaatttaagaaattcaacccaaatgacaggatctgtcacagggatcatcaatgcctgtggcttcaactgcccctcttgcagtcacgccaagtgaatcaaatctctggacacctccagaccagatctctatgctgatcccgttcctaaatatccaacatgatacctgacagctttacccagctacaaccaactcttcag

SEQ ID NO: 141964 - DNA, 723 bp, Homo sapiens
ggtatggatagcactttatgacaaaataggactgatttttaaatttagcagaattatctatggattgtctagatctcagctgatattaaaatataactatattcaagtatttcattagattaaagagcagaggataaggctgaatttaaaaattttatatctcggcccggtgcagtggctcactcctgtaatcccagcactttgggaggccgaggcaggcggatcacttgaggtcaggagttcgagaccagcctggccaacgtggtgaaacaccatctgtactaaaaaaacttcactgggcgtcttggcgcacgcctgtaatcccagctactggggaggctgaggcatgagaatcacttgaacctgagaggcggaggttgcagtgagctgagattgtaccactgcactccagcctgggcaacagagcgggactccgtctcaaaaaaaagaaaagaaatttatgtcatcttcagtttaaagtgaatgaagccaagtgcggtggctcacatttgtaattccagcccttttgagaggccagggtgggtggatcacttgagtacaggagtttgagaccagcctgggcaacatgatgaaacctccatctccacaaaaaaaaaatttaaaaattagctgggcatgaccgagtgcggtggctcacacctgtaatcccagcactttgggaggccaaggcgagtggatcacttgaagtcaggagttcaaaac

SEQ ID NO: 141965 - DNA, 529 bp, Homo sapiens
agtgagatatatatatgtgtatatatgtatatttgatgatatatatgtatatttgatgatatatatatatgtatatttgatgatatatatatatatatatgaaagtttacttttagcttaggatacttgtgcagcaaataggtcaatggtagggagatggactgtgctcatcactgtcattcagactgacaaagaggctacccaacattgctggtgtttgtgcagaagggaaaagaatggtctgggtcaggtgcagtgactcatgcttgtaatcctagcactttgggagactgaggcgggtggatcacctgaggtcaggagttcaaaactagcctggccaacatggcgaaaccccgtctctactaaaaatacaaaaacttagtcaggcgtggtggcacatgcctgtaatcccagctactcgggaggctgaggcaggagagtcacttgaaccctggggatggagattccagtgagccgagattgcgccacttcactccagcttgggcaaaaagagcaaaactccatctca

SEQ ID NO: 141966 - DNA, 251 bp, Homo sapiens
gtaaaaggttgataatttgaacctgtaaaaatttaaaacctaaattgagaaaattgtcaaaaaacaaagtcaaaagtccacacactgtggaaaactatttgtaacataatatcagataaaagctactcaggaggctgaggcaggggaattgcttgaacccaggaggcagaggttgcagtgagctgagatcatgctactgcactccagcctgccaacagagcaagaccctagctcaaaaaaaaaaaaaaaaa

SEQ ID NO: 141967 - DNA, 275 bp, Homo sapiens
aaatctcatcccaacaactcaatgtgccctgacacaccctcttcccaggctgacttactgccccagtgtgctgggaacggaggaatttcctgggacgtggaactttaaaactgggagtgtcctgggcaaaccaccctacttctacttcacctctgttagcctcctcaatcataccctcagagtcctgcgacacagtgtccttcagctgtcctccctttatctcttctactgaactgaaacttgtgtgtctccagaggaccctagtgaccttctca

SEQ ID NO: 141968 - DNA, 749 bp, Homo sapiens
gcgcgttgccccgggagcgcccgtcgtccgggcagagcgcagccgcaaccgcgaccacagccgcagtcgctttccagcctgccttcggtgcgcagcgggggaacagggctagtgcagccgccggaggggggcacgggctcctctcccatcccagagctactgggctgcccttgctgtcctcgccgccccagcagaccccggccggacctgccacctgcgccctggttgcgccatggatccttcggaaaagaagatatcggtgtggatctgccaggaagagaagctggtgtccggcctctcccgccgcaccacttgctccgacgttgtgcgagtgcttttggaggacggctgccggcggcgacggagacagcggcggagccggcggctggggtcggccggcgacccgcatggcccgggagagctgcccgaacccccgaacgaggacgacgaggacgacgacgaggcgctgccgcagggcatgctgtgcgggcccccgcagtgctattgcatcgtggagaagtggcgcggctttgagcgcatcctccccaacaagacgcgcatcttgcgcctctgggctgcctggggcgaagagcaagagaatgtgcgcttcgtgctagtgcgcagcgaggcatcgctgcctaacgccggcccccgcagcgccgaggcgcgcgtagtgctgagccgagagcgcccctgtccggcccgcggggccccggcgcggcccagcctggccatgacccaggagaaac

SEQ ID NO: 141969 - DNA, 369 bp, Homo sapiens
tgatgttttttgattcccgcattgtgatatgaagatgagcagacatcttcttccccatcacctcttcttcttctcttttacataccaaattctgttggctatcgttctatattgtcatagttcataatatgtacattccatactgtaaccataattattacatttgagttctgtttataggttgatttagaaagttaaaagggaataaacagcatttacattattatttctgcataagtagcatcaatggcaaagtagtaggttatcattatgattccttttctacagtgccattgttgataacccctgacccgctcaaaagaatatatttaaataatctttctaatcaccagttcatcaaaattatga

SEQ ID NO: 141970 - DNA, 347 bp, Homo sapiens
atgagtcgggcggtgcaagagcaagagaggtgggaccacggggagaggaggaaaatttgagtatatacttgtgactggtatataaaaaaataagccgatgattaaagaaaaaaaaagaggcaagttttaactgcagaaaaatggtaaagacaaaaggtatagttgtgcaacaaggaaaaacagttgtaaaaaaaaagaaatgcccgtggtcccacctcttcagctgggcgcggtggctcatgcctgtaatcctagcacttggggaggctgaggcgggcagatcacttgaggttaggggttcaaaaccggcctgaccaacatagtaaaaccccggggtcccacctcgg

SEQ ID NO: 141971 - DNA, 416 bp, Homo sapiens
gtattaggatatgggcacagcacataatgagcaccatgtgtttgccattttatggaaactgaagctcaagaaagttatatgacttggcctacgtcacatgagtaccacatggaagagccaggacttgaactcaagtctgtccaactccaaagcagccctctcctcacatactcagggcattgagctccttgatggatgagtagaatttttagattgaaggaaggtggacaattcaggttgttcacagagatgggaatgggctgcatagcaactagtagtagttccagggtgagtgccacatccccacagctctaacatccagtctgatggatattcaagtcactggacacaggattccgagcgcctactctgtgccaggtcaggtactaggtattgagaaaggagaaagaaagcac

SEQ ID NO: 141972 - DNA, 460 bp, Homo sapiens
  misc_feature (190)..(190): n is a, c, g, or t
  misc_feature (394)..(394): n is a, c, g, or t
  misc_feature (416)..(416): n is a, c, g, or t
aatatccaaatgcctgatggatagtgctttcttttttactaccaagccctcaaaggcactatgttcaaaaggaatttgtcatcagtctcacggcacataagcttcctcttgtgttcaatctggagacttgagagtcttcctgttcccttcttctccttattttctccataatcaatcacaaagtcatgtnggattttgctcctaaatatgttaacttctttcctctctcactttatatcccttacatctaggtatttcagaccctcagtctctctcacatagactttggcaataaccttctaatatcagtcaacctgaccaataggccaccagtgcttcatgtagaatctggacaatgtagagcactgagaatgctcacactggtcatatatgntatgagttggtatgacatctangggaagttgaagacttacatagcctttggcccagcaatatacac

SEQ ID NO: 141973 - DNA, 672 bp, Homo sapiens
tcaattaattaagaaattattacactttaactttttataataaaccccagaaggtattaatgtttgtatgttttcactctttttctcccagtgtcatcctgctcactacttttttatctaatttgattccttcactcatttccatttgtttattcactgttgtaatatacatttattctctaattgtgcaattcgatctctctgttatctgatattggtgtgtagtgggaattgtaggtttgtaataagacagacatggatttcagtcctggtttcatttctagatttgtatttgtacctcattttgcaagtaatgtacataaagcacaatgtattggcactcaatacatgataccattattatttgagagagtttttttgcttggtttggatggaggtgattatcgccttctttgttgctcgctacacatgctgttaaagttggctttccgcttttcctaatagaataactactgccatgcctcctcacctctagaggcctagatgccatacagcgagcagtccctctgtatctgtggggaattggttccaggacccccataggtaacaaaaccagggatgttcaaattccttatgtaaaatgacataatatttgcatgtaactgcatacattcttctatatactttaaattgtttctaggctgggtgtgg

SEQ ID NO: 141974 - DNA, 313 bp, Homo sapiens
cctgcaaagtgaagaagctcagactagtctactggaggatgagaggccacctgaagcagagacaagctgtcccagctgaagatcacccatctctcaggcaaaccagccttctagtagctatgtgagtgagaccatgctggattaaccagtcccagccaagctggcccagactaaaatagtccaggtgacccacaatcataagattgtggtcttggcccttaactgttgggatggcttgttacacagtatatgctaactgatacatccactttgttttctggttaacatctactcctcattcaagtctgaggat

SEQ ID NO: 141975 - DNA, 380 bp, Homo sapiens
tggcaccagcgttgcttctggtgagagcttcagaaagcttccactcatggcagaaggtgaagtaggggagcaggcatatcacatggtaagaaagcagcagtgggtgggtgtcaaactcttttaaacagccagttctcatgtgaactcagcacaagaactcactcattactgctgtaaggagggcaccaagtcatccatgagggatctgcacctatgatccaaacacttcccatcaggcctcacctccaacactgggagattacatttcaaactgatatttgaaggggataaaacatccaaaccatgtcactgattttgtacttttgtgtgttttcataatggtgaatatcacctgagtttagaattttttttagcttttc

SEQ ID NO: 141976 - DNA, 299 bp, Homo sapiens
tggagtcaggatctccttaatgtaccagactctttcttaccccccactgtctacccactcacccaacaacatgcttctctctcgccatgcagagctactaatgttcaacctcccacttcactggattccctatgactccagctcagcagagattctgattttggcaacacttttttaagccaaactttgaaagcagctccacttccagagggtagcctgtttcatgcttttctgtgttaaattgactttgtttaaaatggctctttgtttgcagcacatgttcagagttgtagctgtgt

SEQ ID NO: 141977 - DNA, 480 bp, Homo sapiens
ctcattcacacctattgattccttatgcttcgaacctctgcttcccagatctaccccatatagataccttctagagaacatgtcacaatcatgaactattctccattcacttgactgtcatctgtcactcctaagagatggaaccccacagggctagggcaagtaggggttgctatccttagcatgcctggatgtcatgcccccgtccaccctccaccggaggctataacccaatgaatgaacccaggttctaccactttctagcaatgtgacccaaggcaaactctatcactcctgagtctatttcctcatctataaaaagatgagggatacgagtgtgatgcgaggtcaggagtgggggtggctatggtgaagcgtgagccactgagcccgctgagagctgtccttttaaaacaccagatcctcatctctagctagcttattctgctagttagtgaagaacagggaagggagcatgtg

SEQ ID NO: 141978 - DNA, 536 bp, Homo sapiens
aagggctggcagatcaggcagggggaaggcctgtggggtggggcatttgccctgcagacctggggagagaagctggctgcagtagggtgcacttgggggacagagggcatttttttgtcacagtggaggtgagaacttcccggtggagattcagcagagtttttctcctgggcagtgggcaatgttgggagtctgggcccccagcacccggctggactggccaccatggagtcctgccctcggccagtgcatccctgccagagctgggggtgtccagccagacagtcagcattgccaggggaaagagacgaagccacaggtttccaggggctggggacagcattggagggccccaggaggcatggccaggtgagcatgggtcaacatcaagaagcagactgggcaaaggcggcatcccaagctcctaggaaaggaggtgtcagctgccccaggatggggccacagaggcagaaccatagcccccttcccagactaagcagcccagccaccagctgccagcagccagggccctgaat

SEQ ID NO: 141979 - DNA, 440 bp, Homo sapiens
gtcaatacaagagagcacgggagcagaggagagaaccctctgagaaggggaagaaagaatgagtaagaataactgaagaccttttgagaatccacaaatcttgtagctgcagctggattcttcatgcatggtgattagccataaactagaaacagaaagaggccccatgcttttcttctgggacagtgaaagagatggaaacctcagctatcccatctcactctccagccagcctcaagtcctggggtggaggcagcattcaaggggagcacaaaatagatggagtcctgggaagtgggagaatataggcaggaggctgtcacgggaatcagaaatgaccctgggtggcttctcggacaggcctgcatcattctggaaacttcttcactttagcctccaagaaacaagcatcccgtggtcccacctctcaagagcaattc

SEQ ID NO: 141980 - DNA, 265 bp, Homo sapiens
tacaaaataataaagttgggcccctacctacttcataaaaattaactcaaaggccaaaatataagagctaaaactttaaaactctcagaagaagtgaaaatctttgcgaccttgcagtaggcaacagcttcttagatgtgataccaaaaccacaagcaacaaaagaagaaacagttaaattaaacctcatcaaatgaaacacttttatgcttcaaaggacaccatcaagatagtgaaaagaaggccaggcacagtggctcacatc

SEQ ID NO: 141981 - DNA, 171 bp, Homo sapiens
actttcaaggccatgtggtaagaaaagacaataaggattttggtatacaatttaccagaagagtttaatgaggcaagatcaatgggttaacatttcaacgcagggtaaaatgtgaagcacatgacaccagaatatgctttaatatagccatgcttgcagtggatttatact

SEQ ID NO: 141982 - DNA, 409 bp, Homo sapiens
tgtgtgtgtgtgtgtttctgggtaattcagtaaggcccacgtgcaccctgatatcataaggtgggccagaacaatggttaagagtgttgggtatgcaggcagatcactaggcttcaattccctgcttggccgtggataagctctgtgaccttgggcaagttatccagctctcatctttctaatataaaataaaggcaaatagtatataaatcacaggattaagtgagatagtccatgccaagtgcttagcacaatacctggcacatattaagtactaacttgactttgaaagagagtggcatgatttgcaacatagatcctttgaataatgtctgactacctggaatatcagaagtttatggtctgtaagagtgatgtcctgtgggtcacctgtgcttcttcaacaagg

SEQ ID NO: 141983 - DNA, 185 bp, Homo sapiens
aaatttgctttcagtacctatcaccggggaaggatcttatcacctaattcataagaaagcatcagtagtagataaggtcaaatgaggcactctcccatggtgatttatattttaaaaggaaataatttctaatagcatatggaaggactctttaatgacaagtcattagtgaggtgaaaaaaaat

SEQ ID NO: 141984 - DNA, 534 bp, Homo sapiens
aaatctggtttcataatagctgtaacgaaataagccttaatgatattttattagcatcatcttctgtctgcattagcccttccttgctcttcaggagaacaacatttgttttcctccctaggctctatcccaaacggcacattcttccacaacccctgttgaacagattttttaaactgttgcctaatctaaaaacaataaaaacaacaaacaaccacagtaacaacaacgacaaaaaaaactgccacagattctaaataatcagatctttttaaatggtatcaatgtttcccacaaaatattgttgacattgaaaatatagaattttagcattaattttgttaaacctacatcccctcggcagaggggcctccctgcatcccagtggaaagtaggttcctcacagtcctctccgtcacattcttcccatttcttttcttcacagaacacatcactgtctaaaattatcttgtttgcttagttgcttactcatcttcttcttctctcctctgaagtctaagctccaggaaaaag

SEQ ID NO: 141985 - DNA, 241 bp, Homo sapiens
actgagcctgacccctgctctcgtgtcaacagtcctgctcctcccggctcattctgctgagccccatggccacctccaggaccttctcctgggtggaatcctgccgtgggtctgcgagattgtgaactacatctaagcaactccatggctgagcccatgccagctttttaaagccaagttttcattttcacagagaggcctttgccttccaggtggctcagaagcctgaatgataacaggg

SEQ ID NO: 141986 - DNA, 773 bp, Homo sapiens
gccagctttgtaggtgactgacctagtaggcatgtggacggtgtctttgtcacagtcctagccagtcccattttaagattgcctctaggcagcttggctggtgacttagtctcgccttttcaggtcccgcagggctgcgttcccgcagaattggatgtctttagcctcctcctgagcccaattcaaaactaacccaaagccgccaagcccaacagggaataagaggacagaataaggtgttaaacaacacaatgggatgctgtcagcagaatctagactatgagaagccacaggacagacaaccttgtttcttcaaataaattgcaaggaagagaggagtgtggtggggaacctatagattaaaaaagacttaagagatgtaacacatggccccttgtgcattttattaggatcctaattcagcaaacacattgaaaaaaatagtatgatacttattataagaactggaaatttggacactgggtagttgataaaattaaggaattgtgaaattacaaaattttaattgtggtaaaatacacaaaatttaccatcttaatatgatttaccatcttaaccgtttctaagtgtacaattcagtactgttaagtacatttacattgttgagcaatcaatcttcagaactcttcatcttgcaattaaaagaatgaaaaatagtccgagtgcggtggctcacgcctgtaatcccagcactttggaaggccgaggcgggaggatcacaaggtcaggagttcgagaccatcctggctaac

SEQ ID NO: 141987 - DNA, 255 bp, Homo sapiens
cctgtgtctcctccagcccgaataccttcctgatctccatgccaggtgccctggcccagacagcaggagaaagaaaggactcctctctgtctcaggctcctcatttgtaaaaagggagaaataatacctaccccacagtgttgttttgaaggttaaataacagttcacctgtggccgggtgcggtggctcacacttgtaatcccagcactttgagaggctgaggagggaggatcactggagcctaggcgttcaag

SEQ ID NO: 141988 - DNA, 470 bp, Homo sapiens
gacctgaactctaaaaaataaaaattaaaagaaaaaagaagtttgtggcataggtatttcttgttttaagaaaatatatcagcaggaaatttgaattaaggaagcagacaattaatgggcaatgattgcttttacaagagttaatacagggttaccgcagccaactcctttcttcttttaaaatgttttatatgccaaaaataaatactacttttaaaataattttttaaataaacaaaatgtttatgatttttttagaagaccaccttatattttaatgctaattataaccatctccacactattgatctgaaatgtgcagtacattgaaaaacgtaaaagtattttcaatgcattagaaacatagtttccattttcccaagcttctcattccccttaatcctgtagattccctttctcacagattaaagtagcattagaatcacttgcctcaaggccactgggaaagc

SEQ ID NO: 141989 - DNA, 647 bp, Homo sapiens
ggacgcgtgggtcgcggacgcgtggggtgttcttattagggtatggtgcatagcagttcatgtgtccacagaagaaaattcattgtctaaaaatataatctactggaaacagtaattattttacttcttttaccttatactagtccatggaaacttggcatacactcgaggaataaggagattaaaaacataaacctggtgtcaagtcatatgagcaaaaacaaattcattagaaagaaatttctatcagtctggtcgcagtggctcgtgcctgtaatcccagcactttgggaggctgaggcgggtggatcacctgaggtcaggagttcgacaccagcctggccaacatcgtgaaaccccatctctactaaaaatacaaaaatcagctgggcgtggtggtgcatgcctttaatttcagctactcggaggcagagacaggagaattgcttgaaccggggaggcagaggttgcagtgagccgagattgccccacttcactccagcttggggtgacagagtaagactccgtctcaaaaaaaaaaaaaaggaacttctatcaaaaaaatccctctgagttgtgtaaagatggcttttaaaaaattttttttttttacaaagatactgatcaaatttatttataatggaaac

SEQ ID NO: 141990 - DNA, 400 bp, Homo sapiens
aactactttggagcatacaacaatctagaaagtgaattaacgtattttgcaggataatataaggttaattccaaaacgaaaagagagcacactaatgatcatgtatgcaaatattttaatatattagcaaatcaaatcaagtagcatagtaaaggaataacccatcatgaccaagtagcatttaatcccaggtaagcaagacttgcttgacagtaagactcactacgttagcttagtagagtaggaaaaactagatgacccgaacctctcaatagatagaggcagagtaggagaagagaacattttagctgttgtttccttcacttgattagggcattttctgcagacccacagcaaagatcccatctactgatgaagccaagacccacagcaaagatcc

SEQ ID NO: 141991 - DNA, 264 bp, Homo sapiens
cttagctctttcggggtcttagctctttggggtcttagctctttggggtcttagctctttggggtcttgcttgacagtaagactcactacgttagcttagtagagtaggaaaaactagatgacccgaacctctcaatagatagaggcagagtaggagaagagaacattttagctgttgtttccttcacttgattagggcattttctgcagacccacagcaaagatcccatctactgatgaagccaagacccacagcaaagatcc

SEQ ID NO: 141992 - DNA, 403 bp, Homo sapiens
tataaccaccaacaaatcatatttctcacagttctggaggctggaagtctgagatgagggtgccagtatggtcaggttctggtgagggttgctttcacgttgcagactgacaacttcttgtgtccttacgtcatggaagggaccagagctctctcagacctcctgaataagggcactaaccctgttcatgagggcttcaccctcaagacctgatcacctcccaaaggcttcatccctaacactatcactttggggattaggattccaacacatgaatctgggagagacacaaaacattcaggccatagaagctcgtttcccatttatcagtttggattctttcaggctgactaccaaaaatcctaattctgaataccagaaaacctaactcaggggctcccac

SEQ ID NO: 141993 - DNA, 785 bp, Homo sapiens
acattttcactattttactttgaccaaatactttctccttcatttgaaattaacttgaaatcacaggatttcagagttgggagcaattatgtggcttcctcacctcagagtaggcagctttggtattactacattattggtgtttccagtgagaaagctaccacgaggaagcaatctgctcacagctacaggctgtgttctaatttgttaacagatactactatgtaagtatgatcaggaaaagttttattagcacaacatgaaatagccttgactttgatcctttcataaaggttggtaaagctaatatttcctttgacatgttgaaaataccttgttatacaagtaataaaatagtacatttcatttaaaatttgaaacaataaaggttagaaacgtgtcatccacagaagcatgcagaaatcaacatagttaaagccagactttttactatgccatgacaagataatataaaattgtgtactatcaataaataaaacatgcagtataaaatatctcattgtactctgttttgggacatttgaaaccccagttagaaattaaaaagtcatctgggctctacagctcacacctgaaatcccagcaattttcccggctgaggcaagcagattgcttgagctcaggagttcgagaccagccagggcaacatggagaaaccctgtctttacaaaaaatacaaaaaattagccgggcatggtggcagatgcctgtagtcccagctaatccagctaattatttatttatttatttttgagacagagtct

SEQ ID NO: 141994 - DNA, 345 bp, Homo sapiens
gagagggagatgaaaggtgtctatgatatctttatgtaatcggttaagtgatgaagaaagacgagaggtcaacagagatttctggcttcatctggtaactaaaggtatttaggcacttggtagtaaacaaaggccagggggagaaaagagaaagaaagggagggcatagggagaaaacagaaaagaagaatctcagtgggcaccaagaaccatgagaatctcactactcggaaagacaaaagaacttaatcagagggatgcttaggctgagacaaagataaaaagtgaagaatccagacaaatcaaaaagactattccaaccctaaccccactttggatgccagg

SEQ ID NO: 141995 - DNA, 363 bp, Homo sapiens
agctggagcgaacaggaaaaacgggctggtaggtgacactcaccaggcagcaagagaactcgtcacgggaggccaaaagcacgaagtggcttagtgattagggatttgatgtgagtttttgttgttggtttatttcaggggatggggagcagaaacaaaaaacactgggcaaagcttccaaacacccccacccaaaatttcaggttctaagaggccacttcctttttatctcccgctcagtgggcccagagcaaagcatggtgggcctgttcggtttatactccggagtataaaccgaacagggaatcagcaataaaatgactgacagggtaagtaggagacggtcctgtcgcttgtcctgct

SEQ ID NO: 141996 - DNA, 128 bp, Homo sapiens
actggttatttataaggaggaagcacattgacctttggctttcactactgaacacacagtcatggagaccaaaattgtgtgtgaaaatcattcagtgaccacaggagattctatctgaacccgagtcg

SEQ ID NO: 141997 - DNA, 205 bp, Homo sapiens
tggtcacagctacctgtatgtagaccagactcatgcttctgcgggttggagcttaagatccaaactgagaaagcaggccgggcacgatggctctggggtgggggaaataagaaggggtggtcagagaggaaaacagcagggaaaagggactggggaaatggaaactgcccttcaagcatagcaacctgtggtgtcaggaaagagc

SEQ ID NO: 141998 - DNA, 1139 bp, Homo sapiens
gctgtaaggccgaggttgcggcggaagcggagaccatgttccgagcggggctccggggcagctccggcgggcggctcattgctacgatttcagagtaccctggtaatagctgagcatgcaaatgattccctagcacccattactttaaataccattactgcagccacacgccttggaggtgaagtgtcctgcttagtagctggaaccaaatgtgacaaggtggcacaagatctctgtaaagtagcaggcatagcaaaagttctggtggctcagcatgatgtgtacaaaggcctacttccagaggaactgacaccattgattttggcaactcagaagcagttcaattacacacacatctgtgctggagcatctgccttcggaaagaaccttttgcccagagtagcagccaaacttgaggttgccccgatttctgacatcattgcaatcaagtcacctgacacatttgtgagaactatttatgcaggaaatgctctatgtacagtgaagtgtgatgagaaagtgaaagtgttttctgtccgtggaacatcctttgatgctgcagcaacaagtggcggtagtgccagttcagaaaaggcatcaagtacttcaccagtggaaatatcagagtggcttgaccagaaattaacaaaaagtgatcgaccagagctaacaggtgccaaagtggtggtatctggtggtcgaggcttgaagagtggagagaactttaagttgttatatgacttggcagatcaactacatgctgcagtggtgcttcccgtgctgctgttgatgctggctttgtccccatgacatgccagttggacggacggggaaacatagtaagcacagaacgttatattgctgtggatatccggagccatccacattagctgggatgaaagaccgccagacattgtggcattataagaccgagctcccatttcagtggcatagggatcttgcgattattagggctccgcagctgcgcttgggaaagcccggcctcgtagaaaacttgacttccgaccgcttgggttcaacaggcacgggcgcctccctgggagcccaccagggcgcggcgcctgcgccaggtattccacacccaagcgcgcgccttgttgtggtaaagttaacgctcc

SEQ ID NO: 141999 - DNA, 218 bp, Homo sapiens
ggctattacattgttttcttttgacgctgtttgagataaaggctctgcctgccctttcctctagtctaggtcatttatagcacagcctgagggcagaattcagggtgtcatcctgcctagctgtctatacaggctacccttaggcaatgaactcatttgaaacatgaggttgcctgtgtgtctcagcttctgttagccccagtgctgacacaggtcag

SEQ ID NO: 142000 - DNA, 759 bp, Homo sapiens
accccaccggcgggtcttgggctccgaacccagggcgccccgcgcaccgagccgttgcgtttgaaacccacagaaagaattcccccgctcgacgacggcgagggtgtgggagctactggcaggcaaattggtgggagccgcccggcccagcctgccttgccgagtcagcgcgctcttgagccgctgggcccttcccggtgcccgcctggcagcgcggcgcggctggggcaggggtctgctgggggccggggactaagggctgtgggcccatccacacacgcctcatcccttctttccgggggcagcagagcagcagcgggagaccgggagcaggaggggtagggcgagagaaaagcaggacctgggccgggggtgggagtcgggccgttgacgctcgctctgcgaggggctccctgggaacgcccaggcgagcgcctcctgcggggccccgccccccgagtgcctacaatggtgccaggcccgcacccagtcctccgcgtggcttagcgggacagcatgggctgagcccaggcgccgaaagttgtcacggcggcgtcgcaagggggcagtgccagggactgtggggagagccagccctccccttccagctgttcccagatgtcattctgcccgcccaggcgcctggttcctgagctccgcagcattccactgttctaagctactggtttttgttgacttttaaatattttcttctaagggagagggggagggaggcaaaagtcaggaaagagcaaataa

SEQ ID NO: 142001 - DNA, 764 bp, Homo sapiens
ggtttcttaaagagagattcgatgaagtggaggggtctggagatattcggctgtcatcatggaaaataatatatcccctctctctttttctttcttcttcctttctctctttctttccttccttcttcctctctttcttttttctttccttctttctctttctttccttccttccttctttctctccctctccttccttccttctttctccttccttccttccttcctctttcttttttccttccttccttctttctctttctttccttccttcttctttctctccctctccttccttcattctcattccttccttccttccttcctcttttctttctctttctttccctttcttcctctttctctccctctctttcctctctctcctcctctctccctctccctctccctcgctctctctctctctctctgtccccctctctttctttctggatccagcttttactctgttctaggccctggaaatacaaagaagatggacacagacactggtggacaagggggcacttcctggccttctgaagctttgggtctgagggaggacacaggcagatgctgctcacatcttcattttctgcatcggtctcaccaggatcctgagaggaggagagggcgggtattagatgtccccaagaagtgaaaaaagaagtgtcaccggcattaaagactgagcaaggaggcgtcaaatctccttgaccccatgctcacagcacagctggaggagacagaggtctcgccttcac

SEQ ID NO: 142002 - DNA, 541 bp, Homo sapiens
cgtgtccctgagcctagatggacggtctttgtggatctccaaaagaactggagagtggcaattctccctatcttatccagacaataatgaagttaaggcgagcctcagcctccctcccctggagtgtttgtgctacagctgacatctttcctagggacaataattgagtgctttaagaggcgggctccttgatccccggatgtaatccagcatagctaaaagataagagataagatcaagcttaaaaaaagagttacttaagcagaagggaataaaggtcacaaggagctgatactatgagaagccgggttaagatgaaaaccaaaaattaaacattctaaagaaaattctgcctggactggcccagtccattctgcacctcttgccctaaataaaaaagctgacacgtgctttggttctggccagagcaggcaatgtttctggaacaacttcaccttggttacatatttctactttaaacattccaaagttgctgaaggcctcccaggagcatctgctcctgtttctcgggagggagtta

SEQ ID NO: 142003 - DNA, 461 bp, Homo sapiens
ggagacagagcgagaccctgttcaaaagtataaatgtatggctgggcatgatggttcacacctgtaatcccagcactttggcaggctgaagagggcagatcacttgaggtcaagatttcaagaccagcctggcctcaggtgatccgtccaccttggcctcccaaagtgctgggattacaggcatgagccactgcacccagccacttttttcatactgacaaaaattactggtacttaacactggagatttgtatctaaccatccacttcatgccccagattgctagacagaaagtggaatcatctcctttaatcaagcaaattcccgtctcataatggggctgtgggaatttctctagaggacatcatttagggaaaaacaaagaaggcagccacttccttggcctttgggtatgtgctcttgcttcttgtgccctgagagtgagacccctttataatctg

SEQ ID NO: 142004 - DNA, 305 bp, Homo sapiens
tatatgggcaggggtgcaaatgaataggcattcttacaccctgctggtggggtacggaaagcccagatggtataggttatagagaaggggatgtgtaacatgccattttggcaaggagtcctggcagatttttaagagaactgtctttgtgtacttttcaaaacatgttttcctttgttattttggggttcagagcatttctttgaaacttcttgaatctccccttgactggcagcctgttagttgatcctccatttgtgtattgtgtgaaaactccctgtggcagaaatatacacacacatgtc

SEQ ID NO: 142005 - DNA, 191 bp, Homo sapiens
gccgtgctattgactgtttcccttctgcccctggggctcagagagggacaggagcatcaggtggaccgtcccccttcaagctgtagaagccatctttttcacacaacatttcctcaggccaggagcatggggaaatgttgtgtgaaaaagatggcttcaacagctaaaggggacacgggagatcctataga

SEQ ID NO: 142006 - DNA, 447 bp, Homo sapiens
ataaaagtgcccaggctggacagatgtgagcgagaatctccgtcatggccactggtgtaaacgcagcaaagcagaaccgccagggatccggatgggatgaaatggtttcccacgccggaggctggctctcaggagaggactggctttgtgggctcagcacagcctggtcccaagcttgctgaccacaggcagggcctggctggcaggaggggccagctccagagagggagggaggcctgactgcttgggataagaaatcagagagaaatgggcagcccgaggtgggaggcaggaggagggaaacagggggctgggaatgctgtaggcatctgggagaagcggccagccagaaattccggaggtggggatggctgaggaattttaaagagatctttaaaaaaggcatctctagtcagcgttaaggaattagctataacctctccctgg

SEQ ID NO: 142007 - DNA, 185 bp, Homo sapiens
tgttgtgtgacctcgagcaaattgttcaagcttaaacttcaatttcttctttaaaatgggactgggctgggcgcagtggctaatgcctgtaatcccaccactttgggaggccaagccgggtggatcacctgaggtcaggagttcgagaccagcctgatcaacatggcgaaagctcgtctctacta

SEQ ID NO: 142008 - DNA, 234 bp, Homo sapiens
ttatttttgcatatgggatttgaaggaaagagagggatcaaggataactcagtcaccactttgacctagaaaatggggtgactggtggtgatcgttattgacctgaggaggatgggaatcagagagtttaggggtgtagttggtaatccagaggttttagaaatgttacatttaagctgcttattaaatattcaggtgaagagtttgagtaggttattagacacatgatgaatc

SEQ ID NO: 142009 - DNA, 281 bp, Homo sapiens
ctctacatcagacagcaaatcgcctctcctcagctggctgctcctctgagtcggcacagccccagcctctgcatccccagcactccctcttccttggcccttgcaccttggcatccacactgatccttccatgggtccccagccacctcacaaatgaagacactgaatgtgctgaccgggctggctctgagcctgattgccagcctctagtgtttttctacaatatttctactcttttattttattttactttgagacagggtctcactctgttgcccagt

SEQ ID NO: 142010 - DNA, 201 bp, Homo sapiens
acttggtacacccacacaacccaataaagcctgtagccctggtaagaggctttcctgtggaggcagtgaacacctttacagggagctggggaggattggttgattgtctagagaagtcggttaatatctcatatttggggccacacaagaatcaagacaatcatttgctgacaggcattctccctagattctggtcatttt

SEQ ID NO: 142011 - DNA, 177 bp, Homo sapiens
actggtacctctgggaaaaaaggatcaaaggaatggtggaggtgaaagcttaattggaagggggtaaatcaagaactggaggcaagactgaagacagaaatataaacaagattttagtgtactgtgttctcaaatggagcgttgaagaggggtactcactacagggagagatgtaat

SEQ ID NO: 142012 - DNA, 651 bp, Homo sapiens
tgtgatcacctctcccgatcaccgctgagccctgcaggtcaccttctcctgacctattacaccactgattgcttatgctgggcacaattttatacccttgctgttgttcagtctaatcatccctataaccctatcggatcattcccatatgacagaggagaaaacctggggacacaggggctgtgtcctggccaaggccttgcttgcagcaaaaggcagagctggggtctagccaggagccccagcacagtcctgttcttcccccactaaactgagctgtgaaatagatcatggcggtctggaaaacgagctaattccgtgccgatggaggtgttgatggatgtccaccactctccacttgggaggaggccttaacatccccctcaggtctagcttctctctgtgactgagtaccttgggaaagtgggctcagaggaggaaagggacttacttgcccaagggccacagctgccaagtggcaggtaagggaccgttattctcctgtccctttcacagaggacaggaggaaagtgaggacaggtggggtacatgagtttagcctcttttctgcagcaggcccagatcagctttgcacacggttggtgctgacctcaaatgcagccctagaggggcctgtctctgccctgagta

SEQ ID NO: 142013 - DNA, 249 bp, Homo sapiens
caggagccaagtggccagggtgtgacgtccctagtcgtctaccaactatgtgagactcagctcacccactgcacagggtaacgtgcgttagcgcgtgacaggccctgggaaccatgcctggcgcaccgtcagcacatggaaggattagctattctcgttatttctgactgcttggcccatcacaatgcctgtttgggtcttcctaaagcccagccctggaagctcccttcccttggcactctggacaca

SEQ ID NO: 142014 - DNA, 301 bp, Homo sapiens
ggaaaagaccagtcaagcctccaccagtttagttaccataatggcccatgccttgaaaaacatttcaagttagtctacgcgggcatccttttctaggagagtcattgttaatctcataatggcaagtatatggaaaaattccattgaatttatgtgaattcaccttctatccaactcttctatattgactgtctctcaactcttaaatatagacccaagcggtggtaagttgcagggtggaatttctaaaatggtaactcctttaaaatcctttggatttgaaatacgttcagatacacct

SEQ ID NO: 142015 - DNA, 332 bp, Homo sapiens
catagtctcaatgcagatgtcacatgtaactttgttattaatattttagttacttgtggatatctcatatcttctttggtttctttgttatagaacattgtcttcccataaacttgaatattgtccctttcccttagaaaagggaaatgtgggagaggtggggagatggttacatcaacccaatttttgcttcttaaaatgggcttttgttgatgtgagtctatggtcccatttattgttgtgacaatatcttggtagtgggaattactgggtatgttggagaacctcagaagggagaatggtcatgttctccagtgccgtatctgaatatc

SEQ ID NO: 142016 - DNA, 504 bp, Homo sapiens
aaacatcaaggtaacaacggagagggttccaaaatccctaagtaaaaattactggatgccagaaattttatatttattatgacttaattaaaagagtcactggttcaatatggcagactttgtacatctttatttctctccccacccccaaatcccattaaaatgagaagaaacagaaggtaaaaacctgtaacaacaaagtgaataaaaagaagaccaaaagcaaatgaaagatttaaatacaattctaggagatgaagagaaaactgaacagaaaagattactaaaacagagcatgaaaaagtcatagcctagagtccaaaggagctgaagcttaagaagttgtgaacaaccttgtctaacttttagaatctctaaaaatgaaatgatagatggtataagtagtgagctgggctagacataaggattaactgaaagccttaatactttaatactgagaggtcaacctcatctcttcccctacttgaatacccagcaaggcct

SEQ ID NO: 142017 - DNA, 376 bp, Homo sapiens
cttttatatcttcataatgacacattttaccattttcagaatcttctttgatattaaaagtagagaagctattattaccccatcctatagctgaagaaactgaggttgagaaagattaaatgatatagccaaggtcacttgactagtgagtggcaaatatgtctccaatctttttattctatgtgcttttcacagtgtcttatgttcaagtcttctattagaaaattcttgatttgggacaggaggttgcagtgagctgagatggcgctactgcactctagcctgggtgacagagtgagaccctgtctcaaagaaaagacaaaatgctaataaaagtattgcttgtgtagatttctacaacactagacttgaaaat

SEQ ID NO: 142018 - DNA, 411 bp, Homo sapiens
gtttagctctcctatgccacaccagccccagacactcaaggcccatgagtggggttaggggaacctgcaggtcagctcccggatcaggagcttttggggttccccagaactcagggcatcataaaagctcacagtgactgagcctttgcaggtgcaatgtcaatctagatgctgtctgtggatctgcccctcccgagtagctgggactacaggcgcccaccaccaggtacagctccttttcgtatattacgtagagacggggtttcaccctgtaggtccggcttgtctcgacgtcttgaccttgtgatctgtccgcctgggcttcccaaaactgctgggattccgggtgtgagccacctcgcctggcctactgtaactataatactcattggggtcgctgggtcggatgtt

SEQ ID NO: 142019 - DNA, 378 bp, Homo sapiens
gtttacgtgaattatctcacacgttctcctctgacagatgaaaactgatccagtgcctgacattgttgaaacttgccattctgaacttcacttctccattccctaagcgaggtcttccagcaagagtttctgctttgttatctagtgtgataaaaatcagcctgtcttcacagactatggctttttattgagtgagatttcatttttgcagcaggaaagatctggtgcctccatgacccgcctctgtgaggtctgctgctgtcatgagaccgagtgaggcagtgcttcacggccctttcacttacgcagaatattaaaggtcgttttagtgcgattcagatatgatttaaacttgtttgaaattctgaatttataggg

SEQ ID NO: 142020 - DNA, 733 bp, Homo sapiens
ggcggtggcagtctgttgggctttccttccagtttgtggaagtttgttgttttgctgtttgcgataaatcctgctgatgctctttctgtgggtctatactacctttatgagctgttatactaactgcgaaggtctgtggcttcacttctgaagccagcaagaccacgaatccaacgggaggaatgaacaactccagataagaactgtagtaacactcgccgtgagggtccgcagcttcattgttgaagtcagctacaccaagaacccactggaaggaaccaattctggacacagggggacttcgtgcacgcagcactccatgagaccatgagctttctcaccgggcaggaggagcccatccccagctacacgtctgggcccagcgctctcggagctgctttggagaaacatgcttggcgttgtctatgccaatggccaggctcctgggactctacaggtttctccaggtacgaagagatgtcttctgtgcccagaggagcagtactcaagccgcaccagagatggctgcctgcccaggacagagaccttcctggcctttgacgaccccctgggactcatgctcgccttggtggcgctcatgctggccagcctggcagtgctggtcctcagactgttctgaagcaccgagacacacctgtggtcggggccaacaacagagctctcagctgcacgccgctcacctccctgaccctctgtgccctctgtcccttgc

SEQ ID NO: 142021 - DNA, 472 bp, Homo sapiens
ggttactttaaatagatataaatttgaagcataacattgctacttggttggattaaatgtgatatttcttatactctaagccagattttttgttttgaaaaattaagtagtacataaaggaagtataaggcatacaaatggctaagtataaaattgcttttgaagttttctgtattatcgtgtcctgtaatctagagaagagagtcaatgtggaatcagagaaagagcattgctctgtgagtcagcacatctacagtatcccagctgggccatgcaccagctatgtgaccctgagccattccagtcaccttcataggcctcagtgtcctcactaataaaatgagcataggctggctggatgtggtggcttatgcctgtaatcccagcactttgggaggctgaggcgggcggatcacttgcggtcaggagttcgagaccagcctgacctacaggttgaaaccctgtctctact

SEQ ID NO: 142022 - DNA, 383 bp, Homo sapiens
acatatttcccctaggctgatattccccctagctgctcctccctccagttgactttcttttcaataaatagccttcctttccactccactacccaagtcagaaatctccatagcaaccttcactgtattccctcctgacatcctgacaattacaattctcagcaattctacctcggaaatatccttcatctgtctacttctctctattaccgatgccaacaccttagtccaccatctactgtctaggtaattacaacattcccctgcctcaaagcctcacttctttccagttctccacgctggacctgaagtgagctaaaaatctaattaagtctttccatccatttccccttctaagatccttaaaacattccaaaggtctt

SEQ ID NO: 142023 - DNA, 141 bp, Homo sapiens
gtttgatcattcttatcaaatgtatggcttaaaagtattgttcttctaaaatgtaaaaagagaatcaaatacaggtctggccaatgacagtatatttcaaatgacaggcaggaacatgtcttcccaagtcctgatttttct

SEQ ID NO: 142024 - DNA, 216 bp, Homo sapiens
ggtctggtctgggccctggggtacagctgggttgtggggccaagcccaggaagcagccccttcacgccagtcagtctgtgggtactgacaagtttgcagctcccacccactggggacaacactgcccggccacaccctgcatgggccagagcctgtgagctagtgtgtgtgcacccttctgtgcatgtgcgtgtgagagcccaccagggtccacca

SEQ ID NO: 142025 - DNA, 475 bp, Homo sapiens
ttataaatcagacagaaatgtataattgcttaaaaagatactatcaatgtaaaaactaaataaccagcaattcatgagaaagctttaaaggaaattttaccaaaaatttataaatggctttttcaaaagatattaaagagacttaaaaagtgtaccacatgtttctttcaacccttacattgcccctacaacaccaatgctagtttccatctcatggcaaataacttcctaaagggactaaatctaaccatgctaaactctaaataatccaagcttaatgaagtgtaacactctaacatggccggtacatataaaatgccaccactaaaacaagagtcagctcaaacatctggcaatacccttattaaataaaatttttaaaggaaggttgttttcttattcgtaacagcagtaagaggaaaagaattctgtttgatgtaaagattgggtaatatctatcatgcagtcatttttg

SEQ ID NO: 142026 - DNA, 304 bp, Homo sapiens
tatcagagaaaatagcaggtgtataaaaaggtaaacaaggctttttcagattaaagtgggaatcatgtcatggtagtgacattttggagagttcaagtttataactcagactttctttcatgtttttgttaagcttaatgtcctcctagtttcaaatacctgctttagcatgtagattgttcttgaagctatccttgaaacccatcgttgtccttcagttctgcactgcaccatcaagctgtttaattataaaaccaacttgttctggcttccaggaaggatagttttttggaatataaagctt

SEQ ID NO: 142027 - DNA, 427 bp, Homo sapiens
tacaagtttgttctatggaattatgtttaaaatattcatctgagtagttcacaacatgattaataatggggaagacacattgagaagatgctcaaatcttagcagtcttcagaaaaatgcaaattacagacataaagaattcaaattacaaagccagccgggtgcggtggctcgcgcctgtaatcccagcactttgggaggctgagcgggtggatcacttgaggtcaggagttcaagaccagccttggcaacatgttgaaaccctgtctctattaaaaatacaaaattagccaggagtggtggctcatgcctatggtcccaggtacttgggaggctgaggcaggagaatcgcttgagcctgggaggcggaggttgcagcgagctgagattacgccactgcactccagcttgggcaacagagtaagac

SEQ ID NO: 142028 - DNA, 277 bp, Homo sapiens
gtccctgagccctagatggcctggcccacctcctgtctcagcccctgtgcctggctgtgtttcagctacattggcctgctggaggtttctggaacaggtccagtgctctcctgcctctgggcctttgcacttgctcttctctttgcttggagtgtgaaccctcaagatttctacatggtgctccctgtgcaaatgtcccccatcagagaggtcttggaaaatagctcctcctcctcctggtcacctgcatccctccacctgtgttaactttcttcat

SEQ ID NO: 142029 - DNA, 263 bp, Homo sapiens
gtataggctgtcagtgaccaagaagaaaggtgatgaatggcaccagcaatggcggtaaaaagggggtgtaacttcagaaggtagttggagatctagttggcaagacttgatcactgattgaatgtgggggaagctgagaagagaggtgaacctaactctgagcatacctgagtgacaacctggaggttcctgaatatatgagggggcagacaataccctctgcctatttctgcgtccttggctagttccacatcttccctgcc

SEQ ID NO: 142030 - DNA, 409 bp, Homo sapiens
aagctcatcttacccctcaaatacatttcttgtcctgtgaactttctcttagaaaatggcatcaccattcaggccagaaagctgagagtccttctctctccccagccacattctacctacactgcagtttgagcccctcagacatgctaagcccacctccacctcgggcctcagtgttggcagccccttccctccagtgcgttccttacccccgagtttcacagagcagccccttatctgccctaaaatctggaggattcaggctgaccagaggctccctggccacccttgcaaacgtcatgctatttcatttgcttagcagtgaatgctgctatctgaaaatgttttcttcacttatttataattttactgtctgcattctctcactagtaaacaaggattttaggtg

SEQ ID NO: 142031 - DNA, 436 bp, Homo sapiens
caagggcattaagtaccattcatattctgaatcacaagggtactttggcatcttatttaatcaagctctttttatcatcatctacactttaattacttaacaaacatttctctgtgtgggaaagtttgaccaggttatcttctacccttgtcttttgtctgatggtgcaaaaaattttcataagcatgtatttctgaatgcctgatggattgacatatataataagctgctagtattaaaatatgtgacataaaacgcatccaatcttctcactgtttacataaattctaggtttctcctatttacctcaagcacgtatggagcgaattcttaccttttaatattgccatggcattcacattgaacataagttgaactctctcatatggtagctgggttcggattcccttgacaatttccagttctaaccctcaca

SEQ ID NO: 142032 - DNA, 356 bp, Homo sapiens
agaaacaaggctttaacatccacaaagtatttttatatcttttctcagtgttatctctgtttgtatgtaaggaaagtaagttcaaaaggataagcagtttgttaaggatcacagggctggtactggaacctgggtttctaactttgcaaaccaagttaggtgttgattaccctgcacagtaacagtaggctgataacctgtatatgaaggaaagcttgaaaaggatcattctgggtaatgagttaagttgaacttttttatttcagaaacaattttcatccttattttctcttagtacctttcccaagcttaaatgaaatcaccttttagtctcaagtctgtagttagcagctaga

SEQ ID NO: 142033 - DNA, 386 bp, Homo sapiens
  misc_feature (17)..(17): n is a, c, g, or t
gtaaaggcaggatttcnccatgttggtcaggctggtcttgaactcccaacctcaggtgatctgcccacctcagcctcccaagatgctgtgattacaggcatgagccaccacacccagctacttgggaggctgaggcaggagaatcgcttgaacccaggaggcggaggctgcagtgagccgagatcacgccactgcactccaggctgggcaacagagtaagactccatctcaaaaaaaaaaaaaaaaaagcaatgttacacaaaatccagcagcttccccattcataaaatccaccattcactctgcatttactacaaagatacagaagtggctatcaactgcttatgcagagatgattgaaaggtacatcaccaacaatttaatca

SEQ ID NO: 142034 - DNA, 497 bp, Homo sapiens
cctagtacctcaaataatattggaagaggcatgttgagttaactcaccttatagtaaaggctttttgaactaaccaaactaagtagcctagaactgattaccacttactaagctgtacctgcccttctaggctaacacacatgcccccaaaactttcgtggttgataaagaaagggaagaaattttcttggcttcttgcagactacatgtgtctattgcataataaaaaatgtaaatcagtggccaggcatggtggctcatgcctgtaataccagcactttggaaggccgaggcgggcagatcccttgaggtcaggaattcgagaccagcctggccaacatggcgaaaccccatctctgctaaaacaaaaagtagccgggtgtggtggtgggtgcctgtggtcccagctacttagtagggggccaaagcacgagaattgctcgaatccaggaggctgaggttgccatgaactgaggtcgcgccactgcattccagcc

SEQ ID NO: 142035 - DNA, 393 bp, Homo sapiens
gaactatctgaccatcattccaaacacttattattactctttcctgctttattttttgccatagaaattattgctattaaacatactgtatattttgcttatttaatttagcttattatctgtcacctgccactaaaatgtaaactccgcaatgacagaattctttatctgttgtgctcactgctgagtccctagcatctatggcagggcctggcacataaaaggcaatcaaaaaatgtttgttgaataaatgaatgaatgagtgaatgagccaacaaaacactactagacatagtatctggtaatacataagttttgccatttactgttagaaataaatgttacacaattcttcttcctgtgaaaatcagcaaatgagaaaggttaaaaata

SEQ ID NO: 142036 - DNA, 524 bp, Homo sapiens
aggtgattagcatgggccctaatccaatatgacggtgtccttgtacaaaggggaaactgggatacgaagacagagggagaatgccgtgtgatgatgaagggttggagtgatgcacctagaagtgaaggaatgccaatggttgccagcaaagcaccagaaactagggagaaacaaggaaggattcttccacagtttcagagggagaatggccctgccaacactgtgattttggacttctggcctccaaaactatgagacaataaattcctgttgtcttagaccacccagtttgtggaattttgttacagcagaactaggaaacaaatacagtttttttttgcagtaaagaagttttaaatctggattatgtccaatgtatcaatctttttttgtcacttgtgcttccgatgtcatatctagaggaggaccaaatcacaaaaatgtattcctattttttcttagttttatagttttagttcctatatttaggtttatgacctattttaagctaattttggggtgtg

SEQ ID NO: 142037 - DNA, 347 bp, Homo sapiens
aagtcaattaatctgatccttctaaggctttgctgtcagtagaggaaccccttgcctcttatggctgctgcacacttgaatagggctagtgcaaattgagatgtgctgtgaatgtacaagaggcaatggattcaaccatttagtgtgaaaaatgaatgtaaaatttcacatcaataatattttactttgatgacttgtggaaatgataacactttggatgtatcgggttccataaaataatattacagtaaatttcacctatttcttttttttttttttttttttttttttttttttttttttttttttttttttttttttttttttttttttttttttttattata

SEQ ID NO: 142038 - DNA, 199 bp, Homo sapiens
ttgctcggtatcccccttgcattactgcagaaattccaaaattgtaacttttcctggatacattatggaaaaaaaaaaaaagaataaaagccaggtatgactcaaaaaagttaatcaagtatatctgggtccaggtggtaaagccttgggtgataatggccaaagtcagcattacaatgggttggctggtgggaagggt

SEQ ID NO: 142039 - DNA, 436 bp, Homo sapiens
tgagtcaaagatctaaacttaaaagccaaaaccatagaagacttagaagaagatataggagaaattttcatgacattggatttaacaatcatttcttggatatgaaatctaaagcacaggcaaacaaaagataaactgaactacatgaaaatttaaaacttttgtgcaccaaaagacaacatacagaatgagaacatatttgcaaatcacgtatcttggaagagattaatacccaaaatacataggaactcctacaactcaacaaaacaaaccaatgagcccattcaaaaatgagtgagggacttgaaaacatttgtacaaagatatataaatggccaacaaccacatggaataatgctcattaccactggtgattagggaaatgtaaatcaaaacaccagtgacagttcacaactgttggaatggctgccattta

SEQ ID NO: 142040 - DNA, 154 bp, Homo sapiens
agatctaaaaggagatgtctgaccactgttcatcccgatctaacaagcagtaagatactggaattgatcaaatgtctgagacaccgtggttgagacccactgttgtaaagcatggagatagctaacaggatgaatcagtggtgggggcctctag

SEQ ID NO: 142041 - DNA, 345 bp, Homo sapiens
atacagtggaaacccctgagaaatgctacttcaaccaggtaattaaggctaatatcagtgacaaaacacgttgatagcatgtagctatgatatgatatgatgtgatgcggatggcactatacctctgtggacttccttcctaaaacctgtaaccccattctaaccatgagaacatcagacaaatccaaattgaggggaattctacaaatgccctggtcagtactctttaaagctgtcaaaggtcatcaaaaccacgaaaagtcttaaaaaccattaaaatccagagaagcctaaggagacatcaagactaaatataatgtggtgtcttggatgggatcttgggac

SEQ ID NO: 142042 - DNA, 716 bp, Homo sapiens
agccaagaaaacttttaaagatgtgtaaatatgcagtgatttaaaaatctcagttgaagcttgttaaaatgtatcaaaataatttaggaaaaggggggctgattttgccaaaatttgggagatgcatactttttttcaaggctttactgcagttttaaaaaatattttattgttttgtaggcagcttctgaaccagagtaggctcagagactccctttattgcagttttgatgctgcagaaagtgactgcttaatttcagctgttgaggatgttggttatactatgcctggatcaaaaaaatgattttacattgcttagtttgttaaaatatgtttaataggttaatctttttttcaaagcatcaaaaataattaagatgaaatatcagataaaccctatgtctagaatgaataatttagttctaaacatcctggatgctaaggagaaaagaacaagatgttggtttataaaattcttattgtcaaataaagaagcatagaagtttgaagaaagataatttttttgtttttattttttctctctgaatttaggagtaatttatgtttgggttctaatcctatgttatcatcaaagagtaataacattggcaatcttccctcccattctgcttcatcctccccactaaagggaaataccagattgtaaaagaaaaaaaaaaagcatgctggttgtataaaaagaaacattttaaaca

SEQ ID NO: 142043 - DNA, 306 bp, Homo sapiens
tttataaagactgcacaatatggaaaatgttatgtcacatggaaaatcaggatacagaattatatttacaaaataaattcgatgtaaggaattaacccgcctgggcacagtggctcaaacctgtaatcccagaactttgggaggccaggtgggaggatcacgagttcaagaccagcctggtcaacatcgcgaaacccccaactctaccaaaaatacgaaaattagccggacacagtggcacatgccagtagtcccagctactccagagactgaggcaagagaatcacttgaacccgggaggcagag

SEQ ID NO: 142044 - DNA, 518 bp, Homo sapiens
cagcctctggttatacccttctgtctggtcttcctttttcctcacgagggtcttaacttcgagtctctccacacagaggctgatgagctttctcaactctaatacgaaataggaatggccaagcagcattcaaaaaggtgttccttgctaggagtcacatgcaaagaggggatgccacttgtcactaacctgattgacaaagatggaaaataaggatgataacagtgtcaccgaggtgtagagaaagggctctctcatacactcttaatggaagcataaacgtggacaacctttctggagggcagtttggcatgatgcatcaaaaacctttaaaaggccaggtgcggtggctcacgcctgtaatcacagcactttgggaggccaaggcgggatcatcaccttaggtcaggagttccagaccagcctggccaacatggtgaaaccctgtctctactaaaaatacaaaaattagccaggtgcagtagccacgcctgtagtcccagctacttgggaggctg

SEQ ID NO: 142045 - DNA, 575 bp, Homo sapiens
  misc_feature (487)..(487): n is a, c, g, or t
ggttgcaacatctgagccacaatatcttgatttcacaaccgccgcggcttcttacccaaggcggggagtatttatttatttttaattaaagcaagttaaatgaattgagtctggagggttttgcaatggcgctacaggtaagtgactatactgtaattgcatctctacctcagacaaccagcctggcaggtgagccttcagagcccaccaaagacctcctgaaggataagcaaacaggaactgggtcgccctccacccaggatgacacgggtgagtgtggacagtcaaccaccatgtcagtttctgcaccaccttggttactgccacgtagaaagcgaccacacagccccattatctgttcccctccatgaattcccatccttcccttgcggcactcccacccaaacaaacccctggtcactgggatgcaacttccgggggttgcaacatctgagccacaatatcttgatttcacaaccgccgcggnttcttacccaaggcggggagtattcatccatttttaattaaagcaagttaaatgaatggagtctggagggttccgcaatggcagtacc

SEQ ID NO: 142046 - DNA, 133 bp, Homo sapiens
caggtgtggctataaagcctgggctttggcccgtgggccatatctttacagactcacaaccatcccttcctgctgctcgaattttcattcttgaggcatgagcagcgcctgcagcccctgctgggatgttttg

SEQ ID NO: 142047 - DNA, 330 bp, Homo sapiens
ggaagccacagctctaaccaccctgcgttccagagtgacagaccagtccccaagacaagccagcctggagccagagagagaactgcaagagaaagtttctaatttaggttcctgttagattcagacaagtgcaggtcatcctctctccacagctaccgtcacccgtctccagcctaacaaagcctgcagtccacactccaaccctggtgtctcccacctcctagcctctcccaacatcgcctgccgtctctgaccatcttctgccatcctctgccatctcccaccatctcccactgtctcccacagcctcccaccgcctcttgccaactc

SEQ ID NO: 142048 - DNA, 263 bp, Homo sapiens
gcgatacagctttaatctctctctcatcccacccttctggaccaggcatgcttgatccctgcaaatgtgtttctctctccagctttcattttactcattctttgactgccttcgtaaattatttatatgatggattaagttgtaggctgggcacggtggctcatgcctgtaatcccagcactttgggaggacaaggcaggcggatcaccttaggtcgggagttcgagaccagccataaccaacatggagaaaccccatcttta

SEQ ID NO: 142049 - DNA, 717 bp, Homo sapiens
gaagtaattaacaaaaattgccagcattaggaataattttagaaggatacctacaactagaagagatatttttaattatgagcacttttataatttactataaataattgtgtagtgttaaaccaataaatttgaaagactagatgaaatgtgactgtttaaaaatatggattgtaaaaattgataaaaaatagaaaatgtaaataaacgaaacatcttaggagaaattgaaaaaataggacaagaacttatttttaaaaagaggccaggtgcggtggcccatgcctgtaataccagtactttgggaggccgaggtgggcggatcacctgagatgaggagttcaagaccagcctggccaacatggtgaaaccccgtctctactaaaaatacaaaaattagccgggcttggtggcgggcacttgtaatcccaactactcaggagtctgaggcatgagtgtcgcttgaacctgggaggcagaggttgcagtgagctgaggtcacaccgttgcactctagcctgggagacaagagggaaactctgtctccaaaaaaaaaaaaaaaaaaatacagttagaaaaactttaaaggggccaggtgtggtggctcatgtctgtaatcccagcactttgggacaccaaagtgggaacattgctgagaccagcagtttgagaccagcctgggcaagacctcatctctacaaaaattaaaaaacaaaa

SEQ ID NO: 142050 - DNA, 266 bp, Homo sapiens
ttaatctagtttgcttagagatgttttatcagatgctatcaattcaaccatgaattgtttctacactctgacgcatttcatccactcccaactccatgttgacaatagagtcctgggcactttcacttgcatcagtgagcattcaacaagttcacggcaaaatccatcacatcagtacgtccacctgctcttccttctggcctctctctaagttactttcactccctcatttgtgatcacttgccctgcctttgtacattccacat

SEQ ID NO: 142051 - DNA, 329 bp, Homo sapiens
agagctcctggagggcgtggggcctacaaggaatgagagcgggcagaggctgccacagtaagcatacgcagatgttcactcatgtcttgcatcagacctgcagcctgggtcgggacctcacgtgccaagaactccttagcgtcttctttccggaaggaagctacaggtgtgctgggaaacctagctgttggagagtgaggtcatgctatgcaggactggctggcaaggcaggccctggcaaagccaggaagcgccctgaggaagccacgggccaaggtcctctgtgactgttcctgcaccccagatctccccggggtctgggtcggcct

SEQ ID NO: 142052 - DNA, 542 bp, Homo sapiens
gtttctcagatcctgacaacctcaggagatggtgctagaattctcccctattttatgaatgaggaaactacagttaaaagagaggaagatacttgctcaaagtcacatggtaagtagaaccaaatcccatctgtttgattctaaatctgctgtttcttcgctgcaggcatagatttcagcaggaggaggtgtgtgggatatggcagtgaacgagctcaatggccaggcctgcgaggcagcagcagcctccctgtgtgtgtgggaccgtccagcccaggccccccagtgctcccagtctctcccagtctctcccacaacagggaattggctggccctgcccatcttcacagtctgtcttgtctctgtttttactctaagaccacatttgtacaccttacactcaatctgcttgagaaactgagtctcttggagaaagagccccattcctccccaaaactgagaagccccgctggttggggcaaatgtaccagccacaaatagatcctgcacttgagtgaaataaacaagtttcaaggtgttcc

SEQ ID NO: 142053 - DNA, 528 bp, Homo sapiens
ctactaatgaagatttgtaaaccctgggcttatgagcacccattcctttactacaactcagattgctctagaagctcagttcccagcacttggatttttccagtagctgaattctacctgaaggaagggcagaaacaaagggtgaagaagaggctatcacttccaagtatcctgcacccctgggctcaagacctcactggggagggagtcttttgggccacccaccaaacagcactggcattatgcctctcaccctagaccatggttacacgtggtaaaacaaccccttctggtgatacattcacaactctctagtttcccccaaatggcactatggggagcgggagcttgccttttcctcagacttaaaacaataagttttccccgtgtttcccctctaatgctgttttcttttgaccaagcatgtctgaattctagagaagtcaggaggaacacacccattctcggtttgaagggactgatgttctgaagtacaactgggcacagtcccaggctcttcaggacgct

SEQ ID NO: 142054 - DNA, 111 bp, Homo sapiens
tgcttctggttttgtgtctgaaaccctttgccacacttgaggcccatgcctctgttttcgctgtccgctggcggcatgcaccaagcccactgttgagagaggcgggggaga

SEQ ID NO: 142055 - DNA, 765 bp, Homo sapiens
gcacattcccagcagtcacactgctcactgcttacactgtcagcagggcaaatgatttgttaagtcagggcctcaaagggttatcgtcttcactgagagtttcctgtggcaagcacaagtttctcaacccactcatttctcatatccttccttatggaatatggctgcagtgatgcttttaatgcagggagtcagttcagccatctggtctccacaataatttgtagaaagatacactttggggaatcacaatctaaaaagtagctgaaactcttagtaattatacctggatatacttcaagcagagggagacagaagacttacctttgaagggtgccttccttacagcccccatctgacatccacacgtatctggtgcctgaagaaatgtgttaggccactggatactttgggcccagagtccagcttgacaggacttttggtgggttctataggtcacccaaggcttgcctaagcctttatttccccctcagtgtatacttgctgagaatagagattcttgggttagttgaactcagtatttagttatttcagatttgggttctctgaagcttctgcatataaaaaatggattgttacacatgagagaactttgacaactgtaaagccttgtgctgagtaagatggtgtcagtgattatcatggcaccaagaattacaatccttctcagattcttggcttcctttttttttttgctgggtggtgggagcaaaaaccttgtctccccctccacaaaatggggaa

SEQ ID NO: 142056 - DNA, 227 bp, Homo sapiens
ccctgcactcctgccccggggcacgggagtgctccgccctctcccggggtgctcctcgggcgccctgtttcgcctcccccaactgggtccaggcactaggagcaggccaacgagcaggcctgagcctggggagcgtggcccccaggctgcaaaccgctgccagggcccttggtcgctgaattagagtggaagttgcgcggcaggcaaatttgggctccccaagaact

SEQ ID NO: 142057 - DNA, 208 bp, Homo sapiens
ggaaatgatgtatattatagaaagggttgatgcctgtgatactctaggaaaggcagctgactggagctccctaagacagatgagcaaagggagattgtgagtgctgcctaagacatcctggggcaggaaaacaagattggaagagctatttaaagccacgttgggaaagaacaatgttgtttcccattttgcaaaatgaaaaaaggaa

SEQ ID NO: 142058 - DNA, 797 bp, Homo sapiens
ataatcaaacaccaattctttattagatagatagccacaccaagagaaacaaataaagactataacctcacacagctcaggcctggtttcgcagccaagtgagtcctgaaaaaaccgttttctgagctttttggatttcagatttgtacataagggtttgatagcttgtaccaattttcactcctgtcagcagtgtgtgaaaatttcatttccccacttttacttcatgacttagcattgccagatgtttaaaaatctttgtttgtttgtttgtttgtttttttgagtcggggtctcactctgtcacccaggctggagtacagtggtgtgatctcagctcactgcaatctcaatctccttggctcaagagatcctcctgcctcagcttcatgagtagctgggactacaggtatatgccaccatgctcagctaatttttgtatttttttggagagatgaggttttgccatgttgcctcggctggtctcaaactcctacactcaagcaatctgcccacttcagcctcccaaagtgctggtattacaggcatgagccactgtgcccacaccttaaaaaggttttttaaagccttaaaaaacctttacattatggaaatttttacatgtgaatcaaagtagagataataatataagaaaccccatgactctaggtatctatcttccagcttcaacaactatcagtatatggtcaatcttgtctcataccccttacacttcctcattccctagatggttttatagcacatttcagatatatcattccatctgtaattactaa

SEQ ID NO: 142059 - DNA, 329 bp, Homo sapiens
tattaaaaacacatctcatcttccactggaacgtttagataaaggagtgtggggtgtaataaagaactaagctagagcgagagaaacactgaaaaactaattacgaaatgtcacacaagtaccacaaagagagtgattacttgattaattaatgataggaaccctacatttaagtctttcagttatacttgcatcagtcctctttgcctatcagaatgcggtttgtttctgccaacgaataactatcaaaccactgaggcctaactgatgtgtgattaatgtgggctccattaattgtgtggctgagttttatgcatgaagctgtatcc

SEQ ID NO: 142060 - DNA, 315 bp, Homo sapiens
cttggcaggatggaaccggtcagagggtagaatgccaggctaggaaaccaaacaactctagtcccaaccctggcttttgtttgtatgctaggctgggcacctgccctctgacctcaggtgcctcctgtcaagtgccgatgttacagcagtctgcaatttcttgagcttctttctttcttattgcagccaaagctgtcttatttttttttcttttgagagtgtctcactctgtcgcccagactggaatgcagtcgtgcaatatctgctcactacaacctccgcctcccaggttaaagtgattctattctcctgcct

SEQ ID NO: 142061 - DNA, 398 bp, Homo sapiens
cggcagcagcgggtcccgggactgaggcagcagcgggggcggcggcgggcggaagctgaggtgacgaaggcagcggcggcggcggccgtttccctcacggtggcggagaccaaggcggcggcggcggacggggagcggcccggccccggccccctgctcgttggctgtggcagggccgccgtggggccggcccggctcccgccccccgcggctccccctccggctcctcctccggggagacgccgggggcctggcccggcccgcactcagactgctgctgcagccgccgccgggggagtcggaggcggtggcggcgccatgggcggcctggcctctgggggggatgtggagccgggactgcccgtcgaggtgcgcggctccaacggggccttctacaa

SEQ ID NO: 142062 - DNA, 931 bp, Homo sapiens
atgtatctctcaggcttagagctttatactcactcctttgacagccacgcttctatttctttttaaatctcaaaggtgtgggattacaagtcctgtcttagtaataaacttttgcagataaaccctgagatggtataactgcatcctttcttggcaccttaaatcaaattaactaaatacttagtgaggagagaaaaggaaaacacagtttttttgcaacgtatctgactgggtgagaagccactgctgcagcataaagaaccgacgggaatctgggctttcccactctggaatgaaggggggaattacgggttggtggtcggcttcatgttaggaggacacccctccatctgttcacagctcagcctgtttccaatttaaagcccagatttcaatacaaacctcaatttcttttccccattttaaatgcaaagcaagacttgtgaatcatagtgtctctgctcctgggattcagaccaaatttccccccaaaattctcaggctatttgtttgaatacctgcttacagtggtacacaatgggcagctttgagaagaaaaattgataatcttcacggaagagtaatttgaatgaaattacacttgacagcctgtctccaagcaaacaagaggaacgagggagcctgagctaagctctgaggacttgcccaagccactgctgttggagcttcccaggaaaaaaaaaaaaaaaaaaaaaaaaaaaaataccacacgccgaggagatccggagccttagaggggaggagcccgtacacaagagggaggggaggcccgggacaccgaacctctgagcacccggtgtaacagagcggggaaaagtacaagaccaaggaggtgtaacctagggccacaactacggcgggaacacgggcggagaactatgaatagccgcggggcgagattctcacagga

SEQ ID NO: 142063 - DNA, 601 bp, Homo sapiens
aggatccttaattaaattaatcctcttcccccgagcctgtttccaatttaaagcccagatttcaatacaaacctcaatttcttttccccattttaaatgcaaagcaagacttgtgaatcatagtgtctctgctcctgggattcagaccaaatttccccccaaaattctcaggctatttgtttgaatacctgcttacagtggtacacaatgggcagctttgagaagaaaaattgataatcttcacggaagagtaatttgaatgaaattacacttgacagcctgtctccaagcaaacaagaggaacgagggagcctgagctaagctctgaggacttgcccaagccactgctgttggagcttcccaggaaaaaaaaaaaaaaaaaaaaaaaaaaaaataccacacgccgaggagatccggagccttagaggggaggagcccgtacacaagagggaggggaggcccgggacaccgaacctctgagcacccggtgtaacagagcggggaaaagtacaagaccaaggaggtgtaacctagggccacaactacggcgggaacacgggcggagaactatgaatagccgcggggcgagattctcacagga

SEQ ID NO: 142064 - DNA, 472 bp, Homo sapiens
taaggacaaaaagaaatgcaaagaaattttgagtctcactgagcagtttcatttatttttgaaactattttataaatacttagaaaaaacatacatcaatgttaataaaaactatgattttcaacgtaaaggagattaaaacaaaaataatttaacaaactaaaaggaggaggaggaagaagagtagggagaagagaaggaagaaacccataatgttaaacttgagtaagaattatcaagatgatatcatgctttttactccctcctgtcaagagcctcaatgacagcccaataacaaggagcatacttagcacctaaatagtggtttctaaatacaatctcggcagagtgtagtgactcatgcctgtaatcctagcactttgggaggctgaggcaggcagatcacctgaggtcaggagtcccagaccagcctggtcaacatggtgaaaccctgtctctactaaaaatacaa

SEQ ID NO: 142065 - DNA, 449 bp, Homo sapiens
agctcctggtgtccccaagacagatgctcttcccattcttctctgttttctcccaaatgggatggatattcccatttggtcccagagggcagtcaacctgaacagttgtagctggcactagtctctacctcctcttcaccctaaatatcacggatcaccctacacctggttccatcatcatcatctcccatcataacatttattaagcacttattaggccctaaatactgagccaagggctttccatacatccactgtttaattcttaagacaaccctctgatacctgtgagtcggttccatttacagtgaggaaactgagcctaatagaggttagaaaccttactcaaggtcacatacatagagtgtggctgagacaggatttgccccagccctgtctgattccagaactcttgtcttcttctccacattcccttctgtgccctgcta

SEQ ID NO: 142066 - DNA, 713 bp, Homo sapiens
gttgacatggttaatggtacctccattgcagacctcagttaactttaccacacatgtcatattatgttttatgtgggaagacataaagctcattagtttttggttttaaacagcaactcactgaaatgagtctttgtgctaacacagggaacaaggaatcttctcttccactagtggttgcaccatttacaaagataatgccactataggactttttgacaactacggtttccctgctaccttgctgtatggccggggttgctctctctgatagagtactttgcttctccagtctcttgtcaaaatcctgccctgattgaatacaagcaacctcaggaagccttcactaactcccacctctcatctgaaacataagatcttttcctttcttgaactcttagactgctcttgtctataactcatggtcctcaggccttcttccctgctatggaattgtgcctgtatcatctgactctgctgccactgccctcgcccttctcctgacttcttagatatgtataaacagcccttactcgtgagggaaggatttaaaaaaaaaaacaaaaaacccaaagtgctcctccatttatcctctggttttatgaaagtagtgactgacctttatattgaatggcttttattagaaaaagaaaatctgttaaaagtaaaatatctgcataaaattatataaatgtccatcttagataaaattg

SEQ ID NO: 142067 - DNA, 480 bp, Homo sapiens
tgagtggctccttctgtgggaactgcttcggatgggtctgatgagacattcagtggtcactgtggcgcctgtccctgtactcagtggtcccatgggctggtggctcctgtacacgacagtgtggatgaggcgttgccactgtcgcagggagttctatcagatggagatggcccaggcagggaacagcagaaaacatgccaaatccactgaaaaccagagtgaagccaggcggggaaggccagggaagcccccagggaaggcaggagcccttgtgcagcctctctggtgtggtgcgtggccgggtgtgaccacagtcaaaggcatagccaccttcgcccacacctggcaaaacaacaagaccaggcagctctcccaggccgagcctcagacggcccgtttgctaactgccccggctttgtgtgcacaggtaaggctgcgtgtccaggccctgagcccacctcaggactcggctgtggcctg

SEQ ID NO: 142068 - DNA, 182 bp, Homo sapiens
tcttcagttaggaggttaaagcagaatctactgaagcaagctgcagactgctagtgctggacgttgcaccatttcagcttggtttcattttcctccccagctggttcctgaaatactcctatagatctcaaaccaatgtttgcaagtatctttcctagcgtcactcagagctttatggccac

SEQ ID NO: 142069 - DNA, 163 bp, Homo sapiens
aggttttggaacatttcagattttgaattttcagatttgggctactcaacctttatcttcattttggctgaaactattatttcctcttctttgatgagaaatcttaggctgagggaaattttaatttgccaaaggaacctagaaagtaattgacaatgacagg

SEQ ID NO: 142070 - DNA, 834 bp, Homo sapiens
ctattctaaatataagagaaatgatattggtgagaagccacaaaaatatgaaaaatgtggcaaagccttcaaatgcttgtcacatcttactgtatatatataattcctactgaagaaatcccctggaaatgcaaaaaatgtggcaggatttttaccaatgctcatctttttgcacatgatatcctttatattcgagaaaagttatagaaatataaaaaatatagaaaagtcatatctcctcacattttactaactagcaatgttcatacttaataaaaacattataaatgtaatttctgttgaaagacttcagaaaatataggcctttaaagtgaagaagagtattcttaagacaaacaatacaaatataaagagggttgtagtacctgtacttctctcatggattttgttgtacacattttataataggggaaaacactgaaggagactttcttcaacatcagaaaatttatattggagagaaatcctacaaatgtaataaatgtggaaaaacatttgttcaaaaactgcagcttaaacagtttacactagaaaatattttgtagatgcagtaaatgtgaagaaatatttagtctaaaaagaagagtatgtaaacatcagaggatttacagtagaaagaactaaggaactaacactttagacactgcagtaaatcagagtattaagtattaaaaaaatccaaagttgaacctattagagaatttgctttgtatataagttgaaaagaagatttttgaagagatactacatttaaagtatattttttcacttgaaaaaagtatagattttttgaaaagcatataatagttaatt

SEQ ID NO: 142071 - DNA, 348 bp, Homo sapiens
ggctgaggcaggaggatcagtgccgcctaggagttcaaagatgcagtgagctatgattgtgtcactgcactccagctgggttgacagattgagaccctatctcttaaaaaaaaaattgcttccctcacctctgctgtgaaacagctcaaagtcctgagagccaaggcccctaccgcccacatcctctagctgttggctaatttatttcatcgtcttttaggtaattctccagaattccatcgctttcctctttttcacctcccagttactcctgcactcagttcttcgtctttcctcctccactgtgtagaaactgttcttgctcacaccgccagtgaccgactttcg

SEQ ID NO: 142072 - DNA, 423 bp, Homo sapiens
cgaggcattcctggagtctctctgaatctgctatgattctggaggctgccaatttgcgaatcatttttttttcttgttcaattaaactctgttaaatttaatttgtctgaagttttcttttaacagagttgttccacaaatgtcaagtgaatgaatagatagattaaaacaataaataaaagcctgtattgccatgaccaacatgttaaggacaactctggtgagggctcagaagaagagaggtgtttcccttcgtctggcttttgtaaattcatccaggtcacgactaagtatgttggttaataggaatcctttttttttttttaaaagactaattgtgaaaaaatactcactacttaacctaatcaatatgggccataaacttcaaaggatgcaaattcctcatgtctaaaatttatccaa

SEQ ID NO: 142073 - DNA, 208 bp, Homo sapiens
aatgagcctggcccgaatttgctatgatgggtgagttgtcctcctcacctcaagccaactctgaatcaacatgatttcttctgccagtgtgatcagctgttaccacagaaatcacctgaaagcacagtcacaaaccaatttggctgacttgatgatttgatgtcttgtggagatgttagttttgctcagggacatcttgactctaatg

SEQ ID NO: 142074 - DNA, 412 bp, Homo sapiens
cattcccacagccaccatcatagcccaagctctcattacctcatgcttagattactgcagcagcctcctaactggtctctctgcattcagcctccccatcagcgccaagtgatccttcaacgctgctgccagaggaatctccttaaaacatctttcatcgtgtcagtccctgctcaagaacctataatagtgcccttttgcttactatatcaaatagaagctcctcctcctggtatatgaggcctgccttccacaacagctggaattcattatacatatacatatacatatacatatacatatacatatacatatacatatacatatacgtgtgtgtgtgtctgtgtgtctgtctgtgtgtatccctctgccccacttcccaatgcccagactcccctagcctccttactct

SEQ ID NO: 142075 - DNA, 162 bp, Homo sapiens
aaggagaacctggacagatggaccaccagttgcccatggtaatgcccaatttaatactatccttgtgttggcttttcttccttgtctgtgttactccccttagtctgtagaaatcacttcctgaataaatcatttgtgcattaaccttgtctcagggaacct

SEQ ID NO: 142076 - DNA, 297 bp, Homo sapiens
ttttctaacctaatgttctaatcttttctaacctttatggtgctccctcagccctgattttctctgctacaaaatgttccacagaaccactttaagtagcaattctagcggaaacctcatctgggtggacaaaggagaagcaggattgggcagaaagaaaactgcctttcccacatacaggggaactgtgagaccctggaggaacctggggaatggggcagaagaaacaagatcaggaaaagatggatgactgcaagaatttcaagcgtgcctcatccaggtacaagagctaaaatt

SEQ ID NO: 142077 - DNA, 349 bp, Homo sapiens
gttacctaggctggagtgcggtggcacgatcttggctcgctgcggcttggcctcccgggttcaagcgattctcctgcctcggccttccgagtagctgggattacaggtgcgccaccgtgcctggctgatttttgtattttttggagcaacaggtttcatcatgttggccaggctggtcttgaactcctggcctcaagtgatccgcccacctcacctcccaaagtgctaggattacaagtatgagacaccacacccagcccagggtgaattttaaagcctgaagcccaaagaggccccgggtgagacaggagatgagaagccccagagctgacagctctatgcccacctg

SEQ ID NO: 142078 - DNA, 379 bp, Homo sapiens
ttgctgacttccttgcagttcctgccccagggcgtttgcacttgtcactccctctgcctggagcaggttccctcagacacccatatgactcactcacctcttcactcttagtcccacctgcagcctctgcagtggcttttgctatttcttcactttatttttttctccatggtgcttactactaaaatgccacataacttgtttatttactttgttgtatcatttctgtttctccattagaatgtaagctgcataagggtggattttttgttccgtttgttcagcagtgcctagcacagagcaggcatgagaaaaatgtttgtggaaatgaattgaaattgaattaaaatagtcataaggatgtccagaattctaattt

SEQ ID NO: 142079 - DNA, 196 bp, Homo sapiens
atttcttgccattggtctctcaaagtggtgttaacgctggcatgccctgtgagggtcagtagccctgtgcccctgtggtcccattttcaacttgggctttcaggagaagcagtagctacttaaatttctgtaggatactggcttctgcaatttgagcttactgttttacattacctacactggagttaattgggct

SEQ ID NO: 142080 - DNA, 200 bp, Homo sapiens
taatagaaagtttgtacttcctttgcatttttatcttatttccttttagttttgcctacctggaaccacttcatgccacattcaaatgagaaagtctagttttatgtaagaaacattgaatttttaaggttagattttatgtctttttggcccatgtaagaaggggaaaaaggtttttccctttttattagcctttgtat

SEQ ID NO: 142081 - DNA, 915 bp, Homo sapiens
  misc_feature (743)..(743): n is a, c, g, or t
  misc_feature (746)..(746): n is a, c, g, or t
cggggaaccgcggatcccgcagctgcaggaggcgcccggcccggcggagcagccctagccgccaccgtcgctctcgcagctctcgtcgccactgccaccgccgccgccgtcactgcgtcctggctccggctcccgcgccctcccggccggccatgcagccccgccgcgcccaggcgcccggtgcgcagctgctgcccgcgctggccctgctgctgctgctgctcggagcggggccccgaggcagctccctggccaacccggtgcccgccgcgcccttgtctgcgcccgggccgtgcgccgcgcagccctgccggaatgggggtgtgtgcacctcgcgccctgagccggacccgcagcacccggcccccgccggcgagcctggctacagctgcacctgccccgccgggatctccggcgccaactgccagcttgttgcagatccttgtgccagcaacccttgtcaccatggcaactgcagcagcagcagcagcagcagcagcgatggctacctctgcatttgcaatgaaggctatgaaggtcccaactgtgaacaggcacttcccagtctcccagccactggctggaccgaatccatggcaccccgacagcttcagcctgttcctgctactcaggagcctgacaaaatcctgcctcgctctcaggcaacggtgacactgcctactggcagcgaaaacagggcagaaagttgtagaaatgaaatgggatcaagtggaggtgatccnaanatattggcctgtggggaaatgccaggttctagcagctactgaggggtggccgcctggatatcctttgaaagtgcaacaggagcaccttcagtccacgcattcgggcaaggaatgcccacttggctacacttgacttttgccctggcaaggcacgggccaccggcattca

SEQ ID NO: 142082 - DNA, 279 bp, Homo sapiens
tgctagaaggaaatgtaggctactgggaaaggacagagccaggtctgtgtgcctctccctggagtccctgacacttgctgttttggcttgaagcctttggccattaaagttgcctgtatccaggcatgactggcccctgctcagggccaagagagggtgagtcttgcaaaccaaggaagcccaggtaccctgtctgcttccttcagggtctggaccactcctttccctataggccttccagtcggctggagagtgttggtgcatgtgtgcatgtgtgca

SEQ ID NO: 142083 - DNA, 685 bp, Homo sapiens
aagtgcttgacaaaagtggctggccaatggtttccttttcttgctttagcctcaaggaaagggtaagcctcaggtccccttcactatttgtgctcttattagtcttccacctgataaggatctggtgaacaaatttgaatagaaaatggaagtttccaaatgccattgcaacactcagtcttcctcataagtgtcaagggaggcacaatatctggcctactgcctgcatgttggttgcagcagctcctgggcatacagctaaagtcagtgtctcgcaccactaaaccaccaaggaatttataaacttttccaaaacagcctctgagggtcatgcttctagaaacctggtggacagagatctggctgtacctcctgagatgctctgttcttaaagctgctgacttctagccctagctctggagacagaaccaaaagtctctaaaacaggggctaattttaacgctggaatacagagaggtggaatgactccttctgcccttggagagccacctgggcaatccagggcaactgcaagaagaagaaagggctactcaaaaaaacaaaaactgatttggtgcctgtaatcccagcactttgggaggctgagttgggaggatcacttgaaaccaggggtttgagaccagcctgggcaacctagtgagacaccgtctctacaaaaaaaaca

SEQ ID NO: 142084 - DNA, 665 bp, Homo sapiens
aaggaccagctttttctgcagctgaagaaagtttccatgaggaagaaaaacggaggcgaaaggagcagagcgacctgaccttctgacatccgctgtgagccggcggagcccgattattcacgtggggactcgcttcctcctcggcatgcaggcagcgctggagggcacgatcgcccgggcattgtcatagcagctgacccagccaagcagatgttcaggccccacgtgcttacgacccggaagtccgtgggctcagcggcggcttttgcagggaccccagagcaggcagcctgggcggtgccgctgggactgctcagcccctacctcaatatgggcccacatagctagcctatggccctagtcggcagctcagagcagttcagtgctccctggggtgcattcatgtcccagccacaaccttatgttctgctgggccactttcagcacacccagacagggttcctcttctggtgctgctctgtctttgaaaccgcagatagaccatgctaaccagcacacaggtttccctggtccatcctccctgacccccatgcatgcccaggttctgcatccaggccctagactccttgcctaatcccagctccccgcgaagatgcagccagcaggaacgtctaggttttgcagctaccaaccaaccaggccct

SEQ ID NO: 142085 - DNA, 291 bp, Homo sapiens
taagaaccctggccaaatatacaggatttaatgtcctcagcaccaggcatcacacaggaacgtgcgtgagcccatgaaatacttgctcaataataaatgctgccaagctgctaagcttggggaacctgatgagcactcggcttatgggagactgatgctccccacaggccggcccctgtgccgagactccacgcagtggcttcctcgctgtgacagcctcccctcatctgacgaggtccaaacagcgggtccaattctacccacacctctttgcatagggtgcttctctgg

SEQ ID NO: 142086 - DNA, 154 bp, Homo sapiens
atgcaagaggctccttagaataattgccaataataaaatgtgatttatcaaatagatactatgtactgttaattggtaaatagggatcacgtgctagactgtgtagggcttgatctgtgctttaaacctcagcaaaaccctgagtgaagtacat

SEQ ID NO: 142087 - DNA, 273 bp, Homo sapiens
ctgcaccaccgtctgtcagccaattcctgatttcagtcattagactaagagaaagtcctggacctaataggaataagggtctcacatcaagaattcagtctttaccgggaagtcctgtacttagctagtacgtaatagagcctttccacattctattaagaagtacaggccaggtacagtggctcacgcctgtaaccccagcactttaggaggccgaggcgggatggtcacctgagatcaggagttcaaaaccagcctggccaacatggtgaa

SEQ ID NO: 142088 - DNA, 333 bp, Homo sapiens
tgcggtgggggttaagagtggaaatacaagttagatcaatgccagatcaaagactttgtatctaattcaataaacaactagggaaagcaggatctatttaagattttcttttctttttcttttttctttttttttgagatggagtccccctctgtcactggagtgcagtggtgcaatctaggctcactgcaacctccgcctcccaggttcaagcaattctcctgcctcagcctcccaagtagctgaaattacaggcacccgccaccacgcctggctaattttttgtagtcttagtagagacggggtttccccatgttggccaggctgtctcaa

SEQ ID NO: 142089 - DNA, 428 bp, Homo sapiens
gatgagctccgacccctcataatgagtgcccattccttcttgaaaattctttccccccttagtatcagttacactatcctgcttcttttactgctctagaacctcctcattttccctaaagccgcagacctccataacgcaggttttaggcttttctttcttaatagttctttcagtgcaaatctcctcacatagtattcacctgcctcactctgcatttgactcccaattctttatcattaaacctgtcatttatctgagcttccgagatgttctatcatcacttcaaattcaaagcgtctgaaactcaacttggcatcttttctattttagctctatttctactaatactaaaggactgtcattgccaatatttcactctaattcaaacttcatgttgccccttgagtctttacacctcatccttg

SEQ ID NO: 142090 - DNA, 656 bp, Homo sapiens
atgttcatggattgtaagacttcctattgttaggatgagcatactacccaaattaatctacagatacaatgcaacccctatcaaaatccttatggccttctttttaggccgggcacaatggctcacacctgtaatcccagcactttgggaggctgaggcaggcagatcacttgaggtcaagagttcaagaccagcatggccaacacggtgaaaccccgtctctactaaaaatacaaaaaattagccgggtgtggtggctcgtgcctgtggttccagctactcaggaggctgaggcaggagaattacttgaacccaggagatggagggtgcagtgcactgagattgtgccactgcactccagcctgggagacagagtgggattctatctcaaaaaaaaaaaaaaaaaaactagaaaaaatcaaccctaacgttcatttggaatctcccctaataccaaaacaatcttgaaaaaaagttcaaagactcacgcttcctgatttcaaactggctataaaactaccatcatcgaaaccacatggtactgtgtagggacagacatacagaacacagatcctagaaagaaaatgcttgcatatgtggtcaaatgattttttgacaacagtgccatgatcattcaatggagaaaggatggtctt

SEQ ID NO: 142091 - DNA, 430 bp, Homo sapiens
tgacagatgtcctgtaacacagaggatcgtagaacacaatgaagaattgtcctgtgtactgtcagacttcaggatgtctgccagatagtcatgcaggtgtatttcagccatgaggctgaaaccatgtctcttttggtcctcagtagtgtatttttggtgtggtatacggcatacagaatgacatatatgacatatagagtttgaatcaaaaaagataggcagcagaggcattctcagaaaagatgactgcagataagccgggaaaggcaaagcatcttcctgccttctgctgctgtcttctcatccacatctaggtattaagtgtctgctactattgccagtgtctctgaggacacacagcttcagtgtgctcatctgttctccgctgagctaaggacactaagaccatagcttcccaggctagatgtgg

SEQ ID NO: 142092 - DNA, 346 bp, Homo sapiens
gggcagccggtgctgtcaatggaaagaagcaaccacgtggtataaagacttaagcaatctcatagtaagaaaggatgaaccttgaagtgtgttgacaggtcttggtgtcagcagagagaattctcttaggaacaaaaggattcttctgtgtttgttagagagactgaagaaaacaagcaagaaatagtgctatatcctggaggcagaaaatgtataattgatgacagcagaaacaatagaacaaatatattaggctctattttagagggattgagaaaaaaataattaggaaattgcaaagagaaagtggaaagaaaatatttcagaagggatggcaaataaaaga

SEQ ID NO: 142093 - DNA, 728 bp, Homo sapiens
gtgtctggcccagcctagggggcaggtgacatgtaaagagagctttggctagccttgtgactattttcttaaagtctcgctctgtcacccagactggagtgcagtggcgcaatcccagctcactgcaatctccgcctcccaggttcaagcgattctcccacctcggcctcctgaggagttgggattacaggccaccacgcctggctaatttttgtatttttgtagaggtggggtttcacgttggccaggctggtcttgaattccgcgtaacctcaagctatccacccacctcggcctctgaaagtgctgggattacaggcatgagtcactgcgcctggcctctctcctttcaaatcatcctccttatgacactcaaagtgtctttcttcttctttttttttttaaatttttttgagacatggtctcactctgctgcccaggctagagtgtagtggtgcaatcacagctcactgcagccttgacctcccaggctcaagcagtcctctcacttcagcctcccaagtagctgggactacagacacataccaccatgcccgtctaatttttttttttttttgagacagagtctcgctctgtcacccaggctggagagcagtggtgcaatctcagctcactgcaagctctgcttcccgggtttatgccattctcctgcctcagcctaccgagtagctgggactacaggtgcctgccaccatgcctggctaatt

SEQ ID NO: 142094 - DNA, 237 bp, Homo sapiens
taactcttccattagtcagggagacatcagattggcaaaaatttgaaagacatctggtattagtgagattgtaggaaaatggatgtttattgttagtagtaaggattgcaaactaacctttttggaaagcaatctggcatatttatgaaaattcaaagtgttgtatcccatctaaaaagtgttattgcatgaagtttgctaacttcattataaggaatgttatgtagctgttaagag

SEQ ID NO: 142095 - DNA, 288 bp, Homo sapiens
caggcctgtatgttttacctgtactattacagtgagctcctatctgatccctttgcctcttgtctctccatttaaccctgtcttaagcacagaataaggctctaattatgctgcataatatgttaacaatcttttactgcatatagagcgtagctttagtttcccagcctggcatttatttaagccaaggacactgcagtcagttcctgacctaccttcccaactaatttcccacagctctcccctctctctttttttgaaacagggtctcactgtgttgcacaggct

SEQ ID NO: 142096 - DNA, 464 bp, Homo sapiens
aagaaaaacaactgctccagatcacaagagggaggagggctcagaaaattcctccctatctctcatctgtggggtattcattcttatcttagaagaacaaacacaatttgaaaatcactgatctaggccaatcctttaattctgaggataagaaaatgagggctcagagaagttcagaaactgcccaaggtcatatcataagtaacagatagaggatagaagccaggactgctgaccttttgtgcagttctctttaacttccccaggctccttcaataaaaccaggagctggccaggcgcggtggcgcacgcctgtaataacagcactttgggaggccaaggtgggcagatcacctgagatcaggagttcgagaccagcctggtcaacatggtgaaaccccatctccactaataacaaagtagccagacgtggtggtgtgtgcctgtaatcccaactgcgtggg

SEQ ID NO: 142097 - DNA, 1292 bp, Homo sapiens
gaaacagcagagctcggcagggtcagagggcaagcagggcagagaaaagagaggggaaaatgagccccgggagaggggaaggaagtggagggaagtttttcatgcccttcaagtaccaaacaaaacaaagataatttcaaaagtggtcagccactataacactgcttagagaattaaagtattgacaaattgaagagtgctttaaaataaagtggatggggcataagcatgtatgtcttggtgttagttgctccttatacagccggtactaaaggctggtgggtgaagcttaccacattttaaaaagaaaaaggcaggcacacatactaaagttgaaaatgcaggcaggaaggacatttacttttcataaaagcggatcagaaaagcatctcctatcacagatcatgtattttatgccatgctgaccaatgttgggggataatctcattattttgtgatatgagaagatcctttgatgctggtaacaagaaccaatcatcctgacttaaatcttaatatccccacaggttctttgtcatgcgtcttcaagatgtgccctggccattcatgcaagtttcaaggactctgaatctgttgagaaaaagaggttacgttccaattctgctttagttccaacccaaatgctgagaaacactccatggaatttaattacagggcgataactgtgatcttaccaagatttatgaacaggaagatccttggtgattgtagtcagtcaaagggtggctttgacatagcacctatctgttagggcaaatactgccagggaaaaggtgacatttggaatcatctgggattggactcttgatcaatagatgcgaaatgtcaggtggacatgagaactgttggtctttggtacatatgtgttgcaatgagtaaggatgagtaatgtgaaggaaaagtagaatcttgggaccccaaactcactatgccaaagggaaagttaagcgtgggagactgagtcaggcaaaaactgccttccttttgttcccaaatagatggctgtaatttcacatgcttgcgttatgtgaaatgtggattcattgagtgctaatcagagccccacaagaatgaaagcacttgccttgctgcctaccctccctcctcttttttcttcccctcctgcttgctcttttccctttaaataatgaagttcccaaaaccctctttggaaaaagcataggtcacaaatcctattataacttgcatttctttttcctgggtacattctcaacctgggcaaaataaacctctaatcaacgaaaaaaaat

SEQ ID NO: 142098 - DNA, 821 bp, Homo sapiens
cgagctcggtaccctaatctgtactcatcgcgcagacaacagatatttatatgaatgttctttgtcatgcgtcttcaagatgtgccctggccattcatgcaagtttcaaggactctgaatctgttgagaaaaagaggttacgttccaattctgctttagttccaacccaaatgctgagaaacactccatggaatttaattacagggcgataactgtgatcttaccaagatttatgaacaggaagatccttggtgattgtagtcagtcaaagggtggctttgacatagcacctatctgttagggcaaatactgccagggaaaaggtgacatttggaatcatctgggattggactcttgatcaatagatgcgaaatgtcaggtggacatgagaactgttggtctttggtacatatgtgttgcaatgagtaaggatgagtaatgtgaaggaaaagtagaatcttgggaccccaaactcactatgccaaagggaaagttaagcgtgggagactgagtcaggcaaaaactgccttccttttgttcccaaatagatggctgtaatttcacatgcttgcgttatgtgaaatgtggattcattgagtgctaatcagagccccacaagaatgaaagcacttgccttgctgcctaccctccctcctcttttttcttcccctcctgcttgctcttttccctttaaataatgaagttcccaaaaccctctttggaaaaagcataggtcacaaatcctattataacttgcatttctttttcctgggtacattctcaacctgggcaaaataaacctctaatcaacgaaaaaaaat

SEQ ID NO: 142099 - DNA, 528 bp, Homo sapiens
tccaccagggaactcctatgcaaagattgtctggaggacaccctcactgggcagaagtattcatgaggagcacatgacctcagctcatatactgtggcagagcaaaaggcactttagctggacgctgtcagataactcactttcaaagggagatccgagctaagtgttctttcttctctctctctctctctttctttcttccagaggcttgcttcttcgcccaggctggagtgcaatggcacgatctcagctcactgcaacctctgcctcctgggttcaagcaattctcctgcctcagcctcccgagtagctgcgattacagacgcatgccagcacgcccgacatagtgaaacccccgtctctactaaaaatacaaaaattagctgggcatggtggcgcacgcctgtagtcccagctactacggaggctgaggcaggagaattgcttgaacccgggaggcggaagttgcactaagccgagatcacaccactgcactccagcctgggcgacagagcaagactccgtctc

SEQ ID NO: 142100 - DNA, 912 bp, Homo sapiens
tccctgaaccactaaacttgttcctttcatttacaaaagagatacctgacatcctgagacactgagaaatgtcctgaagtcacacagctaatggcagaactggcactaggtccaaatcttgtgataatgaacaccgtaaggttagctagcttcctactttcccttgaatagtgcttttctccctatgtaatatcttttattatgatatttgtggtttagaaggcatattgagttattttgcagaatcataatggacccgcacaaaatctcagaaccatatctgttgacattttttctcatagaaatatcatggttaccccatttgttaatgagcattaatgttttctgaacacttccaaagattaatcaaacataaatattcattgtctgaaaatgtctttaagatacaattcagaggtccctatttcctttgtacatacacacttagaaagaaaagacagaaaaggaagaggaaggaaggaaatattttgagaatatattgagaagaattaagaaaactcttcaatgaagtgttaacaaccaaaccctacagacggtatcagaaacagcaaatagatattcctctaccctttcacagtgagtgagtgagtacagaagaatgctcatgatagttttgccttcattctactttctgtggacacagagtaatgaatatttaatgggacattaaatatgcccttcaaatctataattttactttggtaaacgagatttaacatgatgtcttttatgctcctaaaacatcttttttcaaactccattccttagaacattcttctactgagatgatccaagaccaaaagtgttctttggtacttgcttataaagtgatagtacatgttagcatataatgtattttgaagagtgaagtaaatgctattgataacagta

SEQ ID NO: 142101 - DNA, 947 bp, Homo sapiens
atgaacttgtcaacaactaatggcatacagtaggacagactgagaggaagggacaccagagttcttgttgatgacaacttttggaaaacctgcttggccaaactgcagaggctcttagggaaagtacagatcatctgccccagatgatttagtcagcaggcagagtgtttgatttcttctgacccaccattgaagttggagaaaatatgactatccctcccatgacctcactttactcttagcccttgactttgctgctgaagctcaaatccttcctccagtggcaatctctgcccttctcccagctcaccctttagaaatgcagggaggtcatctcttgatgatgctctctgccagaacagtagaagagaaatgaaaggaatgtggctattgttctttgaaacctccctctgaataaggtgaataaaatttcagtttctggaaggaattgtgatatgatttggctgtgtccccacccaaatctcatcttgaattctcatgtgttgtgggagggacctcaggggaggtaattgaatcatgggggcaggtcttttcaatgctatccttgtgatagtgaataagtctcatgagatctgatggttttaaaaatgggagtctccttgcaaaagctctcttctcttgtctgctgccatgtgagatgtacctttcatcttccaccatgattgtgaggcttccccagccatgtggaactgtaagtccaattaaacctttcttttgtaaaaaaaaaaggggggcttaagttcccgaaggggcaggctaccgttccagtttgtacaggggcccaggggggaattaaaagacggcgggtaacaccggcggagaacgctcggctgggagcccctcgcggcgatgcgaccaccagaccggaaaagatggcacgcccgggcgtgtagttataaactatagtcatattctctcattcccag

SEQ ID NO: 142102 - DNA, 182 bp, Homo sapiens
tgcagggtaggtgaggcaatgcggaggcacagatgcagagcacatctaatggtcgtcagcagtcatggcaagtgaccaggaaatcccaagcctcccggcattgtccaagtcacttatgcacagaataagtctgttccccttgtgatcccattgtgtattttctcacataccctcgcctaaac

SEQ ID NO: 142103 - DNA, 201 bp, Homo sapiens
tgcaatgccatgtacagaatcatgagttagatatttgccctggtaatccattctggattagttttgcatgaagcagaatgagggaaataattattttctctgctgacaggtagttgccaagtgtgaccagccccagccccacttcttcccaggaattctacaagtacctactctattttttacagaatgtagttaatggtg

SEQ ID NO: 142104 - DNA, 496 bp, Homo sapiens
gatttagcaataagctgattccatgccgctggtggaagacggaggaatgcttgagggaacgtttattgcatgctgaatccagagctggaaaccaggtttgagccaatctaggcacgggctccctgagcagggcaccctctgtctctccacctgatgggttgattagactcacagagaaaggaccgtcttacacctggaaaatcaaaagccaggggcagcctgaagacacgctggtcatgccagtactctaggggctaggattgctgtctcatgacggtgcttggcccgagaaagcacatggagagtttttcgtcaagaagtgttacctcttttatggagatgctcacagactgggcatttcactgtcccctgtccctgagacacagattctttttctgaaatctggtcaaaataaactggcgatgttgctgcagccaagctggcttactctgggcagtgccttttttctcacgaagatctggcctgacgggactcc

SEQ ID NO: 142105 - DNA, 320 bp, Homo sapiens
aaaaagtgtatttagccgggcgtggtggtgcacatctgtgatcctgggtactcaggaggctgaggtggaaggatcgcctgcttgagcccaagaggttgaggctgcagtgtgccatgatcacgccactgaactgtagcctgggcaatagaacaaggccctgtctcaaaaataagtagtacaaaaataaaaagtaaaagtataaagtttatttactccatcagctgagatttgttttcttctacaagtacaatatttaaaaatggcaaatttaaaaacaaactgctccacttgtctaaaatagtaaatatacaaaaaaactt

SEQ ID NO: 142106 - DNA, 946 bp, Homo sapiens
cactaagaaccaattaagtgacaaatcctggatttgattttgggaaaatgtctgtgcataaggaagtgaagactcccaggaacatgcaggcaattaacgttgcaaaggtcagtgatggaagtaatcccttggactgggcgatagagcaggcttgctaaaaccacaatttctgtggttgaggagtttttcattgcctaccccatctacactgtgtaataattagatgtgtgtggtattgtttaattacacataagttatcctgatgggaattattagtgttgacatatatcctgtttacaggaggagaaaatgaatccagggaaggcagctactcatttatatctctttatgctaaatgttattctttattaggttctgtgggagtttacttaaaaaggaaatcgaaattacttgttctccaatttcacatcttcttaggaaaataataacactttgctttttaaaagacataaaaacatttaccaagcaagtacaaaggagcatgtagtagcgaggtacaaaaggaagcctggagtgcagtgggcgatctcggtcactgcaagctccgcctcccgggttcacgccattctcctggctcggttccgagtagctgggactacaggcgccgccacaaaaccggtaattttcggatttcggaaaacaggggttcaccatgggtgggccggatggtttcgaatcccgactcatgatacgcaaagtcggggtccccaattgtgggtgtcaggtggacccagggccggcaaacattccaaatctcaagggtagcccggagaaaagagaacacgggaaaggctcccaaagtatgggaagacaggcctcacagaatgggtggaaaccaccagctgggtgtcgcagaactcttcacagtgtgaacacaaaaaacatcgtggtagagggaggaaaaagccgctgaggaaaaactcaa

SEQ ID NO: 142107 - DNA, 495 bp, Homo sapiens
taagccaccgtgcccgaccaaattttttttattataccacacaccctaagtaattctgatacagatgaaccacagactacactttgagaaacaccattctggatgttcacaggcaatgttatcaccaatttgaaacttcatacaaccatgaaaactgaacctacactggtaatttatgttaaatacactaaaactagaagcaaaactaatatgatacacaacagctaacttttatactgaggtactgtgctgtttttcagttttcccttatttaatccctactatcatatgaagtagatttcaccacccatttcacagataagaaaaataactttccatatcacatggcttctagttggcagaacacaggtattaaactcaaactgtctacccaaagtatatcctcctcacctcgatgttataccatctctccatttgtaatctatttgacattttaataagtaaaatgaagttgggtaaaaggagagaaggcac

SEQ ID NO: 142108 - DNA, 650 bp, Homo sapiens
ggagagttgagaactgagatttttgtttattttatttatttattttttgtgagaatagcaaaggctttacaatgtgactgcttactaatgtcagaaaaatagcaattcagctcttactttctcccctatactttcagggcgttatgacagttttaatgtgagttgtaaaatgtagggaggtatactctaattctctttcacacacataaatcaagtttcaggctcttttggaaatgtttactagaaaaaacatcatgggcagattttaaaatgcttttggattgcatgacggcgtggtgccacttccattgaagtgttgtaatattttattttccttcccaaagcgtcaagataaatcctgtaaacattttttctccttttgttgttttggttgtactattgtgtttggctctagccttttgcccccagggaaacaaaagtgtttttttttaactgcagtgctcccgctgagtactccagctgttgggcagcagtttcaaagttgttccctatttacacactgcaagtctggcggatcacaaagcttcctacatcttatctgaaacacaatatactaatttcagggatatatttagaaggaaaattgttgtcaaaatttactataatgtagcttattttatcttttaaat

SEQ ID NO: 142109 - DNA, 459 bp, Homo sapiens
tctatcattctgtttgtatgaaacatctaaaataggcaaatctatagggaaataagaatccttctatttccagaaaatagattagcagttgtctacggctgggagtgggaatggggagtgacagcttagtggaagccaccgtcacatgttgcatagaggaccgtgtcagccgcctcactggtctccacactcctgtttcctgacaaagcattctggagtcctctgctgaaggtctgatggagtgagccaggagtaggcaaacagcccaataggtgtggagggtggttagtccttgagaaatcatatgaacaatgcaggggttcgggatgcagatacatctaggaggtaggggcatgtgtgtggacagatttgacggtggtgagaaggcaggggccagctgagccttcggggtgtatctgactaagtacaagtcaccatggccgtgccctcacagcatgt

SEQ ID NO: 142110 - DNA, 434 bp, Homo sapiens
ttttgtgttttttgtaaagaattttccacatgctggatgaagtgttttttcttaagtacccatatttctcttctaacatttatatgttttcagtgcttatgggtacaacttcattgagatataattgagtatgatgaaatcttcagctcatctagaatttactttttgttatggaataagaactcagctctgcttattttccaaaccattagtcatgtggattagtggcatttattacattacattttggcactctattctgttccattgctctctgcttttccagttacactttttaaacatgagacagggtctcactctgttgcctaggctggagtgcagtggcgtgaccggagctttcagtgagctgagatcgcgtcactgcgctccaacctgggcgacaaagtgagactccgactcaaaaaaaaaaaacc

SEQ ID NO: 142111 - DNA, 290 bp, Homo sapiens
cctcacacatgtctactgaaggatttcctactcagaagtggagccccacctttgaacccccaggcctgatagggtttccttgccctacctcagtggcatctacagtcaaagcttaggcttggcagacattgacatttgcagtcaggatctgccacttatgttcccgcctgaggcttagtttctgggacttcagctgttagaaaaacaccaaacttctgaagacccaagatgccttcagtctgggtctccgctttcgcctgcaaggggctgacttccagcttggcaaaggg

SEQ ID NO: 142112 - DNA, 745 bp, Homo sapiens
aaagaaaaatcaaagtaagacaaaaagcaggtcctttgaaaacatcaataaatttgataaacctttaacacgactaaaaaggaaaaacagggaaagaatacaaattatcaataccaggaatgaaagaggggctattcctacataatattcagacattaaaaggataataaataaatattataaataactttatgcatataaacctgacaacttagaatagatccatttctcaaaaaacacgcactgtcaaactcactcatgatgaaatagccgaaaaagttctatatctatcaaagaaattgagctcatagtttaaaacctttcaaaaaagaaacttcccattccagatggtttcattgtttcattttaccaatcgtttaaggaagaagcaatgccagggctatataatctcttccagaaaatagaagaaaacacttcctaagtcattttacaaggctagaattactgacaccaaaaccacacaaaaatagtatacaggctgggcgtggtggctcatggctgtaatcccagcactttgggaggctggggcgggggatcacttgaacccaagagttcaagatcagcctgggcaatatggtgaaaccctgtctccactaaaaatacaaaaaagttagctgggcgtggtggcacacgcctgtagtcccagctacttagggaggctggggtgggaggattactcaggcctggaaggcagaggttgcagtgggctgagatcacgccactg

SEQ ID NO: 142113 - DNA, 513 bp, Homo sapiens
cacagccaagcatcagaggtttcccaaggaaataaaagctaggagagaaacacatgcttaccttgtagggcatagattcaaagaagatggacgtggcagagattttcttcttgtctgtcatgaacccatgggtcaggtggcccccatccggaaggtccaggcccatgatgcgcccatggggttccaccagggcagtgtacacagcaaagtttgcaggggagcctgaaacgagtggaccagaggagacatgattatttctaactgaggtaccaagtggcatccgggaccttggccactaagccttcacccaggagtggcgagaacaggccttgtaccttccctgagctccaggaggtgccccttcaccaccagccttgagaggtgaagttcagagagagggcactgcctgggagggggtatagagctgggagcccaagggtaatgcagagggatgcgtgacttatcttttatttatggcagtttttttttttttttttttttcagtgcaggggc

SEQ ID NO: 142114 - DNA, 264 bp, Homo sapiens
tgtgcttcctcaaacctctctgcctttgcatatgttgttccctctacctggaacatactgcacgttgaacctgactcatcttccgggacctgcttcaagcttccctgctctgagcagttctccctccctacccctcctatactctgctgaatgaagaatctgcttctctctgttcccactgctccctgtgcacaccatttaacaaaaaacagttccattcacagatggccatgggcctagcaaagagagggtgcttcatggggc

SEQ ID NO: 142115 - DNA, 214 bp, Homo sapiens
tctatacaatcacccacaagcttcttttttctttttaattaggtttaagcttcattgtacacaaagcttcctgaaaaatcactcccccctcccccaggcatccatcacgtcttcccatgatagcaggcccatcttggctttctcaggggatgtagtgcgcgtctgttcatgacttctttaagttcttacctcagtgtttaacctcagtcctcct

SEQ ID NO: 142116 - DNA, 460 bp, Homo sapiens
ctgtgggcctggactgaagactccctgtccactctgccactccccaaaggcttttggtaggtatttatgtttggatcagggagatttttgttcttgactacagtggtgattggatgcttacatgctgtctaagctggccctgtagaattggaatacacttaatgagcagaataattgaaaagtttccttcctccttaggaattcatcattacagttataaagttatactacagtggccttggaccatctcacctcaccattatgctctcaaagggactcgaaactctgtcaggtgtgggagtccctacaaattgaaagcttgttctatagtttggacttcttccttctcaaatctagtctcagtgctgtagatacagattactcaaggcatctcaatagatgttgttgttgacgtatgaggacctgtggtcaagtagatactaatggaagactgctagac

SEQ ID NO: 142117 - DNA, 520 bp, Homo sapiens
gtggagttggatctaagagaccaggctgaggaggctctggcgtaggacactgcacaggtgacaagcagcaaggagggtggggcgaagtcagcattgatggccacggggctggagcagagaagaaggtggggcacaagtgtcatctcatgggaggctggcgccacctcagaaggtgaatgggttcagcttgggttccaggccagagtctgaagttgagaggactccgttgggtgctgggctgtgagcccaccgtgggggcaagactgggagcagcagacccagcagggcccttgtaggtaatcaccggctggcactggctgggggccaggtaaagccagcagaggctgaggggtgctggagtctgggtgtgtgtgaacgcagagtgggtacgctggcacagtgcatgggaggccgtggattcccaaggaccccagggctgtggctggagcagctggaaagacggagccgccgcttcctgagatggagaagcctggtaggtgggtttgggggagctcaggaa

SEQ ID NO: 142118 - DNA, 427 bp, Homo sapiens
aaagagcaggcatctggagggccccacacacatagaccaaaggactgagcccgcctggcattcctccactcacagcacaaatactcagccctgcagccagggaagggtggggtctccctttgctgcccaagtgtgcccccttgcccgtctgatctctcctgttaggtcagcctcattcagggctttgtgccaggtcctgtcctggagtctcagtccgggacagcagcctggctcttaggcagtccagaagcagcagggcaaaggggggcaaatactaacacggggtgtcacgggatggccaggaggagtcctgctcgccacccaggctcactgtcctaaacctccatctgaaaccgcatctcgggtgacctcagattgtgctaggaaagcctagttaataaatctgcctcatctcaaaaaaaaaaaa

SEQ ID NO: 142119 - DNA, 518 bp, Homo sapiens
tgaaggggtaaatactttaaataaggtggtcagggtagggctttctatgtgagtgacatttgaacaaatgaggtgagggcatttgccatgtgaacatcaagtggggtggaagtaagggataggcaatgaaaatggcaaacacatcctgagctcttcctatgtgtccagatgttcttcacactttacatgggttaaatcatttaattctcataataaccctacgaagtaattttcatactgatccccaacttatagaggaggaaaatgagggacaggttgaatgatttgtcctcagagaagccatgtggtagggctaggacaagaacctgttcttgcactgctataaagaaatacctgagactgggtaatttacaaagaaaagaagtgtaattggttcacagttcagcaggctgtacaggaaactggcatctgctcagcttctggagaggcctcaggaaacttacaatcatggcagaaggtgaaggggaagaagacacatcacatggccactcaataag

SEQ ID NO: 142120 - DNA, 431 bp, Homo sapiens
ttagtttcccagagaagagtttaactctttagaatattgtgggacaccctaggattgcagagaatggggacctattgtgtaccttgtgttgaaggcagaatacccctaagcacagtagagttagtggccactgcatcccagaatattttgtcctgtttctttgataaacagcttaggatcatagtaagcatgactcttatcagagaggctctaagctggatattaggagaaagacattctgtatgtgctttacatttttaggttgttgctgtcattgtttgttttgttttgttttgtttgttttttgagacagcctcgctctgtttcctaggcaggagaatcacttgaacacaggaggcagaggttgcagtgagccgagagtgcaccattgcactccagcctgggcaaaaagagcaaaactccgtctaaaa

SEQ ID NO: 142121 - DNA, 1484 bp, Homo sapiens
cgcgcgcgcgcgcggctccgccccgcccgcttggcgcgcgcccccgccaggtccgctctcgtcccccacccctggcgcggacggggtggttccagctcactctcctcccccgagcggcagcggcagcggcggcggcggcggctgctgcgggcgctgaatgagagacggtgactgttcgggtcgacgagtgctactctaggcggcggcggccgtggcggtgaagcgtgaggccggcatcgtctttccgtcctctgaggcgacggccgcggctgcacaggaataatgtatttgtggccttggacatgaggcagtcagtcctctgttgctgttaacataaggtcagggactgatgaggaaagcatggacctaatgaacgggcaggcaagcagtgtcaatattgcagctactgcttctgagaaaagtagcagctctgaatccttaagtgacaaaggctctgaattgaagaaaagctttgatgctgtggtattcgatgttcttaaggttacaccagaagaatatgcgggtcagataacattaatggatgttccagtatttaaagctattcaaccagatgagctttcaagttgtggatggaataaaaaagaaaaatatagttctgcaccaaatgcagttgccttcacaagaagattcaatcatgtaagcttttgggttgttagagagattcttcatgctcaaacattaaaaattagagcagaagttttgagccactatattaaaactgctaagaaactgtatgagctgaataaccttcatgcacttatggcagtggtttctggcctacagagtgccccaattttcaggttgactaaaacatgggcgttattaagtcgaaaagacaaaactacctttgaaaaattagaatatgtaatgagtaaagaagataactacaaaagactcagagactatataagtagcttaaagatgacaccttgcattccctatttaggtatctatttgtcagatttaacatacatcgattcagcatacccatcaactggcagcattctagaaaatgagcaaagatcaaatttaatgaataatatccttcgaataatttctgatttacagcagtcttgtgaatatgatattcccatgttgcctcatgtccaaaaatatctcaactctgttcagtatatagaagaactacaaaaatttgtggaagacgataattacaagctttcattaaagatagaaccagggacaagcaccccacgttctgctgcttccagagaagatttagtaggtcctgaagtaggagcgtctccacagagtggacgaaaaagtgtggcagctgaaggagccttgctcccacagacaccgccatcccctcggaatctgattccacatggacataggaagtgccatagtttgggttataatttcattcataaaatgaacacagcagaatttaagagtgcaacgtttccaaatgcaggaccaagacatctgttagatgatagcgt

SEQ ID NO: 142122 - DNA, 1992 bp, Homo sapiens
cgcgcgcgcgcgcggctccgccccgcccgcttggcgcgcgcccccgccaggtccgctctcgtcccccacccctggcgcggacggggtggttccagctcactctcctcccccgagcggcagcggcagcggcggcggcggcggctgctgcgggcgctgaatgagagacggtgactgttcgggtcgacgagtgctactctaggcggcggcggccgtggcggtgaagcgtgaggccggcatcgtctttccgtcctctgaggcgacggccgcggctgcacaggaataatgtatttgtggccttggacatgaggcagtcagtcctctgttgctgttaacataaggtcagggactgatgaggaaagcatggacctaatgaacgggcaggcaagcagtgtcaatattgcagctactgcttctgagaaaagtagcagctctgaatccttaagtgacaaaggctctgaattgaagaaaagctttgatgctgtggtattcgatgttcttaaggttacaccagaagaatatgcgggtcagataacattaatggatgttccagtatttaaagctattcaaccagatgagctttcaagttgtggatggaataaaaaagaaaaatatagttctgcaccaaatgcagttgccttcacaagaagattcaatcatgtaagcttttgggttgttagagagattcttcatgctcaaacattaaaaattagagcagaagttttgagccactatattaaaactgctaagaaactgtatgagctgaataaccttcatgcacttatggcagtggtttctggcctacagagtgccccaattttcaggttgactaaaacatgggcgttattaagtcgaaaagacaaaactacctttgaaaaattagaatatgtaatgagtaaagaagataactacaaaagactcagagactatataagtagcttaaagatgacaccttgcattccctatttaggtatctatttgtcagatttaacatacatcgattcagcatacccatcaactggcagcattctagaaaatgagcaaagatcaaatttaatgaataatatccttcgaataatttctgatttacagcagtcttgtgaatatgatattcccatgttgcctcatgtccaaaaatatctcaactctgttcagtatatagaagaactacaaaaatttgtggaagacgataattacaagtaggttggatcttcaaaagtggtttgtataactttgtcctgtcctccacctttctatccctatgtatttaaacatctaaatcctacatggtatcatacaaaggactaatccagtggtttacagcagtaaaggtactaacatgtattacttcttaatcacttgttatgattgagccaatatacaaatacctcatctgttctttttaatattttatctctgtttgtagagagctaacgtttgatagttctaatttaaatttcttcctttcccccatattcaatcattgaatccttatagaatttgtcttttaatagacagaaaaattaatgaaactttttaaaatagaaaaattactcttctttaatgctaagtattgacacatcgttgtttgtttttcattgtttttgcggattgagagacttggtccatcttgtctcaggagaagaaacctttctccaatgtagcagaattatcctcttccctgtattatagcaagttctttattaaagatttttgaggccgggcacagtgactcacgcctgtaaccccagcactttgggaggccgaggcgggtggatcacttgaggtcaggagctcaagaccagcctgaccaatatagtgaaacactgtctgtactaaaaatacagaattagccgggcatggtgcatgcctgtaatcccagctgcttgggaggctgaggcaggagaatcacttgaacacaggaggcagaggttgcagtgagccgagagtgcaccattgcactccagcctgggcaaaaagagcaaaactccgtct

SEQ ID NO: 142123 - DNA, 870 bp, Homo sapiens
ctcaagcgatcctcctgcctcagcctcccaaggcactgtgattgtaagcttttgggttgttagagagattcttcatgctcaaacattaaaaattagagcagaagttttgagccactatattaaaactgctaagaaactgtatgagctgaataaccttcatgcacttatggcagtggtttctggcctacagagtgccccaattttcaggttgactaaaacatgggcgttattaagtcgaaaagacaaaactacctttgaaaaattagaatatgtaatgagtaaagaagataactacaaaagactcagagactatataagtagcttaaagatgacaccttgcattccctatttaggtatctatttgtcagatttaacatacatcgattcagcatacccatcaactggcagcattctagaaaatgagcaaagatcaaatttaatgaataatatccttcgaataatttctgatttacagcagtcttgtgaatatgatattcccatgttgcctcatgtccaaaaatatctcaactctgttcagtatatagaagaactacaaaaatttgtggaagacgataattacaagctttcattaaagatagaaccagggacaagcaccccacgttctgctgcttccagagaagatttagtaggtcctgaagtaggagcgtctccacagagtggacgaaaaagtgtggcagctgaaggagccttgctcccacagacaccgccatcccctcggaatctgattccacatggacataggaagtgccatagtttgggttataatttcattcataaaatgaacacagcagaatttaagagtgcaacgtttccaaatgcaggaccaagacatctgttagatgatagcgt

SEQ ID NO: 142124 - DNA, 247 bp, Homo sapiens
gggattaatataatgcatcctccaataaatacaaagcagcataagcctaattccatagggtaacatgatacaatgtaagataatactctgcattaaaaactgaattggagagagacaagacagatggagagagagacagagaggcagagaaaggccgagcagaacagggacagagagtgagggctgaactgaaagagcagcgaatcaatgttgtactgtaatttaaaaaccaatatacagtaaatat

SEQ ID NO: 142125 - DNA, 154 bp, Homo sapiens
ggtggtctcaaactcttggccccaagtgatcctcccacctcagcctaccaaagtgctgggattacaggcataagccactatgcctggcctcttatgtatttttaaaagcagttaggtgactgaggtagtacaatttagatttagaattaggtga

SEQ ID NO: 142126 - DNA, 560 bp, Homo sapiens
ggaggaaagcagaggctgccgctgaccatcctgcagccctcgctctggctgctcacagctctccaccttctctggacttcgtcacttcagtatgtgaaacaaccatttcaaccagcttggacaaaagagagaagccaagatggggctgagaaaccaatgcaggcaggcccagggacccaggagtcagggaccaggtgctaccagatgcttgctccgactcgtgttgctgctgtcttctctgtgcctcaactctgtcctctgtcactgcaggcagcttcctcccaaggtgatctcgatgggataaccacattggtttgtttagtaaacactgagaccaactccaccatccagaggcctgacagacaaatggcctgagacagggctgggaaagttttgcttctggttgggacttcaggaagagttttgttttgttttgttttcccccaagggaacaagcccttgaatccgggaggccaaggttgcggtgaaccgagattgcgccattgcactccagcctgggcaacaagagcgaaactccgtctcaaaaacataaaaagtaa

SEQ ID NO: 142127 - DNA, 453 bp, Homo sapiens
gattgagaactgcttttgagcaataaatcaaccagtgaggtagactcttgtggtatcacctttcaacatggtcaagctatggaaacgtgattttaatttctcaggttttttgtttgtttgtttttgtttttgtttttaatctgccagatggagaccatgccattgctagtctaccttgaaagacagatgtgaagaatgaagtcaggggctttgcaggaaggtgatatatcccacctcatgaaatcaggcttcaccacaagattgctttgaccaaggggacgtgagtagaagtttgaagaaccacagactggtccatcaccttgtttcttatccctctgacataagcaatgtcccagactggggctgttctgttagcctggcttccagaatgaagagagctgatctacatggcatatgtaacataaataaacctttgttattacaaaccactga

SEQ ID NO: 142128 - DNA, 526 bp, Homo sapiens
ggaggaaagcagaggctgccgctgaccatcctgcagccctcgctctggctgctcacagctctccaccttctctggacttcgtcacttcagtatgtgaaacaaccatttcaaccagcttggacaaaagagagaagccaagatggggctgagaaaccaatgcaggcaggcccagggacccaggagtcagggaccaggtgctaccagatgcttgctccgactcgtgttgctgctgtcttctctgtgcctcaactctgtcctctgtcactgcaggcagcttcctcccaaggtggaaggtgatatatcccacctcatgaaatcaggcttcaccacaagattgctttgaccaaggggacgtgagtagaagtttgaagaaccacagactggtccatcaccttgtttcttatccctctgacataagcaatgtcccagactggggctgttctgttagcctggcttccagaatgaagagagctgatctacatggcatatgtaacataaataaacctttgttattacaaaccactga

SEQ ID NO: 142129 - DNA, 498 bp, Homo sapiens
tgttgagtctcattgttggtagaaagtttataggaaaagtgcttggaaactgttgctggtcttccttccttcctttaaccttgagataagaatgcctttgtttgagtctcaagcatgtctcaagttatgtaactcacttgtattaaaactctccctgactgttttatattcagctttctagctgccctggtttgcagctttaattgaataggtggccttgtatttatgctaattttttgtctttctctttcagatctcgatgggataaccacattggtttgtttagtaaacactgagaccaactccaccatccagaggcctgacagacaaatggcctgagacagggctgggaaagttttgcttctggttgggacttcaggaagagttttgttttgttttgttttcccccaagggaacaagcccttgaatccgggaggccaaggttgcggtgaaccgagattgcgccattgcactccagcctgggcaacaagagcgaaa

SEQ ID NO: 142130 - DNA, 423 bp, Homo sapiens
aggcaaggctgagcagataagaaagggtgctctccggaatttatggtgcagagcaatgatagaatggattcctacaaacatttctctgtccaaaaattgttggcagctggcacagctaactcttaagttctggatgctacagtttctacccaatctcgatgggataaccacattggtttgtttagtaaacactgagaccaactccaccatccagaggcctgacagacaaatggcctgagacagggctgggaaagttttgcttctggttgggacttcaggaagagttttgttttgttttgttttcccccaagggaacaagcccttgaatccgggaggccaaggttgcggtgaaccgagattgcgccattgcactccagcctgggcaacaagagcgaaactccgtctcaaaaacataaaaagtaa

SEQ ID NO: 142131 - DNA, 233 bp, Homo sapiens
gatgatggggagacccttaagcagagaagggaactgattagatttgtgctttatatatatccttctggcagttgtgtgcaggatggatttgagcagaggaagactaaagctagaggttagagtggaggctggtgcagttgtctaggacggaatttggaataacagaagtggaagcaagatacagaggagctagggttgagaaataactaataagttacattggcgagacttag

SEQ ID NO: 142132 - DNA, 1265 bp, Homo sapiens
gttgctgcctcaatttctatatgagaaatgactgattgatttcatttttctgttcacgctaccattttcatatcatactagcacatgttacccattaactgtattgcagatttggtctcacaaaattcttctaaaataacatttttaaaaagcatattaatcaaaaataagctttatatttctgaagcttgtttgagcatagaatgcctttggataaaataccattacctagtaaagtgtgaacttttataatccataaaaattattcttttataagaatattcataaatgtagttagattaatagaagattctcgattctttgatcagaaaactaaggactatattgaaaaatcagtgacaaatttaattcttatagtacatctgaaagaaaaaagaaaactcttgggagaacttttacagtgatttaattttgctgttgatatatttctttgggtggtaagtatggcaaaacatgttaaaatttaatgcaaagagattttgtacatttttccatctctaagaaggacaaagcctaagcccctccagatagatagaaaaactcatttagagagttctccttcatgttaatctaatttcttcttaattcagctgtaaaacagaaatagaatgatcgtattaatcatttaaagctgtgtaattgcatagattccttgttcctttaccccctcttatatcttgtttcctatcctttgtgactttttttgcattatatataaggatgccgaaatactgtttattgttgatagtttacaaaattgaatcttacattagtgcataattttggtgaatgttgaagattatggtagattgccttacatttctgcatattgtttgcaccttggaatgatagcactggcatgaattatagagctgaggatctaaagatttttactttgatttatcccattatcatctgcagggaaacaattgcttttactgattaaaaatgcaggctgggcacagcggctcacgcctgtaatcccagtactttgggaggccgaggcgggcggatcacaaggtcaagagatcgagaccatcctggccaaccaacatggtgaaacctcatctctactaaaaatacaaaaattagctgggtgtggtggcgcgtgcctgtaatcccagctactcaggatgctgaggcaggagaatcgcttgaacccgggaggtggaggttgcagtgagccgagactgtgccactgcactccagcctggtgatagagggagactccatctcaaaaaaaa

SEQ ID NO: 142133 - DNA, 735 bp, Homo sapiens
ctacgtagaatctcccaactttgaagaccattactaggctattttaacttcaccaggctactttgagaataaatttatatacctatcacatggttctgtcatggggttatatttcatgttgcagcatgagaactgacatgcatacacttatatttgatggagatgctgtgaagtgactagatagaatctgtaaataaattcatattccttgaagttcagtacttcctaagcagaaagtagtataacttcacagagatagtgcccagaaatctatctgaaattctttatgacaatactcaatctttaagtagcacttgtatttttaaatagttggatatattgtaacatcttttccctttgcctattgaatgcttctaccttaaaactcactgtcgatggatttatagggtatattccagaaaaaaaacaaaaaaaaaaaaaaaaattttgggggcgccacgggcccgaaaacagcttctcaaacccaatcggtagggagcgcgggccccaaaaggacaacgtgacgagggccaaaggggtaccaaagagacaccgggccacagaacagagcgcgcgagaatacacacaccgaaataaaaaaaaggcccgggggaagccgcaagggtttcaggaaacaacaccgcagaaggaacctcgagagaggcataagggggagtaccaacacgggaggagtcccaggggaacccgaactcagaataagccgcgacggccgca

SEQ ID NO: 142134 - DNA, 445 bp, Homo sapiens
gttgcttccccttccgcctgaggccttcccacccctgtggaactgtgagtcaattaaaacctctttcttttataaattacccagtctcaggcagtccttcatagcagtgtgagaacggactaacacagatgtcatgaggaggacttgagaaagagacaagagaagaggattcttcagaaatgttggtgttatgaatggaacccaaaccccaccctttggcatctttaagagatttcagtaaagacataaattgatttaaaaactgtgttttggtcaagcatagcggctcacttctataatcctagtactttcagaggccaaggtggaaagattgcttgaggccaggagtttaagaccagcctgggcaacatagcaagactctgtctctcaaaaacaaattaaaattagccttatgtggtggcatacacctgtagtcccagctact

SEQ ID NO: 142135 - DNA, 236 bp, Homo sapiens
ttactgacaaggtgatattattatgtactgttttctaaggtcagttaatttcaatgaatatacttttcacccatttacaatttgaaaaactgataatgaaaattcatttacaacctttctgaactcaactgggcaagaaattatttcatacatatatggaattttttcccatctactctaataaaaataagcaattcaatccacaaacatataatcaccaaacaaatcaaggaatt

SEQ ID NO: 142136 - DNA, 462 bp, Homo sapiens
tgcagccccccccccgcacattgcagatactattgtaaaatcatgaactttgattcatcctcccctaaaactacaaaatgctgattaaaacaaaaatgcgagcaagtgaagggacgtgcactgtgttcatgggtcaggagactcacaatagttaagatgtcaactcctcccaaactgatctgcagaagcaatgcatcccaaagtcccagcagcctcctgtgtagaaactgacaaggtgattctgaaattcatacagaaatgcaaaagtcttagattaaccaacacaactgtaaaaaaaggtcaggctggccgcagtggctcacgcctgtcatcccagcacttcaggaggccaaggcgggcagatcatttgagcccaggagttcgagaccagccaggccaacatggtgaatccctgtctctactaaaaacacaaaaaattagttgggcatggtggtgcacccc

SEQ ID NO: 142137 - DNA, 398 bp, Homo sapiens
tcactctgactgggggtggaagaggaatgaacaagtccaccccagcgtaaaaataagatgaaaatataaaagaatgtcagtgttgaaggttactccttttgattttgccaatatcccggaaccatgtgagcacatgaacattccaaagaagaagatacctccaggttcttcagatgagtctcactctgttgcccaggctggaatacactggcaccgtctcagctcactgcaacctccgactccctggttcaagcgattctcctgcctcagcctcccaagtagctgggattacagtttctctaaggcaatcagactgcagaacctagtcctcttgtgtgcccagaaagaaaatgaaaaggacttcaagaaccactcaggattgtccctgctacaggaaa

SEQ ID NO: 142138 - DNA, 505 bp, Homo sapiens
gatcgccatgatttgctacacacctggagtcagaaggaaagtctaccaaggtatcttgctgttcctcagcaggcaggcctgttgaagaacctcttttctgctgacacacacaacatacatacactatctgtatcaatgtaagtaaatgcctaattgtttttaaagtgaaaagtagaaaatgttctattctttcattttaaaacttatcaagaatatttaataagtgagacataatttaaattaaacaatagaacttaattatcaatagaatacacttgtcagctcatctcagctctctgagtgggaagcagaagcagaaaaaacctcaaggaagtcagagtagatggctgagcccaggcagtaaagtgcctgcatgtggcccaagtccctccctagtgactttcctgatctttttgtggtctacagttcccacaagttcaacagattgatttctttttttgttttgttttgttttgtttttttgcaacaaggtctcatctgtcag

SEQ ID NO: 142139 - DNA, 501 bp, Homo sapiens
gtactgtaactcttggttctgctcagaagctggtcttaacgggctctaggaccatggtaactcatgtgaggcccctagatataggcaggcaggcccctgagcccacagttcgccccatctgacaaacaatattttccaaagatagctcacaatatatcccatattacatgccttttcttacagtgcgacactatcagtcttcctatcaagtgataggatcaatattccctcccctggatctgggtagctctttgtaactgcctcaacaaacaaaatatggccgaagtgactgtatgttagtctccaagtccagagcataagaaactgatagtctccacatctgcactcaggaagatcacttttggagtgcaaccaccctgctgtgaggaaacctagtccacacggagcagccacatgtagttcttctggccaactgtctcagctgacatctcagccaaaaaccagcatcgaccaccagctatgtgaataaaaacacctccc

SEQ ID NO: 142140 - DNA, 347 bp, Homo sapiens
cttgtcttcctcgatcttccagggtccgcactcctgcagccctcggttttcatcactgaacaatgtgacggttcctgccccctttgcagaacctgggggttccagcagtgagaactgcgggttggggaggaggagtcagaaaggggaacgcccccacgccacacccacacagcgcacacctccaaatgcggacccagacccgaaaagttggccggcacacacacacagaaccactgttgacccaccgagaaggatgctttcacccagcttcacacctggacaaacagcctcacagaccttactgacttccccaaggtcacaggctaaccagaggcagggcaggctgg

SEQ ID NO: 142141 - DNA, 687 bp, Homo sapiens
aggacccaaaatgcctccagacattgccaagtgtctgctggggtgaggggtggggtggggcggtgcagaaccacctaatgttgaagaccatttatgtagggaaggatgtggtaggagatgggagatgtacctttagcctatgggggaggcatttggtgaaggggaagaaaaaaactttattacaaaagaaaaaaaaaggtaacttaaaactaaacacacttttaaaagacacaattgcctgtatatttttccagttttatttctgcacgatcatcctaggcatactcgttggcaaaccgttcttaacataaccttacttctatgtcattgcgtattttcctacaatattatctgtagtagctgaggaatattgccttatctgattgtgccataatttatttaaccactaccttcaccaattattgattggtttgctgccagctgctctgctagaaagaagttaatccaacaaggccctgctttttggagccacaggctagcagaaaatgaagacattgagcaagtcagtttggacatgttgagtgttaataaggggtaatgtgggaatttctaacaggggagctgaacctgggggtagggagggggcgtcacaaggaacatttaaggctttggttctcgagcttcatgaaccatcagaatccctgaggagcttgttaaaacacagct

SEQ ID NO: 142142 - DNA, 727 bp, Homo sapiens
attgcattttaattttgttgactaaaattttactttctaagagctcatcttgttttctgatggtttttcttcctcctcctcaatccaacccatcccctctccttccctggcatcactgcctttccccctttccctttttctcctctctccctctccttcatcccctcttcttctcctctctccttcctgtgctcctcctcttccctctttctccacctgcatcctgttccccatcccttgctgtattattttcttttatctctgagggcagagattgtggaatttttaatttgttctccatttactctactttagttatcttttgtctgagccagcattctgtttcctccaagttgctcttatctgtgttttggttttggttatatttgatgtccattcatctctatgggcaaggctctgcaaagctcattggaagatgtgtgtgagtggggtgggtggaatggtaggcttcactgtagaataacagagcatgatccagttgatttagctgaaggacacccagatgtctgtatctgtgtttttggacgggctgttctgttccttccagaataaagatctttcagtatcctccatgtaaataaaagttaccccttcatttattatttgtaagtattgggattttaacatcacactgtcttaaagtaggacacagctcagtttattcattaaaataaaagagttggacttgatcctttctacctataat

SEQ ID NO: 142143 - DNA, 460 bp, Homo sapiens
ttcccacctgcttcaggatgtgctccagtaagtctctccctctctgctgcaacctgttactcccctccactgggtcatcttcacacagcctgcgatctctcccatcttttacaaacctttttggaaccctctaacctccaatttctttccccccattcaaagcaaagtccctcaaaagagctgttcccatttaacatctaccattctcatttgaacccattcgaaacaggtttgcgtccccacaactcctccactgaaacagctctagtcaaggccactggtggcctccatgtagctaagtacaaaggtcaagtctcttcatctttgcacttgactagccgcatcatcttggacaccttctccatgtggcttccagggctccacatcccttggttttcctcctagtgctctagcctctcctgaggcctcgatccagtctttgctggctcttcctcacctc

SEQ ID NO: 142144 - DNA, 155 bp, Homo sapiens
catttttgcagatgtttcttctgttgttttgtttctttcataaataaaatgtctacagagctaccatgaagcatgtttcctgtctcttagttcaaagaatatataactcctggcatttattagagaactccaaaagctcatttgatatttagtaa

SEQ ID NO: 142145 - DNA, 264 bp, Homo sapiens
tttctggaaggataaacatgaaatagataacattggctgcttccagggtaatgaactggaagccaaggatgggaagaaaaatgttcactgtaggcctactctttaaagctggaatgactgtttcaattctccgccaagtcttcccagaacgcatgcactgaatggtggccgtagctcacccagagtgcaggtgacacaatggaaacgcctctagacgcttgctgccagaggtttgaaccaggctcactgcctccaggcctcccc

SEQ ID NO: 142146 - DNA, 1615 bp, Homo sapiens
ccatgaattctatgtatagcaaagttgtccttcaagaatgaaggaaaaagtaacacattttcagataaccaataattaagggattttattaccagtagacatgtgctacagaaaatgctaaaggaaaccttttaggctgaactgaaagtacactagacagcaattcagagcctccaaaataaagaatattcataaaagtaacaatagaggtaaatataaaacccagaattactacatgtgtcatatagtttataacttctcctatttatagctttctatatttatatttatctataacttcataggcaaatgaataaaaattataaatatgatagtggtcatataatgtataaagatgcaatctgtgacagtcttatgaagcagggatgaagacatataggatcaaaatgtttgcatagttattgaagctatgttgatattatgaaattatattgttacaagtttaagatgctaattataattctcaaggtaaccactaataaaattaccaaaattatgcagaaaaggaaaaaagaaaaacaatacactataaaaaaccaattaaatacaaaaaatgtcagtaacagacaacttgagaaacaaagacatataagatatagagaaaacaaatgattaaatggcaaaagtaaatcttgttttagtaatcacattaaatagaaaaggatgaagccatcctattaaagggctgagactgacaagttggctaaaaactaaaataaattaaaaagaaaaacaagactcatctacatgctgtctataagagacttgccttagatataaggacacaaagaagttgaaagtaaaaggactgaaaaagatattccatacaaacagtagtaaccaagatagtgccgagtggctatatttttgtcaaacaaaataaactaaagtaaaatttacaagagaaaaagaagggcattatgcattgacaaaaattttgacatagccaaataattatctgttataaaatatatgtacttaataatacagcctcaaaatatatgaagcaataattgctataatttaagggagaaaagaacagttctatgaaaagttagagaatgaaatattccactttcaacatgagattaaacaactagacataagatcaataaggaaatagaaaatttgaacaacactataaaccaattatccctaacaggcatatacagaagaatctacccaacaagagcagaatattaattcttctcaaatgcacatggaacattcttaaaccatatgttaggccacaaaacaagtgttagtaagtgtgaaaatttgaagtcataaaaagtatcttttgcaattacaatggaatgaagctagaaatcaataactagaaaaaccagaaaagtcacgcatatgtagaaatttaaaaacccgctcttcaacagccattggtcaaagaagaaatcacaagggacattagaaaataccttgagacaaatgaagtaaaaatacaaatagcacgtttatggtatacactgaacatagttctaagagggaaatttatagctgtgagcagttaactaaaaaaagaagaaagatctcaaatccatagcctaactgtacactgtaaggaactaaaaaaaaa

SEQ ID NO: 142147 - DNA, 1247 bp, Homo sapiens
gacttagagatcccccaggtcttctcccctcaaattatatgaagcaataattgctataatttaagggagaaaagaacagttctatgaaaagttagagaatgaaatattccactctcaacatgagattaaacaactagacataagatcaataaggaaaaggaaaaaagaaaaacaatacactataaaaaaccaattaaatacaaaaaatgtcagtaacagacaacttgagaaacaaagacatataagatatagagaaaacaaatgattaaatggcaaaagtaaatcttgttttagtaatcacattaaatagaaaaggatgaagccatcctattaaagggctgagactgacaagttggctaaaaactaaaataaattaaaaagaaaaacaagactcatctacatgctgtctataagagacttgccttagatataaggacacaaagaagttgaaagtaaaaggactgaaaaagatattccatacaaacagtagtaaccaagatagtgccgagtggctatatttttgtcaaacaaaataaactaaagtaaaatttacaagagaaaaagaagggcattatgcattgacaaaaattttgacatagccaaataattatctgttataaaatatatgtacttaataatacagcctcaaaatatatgaagcaataattgctataatttaagggagaaaagaacagttctatgaaaagttagagaatgaaatattccactttcaacatgagattaaacaactagacataagatcaataaggaaatagaaaatttgaacaacactataaaccaattatccctaacaggcatatacagaagaatctacccaacaagagcagaatattaattcttctcaaatgcacatggaacattcttaaaccatatgttaggccacaaaacaagtgttagtaagtgtgaaaatttgaagtcataaaaagtatcttttgcaattacaatggaatgaagctagaaatcaataactagaaaaaccagaaaagtcacgcatatgtagaaatttaaaaacccgctcttcaacagccattggtcaaagaagaaatcacaagggacattagaaaataccttgagacaaatgaagtaaaaatacaaatagcacgtttatggtatacactgaacatagttctaagagggaaatttatagctgtgagcagttaactaaaaaaagaagaaagatctcaaatccatagcctaactgtacactgtaaggaactaaaaaaaaa

SEQ ID NO: 142148 - DNA, 503 bp, Homo sapiens
tttttttttttttgagatggaatctcgctcttgtcgcctaggccggagtgcagtggcgcaatctcagctcactgcaacctccacctcctgggttcaagtgattctcctgcctcagcctcccgagtagctgggattacaggcacctgccatcacgcccagctaatttttgtacttttagtagaaaggatggttcaccatgttggccagactggtctcgaactcctgacctcaggtgatctgctcgccttgggctcccaaagtactgggattacaggcatgagccactgcacctggcctcatcttcaagtttctgtactgaagtactctgggactgaagtccaaattatttatttgttgagatggagtctcactctgtcacccaggctggatgcagtggtgcgatctcagctcactgcaatctctgcctcctgagttcaagtgattctcctgcctcagcctcctgagtagctgggattacagatgcccaccaccatgtccagcta

SEQ ID NO: 142149 - DNA, 268 bp, Homo sapiens
tttttttttttttgagatggaatctcgctcttgtcgcctaggccggagtgcagtggcgcaatctcaaaaacacaaacaaacaaaaagcaaaaaaactgcttagcaattaatgaaaatgaaaacacaacataccaaagctgaggaggtgcagccaaagcaatgctcagagggaaatgcacagctgtgaatgtctatcttggtatttgtggaatgaacaaagcgatgagactaagctgatcaaactcccagaggaacggagggggacatg

SEQ ID NO: 142150 - DNA, 317 bp, Homo sapiens
gcctgggggtggagaaagaagaatggagagaagtgggagcgtttaatctggggaagagaaagacaggggtcgtggagggaggtggcagtgctgtgggtaaaggcctcctggactgactctgcagcggggtgaggaaggactggacacagtcactgcggcccctggggaagcaaaggaacagtggctaggatttacagtgctttattttggcacaaaattagaaatatttccttaaaagatttaaatacatttaaataacactttgccaaaaggtaaaaagatcacagaagaggatatttggggcccacactgctcct

SEQ ID NO: 142151 - DNA, 434 bp, Homo sapiens
ctctccacaatctgctttcttacccacagaattactaaagctcttctaaaataaaaacaaaaaatgattcctaatcctttaatccaataggctgtttttgtcttgctgctcttcaatgatctctttgaatctatcaactgacactgtttattatcatcctataaaacactcccctctcactttcatgaagctacactgcgttgtttgtattttacactctgatttctctaattttgtctttgttggttcctcattttttattctcaataaatggggatctaaagcagcagttttctacttttttttctgctacaacaggtaatattcacggaaaagagaacaagagagcttactttatttatctgatcttgtttaccacttgtgtcaaagaattgctcatcgaattgaccagattcaaggaccattactggtcc

SEQ ID NO: 142152 - DNA, 765 bp, Homo sapiens
gagaaatgcagcatgttgctgattgcctgtcactaaaacaggccaaaaactgagtccttgtgttgcatagaaagcttcatgttgctaaaccaatgttaagtgaatctttggaaacaaaatgtttccaaattactgggatgtgcatgttgaaacgtgggttaaaatgactgggcagtgaaagttgactatttgccatgacataagaaataagtgtagtggctagtgtacaccctatgagtggaagggtccattttgaagtcagtggagtaagctttatgccagtttgatggtttcacaagttctattgagtgctattcagaataggaacaaggttctaatagaaaaagatggcaatttgaagtagctataaaattagactaatctacattgcttttctcctgcagagtctaataccttttatgctttgataattagcagtttgtctacttggtcactaggaatgaaactacatggtaataggcttaacaggtgtaatagcccacttactcctgaatctttaagcatttgtgcatttgaaaaatgcttttcgcgatcttcctgctgggattacaggcatgagccactgtgcctgacctcccatatgtaaaagtgtctaaaggtttttttttggttataaaaggaaaatttttgcttaagtttgaaggataggtaaaattaaaggacatgctttctgtttgtgtgatggtttttaaaaattttttttaagatggagttcttgttgcccaggctagaatgcaatggcaa

SEQ ID NO: 142153 - DNA, 522 bp, Homo sapiens
gatctagaggatccctatgtccacagggcctagagagagttccatcaacacgagaaatggagaaaaccaaatggtttgttgctgtatatttagtaagggctttttcacagtggccagaagtaatgttacatttaaattctgcatcccaatcccgcatttcagaaagggacatgcttttttattaaaaaaaaatgtttaaaagtgagttttcatttgagaggctcttcccttttgtatgggtgccccctgcaaggccgggtctagctgagtcgtatttacaggtatagaagtgagttgctgctgaaatgcaccatgttgaaatacactaactgttgtttctgaggggcagtagtcctatatggataaaaatgtccaggcctccatctatggacacctttctacaagtgtccatagctcttatctgtctatgggttccactcagctaaagtacttcctggaccataaagaaagggacacagcgaacacgtaattgttagctgtatttcatgttcacaattcctt

SEQ ID NO: 142154 - DNA, 304 bp, Homo sapiens
ggtatcaaagtgatcctgcaccccagagttcccagaaactagctagaaggtcggtggggggcagcctggaattttgtgattgctatagataatccacaaaatggataatgaatataggaataatcaaaactctacccagatacaagaatggggctatgtgggtaggcagctaagagcagaggctgcaatgagttgctagcacacaatttagtatcattaaggaacaagcatgaccctggatgctctaaataggaaagaagcttgtaggaactatgaagtcgtcttccttctctattccatggtc

SEQ ID NO: 142155 - DNA, 411 bp, Homo sapiens
ttcttcaaagttttagggtcaaaggactcccagtgcttcagaatgcactccagaggagtgccggctgaagatggcttgttacccatctgcaaaagagacaagaatagaggtttcctcggtctcctggttcttttcaatgtgactcagggaggaggggacacagtaggagagtcctcctggctgttctccctccttggtccccgggtcccagcaccatagttgcagccccatggttgcaggtgtgacccccaagcgtaataccagaggacctaatcaatgggctagtcatgtttacccatatgacctcagtcctctgcctaataattgggtaattactctctgacctcctagacctgtgtgtctgcctgtgtcttcccactattgaaaataaataaataaaactaaactgca

SEQ ID NO: 142156 - DNA, 472 bp, Homo sapiens
gagtgttggagccggaataggggtgttggagctgggataggggtgttagagccgggataggagggttagagctgggatagaggtgttagtgctgggatatgggcagaggccctggagggagtttgaggcaggggtggagtgtgccaggccttctgcctctcaggggtactcagctgggtggtaaacatctggggcctatttataggaagctgtaatagtaattttctttcctcgcctgttctgccctcatcgtgattagcttttttttaacccaacctccaaaaagcatgtgtgaatgccaaacccagctctcagttgctgagcaccagcttcaggcactgctggatccaggggcttaaaatgatgtcacaggagaaacggtttctctccgcactggcactcctgcctgtcctctctgtggacatcttcctgtgggctggtagatccaggctcacatccagtctctgggaaa

SEQ ID NO: 142157 - DNA, 298 bp, Homo sapiens
aaaccctctaataaaaaaagaaagcaaaatgaaaggtaaaacaaatagatttcagtcttagtttataatagacttatttaggtggttatgatgaaatgggacatggagaatacacatggatggtcaggcatttcaaaattttgcttaggttcacgttgcttttttgtttttggagacagggtgtcactgtgtcacccaggttgaagtgcagtggcatgatcatggctcactgcagcctcaaccttctgggttcaagcaatgcccccaactcagcctctcgatagctgggactacaggc

SEQ ID NO: 142158 - DNA, 418 bp, Homo sapiens
cttccaccaacaatgtatgagagcttcagttgctctacatccggccaacacttggaaggaaattggaagggtagcagatccaggatttagggggagaaagactcaaatagaatgcaaatagctgggcctggtggggtggctcacgcctgtaatcccagtactttgggaggccgaggcgggtggatcaccaggtcaggagtttgagaccagcctgaccaacatggtgaaactctgactctactaaaaatacaaaaattggccgggcgtggtgtcgggcgcctgtaatgccagctacttcggaggctgaggcaggagaatctcttgaaactggaaggcggaggttgcagtgagccgagatcgtgccactgcactccaacctgcgtgatgggagcaaaactccatctcaaaaaaaaaaaaa

SEQ ID NO: 142159 - DNA, 156 bp, Homo sapiens
tacctctgagagacatccaacttttgttcacactatttacaccacaggaagtgaatattccagctctataatctccacttcatttttaatactgttttcaaccctgctaaaatggtccaactctgattttggttcaagtaccactgatgtttgcaa

SEQ ID NO: 142160 - DNA, 489 bp, Homo sapiens
catgagatatttgatatggcatagaatgcataatcacatcaggataagcagggtatccatcttctcaagcatttatcctttgttagtgctacaaacaacctgcaaggctcttgtattggtttgaaccccgatgacgcaccaacaacccccacgacatgaggcggtgtggagcaacatgctgttttaataagcgcctgggtgcagacgggtttatgcctaaatggcatcagccccaagtgaggaatgggttttataatagcatcagccccaagtgaggaaggggttttatagtcctctgtaagcaggaagtgtcccagtctgacgtggctgctgcgtaaatgtgtccggaattggttccttccagtggattcttggtctcgctgacttcaagaatgaagccacggactgtcgcggtgagtgttacagttcttaaagatggtatgtcgagagtttgttccttctgatgttcagatgtgtccagagtttctt

SEQ ID NO: 142161 - DNA, 451 bp, Homo sapiens
gcgccatcagctggtgctcagagcccggaggaaggaactccccccggagttggggggggtggccctagggatgcctcaccggccccatctctccacggagctacgggtagcatcgcccatcgctcctacaccccacgcgccctggcccagaaccggcgctaggctcgggcagggatcacctcgaggccggggctaccccaattttagggcctgaagttacctgttgctttcagggactccgagccctgtatttctccgtctgactcagctcctagaccacacgggagcctctgctcttttcccgacatctccggatttcagcatctggctcagcttcctggtcatcggtacctgcaccatcatctgtccacacatctgcagctttcagttcctcctagatgcccggctaacccccaacccacaagattctacacccgctcgaatctaggca

SEQ ID NO: 142162 - DNA, 477 bp, Homo sapiens
caggtggatcacctgaggtcaggagttcgagaccagcctgaccaatatgatgaaaccccatctctactaaaaatagaaaaattagctgggcatggtggtaggcgcctgtaatcccagctacttgggaggctgatataggagtatcgttttaacccaggaggtggaggttgcagtgagtcaagatcgcgcattgcactccagcctggccagcaagaacgaaactccatctcaaaaaaaaagtaaccttaaatttgaaccaacgtgaatttagggtatgaaactgatttatattgacataatctatgcatttctcacataaatgaagtgaataaatacaaataaatggtacgatgctgaacaaaagaataccttttaagaaaatcttttgtgtttccatataggtttaggacattaatatgtattgttcatctggttgtgtgggcactctaatttataagctgatcacctcaaattccc

SEQ ID NO: 142163 - DNA, 524 bp, Homo sapiens
ctaggtgagcagtgctattcacttcagttcaacaaattacaccaagtgtctgttgttgaccaggctctgcacatggcatcagggacctggagatggataagcatggcactatgtgtgtctagtgaggggcggaaggacagaggcatagattgacaggctaataccacttgaaaagtgcaccaaaggagggatggatgaggtactttaggggcataagaagaaagctgctagctgggcatggtggctgacacctgtaatcccagcactttgggagtctgaggcgagcgggtcacttgagctcaggagcttgagaccagcctgggcaatgtggcgaaaccccatctctacaaaaagtacaaaaattagccgggcatggttgcgcgcacctgtagtcccagctactcaggaggctgaggtatgaggaccacttgagcccaggaggcggagactgcagtaagccaagatcgtgccactacactcctgcctgggtgacaaagccagaccctgtctcaaaccaaaaaaag

SEQ ID NO: 142164 - DNA, 229 bp, Homo sapiens
ccgtggtactgacagattcgtggccaggacactggcgtctgaatttcactgtaatctgcccctccaccctgttctccagacgtctccagtttatctcctgatgcagtcagggcgaccccatgtcctctgtgctaccactaatgtggcccagggacgataaattgtgccttgtaataacactccccgatgggttaattgaccctgctctgacgggcagtccctgctggcc

SEQ ID NO: 142165 - DNA, 588 bp, Homo sapiens
gttttaatgttcttcattgaggcttctctgttcatcaaccctttgagcaggaagcagtataaggtttcttatgattattactactaacacattgtaaagatctttttcctttaatccatttagtacaggatctatttagtactggcctgtgtcctagaataccatcagagataaggctattatcctttcattgagtattatcctgggaaagtatttataaaattgaactccattgcacctgctgacctccttttttaaatgaagaaggggtggggatagagattatgctaactgaattcagatgaagcagtgtatttgccagcactgacacaaagtgctttagttagggccttttgttttgtgcaaatcgattccatcttggactctgaaagaaataagttgacaattcagatcaggaagttgataatcacattgggtcctctgcacttattggcgcagttgctatttttcatgagcaattctgtactaggactcctagctatttcaggattagtctaaaatgtttgtttgccattattgtcatgttttctgcaaaattgctataaatgtaatctagtggcattatat

SEQ ID NO: 142166 - DNA, 294 bp, Homo sapiens
agccccagggccctgtctacagggtctctccagctggggccggcccatcatggcaggagtaaaggcccgggtcccagctgagctccgacccgccgattatcccagattagggagcctgtgaccatctggacacagctgataatggcagtggaggaggggagtggggacagttagcctgcctgcgcccaccctatggggaacgctcaggacaaagcaaagaaggcatcatatcactggcctacccagggaaaaggcaggggcagatccagggcacgctcctcccaaacaagtggg

SEQ ID NO: 142167 - DNA, 190 bp, Homo sapiens
tttcaaatcaagaaatgtgggaggacatatctctgatgagtcagaatagtggaagggagtggccccggaatgtgactacctggaagaatctagttccttaggctaagtcactagtgttagcccagtataaaaatgtgtttttcagaatggaatcaggatgggatacaggtcgacgcggccgcgaatttag

SEQ ID NO: 142168 - DNA, 309 bp, Homo sapiens
cacgcctcattcagtgatgcctcatctcatgccctcatccagtggcatgccctcatccagtgtataaatgccctggaaatatctcaccctctttgaatatgcaggtgatgcctgctattggtggtgttttgtttctgaagggtgggcatgagtcatcaaactgtggtgtgtggctccaggcctggcatgctcatactttccctccgtatgtttccagaccatccacctctttctgtccccactggatgaggctcatccagtgggttcaccctctaaatcaccacgtcaaacccggtggatgatggcgtg

SEQ ID NO: 142169 - DNA, 513 bp, Homo sapiens
tgctgggattacaggcgtgagtgtatggcgacagttcttaagttcttagatgccatacttagagatgtccttgtggttcagtcttctggcctgggatatgccgcacagggtaagatgtgtaaagtgacttaaagcctacgtctggcagtgaccaagaaaagaaagcgaattgcatttgtaatgaactagtgccaaagactgttggtgttcataggaaatagttcatcacaggaaaaagagtggtttaatatataaactattctgactataaatgccctggaaatatctcaccctctttgaatatgcaggtgatgcctgctattggtggtgttttgtttctgaagggtgggcatgagtcatcaaactgtggtgtgtggctccaggcctggcatgctcatactttccctccgtatgtttccagaccatccacctctttctgtccccactggatgaggctcatccagtgggttcaccctctaaatcaccacgtcaaacccggtggatgatggcgtg

SEQ ID NO: 142170 - DNA, 675 bp, Homo sapiens
agcaacggctgaaatctctccaggccaaaggagagtttgtatcaccttaccagaagcttctccggaacaattggccagaagcctagagttcagaaacccagacacatgcagtaagcaatttccagtttctctataatttagaagaggacaccatgatatgtaatgcggggtctggaggttggaatgcctccataaaacacctgccatattttttggtccaagccttagtgttataaatcaagaaggctgtaaataagacttcagctttttgtgctggtgaagtttgtttcctttaacttatcctccaagagtaccgaggcaccgagatctaccatttgccacctcatccatttctatggcagaacaccgcctggggaaaggaattcgattccccgaatcaggatgactgtgtggggcttctgcaaaggttgcatcacgagtcctatttctgagctatctgagatccccattaagaatttaaaagcaataaaataacggagatttttgactatcaacatgaatgctgtgtgggcttttacagttaatgattgcccttgagtgctgaataatctgtggcctgaaaaaagaaatgttcttatcttctaaatttggtaatcaagaacaagatagagtaatgaatgtaaaggaacactgttgcaagttgagtgtttccaa

SEQ ID NO: 142171 - DNA, 495 bp, Homo sapiens
tgtgagcctgttgctcaccctcgcagacggacacacagccaagtctgaggtggccgctcgctcagcgccaacccgccagccaacagatcacttttgaaaaaaggaacagcaagagaacatcttctctgcctagaactgcaggcgggtggaattttcgggaagcagaatcgtatgaccaaaatagaaacccagctagggaacctctgagaggcagccgtccttggggggcacagggaggggcagaggcaaatggagctttcaggcttgagtggctgggaagagagaagcagggcctggcctgggggctggatgcccctccgatgggcagcagggccacagggctccactgatccctggccaagctgatccgacccacggcttgatgagctcaccccgatgccgaggtggcgtgagtcccagggcctgggtttgggacatgacagtctgtcgccaaggcagcacttaggatgccacagctggcaccgcagatctgta

SEQ ID NO: 142172 - DNA, 667 bp, Homo sapiens
aaacttatcaaatggaagtttttgtgtatcaattatgcctcactgaagctgtttaaaatgctttatacatttggcctcatacggccagtctagacagattataggccaagttagtaaaataatttataatatgtgtcattttatctagcctagtgcttcctttgtgtttctgtttctcatgtgtacagcactttgacattggtgtgcattaaattactattcatttgtttaaatgaacaaatcttataaatgttttcaaatatgctatgtgtggatgttcatatgatttcatgatacagaatattctgtgtcaaatttgaatagcttcacctattttttttattacgcagtatgaatatcatatattttccatcaaagcaaaatctgccatcatcataaaagtaaatttttgtgtaagtcatttcagtacagttgagttgtctatagcaatttaagtcatttgaccagaggtttagaaactgagaacaaagagttattcaagcagaccttgggtgaccacttgtttggggtactatagatgggatttatcttaaagacaaaaggctaaaagagacaaaaatccctttcaattcagatttttactctgcttggtatatagtctttaaaaaaaaacataagaataagtcaaacaaatatttcctggtag

SEQ ID NO: 142173 - DNA, 590 bp, Homo sapiens
atgcactccctgctgcctgggaaccccactgaacatctctgccagctgaagtatctcttttcaggaagtccttaccaacttccctggaaaagtcaatttccctgtcaaacaggatgctttccatgagcaagacaaggacttgcacctcttctagagctgtggctctcatttatgccagggactgtgctaagagttaaatcattctcttaagataattctcaccacaatcccacttggtgaattatcagcagcctcatttccagagagggaaagggagcttacagggtcagttaacctgcccagggtcacacggctgctaagtggcaaagccagaacccgaacctggatcagactctaaatgctatatgtgctctcttcccaccatcccatgtggcttcattcatccatggccccacacacccacttgctttctcaaagcctgtggaaagtaagacagggcaacaaggttgcacagctggatgataataagcaagtgtaaatctctgccctccacaaagccatgctctgtgacagtttcatttctctaattcattgtgtgtacaacagactgacaggcacaaagcggagca

SEQ ID NO: 142174 - DNA, 373 bp, Homo sapiens
cccaaagtgctgggattacagctgttagccactgtgctgggccctaggcatctgttttaataagcgtctctgtgtctgatgcacataaaagtgtggaactcatggactagagttagtttgctcttcttttccactgattgtaatgtctttcaaaacaccttagaggaactgtaaggcaacggtctcattttatagtggaggaaactaaagaaaaggcaaatgatttacctagagttatacagctaagggcagaggcaagacttaaaacccagcagtatgactcccaatccactgcttttccactcacattgttcctgtctttctcctagttgtggggtcccccccggggatttcgtcctgagcagatcctgca

SEQ ID NO: 142175 - DNA, 806 bp, Homo sapiens
aacgggtgggtgtatgtttagatccaagagaaacaaattataaccatggatgtgaacttttcacagtcttctcaaaataaaagcttgaaaaaatatttttttatatttttcttctacaaagaccaaatctccttctgaagaggaataaagcaaagacaacatgttaagcacatatgcatcttcatgttgttgacaccttccctaaaattagcggaacacctcaaaatgtttattatttttggccatgattttaaactttaaaaaccagtacaaagatgtagctatatcaagtccaacagagctgaacggtaaaaaaataaaaaaagaagtagatacgtagtggagttcaagtaatattggacattgctgttttaacgaatgtgttttgagtgtgaaggaacaaaatactgtaggattagatttatgagggtaagccaagtaaaatgtggatgcccagtagtaagacctttctactgtatcaaacatgaattagacatgttgaaagcctcttaaatttattaaataagaatatgattgggaaagggtgaaggctctgtaaactgtaaagcccctgtaaatgtctccttggtatactacactgattggtttcttaagctacttagcacccatatgactaccattgtgttttgtgtgtgtggaagaggacatagctgtgggggtacacattactaacatggcagatgggggcagtggaaatcagggtagaaaaggagtatgacagacgcaaaattgacattttaagttcagaactactggtgtttccaagtcatggccttgaaccaaga

SEQ ID NO: 142176 - DNA, 2450 bp, Homo sapiens
  misc_feature (1675)..(1675): n is a, c, g, or t
  misc_feature (1728)..(1728): n is a, c, g, or t
  misc_feature (1795)..(1795): n is a, c, g, or t
aatgaaacatacattatgagttagagaacctgatagaatcacagtggggtcaggaagggattcttacggaagtgatttttcctgtttggcctttcttaagggcagattataattataaacagttaaaactttgtttaaggaggcccgcactaaggtgcagtgggaatgaaaggaagtagtagattctagtgacattgtcaggaaagatgaactggtgcttgagactggtttggaggaggggaggcagacagtaagggaaaggaatccttcaacggttgctccctgtggaattgaatcttggtgttgccattaatggtagttagaaatatgaagaggaggccgggcgtggtggctcacgcatgtaatcccagcactttgggaggccgaggcgggcggatcacgaggtcaggagatcgagaccatcctggctaacatggtgaaactctgtctcactaaaaatacaaaaaattggccgggtatggtggtgggcacctatagtcccagctactcgggaggctgaggcaggagaatggtgtgaatccgggaggtggagcttgcagtgagccgagattgcgccactccgctccagcctgggtgacagagcaagactctgtctcaaaaaaaaaagaaaaaagaaaaaaatacgaagaggaggcagttggaagagtagttccatcttggccaggttcagttgctggtgggcagcctaccagagaatactcacaggcagtcgtggctgcagatggggacctgagcataaacctttggaaagatgcagtttaggacaggggaggagaagggtgatcagaagtatggggaaaaccaagagcctggatgctcaggaaggatccgccggaaggaggagtttggtcagcagcatcagatactgctgtcattttttagaaagatgaaaagagcaacagtccttggatttagtggttagaaggtagtctttgttgctttctggaggaccatgtcagtgaagacgcagaaactgcatttcgggagaggatgtggatggtggggaagcagaattggggctgttagagaccttggtgcagggttgtggtggaaggaggggatggagcagggctaagaggcgtggtttaggagtggagagacgtgagcaggtttgtggactgaggggagaggagctttggtggaggaaaacattgatgctataggaaagcaggaagatggaacaaggtctcagaagagctggagcttgggctcactggtgcagtgctcacttggagttgcacctctctggccaactgtatatgtactctttatagtctttctctggtatatacttaaggaacattttagaatgtttacaaagaaggtcaagcatagataataaaaaatggcatggtttgagtggtatgttaagatatttgaatggtgatataccaaaataaatattgcatcatgcacatttggctggcagttcatcatttttctgctcagttgattgacgatatgtttattacacaatgtgtctgtgagtgtcttgtgcatagagattgtattagtccattttcacactgctgataaagacatagctgagcctgggaagaaaaagagatgtttttgtttgtttgtttgagatggtgtctcgcttcttgcccaggctggagtgcagtggtgcgatctcggctcactgcaacctccncctccggggttcaagcagttctcctgcctcagcctcctgattagctgggattncaggcacatgccaccatgcccggctaattttttgtatttttagtagagatggggtttcaccgtgttngccaggatggtctcaatctcctgacctcatgatccgtccacctcggcctcccaaagagctcggattacaggcgtgagccactgcacctggccaaaaaagaggtttaattggacttacagttccacatggctggggaggcctcagaatcatggcgggaggtgaaaggcacttcttacatggtggcggcaagagaaaatgaggaagatgtaaaagtggaaacccctgataaaaccatcagatctcttgagacttattcactatcacgagaacagtatgggggaaacctaccctatgattcaaattatctcccaccagtccccccccagcaacatgtgtgacttacaggaggagtacgattcaagatgagatttggggccaggcgcggtggctcatgcctgtaattccagcactttgggaagctgaggccggtggatcacctgaggtcaggagttcgagaccagcctgactaacatggagtaaccccatctctactaaaaatacaaaattagctgggcacagtggcacatgactgtaatcccagctactcgggaggctgaggcaggagaatctcttgaacctggggggcggagtttgcggtgagccgagatcttgccattgtattccagcctgggcaacaagagcaaaactctgcctc

SEQ ID NO: 142177 - DNA, 344 bp, Homo sapiens
gttcttaagccccagtctctctgtcccagatggagcaggtcggatctccaagctgctgaggggcactaggactcgggagacaccaggctagctctgcattcttctggtcctcctggcatttctagaaactggaggtgggcaaggaggagggggaaagaggagccaggagaacacggagtcttaaataagatctcttccctctcttcctgcctggagtgaagccctttatgagtaagcaccgatggagggatgccaacacaacacagcaaaactagccctgtcattcccaacccaggcctcacaactccaaatcattcaaggggtaaggacacagaaagaagagc

SEQ ID NO: 142178 - DNA, 274 bp, Homo sapiens
aattctcctgcctcagcctcctgagtagctgggattacaggcgtgcgccactacgcctggcaaatttttgtatttttagtagagacagggtttcaccatgttgctcaggcaggtctcgaactcctgacctcatgatccgcccgccttggcctcccaaagtgctgggattacaggcgtgagccactgcacctggccggcttaaaaaacatttgtttctgaggcttaagaatctaagggctatttagctatgtgattcgagctgtctaactttcca

SEQ ID NO: 142179 - DNA, 740 bp, Homo sapiens
ctagattatataactgaagctccctttctttgctagaataaggagaattttctgtaccttctgactccttgattgattactccgaagtccttctccaagctctataacaaactgtgacaaacctatgtaattaataggattcaattatcaccagaggaggaaaaacaaacaaaacccagaggaaaccaaaattctttccttgttttattttttgagacagagtctcccactatcacccaggctggagtgatgacagctcactgcagcctcgaccttctgggctcaagcgattctcccacctcagcttactgagtagctgggacaacaagtgtgtgccaaccatgcccagctaatttttaaattttttgtagagatgaggtctcactatgttgcccaggctggtctaaaatcctgagctcaagcgatgttcccacctcagcctcccaaagtacggaattacacatgtgagccactgtgcctggctggaaccaaaattcttcaggagaaaaagtctagcacttagttagctcccagcatcagactgagggtgagcggatctatggacttaggggttctgactttaatctcttcttagtttcctgggctagatgaagaatagctaaaatatagtcctggttctgacaggtggctcttccacgtccatgacaaacacggcaaatcaaacagcctttttttcactgagcacatatcctcccgcagtgaaaaataggcagctacta

SEQ ID NO: 142180 - DNA, 267 bp, Homo sapiens
caaccatagaatggaacgctactcagctgaggtgggagggtagcttgagcccaggagttcaagaccagcctggacagcatagtgagaccctgtctctaagaaaatgtccacctttgatttctcttcactccttttttccatgcagggccttcactcttctgtttctcaaattccttctttagtattatttcttccttcctttaagcttcacacagtaaagtttgcttccctactttctaaccgagagtatagcatataattaaaatt

SEQ ID NO: 142181 - DNA, 577 bp, Homo sapiens
tactaagcctcgagtgtttcactgtgaccagataaaatttctcgtgacacctttgggtatgccggcgcttgaaggaagtccttgtggacacaccctgggtattcaccccaaggtgttgggcagactttttccaaaaatgatcgaacctgtcgcttcatggagaactagtggcaacatctgttacagtagtaaaattcaagtgaaaaccagaattttggaaaacttaacgtcgcttgccatgagcttggtgtcttcccaacacctagagacttttctggtgaggtctgtgggggtgacagatggaatgtttccaccattgccagtgaaatgtgtcagcctttggaagacctacttgactcggtgggagatccttcctgaatgaccagcagagtgtcacgaagtcacatggggatggagtggcaaagagttgtcacaggcctgcagaaacccacctttgtccagcttgatgtggcctcagggctggagactcccagccatgcagaaaggctgtaaaaacaaacccatctccctttccagcctcaggcatccatgaggcctggcttccccacagcgtccc

SEQ ID NO: 142182 - DNA, 275 bp, Homo sapiens
gccccctcagataatccagaataatctccctatggtaaggttcataaccttaattacatccgcaaaatcccttctgctatgtaatgtaacaaattcatagtgtttagggtgtagatatattaggggaccattctgggtaccacttcaggtgaacatttctgtgccaagatggctaacaggggtgaatgataatgctaaatctgccccaaaacaacaaacaacaacaacaacaaaaccaaaagaagaatttcactgacattaaattctaaatttta

SEQ ID NO: 142183 - DNA, 1704 bp, Homo sapiens
tacctttgtattcttatgtattttatttaatgtatttaaaaacatttttctgatagtgctgttattgtcagactgctacagaggtccatggcagaaaattaagattaagataccttgatctaagaagttagtaaatgctgtgtgacagatctcagtaatatagcgcagggatttgtacccaggtgtgagagattcaatgccagcgctcttaaactaatgataaaaataaaatgagacacaagctaaattggacactgctgtgtgccaggcacagcattaagcagctttaattggattagctctgactcttctcaggcacctaaatgggtaagtacttttattatccacatttgttagttgaggaaactgaggtccagcctggctgtttcttgcctgaggtcacaaaggtggagcaacgcctgactccagatctgctttgcacacttcctcccttatgcttcctctttaatgctgaggtgagatgttaaagggagctgccaagcctcagtataacagtacaaagaatgattcctgctaaaattggttgtttgtaatatgtaataatcctgagttatcagtgtggtggttcaacttgccagcaattaaaataggagaattgtgcttatttctgatcctctaccccaccttccgacatgccctggaactaggaacaaagccacaagactgttatgtctgttgttttcttagtctgtgtgttgggagtatatctcacattttgtaaatgtgcattttctttggttacacctggaatgtggtccaagctcattcagataattgtgctctgtgggagagaaggtaatctttgagatccaaagagaatatatggagaagattcaagatattttgggatttcagggaaactctaaagctgggccacgttgccctgagtaatgctaagagaaaccaaaacatcacctgtgatgtaaaatctcaggtagtgaaatcttgaccatgtactactacacattagtgtttgtttgctcttgagacaattaatttagaccgacagactcattgtacttacagatttgtagctcagtgtttaagcacaccagtttctttgttcattgtttagtttgattcctgatttgttattgatgggtgatatatgactaattttttatgcaaatggattaggcggtgtattcccatccctgtagttcactccttaagacaagatactgtctcccacattttagtctcccctacataagctagaagtactttgaattgagagattacctaagtatttcttggcttgtggacttttataaattaaggctgtgttaaaacctaagagtaggaaatttgttttgtggctgatttcttctcttaaagctggaagacatttcttgactaaaatgcaattaaatgcttttaaaatttagatttttgggggtcatattttgaaaacaataagtatttggtttattgtattcctagagttgagaaaggtggtcactgagaaatgtcttgtcaaagcggattgtatgctgtgtctgggctctcagataagtgtgtgctttctttggaacctataaacataacagacacattgaatatatacttccttgtggaaattgcaacaaacttgctttctttgatgtgaaatagttacagaacatggctttagttactggactctgatggaaagtgcatccagactattttatagaagtataa

SEQ ID NO: 142184 - DNA, 905 bp, Homo sapiens
tctctgagcctcagtgttcccctcagacctctcagatcctgggccctttaccctacattttatggcccgcttccctttctgcttctttctgatcattttattttgtatttgatgttctgagttttctctaaagaacaacatatattcgttttagattaatggctttaagaaaatcatttattgttaagaatagtacagttttgtggctcagcaaaaaataattctactgttcagccataatcattttggcaagtttacagcctttttctcaagcgttggttagattaactgaacttctgaatacctttgtggtattttaaaaatctgaaatcacttgtctacaaatagtatttcttttttttttttggccttaaagttttaataatgaaatttttctatgtagtcctctttaaaatatttaagtatagtaggaagcagcagagtttgttccacctaatgtcaattcagagaacattttacattttatattaaaattatgatgccttaggatcgttcttttacctgtgtatttattcattttcacactcgggagttttagttgccactccatatcagtggcacagccatgatgatttttcccttgtccaatcatgaaggtttaaaaacacctgtacagtttttagtctcttattatgatatcaattaaggtgattttataggaagaatatcaattaagggtgattttataggaagaaaaatgtaccctgcatttcattgggaaaaaaaaaaaagaatcaactattaaatgaggaaattaaaaaaaagtttaggtttaaaaagaaacatacttaggaggattgctttgagcctgggaggctgaagtttcagtgagccgagattgcaccatcacactccagtctgggcaacagagcatgaccctgtct

SEQ ID NO: 142185 - DNA, 796 bp, Homo sapiens
taagctttctatttcaaattctcctacttagaatttctctctctcatatttcttcttaaatggtggcaccttccaaagagctgttattaattcccacatgccccctatgattcagaccacttctctctttttttctctctctctctgcactgttacttggtcttctttttattttttttcctataaattttcctcttccttctgatatgcttcacttccatgaactcccatacctcctgttctcatttctacctactctttctcctctggaccacccaaatctctcttgatagctcccttttcttatcttctatctaaaatatagtcttaacgtgacatgccacacaaacctgaaagtcatttctttttaatgtcatgccaaaaccatctcagtttatttttgtttggttttagctcaacattctaatagtacactctataaatgcatttcagcttatcaaaatcattacaaagttctgactaagaacatcttatcaatcttgtgaattagtcatatttacttcaaagcaaggaagtgttttcagttactgtctgtttcgtcatactagtgactgtaatatatcatgaaccattctgttaccatctcagcaattacaattattgctcacccttacaattattgagatgaaaccaatactcaaaagtgaaactttaatttttaaatacctcttaactccattgaaagaatgactcatgatcacaaaactgtctacaaggctgggatggcattcattattgggaatgatccttggcattacctttacaaacactttgg

SEQ ID NO: 142186 - DNA, 434 bp, Homo sapiens
ctcgcccggggccgtgtagggagcgctgccccgtcgctgcccagcagccagctggtgacctgacgcccaagatccccgcagaggctggccgataagcggtagagtcctggcttgatctgttctccttcatcctagcttcagtttccctatacgtaaattagactcaacaacgcatgatagggacacttgtggggcgcccggtacactactcttaggataaggtgatcattggtaactactctcacttccgctgttccccgccccaaataaatacacctttaagttgcatccctccatccaacccccctttcgccctcgattggaattgctcattcagctccttcagggctggcacaggggcaggaaggattggaggaacttcgtcgcttcgctccgaactcctggcgtctctcctttcaaactttgcacgtgct

SEQ ID NO: 142187 - DNA, 523 bp, Homo sapiens
agtgcccactgtacgtgttcaagtgagctgcactcatccatctttcactagggctgattcatagggcggccagaaccctatttagaaccatagcttgctgcttacataaatcaatgaaatcatatgaaacacaatataacatggtttcattgaaagagcacaggtgtcaaaaggatgtgagtttacatattacataacttaatatttatttgaacttggactcgtcacttagcctggttgaacttcaaatcctttattggtgaaatgagcatccactcataaaatttcataagcctatttcaaaggattgctaccttatataattttataaactatgaattctcatacaaaagtcagtgataccagatcacacaatttaaaatttataggcagacacttcactacttttgcttcccttcactgtgaagtaacacatgctatcaccttggtggcactcgcagggtatctgttggctggctgttttattgggcttcttcctgccactcaagtgatcatgactgag

SEQ ID NO: 142188 - DNA, 443 bp, Homo sapiens
tatagtaacgcaaggttttcttcaaatactgtaagaaagttttcagaatttcttggagaggcagcattcaaagactgtgttaaccctatacaacaagtaaataacaactaactacccaaaaatattattaaatttcatcttgattagatctttggaagaaaattttctttgattcctcccccttcctctagatctccagtcatttagttcttgttggctctttaaagtgtctgtgtatggtcagttactctgttctcactgccactgcagagccaaaattacctcatacccggactattattacagaagcttcccagccagtctcccaaccttcagtctcttaattgtcccatcaccaataaattatcagccatcatcaataagtcttacaaaaatactcctcttgctcaaaagccttcagcagctaacgaataaaatctaat

SEQ ID NO: 142189 - DNA, 422 bp, Homo sapiens
tcgagctcggtacatacatgtcgtgatgacaaagatgtggaattatgcatagggattttagatgagctatcttataaatggcccaagaagtaattatgaacactctcgaaacacactgaaaaatataaagtctcactgtgttgcaggaagtcagggaccccgaacagagggaacagctaaagccatggcagaagaacataaattgtgaagatttcatagacatttattagttccctaaattaatacttttataatttcttacacctgtctttactgcaatctctgaacataaattgtgaagatttcatggacatttatcacttccccaatcaatatttttgtgattttctatgcctgtctttaatctcttaatcccatcatcttcgtaaactgaggatgtatgtcgcctcaggaccctgtga

SEQ ID NO: 142190 - DNA, 368 bp, Homo sapiens
gccagggctctgaggggaggcgcctgaggactgcagatctccactgacctctttccctagattaagatgggacccagtggccgggcacggtggctcaggcctgtaatcccagcactttgggaggccaaggtaggcggatcacctgaggtcgggagtttgagaccagcctgaccaacatggagaaaccccgtctctactaaaaatacgaaattagccaggcgtggtggcgtatgcctgtaatcccagctgctcaggaggctgaggcaggagaatcgcttgaacccgggaggtggaggttgcggtgagccgagatcatgccattgcactccagcctgagcaacaagagcagaagtctgtctcaaaaaaaa

SEQ ID NO: 142191 - DNA, 305 bp, Homo sapiens
cccagggctccatagaccacgtctacacgggttccggataccgaatccgggactccgaactgcagaagatccacagggcagctgtcaaaggcgacgccgcggaggtggagcgctgcctggcgcgcaggagcggagacctggacgccctggacaagcagcacagaactgctctacacttggcctgtgccagtggccatgtgcaagtggtcactctcctggttaacagaaaatgccagattgatgtctgtgacaaagaaaacagaacgcctttgatacaggctgtccattgccaggaagaggcttgt

SEQ ID NO: 142192 - DNA, 226 bp, Homo sapiens
acttagtttgaaagtctcaactaaacatttatagttcagccatgaaggtacagtaagtctaagatttaaacacactcaaattcatcagcacctacctgtaatatgaaaagtaggcctgagcatgctgattggttattacagaatacagttttttattatttttgtttttaatatactgtacttcttttggcacagtctgagatagcattagttatttttgtagtac

SEQ ID NO: 142193 - DNA, 784 bp, Homo sapiens
gctgccctgaagtttcgtttttggaaataactgttatcatacattttgtatgatgttgcttgtgggcaccatgaagagagcctggctgtaaaggacagagggagctaaaccaacaatgcatggccctgcgtgcccacaagagggagccacctgcccgggatgcagcaggcctcctgccctgtcctctcagcacccctgagccctgcactcaaaccccacctccgagacagagcactccagcagggcaggcatcccaaacaggggagagaccctccactcggactagcctggggcacaccctgaggcaccagactggagattcctggtgggcccacggtttagccagagagcatgaggcagctgtgccagggaggccccaccaccaccaagtgggacacaagtgtctcctaagacacccacagggggacggcctgaggagcagggagcagaggaaacctgtcccgtgacattcctgggggctggcaggaagaccttcaggaggccacagggccaggtccacctggccccgggctgtgagccgcaatcggggcaggactcctgatgggacacgtcagaagagatcctggaaagcaccatgtgagacgccttgtggcactcaagaagaatgaagttggattctggggactctacatactcaagatcttcccagaggaatacgccacgcatggatggctctcagctgccagggagaaaggggaagtgggccgggcagggctcccctctctagctcatgtgtttctgtgaggtcacgtttctccacaag

SEQ ID NO: 142194 - DNA, 188 bp, Homo sapiens
tcagtcggtaccgacgctctctctgtggggattcactggaattattagagcaaacttttcttttcttttattattcagacaaagaccccgatcttcctccctgaacaaagtgaattcatttcctcaataattggcaaccattgatgctgcaggggacacatgagagcagaaggggcggagtggaaggg

SEQ ID NO: 142195 - DNA, 134 bp, Homo sapiens
tggtaggatcgctgaagctcaggagtttgagcccagcctaggcaacatagtaagatcctgtctctacaaaaaaattaaagaaatagccaggcacagtgatgtgcacctgtagttccagctatgcagaaggctga

SEQ ID NO: 142196 - DNA, 434 bp, Homo sapiens
ctaggccaatgtccagaagagtttttccaaggtgatcttctagaatttttatggtttcagggcttaaagcctttcatccctcttgaactgacttttgtataaggtgagagataaaaaaaacccaatttcattcttctaaaaaaggtatcagttttcccagcaccatttactaaataggatgcctttcccccaatttatgtttttgtaagcttgtttgtcaaagatcaaatacttgattacaagtatttggctttatttctggtttccctattctgttccattggtctatgtgcctacttttataccagtaccatgctgttttgctaattataaccttgtagaatatgtgatggctacatacttgttctttttgcttaggattgttttggctattttgggctcttttggttccacatgaattttagaattgtttt

SEQ ID NO: 142197 - DNA, 195 bp, Homo sapiens
caccaccctccctcctttgagtaaaatgaagggcattaggtgttttgatttttgacagctactttcagggtcctggagcctgttagcttgcttcctggcccttgcctctatgttctaggtgagtggcacctcagataattgatttttgagtaggtaaaggcactactaggcaacgtgaacccagctttccaacag

SEQ ID NO: 142198 - DNA, 490 bp, Homo sapiens
taataaccaaaataacaatagcaaggccaataatcatagaagcagctcatgtttaccgggcatttccctagagacattctcataagagcttcatgtgattctcttaggtagggactgttgttctcattagcaggtgaagaatctgtcttggagaagctgagtaggcgacagaagagcagagcagtgagggcatgggctggggagccagacacctgggttcagatctcagctccgccactttctagcctcttactctctccgcatcagttcctcgtatgcaaaatggggataatatcctgtacatcaaaggagtgttgtaaggaccaaatgagctggttccataaagcactgagaaaagagctgggctcacaccgggccagcagcagctgctcctatggtgcctggaggccatgtagctggtggaccttcagtctgagcctgagcttcccaggttgaatcagccttgtgcgctgctgagtcctgtgtacct

SEQ ID NO: 142199 - DNA, 351 bp, Homo sapiens
ggaaaagggatttttttagtgctctttcaactctactcaacaatcaatttataacaattgtcaaaatttccctgggagacaaaattccctcaggttgagaaatattgtactagacactgcctcctacttgataaccaatccatatatttatataaagttgagtatttaaaacctttatcagataaattcttttgacttcctagtgagagtattaggacaagataagaaacagtccctattgtaatggtattgctatctcctttttcttctttttttcccaaagcgccactgcgtcttcatggcaagtcataccttccctcaaattctggattccagacagcataaactcct

SEQ ID NO: 142200 - DNA, 729 bp, Homo sapiens
gtgcagtttatggtcttgttaaattgagatgcatttagtatacccaatcaaaatcccagcaaatgattttgtggatatctccagaggcaaaaaacacctaaaaaacccagaatagctaatacaacattgaaaattggaagacgacactacctgacttcaagatttactgtaaagctgcagtaatgaaggcagtacggtactggtgaaagaatagacaactaaatcaatagaacagaatggaaagtgcagaaatagacccacacagatgcagtcaactgatgcttgacaaagaagcaaaggcaatacaatagagaaaagtcttttccacaaatggtgctagaacagctgagcattgaggtgaaaaaaaaaaaatgaatcttcacccttcagaaaaattaaagtggacggaccatcgtccaaaatgtaaaagacaaaaccataaacgtcctagaagatgatctaagagaaaatctagatgaccttgggcttatcatgactttttagattcaataccaaaacaatccatgaaagaaataataagctagaattctttaaaattcagaacttctgcccagtgaaagatactgtcaagagaatgaggaaggccaggtgcagtgagtggctcatgcctataatctcagtactttgggaggctgaagtgggaggattgcttgagaccacgagtttgagaccagcctgggcaacatagtgagactgtctctacgaaaa

SEQ ID NO: 142201 - DNA, 664 bp, Homo sapiens
caataaactggtctatcgaccattttatagtgaaccattgagtaaattgggttctgtttcttagtcttaatagttcttgtatatttggataatagccctctatcaaatttgtcattggtaaatattttctagcagtcaatggcttcacccttcagaaaaattaaagtggacggaccatcgtccaaaatgtaaaagacaaaaccataaacgtcctagaagatgatctaagagaaaatctagatgaccttgggcttatcatgactttttagattcaataccaaaacaatccatgaaagaaataataagctagaattctttaaaattcagaacttctgcccagtgaaagatactgtcaagagaatgaggaaggccaggtgcagtgagtggctcatgcctataatctcagtactttgggaggctgaagtgggtcaatcacttgaggtcaggagtttaagaccagcctggccaacatggcgaaactccatctctactaaaaatacaaaaaattagggttggtggtgcatgcctgtaatcccagccattcaggaggctgaggcaggggaatcgcttgaaccccggaggtgggggttgtggtgagctgagatcgcaccactgcactctagcctgggtgactgagacttcatctcaaaataaataaataaat

SEQ ID NO: 142202 - DNA, 647 bp, Homo sapiens
ccttgtcagcacttggagctatccaatggtcgattccgcctgcctccaagggtaactccccctcttccagctgacttggatgctggaattccaagtgagctggcttcaaatgtttcaaaaacacatcatgtcttcttcctgccagttccatgcccctgtgcaaagtggccagggagggtcccttctgcacaggacatggtgctgctgcgtgtccctgcagcacagctgctgcttgggcctacgaaaatccattctcccttcccctgtgacctcatcttgactttcctcacccacactttgccccatatggtttcaatgtgaccgggcccatagcctggctccagggtgcgcacatcaccaggccttcctgtcacctttgcaacagtgatgggctcaggagctgccatctgaccaaggtggcccagtgagcatcacgcacagggcaagaggtgctgtgttttggctgtgatatgggcctgcagtaggacccatgctgagtgcctcacggagagaacctgtctaagagtgaagccaacagagttcagcagagtgatagagagatgctctggacttcacttgtgcccctggatcaagctatgcctagagcccatatggacttcagctacataaggccatagactgccttt

SEQ ID NO: 142203 - DNA, 353 bp, Homo sapiens
caaaatgaactactgctaatttgaccattgaaaacaaaattggcttgtctgttgctattatttcctataaatatactttccagtgatagttcattatttaaggctcctgtcattcttacctggcttaatctggcaactcggtaagtggatgacttcactcaacaaaagccatcttccatactgtggccagagtggactttgtagtttgtaactccgatcgtgaaattatttttacttaaaattttcttaaagttacttctagataacatgaagtcaaacttctttattgcttcccaaggcccttaatgtcctaattccttttaagcaataacctaatatctcatcactcccca

SEQ ID NO: 142204 - DNA, 332 bp, Homo sapiens
aaaaaaagcgaagatgtgctgaggtgatctacagggattaggcactgcttcggatgcctgggatggcaagtggcaccagcgctgtgagatggtttccttcctgccgtcaggcgtcaggaggcctgctcgggtctgcatgtgcctgggcttggcaggtggggaggcggcacccagggcagcccccgcattggaagctctaggaacttggatctaggctgaaggcctttgctctagagttccggattgctgagcttggaacagctcctcctagacacagtgtggcgcgggagcagctgcatgagggcccacgtactctgcacacatcagcagcc

SEQ ID NO: 142205 - DNA, 382 bp, Homo sapiens
atctacagaggacttgaggagctccttactctcatttgcctccaatgggtggaggttatacaggtttgatcaaaactgagtaaatcatttgagaactgagactactttgtccacaaagcttaactattaggattgataattgagaccatctgtgtcaacataacgtaactcattcttccaggatcttcttgcccagaaaattaagactgtaaaccaataaataacttcactgtttgttgcaggaaatgtctacacactaatttgtcctggcaagcaatttgctcacctgggaaaacagctcacttatcaaacaagggtttacttgtcaagagccacttcaatatactagtcttgctgtatccaccagtcccaagctattgtg

SEQ ID NO: 142206 - DNA, 471 bp, Homo sapiens
ttcccccagattcttaagatgccaaaacagaaaagatgctgcagtgccaaaaaaggagccttctgagtttagaaacttctcacacactctcagaagtcctggagaaactccaccctaaccccaaaatatgaatcaggccaagagttctaagtccaaattgcaacctgtttcaaaaagccagtccaaatacatgcataaattccaacagaaagacatttagttaagcaagatcaattgcaaacttcacacatatccatcttccagcttctaggggcaatgcagctcccacattcaatcttacattactgactaaaaacaaacttccctttctttctccagcaatcttagagaagatccaagaaagttgttctttatatgcttggcaagtgaaaagactgatagtaatacggtatgtgcatacgcttcagggctggcatctactcctgcaatctgtcctccacgcacagttcc

SEQ ID NO: 142207 - DNA, 354 bp, Homo sapiens
aatacaattgtctttatgataaaaaggataaactgttaagaggggcaatggatgaaacaaacctgtcaggagattatctcaaagaattctggcaggaggagtactctgaactaaggcagtattagtacagaaacaaaaagcacagattgaatcagttacttccttagatcagcagtcaggcttcatgggcattctaagcaaaattttcttaccttttttgaaaaaaaactagaagaggctccacagcattcataatatatgcaaaggggactatacaatcccccaaaaaatcaagcatcagtgaattagaatatactttaggatactgatgttacctatattacttagcctttt

SEQ ID NO: 142208 - DNA, 271 bp, Homo sapiens
ttatgatggtgatgtgaagaaggatgctcttggcagaagaaaagggcatatagcaagacatggaggggtaaaatcgaatgaggtatttgggtaatagcaaatatttgtgttagttgagcagaaaaagccagggagacagccagattgtgaagcgtctttgtgtaagatatttggcctttattttgaggacagtcagggaggcttttaaacaggtgagtcttacaaaaagatttgtgtttaggaaggtctcagtggaggttggaagggacaa

SEQ ID NO: 142209 - DNA, 370 bp, Homo sapiens
ggggaaaataatatttttgtcccatgtgtcctaaaataaaactcagtaacacatgacacttatttgattgacagatgtctaggaggtgacactttaaggtgggctgtatatatgtgttggattgactataaatgtgttgtaactgtgttgtgaaagtcaaggatggaagtaaagtttcaaaaagtgggtcatgtaactttttagtgcagggagggaagatttgcaaccacttcactactgctcacattttaagttgcttgaaggctaggttttgaggtgtgcctgcctgcatgcacatttactcctggggaaggcagccagctctcttagttttgatgaactgacaataaagatttgtagagatagattg

SEQ ID NO: 142210 - DNA, 742 bp, Homo sapiens
ggtcttcaaggaaagacaggagtcatgaccttgtggctcatttctgagattagggcagggatctgtgtctccaggcgctgggactactttgacattcaaggagcctaaatacccagttacttctagttttgcgtaattgccaaagttactttctaaaattgaaaattaaaaagcctgtttccactgctcatgattttcaggaagttgatattttggcaaaatgtagatagcaaaccaagtactgtgactcaagcagtaattgaacagaatccctaggaatagtgagttagagatcataaaagtcaagctttgttttttcaagttcgcttctcttcctatttgctgctaggtaacagaagcagccccttccataggaaagtggaacgaacctgtgttagttttctattgctgcgtaacaaataccacaaatttagcagcttaaaacaacacccatgaatgaccttacgggttctgtaggatagaagtctgggcacggatgatctgtgttctccgctccaggtcacataaggctgcaaagtattagccatgctgtggttctcatttggagatcagggtcctcttccaggctcatgcagtttgttggcagaattcagtcccttgcagttacaggactgaagtacttcttttcttgctgcctcttgccagccactgctcccagcttctacagcctgcctacagttccttgcctcaaggcctctagaggccattcataacattgatg

SEQ ID NO: 142211 - DNA, 396 bp, Homo sapiens
ccaaggatgcaagtgtcaagccaggactcacacatagcatgggcctggagcaaaaaggaggaaaccaacataagcacaccatcaaacacacagacaacaaacagctattagtacagggccaaggcatatagacaagttaggtaactgccagggcctcagtgagcacatattaccaagagccacccccaaccatgctataggagaggatttgtgggaacagaagagcaaggagaatgaggcttctgctgtgctcagagaaacctatttcatgaacctgcaggtgagcactttcagggatcccaactgatgaggtctggagagagggaaggaagaaggacagggaagaagagggtaaggtaaagaaggacactttgcatccagaggggtaccgagctc

SEQ ID NO: 142212 - DNA, 649 bp, Homo sapiens
taaataaataaataacaaaaattagccaggcatggtggcgtgcacctgtaatcccagctactcaggaggctgaggcaggagaactgcttaaacctggaaggcagaggttgcagtgagctgagattgcaccattgcactccagcctgggtgacagagcaagactccatctcaaaaagaaaataaaaagaaaaaaacaagttactttaaaatgtcttataaaatctgtttcttatagtaaaactatttgtagctaatgaaaatgaagttttgatacatttaacagtattaccactaagaatgccatcctttcaagtactctaccactggtcaaatttcagaacctcagtttaaaatttttggggaggccagatatggtggctcatgcctgtaatcccagcactttgggaggctgaggcaggtggattacttgaggtcaggagttcaagaccagcctggccaacatggtgaaacccagtctctactaaaaatagaaaaattagccaggcatggtggcgggtgcctgtaatctcagctactggggaggctgaggcaggagaatagcatgtatgctggtagaggttgcagtgagccaaaatcaagccactgcactccagcctaggcaactaagagcgagactccatctcaaaaa

SEQ ID NO: 142213 - DNA, 236 bp, Homo sapiens
agggcccgggttatagaagataagagaaagacggagaaagtcacggggagggaggggagcgattcaggcactaactcttgcatttcacctcagcaggaacgtgtcggtgtggaaggtctggttgtagactctctgcccactgtccactatcacagctcctctcattgcacatacaagacacagacacctgtcaaccagagaccgtttctctgttcacataaacatttaaagtagat

SEQ ID NO: 142214 - DNA, 186 bp, Homo sapiens
ggagtcaacgtccttccagaccaggcccagcctcaactctggctatttgccttacaggggtaccatgctggccacatcagacttaagtttccagactacaaagtgcagtttctggacaggcagagctgtttgaacctataatcccaaagctttgggaggcaagggtgggaggatcgcttgaggcta

SEQ ID NO: 142215 - DNA, 209 bp, Homo sapiens
tacttggtggtaaaatgctacccaatattataacatcatgtggcgccttcttttaaaaagtctttaaacatgatataatttcctcaaagctttatgatgtaaaatgaggtatctcagatatggacatctccagtgagaggatcccaaaggctttatacccccatattctattgtgggttgggatgcagtggagaagaaatgccaggatg

SEQ ID NO: 142216 - DNA, 136 bp, Homo sapiens
tatgtataaagggagtaaaatgttctgattgtgataacaactttctgtaaatgatatgtgcctaagtaaaatggcacttgataggcttgaaacatacatttaattctattgattaaaatatcctctttactctgtg

SEQ ID NO: 142217 - DNA, 161 bp, Homo sapiens
gatgcattctaagtgccatgatttcagagaatttacattttattatctttctcagtgagtgtaatcacagtaccatcacagcacattattttaaggaccagtttacatttatacttgcagtttttaatttttcctctttgcccttttttgaggtagggggt

SEQ ID NO: 142218 - DNA, 277 bp, Homo sapiens
attaggtttattttaaacataactatctctactagaaataaccacgttgctacacgttagaatatagatgagatttgaagagcaggcttgtgtaactttagcaataacgtaaactgcagactgctctatgaatgggagcattatggggatggatgttttgatgcaattgaaataaaaaccttgaacttttgcccctctctcaaactaagtgaagattcagttataaatctctgttttcctttctgaccttcatcataatctcctcttgcatgatcat

SEQ ID NO: 142219 - DNA, 300 bp, Homo sapiens
tgctctccatactgtctcctaatctaagcttgaccatgtggttctcaataacaatttagggaggaggggttcagatcatctagactataattattaaacggggacaaaaaattgaagaccccaacaatgatcaatttggtaactttacagaggactagcctcaccccagtcatcattaggagtttcttttcagtctgctcagtaatgtggttgaggaaaaggatccccgggcctgggttcaaagcccagctctgtcatatattagctacataatgttgggcaatttgcttaactttccat

SEQ ID NO: 142220 - DNA, 487 bp, Homo sapiens
atattgctctgaagtgtctttaaagttcagggtattataagctcttgccaagtaaggcggtgcttaataatttttttatttcatcagtattaatttagaaggaaagcgagcacattataaagaaacacatgtacaaagtcgcattactgaaatgtagtttaaggaagatgggttgtagctattgttaactcatgattaccccagctagttctctggtggctttaaggatgatgtcgaacccattcctaaggttttgcttcttggcaattcccattgccaccatggattcacttcttacctcatccaaccacccactgctgcccacacctcttctccagaaccgcctgtgtgtgtgattagagaccaggaaagcttgccttgaagacacctcatacctgaaattctagccaagcaggagtcagagggcagccccagctcaccctctccactccactgaaatggaggccagggacacttagctcccccg

SEQ ID NO: 142221 - DNA, 737 bp, Homo sapiens
acgcagcaagaaagtgccatccatgaagcagagagtgagaccccatcagacactgagtctgctgatgccttgatctgggacttcccagccttcagaactgagctgtaacactcactgtgaaggtctgtggcttcacccctgaagtcagcgagaccacgaacccactgggaggaatgaacaactccggacgtgtcacctttaagagctgtaacactcactgcgaaggtctgcggcttcactcctgaagtccagcgagaccacgaacccactggaaggaagaaactgtggacacatctgaaggaacaaactccggacacactatctttaagaactgtaacactcaccacgagggtccgcggcttcattcttgaagtcagcgagaccaagaacccacccaaaggaaccaattccggacacagggtggaggagggggtgaaggttaatgtgcaatttctagatgagaatgcctgtggcttctcttaaccacataaatgaacaagcactggcagagagacagatggcttagcttgcccagagcagccccagtgctcttagggaaggaaaagagcccccttcacttcacttcagttcctcctttccccagcagggtgagcaacccctaaagaccatcgttattttgagggcttttgtttaagtatagcacatatattagaatgtactatggtgatggcctatggtgctcttgaattgtttcataaatatttatcctgaatccc

SEQ ID NO: 142222 - DNA, 168 bp, Homo sapiens
atacctagagaagggagaaaacaattttctcccattttttttcactctcctcacttttctgcctcaaaatagacacttctccctcttagagattttagattaaacctttcagttctatttttcccccttctcactagcttgtccccacaggatgatagcaatttatat

SEQ ID NO: 142223 - DNA, 198 bp, Homo sapiens
tttccctaatgattagtgatgttgagcatcttttcatgtgcttattgggcacatggagaaatgcctactcaaatacattgcccattttaattggattacttgtctattattgagttgtaatagttctttgttctagatacaggtttcttaacagatatattatttgcaaatattttctcccattctgtgagttgtctt

SEQ ID NO: 142224 - DNA, 517 bp, Homo sapiens
atgggacagggctctgggctggcggggagaggggagctcagcttttcgcttaatgaagggagagctgaactcttgaaccgattggatgtatttttcctttgtttggccttggcctgaactggccaagaagcagtgggcggatggatgtcactgcctatttcctcccagttgtttttgcaggcctacattttagaaggctaattgttagagtcctcatttttcttccccacaagaagagggctttgttcaacaattaaatcaggctgtgtcagaggcaaagcctttccatttttgaccaaggtttggctccaaacataaaagaaattttggctctatttcatttagctgacaatgtttcctccctcagagcctgaaccgaagttttctacccaaaagaaacactggccccaccgtgacgtatcctaacatccaaataccaggaggtgagatccctggtagccaagccgagaatgaagacagccgtttagacatcttgcttctgcttccagtgaatgaa

SEQ ID NO: 142225 - DNA, 837 bp, Homo sapiens
tgtctgatggtgaatcgtgtcaccttccttctttctctttctttcgagaagagaaagaaggaaggaaggaaggcacaggaaggtagtgtaatgtagaaatgggtagcttctggggttactaatcagaaaccctgagtgctacactaattctgtgattcaattcgaatccaaagtttggttaagttaatcaaacatttagtaagaatcagcaatgagcaagatattatgtgccaaattcttatcctcaagaaactattgtttatcatccaataaacatcaagtagaggtggaattctgctgaacactcaaggaacaccgatcaagtccattattgaagcaatcgagtacttacaaaactagtaagtaggtagaggagaagagatttttgtttctgctgtatctcttaggcaatttctctaattcttgtggcatccacttcctcaacagttaagtgaatgttacactgtggagctaacagatgagacaatgtatgtgaatgtctgtaaactagtgtcacccaaatgaggatggtgatctgtgtaaattagtataaactatcccactagtctaccatcatatgtgcctaacttgtcctaaactcagctttctttaatgaaacctcattatttctaatgtgttcaaattcaatgataagttttagtaacatcttctctgtcatctttcccctagttgatgtgtgaaaatcaattgatgtgaaggtactcaatggaaaaagaataagatgatcattctttcaccagcacacagctggtgaaaaaataatggttttgtttgtttgtttgtttgtttgtttatgcacgatggtataccttcctt

SEQ ID NO: 142226 - DNA, 829 bp, Homo sapiens
tgtctgatggtgaatcgtgtcaccttccttctttctctttctttcgagaagagaaagaaggaaggaaggaaggcacaggaaggtagtgtaatgtagaaatgggtagcttctggggttactaatcagaaaccctgagtgctacactaattctgtgattcaattcgaatccaaagtttggttaagttaatcaaacatttagtaagaatcagcaatgagcaagatattatgtgccaaattcttatcctcaagaaactattgtttatcatccaataaacatcaagtagaggtggaattctgctgaacactcaaggaacaccgatcaagtccattattgaagcaatcgagtacttacaaaactagtaagtaggtagaggagaagagatttttgtttctgctgtatctcttaggcaatttctctaattcttgtggcatccacttcctcaacagttaagtgaatgttacactgtggagctaacagatgagacaatgtatgtgaatgtctgtaaactagtgtcacccaaatgaggatggtgatctgtgtaaattagtataaactatcccactagtctaccatcatatgtgcctaacttgtcctaaactcagctttctttaatgaaacctcattatttctaatgtgttcaaattcaatgataagttttagtaacatcttctctgtcatctttcccctagttgatgtgtgaaaatcaattgatgtgaaggtactcaatggaaaaagaataagatgatcattctttcaccagcacacagctggtgaaaaaataatggttttgttctgtaagaaagatcgccataggttttttcactgaat

SEQ ID NO: 142227 - DNA, 522 bp, Homo sapiens
gtcatttcagtcacgacctgctgtgtatctgtggagttgacatgttctgcatagttgagtgctcccctgctctgggaagcctgcacggggtccctgcacacatcccagcatggaggggctcagggctgggtttgagacgaaggtgggcgaaaggttcacatgaactgaggtcatgacagagtgatcaggtgggaccaggcagaactctcggcccccagggcttgctggtacacagattgctaagtgtcttcattgttaaatagaattaatcttcatatggtagttgtgggctgagttgcctcattcacttgtgataagtttagcggataagaaaatgtcctgacataatgagagcagagggcagatgggtgttggtgtgggaaaggctgagaaagccaggacttttgggtttgtaaaggtgaacgtggacacggctgtcagtgagggaatacacgcatacctcaggggtgctgaaacttagggtttgttcttgaagcctgaagttgtcctgagcttcatggt

SEQ ID NO: 142228 - DNA, 370 bp, Homo sapiens
ctcaagtagctgggattacaggtgtgcgccaccacgcctggctaattttgtatttttggtagagatggggtttcactatattggtcaggctggtcttgaactcctgacctcaagtgatgcacctgcctcgatctcccaaaatgctgggattacaggcgtgagccaccactcccagccccttcttgattcttgaaaaggacattgggtgctgtacatctcgttatagatgttgataaaaatgcttgtgagaagagtaacattaaggtagttatttggtcatttttgcagattattttaagacaattctaggactgatttgtggtaaatcacacattgctgtatcatagttgtgttcactgaacatattcag

SEQ ID NO: 142229 - DNA, 293 bp, Homo sapiens
tttagtagagatggggtttcagcatgttggccaggctggtcttgaacccctgacctcaggtgatccaccggccttagcatcccaaagtgctgggattaaggcgtgaggcaccgcgcccggccacttctaacctttttaaggagtatttgcgtgaacagaatcaatgagtttcttcaaattaacttctgacaataatctaaatggtctccattttctgattcacccttttttccaattccaagttgccattatccatgtaattggctctaaagagagcaaggaaatctatcttc

SEQ ID NO: 142230 - DNA, 295 bp, Homo sapiens
tggtgttttggaggaaatttcatcttgggctgctccccttcttaccacatctgttgcccagtatccaccacaaagcctgtaacttagcatctgcctataacaccaaacaggttgcatcagataaacaaaaattcttactgtggtaggtgaatattttagcaaacgtaaaatactataactcgaatttacaaactgggtcagaagtgctttctcatgttttggtgtctggagcaacgtgcacatggtcagaggacttcttatttcaattttcttgtttgtttatatttattttatg

SEQ ID NO: 142231 - DNA, 221 bp, Homo sapiens
gaaagatgaaaataacatgtccttctctaatctgtagctgttaagaaagaaatataatcctacatcattaattcacaaataatacaatgcagtttaataataataatgagaccacattattgagaatttcatgagaatatgaatgatatctcctagaatgcctgattctactttgtattaatatcaatctctctgtattattgctatatatggtgaatcat

SEQ ID NO: 142232 - DNA, 301 bp, Homo sapiens
atggaaagaatctacccacgcggaggcatcctaaaatcccagcacttttcatgggagggaagcacatccctttaagtcccgctccctcacagggccttgtacctctagagggcctaccaagatttagtcttttttttttgttatgagccagggtcttgctctgtcacccaggctagagtgcagtggcgcaatcatagctcactgcagccttgaactcctgggctcaagcaatcctcctgcctcagcctcctgagtagctgggactacaggcatgtgccaccatgccttggtaaagatgagg

SEQ ID NO: 142233 - DNA, 401 bp, Homo sapiens
tacggatgtttcctaaaaaagtgacagttaagctagatccaaagagataaaattagctaggaatggcaaggggagtataacggtgatccagagagagggaagaacatatatgaaggagtaaggagacacagtacatattgagaatataggggacaggtggtttcagctcaggatgaggctagagatgtaggcagaaagtacacaaaagatggccttatagaaaatgtttaaaaactgtggattttattcaagggcactgggaagccactgaaaagttattattagaaagctgatggccgggcgcggtggctcatgcctgtaatcccagcactttgggaggccgaggtgggcggatcatctgaggtcaggagttcgagacctgcccgaccaacatggcgaaa

SEQ ID NO: 142234 - DNA, 815 bp, Homo sapiens
tggtgtctcctagcctcccttcagctgaggtttcatggtgggagacaggagtgtggctggggtggagggttgagcctggccctgtgacccttgcgtgctatagttccagctccaggccagtggttctgagcagccatggtcagaagcaagtaagttggattcagggcctggcctgagggagctgtgccccggtgcttttaaggctgccgttttctcagacagcctgtgtcctgatgccaggagaagcagcagtggttttagtcagatccctggagcaaggatgtggaagacgtagaggacttggggtgtaggaaagctgggattgtccggagggacatggccgagttgggccagtgtccgaggcgggttcagcagcccctggggctggctctccctccatttgtgcctggggctgtcttccgtagccacctggctccccatttgtccaccttaccgtggtcttatctttctcataccctccctgggtggctccacaggcacggcttggtggctgctttctcttgcttgggtttggtgagggctaagcacgcaaagcccagggaagcttttttggggtctgggtctccttcaagggtcagtcctgtgcgtcagctttgcagccaccttggtcagccctaaggccgagcccaccgcctgcaaggtgcagccgtcctcactcccctcatctctctctctcctctcccctctgcatttctctcttctccagaccagctcctccactgtggctctgagtgccccggggctgtccagctctgctccgtcctcatactgctcccttcctccttctcctcctc

SEQ ID NO: 142235 - DNA, 537 bp, Homo sapiens
cctatcaaaaataataactacaacaacaacttttccaaacatagacagtatgataagatataaatagaaacaacaaaaattctaaaagcaggggaatgaagttgaagggttgagttttttttcattttctctttgcttgtttgtttatgcattcagtgttattggtttaaaataattggttataagaaattatttgaaagactcacagtaacctcaaataaagaaatacaacagatataaaaaaataaaaagcaagaaattgaaatatgtcaccatagaaaatcaccttcactaaaaggaagacaagaaggaaggaaagaaggagtagaagatcacaaaacaaccagaaaacaaataacaaaatggcaagagtaaatctttagttatcaataataacattaaatgtaaatggattaaactctccaattaaaagacatagagtggctgtatggattttgttttaagaaagacttaataatctgttgcttacaagaaacatccttcacctataaggacatgcatagactaaaaacaaaa

SEQ ID NO: 142236 - DNA, 259 bp, Homo sapiens
ggatttgctggtgcagtacaactaggcttaatagggactcgaattcgagctcgaattcgagttcaatttttcattttcatacagatacccaacgatcttgttaaaatgcatatcctgaccccggagggctgcggcctgagattctgcatttctaacacactcccaggtgacgtcaccatgctggttcatggaccatattcgagtagcaagggtataaatgacatgattacacttccaaataacacaaaaagaccaagaa

SEQ ID NO: 142237 - DNA, 910 bp, Homo sapiens
ggccaaggaactccagttaaacttcactgccagttaaagtctggtagattttaatcagagaatgaaacagttttaaactcaaaatgaaatgtcttgttataactgtgtgggttcctgtcctgtagcgttcttagaagtcaatttgggccaggtccagagagtgcagtttgtatgtaatagtctcaacactgcatgcacgtcgtgcacttcccacgcactttacaaagtactctgtccagaatctcacatggacctcggaacaaccgagacctcttccagccagattggaggcacccagagtagggtctgggatgatacaggctcttgctcaggactctgggaaccctttaagggcctgcttgaactcagaagttggtggctcagccagcagtctctgtccctattctgtgtcagcgttgatatcacacacttgtgatgtgactcgtttttctctttttcccctgactggtttttggtttttactctcccattgtgatttatcccaattacatggaaggaatttagctaaattaaaattaaatttgcagtcatggagcacgaattaattttctttctttctttctttttttttttttttttttggagacggggtctcactctgttgcccaggctggagtacagtgggtacgatctcggctcactgcaacctccgcctcccgggtttaagctattctcctccttcagcctcccgagcagcggggactacgggcacacgccaccacacccagctttggtattcttagtacgagatggggttcccccatgttggccaggctggtctcaaactcctaacctgaagtgatcgaccacctcgggctcccaaagtgttgggattacaggcgtgagccaccacgcctggcctcttttattgttttgcttacccaactcc

SEQ ID NO: 142238 - DNA, 175 bp, Homo sapiens
gagaatcacttgagtctgggagttagggagctgtagtactctatgatcgtgccaatggatgggcactacactccagcccgcacaacataacaaaattcacacccacctttttttttgagagtctcgctctgtcacccaggatggagtgcaatggcacaatctcggctcactgcaa

SEQ ID NO: 142239 - DNA, 591 bp, Homo sapiens
gatatttgccagtgtttttctaagattgtttctcgtcaaaattattttgtatttttcggttatctttttagtgtgattctgctgactttgtgaaattaatttggaatattttcttttttatgttatctgctttattttttccttggaggttttaaagaaaatgtatgtttttcagaggtaggacctagaaaactttgtcagtttcttttgtgattattagttttatggtttctatccctttttggatatttcttagggaaatgattcattcctccattttctttttcacagttcctagcatagctgtgaaagtggatttggacgggctactggactgtggccatttggaccctgattttctaggctgtaattctttgatgatgtgtaaattttattccatggcacttggtcctttttttttgttttttcacaacttgagtcaattttggccactcataaaatgatcgaatttgtctgaggatggtgtctcatgcctgtaatcccagcactttggaaggttgagatggaaggatcacctacgcccaggagtttcagactagcctgggcaatatagcgagaccttgtctctac

SEQ ID NO: 142240 - DNA, 242 bp, Homo sapiens
aacagaaatcattataatgaatgaagtcatcaaaacaaaatcactgggtatactttagtaaagtgaggtaaaattagcataaattacaatatacttttgtgaacagaaaataccatttcccatttgtgtgactgcagcttacttattttgaccctttagattaaaaaacaaaagataccacagctttatttagaataaaaaaccttccaaaatatgaacattaggaaaagcctttcagtata

SEQ ID NO: 142241 - DNA, 235 bp, Homo sapiens
agtataaagagggcatgaggtagcttggctagagactgatctcctcctgctgagtccccccatcagactgtgcttcctctgcagcgagtgtctgcagggtctggatgcgggaaaggaattctgatctgttgaaatttgtctcctctgtgtgtgtcctgcactaaatgcccaaaccccagcatgggacgtaatgcagagagggacacaggcgatgtggggacctgagcaagccagg

SEQ ID NO: 142242 - DNA, 625 bp, Homo sapiens
tcggattgttgctgtctgtgtggaaagaagtagacataggagactacattttgttctgtactaagaaaaattcttctgccttgggatgctgttaatctataaccttacccccagccccgtgctctctgaaacatgtgctgtgtccactcagggttaaatggattaagggtggtgcaagatgtgctttgttaaacagatgcttgaaggcaaaaaaaagtaacttcaacattacttattgaagttacagaacttacagaacaaatatactcttttcaataaattaccataattaaatcaatttagaaaaagcatttctaaaattcaacacccactcataaaaactcatagcaaacttggaatataaggaaatttccttaatctgataaaagcaaatacaaaaattactcacagtaaataccacacttaatggtaaatgtttaaaagttgacccctgatgcccactaccagcacttgaactggccagtatcaaaagcaagaaaaagaaagaaacagcatacggactggaaaggagaaaataaaggcaatcttgaggaaccacaactaaaactacaccaccatgtaccaggtaccaagataacacaaagtcataatgatttagacagtg

SEQ ID NO: 142243 - DNA, 121 bp, Homo sapiens
ggagcttggtgccagtcccagctctgccccctgccaagacacagccccaggatttcactccaccatctcaaagggccactccctcccatagtgttggtacataactgttatcagctcttag

SEQ ID NO: 142244 - DNA, 674 bp, Homo sapiens
gactttctaagccgttttatgtttttcttagttttatggttttcttaggcatattcctcctgctctccctaagactagattgatctgaacatagacataacagaataaacagaatttggaaggaaatgattaatttaccagcaaacacctcatgcaaattaaaaggaatggtaccatatatgataaaataaaatctgaagcatcttaaagatcacttgggctgggtgcggtggctcacacctgtaatcccagcactttgggaggccaaggcaggcggatttcttgaggccaggagttcaagagtagcctggccaacatggcaaagccccatctttactaaaaataaaattttaaaaatatcacttgtttctgctcttacaaaaacaaacaacagaactattctggcccacatactgaatatctgggtctagtttacgtctttggaagttgtgtggcatgctttatttcagcaaagatttttttttggggggggtgtggggtttgacataaaggattatagatgggtgataaggctactttgtagttttttgagagtctaggtcacttagcacaaaattctatagaagctaaattaggtgactttagtaagaatagtcagggcaaggccaggcacggcggctcacacctgtaatcccagcactttgagtggctga

SEQ ID NO: 142245 - DNA, 304 bp, Homo sapiens
aatcaaatgagaacaaaaagatgtggattttaacctaaaacctttttccaagtgataaccctgccagaagcacatcaatacttcataactgcaaccctagacccgtaaaagaaataaattccagatgagatacaggcagccaaggggcaactctgaagcaaccaacaagaaagcctcttctcctacttgcttctcagctttttaatcccaatgtttgaaagattagcaggctactgatacagaagctgctgagggaaaaaaacatcagaaagactcagtcctagatccaagataaagaaggcat

SEQ ID NO: 142246 - DNA, 277 bp, Homo sapiens
ctcagaacccaggtcgccctgactgtggccttggtaaagtctggaaacagtcctcagcctctgatatgccagatatccccagggctgctggttccgatgtagggacctgcccagggtctgcacgctcggcccggtccatcctaccacggccgccccctgaggggcccagggcagcatctcccagccccaggggcaccccaacctgctgtgtctggggaagtggaaggcccggatcctcgcagtatgggggcggagctgcccctaccaccaagtcccc

SEQ ID NO: 142247 - DNA, 486 bp, Homo sapiens
ggttttgctgttgagttgtttgagttcctcgtatgttctggatattagttcctcatcagatgaatgaaactagatccctatctcatcatatacaaaaatcaacttaaagtagattaaagacttaagcataagaccctaaactataaaactactagaagaaaacataggggaaatgtttcaggacatgaacctgggcgaagactttatggcaaagacttcaaagcacaggcaacagaaaagaaagtagacaaatgggactgtattaaactaaaagcttctgcacagcaaaggaaacaacacagtgaagagacaacttgcacaatgggagaaaatatttgcaaactcctacttaaactaaagaacctctgattttatctgatatatacattggccttctgaatatgttttgcttgttatatatacatattccatatataaatatatatatttgcatgtgtgtgtatgtatactatggctaaaaagaag

SEQ ID NO: 142248 - DNA, 238 bp, Homo sapiens
tcacaaaaacactaagtggaaaaactaatgattggcagggctagcatgcaaatactggtttgcctggttacaaagcccatgctttttctattacccgaatttgtcatataagtaatgtgagcttgattcaaaattttcaatcaacagaatttaatagaagagttgacaatataagtgctagcaaaattcaagacaacatattattttctgaatcctaagccctgaccacatgacatag

SEQ ID NO: 142249 - DNA, 280 bp, Homo sapiens
tctactgataaaagcatttcatttaggtggtctttaattgctctgtatgtatgtggcaaaatataaagggaatgtattttttggatggggccaatacaaaatcttccatcagaacaaatcctcaaaatgtttgaattttagaatggatcatgacctaggtgaaataaaacaatcttctgttacactctcttgacagccaaaatcctgatttggtggaagtggccctatgcccagattaaaaagccacagtctcagacttctttgtagttagagatgggca

SEQ ID NO: 142250 - DNA, 391 bp, Homo sapiens
ctcttgttagcttctcatcccggtctcctgtcctggtccctcaggcaggtattactcgctactctagcaccctttaaagctatctgctctccacaagtgacctcttattctgactgttctacatgctcctgccccatcaagatgccattttcaaagtgcaggaaaacattccatttgtgtcaaagagataacgctttacaattacaagctattatacagatggctttgaaagcacttatatgcacagcactgtttttatgaagtgggcagggcaagcttcatccccattttatagatgaggcaaaacagactcagaaagtaagtgaaaatgttcagtgaggggtgagtcaagcctcccacccaatttgactttcaaaggatattagctttt

SEQ ID NO: 142251 - DNA, 287 bp, Homo sapiens
gcggccgcctactactactactgctcgaattcaagcttctaacgatgtacggggacatgcctgtagtcccaactagaccggtggctgaggcaaaaggattgcctgagccctggaggtaaggctgcagtgagccactgcaccccagcctgggcgacagtgagaccctgtctcaaacaaaaaaaaaaaaaggaaaggaaaaaaaattttttttgtttaaaatatacatatttgcttaggaaaatatttgggaggaaatacatggaaatattaatgttcattctctcaga

SEQ ID NO: 142252 - DNA, 279 bp, Homo sapiens
agcaatagccaacacaggccctggcgcatggctgcagctctgtaggtatttgctgagtaagtcttgggggaaatggtgtgaataagccagacatgatcctgatgagccaaacaggacctgcccggggccatgacagcagggcaggctgggtcttggcaggggagcagagagccttctagccagggcatccgaggcagattgaaccagtgctcacagggatgggcaggaagtagacttgagggatagagagcttagggaaatgagaggtcccagtacaca

SEQ ID NO: 142253 - DNA, 111 bp, Homo sapiens
accaagtgaatgaatatcctggctatgtgtatacaatcaaaattagaaaggcttcaactcattattgggagactgttgcaacactccaagagggagttattaataataaag

SEQ ID NO: 142254 - DNA, 142 bp, Homo sapiens
gcctctgattcctcatgtgaagatgagaacagtaagagtatctatttcctagggatggcgtaagaatgaatagagttaagatctataaagtacttcgaataatgtctggtatacaataacgcaccaataaacattagctctt

SEQ ID NO: 142255 - DNA, 646 bp, Homo sapiens
cgctgccattgtagtgcagaagcagccgtagacaatatgtaaacgaatgcgcatgattgtgttcagtaaagctttgtttacaaaaacaggcagtgagctggatttggcccctgcgctgtagtttgctgacctaactagaaggtaggttaaggtgagttacctggaatgcatcacagagagcgaaatgaaagatacaaaagagaaaaaatcctgtaggagaaaatccaacacacatttaatcagagtcccagaaggagaagagagaaagacagaaccttccaaaactaatcgataatagtaatccacagattcagaagcccaacaagtgccaaacgagaatgcataaaaggaaactgattctaagacctgtcctagtgatactgaagaacaccaaagatgaaatattaaaagcaactagagaaaaaagacagattatcttctagggtgccataggcagactgacagcagacttttcagcaatgaccatgaaagccagaactggccacctagcatttctaaatccagcaaaaaaatatctataaagaatgaagagaaatcaagactttttttcagataagcaaatactgaaataatttatgtctagcagacctgactccagtctgggcgacagagcaagactccatct

SEQ ID NO: 142256 - DNA, 765 bp, Homo sapiens
gaatagctgttttttatttactgcccagccaactctttctttaggtttggctaaccggcttttataactcaccaataaactgttaatttttattagtgtacttttaatctccataagttgtatttagttctttgtcacatctgcctagccgtttttaatttatttttgttaattcgtaatttggatatgctgtttttatttttaaaagcatgttaaagtgatggatacatgaacttacataagtaataaaaacacccacaaacaagtatgagtgaaactggggatatctgaacaagattgatggattggatcaatgtcagtatcctggttgtgatactgtattatagtttttcaagatatcatcattgaaggaaaccaggtaaaatgtatacaagattactctgtaatatttcttacaatgggaatctacagtttatttcaaaagaaaaaatttaattaaaaacattaggcatttaaaaatattttacatcagctactctgatatttgatattactgcttgctcttcctcacagtgttttgtttcttcatgggtgctttatgatttttgattgtgagtccatgttccttaaaactttatctgttcaatttctttccagcctgagttaaatctatgctgtgttacttctgacaattgcctagggcactaccaacataaaaccactttaaaatatattattggcatgaatttttttataccataccatcttatgaatttgcggtgcaaatctgtgatatttggctgg

SEQ ID NO: 142257 - DNA, 406 bp, Homo sapiens
taggggaaagttcagagttagcctgttgtcagcactacctgctttacgagaacaataatctatttgcattttaatatatacatactgataagtgtagctagggactcactgtggccttggactttccaagaaatgagtcaagtcttcatgttcacttgaattccctattcttgatttcctattttgatgttcccaaagctggcacttcttttactcagtataatttagtatcctactcactgattgccaacatatccattggaaattccatttctttcttaactcaaaggcttttttttttccatgtgacacatatcctgtttttcccaatatcctgggtaactcccaatgattggaaattaggtatgctgttccccatacctacaatcaattcaacatctcacaa

SEQ ID NO: 142258 - DNA, 315 bp, Homo sapiens
tgctgtctcccaaaacacacagaaaagtaaaagatgcacaattttcttgttgttttgttatttttgtattcatatatgttacacatacagacttcagacattattagccatataaattcctaaacagccatcaaaaaacgtcaaggccaatactcctgagagctccaggagactgtagtctcccaggggtatacttaactataaagataagattatggtaatgtattaacatgtcagcacgactaggcacttgaaagtgacaacataggaaaaatgaatgaggtgctggcatggtaccagtggagggagcagcag

SEQ ID NO: 142259 - DNA, 240 bp, Homo sapiens
ccccagcttcccaagccttcctcttttccagatataccatattcctggttgccacaggaaatggggtccagattgctttgctacaagtgttcctcctttgcacacactacactctagatatgcgtcattgaaaatttggtgcccagaattgaatataatactttatatatgatctggccaatctaatttaaggtcaatcacatcattacatttcttctttttcttttcgtttcttttttt

SEQ ID NO: 142260 - DNA, 476 bp, Homo sapiens
accagaagcactggttacttcccccgtcctctcagctctgggaagggtggggtggtcatgaagtcctgagagagcagagggacacaccaacttctcttgttggttccctcaaccctgcccatacctatgggtaatcagagatggattcagtctccagttaggatcctcatcaaggtatttgtatgggggattccatgcagatggtgtatagagagaagatagacacaaggtgagttgactattatgagaaggtcagctcacaggtcagtagacttcctgatgaaggacagaacaccattgcatgaagtaactgggactcaaagcttccttcttcccacttgaccaggatataagagctttggtccacaaggacaggttcaggaatcagatccaaagaaagaaagacaacttcatgtatcagagtgaagtggagatgtccttatgagaaatgacattgttagaagttatcagggaag

SEQ ID NO: 142261 - DNA, 313 bp, Homo sapiens
tcctaatcattctttctaacaaggaaaatgcagacctcagactcagctcccagcagacaactgtatctggctagaacttactaaagttttgttttcgttgcacttatttattgtttattttctattttgggacggagtcttgctctgtcacccaggctggagtgcagtggcgtgatctcagctcactgcaacctccaccttccgggttcaagcgattctcctgcctcagcctcccaagtagctgggattacaggcgcccaccaccatgcccagctaaattttttttgtatttttagtagagacagggtttcac

SEQ ID NO: 142262 - DNA, 266 bp, Homo sapiens
tgggggtggagagaacaagacacaatcaactgggggccaccgagctggtgctcatgagataatgtgacattattcattcataagcaacaagtcattcattctctctcttttttatgtgtcttttaaaaacagctgattgaagtacaattaactgcacatatttaaagtgtacaattgacatgcatatacatttgtaaaaccatccctgtaatcaggagaataacgtctccatcactccaagagtttccttgtgccccttgatagtc

SEQ ID NO: 142263 - DNA, 481 bp, Homo sapiens
cagaaagaaattggagtaaaagaagtatattagtttcctatggctgttgtaacaaatttctacaaactcagtggcttaaagcaatacaaatctattctcttacttttgtggaggtcagaattctgaaattaaaatatcagtagggccctgttccttctggaggctttaggcaagcatatacttccttgccttttcaggttctagaagctgttacattcattggcttgcagccccttcctcacatcactataatctctcttttcatcatcacatctactgctaactctgatcttcttgtttccctcttataacgatcctaacaattacacttggttcatctgaaagaatcagggtaatcttcccatctaaagattcttaacttaatcacacctcctaagtaaggcaagatattcacacgttctggagattacgacatggacatctctgggatgcaattatctagcctatcactggggaaaaa

SEQ ID NO: 142264 - DNA, 304 bp, Homo sapiens
ctctgcctcccaggttcaagcgattctcctgcctcagcttcccaaatagttaggactacaggtgcataccacaacacccagctaatttttgtattttttgtagcttcttccctggccaagaagcttttttttttttcttgacacggagtcttgctctgtcgcccaggctggagtgcagtggcgtgatctcggttcactgcaaccttcgcctcccaggttcatgccattctcctgcctcagcctcccaagtagctgggactacaggcacctatcaccacgcccagctaatttcttctatttttag

SEQ ID NO: 142265 - DNA, 360 bp, Homo sapiens
atgagaaagtttgagaggtctgctgtataacattgtgcttatagttaatcatactgtgcacttaaaaatttgttaaggccgggcgcggtggctcacgcctgtaatcccagcactttgggaggccgaggcgggcggatcacgaggtcaggagattgagaccatcctggctaacatgatgaaaccccgtctctactaaaaaaatacaaaaaagttagctgggcatggtggcgggtgcctgtagtcccagctactcgggaggctgaggcaggagaatggcgtgaacccgggaggcagagcctgcagtgagccgagatcatgctactgccctccagcctgggtgacagagcgagactccatctc

SEQ ID NO: 142266 - DNA, 226 bp, Homo sapiens
gttgcgaggaatgctgaggacactctcctacattaacaccgtactatgaccacacattaatactgtactactaccttacattcactctgtattcaaaatccctaatagtcatctctaacgtctcccgtctttcatccccatcaccaagtcctggtgattttatctcccgtctctctcaaatctactctccatccacaccatcctgccagcattcctagtccaaggt

SEQ ID NO: 142267 - DNA, 148 bp, Homo sapiens
acacatatttaggtagtttcccctttctctgccattacaaacaatgctaaatgatcatttttatgcacatctctttgtaccaatgagtgagagttcttctagaatagacagctagaagtggaactactgcagaggatgaacattttca

SEQ ID NO: 142268 - DNA, 111 bp, Homo sapiens
gccgggaagagtccctgtctgaggagcagccgggctctttagctcaccagggactcatgatgtccccagctctggacgagctgtggggaagctacataccacccagacaag

SEQ ID NO: 142269 - DNA, 205 bp, Homo sapiens
ttttgtatttttagtagagacggagtttcaccatgttagccaggatgctctggatctcctgacctcgtgatccacccacctcggcctcccaaactgctgggattacaggcatgagacaccacgccccgccgagtccctgcttttaattctttggggcagggatccccaaccccctggtgatggaccaatactggcctgcggcccc

SEQ ID NO: 142270 - DNA, 109 bp, Homo sapiens
aaagctaattactaaatgcatttaaaataactaagtcacttcactgttgtatacttctctggggttgaatttcccaggattcacctacgaattatgtattgtatactag

SEQ ID NO: 142271 - DNA, 416 bp, Homo sapiens
tctagcctcccaacctcagacacccccaaagttaggaggactctgtggcactgaagctcagatctccaaactaccccttttgtccccaaacttcagtcaccctacactaagcaccccataggctgttacccccagaagtaggcaagtcaagaacccccaaatcaggtatgtgcagctgaccctcaaggtcagtcttcctaatccaaacaccaagaagctcataatcagagagacctgaacttgggatttagagtacctgcctcaaacaccctcatagcaggttggatggtggccccccaaaaaggtatgtccacatcctaaccccagaacctgctaatgtgaccttacaggaagagtctattcagatgcaattaaatgaaggatcttgagatgggattatcctgagttgctggggt

SEQ ID NO: 142272 - DNA, 598 bp, Homo sapiens
ggcctcactgtgttgcccaggctggactcagacccctaggctcaagtgatccttccaccttggcctcccaaagtgctgggattacaggtgtgagcacctggcttctgagggctttttaaatgtaatgtttgctgctagatctttaattgttcctcacttaatgctatcttaatatgttgtatttttatttatattactatatacagtaaccaagttaattcttacacttaatttttttatacttaggttgaaatgaagtttatcttcagtctagccagattttaagaggataatattaatgacattaccagtgtaaaaaaggttacaagggactataaataattgaatcaatgatttcaagagttttagagtatcagtaagcaagtccgtcctgctgattgcagttatctgtttgttaaattgggtctcataggactaatacaatattaaagatgatttttgagtatgtactcaatttatgagtatataatttctgtgaaaaattgcatttatcactgaagaagacaaaagcagtagatacagatcctgtatggcaaaagacaggaaaaaggggaaacagataaaaagcagaaaaatg

SEQ ID NO: 142273 - DNA, 286 bp, Homo sapiens
tcgttgaactggaaggtggaggtttcagtgagcgcatcgtgccactgcactccggctgggtgacagagcaaatctccatctcaaaacacgcgcgcacacacacacacacacatctttcagcctggcagaaaagataagtgacttacccaaagccagtgcagttcagaaagagctaagcagtaattcaaacacctgtaatcccagctactcaggcagctaaggcacgagaatcatttgaacctggaaggtagaggttgcagtaaaccgaggtcacgtcactgcactc

SEQ ID NO: 142274 - DNA, 171 bp, Homo sapiens
acctgcacgttgtacacatgtaccctagaacttaaagtataataaaaaaaaactattaatgtttttagcctactttttgatggaattttgtttttcttatttgatttccttgtagattctaggtattagtcctttatcggatgcagagattataaagatttctcccactct

SEQ ID NO: 142275 - DNA, 519 bp, Homo sapiens
ggcagaaaaatgccagctgatgatgtcttgcttaccttggttacaccagctctgggccccacctgcctggcctgatttgaaggcagactgcctggctactctgggactgccctggaaaacagccactctcacacctcttacagggaggaaaacagccagcgggagagagtcagccctgagctggggggaaaggaaggctggccctctgcttttggtgtcaggattactatttaatgcagtagtcctctattttccttcttcccccaaataaagtgttagtatatgtaattttcaaaagacattttaaaagagcctttccccacacctcaaaaaatttgatgtggaaaggcagattggcggttacacccctaatttttcctacccctttaaaaaatgaaattatatatatttccttccctttccctttccttcatttccttctttcttttctcgtttccttcctttccccccgtcctttcttacagtctcactctcacccctcgaacttctggcctcaag

SEQ ID NO: 142276 - DNA, 915 bp, Homo sapiens
attatttgctagctgtgttgcttaactttaactccttcttggcccacctctgcaaataaaaattaagtataattatactgatctcagaggtgtcttgatagaataaaacaggatgtttagctgaagcatactactcttgagaaagtaaaaggaaaaataattatctactagaaattattaacactcaagtgcagttttagaagaaacagacaaaataaccttagtgtttgtcagaatgtttggttctggagaccaaaagtcataatccctttttaacctttaaatagtctggagtcactgtgagttgcctaccccagagctccaccagccatctttttccttctagtagacactgagtcacacaattgagattaaagatattatttacttgcttttccattctctcttgcaactagtgatggtcatatgataactgctggccaatgagacatacaggtagattttctgggtgactgccatggaggactttttctcccttaaaaaaaaaagcttaaaaaagacattcaaggagagtcttctcaactgcctgactctcttcttgtaattgcatgtggtaaacctgagacttcagaaatcgccttttgaccacagagtgataagcccaaggatagaagctgcatgttgaggacagaagtgaaatgatggaaaaagccgcgtagacatagccacatgcctgaactaccctagaaccacttttttctagattttaagaaaatgaaaccggaccagacacagtggctcacgcctgtaatcccagcactttgggaggccgaggtgggaggatcacaaggtcaggagactgagaccatccaggctaacatggcgaaaccctgtctctactaaaaatacaaaagattagccggtcgtggtggtgggcacctgtagtcccaacta

SEQ ID NO: 142277 - DNA, 751 bp, Homo sapiens
atcaaacttcaggtttcattcaaaagtaatacctgtatatatttgtagtgcataataaaaaatcatattgccttgattttgtatgccatttgtagcttgcaaaatgcttttacatacattatttcacagaagataaattattgggattggcaaaataagttcttattcagactttttatgtcagttttattagcttttattttcaaatattggctaatagcttataaaaatatattttaatttctttagaatatattgttttataagttttttaataaatcataaattgccttttaaaatttattgaatctgtattcttactttattcctttgttcctcaaggatttcagtcttttaacaatattagtccactccctaaagtagtcactgttccagaacatagttcttgggtttgagactaatcagactacttaaaaacttgtgtcggattacagaggaattgcaagaaagtgtaagaatttctaccccacttaaattcagctgtgagaaaatgctggctattgtgccactatcagcaactactcaagtgcatttaattaattaattaagtccactattcagtcagttcaactcacacttcttgactagacatagatatcactaaattgactgtttagaattcttgattcagtaatcctaatggtttcatagatacacaagcaataggaaaatgtgtttattcttttttgaccatgtattcattctcaaaacaaaaatggtagtgtggaaa

SEQ ID NO: 142278 - DNA, 304 bp, Homo sapiens
gaattcgggaccaacctggccaacatgtgaaaccccatctccactaaaaaatccaaaaattagccaggcatggtggtgcgtgcctgtaatcccagctattcaggagactgaggcaggagaatcgctggaccttggggaggcggaggttgcagtgagctgagatcgcacactaccgtactccagcctgggtgacaaagaaaaactccgtctcaaaaaataataataataaaaaagtatagtgtgcctggatgcagttttgtttttatttatcctgcttggggatcataaagctttatcagttttg

SEQ ID NO: 142279 - DNA, 246 bp, Homo sapiens
agaaatgagtaccaaaaaatgaggcatgagatggaggcaattatatggaacaagatattcattacgcttgtttagccataggaagccacagtggcaggaaatatggactggggtgttattttggctgaaaacaaggggtagccaagttaaaacactccttaataagcaccacctgagaacccagcatccctgatccacagacaagaagcctcctctcctccccagcaatgcctcttcccagctact

SEQ ID NO: 142280 - DNA, 262 bp, Homo sapiens
caagatgaatacattttaacagatgaaaatagaggtagagatggcagtattttcaataaaggaaccagctctctttcattcatttgaaaacaaattgttaagcatctaccctgcctgaggtaaaaagtggctaaaataaataaacatgctttctgaattccagaaactttcttttccttttttttttttttttttaaattttactttaagctccaggatgcacgtgcagaatgtgcaggtttgttacataggtatacctgtg

SEQ ID NO: 142281 - DNA, 167 bp, Homo sapiens
atcaatattgttgtctgctaaataggctctgtgatcccagagtagtatgattaggtggttaggagcccaaattccttatccctaaaaccaagggaatgtttgccagtgccatggtctcccttagaaaacatacagctgaggctgtgtcaccctcaaaacccctagaa

SEQ ID NO: 142282 - DNA, 785 bp, Homo sapiens
ttctagtttaccaggcgtttagagcacgggaggctgttgatcctggtctggaatgtaaattgcaaatgctcccccatctgtctgcttttctgctcattctttcggggcttccttctttctctgccacgtgttcttgcagtgccgagctctgatcacaagggtcacctctcttcctgctttcctcggcagccacattcccttgtgcagtcttggccacacccatgtgccggggctgcctcagttggaatccatgccatctggggcctgctcgcccctgcagcagcctgagccgcaggctctgtgcgtctgccctgtgctctcagcctcggtccctgcactcgtccttgacccagtgtctgagcagagcccccctcccagcacggacgctgagttttgggaacctcgcggcccaggcagagcgcgtccttgtggtgctgtgcacaccccgcccaccctccgtccaccctgcgcatgcagtgcctgtggtgtcctgaggccttggtggggccgtcctagtccctggtgcagacgaggagcctgagaggcttagcagctcatgtgtgtgtcagctgggaacccacagcaagtggattccaaagcctgccatgtccctgttgccactagcacctcctcctccactccctcctggcctctctgggtcctctccttgtccctcctggcctctctgggtcctctccttgtccctccctgacctctctgggtcctctccttgtccctctctggcctctctgggtcctctccttgtccctctctggcctctctgg

SEQ ID NO: 142283 - DNA, 268 bp, Homo sapiens
tgcttccccttccttcatatccggacctttcatagaccagatagatgcaatccatccacaagacaccatatcccggacaatgcagggctgtcggtgggagagctcttactgcatccaggccctcattcatctgtgcagagaggagttaggagagcacagacactgcctttcaaagacagagctacttcaatcccattttattcttgatcgtgaccagggatggtgcctcctgactttctcctgtgtctttatgtctctggaagagaat

SEQ ID NO: 142284 - DNA, 5162 bp, Homo sapiens
  misc_feature (3287)..(3288): n is a, c, g, or t
ctgcgccgcgcgccctccgccggcgccaacacctgtcaactctgcgcgctcccaggttcttggagacgccgagtgaggagccgccctgaccgcccggccccgctccgcactgcaccccgacccaccccgcaccctccctttctgcaccctcgcacccacacccctcgcggttccagggggcggcggccccgggcggagcgctttcgcgtgcagccaccactccagaagacttaatgaagtagccagctgcagaagaatctggatcattagataaaaatggctttccatgtggaaggactgatagctatcatcgtgttctaccttctaattttgctggttggaatatgggctgcctggagaaccaaaaacagtggcagcgcagaagagcgcagcgaagccatcatagttggtggccgagatattggtttattggttggtggatttaccatgacagctacctgggtcggaggagggtatatcaatggcacagctgaagcagtttatgtaccaggttatggcctagcttgggctcaggcaccaattggatattctcttagtctgattttaggtggcctgttctttgcaaaacctatgcgttcaaaggggtatgtgaccatgttagacccgtttcagcaaatctatggaaaacgcatgggcggactcctgtttattcctgcactgatgggagaaatgttctgggctgcagcaattttctctgctttgggagccaccatcagcgtgatcatcgatgtggatatgcacatttctgtcatcatctctgcactcattgccactctgtacacactggtgggagggctctattctgtggcctacactgatgtcgttcagctcttttgcatttttgtagggctgtggatcagcgtcccctttgcattgtcacatcctgcagtcgcagacatcgggttcactgctgtgcatgccaaataccaaaagccgtggctgggaactgttgactcatctgaagtctactcttggcttgatagttttctgttgttgatgctgggtggaatcccatggcaagcatactttcagagggttctctcttcttcctcagccacctatgctcaagtgctgtccttcctggcagctttcgggtgcctggtgatggccatcccagccatactcattggggccattggagcatcaacagactggaaccagactgcatatgggcttccagatcccaagactacagaagaggcagacatgattttaccaattgttctgcagtatctctgccctgtgtatatttctttctttggtcttggtgcagtttctgctgctgttatgtcatcagcagattcttccatcttgtcagcaagttccatgtttgcacggaacatctaccagctttccttcagacaaaatgcttcggacaaagaaatcgtttgggttatgcgaatcacagtgtttgtgtttggagcatctgcaacagccatggccttgctgacgaaaactgtgtatgggctctggtacctcagttctgaccttgtttacatcgttatcttcccccagctgctttgtgtactctttgttaagggaaccaacacctatggggccgtggcaggttatgtttctggcctcttcctgagaataactggaggggagccatatctgtatcttcagcccttgatcttctaccctggctattaccctgatgataatggtatatataatcagaaatttccatttaaaacacttgccatggttacatcattcttaaccaacatttgcatctcctatctagccaagtatctatttgaaagtggaaccttgccacctaaattagatgtatttgatgctgttgttgcaagacacagtgaagaaaacatggataagacaattcttgtcaaaaatgaaaatattaaattagatgaacttgcacttgtgaagccacgacagagcatgaccctcagctcaactttcaccaataaagaggccttccttgatgttgattccagtccagaagggtctgggactgaagataatttacagtgaccccatctaaataaaatactgcttttgcaaacagaacactgtaatagggtagttctggagagatggtatgcagcatacaaaaatatattaaaaatataaacaatgttcaggagagtaaaaattcatataaagtgcaattgcacaaatacaagccaagctagaaggaagcacctatgaaagcaacaactttgtttctcatccatagtagtattgattttgatgctagatagttttgctaggtataaaaaataagtaaagttccacttagagaacaaagggccaaatagagtttttatatttgttatgataaaaggaagtagatgtgaaaaagcctaagaaaaaggaaattggacagttttgatacaaactttgtttgctaatgcactgatgagtctagtttcattatagcacgaagctatgagaataacttcagtcactcccttgaatggtgcaatgaattaaccagctgatttttcttagtgtgatgattaaccccttctttcatgttctgagctataacatttgctgaatatgcaatttgttattcttttattaatggcatgtaatattctgagcacgggcaaagaaaacacacaaaaaattatgtattggcatttatttatgtgcaaggtgataggaaaactgaatccatctttgtagaagagcactgggctaatttgtatgtttccatagctactatatgcataaacaacagtacctgaaggattattaagcaaccttaaagcaataagttcattaaacagaaggtaataggaagaacagtacatttttgtctttatctcaagtatataaagttttgccccatgataaaataagtaacatataaattaatacataagttaatattggaagtgaaattaggccttatgtaaggagaggtagctacacagcatctgttacggttaatgagaggcacactgctaaatttacgtatatttcattgaatactttatgggaagcctccacaacacctcctgatagtagtaaaattagaaaaaaacaaactctactaatttttagatattcattaataggaaagatttaatgttacagcatctactctttggcactttttcacataagccagccttagagactagacaaataactactgcaaaaagtacatagtgaattttaaaatgtagaagaaagcaaaaaataaaataagtcctaaagtgaagaagccatcaattttaacatttgatgtctagataacattcatgagattggtcattaaatactatttnnctccttttctggtgttacacatacacactcatacgtgtgtgtgtgtgtatgtgtgtgtgtgtatgtgtaatgatttgtgtccatttcaagtgttttcacaccagtcacacattatagaaattactggagccatgtctacaaaagcaaagtgaagtgatgagctgaaaagtgatcagggaatctgatcccataaagaaagtgagtctgaattgttgaaactaaagcacttcttttccaaaaatacttctgcaactcatgaacaaaatgaagttaacttagtgtttagcattaaaaataaaagttgtaccttgaccctagaattccttttataagatttaattgtaattgtctcaaagcatcaaataatacatctttatcattaaacatgaatttaatgtctaggataatttttaaaagaggaaattaaataattttacatgtctcatattttcagtgctttctcaaaatttgatggtgaatattacattgcattcaaaatcttcactgaatatcatatatatctaaatgaaaagagaattacttatattcatctattttctcagaatctattcagtaccctatggagtacatggaagaagtatatttttggaaccagtaagtatgggagtccacgattctcaggtattgattgaaaaaagagaaaggggcaagaaattcattaaagaaaaaccacagatactgaaacatttgacacataaaagtaattaattgctggagactacaattcctggcaaacaccattattccagatgcaccatgctacccagcatgctacctgaatggcggtttttatccatcctgtcaccctgagcatctgtctcaacctgctgaggcacagacttccaccatgtgcatcaggaaacacctcactcatactgtcatataatgcaacagggaggcatagtctctctacaggtctctctctttacgttgtaccattctgttgggcaacaattgtcccaacaaccacacttaaatccagtggggaaaaaaaggttaacagtaaaaatttcttccacgtaattcaatttctcacaatagacagaaacagggggaaaatgtttgccctgttcaaagtactaaaactagataacttaaataatttaagccaataaataatattatattgtatttaacccattattcctcacctaccctcaaagtaggtatacaaaagactagtttgttattaatccacaaatatgctaaatgttagcaagatgatttttaagtacaaaaaagtttaagattgcaaggaaggaaacaatggtcacaaggtctttacttatgcacatttgtgcataaatttccacccaatttccaagacagttgtatcacaaagctgtgaaatgtgcaagagtatactttgtacccatcatgtgctctgttttgacataatgagtaatgcagacatttacatgttcttccagcttcaatcagtagacctgattttcaaaatctgccctcagatgaaaataaaataaacgaaacatttagacaatggctatattaatctgggaaggcaacacctgtggataaaacattagaagaaaacatatattttattttcatacttttgatatgattgtaacatatttcttgagtaatttaaatgctttgttttcccacacatattcaaatcagcaagcttgtagctggactgcaatatcaacaacaagttgtttcaaacagcatcaaaatacaacttcattgctacacttacaagtaatgaattttatgtgactatgaaacgaatataagcttaaaataagtgaatctaataaaatggctattcctctttttacttggaaataataaattaacattatattttaaacataaattatgatttc

SEQ ID NO: 142285 - DNA, 256 bp, Homo sapiens
aaagagctcagtgtgtcaaggtacagcaaggaggccagggcagctactgggttaatttgaggctgaggaaactgacaggagtcaaccacatggtactgtgaagggccaaatagaatttgggtttgggatttgtttgcttgcttttgttttgagatggggtctcactctgtcacccaggctggagtgcggtggcaaaatctcagctcgctgcaacctctgcctcccaggctcaagccaccctcccaccttagcctcc

SEQ ID NO: 142286 - DNA, 395 bp, Homo sapiens
ccctctgaaccctgaatgcctaagcccagatcattcaattctaagatctggccacgcccaccctcctgcttcctgttaggacctcagcaagagagggaaactgaagaacaaagacaaagaacagatgtagggctttgctctagctcagggcaaaaggcagcttcaagatgtttcccctcctctccatctcttgtcaatacctgacccttgccaaactgcagagatcactctttgaaatgaaaagcatacaccatatacatgatggactagatttttctgtcctgattcagcagtgcacaggaggaattttcatccccataaaggaaactgtccaataacgcaactcaataaccattgaatgagcagctactatgtgctctctatttgccctgcac

SEQ ID NO: 142287 - DNA, 286 bp, Homo sapiens
ctgatatctactgacactggcatctactgacaccaacatttaccaacaccagcatctaccaacaccgacatttaccaacaccagcatttaccaacaccgatgtttaccaacgccgacgtttaccgacgccagcatctaccaacactgacatttaccgacaccgacatttaccgacactgacatttactgacactgacatctactgatactggcatctaccgacactgatatttaccaacgccagcatctactgacactgatgtttaccaacaccgacatttacgag

SEQ ID NO: 142288 - DNA, 110 bp, Homo sapiens
agcacttcatttttcatacaataccttttattatagagggtaaatggcagttttctgctgaattttaaaatagtgcatcatgtataattcataaaaactgccagtagcat

SEQ ID NO: 142289 - DNA, 511 bp, Homo sapiens
acattccatgtggcgcctgatgctgcgtggtgtcaggcagctgtggtcattcttgccggctgtccctgcctgctcatctgtgaaatgggagcgttgactgcataggatccagtcagggctcagtgggatcatgcccagagcctggtattcagtagacacttaataaatgcaggatactgcgtgggatccactcagggctcgatgggattatgcccagagcctggcatacagtagacacttaatagatgcaggatactgtgtaggatccactcagggctcggtgggattatgcccagtgcctggcatacagtagacacttaatagatgcaggatactgcgtaggatccactcagggctcggtgggattatgcccagagcctggcatacagtagacacttaataggtgcaggatactgtgtaggatccactcagggctcagtgggattatgcccagagcctggtatacaatagacacttaatagatgcaggatactgcttaggatccactcag

SEQ ID NO: 142290 - DNA, 207 bp, Homo sapiens
ctctggctccaaagcctctgctctcatctccttccaagtattttgtggttctgttttggctgcctcctaaccccaaggaaggtaatggtttgtctctgctgtcccctccatttactgattttgaatgatttcggaagggggaagtcccaaatgtacactgccaagttctaagctagagactttagaaaactaaaaaagaagaaatat

SEQ ID NO: 142291 - DNA, 346 bp, Homo sapiens
gtttttcatccctctctcctaagaggcagttgattatttatgtaactctagtaccagatatttacatggggaccatggaatgagaacaaaggcagggaaataaaatacaagaaagggaaaagaggagaagggaagggaagaaaaaagcaactagaaaggaatcaaacatattcaactcaaacaacagcaaaacgaggaatgcttgtgtcagcaccagcacccaagctgctttacaagacatggcagaagtcagaacacattgcatgcagctgctgcctgtacacacaaataaagttatataggaacacagccacacccatatcagtacctattgtctgtggctgct

SEQ ID NO: 142292 - DNA, 403 bp, Homo sapiens
tctcagctgtagaatggaaaaatctgtttcagttttaaggattgaattcaaatgtgtaaatagcttaagagtatccggcataagcactatagaagcgtctgctattactctgcagagtggcagtggtgaattatctgatattttttccttaacttgaatagcaatccacattacaatggataacaatacccattgtttatgatttgaggcatccaattataactgtattattgaagtgttatcaaattaccaaggctgtagggtatatttagtattcctagttaaaggtttgaactaatttgtatactagggcatgtttcttaatgggaagggggtgaaggttataataaaagtcacccctaatgcttgtttaaaattaaagaggaatttgtgggcctgggac

SEQ ID NO: 142293 - DNA, 321 bp, Homo sapiens
atataagccctcatggggcttatattttaatgagcgaggataggaaaaaaaaatgatggttataaataataaataatttatgtaattatgtatataaatagtaaagtatataaaatagtgtgcccaccctttgatccagaaattcacttctagaaattgatcccaagaaactatattagagagatatctaaaaacttagttacaagcattatttatacagtagaggggcaaattagaaacaacttaaatgtccaacaatagagaagtgattaaaaaaattaaggcagccaggtgcggtggcttaccgctgtaatcccaaca

SEQ ID NO: 142294 - DNA, 306 bp, Homo sapiens
agggggaagtgactgtcccaagtctacacaaccacagaagggatattctgggaataaatcacggctaaacccccctgctgctccaggcagttctccttctacagtgctctattgtgctgttttaataatctttcaactgggaagaactcccatttcaggaattaagccgtggacaaatcttttaattatccttgaaatcatcctaataagaaatccaaggaggaagtcttacagggtgcctcacccacttttctcatcactggaactttttagacattttattattttcttcctaaaccagagtac

SEQ ID NO: 142295 - DNA, 247 bp, Homo sapiens
agtagagacagggtttcaccatgttggccgggctggtcttgaactccagacctcaagtgatccgcccacctcagcctcccaaagtgctggaattacaggcgtgagccaccatacctggcctaggctaccctagatattaatgaaatagtttcatacttgctttgtaatcttgccccattggcatagcattttatctttattaaacaaatgaaaatttaaatagccaggcatggtggttcacacctgt

SEQ ID NO: 142296 - DNA, 187 bp, Homo sapiens
gatgaaaaagccaaacagttttcgacagctggaattcaccagataatacctaaagattgttttctaaataagtctgtaaaactacgtgactctctaaaatatatgtataactttgattaaaaataaaagcaataatgaggccgggcgtggtggctcacgcctgtaatcccagcactttgggaggcca

SEQ ID NO: 142297 - DNA, 353 bp, Homo sapiens
cactattgcattgaccagcaagctacccaagccttggtgattcggtagagaatgggctggtttagaaatcatactgacttgagtttaagtctcagctctccttttaccagcagtcaatatttactatgtgtaaatcatttaatttctctaagcccccaattttatgaatgttgtcaatcataaaattaggatgatgatggattcttctcaaggttgttgtagggagtaaatgcatgaaagtgtcttacacatcatggtgcatggtgagggctcagtgaacacttatgtctcctctctaccccttcctccttgcacgcactactgtgtgcatcaagtgttggcatcctgatggt

SEQ ID NO: 142298 - DNA, 242 bp, Homo sapiens
ccaaagtgctctccctgtttgctttacaacaccaaggttttgtcacaaaaagaaggaatgtgaacattatgtaaaaataaaaatttgcaataatttaatcccttctatttgtataattatttataatttaccaagtattttacttatatgtctttagatgacacagataaccctgatatatagtaatttttatgctatcttacaggtggagaaacacttccttacagagatcacatgcaaag

SEQ ID NO: 142299 - DNA, 399 bp, Homo sapiens
tgtttaaaaaaacagacttgtacctggaattcgcttttaaagtctgccagctgcccagggtcataggttcatttgcccaggctcctgcatattctaattttatccactgaggcccaggacacatggagtctctgctcagtctctatccttagaaggaagcttcaagccgggctgtcagagccgacggtaaacacatgatgaatgtccccgccgccctgaaccgtcttcctgagattctgtgtgcctgcccactcttccttgcagagtctgaaagtgcattgcagcgtgttcctccggctcccagaatcggacatccgtttcatcttggaggagcacatcctgaataaaggttattctaattttaacagcagcaaatgctaagctcaatggtgaactaga

SEQ ID NO: 142300 - DNA, 549 bp, Homo sapiens
aggtggtggtttaggtgctgagactacaggaatgaccaaaacaaaacccttgtgctcaggagctgttttcagtttggagagaaaggcattaaaccatataaagtcagtggcaatgagtgctttatagcaaaaagagaaaaagaaaatgaggcaggagacaaatgaaatgctaaataagctcttcatgcacatggcaactagagcagcccttgtaaaatgtcagatgttaatgctttggttgacctcctctaaataactttacacttaaaaaataaaatccgaactccttactaaggcctgttaagtatgcttctcattttatcccccatgttccagttacactgtactcgtccccagagatactaagcagttctctacttcaagacttttgcacttgcaattccttcttcctggaacatcttttcccagatttttgcattgctcatttcctcaggtggctgctcaaatattcagtgtccttcttcatcgaaaatagcacacccccagcacacatatcctcaattcatttgtctcctgcctcattttctt

SEQ ID NO: 142301 - DNA, 264 bp, Homo sapiens
cagttctgaatatccagatagagaaagttcatggaacttctaaggtgcagccatcagttgggaagttttaactacctcttgctcctgtatgtcatcagtcatgttcagctccaggagaatctcaggtactcactgctatgatcagagtgctaagatctgttataggaagtgaatgtgttggaaaagtgtctgagcagataatagcagtagctgcctgaagacctcttcctcaaagtttatcatatagaaggattgaaggtagag

SEQ ID NO: 142302 - DNA, 364 bp, Homo sapiens
cccattttacataaggggaagagggaaccgacctaaagctactcagttaatgaacagtacagccaggaccagaaaaaggtctctcaagcaggcttccttctacttttctggctcccttactacttgaataacaaggactcttagcaagctggaactttatctgatgcctactcaaatcgtgcatagaattagcatcacaaccatggctcagaatatgggctgtgggcccagactgctgagttcaaattctgactccaactcaccagctgtgtgacctgggcaagttatttgatctttctactaatctattaggccttattacccccatctgtaaaatggagacaccagcagcgcctactcagag

SEQ ID NO: 142303 - DNA, 694 bp, Homo sapiens
agagtttgtgtctttgttcacagtgctaaattgtcccccagttagcatcaacacacactccccaaactcctgcctgcaatgtctatatttggtggccttttatgatgttccttgcctattgttttcccttcacctattaataaattatttctttagctttattgatcaaagctgcccaggcattttaactaacatcacgtgtgcaaagtttttaggtgtggagtgtggggtttagcaggaggcctgtgtgggggctgtgctccccatcctgacaagcacacaaggaactaggatgatatccttgagattggctgggctaccattgtttggattctctttcttttaaaatatatttttcctatggtatatgaataaacatttaaaatttttaatacaatgtttgaatcttcttcagatattttatgtgaaagttaggtcactgcttgggaaggaatagaatttcaacctttgggatgaggatgcttaagaggatgtggaggacttccaaaccactctgaaatgttttcttacctgaggaagtcttctagacctggcagtagaaacctaaaaatatccctcatagccttcctctaattgatgctagttattagaatctgagctcaacattgcctggaaagggtgggcatggaggcatgtgtctgtagtcccagctactcaggtggctgagacagga

SEQ ID NO: 142304 - DNA, 267 bp, Homo sapiens
acagctgacagagtcctctcctggagggattcccaagttatctccagctgagctctttcatgaaacaaataatatttgtttcctattgctgcataacaaattactacgcatttagcagcttaaagccacaaccaattattatctcacagttccctaagtcccactgtatgggtgtgactgggttcttagctcagtctcaaaagggcaaagtctaggtgttggctgagctgggctcttatccagatgctttgaagaagaatccacttt

SEQ ID NO: 142305 - DNA, 836 bp, Homo sapiens
ggcaacaagagtgaaactcctactcagaaaaaaacaaaacagaatttcaagactcaactaaatctctgaagaatagaagcagggattaaaacttatttttacaaaggaattaaaaacttaattttacaaagttcaggtaattccgatatttgcctgggtttgcaaatcatgaatataattcaacctttgcattttatgatgtggttgagtaatgtgtccaaaacaacacggttagataacagtataacctgaacaagaactcaaagatgccttgtggcccagtccaagacatctactcagctacctctgtgtgcttgcaatatgaattggtggcaattaatgcaagaagaaggattctatgagaccaagagctgaggtttggatgggagtattgcctatgttccactggactggaagggacaggcagggactaggtctgacaggagtgtccctttccttccctggcagggtttccaagaagcaacctgtccaagtccacctattagtcacaggaggtgacactggcccctagtgatgctcacgccgtggtttttctgagcatggctttttcatttagcttttgctcagagatgcttaacacatggaacctagttgctgacagaatgacctcagcagggagaggaagggaactactttttcacacctgcaatgttactgattataaaaaatgataggtaacttccatagatagggagggctgccttaagaacaatgaagttgcaaacttctggagtattctataaaaattgctactgtgctgggcatggtggctcccgcctataatcccagtactttaggaggccaaggagggaggc

SEQ ID NO: 142306 - DNA, 273 bp, Homo sapiens
ccacctaaacctttccatttcttacctacatttggtctcattcattcgcatctagaaatgtattcaaatgaaaaacaatccaggatatatgcatacgttaattttcagggatgtttagcaaggctatttgtggtagaaaaattggaagctacataaataactaacaataggcgactgattctaaatcatggaaattcgtttagtaaaactttttttttttgagacagagtctagctctgtgacctgggctggagtgcagtggtgcaatctcgg

SEQ ID NO: 142307 - DNA, 463 bp, Homo sapiens
aaggaaggggcagaaagaaaggtaagggaagagatatatatagatatgtccatatttacaatctgattataaccactgacatatgtgtgcttttttcttggtatactttgtgaatactatatgaattgttaaataattaagtagaaacatcatttctggtaatattttaatagtgcagatctcatactgaactatctaagaagcattatacttacttgactgctttgtatctcattttatattgggtattaagtgaacacagtatttaactataaacctgccaatatgcatttccagagacctgttgccattttgttttttaagatatttttgtccccacaaaagataagaaaatgtatcgtgaatatttaccaatgtctgaatcctaaagccctgagtattttgatactcaagtactcatgatatgcaagaaagcatggcacatactatataagtgtaacca

SEQ ID NO: 142308 - DNA, 121 bp, Homo sapiens
aagaggaagaaaaggaggagggagaaatggaggggaaaatttgagaaagagtaggaggtttttgaatctagtttgaattcgacaagctagaattcagaagaaagcagggtgagaaaaatat

SEQ ID NO: 142309 - DNA, 329 bp, Homo sapiens
gccacccactctggggaccagagatcccataacgatgaaggtctgtccagacacttcactatgacaagagatcagccatgagtaggtgggtggagcatccgtctacctggcactgggaactgctcagctgcagctaactgtcggcctgggggctgcaggccttcccagtgtttaaacgatagccacaggctgggcgaggtggttcccacctgtaatcctagcactttgggaggccaaggcgggcggatcacctgaggtcaggagttcgagaccagcctggccaacatggcgaaaccccatctctactaaaaatacaaaaaattagcctg

SEQ ID NO: 142310 - DNA, 154 bp, Homo sapiens
atttggagttaggctatatttgtggtaagcaagcacagttcctatagtatgtaagtttcatatctttcatttccaaatactacattgaatccacataaatgaagtgatatgtaagcattgtattagatattataagtaatctagagatgattta

SEQ ID NO: 142311 - DNA, 292 bp, Homo sapiens
gtggtcatccttttgactgacacatcagggtttcaggctgggagaccccatggatggggattgtgtggctgtagctgtcatctgcgtgggggtcagaacccaggcctgcgcagggactcacctgacaactaacggcaggcagcctgggggctgtgctcccatgctccctggccgctggaggcatgtgtgggcagagccccccaccccactcaggacgagggccctgggagctgcaggaagcacacggaggcacgcacagggcggcctgggacccaggcactgacagacttgg

SEQ ID NO: 142312 - DNA, 378 bp, Homo sapiens
acttatgaacactgtgctgaactgataagcagtaatcgttttccctttcttttaatatactgttgccaattttagctggttgcttagaaacattaagtaaaacactagaagccaatgtaagaagaataagggctgtggtaggggttggcagtatattcaaaaatgtaaagatcagaatataactatgtgtaagggtgtgagattatcagccaaattttgctagctcactgttttcacagacgtcacaactctcgttggaaacttggaaaatgcagctttctacaactacacccgacaaaacaaagactgacattttgaattggccacatgattaggggattgataactgttcctggctagccagcacagatggcaaca

SEQ ID NO: 142313 - DNA, 277 bp, Homo sapiens
aaatatttaggaaaaaaaacctgagagagctgtgagacatcatcaagcatactaatgtactcatatattcatatagttattatattcattagtatattcatactcatatactcatataggaatcgcagaaaaagaaaagggacagaaagaatatttaaagaaataatgatagaaaatttcccaaatctgatgaaagacatgaatctacacatccaaaaagctcaataaaatccaagcaggatgaactcagatccacaccaagacatgttatattagg

SEQ ID NO: 142314 - DNA, 102 bp, Homo sapiens
aggtaggggaggatgatcgaaggtaggggaggataagcaaagactgcaaataagaaccctgatggtggccgggcgcggtggctcacgcctgtaatcccagca

SEQ ID NO: 142315 - DNA, 482 bp, Homo sapiens
agctcaagcaactgatcacagctgtgatagagaaaagacattgacagataagggcttttgatatcaggcaatcctgatggccttaaaataccagaaggacattctaattagattcagagtaggtgagtgataatcagatttgggatcagatcagggttaaattaagcagtgaatgaaagaagttaaagattaaggagatctatacctcccctccacttctcaggaaagatttgagccggattttcaaaaatgtacacaatcatgtagatagtggttaagagcctggacctcaggataaaagagaattaggtttaaatcccagctctgccacttcctgctgcgtgaccgtgggccagtcacccacctctgatttctcatctgtgaaatggagggcaaaatacttcttgcacatggcaggcttgttggaggacaaaatagactaggtacctgaaacgtgcttgctacagaacgtgcactgagcg

SEQ ID NO: 142316 - DNA, 648 bp, Homo sapiens
tttccaagtcaagaattgttttaaaaagaagcctggtgaaggcaaatgctgtctgtggccgaaggcaccgtgaggagctgaggctgacttatgtttctcctctgggctacgtgcgcctctaaggagttcacacactttaacccccttaggaaccctacatgatcatcctcgtttcttaaagaggaagcagagccagcaaacaagtgggggagccacagttccagcccaggtgtcactgggccctgcctgccccagccggctcctcaggagcacacggcaccccacgcgcgtgcaggggacagctgtcctcacaggaacagccctgggacctacaggacttcctggggtttaccctcagatcacccatgaggttagaatcacaaagcccgggagtcaggagacacagggcagctggagggaggtctttactgaggctactgaggcacagcagccccgtctagaggcctccctgagaggcacttcctgaggagtctggtggattttgagctgctttttaaacaaccttctccttagcatagacactgacactgaagggaaagaaagcaaatggtctgttcttagtgggaaggcaacttgctttcaggggaatgagtttggggaaagaggactggtagaagacacgactaa

SEQ ID NO: 142317 - DNA, 397 bp, Homo sapiens
gccaacccagcgcattcttctcacccttcttccaccctacgaaaggccatatcttacaagagatgctggtaaatgccagacattcactgtgtcaggcttcctcacagctagcagtggcatgagatcagttcaatccaatgacactgaaatggaactctccaaagtgagtttctgcaaaagacttctctgttaacagggagttataaggaaatatgcaccttccttccctgctttccaatccaggcatgatgtctggtgctacggcaaccatactgcaaacatgaggcaaatgagcctgaggaataaaagctaaaacactaatagaagaagaaaaagatgcagaacctagatccttaatgacatcattaagccactgcaccagctttagaaccaacta

SEQ ID NO: 142318 - DNA, 212 bp, Homo sapiens
ttggcacttaaaaataacttcagcactaagaaatgagtcttattatgaagtactctacacatttggctggaaaaaagtacgtccaagccttcatcaaactggaagctccctgagcgtgtggactgcctctcccaaaggcatggcattctccaacaacagagtagctctctgaacttcctcttgggtaaccctcagccacttgttctttaaaa

SEQ ID NO: 142319 - DNA, 400 bp, Homo sapiens
ccctaataaagtcccattattcaaattagaccactttatccttgaactatttatcagaaaacagcttgatcattcatgctataacaagaatatgagttaaagattgagttctttcattaatataaaatttgcaccatttagagggatctgttttccttaaaaattatgcttatttgctatagtttgttagattttctaataggtaaacccagtctctgcttcatatactatttttaaattatttgtaatgtagatgtcattgatgtagtagactgcatgccttcatgtcagtttctctgggaaagctatttccatgtatggcagatgaaacagaggtaactggtcaaatggttgtaaaggaaaatttgaagttttaattttatttaaacaaagaacactt

SEQ ID NO: 142320 - DNA, 435 bp, Homo sapiens
ggcaagatctcggctcaccacaacctctgcctcccgggttcaagcgattctcttgcctcagcctcccaagtagctggggttataggcatgcgccaccatgcccagcttattttgtatttttattagagacggggtttctccgtgttggtcaggctggtctcaaactccctacctcaggtgatccacccgcctcggcctcccaaagtgctgggattacaggcgtgagccaccatgcccggccagcttctgtttctttatgtataaacagtactgtcatgaagatgcaatgagatgaattttagctcagagcctgccacctggtgacttacccatgttaggtattgtggttacagccctgctgtcaaaccacttctccaactctctttctagcctcaattcatctgtcaaagcatttggccccaggattttgctgcg

SEQ ID NO: 142321 - DNA, 593 bp, Homo sapiens
aaaaagtccaggaccagacggattcccagcagaattctaccagatattcaaagaagaattggtaccaatcctttgacactactttacaaaatacaaaaagaaggaaccctccctaattctttctatgaagctagcatcaccctaataccaaaaccaggaaaggacgtaatcaaaaaagaaaactacagaccaatattcttgatgaacctacatgctaaaatccttaacaaaatgctagctaactgaatccaacaacatatcaaaaagataattcaccatgatcaagtgggttttataccagggatgcagggatggtttaacatatgcaagtcaataaatgtgatgcaccacacaaacagaattaaatacaaaaatcacgtgaccatctcaatagctgtagaaaaaacattcaacaaaatccagcatccctttaatattaaaactctctcccagctactcgggaggctgagacaggagaatctcttgaacccgggaggcagaggttgcagtgagctgagattgcgccattgcattccagcctgggtgacaaaagctagactttatctaaaaaaaaaaaaaaaaaaaaaaaaaaa

SEQ ID NO: 142322 - DNA, 249 bp, Homo sapiens
cagttcatgaccagcctgggcaacgtggtgcaatcacatctttacaaaaactatgaaaattagctgggcatggtagtgaagactgtaatcccagctactgaggtgggtgagtttggagaattgcttgaaccaaggaggtggaggttgcaatgagcagagattttgccactgcactccagcctgtgcagtggtgagagaaagagacagagagagaaagagagagagaaatcttctgacctcagagcctga

SEQ ID NO: 142323 - DNA, 674 bp, Homo sapiens
ggataataacagcttaggagagcttatctgaggaatgtaaggatggctaaacattagggaatcagaaacaaaaattgttagtaaactaaagaacacagcatagttagccagaaatgctaagaaaattcagctacaaaacttaccagcaatttagggttaaaacatcatatgaaatggcaaattaataaaatggtgccattaacggtgagttcaaacctaaaaggccaatatttgtcattgttttcattagtgttttttttgttcctacatactgtaaaattttgtgacaaattctgttccacctagtatttaacctgacacctaaaatgtttagtgtatacagttgcaaagacataattacttgccattgtgtaaatagtgatctttgaaactaaaactattccattctcaaatacatctgttggactctaaatacctaagggtggatcacgtgaggtcagaagttcaagaccagcctggacaacatggtgaaaccctgtctctactaaaaatacaacaattacccgggcatggtagcaggcacctgtaatcccagctattcaggaggctgaggcaggagaatcacttcaacccgggaggcggatgttgcagtgagccgagatcacaccatggcactccagcctgggctacagagactctgtgtccccccaacc

SEQ ID NO: 142324 - DNA, 245 bp, Homo sapiens
ggagacgaacagaacccaagcctatcgagaccatatgctccaccgcttacatttgtcttctctaaaggctgaccctttaacagttatgtaattcagttacttcacaaccatttaaatatagcaaaatgtccacaaagaaaaaaagttgcccacccacctaaataccttccatgctttgcccacagtggtaatagacgagggggtgggggtgggcaaacatgcctttcagtgaaagcatggagaga

SEQ ID NO: 142325 - DNA, 443 bp, Homo sapiens
caggacttccagtgctaaaacagagaaagcccggggcaacccaggtcaagctgtccgctctccctggccagtccctcgaggggctccagtctggaggtgagacttccatgggcatagagtcccagtcccgggtgagacctgctttgatgggggccatagaggtgcagcaaggaggccctgctgcaggccatgactcccccaggccacaccggacaagcaggtggatgaaggaaaatgggaaaggtgatcagggcaggagcaagcttgtgcaaagacccaacgatgcaagatcctggcacgcttcaggaatacagggagtttgcgggagagtctccttcctccttagaagtggctcagagaggccgggcacggtggctcacacctgtaatcccagcacattgggaggccaaggcgggcggatcacttgaggtcaggagttcgag

SEQ ID NO: 142326 - DNA, 243 bp, Homo sapiens
cacttctagggacctggccctgccttccagcctgccaggatcccaggagaccaagcctccacctctgcctccggacagctttactttggctgagcaaggaggatagcctaggcctagaggaagacatgagggcagcgaacctggggctgagctcagagctgcttgagcccttcaggccccattcagagtgggagagggggtgtcatgccttagagatgtggggactgacccccttatcccagc

SEQ ID NO: 142327 - DNA, 290 bp, Homo sapiens
ctcccagccgtcggcgggctccagatcagaagcggggaatagaacctctcccccctttcctgcctctttctggtgtggcttgagttgctctgctctctgggaaatgaggctgactgacacacaccctcccttcccccaatccttgaaatcttgggtgtttgaaggacaattttcttgctcccaactcatgggtccatttatctagccagcatccctagcatagccctccttgcccttgatgccaccttcaggctggggcaggtggagtggaggctgaggaacagactggt

SEQ ID NO: 142328 - DNA, 229 bp, Homo sapiens
agctgggattacaggaatgtgccaccatgcctggctaattttgtatttttggtagagacacggggtttctccatgttggtcaggctggtcttgaactcccgacctcagatgatccacccacctcggcctcctaaagtgctgggattacaggcatgagccaccatgcccggcaacttattattttttaaatcaagcacccaggtgattgtgatacaggttttcaaagcca

SEQ ID NO: 142329 - DNA, 426 bp, Homo sapiens
tccagatcagaatctcctaatacactgggattggaggtgggtgtgggagagtctttgcccaattccttacgaacatggcagtttttctgcttctcagattgggtccaaacctctctgcctgccactccgggctttctacttgttgagccagcagtgggaataaatattatgacacagttgctaagtatacaggcccttggctcaggtcaccagtttggcccctagctcaaactgtgtgaccttaagcaaatgactgaacctctctgtattttagtttgttcatctctatataaagaagcagtcatagtacttacttcatacaatcattaaaaacaaacacatacatgcttatcaggtttcctgacaccagtactcagtagtcttagtaactattacttattttatctcatctaggtgccatcaatt

SEQ ID NO: 142330 - DNA, 795 bp, Homo sapiens
caaaagctcaagtgtgtaacacattggtaaagatgcagaggagccaaacaattagaaaaattcatctgaaagctatatggagaattttttttctcttctatgagcttcattgagaagtatatatggagaattttgtatccaataaacatggttttcaaaacatgtggagcattacacaaagcaatgatagtcgggcacagtgtctcacatctataatcccaacagttttagaggctgaggcaggtagatcacctgaggtcaggggttcaagaccagcctggccaacatggaggaagccccatctctactaaaaatataaaaattagccaggcatggtacacgcctgaaatcccagctactcaggaggctgaggcaggagaatcacttgaacccggaagccagaggttgcagggagccaagatcgcaccactgcactccagcctgggcgacagagtgagactctgtctcaaaaaaaaagtaacgatatcacacaaaaaacctaaatgaatctgcaaaagcagaagtcatctaagtcaccatgcaccgtggtcagaacaagagtaaaaagacaaaacaaccgcaacaggggaaaccactggtttaagatcaccagcaatgagaataccaggtgtcaaaatctgcaatctttatccagagccttgggtctccccgttccaacaccaaataaatcgattaaaaaatgagccctcactagacggagctagcagcagcagcgttatgggttgaattgtgtccctccaaaattcatgttaaacacacagcccaggacctcag

SEQ ID NO: 142331 - DNA, 416 bp, Homo sapiens
gaacaagaaaagctgtggttatataccttgcccacaaaatgtagttttgtaataaattctctcttaagcactctccgtaagtgttttcatttcctcccactgacaaccagtccaagggagataaagaggcaccagcccggctgatttttggatttgtggtaggagacggggtttcaccaatgttggctggtctcgaactcctgacctcatgatccgcccacctcggcctcccaggagtgctgggattatagacgtgagccactgtgcccagctgcaacgtggcatcttcaagtgccaggtccaaaatggcgccttttaagttacccagaaagtacagttagtatgtcgctataaagtagcttcgcaaataatgcttccccatcctgagcaacattcccaggccttgggactgaacc

SEQ ID NO: 142332 - DNA, 326 bp, Homo sapiens
ttgctagctgtgtgggcctggacaagttcttcagcttctctgagtctccctcacctcattcatctgcctcacagcggtgtttccagcacaaagtatatgaaaggagtctgaaatcatacgtctctataagagattattaatactattattggttgaatcacaaatctattgtcactgaaaatctttccagtgcagacaaccagaagtaaaaatgaggaaaaaagggaggtgctacgagggaatgagaggcaggaggcctggaaagggggaattgggcccctcctttacaatctgatccgggtgtgggatcacctgcaaactgcctg

SEQ ID NO: 142333 - DNA, 354 bp, Homo sapiens
gccattacctcctgagttcagtaagaacttagacaaaaataaccagtagctgagaagcttcaaacaggtttattaaggttgtttctcaacaccatcatttgtataaataatcccccagatccctctgactttcacaagataatatttttcaactgaaacttattttcattattttctttaaacatatttttgtatacattgtctgctgggcaataaattaaaattcaaaatataaaatctgatttaaatgtcactcggaatgtagatacttccatcatgaataataaattgatttgcagatgataaatccccacagaaagggcatttgttttaaacagctgttcagtttcagag

SEQ ID NO: 142334 - DNA, 116 bp, Homo sapiens
ggagccagtgaccttctagggggctttgccacctgctgctcctgaaaactctcccacaattagaatgcacctggcaggccgggcgggctcggtagctgacgcctgtaatcccagca

SEQ ID NO: 142335 - DNA, 785 bp, Homo sapiens
ataatgagaggttagaccacagtccatgtgtattcctcccacaggaaatgttggccttctttcagagagccagtctagttaaaggataaactatatggcagtttcatgggtattatgtagaggactgaatgttgattattagggaactttcttggatcacctggtactttaaagagctggttttgtaacagagtctaccagaggagagtctgttataaatcagtcattaaggttagaagattttcttacaagaggaatgagcaagaaattgtcatcttagaactagttgagaccttagaagccatctagatcacataccttacttcacagatggacagaacaagctcagaaagctgcagctggggttcagggctttgacttgccagcccaattaatttctcagggaatacagattagaaggacagagaaattaatagttacggagacctaaagagaaaaaatagaagttgattaaatccaagtttttattgtatgcctgctgtgtcccaggttctgtgctaaaggtaccaagaataataaataaaatgtcaataaggctaattgttaccctatggaatgcctgaaactgaagctgacacatgcatattgaagggagcctataaagaatgtgtgggaaccaatgtattgaaacattaaaaaatagaaggcgaggtagcttcaggcctgatatcccagcactttgggaggctgaggtgggtggatcacctaaggtcaggagttcaagaccagcctggccaacatggtgaaaccccgtctctactaaa

SEQ ID NO: 142336 - DNA, 351 bp, Homo sapiens
gtggcagccgtggtgtgggtgaatttcatcatgctgacactcctccacacctgctccgtgcctggcagtcatggtccaggggctggatgcccagggtaaagtggggaagaaggtgataggcacccagccacatgctccgtgcccacagatccctggggccagccaagctgcaggtgccctccctcaggtgagagtccactcggccttgtgattcctacagaatagcccttctctccttctcctgtgtctctccaggggccagggaggagatgctaggggcagagagccaaggtggggtctcagcctgggagcgatggcactgctgtggtttcaatgtctgtgttcctccga

SEQ ID NO: 142337 - DNA, 444 bp, Homo sapiens
acaaatgagggccagagtagaggttgctagagagctgtgtatattgttaggtactgatttggatgacagtgattgctataagcatttacaatacttcgtagtttagccacagttgtcccagatagctgcccacagctttaaaacatttttagggtgtctgttgccaccctagtccgttgacactgcatggagattatttctgtgacagcagtcttcaccagtgttaaggaggctgggagttgactctgtttccataaccatctaattaaatcaagtgcccataatggaatttgaataactgcctaactttgatatttaaacagaaactttgaggaaaaacaagtctctttttgtaaatatattctacttgttaagaaaaaataaagtagatcatgatgttcatctgaaaataaaaaataaaagaaaaaaatggacaagatgtta

SEQ ID NO: 142338 - DNA, 277 bp, Homo sapiens
gagatcatttcaaagaaaacattctggaacagttgcctatgggcacggcagggtgacggtgctgcttctgggtttgacagtggcagcgtatagctttcagcgcttgtgaaatctacacccaagtgagatctgtgggagggcagacttaactgttacgacttttttcaactcctgttacttggtagtactattggcctgcctaaatggggcctaccgaagatcgtggaaaagtagtacatgggacattaatgtaaaggaaggagataggagaacatta

SEQ ID NO: 142339 - DNA, 240 bp, Homo sapiens
tctacacacacacacacacacgttgccacatccctgtggtcccagttactcaggaggctgaggtggggaggactgcttgagcccaggagatcgaggctgcagtgagctgtgtttgcattattgccctccagcctgggccacagaatgagaccctgtctctcaaaaacaaaacaaaaacatctacgtgaggtcaggtagccaactggagaccagggtctgaaagtgagagaagagtgctga

SEQ ID NO: 142340 - DNA, 415 bp, Homo sapiens
tatgatggagggagagaggggaaacacgttgaagaatgcaatggagtgattatgatgacggattacagaaaataagcagtagaagaaaggaagaatgcgtataaaggaaatgcttgggccccacagtagggtttaaagaatggctggaataaaaaaacagacaaaacatggtttaaagataggaggtggtagttaaagagtaatatgcttgcaattgagatttgacagtggttatgattactggtaatagctaagcaagagtaagtgattttgaaactaagaggcaggtactggattgattgacgatacagaaataattaagaatgataaaagtagttgaagtagagaaaaagacaacgagtcagatcctaaaatcactgatgaaaagagacttgtggatgagtgcaaaaggaca

SEQ ID NO: 142341 - DNA, 321 bp, Homo sapiens
tctccccagttcttcccacaaatgtctttaaatcactcatctaatgatgtatttaatgcctcttttccctgttttcttgcaaactacccaagagcaaaaaccaagtcactcttaatgcttcatcagcagcatcctgtgccatgcttagcacatagttggtgctcaataaattcttgccacacaaaccaataaataaatgttaaagtgttgaaatgtcttttcaccttttcaacattttttgaattgcgtttctacacacgttgcccacttacgagaatgaaggctcttgttgatttgtgaaaactttatatgaaccctctg

SEQ ID NO: 142342 - DNA, 478 bp, Homo sapiens
tcaggaactgaatgaggtctttgctgcagagtaaaatgggaagggtcagagcaaacctaccattagaaattgatgtttggctttttttttcctccacgattaaaaaagtaggggaaaaaaacccacctcaacttcgatttgattcaaaatagtatttcctaaaacataagccattcttgtcaaatatgagttccttaacttaaaaatgcattcatttaaatccctgatgtattttctcgtgttcttcattcatgcttggggacagagtgagtgggatttatgagttactgtactcagcacaggagaaataaatttggtataaaatatgtagagtataatcttactatttttgtataatattagaatttatcctaatcttaccaacccatccttgaaggcattttccttcagttcataatcctcactaaccaatttttctccaatgggaacttataaacattagcaaagaccccataac

SEQ ID NO: 142343 - DNA, 738 bp, Homo sapiens
gatttgtgttctgtttaaatattaaattgtcaacattgagtatactataccttttgtccttatctccatctgacctttcctagcatataacttttaatatgagaaatgttatttctttataatttttttgttttaatccagtactagctgtataaaatggatttttgcataaaagcagttgatgttatatattcttctattctgccacttttaagatttatgcttcttatacaaactttttagtgaatcagttttgaaatgagcagtagtccatttttgaaaacagtgttggcatatatagacttaggatccctaatccaaaaatttgaaatctgaaatgctccaaaattcaaaactttttgagcaccaacatgatgctacagtgaaaatttcacatctgacctcgtgtcatgggctacagtgaaaacacaggcacacaacacacagcttattcatcctccacaagggaaaaaagaccctcccagccctcacagctgtagttaccttttctgtgtgcagaatgatgatagtgctaaaccaccacagattgtccacgtgggtggttgagatagcaacacctttgctttctgatggttcaatgtatatacaaactttgtttcatgggcaaaattatttaaaatgttgtataaaattactttcagcttatatgtataaggtatatatgaaatgtaaatgaatttcatgtttagacttggtctcattcccaagatatctcat

SEQ ID NO: 142344 - DNA, 2559 bp, Homo sapiens
  misc_feature (1448)..(1448): n is a, c, g, or t
gaaacgatgaatgtttgagatgatgaaaatgctaaataccctaatttgatcatttcacaatgtgtatatgtattgagacatctcactgtacccccaaaatatgtacagttattattatgtgtcgattaaaaatttaatttttttttgagatggagtctcactctgtcacccagggttagaatatcaaaatatctaatttatatctaatcatatgggttaggatatctaacccatatgattatgcaatttaggctctctagtgtgattccaggccttctggtttgcttatattgatccctaccctagctagagagaaagagccattctaatgaagatttttgcagttagatacttagttattggtttttccaaaaggaatccaatttacttttgctgtgagctattttgacaaatagtgagaactctgaaagttaatagtttgtatcttctttaggggtatcactggagaatttccccctctgtaaagaattgctcattccacctggaacccaaaactatatggtgagaatgcgactctatgacgtcaaccgtcggcagctgaacctcaccatccggattgtgtgtcgagcagaaggatccttaaagatcttcatttctgctccatattggctgattaacaaaacaggtacatacaggggctgctcaagtaggtctttggcgttagtcatgggaattcagatttatttgcttagctaactaaatggagccaatgcaaatagattacttcaacagtctgagctgctgaaacattcctgcttccatcataaatgcttaatcatgctcaaaactgtctttttaggcaagaaactgagcccactaaatagattcagttttcactcttttcccgcttgatggttttattcattcaccatttgcatctctttcagatagactgggtggtattgatgtaaacttttctctccttcctaaagggttgccactgatcttcagacaggacaatgccaagacagatgctgcaggccagtttgaggagcatgagctggcccgtagcctgagtcctctcttattctgctatgctgacaaagagcagccaaacctgtgagtacagttatttatgggaaggggaaataagctcccagggaagggaagaaattagtaaaggctataatatatccgtgtaagtagaaatatactgtagataacaatcctgacttggcaggggaatagaaccatgacctaatgggatttttggggatctaatttctatgttatttgatactgaaaataaaccatttggttggtttataatgaaagctagttttattttacatgcattgaagtagttttcctattcataactctgccaacgaagagaaagccacgagttctccttctctgctctgcagtttttcttcccctgtaaacttggagcacaggcacaggagctgtcatcagaatggacatangctggttctttggtgaagccgtcagcctcattaatccaatccaggatttgtatcacatttggaaattcatcccttttacctttgaagtaaaatgtgccattttatggtctcagagcactcattgcatgtttaaaagcagggacaaaaaacaactgtgaggattagatgacatgtgcttttaatgtatggtaggagcattaattcacttttgttcttggttttgacattttgctttttacaagagtcttttaatagagctctaatcaaagataaatgggtgtatccaataatgctaaaatgccataccgtgttatcggtagaatcgtgctgacagcttaacagaaagtcttctggggtaccacacttcagtgggtactgatgtgtttacaagggaaggttggagtgtagattaccgtttgaggcatggaaagaggattgatgagagttctggatattgtaggggatgcagccagcctcttggcatgtgcagccagcccagtctcattcttctcctgaaatgatttggacagttttagatttaggacttgacatgtgtcacacagtgtgttttatctgtgaattccacagttcccaaagcatttcacatagaccatctcattggattcttcccaccatcccaatggtttaggcagggcaggaaatattgttatattttaagatgaggaaacaggctcagagagattgctacctgcccaagtttacatcgcttgttagtggtagagctggaacacacattcaggaattatgttgtcgaaatccatgacaggacactggcccactaaacagtgctttgctattgtaatagtatcaggccggctgggtacggtggctcatgcctgtaatcccagcactttgggagaccgaggcgtatcccaaggtcaggggtttgagaccagcctggccaacgtggtgaaaccccttctctactaaaaatgcaaaaattagccgggtgtggtggcgctcgcctgtagtcccagctacttgggaggctgaggcaggagaatcacttgaacctgggaggcggaggttgcagtgatcctagactgtaccattgcactccagcctgggcgacagagcaagattccacctc

SEQ ID NO: 142345 - DNA, 128 bp, Homo sapiens
gaaatttccactgtatctgtaaaagtggcaggttctctagaaggaaattttgtgtcccaggtgtaagccaaaaagtatcatgtgaaactgttgtaagtattcagcttcataaatggaaacctaacata

SEQ ID NO: 142346 - DNA, 848 bp, Homo sapiens
agtaatctgaaatttccactgtatctgtaaaagtggcaggttctctagaaggaaattttgtgtcccaggtgtaagccaaaaagtatcatgtgaaactgttgtaagtattcagcttcataaatggaaacctaacatatatgtgactggacacctgtgtattttagttgctgttaaatggtacacactgtgtgaagaaactaggaattaaggggatgttgatcttgcctctgaacctttttaaggcctaaatgggaataaggagtaataatactttgagtacaattgctgttttcattacattcctagaaggttcaatatcctctgggtgatacagttattttctcagagaaactaagtaactgtgaaggttatttatttttgtcagaccaagagttttctctcttcatggttaactcataaaagtggttcttgttatttgtaggtattgatgtcaagaaaggccgaggtcgatacattgatacctgcatggtcatctttgccccccgttacctgttagataataaatcatctcacaagcttgcatttgcacagagggaatttgccaggggacaggtgagcagtttgcttttgaaggatgagagtgcctatttaatagcacgagttttaatgtcatcttctgtgaagactgtacgttctgtgatgcaagtaactgctctgtgcctttggtacccagatagctcctgttagagggtaaggctcagagtaggtactcagtaacacttattgtcatgaatcgacttgttgactaaagcctgtgatcctatgtgttttagggaacagccaatcccgaaggttacatttccacccttcctggttccagtgtggtg

SEQ ID NO: 142347 - DNA, 1869 bp, Homo sapiens
gagcaagtgagcccagtgtctgtggacaaagtcgggacttttttcgatatgcagcaccagataaaaattcatcttcctctacgattggcagcccaagcagcagaacaaatattatacatccccaggtttatttctcttcactcccaccagtgcgggtggtctttgcagtgactatggaaggcagtgcacggaaagtcatcactgtccggtcagccctcattgtgaggaacagacttgagacaccaatggaactaagactggatagcccatcagctccagacaagccagtggtgcttcctgctatcatgccaggggattcgtttgctgtgcctttacacctcacttcttggcggctacaggcccggcccaaaggattgggtgtatttttctgtaaggctcccattcattggaccaatgtagtgaagactgcagaaattagtagcagtaaacgagagtgccactctatggacacagaaaaaagccgatttttcaggttttgtgtggctataaagaaagagaattatccagattatatgccctcaaacatattttctgacagtgcaaaacagattttcagacagcctgggcataccatatatctcctgccaactgtggtaatctgcaacttgctaccctgtgaacttgatttttatgttaaaggaatgccaattaatgggacgctgaaacctggcaaggaggcagctctccatacagctgatacatcccagaacattgagctgggggtatcactggagaatttccccctctgtaaagaattgctcattccacctggaacccaaaactatatggtgagaatgcgactctatgacgtcaaccgtcggcagctgaacctcaccatccggattgtgtgtcgagcagaaggatccttaaagatcttcatttctgctccatattggctgattaacaaaacagggttgccactgatcttcagacaggacaatgccaagacagatgctgcaggccagtttgaggagcatgagctggcccgtagcctgagtcctctcttattctgctatgctgacaaagagcagccaaacctctgcacgatgagaatcggaagggggattcatccagaaggcatgccgggctggtgtcagggcttctccctggatggtggtagtggtgtccgagctttgaaagtcatccagcaaggaaaccgcccagggctgatctataacattggtattgatgtcaagaaaggccgaggtcgatacattgatacctgcatggtcatctttgccccccgttacctgttagataataaatcatctcacaagcttgcatttgcacagagggaatttgccaggggacagggaacagccaatcccgaaggttacatttccacccttcctggttccagtgtggtgttccactggcctcggaatgactatgatcagctattgtgtgtcagactgatggacgttcccaattgtatttggtctggaggctttgaagtcaacaagaataattccttccatatcaacatgagggataccttgggaaaatgcttcttcctacgagtggaaattactctccgaggagctacgtataggatctcatttagtgacacagatcagttacctcctcctttccgaattgacaacttttctaaggtcccggttgtctttactcagcatggcgtagctgaacccaggctccggactgaagtgaagcccatgacttcattggattatgcctgggacgaacccaccttgccaccttttatcactctgactgttaaaggggcagggtcctctgagatcaactgcaacatgaatgatttccaggataatcggcagctttattatgaaaatttcatttacattgctgctacatatacattctctg

SEQ ID NO: 142348 - DNA, 838 bp, Homo sapiens
cctggatttatttatttttttgcatgtggttgtccagctgttctagcaccactagttggaaaggctatctttgctgctttaaattgtctctaaacctccatggaagatcagtggactgtatgtaggcctgcttctgggctccgtattcttttctatgcatctatatgtgtgtgttttctcttttcaccaacttcacactatttgggttactgtagcttaatgtaagtcctgaagttggtagtgccaaacctcagggagtttttctgaacttcatcatgagaacctggttgagatcattgtagtaacacttggaaatgtgtgagattcccccttagtctggtcttcaaggagtttttaatgttctagccaggctaccctcagcttctagtaatctgtcaataccatttaagtgctcctcccacttgctgtccccagtagcttctcttccctgtgagctgtgactccttgtgtgttagcctgtgtttctcatttttaaggtggcagttttccctgtgacctcaattctctgatccaccctagaaggattgactttcagtttgttcagcttttttctagctgtgaggacaagtgatgactgcctagctctttccatgttgaaatagaaacccaaaagtttgtttaaagaattacttgttataaaagtcccccattgttaatgtacaacccaatgatgtaagttgatttatcgaattgtgcagccatcagcagagttctacttcagcatattttgtcacttcccaaattcccttgaacctgtttgtagtcatttcctaatccctggtccccatgactgggtctgaataaaataaacatttgg

SEQ ID NO: 142349 - DNA, 425 bp, Homo sapiens
aatcgacggatctacactagccaggaagcgttggcagaaactgtacaaatctgggggtcactgtcgtggtgctgctgtgagttcttttgctgatggtagcttgacattcatgaaggatgcttatttagcctctgtcatgtcatctgattgtgcttgccccatagttagtgtactgtgaaaaagaggaagctttctgggagtgtcagagatgaatcccttgatctctctggcttcttgataatccactgtgatgtatgcagcctcccctgtccaatgctgtggaatccctatattattgaatggaagagagaatttgcacttgagggagcaaggagaggaggaagtttaccaagtttgattcaagcacattggttagtggaataaagcaagctgtgctgttatatagttgttggtctttcaaattg

SEQ ID NO: 142350 - DNA, 927 bp, Homo sapiens
ggcggggccggacacttccgtccggcgcgcggcgtcctcctcccgctcggaaggtcccaggtgtgacaccttcagcaggtctcagggaagatggcagccctaggggacattcaggagtccccttctgtcccgtcccctgtcagtctctcatcaccggggacacctggaacccagcaccacgagcctcagcttcacctccatgggcatcaacatggctcccctggctccagccctaaggtgctctcccagccgtccgacctggatctccaagacgtagaggaagtggagatcggcagagacaccttctggcccgctgatgcttcccgaggcggtgactgcagcccacagccacctgcgccagtggccccacgtggactcctgccggccccagctggacacagtgaatcaggaactcctccctcccctccacctgccttgggctggggcttctggctcagggcaccactgtccccccagatccacgagttatcctgtgtcccctcctcctcctgcatcccctagatggcctcccctcagcctggttggagctgtgtccaggtcccctgcacctcccccttgagaagctcccagggttccctctgggcgatgttagtgatatggctggatttaacagtgctgagccctcgcccacatctgggcggccctggggtggggagcaggtgtctgaggtcaggtccctggaaagagaccctgggccagagatttgcgtgggaagctcctggggtgggcatgggagctgggcggcagcacacttgccaccgaggcctggggcagccccatgaggagctgtgcccatatggaccacatcctcggcaagggctttgaggcgccctctggagctctggcgtcccccaggctccgggtcctcaccaacacttagtgcttcctcctggctaagggtgaccc

SEQ ID NO: 142351 - DNA, 1317 bp, Homo sapiens
cgtcctcctcccgctcggaaggtcccaggtgtgacaccttcagcaggtctcagggaagatggcagccctaggggacattcaggagtccccttctgtcccgtcccctgtcagtctctcatcaccggggacacctggaacccagcaccacgagcctcagcttcacctccatgggcatcaacatggctcccctggctccagccctaaggtgctctcccagccgtccgacctggatctccaagacgtagaggaagtggagatcggcagagacaccttctggcccgactccgagcccaagccggagcaggctccacgctctcctggctctcaggcccctgacgagggggcgggcggggcgctgcgcagcctcctgaggagccttccccgcagggcccggtgcagcgccggcttcgggcctgaatccagcgcggagcggccggcgggccagccgcctggggccgtcccttgcgcccagccgcggggcgcctggcgcgtgacgctcgtgcagcaagcagcggccgggcccgagggtgcgcccgagcgggctgccgagctgggagtcaacttcggtcggagccggcagggcagcgcgcggggggccaagccgcacaggtgcgaggcctgcggcaagagtttcaagtataactcgctgctcctgaagcaccagcgcatccacacgggcgagaagccctacgcctgccacgagtgcggcaagcgcttccgcggctggtcgggcttcatccagcaccaccgcatccacacgggcgagaagccctacgagtgcggccagtgcggccgcgccttcagccacagctcgcacttcacgcagcacctgcgcatccacaacggcgagaagccctacaagtgcggcgagtgcggccaggccttcagccagagctccaacctggtgcgccaccagcggctgcacacgggtgagaagccctacgcctgcagccagtgcggcaaggccttcatctggagctccgtgctcatcgagcaccagcgcatccacactggcgagaagccctacgagtgctccgactgcggcaaagccttccgcggccgctcgcacttcttccggcacctgcggacccacacgggcgagaagcccttcgcgtgtggcgcctgcggcaaggccttcggccagagctcccagctcatccagcaccagcgggtgcactaccgcgagtagccgggcgggggctcggggctcggcctcctacctgcccccaacccaccctccaccccgtcccccacggtgggcactgcccagcaccgcatgccacgtgtccggaataaattctttttgattgttggaag

SEQ ID NO: 142352 - DNA, 1272 bp, Homo sapiens
ggtcccagcagctctgggtcaccctgcaacgccccccacccctgtgtctatgtcagctctcctgggcacggcactccgagcccctgtccgcttgtctcccatccactgggtgcctggcccctccttgtcccctctaagcccccccgtccagctctgctctcactccccgtccccgtccctccgtgccacggtgggggcatgcgggtactatccgcctctgccgtttctcatttcagactccgagcccaagccggagcaggctccacgctctcctggctctcaggcccctgacgagggggcgggcggggcgctgcgcagcctcctgaggagccttccccgcagggcccggtgcagcgccggcttcgggcctgaatccagcgcggagcggccggcgggccagccgcctggggccgtcccttgcgcccagccgcggggcgcctggcgcgtgacgctcgtgcagcaagcagcggccgggcccgagggtgcgcccgagcgggctgccgagctgggagtcaacttcggtcggagccggcagggcagcgcgcggggggccaagccgcacaggtgcgaggcctgcggcaagagtttcaagtataactcgctgctcctgaagcaccagcgcatccacacgggcgagaagccctacgcctgccacgagtgcggcaagcgcttccgcggctggtcgggcttcatccagcaccaccgcatccacacgggcgagaagccctacgagtgcggccagtgcggccgcgccttcagccacagctcgcacttcacgcagcacctgcgcatccacaacggcgagaagccctacaagtgcggcgagtgcggccaggccttcagccagagctccaacctggtgcgccaccagcggctgcacacgggtgagaagccctacgcctgcagccagtgcggcaaggccttcatctggagctccgtgctcatcgagcaccagcgcatccacactggcgagaagccctacgagtgctccgactgcggcaaagccttccgcggccgctcgcacttcttccggcacctgcggacccacacgggcgagaagcccttcgcgtgtggcgcctgcggcaaggccttcggccagagctcccagctcatccagcaccagcgggtgcactaccgcgagtagccgggcgggggctcggggctcggcctcctacctgcccccaacccaccctccaccccgtcccccacggtgggcactgcccagcaccgcatgccacgtgtccggaataaattctttttgattgttggaag

SEQ ID NO: 142353 - DNA, 1213 bp, Homo sapiens
ggcacgaggctcccgctcggaaggtcccaggtgtgacaccttcagcaggtctcagggaagatggcagccctaggggacattcaggagtccccttctgtcccgtcccctgtcagtctctcatcaccggggacacctggaacccagcaccacgagcctcagcttcacctccatgggcatcaacatggctcccctggctccagccctaaggtgctctcccagccgtccgacctggatctccaagacgtagaggaagtggagatcggcagagacaccttctggcccgggcccggtgcagcgccggcttcgggcctgaatccagcgcggagcggccggcgggccagccgcctggggccgtcccttgcgcccagccgcggggcgcctggcgcgtgacgctcgtgcagcaagcagcggccgggcccgagggtgcgcccgagcgggctgccgagctgggagtcaacttcggtcggagccggcagggcagcgcgcggggggccaagccgcacaggtgcgaggcctgcggcaagagtttcaagtataactcgctgctcctgaagcaccagcgcatccacacgggcgagaagccctacgcctgccacgagtgcggcaagcgcttccgcggctggtcgggcttcatccagcaccaccgcatccacacgggcgagaagccctacgagtgcggccagtgcggccgcgccttcagccacagctcgcacttcacgcagcacctgcgcatccacaacggcgagaagccctacaagtgcggcgagtgcggccaggccttcagccagagctccaacctggtgcgccaccagcggctgcacacgggtgagaagccctacgcctgcagccagtgcggcaaggccttcatctggagctccgtgctcatcgagcaccagcgcatccacactggcgagaagccctacgagtgctccgactgcggcaaagccttccgcggccgctcgcacttcttccggcacctgcggacccacacgggcgagaagcccttcgcgtgtggcgcctgcggcaaggccttcggccagagctcccagctcatccagcaccagcgggtgcactaccgcgagtagccgggcgggggctcggggctcggcctcctacctgcccccaacccaccctccaccccgtcccccacggtgggcactgcccagcaccgcatgccacgtgtccggaataaattctttttgattgttggaag

SEQ ID NO: 142354 - DNA, 1187 bp, Homo sapiens
ggcacgaggctcccgctcggaaggtcccaggtgtgacaccttcagcaggtctcagggaagatggcagccctaggggacattcaggagtccccttctgtcccgtcccctgtcagtctctcatcaccggggacacctggaacccagcaccacgagcctcagcttcacctccatgggcatcaacatggctcccctggctccagccctaaggtgctctcccagccgtccgacctggatctccaagacgtagaggaagtggagatcggcagagacaccttctggcccgctgaatccagcgcggagcggccggcgggccagccgcctggggccgtcccttgcgcccagccgcggggcgcctggcgcgtgacgctcgtgcagcaagcagcggccgggcccgagggtgcgcccgagcgggctgccgagctgggagtcaacttcggtcggagccggcagggcagcgcgcggggggccaagccgcacaggtgcgaggcctgcggcaagagtttcaagtataactcgctgctcctgaagcaccagcgcatccacacgggcgagaagccctacgcctgccacgagtgcggcaagcgcttccgcggctggtcgggcttcatccagcaccaccgcatccacacgggcgagaagccctacgagtgcggccagtgcggccgcgccttcagccacagctcgcacttcacgcagcacctgcgcatccacaacggcgagaagccctacaagtgcggcgagtgcggccaggccttcagccagagctccaacctggtgcgccaccagcggctgcacacgggtgagaagccctacgcctgcagccagtgcggcaaggccttcatctggagctccgtgctcatcgagcaccagcgcatccacactggcgagaagccctacgagtgctccgactgcggcaaagccttccgcggccgctcgcacttcttccggcacctgcggacccacacgggcgagaagcccttcgcgtgtggcgcctgcggcaaggccttcggccagagctcccagctcatccagcaccagcgggtgcactaccgcgagtagccgggcgggggctcggggctcggcctcctacctgcccccaacccaccctccaccccgtcccccacggtgggcactgcccagcaccgcatgccacgtgtccggaataaattctttttgattgttggaag

SEQ ID NO: 142355 - DNA, 1103 bp, Homo sapiens
cgtcctcctcccgctcggaaggtcccaggtgtgacaccttcagcaggtctcagggaagatggcagccctaggggacattcaggagtccccttctgtcccgtcccctgtcagtctctcatcaccggggacacctggaacccagcaccacgagcctcagcttcacctccatgggcatcaacatggctcccctggctccagccctaaggtgctctcccagccgtccgacctggatctccaagacgtagaggaagtggagatcggcagagacaccttctggcccgactccgagcccaagccggagcaggctccacgctctcctggctctcaggcccctgacgagggggcgggcggggcgctgcgcagcctcctgaggagccttccccgcagggcccggtgcagcgccggcttcgggcctgaatccagcgcggagcggccggcgggccagccgcctggggccgtcccttgcgcccagccgcggggcgcctggcgcgtgacgctcgtgcagcaagcagcggccgggcccgagggtgcgcccgagcgggctgccgagctgggagtcaacttcggtcggagccggcagggcagcgcgcggggggccaagccgcaccgcagcacctgcgcatccacaacggcgagaagccctacaagtgcggcgagtgcggccaggccttcagccagagctccaacctggtgcgccaccagcggctgcacacgggtgagaagccctacgcctgcagccagtgcggcaaggccttcatctggagctccgtgctcatcgagcaccagcgcatccacactggcgagaagccctacgagtgctccgactgcggcaaagccttccgcggccgctcgcacttcttccggcacctgcggacccacacgggcgagaagcccttcgcgtgtggcgcctgcggcaaggccttcggccagagctcccagctcatccagcaccagcgggtgcactaccgcgagtagccgggcgggggctcggggctcggcctcctacctgcccccaacccaccctccaccccgtcccccacggtgggcactgcccagcaccgcatgccacgtgtccggaataaattctttttgattgttggaag

SEQ ID NO: 142356 - DNA, 1080 bp, Homo sapiens
ggcacgaggctcccgctcggaaggtcccaggtgtgacaccttcagcaggtctcagggaagatggcagccctaggggacattcaggagtccccttctgtcccgtcccctgtcagtctctcatcaccggggacacctggaacccagcaccacgagcctcagcttcacctccatgggcatcaacatggctcccctggctccagccctaaggtgctctcccagccgtccgacctggatctccaagacgtagaggaagtggagatcggcagagacaccttctggcccggtgagtgagcagaatcgggttactgggggaccagagctctgcgcgtgccaggctcctcacaatgcccacctctgtggcacccccaatgctggcaccacccccttcctggggccccttttcttccctggcatcagctcacctctgccccgtggcccctcccccactctaatgccagtccagttactgatgcttcccgaggcggtgactgcagcccacagccacctgcgccagtggccccacgtggactcctgccggccccagctggacacagtgaatcaggaactcctccctcccctccacctgccttgggctggggcttctggctcagggcaccactgtccccccagatccacgagttatcctgtgtcccctcctcctcctgcatcccctagatggcctcccctcagcctggttggagctgtgtccaggtcccctgcacctcccccttgagaagctcccagggttccctctgggcgatgttagtgatatggctggatttaacagtgctgagccctcgcccacatctgggcggccctggggtggggagcaggtgtctgaggtcaggtccctggaaagagaccctgggccagagatttgcgtgggaagctcctggggtgggcatgggagctgggcggcagcacacttgccaccgaggcctggggcagccccatgaggagctgtgcccatatggaccacatcctcggcaagggctttgaggcgccctctggagctctggcgtcccccaggctccgggtcctcaccaacacttagtgcttcctcctggctaagggtgaccc

SEQ ID NO: 142357 - DNA, 1319 bp, Homo sapiens
ggcacgaggctcccgctcggaaggtcccaggtgtgacaccttcagcaggtctcagggaagatggcagccctaggggacattcaggagtccccttctgtcccgtcccctgtcagtctctcatcaccggggacacctggaacccagcaccacgagcctcagcttcacctccatgggcatcaacatggctcccctggctccagccctaaggtgctctcccagccgtccgacctggatctccaagacgtagaggaagtggagatcggcagagacaccttctggcccgactccgagcccaagccggagcaggctccacgctctcctggctctcaggcccctgacgagggggcgggcggggcgctgcgcagcctcctgaggagccttccccgcagggcccggtgcagcgccggcttcgggcctgaatccagcgcggagcggccggcgggccagccgcctggggccgtcccttgcgcccagccgcggggcgcctggcgcgtgacgctcgtgcagcaagcagcggccgggcccgagggtgcgcccgagcgggctgccgagctgggagtcaacttcggtcggagccggcagggcagcgcgcggggggccaagccgcacaggtgcgaggcctgcggcaagagtttcaagtataactcgctgctcctgaagcaccagcgcatccacacgggcgagaagccctacgcctgccacgagtgcggcaagcgcttccgcggctggtcgggcttcatccagcaccaccgcatccacacgggcgagaagccctacgagtgcggccagtgcggccgcgccttcagccacagctcgcacttcacgcagcacctgcgcatccacaacggcgagaagccctacaagtgcggcgagtgcggccaggccttcagccagagctccaacctggtgcgccaccagcggctgcacacgggtgagaagccctacgcctgcagccagtgcggcaaggccttcatctggagctccgtgctcatcgagcaccagcgcatccacactggcgagaagccctacgagtgctccgactgcggcaaagccttccgcggccgctcgcacttcttccggcacctgcggacccacacgggcgagaagcccttcgcgtgtggcgcctgcggcaaggccttcggccagagctcccagctcatccagcaccagcgggtgcactaccgcgagtagccgggcgggggctcggggctcggcctcctacctgcccccaacccaccctccaccccgtcccccacggtgggcactgcccagcaccgcatgccacgtgtccggaataaattctttttgattgttggaag

SEQ ID NO: 142358 - DNA, 586 bp, Homo sapiens
ggcggggccggacacttccgtccggcgcgcggcgtcctcctcccgctcggaaggtcccaggtgtgacaccttcagcaggtctcagggaagatggcagccctaggggacattcaggagtccccttctgtcccgtcccctgtcagtctctcatcaccggggacacctggaacccagcaccacgagcctcagcttcacctccatgggcatcaacatgccaggaaagcacccacctgccgcctgtccccagacgtgtacagccacctcacctccacttggaagaccagccccagcagggctgccaggtcctctccagtggtgtcccagcgcagggcaaaggtggcaaggctgtctcaggtgatgtcctcaccgccccctctgtaggagcatggcgctggagcctgccctgtatttggccatctgtggaacaagccagctcccctggctgccaggggatggtgacatggtgcccccaggcctgtctccacaatggggagggtatccgaaagacccaaagatggtttgggacccccacatcctgctttggggcagccaagcagttctggaccctcggctctcgaggaaggga

SEQ ID NO: 142359 - DNA, 779 bp, Homo sapiens
ggcacgaggctcccgctcggaaggtcccaggtgtgacaccttcagcaggtctcagggaagatggcagccctaggggacattcaggagtccccttctgtcccgtcccctgtcagtctctcatcaccggggacacctggaacccagcaccacgagcctcagcttcacctccatgggcatcaacatggctcccctggctccagccctaaggtgctctcccagccgtccgacctggatctccaagacgtagaggaagtggagatcggcagagacaccttctggcccgcgcagcacctgcgcatccacaacggcgagaagccctacaagtgcggcgagtgcggccaggccttcagccagagctccaacctggtgcgccaccagcggctgcacacgggtgagaagccctacgcctgcagccagtgcggcaaggccttcatctggagctccgtgctcatcgagcaccagcgcatccacactggcgagaagccctacgagtgctccgactgcggcaaagccttccgcggccgctcgcacttcttccggcacctgcggacccacacgggcgagaagcccttcgcgtgtggcgcctgcggcaaggccttcggccagagctcccagctcatccagcaccagcgggtgcactaccgcgagtagccgggcgggggctcggggctcggcctcctacctgcccccaacccaccctccaccccgtcccccacggtgggcactgcccagcaccgcatgccacgtgtccggaataaattctttttgattgttggaag

SEQ ID NO: 142360 - DNA, 1050 bp, Homo sapiens
gagaagcccaagcagcgggcctgctgttgggattgggagggccaggaggtgtcctgtgtcagggccacagcccgggagcacgtggcggtcagagaggagcggaggcagtggtccagagggtggaggtgagccccagcctccctgacccccaggcgctcccctggctccagccctaaggtgctctcccagccgtccgacctggatctccaagacgtagaggaagtggagatcggcagagacaccttctggcccggtgagtgagcagaatcgggttactgggggaccagagctctgcgcgtgccaggctcctcacaatgcccacctctgtggcacccccaatgctggcaccacccccttcctggggccccttttcttccctggcatcagctcacctctgccccgtggcccctcccccactctaatgccagtccagttactgatgcttcccgaggcggtgactgcagcccacagccacctgcgccagtggccccacgtggactcctgccggccccagctggacacagtgaatcaggaactcctccctcccctccacctgccttgggctggggcttctggctcagggcaccactgtccccccagatccacgagttatcctgtgtcccctcctcctcctgcatcccctagatggcctcccctcagcctggttggagctgtgtccaggtcccctgcacctcccccttgagaagctcccagggttccctctgggcgatgttagtgatatggctggatttaacagtgctgagccctcgcccacatctgggcggccctggggtggggagcaggtgtctgaggtcaggtccctggaaagagaccctgggccagagatttgcgtgggaagctcctggggtgggcatgggagctgggcggcagcacacttgccaccgaggcctggggcagccccatgaggagctgtgcccatatggaccacatcctcggcaagggctttgaggcgccctctggagctctggcgtcccccaggctccgggtcctcaccaacacttagtgcttcctcctggctaagggtgaccc

SEQ ID NO: 142361 - DNA, 339 bp, Homo sapiens
cctactccctctgcgctgctcctgcgcgctccctagaatcttctagaagcgtggctgttcgtgctgttgcctgcctccctgcgcatacattctcatattcttaactaggaaccagctccctggatggggcaaccccagaaatgggcgacttcaaggaggcgggagataacatcccctccagggggcgacgtccaagagcatattgtgtggctgcgtgcactgagtagagctcaacgcccgggacctaaaaaaaaaaaaaaaaaagggcgtggagccggagggtcggtcccagctcggggcatgacgtcacaacctgcgccgccgcgcaaggaaggcccg

SEQ ID NO: 142362 - DNA, 854 bp, Homo sapiens
actgccgggcacagggccgcctttgcctgcctgccctgcagcagcaggcccgggcggctgcgagagggcgcagggggcggaggcgcggcaggggcgggctctgccgcccgccccaccacccgctccccgcccggctgcggggccagtggcaggagcgccgcgcaccgccagccgcagggggcgtgggatgggggcggccggggaggggggcgcccacactgactagagccaaccgcgcacttcaaaagggtgtcggtgccgcgctcccctcccgcggcccgggaacttcaaagcgggccgtgctgccccggctgcctcgctctgctctggggcctcgcagccccggcgcggccgcctggtggcgatgacccgggcgctctgctcagcgctccgccaggctctcctgctgctcgcagcggccgccgagctctcgccaggactgaagtgtgtatgtcttttgtgtgattcttcaaactttacctgccaaacagaaggagcatgttgggcatcagtcatgctaaccaatggaaaagagcaggtgatcaaatcctgtgtctcccttccagaactgaatgctcaagtcttctgtcatagttccaacaatgttaccaaaaccgaatgctgcttcacagattttggcaacaacataacactgcaccttccaacagcatcaccaaatgccccaaaacttggacccatggagctggcatcattattactgtgcctgtttgcctcctgtccatagctgcgatgctgacagtatgggcatgccagggtcgacagtgctcctacaggaagaacaagagaccaaatgtggaggaaccatctctgagtgcatctggtaatgtggaaaa

SEQ ID NO: 142363 - DNA, 890 bp, Homo sapiens
actgccgggcacagggccgcctttgcctgcctgccctgcagcagcaggcccgggcggctgcgagagggcgcagggggcggaggcgcggcaggggcgggctctgccgcccgccccaccacccgctccccgcccggctgcggggccagtggcaggagcgccgcgcaccgccagccgcagggggcgtgggatgggggcggccggggaggggggcgcccacactgactagagccaaccgcgcacttcaaaagggtgtcggtgccgcgctcccctcccgcggcccgggaacttcaaagcgggccgtgctgccccggctgcctcgctctgctctggggcctcgcagccccggcgcggccgcctggtggcgatgacccgggcgctctgctcagcgctccgccaggctctcctgctgctcgcagcggccgccgagctctcgccaggactgaagtgtgtatgtcttttgtgtgattcttcaaactttacctgccaaacagaaggagcatgttgggcatcagtcatgctaaccaatggaaaagagcaggtgatcaaatcctgtgtctcccttccagaactgaatgctcaagtcttctgtcatagttccaacaatgttaccaaaaccgaatgctgcttcacagattttggcaacaacataacactgcaccttccaacagataatggaacttggactcaactttggctggtatctgaatatcatgaacagggctccttatatgactatttgaatagaaatatagtgaccgtggctggaatgatcaagctggcgctctcaattgctagtggtctggcacaccttcatatggagattgttggtacacaaggtaaacctgctattgctcatcgagacataaaatcaaagaatatcttagtgaaaa

SEQ ID NO: 142364 - DNA, 293 bp, Homo sapiens
cctataaatgtaatgactgtgggaaggccttcagtcagaattctgtcttaattaagcaccagaggcgccatgctagagacaaaccctataactgtcagatctctcaccttcttgaacattagagagtgcataatggtgatacttgtttataattcttatgctgcaggaaccctagagacaaaatgagatgaccattcacaatttgctgtaacccttaacttaaatagccagtattatcttgcccttttgaacatttaccatgtactctagcaagactggtccctctgttctat

SEQ ID NO: 142365 - DNA, 551 bp, Homo sapiens
ttccagaggcagccacccccctcccatctctgtttggggagccacatccaggagatttgctgcagcagcacgaaccggctgacaacacaattcttcctgtttccagggaaagcctttattttgctttgttctgcacttgaagggagcaggcacaaggctgccagaagagctcagctactttaggctgtgctgtttggaacgagggatgttaagcagaaaggcccaggctggtgggggactgggaggctgccttccagcccatccctgctgcttgaccttggatgcgtcattggtggtggaacataggttcaactatctttaaaatcaaggctgggccggcgcggtggctcacgcctggaatcctaggactttgggaggcggaggcgggcggatcacctgaggttgggagttcaagtccagcttggccaacatggtgaaaccctgcctctgcggaaaatacaaaaattagctgggcgtggtggtgcgtgcctgtagtcccagctattcgggaggtgaaagcaggagaaccacgtgaatcagggaggcagagg

SEQ ID NO: 142366 - DNA, 426 bp, Homo sapiens
cctgagagtaagataagagtcatggatgggactctcacagacgagaaaatgtctgaaaagagtcttcaaagttcatattttcacctatgttgggcccatgtggataatccaagataatcttcctattttgaggtcagctgattagcagccctggtttcatctgcaaccttaattcctctttaattcctcacgtaacataacatattcacaggctctggagatgccatcttttcatcttttggagaccattattgtgcctcctgcaagaagagagtccagatgcagacccagctatctagaatctcaactcaaggacagagcagacattgtaggtccatgggaaaggactgcccattccatgaatggtgccaagaccatttattatccttacagaagaaagaaattggtttccaacctcactctata

SEQ ID NO: 142367 - DNA, 363 bp, Homo sapiens
cctctgaatggtaaatgaatgaaggcagaagaggggagaagagctttttctgacctcacactaaaaagtaacaggagtcaagaaggaaacaggcagaagcctgaagggataggaacaatgtgaaaagtaaagtaggtctgtgagctccttccccaaatccctgcatggccagttagcccagaaatgcaccagggcagagctccacaaagggagagaagcgtccagcagccatggcgcttatgaccatcataaaagggacagcagttctggagatggaactctacctggctgatttttagatcatatagtcagatacatatttgttgatctaactcagcattggttcatactcaacccttccct

SEQ ID NO: 142368 - DNA, 220 bp, Homo sapiens
aatcaccttaatttaaggaattacgctcaatctttctgggcgaagagcttgtgactttatcatgtggctcagtgtatcgctaggttttatttactgtaagtcttgcagagaatctggcacagttgggcaggggatttgaggtgttgtaagcaaggactgatagaagggtgtgtagttggttcatacagagtttagtaggatgtttcactttcacgaggct

SEQ ID NO: 142369 - DNA, 211 bp, Homo sapiens
actgtgcatgtgagggatctagcctacatctaatacttgatgatctagggtggaacagtttcatcctgaaaccatcctccacccctggtacatggaaaaattgtcttccatgaaatgggtccctggtgccaaaaaagttggggactgcaggagtactgtattaattatagtattaaaatacaaaataatttttgtgtatattgataatggc

SEQ ID NO: 142370 - DNA, 1028 bp, Homo sapiens
agtgctaggattacaggcgtgagccactgcacctggcctggagtactcttagttatacagtcattcccggatacatgaagattcagcttcatacagtcattttgaaagcaaatttataacagtttggaattgtatgagcttgttttgaacacagtttgtgcttccattccctgccctatacatgcctgcatttaaaagcattgcagattagaaataaacaacaatagcacagtgattataaaaaaggagaaactcaacataagttacttcaattcgatgtgatctcttggagttatttttatgctttaaatttacagttgagaaagctatggactctgaggtgtaatgtgtaatattttgcttgcctctggaaattattctctgagccttgtggaatttgtttttggaaactttttttttatccggtgtgatgtctttttctcagaacttggacaacttgtattcattctttctccatctcaacctccattgaatggtgaaacaggcttgcagacaaaagctgtgcctagaccagactggaacggtccctttatgaaccttgggcccaccagttcagacacacactcttgacaacgttaatctccactctgaaggtaccttgtactccacacgatacctgtgcgaccgctgattccgctcaacacattttctctgatgtgtgcgggtatctctcgtgcaaatacctttacctggtagtagacagaatgaccttaatcgataacacgacattcgtcacttgcactcatcttggacagcgtccgtgaataccaacttaacactcttcttgaacaatgcggtaacaacttggtacgcccttacagtcgcacaaccacaactgcatctcgttacgcgaagacactatgtgaggcagcgcgaaacgtgacgggggatgagagcaaagtacacacagacaagtgagtatacaatgaacaaatatatttacaatggcaggccatgcgcaaatgcgtgcgtaaccacagctatgattacttgctcttcttattcct

SEQ ID NO: 142371 - DNA, 293 bp, Homo sapiens
accacaggcagaagttgcaaacttgcctgaagggcaagcagacatatttaatttggcccatttaggtttttgtttgtaattaggagccaacacttaaaattctgagatttcagaggggaaaaaaattgtatttctgatttctctcagaaaacagcaaccacccttggcctgcattcttgcacagcagtgatttttcagtgctaaggaacagctgcgcctgtggatagattagattggatattgtggtctccgccatgttacttggggcctagcccacttccttctcttccagt

SEQ ID NO: 142372 - DNA, 517 bp, Homo sapiens
taaaattaatcctgtttgtttttgtcttcctccactaaaatttaagtttgctgaggtagacagttttgtttctggaaccactatccctccagcggctagaacagtggaacatgttcaataaatattcaataaatatttttgaataagtgaatgaatgaacaggttaaatgtaatctttattttttaatgaactatcctttccagagacatacaaattgccagttgatggcattttttatttctttttgtaaaaagagtattttaaaatttgaatgagttctatctaacagataacacagttgagtacattaaaagggaccttgaacacaaaatccatgttttcgtggattagtatttttgcagcttaaatggtgaacgataggattgttagatgcaaataactctggaaattaaagacctttagttgtaactctccctaaaatgtttgtgagagcttgtaaaatgttgttcactttattctattataaaagggcattataataaatatgaagttttg

SEQ ID NO: 142373 - DNA, 480 bp, Homo sapiens
ggaatgacagaaaactgaaaagttaatgattattatgtccattttataacaaaaatatatgcatttagagaagccatccaacttgccctagttgtaagctagttaacggcagaagaaacacaagatctcagattttctttaagtcaagacatcacaatatggtcagaagaaaagttgtcaagacagaggcttatgttcaaatcttaacaactttgtatttgtgtgaccctgggcacacaaattgtatttcctcaatcgatttcctctcaattatgaaattatatttcataaaacaagaagttgtacaactatcataataagagaaatagaaattacatgtacagcacttaactctgcacagaaagctttcaataaacagcaattagtattattcttgttcactgtattagacctaattttaaaacatggtaattactttagtcttccaaatgcataataatttggcagccatttaaacaa

SEQ ID NO: 142374 - DNA, 437 bp, Homo sapiens
cctttgttcacttgtttgtatgttgaccttccctccactgttgtcctgtgaccctgccaaatccccctctgcgagaaacacccaagaatgatcaatgaaaaaaataaaaataaaaaaaataaaaaaaaggaagttaaatattagtgattacaaatatgatagagatgcaaaagatagtaagtcagaattttatgccaatatatttgaaaatacagacaagaataaacaaactttttaacataaactaccaaatgtgactcaggaaaaaacaaagattttaataatcctataaatattaaaacatccaaataagtaatttaaaaatctgagacagaaaacactaggccccaatggtcttaccagcaaggcttaccaaaccttcaaggaacagataattcccttttacataaactctcaagagacaaatgaggaaatac

SEQ ID NO: 142375 - DNA, 782 bp, Homo sapiens
ccaccctccccaggctcccgttctcatccctttctctcaggggccagtcctccccagcgctgctttgtccctaagacttgtcacaggatagaaatccattttgcttggatttttcacagcaccaggcctcaaaaccattgagggcagctggggccatcccacacccaggttagaaatcactttcctgggtaaggagggaatggatggcccagctccttcccagccccatagcaggggatgcactcggcccatgaagcttcctgcagagaccaccatgcagagaccaccattcctcggggctgtccgtgggagaccttgtctgttcattccttgccatcattgagaacccacgaggagcctggctttgtgcctctcacgtgggtgcagactggaaccgcatcccaactctgcccccagaagctccctgttttgaggggtggatgggctgaggtgctccccaacaattacagagggggccaggcataccacaggggcatcctcacttgcttctgcccctcagccctgacctccctatcagactgcacacctgtcactcagcctatggccagttaacgagatgcagaaccaaaggatggactcagcctcccctccctcttcctaggagcaggtagttccttggccaagggtataggggcctcagagatggttcctggggccccagatgagggtccgcagcagcagaggcccagaaagtgaccagggcccccgccaggcatgcttcagcccagccaagctcctcactgcgggttgggaaagcgcct

SEQ ID NO: 142376 - DNA, 283 bp, Homo sapiens
gaatctcataactgatgagaactgaaggatggaaggaggctgttgacagctgttgacagcagggagacggggatgaggccaggctctgggaaagaggaaatgtggcttcagatgacagggaaaattcagagacaatggataaagacccaaaactccagaaagttctatcgagactcagcagaggggcatcctgtggctgagacagggcagaaagcttcctcggagaaggtgagaccaggcagggcaccaagaataacttttccacttaggatgggagacaggg

SEQ ID NO: 142377 - DNA, 279 bp, Homo sapiens
cttgaatccatatgttacggtgctcagttcagagctctttaccacattcaacaactgctcttattacacaattacattttaatcttcttgggaggcatgtatggtaattaaaagaatgggctcactgggcgcggtggctcacacctgtaatcccagcactttgagaggcctaggcgggtggatcacgaggtcaggagtttgagaccatcctgaccaacatggtgaaaccccgtctctactaaaaatagaaaagttagccaggtatggtggtgcgtgcct

SEQ ID NO: 142378 - DNA, 563 bp, Homo sapiens
gcaccccagcctggggagctagaacaagttgggatgcccctgtatctgtgaagagtatttgtgagtctcaagggaacagtgccacaagggaaaactctcttatcaaggtttcctccctaccccacccagagatttaaggaactcctctgttcaaatgcttttgtttctgtccccttcagattcttccagatcacactcttcccggtgtgaagttcaagaaataatttttctcggtgtttgtttttccatgcaggccctggctttgattttgcttttggatgctttccgttttctctaaataggagggttccaagtctagtgtgtgctgtctgcctgttatttcctgctgagaacacttggtaatgaagtgagttcctagtactctaaaacatgtttgtggctcaaaagcccatacctgctcatacctctgaagtcaggccagacaagagcagaggccccagctattcatgctgtgggcattttctcccagagctggactttgatgtctgcagagaccttctcttgacatttaaaaaccatcacaatgttgactgactagatgg

SEQ ID NO: 142379 - DNA, 486 bp, Homo sapiens
agtgcgagattaggaacgttcctcattatctcttcatgagatgatctattctgtataattgaatggctcgagtcgcgttactagacatgttaaatctcttgatatgaagcttcgccctcttggaatctctagaagtcattctatccttcgtgattaccttcataatcagccttgtgtcgagaactctaaccccaggcaagggggcaactaaatcccgaaagacaactaagtcacactagtgtacttcctattcatactttcttgcatagctagacgtagattggccggagatcctctatagtctagactagcatttcatacaagcttgagactgacagtcgttcatcactctgaagtcaggccagacaagagcagaggccccagctattcatgctgtgggcattttctcccagagctggactttgatgtctgcagagaccttctcttgacatttaaaaaccatcacaatgttgactgactagatgg

SEQ ID NO: 142380 - DNA, 494 bp, Homo sapiens
tactattttgatatacttattttatatattcaagttgaaaatcaaatttataaaatgtgaatgacagtcataatcttctgcaacccagataaaagttatagtttgctttagtatattcttaacaaaaaataatgtatgttactatgacacagttgccaaatctgaaaagaattaaatttatgtgaaattaaaaaaatacaatcgtatctgaaaccatagaggattgtttttgtttcaattttgcatgtttatttagattagatcactcaaaagtatttactttcatgcccttagactttatcataccttcatatttctaatgctgttttctaattatttttcagcttactgcaaaattcttaaaagttatcttctcaaagatagtttttactctgcatttaatgaatgttaccttatatattatgcagagaatgaaagataaattatactcagttatttcattaataaatgtcatcaagtaacaagaaagctgt

SEQ ID NO: 142381 - DNA, 393 bp, Homo sapiens
ctccgtggtccctgtcactaaggcttgaaagctgtatattgattttattatccctttgtcccttgggggcccatgccctgtaaagttgacgagtgcgggcagttctcctgctggtcctcctttgcactcactttcacagttctaaatcatgctatgagagcgtctttcttgaatttttctaactatatttcttggttctagattttttttccctctgttccaaatcattttccacacagctgctagaattttctccctaagatatatttgcttaaagacaataccctttttgcatgcagaacaagttaattcttctcatcctcagcatcagatccccttcctgtcttcatataattaattaccttccagtaaccttatcctgctccgtgatcc

SEQ ID NO: 142382 - DNA, 516 bp, Homo sapiens
gcattttgggaggctgaggtgagaggatcgtttcaggccaggagtttaagaccagcctgagcaacatggcaagaccacatctctataaaaaatacaaaaaaattagccaggtggggtggtatgcacctttagtcccagctacttgggaagctgaggcaggaggattgcttgagctcaagagtttgagactgcagggtgccatgatcaagccagtgtactctaccctaggcaacagagtgagatcccatctcagaaagaaaagagagaaaaggaaggaggaaagaagaaaagaaagaagaaatttagggaaagaaggaagaaatttggggaataacttttagtgctgtattaactgagagaatgtatgcagagcagtgctgagagcgtaagcattcaatgtatggagttgtcagtgtccttaagccagacaggtaaactgaggccaagctgtgaagaatcacctcttgttccacaacaggaaggctaaagctccaggacacactaggcctttgcttc

SEQ ID NO: 142383 - DNA, 129 bp, Homo sapiens
agtctcaattgtcttgagagcccattcgtttcaatgcaatcaatatttatatgccactttctgtgtgcagagggttgtgctagacacccaaaggcagggagtggttaaagaagaaagaataaaacactg

SEQ ID NO: 142384 - DNA, 323 bp, Homo sapiens
catgtcatcccaagctctgctctttccaggattagccagagagcctggaaaaatgcatcagaacttcaaagcgtaatgggtggggccccaggggactctgtggcagagacacagagacacagtgccatggaggtgatttacttatgatggggtgaatggcccaagggtacaagagacctaaagagaagtctctagttatatgtcgccaagctcccagcattttaatccgtgacttggataatgacgtggaagacaagaccaggtctgcagggaacataattgggaggggtagggtcagcaacagaagctggtgtctaagagat

SEQ ID NO: 142385 - DNA, 576 bp, Homo sapiens
cataaaagcagctaaaaagtctctgtccacaatgactggtgatgagtgagttcatggtaatacagttgcttcagaccactgttgagtgttaaccctgtgagtccaggagaaggctctcctctgggattgcttccagtcctcatgttctgctctaactttatttgatcttgaatctgtttattttaactattgtggccgccaagattattatattttaatatagaaatgatccataaagatgcatttttatggcatttaaataatgctctgcagtggttgaatgtctcaggaataccacagagtgtctgtgtgtatgtgtgtgttagagtgtgtgttagggtgtgtgttttagacaggttgtatgtgtgtgaatcagggtgtatgtgtgttagggtgtgtgcgtgtgatggggtgtgtgttttagacagggtgtgttagggtgcgtgtgtgtgttttagacacaatgtgtatgtgttagggtgtgtgtgtgttttagacagggtgtgtgtgtgagagacagggtgtgtgtgttagggtgtgtgtgttttagatagggtgtgtgtgagacagggtgtg

SEQ ID NO: 142386 - DNA, 622 bp, Homo sapiens
acaccagcctgtagatgagttagaaatgggactttgtatcttttaatgtgagacctcctcttgatcttttttattttttacaatattctgacgattctgacatgtttattttaccagatgaattttacagttaatagattcttcccccaaaaatatattgagaatttggttgggattctcttaaattgatatgactgtgaggactacagaattgcattgctttccagaaacatgttgccttgtttctgaaaaactttatatatccttcaagagagttttacttaaatcctatataatttgtaataaatatgttcctaggtaatacagacatacagggaacacgttgatactgcttattggagcttttaatatgttacctatgtggtcatttttgctatataggagaagaatttatttgcatcgattattttaaattggcaatttattgaaatctattaattttagagatattcatttgatccttttgagtttttccaggtgagaaatcctatcaattatgttataattatatgttttccttttcaaaatttataacataatttctgactgcatgggttaaacattttcataacagtgctaaataataaaggtggcagtggca

SEQ ID NO: 142387 - DNA, 678 bp, Homo sapiens
agatttaaaaattactcatttgaatgtgggtggttatgtagatctgtaagtatatttatcattgagtatatagtaagatttaacacattatttctgacaaccagaaagctaaaaaatgtatcggttttgctgaaaatctttaatagtcaagtttctgtgttaaaaattttagtagtttttgttgatataaggatatataaatacgcaaatggaaaaacttaatgtacatagtgtctctttcaccattattgacttttttttttttttttggtggtggtaataaatggaaatagtttagaaaaatatgagccgatgactacccaaaaataaaatttggtcatcccccagtctctaccaactgccaagtttatccctactgttaacaagacaatcagaatacatcaatatataggatttctgttatattttaggcctttattgagactatctagtataatgaaatacttcaaggtgcttaaatctgtggtacctagaatgatgagaaataaaaggtaacactattagtgtaaaggttatgctgcccatcttctgtcatcttgggtttattgatagattatgtgaataatgatgggctactcttcctcgacctctgtagcaggtgtcatgtattttttagatgaaaggtcatggaaaacccatcccctaccacataccaga

SEQ ID NO: 142388 - DNA, 553 bp, Homo sapiens
cagtctttgaaaatgtcatagagcagagtctctcggcctgcttctcgaatgaataaaagatgggcttctagaacccaaggtgatcttggcagtgcttggtgcagctcacatgaacctgtgaggccagcctggctgcctgccagaaatgaatgcctctcagtccctccctgaccccaaaccaaggtgaactccacttgaagcaatattgggagcccaatactggcaggaggggaacacagccagagtcactgtgccccctgccatgtccagcacccaagtgcatatcaggctgcaccttccctgctcagtcccacctgaattgaacacacagaccggcctggggcagcccaagtccaggcttccccctacttcccatggcttggtaagatggcagggtgaattaaacactatgagttacccggggtagagatactttttctccaatggtctttgaaaatgtcatagagcatcctaaagtctcacctggagggatcctgctagtctgctcaatgccgaacattcctgaacaactgtgtctttagcctctgcttga

SEQ ID NO: 142389 - DNA, 254 bp, Homo sapiens
aaactcctgacctcaggtaatccacctgccttgtcctctcaaagtgatgggattacaggcataagccaccgcgcccagcctaacctttttttttcatttatatttttcagcaccccacttaaaattttttttaaattctgattaagtatatataacattaaatgtaccatcttaaccatttttcagcacacagttcagtagtgttaaatgcattcatactgttgtgccaacaaacctctgggaccttttcatct

SEQ ID NO: 142390 - DNA, 383 bp, Homo sapiens
tctcagaacactatgcccaagtgcgtgcagtcacatacaaaggtaaccagctgtccttaagtacagtcgtcttgagcctttttaaattatgattgatatgtggttcatggtccacatattaatgaatgaaggcatggcaggtctgaagggtcgtgggcatcacgctggagtgtctgaggcatctggcatgcggatggaagcacctgctggccctgttggtgatgagtgccccttactgccatttctgcagtttgctgccaatatttgtggtgaaaggaaatggtaaatttcaggtagagggtggtgaaaacaaagatgatgttttctccctcattcaaggtcatggaccctgtgaatttggtttatgaccccagtggttaaga

SEQ ID NO: 142391 - DNA, 239 bp, Homo sapiens
ggtctgagggggtgagtgtggggctgtgtccctgtggatgggagtagagagtgagtctgaggggtgagtgtggggctgtgtccctgtggatgggtggggaggagtgagtctgaggagagagtgtggggctgtgtccccgtggataggagtggagagtgagtctgaggggtgagtgtggggctgtgtccccgtggatgggtgtggagagtgagtctgaggggtgagtgtggggctgtgtc

SEQ ID NO: 142392 - DNA, 415 bp, Homo sapiens
tttacctgtttgtgttcttggaaaggttcccagttgggtagatgacttcttagccattgcccctctcctgagcagaggatgctgagcttcctagcttcctgcagtaataattgcagtgcctcagagttgcacagcattctacagtttaccaggtgccttgaaagcatgcgttatgtcattttagccttgcaataaccctgtggtgtgggacttttcctagtgctaaggcatgggcccacacccaggttttgtatcctgggttctgtcaccggcctttctagacatgtttcttccatttctttttcctttcccctcagctaatcctcatgcctttgcttgcttctctcccgagtgggttctggtttcttcaagagctgtgaagagggggtcaggggaaggagtggggtgaagagag

SEQ ID NO: 142393 - DNA, 746 bp, Homo sapiens
atgaattgatccctttataattctataatgactttctttctcttcttatagtttttgacttaaattctattttgtctgatatacgtacagttgacccttgaacaacatggagctggggcgacaactcaccatgcagtcaaaactccacatttaacttttgactccctaaaaatgtaatagcctactgttgaatggaagccttattgattacataaagtagattaacacaaatatagaatggtatatgtgttatatgcaatactcctacaataaagtaagctagagaaaagaaaatgttattaggaaaatatgccaggcatggtggctcatgcctgtaatagcagctgttatagcagccaaaacggactaagacaactgtattgctgagacacagtgaaaggtcattcaagatcagggggtgacatcttaagtcctagaagtcaacaagtctaaagtgggtctcactgggctaaaaccaacatgttgaagactgtgttgcttttatggaggctctaggaggcattctctttcatggcctttcccagcttctagaggctgcccagattagctcatgagcccatcctactttttttttttgatacagagtctcactctgttgcctgggctggagtgcagtggcaccatctcagctcactgcaaactccacctcccagattcaagcgattcttctgcctcagcatcctgagtagctgggattacaggcatgcaccaccacactcggctaa

SEQ ID NO: 142394 - DNA, 223 bp, Homo sapiens
atattagattttcactagttgatggatgaatgaatgaataaattaatacatacaagaacaaaggatggatgacaaggtgagaaacggaaagagctataaaaagaaatgaggcttaggaaaaaaaaaggaagaaagaaagtggtgactcagctcaagagccatagaaacagcatgtaagagccacctgtgccttcacctgaccctgatttggggtaaactttcc

SEQ ID NO: 142395 - DNA, 672 bp, Homo sapiens
ctttcctcctgccctcaccccctccttaacctctggtaatcactaatctagagatttcctttttgggagtttttaaatgacaaattgtttccttaatagttacagggctctttcatattgagtgtcttgtggtttgtcttttttgaggaattagtctatgttgccaaatttatttgggtagaattctgcataatattctcttatccttttgatacttgtagtgatatcccatttcattacctccgatattggtaatttgtgccttctctctctctctcttttttttttggtcagtcttgctagacgtttgtcgattttattgatctgttcaaagaaccagctctgtttcattgatctttccctttatgttttcaatttcatttacttctataattatttccttgcttctgcttggtttgcctatatattgctctttttttttactagattcttgaagttggagcttagattattgatttgagacttttcctctttacactgtatgtatttcttactacacatttccctcacactgctttagctatattcaacaatttttgatacatgtatgattttattccgttcattatttttttaattcccttgagactttctttttgacccatgcattatttagaagtgtattgttccatttccaagttttcagagagt

SEQ ID NO: 142396 - DNA, 180 bp, Homo sapiens
tgtctgcaattgtgtttgactattttctgttggacaagaagtgtctttggaaatatgcaacccgtgatcaaaatagaagtgaagacagcatttggttgaatgatgacaccatttgtctagacatataggttacatagtcttctaaatatagcttctaaacatgaattattttcatataaa

SEQ ID NO: 142397 - DNA, 417 bp, Homo sapiens
ttcgtacgtccctccacagggctggcccagaaagcgtatggccggcctatctcccggatgcagcctgtcagagggagcccaaccaccccgaacacatagcaaaagaaacccggggaaggagccaatgatcagaagaggctcactcaaagccaaggacggggccctggtgagatgattttattccccgcccctccctctactcccaagaacgtgcctgcgaaaacaaggaaataacaaaaaaaccacagggctaagtaagagcctatctaccagccactactcctaagcgccatctattggactgaagcccaaactacaacactaaacattattctgctaatagatgccggaaaccaagagcaagaattcacccacaaataaagacactgtacagagccttggccctctgaaagcgcc

SEQ ID NO: 142398 - DNA, 347 bp, Homo sapiens
tattgacagaagtccccttttgtcagtaatagccgccgtctactggatgcccactatgagcaggccattctctaatcttccacatagtcatgaagatgggcattttcccattttgcagatgagaaaactaaggtgcaaagacaggttaagtggcaaagcctggatctgaatcagatctggctggctctgctgcactatggcagttcagcaagtgagtctctgggaaccttagagatgggaagatgggacatgtacacatagaactgtggcgcatggtgtcatgtggcaggcatcccaagggtggcaaagtggcataggagctcagagggaaacaccatttctgactg

SEQ ID NO: 142399 - DNA, 395 bp, Homo sapiens
cattttctttattgtcttggctattaacattcagctccctttacttatgcaaatttctgcagtcagcttgaatttcttccctgaaaatgggtttttattttctaccatacggttaggtttcaaattttccaaacttttattatctgcttcccttttcaatgtaagatgcaatttcagaccatttctttgtgaatgtatatgagctatgctgttagaagcagccaggctacatcttgaaccctttgctccttagaaatttcttccaccagagaccctaaatcagggatgtccaatcatttggcttccctggaccacaatggaaaaagaacaattgtcttgggccacacataaaatacaatgacactagtgatagctgatgaactaaaaaatattgc

SEQ ID NO: 142400 - DNA, 764 bp, Homo sapiens
cctttatatgtgttgtttcatattagcatacaaataaacatctattctttaaaagcaaacaatatacattaaagtgataagactaaaaatatctttgaggtcaggtgtgatggctcggctcacacctgtaatcccagcactttgggaggccatggaaggtggatcacctgaggtcaggaattcaagaccagcctggccaacatggtgaaatcctcatctgtactaaaaatacaaaaattattcaggtgtcgtagtgggtgccagctacttgggaggttgaagcaggagaatcgcttgaacctgggaggcagaggttgcagtgagccgtgaccacactactgcactccagcctgggcagcagagagagagagactctgtctcaaaaaaaaaaaaaggacaagaaaagaataaaagaaaattttgagtagctcccatgacaaggtcaagggagcaattacaaagctaaacaatggaagggcttttgatgggtgtggttttgcagcagaagggctgccccctatggtgaggcatgatgctggattttccagaggtcagagatttggatttctccaccaaattgtagaagctttaggtaaacagacttgttctaaaagaacatgatgagcatgaaaaatgtttctatgaagatattaccatagcttgagaaagaaatagaaaaggtctagtatttcttatattctcaaaaagcaggtaaaagaaggcctaatgttgacgcttacccctgggcaaactcaggcatgaac

SEQ ID NO: 142401 - DNA, 553 bp, Homo sapiens
acccagcctcgttagtgtccctggcacctcaggacccggctatgaaaagcaggctgcttcgcccttaaatgacggaagtggggaggtgggcgaaaagggggccgcagcgttgtttagactgcagaaatcaactactatcgttaaagtttagggatcatcacaaaccaaatctccaaaaggtagcctagaaagcagtccgcgtatgagcatcattttaaatcacagtcttgagctggctggaccccgcggctgctcaaactccacacacggttcgcttggctaccgcgcccgtgaacttggaggcttggaagaggcacagtcaggcggcagaccgcgaattttccctctttccaacccaaaagtttgctcaatgaacctctggcctaaagacaatgctccggggaacggttcgcgtgctgggtgtttcgcttcgagaacggcggtcccagcttcccgtgaggtggaggtcacgctcagctcccgggaggcggcggcgcgcctgcgtcccagggaacagcaagccggggctctgcgccccacacccggcggccgc

SEQ ID NO: 142402 - DNA, 347 bp, Homo sapiens
gactatataaaaatgctgaaaattcaacttagggaaagtaaatggtgaatctaaggatgctgatactcgtatgataacctggagttctgtaactacgctaaaaaagcaggaatctaaagctgtcacattttctttacaaccaacaacaacaaaaaaatgtgtacccgtctgtctgttttaaccaccacttctccaacttgaagaaaaaagggagaactagcaagaaatatttatctacgattcgtgcatacacctgaccaaagtaactggtgaacttcctcatttgtgattttccgcataatggaacaccttatctgatggctgttttttttctcattcttatgggt

SEQ ID NO: 142403 - DNA, 499 bp, Homo sapiens
tggccggtccttcttcgcccaggctgctgtgtgtgaacttcctgcagcctatgtggccctctctccatttccagcgccatggccccgcttttggccccagtcctctagcttcccatctccgtccttgtctagtctcatctccccagtctgtttgattgtttgtttgttgctgaggcaggagaatcacttgaacccgggaggcggaggttgcagtgagtcgagattgcaccactgcactccagcctggagacagagtgagaccctgtctcagaaaaaaaaaaaaaattagccgggcatggtggcgggaacctgtaatcccagatactcaggaggctgaggcaggagaattgcttgaacccgggaggtggaggttacagtgagctgagattgcgccattgcactccagcgtggcgacagatcgagactctgtctcaaaagaagcagtggcgtcgtctgtggtttctgtgcgccctgtctgctgtgtgtgaacttcctgccc

SEQ ID NO: 142404 - DNA, 451 bp, Homo sapiens
ttaagtagaaaaaaaaaaattaccctagtcccacagattgaactttttctgagatttccttccaacctttttttctacttgcagtttttcctcacatagctgtggtcattctctatgaagaattttgaatttcgcttcttcccattaacacataagcatgttctgtattatgtcaaatctttcataaacattttaaactaccacatagatagatagatgtgatatagatgtatttaaccacatacctattgtttggacatttaggttgtctcactattataaatagcacagtgatgaatacctttatgggcaaagtgttttctgtatgtaatacagaatcccaggatatggattcctgagtggaaaggagtgagcacgtttaaggtttttaacacttacccaaagctttgactttttcagagcggctgaggtgtgagtctgtatccagaaa

SEQ ID NO: 142405 - DNA, 272 bp, Homo sapiens
gaaataagcttgagaatgcaaagagaatactatatagcattctttttgagattgtccttgcatattcgcacatgaaaagttctgctagaaggagagccactcagtatattttgatcagtgtgttaaaaatgtatttgcccaccaagcctactttcagaaggtctagtaacaatggcatcctgtgggagattctttgggaagcatcgattaaacagacctggaaggtttgggtcgatgtggaagcggaagcattgtgtcctctgcccactccc

SEQ ID NO: 142406 - DNA, 620 bp, Homo sapiens
agaggctgactctacaggatctttctaaatggctgtttccatcagcatagttgtaaggataaaataattgtagaacactttgaatggtacctgtgtatatacagagtactaaatcatattacgtaaaatggtgtggtacagagtataagtgctggaggaattcagaaatggggaaggtaagttgagggatgtgtggtcaggagaggcttacttggtggggcttgaaatgggtttgaagatttgagtcaggctctaagagaacaatagtagatgtgtgtccagacaaggggacaatgttgcataaggacgcagaagaaattgttatgtcctagactctgtaagggaacttgactagggtaaatgggaaactagattgaggtatgtgattttggggatgggaggttgagggatatttgataaattgggcactaaagattagtttttatacatgggggcaccaggatactcatttgggccactagggatttctgagctgtgaaatgaccaaagtaacttgaagttcaagcagatgagtcaagtgtggatattcagggtgggctgaagtgaggagctgtggcacgggtcggaaagccagccaggaagccgtactgatagttcac

SEQ ID NO: 142407 - DNA, 208 bp, Homo sapiens
tgctgggattacaggcgtgagccaccgcgcccggtcccctctggcattttcattccacacctccttctcccgagattacaaggaagttaaattgccaaacttcctggttcatgcaaagttaagactgtccattaaatagacgccagagaaaataaagtctagttttgaagatttggtatcagcatggctcaaagtacttctctgtctc

SEQ ID NO: 142408 - DNA, 312 bp, Homo sapiens
ctgtatacgtgctgctgtctgccaggaaaaatccctgcttcctcccacttgtttgtctttcagatctcacctaaggggttattccaagaaaagttccctaacccttgtctcccagtctcctcaagtctgtgaaggatgtttcttttttatcctcctaagtctgcctatgacttacccaattatatttttaatatattgcacagttacttgaatgcactggatttttgaatgtcttccccttataagatttccttaagaagaggaacttttgtatgaccacggtagcagtgtttagcatacaacaggcaactg

SEQ ID NO: 142409 - DNA, 228 bp, Homo sapiens
aatacctaaaaatatttgctcttatttagggagcccttgccacatgcccaagctgggcagatcgctttgtacgtgttgtcttgtgtgagcctcacaaggaccccatcaggtcagtcctgttgttctcatcttacagatgaaaaattggaactcagtgaggtataataacctattcaaagtctcaaagccagtgaggaatagaacaagggttaatgcaagtcagtctgg

SEQ ID NO: 142410 - DNA, 592 bp, Homo sapiens
acaaccggtacatacattgtctgatgacagggattttgcactccaagaaatgactatactttttgccctgaccttcagcctggaagactccttcagaaatataaataggccacagaagttaactccctctgccttgagattgaattcattctgctctctgaatacgtgtatcctgatctcagtgcacatgacattttagatttcagatcaacacttgcttcaattttccaattcagaatggtagaacttcaaaatttcatattgagccccgattattcacatacccaattcccataatataaggtacttactttccaaaagatcataagcttatttcaaaattagaccatttctttatctgtagcctagtaactgtaatttgtggagtacttaccatatagcaggagtattccatatgactttctatatatgaaaaataagaaaccaacataggaggttttttttttccatgcttattggttaaaaaacaaaaacaaaaactgaggcatatgtcaattgcacaaaccattcaaataatgactgctctgggattctagtccactctgtgtcatcaccactatggaactttgca

SEQ ID NO: 142411 - DNA, 782 bp, Homo sapiens
cacccacatcctgctgattggtccattttacagagagcatattggtccgttttgacagggtgctgattggtgcatttacaatccctgagctagacacagagtgctgattggtgcatttacaagcctctagctagacaaaaattttccaagtccccactagattagctagacacgcgtttacaaacctttagctagacacagtgctgattggtgcgtttacaatcctttagctagacacaagttctccaagtccccgctagattagctagacacagagcactgattggtgcgtttacaaaccttgagctagacacagagtgctgattggtgcatttacaatcctctagctagacataaaagttttccaagtccccaccaggttagttagatacagagtgctgattggtgcatccacaaaccccgagctagacagagagtgctgcttggtgcatatacaatcctccagctagacaaaagttctccaagaccccacccaactcaggagcccagctgacttcccctagtggatcccgcactggggctgtgggtggagctgcctgctagtcctgtgcctcacacctgcacacctcagcccttgggcggtcgatgggacgggcagccgcctgtcggggagtctcgggctgcatgcgagcccatggcggtcgggggtggcttgggcatggcaggccgcaggtcccaagccctgcctcatggggaggcggctgaggcccggtgagaattcaagtgcggcgtgggcaggctgtcagtgctgggggacccgg

SEQ ID NO: 142412 - DNA, 477 bp, Homo sapiens
tttatagtttattcctagatgtctcagtccagatgtggggagtcattttcatcataagcaaagcagcttagtaaattcttgacattccatatctatctgattttactgggtaaagggacagagagttacctcaatatcatgtttgtccgtaaagaggagaaagggttttattactcttttactcacagtaatgttggcatttaaaaaattgttgcccatctgatggatgtatagtgtatctcaaagtggtcctgatgtattactctttgctttttattattttcttccttctgtgtttttcaaacttaattttctgttcattttctaacttactggaggattggccattgattattagccgccctttcatttaaagctatcaatgtttctaagtatggcttttggtatattccacgaatttgatatgccatattttattatttagttcaaaatattttctaagtgttttgtgatttt

SEQ ID NO: 142413 - DNA, 326 bp, Homo sapiens
accatcatctcgtttattattgtacacaaaaatatatatattgggtcaggtgcagtggctcacacctgtaaccttagcattttgggaggccaaggcaagaggactgcttaagtctaggagttcaagaccagtctgggcacaaacaaacaaaaaagccagacatggtggtgggcaactgtcgctgcagctcctcaggactcgggaggctgaggcaggaggatcgcttgagcttgggaggtcaagactgcaataagccatgatcatggcactgcactccagcctgggtaacagagccagaccttgcctccaaaaaaagggtacacaga

SEQ ID NO: 142414 - DNA, 713 bp, Homo sapiens
ttggggagacccctgaggataaaaatagtccttatgatttgaatagcaggcaggttgccaattgaagagactttggtagaagtgagccataaggagggagccagagttgttagagggaaggagcaagaaaccaggagaagcttttgggaatgtgatgatgttaggtttccagataaatattatataacgtattaatataaatattgtatcacaaaaataagctcattatcatgaatctgttgatttatattttgtgatttctaagtcacgtattggtatttgcccctgaaaatggtaaggtatcctaaattaagttattctaatgcataatcacaaatgagactatgtgaaatgtgcagaagtataggagctaatgcaagctctgtgatggcagggaccattttctttgttcactctttaagtcttagcacttagcataagcctgacaataaaagatgtcgaataagtatttgctaatagaattaaagtatctacaatctaaggtatttattttataactatctcttcagcagtgttgtccaatagaaatacaatgtgagccacaaatataatttaaaattttctagtgccacattaaagaagtaaaaggaaacaggcaaaattagttttcataatgcatttaagccaatagatctgaaagattatcatgagtgactttacgtacttttattcatattggacagcgtagctct

SEQ ID NO: 142415 - DNA, 180 bp, Homo sapiens
tacatttatctgagtctactctcttctgaaacctcactaaaacgacagggaattttgtaaagagtttacactttccaggacatgggatcacagggccggagggcaggcagggaagcagccaggcgtgcactggtgaagcctcaccagctcaggtcagggtgtccacaggtgcctgtggag

SEQ ID NO: 142416 - DNA, 509 bp, Homo sapiens
atattgcgtctgagtcactgaaggaaaagaatgtggggtctgtttgctgggactggacacctccataatcacatgctccatgaaatgcaggcaggagatctcgctttctacctctgggatgggagtgtgcagtttcagaatgagactagcccacacaactgactatttgggaaagagaaatgaaatcagatgcagcaatttaatatccactaagatgatatcttaatcacaaacactcttctggtttttagaaatgtgaatgttatttacactaggttaaaaaacctgaatatccaacagcatgacaccgactaaagaaatactggcgcactctggaaccttgcacaccacttattggcatgggaacaatgggaacacgcctatgcaaagatgtgcatggaaattagaagaatgcaacactgtagaacagatgtgactaggtgcatgatcaagagcacacaagaccaagcctgcctctgcacacacaagacagcgcctgagtctgcacc

SEQ ID NO: 142417 - DNA, 501 bp, Homo sapiens
cacgcatagagcagaactttctggaaaataacttaaacaactgcttgagagtttaagagaaggaagggaacaaaaagtttaaacagattttattacaacaaaatacagtataaaaccccaatccagagccaggcatggtggcgcatgcctgtaatcccagcatttgggaggctgatgcaggagaatcgcttgaacccaagaggtggaggttgcggtgagccaagattgcgccactgcactccagcctgggcaacagagggagactccatcgccccccctcaacaacaaaaaaagtttcccatacactggcctgccccaaaacccactaacaattttagcaaaacagtccaggccaaagaggaagcatttcatgtccaataagaaacccagccattccgcatggccggttcctgagtggctctggtgatactctccagccacctgctgacattgagaatctcagacctcgggactgctgttgcggtaccgtgtgtctgacac

SEQ ID NO: 142418 - DNA, 305 bp, Homo sapiens
aggatgaggacaatcagaaaggcctgttcattttgcatcctaagcatctctcaaatcccttcgcgccatccccagtcccctcattcaggctgggatattgcaacatcctccagactctatgtacccaattgttaattatcgactttctaaaggagatttgatcctgtccagcacgacatagagcatgcaagcgttcctcatggcctgatagcttgtgattctctatgtgtatgtctgatggctcctgttatcaagaaaatcatgtgtgagatccctccgttcatgatcctccttggcgccatttg

SEQ ID NO: 142419 - DNA, 241 bp, Homo sapiens
ccagcactttgggaggctgagggaggaggattgattgagcccaggagtttgagaccaacctatgcaacatagtgagataccacctctagaaaaatgaaaagaaattaaaaaaaatagaaggaaaaagtaggttcagggcattcaagtggttcaagttcaacttattataaaaaatatacaaaattagcctggcgaggggatgcacgcctgtaatcctagttactcaggaggctgaggcagg

SEQ ID NO: 142420 - DNA, 1019 bp, Homo sapiens
cacagtgttcatgtgtcatggagccatttttgaatcctgtgagagacttcagtgctgatgatcggatgaccagaccatcaaaccatgctggaggtgattaattaattaccattctgcctctgccccgttttgttcaatacttcagagaaaaaaaaatacaaagatggtgttctccatctgaacttatctgaatcaggacaggaaagacccaggacacagaccctttccccagagaggagagaatacatctctacatactgctgcccaatcatcaagcccagtagttgccaaaaacaaaccaaccacctgatttccctgggcctggagtgtttcagaatcctctgccccacttgttctgccgtgtattaactgcagagctgtggcaaattgcaaggcactcattggcgatacacaggtggacatgagcttgttaacagaatgcagtaattgacataccgtgattcattatgcacagcacgaaggactctagtagaagcccactttatggccaagagctgctggcaccaccaaccttgagaatttgttcctggctctgttctgtctccccagctagagagcaccatccctttaggggccagaagcagtctgtggcttcagtcttatctgcccctacctccaggcaaggagtaaggatacttccctggtcccaggctgcatgacgttggagggagattatttgttcattcattcactcaacaagcatttaaaaaaatctggccagtaatgcagtggagaacaagacagatagttcctgcccttccagaacttaatcacctggtgactatcagaactgcaaatttctaagcacccaattcccagttctatagacctggaagtgggccctctctggaccttagtttctttatcatcaaatgagtagaaaagagagaattgtattggtcaatctcttttagctctaagatttcagactctgtggttatggattataaacatgagtcacagtatcagtcttagtcatttgtatccaatgccaaagg

SEQ ID NO: 142421 - DNA, 270 bp, Homo sapiens
tgtctattgtgtgccacttcctcctctgccaatagtcccataatcgaagcacgtgtcactgaggggttgggcagaagagagaggggcttctctgcagaactcagaagctggtgcccttgagcagagctctggaggacaggtgcatagttgttctccaggtacccaggagctgcctgtggaggagcattccacattctgtgcaggaataggggttagcatttacagagtcatgaagagtaagagagctacagggggctgggtactgctaga

SEQ ID NO: 142422 - DNA, 222 bp, Homo sapiens
aactacggtggtggtgggaactataatgagttcggaaattatagtgaacaacagcaatcaaactatgaacccatgaaagggggcacttttggtggaagaagctcaggcattccccatggtggtgaaagtggtggatatggtagcagaaggttctaaaaacagcagaaaagggctacagttcttagcaggagagagaacgaggagttgtcaggaaagctgtag

SEQ ID NO: 142423 - DNA, 257 bp, Homo sapiens
cagagagcaccccagcaggggagcagtcttcagtcgctgcttcctctaaacagggcgtcgagtgagaagcagcctcctgaacacatgcaccaacatgaatgtgtctgtaaactcctaattgagagtgataagccgccaccagactctgaagggcaggcgtctttgtaggtcacaggttgccgagaaagctaagctcagtgccgctgattgacacttggagcagttacattgttctgtggccttcgtgggttactgtg

SEQ ID NO: 142424 - DNA, 736 bp, Homo sapiens
atggtgcgtgcctgtaatcccagctactcaggaggctgaggcaggagaatcacttgaacctgggagatggaggttgcagtgagccaagatggcgccactgcactccagtctggacgacagggtgagactctgtctcaaaaaaagaaaaaaaaatttttttttatatcctctgtagagttatgcaatttctcaacagattatttttgtggctcacttatgtcttagacattttaagatcttttccctcaggacaggactttctttaaatatcttattgatgtatttacttttaagggagaatgactaacatgaaaaattttacatttctccatctaattcgtattttgtttgttacacactacaatgtaagttttttgacaaggttttatatgtatgttttcatttcatctgtcatgtcaggcctaaactcagtgtacagaattctcaatcttaaactttatgaaagctcatacagctattcaatctatatacttattttcagatatagttacttcggttaattttttaaccaagatatttcaatcataaacaatcattttatgtttagtggtttatctttttctttcaatattaaatattcaggttgtatacttcagtattgtgaagtgtgtttgagtcatggccatgatatgaagatcagtgtactatcaaagaaacttaaaaagacagcataggatgggctttagatccagtctgttcctatcacttgtgagac

SEQ ID NO: 142425 - DNA, 270 bp, Homo sapiens
gatggggaagctcctaataccagctgtctctctgccgccatcccccaacaccctcaggaaggggcacctttctgggcctgcctaaaggagggagcatgggtgtgagggctgcccaggcaggtgggagtacggagccttgtggggcagggtggaggcgtccaggaccttcctaggaggttttgcccaactccccctaagtgatgacaggtctcaggagggggccgcccccacatatgggagggagaagcttattttcccagcttggggtgg

SEQ ID NO: 142426 - DNA, 419 bp, Homo sapiens
agggaaggacagggagtagataggcactgcatacctcttatcgctaaggcgttccatagcccttggctcactagcttctctgactaccttgggaaacaggcatagtcactctacttgatagataagaatgctgaggctccgaaaaaggaggagacgtgttcgaggtcacactgcaagtgagcagcagagccaagatctgaaaccaggcaagctgtccttctaagcacaccttctatttctatggaaaggctgcatgggaaccaggacccagggagcagccctcttcagagagaaagttctatgctaacttttagggcctgctattaggtagattctggcctgctcggttaaatttactcttgttgggggtaagtgggaagatgactacaaggaaggaacacagcaagaatcccagcctc

SEQ ID NO: 142427 - DNA, 492 bp, Homo sapiens
aaggctcccatatttacacctccaaactcttccctgaactccaggcccacatattcaactgcccacttgacatgtccagctgatgtctaccaggcatctcaaggttaacaaatggaaacccactcctcctgcagtgaccccatcccagttaatggcaactacatgcaccccagtcgttaagccaaaaacctgctgtgattccttgattcttcctcacccctcacatatccagtctgtctgccaatcctggagattagactccacctactggcccatgggagacaattatagtaatagtacttaaggaaatggaaaaaaaaaaaaaaaaaggaacttaaggaaatgaataatacggtcagcaaaaatttagaggtgaggccagacacggtggctcacacctgtaatctcagcacttttggaggcaggtggattgctggagtccaagagttcgcaaccagcctggccaacagggaaaattcctttttttacaaa

SEQ ID NO: 142428 - DNA, 652 bp, Homo sapiens
gaggctctagacagagagccccagagccaccagaggaaaaggaactcgagagaaagatggaggagcaaacagagggaggggaagggggcaggaggtgcagctcccccaagagggggggcaggaggtgcagctcccccaagaggggtggcagccctcttgggaagatgaggacagagccccagggaggcctggggttggcaaagggagcctgcagtttctttgtgggtgcgggggcctcaagggctacgagtctgagctgtgcgtgtgtttggacaagtccccagagtgtgtgtcttcctggggttcctagactgcgagtggcagtggcccggcggcggaggccgtttggatccctgtgtgagctgtagggggcgccctgggcgtcgggcccaggtcaagtgcgagataggaacggggtgcgggggccgatgagagctccccgcgggaatgtccgctgtggacgccctcggaggccccatctaactccagggcggagagcgtggccgggcccagttcacgggctgctcgagccctgacgaggcagctgggggctgtctggcgtccacgctcacgttctgggccggcggaccccgtaccggccaggccgtggcggccacgggggcccggaagcgccgccgccagctggccccgc

SEQ ID NO: 142429 - DNA, 463 bp, Homo sapiens
ccttgaaaagagtagttcactggacataggaagttagcactaacgtttggggcaaggagagcttgttgtagtgtggaacaatgaattaagaatcgtaaagcctgatgtcgggttctagctgtagcataaatgtgcttgccctgatcacttgtctcttaatctctggtccttaatttagaatatgtgagttggaggatctccaatatctcttccaggaccaaaaagtaaaggattctgatgagtccccgtggttgcaaaacataagagtaaatatacttaaatatataaagttaatagtagatagatatacttggattttttaattcagttgccttactcaatatcttacctttttcatttgataaatattgagcatctactatgtggcaggcaccaatctacatatttggatgtttaataggccgtgtaagtacaagacaactttcgtgttcttttttttttt

SEQ ID NO: 142430 - DNA, 229 bp, Homo sapiens
caaggaggtaaggcccctcccaggtcccagaacctccttcgctgaacatcccttccagcacatccatggcattcctgagcctgtgaagatcagacaggctccggtttcaggtagcaatccctccctatcccagtgctttatgctttgggtgagcctgaaaagtccttgcctttttcatctcctccaggaagcccatgagcctccagaggcaaaaaggtatggagtaggt

SEQ ID NO: 142431 - DNA, 271 bp, Homo sapiens
aatgaacgtataaagcagattggaccatctcgggaatcccaccagatcggttttttctcagaatcttccacacagcatttagccttaggaatatctaagaaggataactttcatggtgctagaaatcgtaatctgtccttgatggaaatggcaatgaactttttgcagattggaccatctcgggaatcccaaagatcggaaactattttctttctcagaatcttccacacagcattgagccttaggaatttctaagaaggatctggaatga

SEQ ID NO: 142432 - DNA, 717 bp, Homo sapiens
agaaataatgtgaagctatatataggaaatgtttttaaggaaatgtttttaagaaggtatgggcaaagaagcctgaacaaagtggtggtttaaaatgtatttccgtcctcattttataatctgtttaatgaggtcaactatgtcaggccctaaattcaggaggtttcaatatgactttatatgggaggatttttactgtggtaggtttaattgccagcccattctccattctttcctatatcattgctccttttcatgtagttgtacaattcttacaaaggaatctacttccctgactctcgactttgaactaagtgacttggtttgtgcaattgacacaaccaagggcttacagcattaggcttgtttctttattcactgctaggtacctgaagaagaatcaagttgctgagcttaataagtggattactgagtctgtccaactgaggtcagaagagctgccctctctgattaacagatgcttgagaggaaatgtttatttttaatgtcactgagattgtgttaattgtttataatatagcaacagttgactgatacagatgcattaagtacagtttgtgccttccagtgaataatgttgaagtggtacaattatttatacaatactatttgattatgacactaaggcaagtatttaaaaagtactttctgagcacacatgtggaaatgcaaactcagactgtctccagcattgta

SEQ ID NO: 142433 - DNA, 410 bp, Homo sapiens
gtgtgtgtgtgcgggcacgtgcatttgagcccaggagttggaggctgcggtcagctatgatcgcaccactgcactccagcctgggcgacagagcaagaccctggctcaaaaataaaaaataaaaagaaaagaaaatggcaggacagagaggtgaaaagacaagtggaaataggatccagatcactgcctgagggctgtgcagtggtacagaatcttctcattgagaaggtgaccttgagtaaagacccagaggagagggagggagccaaggacctttgggctgacaaccatccctccctcttcaacagccacagactgactccttcacttccttcagctatagctcaaaggtcacctcctagagaggccctccctggccaacctggctcaacgatggccccatcccccgc

SEQ ID NO: 142434 - DNA, 356 bp, Homo sapiens
aatacagtaaagacatacaaaatttgttgacagagttgccttcccttatattcctcttcacaggaattataaaatcccaaactatagcattctctgcagctttgaaaaagactattatattgtttttattatacatagaaacttcacttttttttcatatactcaaattacaccgtttgtaatattggtactagaaactacaacaacttcttattaatctgttttgtgtggcatgtagcattaccatatctgcttcctctacactttagtggatagtattaataggccactctcatttctgaagctgttactcctcatgccttagtatctccttttactgtagcagaatatgacac

SEQ ID NO: 142435 - DNA, 273 bp, Homo sapiens
taaatgtcactttgtagagcctttttctgataacccaccctagtgagacacactgtctaccctcattcactctagtcctgttactctatttttttttaattgcatttcttaccacttggcatatggcttactcattcattcagatattaaatgcctaccctgtgctagggtgtagggacaaaaacagaatctcagctctaatggagctttcattctaagtgagatgatgagtagatgcccaagtgaacttaacctaggatgtttgctttacca

SEQ ID NO: 142436 - DNA, 407 bp, Homo sapiens
gaactttctacccctttacagcacgccgaccacagccagctcagccttttctgatatatttacaactacaaaagataccgttaaaaaagaaaaatacctgggtgcagtggcttacgcctgtaatcccagcacttggggaggccgaggcgggtggatcgcctgaggtcaggagttcaagaccagcctggctgacattgtgaaaccctttctctactaaaaatacaaaaagtaggccaggcgcgatagctcacgcctataatcccagcactttcggaggccgaggcaggcagatcacctgaggccaggagttcgagaccagcctggccaacatggtgaaacccttccctactaaaaatacaaaaattagccaggtgtggtggcacacacatatactcccagctattcag

SEQ ID NO: 142437 - DNA, 116 bp, Homo sapiens
agtttcacaattaactacttcctgattttaagatgatggctggtacaaaataaacccattccattttattataccatttcctttttgagagaagtcaagcatcaatgaagatctgt

SEQ ID NO: 142438 - DNA, 287 bp, Homo sapiens
tcaagacacagcctattgctgggattctgcctgataaaggggagatatggagctgactaggcaagaattgtcttcccttagaaggtgtggaaggaaagagcataaataatcacacctagacgataaaaaaaaattagccaatctaatcctcatattaaccctgagattataaagatccttcaccaaattgtagtcatgaggaaacaggctcagagggaaaatgagttgcccaaggtcacgcggccaaatccaacatttgaatacaggccctctggttctaaaacttg

SEQ ID NO: 142439 - DNA, 752 bp, Homo sapiens
acagctgttgtttatttaaacaataacttaaatgatttgataggtagaatatcttagctggtgagttcattgcatttttttttttaaagaatagaatggcaaataatgagttagtggtcataggaaagttaaacttcacttatcctataggctgagggactgaatcctagatagctggacttcagtctagtaagtatataactaggtaagtatataacaatgtaaataaatatatataactaaatattactctatatatactgtataaatagctatataattatatataactttatatataaagctacatgtttgcctctcagacttagaatgtcaaccattttacataaaatattttgaaacaaatctttcatcttaatcagatcaaaccaagtataatttgatcttttctagatgatttaggatcaacattataaacatttattattgtactacactagagcaatgtgaggcctacctgccagaagctatgaaaagtttgcattctgacctttccacaagagggccacaggggagtgcacccttgcctttatctgctttcaatattccttattaccctgttccttaccgcaacttttttcttaacttcttcatttgcttatttctcattgggctcatcagactaagtcaatgcttaaggaacttaattttattaaacccacagattcctcagggtgcggtggctcacacctgtaatcccagcattttgggaggccaaagtgggcagatca

SEQ ID NO: 142440 - DNA, 572 bp, Homo sapiens
caaaggctggaaaagtagatcagtcagctcccacagggccttgactgagtgtgacattaggcatggagggccactgaaggttttaattcagaggaataagataagacctgtgtttccgaaggattaatttagcagcaatatagagaccatccgcaaggaaattggttacaaggttattacagaggtctggttgagagacattgagggagacagttggggaggaggggaaaggtacgcattattatggaaataggatgagtacaatttagcaattaagtcagaggtacaggacaaaggggaatttgcaaagacccttttaaagatttgattgaatggtggggaatatggttgtaccatcagcaaacagcagttacagggtggggaagaaagaatgggtttagaagaaaaagggatgatttgagtataaattgtattacaggctggggcgtggtggctcatgccagtaaccccagcactttgggaggctgagaagggtgtggatcctttgagctcaggagttcaaggccagcttaggcaacatagtgaaactctggtctctacaaaaaataaaa

SEQ ID NO: 142441 - DNA, 618 bp, Homo sapiens
ctggcctggtggtatgggtcctattgatgttggggaattccttctgccacaatcatttcacttatttcttcctatactgtttcattatagctaactccttcagtctttaattctttaagttgctaatcctttgtgactattttctataccaggtaatgactacagccatttctgtcttatagttaaagggtctacaaaagaatcaacttctgcactcctgcagaaatcaaaacccatggtatttgtgcaagaagtatgatagaccaataaatgaagtgcctttgggtgaacgtctctgagatcaacatgtgcaaatacctcatagctctatttgatttgcttgttcaccagtacttttggagcagaatgtcaggagtatgtgaggaagtaaagaagacacatgagatcccagaccatcaaggagcttgcagtgaaaacttgcaatgccagtagagtgcgatctattagtgggttctgatggggagagtaggagctttacaggaacacatagaaggcagctaatccacactgatggggtggggaaagggcttaaggaggtctcccaaggaagagacgtctaaattgacagctgaaggctagtctgttgatgttagctgg

SEQ ID NO: 142442 - DNA, 261 bp, Homo sapiens
ataattcctagaacaggtatactgaacacttggcgaagaattcacaatggaaattagaacttttttgaaataaaaatacaagatatcaaaatgcatagatgtcactaaagtcacaaaagtagtacttaggggaaaattatagcactaaacacctttattaggtaacagtctcaaagcaatgacatcaacttttcaactagaagaaaaaagaagagcagtaaatccaaaaggaaataatgatcagagcagaaatcaaatgaa

SEQ ID NO: 142443 - DNA, 456 bp, Homo sapiens
cctgagtagctgggattacaggcgcccaccaccacacgtggctaatttttgtaattttagcagagatgggatttcaccatgttggccaggctggtcttgaacttttgacttcaagtgatccgccctcctcggcctcccaaagtgctgggattacaggtgtgagccacccctcccagccgacattggctttttaaaatcctgttttggttttttattgtgagcatgctgcagtgagcaatatggtgatcactagtgctgtttggcattactaccttggtttatgctaaggtgcagcagtttctctccactgctcttgcattgtcagtgcagaagggagcaaagttgaaaggacatcacattttaatgtggtgcaaagaattttgaccttgcagacccccttggagcaaggctctggaggcctctctgtctcccctagttctgtggaccacagttgga

SEQ ID NO: 142444 - DNA, 140 bp, Homo sapiens
aaccctttccctgacccctggattatagaacattccagacaacattttcctagcataagactttagctttctgagtcaggaactcaattttctttagaccctaaaaatattgtcttaaatttttctaccattagatttct

SEQ ID NO: 142445 - DNA, 127 bp, Homo sapiens
ctcgaattcaagcttctaacgatgtatggggacatgaataatacgtagtttattagtctatacccagtgtacctctctgtgtgtctctgttgattctaatgcttgtttaaatcagtggataaaaggg

SEQ ID NO: 142446 - DNA, 676 bp, Homo sapiens
tgccctggctggtattgaactcctgggctcaagtgatcctcccgccctagcctccaaaagtgctgggattacaggcatgcgccatggtgcctggacaggagtttatttttgaccctgttaagtttgagatgcctgctacacattcaagtggagatgttgaataggcattcaattggtcatgagtttggggctcatggagaagtttatcttattattattatttctttaaatggagtttcactgtgttgcccaggctggcgtgcagtggtatgatcttggctcactgcaacctccaccttctggttcaagcaattctcgtgcctcagcctcccgagtagctgggattacaggcacgcgccaccacacccagctaatacttgtattttagtagagatggagtttcatcatgttggccaatgtggtcaggaagtttatgtcaatttgggcatcatcagtgatacatgcagttgagctatattggacacatggccaattgacctcacagtccgcagggcttgtccccatgtaactgctcttctatccctatgcaaattcattttgtagatgctaacgtttagcagctcattgttgctgttgaaagttcttggaacactttcgtagtctgaatgctagaaaggatgggtcctaggaatgtcctctaggttgtggcagatcc

SEQ ID NO: 142447 - DNA, 524 bp, Homo sapiens
cagcaagcatgaccgtcaacttccgcaattaaaaaaaccaaactctcactattgaggaagaaatacataagaaatggagtcaacaaaaactctctgagggcaagtttcagttgagagggtcccactgttcagcacatgaagagtctaacaacctttgcttcaacttaactgggtacattggaatttataaaaaggaacaattaccagagtgacccaacagatggcccattaaactctgggattcgtacaatgtgtctggtgacctatttcaaggaactggttagaaacctcccaattggccaacttgtgattaaaaatacgagatgtttgcagctgaccttcaaatctaactctttctggccaatctaggcagaaataataagagaataaataaaacatcagaaataatcaaaagagatcctgggacttggaacggctgtcagcagaattacttggttcacatatgggacagctccttctctgtgagggcaagcatcatggctagggagaacaagaaatctcgg

SEQ ID NO: 142448 - DNA, 337 bp, Homo sapiens
gtggagagtgttggggtcaccaaaacaaacaaatcatggcttctgctttcagtctagggagaggcaggtccacaaaatatggtgcctaaacacaaccataagcaaattgacccaatggacccgtgtctcgttatagggaacattcaacaagaggtggctgagtgaagggggtcatgagttggtagaaaagagaccctctaaaagagaattagctttgtgactagtaagaaaaaaaaatagagaaagacaaggatacccatggaggaaaatggtgtccaataaactctttgtattccatgaagaatatgtgcatatgaagcatgtccttttattctcg

SEQ ID NO: 142449 - DNA, 378 bp, Homo sapiens
tcctgcctcagctcccaaaactagctgggactacaggcacatcaccacacccggctaatttttgtattttttttgtagagactgggtttcaccatgttgcccaggctggtctctaactcctgagctcaagcaatccgcccaccccagccttccaaagtgcgtgaaccaccgtgccctgcctagcacctgtgagatttaacaagatcagggaaaacatcttattgcttcttcccctgcccttgtgcaggcctcactccctcacaaaggattccctctgttgcctccaaaacttcctcccagcttggcccttcctgccccaggaactgcttcctccagtccaccttgatcctggggcagatcctggtgacctctagaaag

SEQ ID NO: 142450 - DNA, 675 bp, Homo sapiens
aacactacttgtggatattcacttgggaaatgtcagagctccagattataaaattcttgcaaaagcttgcaattggctcagaatgggacatgggactttgtaattaggtctatcccagaattacaacctttgcccatactaagctggaaacaatagaaagtatttaaatgttggacattttaattacagcgtaggagagaaaaaacacacagtggataaagatgttgtggtatattggctataatattcttagcaaagtgggaagttatgacttcaaaaaactctcaacagattcctcactttgatgggaggagactgcaggtatgggagcagtagagacttgaattactccgacattattgcagaacattcctcaagtctttcctgaataattggaccccttataggtctatcactttgccaccatgagataatattgagtttgcaagaatgcttttgcagaggtcgctgtgctcctggaagacagtatttataaaaatagtcactttgtatggtggtatctgtttgggacagtgtgagcccctcactactctcagctttagatatggaaaactcaaagacagacacaaaggaaaatacttctgttttcagttattgagaaaatgatactttgtttaaaaaccactattgattaaatttagtgatattagagac

SEQ ID NO: 142451 - DNA, 531 bp, Homo sapiens
accaatggaacagaatagtgagcccagaaacaaaccctcacacatacatagccaaatgatctctgacaaggctgtcaaaaccacacaatggaaaaaggacagtcttcagtttttattcaaacatatagtttcaaaataaacatttaagtaaaattctaggaactgcagattatcttgaaaggacatatagagataataaactaatttatttgttttttcaacaattcaggctttttatttttacctatcttaaagtgatttaattataatactacatccaacattcggtttcttttgtactgtaatatctccatctttggcacatctaaagcttatttacatttcagttttaataaatttagccaagagtagtgccaaagaattacaataactaatctctgcccagagctattggggtctgctgcaagcactgtcaggaatgaagaaaaagaatgggccaggcgtggtggctcacgcttgtaatcccagcactttgggaggccgaggtgggcagactgcctgagctcaaga

SEQ ID NO: 142452 - DNA, 370 bp, Homo sapiens
gcggattagaggtccctctactcgcgggtgctgtagtacaagatggctgagaaatacagcagtacttatgggaatgtgtgatgcatttggcatttcctatagaagtgcttaatcctccaaacaaccggatgaagtaggtattattgtgcccacttaacagacagataaactgaggctctaagagcttacattattattactattattttgaaatggaatcttgctctctcatgcaggctggagtcaggggcgcgatctcggctcactgcaaactccgcctcccgggttcacgccattctcctgcctcacctccaagtagcatgggactacagcacccgcgagtagaggtaccgagctcgatctaaggacc

SEQ ID NO: 142453 - DNA, 355 bp, Homo sapiens
acctttgcaggaatagaagccaggagcaataggaatggtctacccccacacctctgacaggaaaccaaatttggccagagtgcccctctagctcagggaaggcaattccctcttcagcagattcctataggggagcattgatgctgtcacaggtcagccaatggggcttatctgggtctactctccatttccaccttcaattagtttagttggaaaaataacgtacccacgtacttggagaatctgaggaggatggaagattttttcttgatatttgcaacccagtcacgccttgggcagatgtacaaaatttcctttgcattttattgacctcagaggagcagagaatggtcct

SEQ ID NO: 142454 - DNA, 276 bp, Homo sapiens
tcaaaatagctaccacgcatgagcttgtcaccctgcaccaactcatcctgtgcagttaccactactgttaactctgacctaggatttgtagttcattcgggatgtcatgcatgcttcagatctcaggccctagtgacctcacctataaatttggtgtgggcagtgataggcctggatgaccctcagtggcccttctagcacaaaaatttctcaagtcagaagaacaaaaccctgtacttctactctccctgggacagtggcaccaaatatgccata

SEQ ID NO: 142455 - DNA, 563 bp, Homo sapiens
ctcaataagacaagtaaaaacgcacagttgtacagtgcttgctgtgtattagggactattctaagtgcttcactcgtattaactcattgaatcctcatgagaaccctgtactattatcatagtttgcaggtgaggaaatcgaggcacagagtaagttggtaacttgaccaagtcacacagtgacataaagaagcaaggttctaagcccagaccatctggctccgtgggctgtgcttagcctctgcactatagtgcctgattttgtttgctttggtgatgtgtctggctaaaacagcttcatttccttgaaaggaggtagacccatttggtatccccccttttgcccatagttcatctctttctgcctggaacgtgagtgtggtgctagaaggagggcatcactttctgtcgtgattactattttgcacccatgagttgacaattgggaagaagaaagctgcatggcttggcctaaagaaggaaggtgcctgggtcccagccccagattccctactccagattccttgtgaaatgaataataaaatccctcatttttaatgcta

SEQ ID NO: 142456 - DNA, 461 bp, Homo sapiens
caccacccctgagtcaagctaaaccaatccaaaccactgcactggtgttggcagtggcagttgaaggctgggggagtcccaggttcttaaagttgtaagttttcaggatgctggtgaaggcagagggaatgttggaggtaagtaggagcttaagacatgtctattcattcattcattcagtgctaaacacctgttgtacagcaggtcgtattctcagcagggttgtattggtaaacgtgatagtgctgtgcacagatagttactgggacactggagaaatacaggggaaagggttgtccaggaatgggcagggtgtcttctataacgtgtgggtacagaggaggctctctaacggagtgatacttaatagagtgatgaccctttccagaagagggaacgtggtgtgtgaagacttggacgccagagaccagaccgtgttgtatctgaagaagtaaaacaag

SEQ ID NO: 142457 - DNA, 339 bp, Homo sapiens
ccagctcaggaccctgttcctcttcttgtaaaaccactagaactcattatcctgttagtccatgaatagattaatcctttcatgagggcagagccctcacactctagtcacctcttcatagccccacctctcagtaatagggattaagtttcaacatgagtttcagaggagacaaatacctaacccatagcactccctgtgtctctttaagaacaacaaaagcttccaaaatcagagtcttcagcatcttggcatgaatgtctagcagccattccacatgcagcctgactggagccccactcctgattcctcttgcaagctcttcccaccatctcctca

SEQ ID NO: 142458 - DNA, 528 bp, Homo sapiens
ttaattacccccaaatcggccaggcacgatggctcacgcctgtaatcctaaaaatataaaaataaaaatgacccaaatcacaaaaatacgagaaagcataattacgaaacgtaatgcttccaaattatgaaaatcttcggcctggcgtggcggaccacaaggtcaggcgttggagaccagcctggccaacatggtgaaatcccgtctctactaaaaatacaaaaataagccaggcgcggtggtacacgcctgtagtcccagctactcgggaggctgcggcaggagaattgcttgagcccagcaggcggaggttgcagtggtgcgatcaaataaaaagaaaaattgagaaaattcttaaaggcaaatgaggatccagaataaaactgtgtgcaattatattgagaacgacaatgtgcctactatgaggcagtaagataaacagtgggggtggcggtgcaccttcagaggctcgctgggtcgggcggcagcctgcgggtcccgaggtctccatggcccacttctggccca

SEQ ID NO: 142459 - DNA, 259 bp, Homo sapiens
ggggagttatttgcatgtgtgatagagaatgagtaggcttgctatttaaagagcccttactaatcaagagtgaaaaaggtgaagaaaatgggcaaatgaggatccagaataaaactgtgtgcaattatattgagaacgacaatgtgcctactatgaggcagtaagataaacagtgggggtggcggtgcaccttcagaggctcgctgggtcgggcggcagcctgcgggtcccgaggtctccatggcccacttctggccca

SEQ ID NO: 142460 - DNA, 1391 bp, Homo sapiens
ggccgccctgccgcgcgcacatgtaggcgttccgagcggcggcggaggtgagcgcacggacgagcgggagggacccttctccggcctgatgcgacccgattgtccgcagtgactacactcatggcaggtcccctgtggcggaccgcagcatttgtgcagagacacaggacaggcctcttggtgggttcctgtgcaggcctgtttggagttccagtctcgtaccacctcttcccggatcccgtggtccaatggctctaccagtactggcctcagggccagccagctccgctccctccacagctgcagagcctcttccaagaggtgctacaggacataggtgttccttcaggccattgctacaagcccttcaccaccttcaccttccagcctgtgagtgcaggcttcccaagactccctgctggggctgtggtgggcatccctgccagtttcttgggagacctagtgatcaacactaaccatcccgtggtcatacatgggcatacagtggactggcggagcccagcaggcgcccggctgagagcttccctgaccttgtcccgtgaagcccagaagttcgccttggccagggaagtggtgtacctggaaagcagtaccactgccgtgcacgccctgctggccccagcttgcctggcagggacctgggcactgggcgtgggtgccaagtacaccctggggctccatgcaggccccatgaatttacgggctgccttcagcttggtggcagcagtggcaggctttgtggcctacgccttctcccaggattctctcactcatgccgtggagtcctggctggaccgccgcacggcctccctctctgcagcctatgcctgtggtggagtggagttctatgagaagcttctgtcgggcaacctggccctgcgcagtctcttgggcaaagagggggagaagctgtatacacccagcgggaacatcgtccccagacacttgttccgaatcaaacatttaccctacaccacccgccgggactctgtgctgcagatgtggagggggatgctcaatccgggccgctcctgatgggctcatcacaaggacacttccagcttgtgcagacaccaccctgccattgagtctggagggccctgttggagcctttggacctatagctcaaggccagaaaaatcactggctttggaattaaatagcttagattgtactataaccactacttatgaactcagggactatgagggactattcaggggctatgaatctgagcctttgtttcttgaactgtaaagtggagatgatgtaaaccgccttgcaagattgtagagttgggtaaggtcatgaacataagggcctggcacaaagggtgcactgtaaataaacagacatccctccttaaaaat

SEQ ID NO: 142461 - DNA, 392 bp, Homo sapiens
ccttctgtctgtcggttactgtggtgcccatgaaaatgtgccactcagacctgctgcggagcggatttgactgacagccccagctgctgtttctctccgtccacccgtgctttgcctccacaggctgctttccaccagcgatggagcgtggggacagtactgctgcaagtggatcgtgggactcctccagtaggtgactgtggctcgagaactccccagtggcctgggcaagcctttctcagaactgctctgaagtctgaggcccatcctccccactcctccacagatgtcacacctgtactgtggtctgaaggatctccctgccttctatcccctccttctttgtccttcacaggcggttcccccaatatggctcttactcatgcaaaaaa

SEQ ID NO: 142462 - DNA, 678 bp, Homo sapiens
ggccgccctgccgcgcgcacatgtaggcgttccgagcggcggcggagattgtccgcagtgactacactcatggcaggtcccctgtggcggaccgcagcatttgtgcagagacacaggacaggcctcttggtgggttcctgtgcaggcctgtttggagttccagtctcgtaccacctcttcccggatcccgtggtccaatggctctaccagtactggcctcagggccagccagctccgctccctccacagctgcagagcctcttccaagaggtgctacaggacataggtgttccttcaggccattgctacaagcccttcaccaccttcaccttccagcctgaaagggaacatcacagaaaggtgaagaaatttgccctaaatcataaaactttgtaagtggcagaacaaggatttgaagctggcagtctggttccaggtatcgttcttaaaacactaaatttatactgtcctatttagcctgaaagtttcatggtgcagacttatactgtggactccatagcccttttcctcatgctgggttagaagtagctttttcaggctcactatttttattaggaaaaaatagtcactgagcagaacttccgaggagacccctccagctaactgaagagaaagggacaaccagcctaccatgtttagtgcagcagggggaacagg

SEQ ID NO: 142463 - DNA, 637 bp, Homo sapiens
ggccgccctgccgcgcgcacatgtaggcgttccgagcggcggcggaggaaagggaacatcacagaaaggtgaagaaatttgccctaaatcataaaactttgtaagtggcagaacaaggatttgaagctggcagtctggttccagagatggggttttactatgttacccaggctggtcttgaacttctgttctcaagagatccacacacctcagcctcccaaagtgctgggattacaggcgtgagtcacttcacctggcccatactgccttgagagcccctggagcagagaagcagctaacctgtgcctggattcctgacccacagaaacaagaagacaataaatccatgttgtagtaaaaaaaaaaagaaaaaacaaaaaacaaaaacaaaaaaaaaaaaacaaaaaacaacaaaacacacacacaaaaaaaaaagaaaaagacaaaacacaaaacacaccgagaggaggcgggcaggcggagcacgcggccaaagacaggcaagagaaaacaagaggaggaggaggagacggggcgaagaagagaggaagaagcgaggcagagcgcaagagggagagccgggaggagaagcgcgagggagtaaccaccggggggagcagagatcatcatcaggagg

SEQ ID NO: 142464 - DNA, 1732 bp, Homo sapiens
ggccgccctgccgcgcgcacatgtaggcgttccgagcggcggcggaggtgagcgcacggacgagcgggagggacccttctccggcctgatgcgacccggtaacgcgttcagactgcggagtagcctaggggcccagagtggaagcgtagcgaggacccctctgcggggctcctgcagcccctcctcccccagccaccggcgggctgcatggtactgtgttctaggcccaccccgcagcgcgatggccctagggacgttggactttggtccagacctttcctttcttagcctcactttccgcattgggaaaaaaaaaaagcccgaatgataatgattcttataggagttcttgattaagataggccaagcggtaccctgcgtttttgtttgcggcaactcattcgttgctcattaagcacttttcacggacaggaatacaattgtccgcagtgactacactcatggcaggtcccctgtggcggaccgcagcatttgtgcagagacacaggacaggcctcttggtgggttcctgtgcaggcctgtttggagttccagtctcgtaccacctcttcccggatcccgtggtccaatggctctaccagtactggcctcagggccagccagctccgctccctccacagctgcagagcctcttccaagaggtgctacaggacataggtgttccttcaggccattgctacaagcccttcaccaccttcaccttccagcctgtgagtgcaggcttcccaagactccctgctggggctgtggtgggcatccctgccagtttcttgggagacctagtgatcaacactaaccatcccgtggtcatacatgggcatacagtggactggcggagcccagcaggcgcccggctgagagcttccctgaccttgtcccgtgaagcccagaagttcgccttggccagggaagtggtgtacctggaaagcagtaccactgccgtgcacgccctgctggccccagcttgcctggcagggacctgggcactgggcgtgggtgccaagtacaccctggggctccatgcaggccccatgaatttacgggctgccttcagcttggtggcagcagtggcaggctttgtggcctacgccttctcccaggattctctcactcatgccgtggagtcctggctggaccgccgcacggcctccctctctgcagcctatgcctgtggtggagtggagttctatgagaagcttctgtcgggcaacctggccctgcgcagtctcttgggcaaagagggggagaagctgtatacacccagcgggaacatcgtccccagacacttgttccgaatcaaacatttaccctacaccacccgccgggactctgtgctgcagatgtggagggggatgctcaatccgggccgctcctgatgggctcatcacaaggacacttccagcttgtgcagacaccaccctgccattgagtctggagggccctgttggagcctttggacctatagctcaaggccagaaaaatcactggctttggaattaaatagcttagattgtactataaccactacttatgaactcagggactatgagggactattcaggggctatgaatctgagcctttgtttcttgaactgtaaagtggagatgatgtaaaccgccttgcaagattgtagagttgggtaaggtcatgaacataagggcctggcacaaagggtgcactgtaaataaacagacatccctccttaaaaat

SEQ ID NO: 142465 - DNA, 1465 bp, Homo sapiens
ggccgccctgccgcgcgcacatgtaggcgttccgagcggcggcggaggtgagcgcacggacgagcgggagggacccttctccggcctgatgcgacccggtaacgcgttcagactgcggagtagcctaggggcccagagtggaagcgtagcgaggacccctctgcggggctcctgcagcccctcctcccccagccaccggcgggctgcatggtactgtgttctaggcccaccccgcagcgcgatggccctagggacgttggactttggtccagacctttcctttcttagcctcactttccgcattgggaaaaaaaaaaagcccgaatgataatgattcttataggagttcttgattaagataggccaagcggtaccctgcgtttttgtttgcggcaactcattcgttgctcattaagcacttttcacggacaggaatacaattgtccgcagtgactacactcatggcaggtcccctgtggcggaccgcagcatttgtgcagagacacaggacaggcctcttggtgggttcctgtgcaggcctgtttggagttccagtctcgtaccacctcttcccggatcccgtggtccaatggctctaccagtactggcctcagggccagccagctccgctccctccacagctgcagagcctcttccaagaggtgctacaggacataggtgttccttcaggccattgctacaagcccttcaccaccttcaccttccagcctgaaagggaacatcacagaaaggtgaagaaatttgccctaaatcataaaactttgtaagtggcagaacaaggatttgaagctggcagtctggttccaggtatcgttcttaaaacactaaatttatactgtcctatttagcctgaaagtttcatggtgcagacttatactgtggactccatagcccttttcctcatgctgggttagaagtagctttttcaggctcactatttttattaggaaaaaatagtcactgacaaacagccagctaacagctggggcccttgggccacaaggcactgaatcctaccaagaaccgtgtgagcctggaatagaatccttccctactcaagctttcagatgagactgcatgtattaatccattctcatgctgctatgaagaaatacccaaaactgtgtgatttataaagaaaagaggtttaattaactcacagttccacatggctggggaggcctcaggaaacttacaatcatggcagaaagcaccttttcacagggcaacaggagagagaatgagtgtcagcagggaaaatggaagtagaaaatcatcagatctcttgagaactcactcgctatcatgagaacagcatggggaaaccatccccatgattcagttacctcctaccaggtccctcccgtgatacatagggattatgggattacaattcaagatgagatgtgggtggggacacaaagccaaatcatagcaccccagc

SEQ ID NO: 142466 - DNA, 799 bp, Homo sapiens
taagagaaatgccttcttcttgagaagaatttggaattgtcaaagaaaaacaattgaaaatgttgcacagaaatcctgtgcctttccaggaatgtcttctagataccggggccattgtctcaaccactgtttaccatctggctttttaacgtcaacaagtgaagacctgtgcacacaggagacagcatggtctgaccctcatagtgttttctttttctctagatgcaggtggacccagccacactggcaaagcgtacgtattctgggatcatctctttgtttaggtgtgaaatcttagtgttgtaaaggtagtgctgcttcacctgcttttgctcaagggccactctggtttgagctttctgccagaaatgagatttgggaattttggtttaaaaactactaagagtcacttcacctggcccatactgccttgagagcccctggagcagagaagcagctaacctgtgcctggattcctgacccacagaaacaagaagacaataaatccatgttgtagtaaaaaaaaaaagaaaaaacaaaaaacaaaaacaaaaaaaaaaaaacaaaaaacaacaaaacacacacacaaaaaaaaaagaaaaagacaaaacacaaaacacaccgagaggaggcgggcaggcggagcacgcggccaaagacaggcaagagaaaacaagaggaggaggaggagacggggcgaagaagagaggaagaagcgaggcagagcgcaagagggagagccgggaggagaagcgcgagggagtaaccaccggggggagcagagatcatcatcaggagg

SEQ ID NO: 142467 - DNA, 1219 bp, Homo sapiens
ggccgccctgccgcgcgcacatgtaggcgttccgagcggcggcggaggtgagcgcacggacgagcgggagggacccttctccggcctgatgcgacccggtaacgcgttcagactgcggagtagcctaggggcccagagtggaagcgtagcgaggacccctctgcggggctcctgcagcccctcctcccccagccaccggcgggctgcatggtactgtgttctaggcccaccccgcagcgcgatggccctagggacgttggactttggtccagacctttcctttcttagcctcactttccgcattgggaaaaaaaaaaagcccgaatgataatgattcttataggagttcttgattaagataggccaagcggtaccctgcgtttttgtttgcggcaactcattcgttgctcattaagcacttttcacggacaggaatacaattgtccgcagtgactacactcatggcaggtcccctgtggcggaccgcagcatttgtgcagagacacaggacaggcctcttggtgggttcctgtgcaggcctgtttggagttccagtctcgtaccacctcttcccggatcccgtggtccaatggctctaccagtactggcctcagggccagccagctccgctccctccacagctgcagagcctcttccaagaggtgctacaggacataggtgttccttcaggccattgctacaagcccttcaccaccttcaccttccagcctgaaagggaacatcacagaaaggtgaagaaatttgccctaaatcataaaactttgtaagtggcagaacaaggatttgaagctggcagtctggttccagagatggggttttactatgttacccaggctggtcttgaacttctgttctcaagagatccacacacctcagcctcccaaagtgctgggattacaggcgtgagtcacttcacctggcccatactggctgctttccaccagcgatggagcgtggggacagtactgctgcaagtggatcgtgggactcctccagtaggtgactgtggctcgagaactccccagtggcctgggcaagcctttctcagaactgctctgaagtctgaggcccatcctccccactcctccacagatgtcacacctgtactgtggtctgaaggatctccctgccttctatcccctccttctttgtccttcacaggcggttcccccaatatggctcttactcatgcaaaaaa

SEQ ID NO: 142468 - DNA, 959 bp, Homo sapiens
  misc_feature (779)..(779): n is a, c, g, or t
  misc_feature (783)..(783): n is a, c, g, or t
ggccgccctgccgcgcgcacatgtaggcgttccgagcggcggcggagattgtccgcagtgactacactcatggcaggtcccctgtggcggaccgcagcatttgtgcagagacacaggacaggcctcttggtgggttcctgtgcaggcctgtttggagttccagtctcgtaccacctcttcccggatcccgtggtccaatggctctaccagtactggcctcagggccagccagctccgctccctccacagctgcagagcctcttccaagaggtgctacaggacataggtgttccttcaggccattgctacaagcccttcaccaccttcaccttccagcctgtgagtgcaggcttcccaagactccctgctggggctgtggtgggcatccctgccagtttcttgggagacctagtgatcaacactaaccatcccgtggtcatacatgggcatacagtggactggcggagcccagcaggcgcccggctgagagcttccctgaccttgtcccgtgaagcccagaagttcgccttggccagggaagtggtgtacctggaaagcagtaccactgccgtgcacgccctgctggccccagcttgcctggcagggacctgggcactgggcgtgggtgccaagtacaccctggggctccatgcaggccccatgaatttacgggctgccttcagcttggtggcagcagtggcaggctttgtggcctacgccttctcccaggattctctcactcatgccgtggagtcctggctggaccgccgaggctcccntgancatgcgggggtggatggcctcaaaaagcgacgggaacggcgccaaacatggagaacggaacgggaacaacgggacggcacacgggcagaacttccaacaccggacggcgagggggagacgcggcaacgacacaaaggacaccaaagggcgcggagcaacgaaaagggaacaaggag

SEQ ID NO: 142469 - DNA, 1340 bp, Homo sapiens
ggccgccctgccgcgcgcacatgtaggcgttccgagcggcggcggagattgtccgcagtgactacactcatggcaggtcccctgtggcggaccgcagcatttgtgcagagacacaggacaggcctcttggtgggttcctgtgcaggcctgtttggagttccagtctcgtaccacctcttcccggatcccgtggtccaatggctctaccagtactggcctcagggccagccagctccgctccctccacagctgcagagcctcttccaagaggtgctacaggacataggtgttccttcaggccattgctacaagcccttcaccaccttcaccttccagcctgtgagtgcaggcttcccaagactccctgctggggctgtggtgggcatccctgccagtttcttgggagacctagtgatcaacactaaccatcccgtggtcatacatgggcatacagtggactggcggagcccagcaggcgcccggctgagagcttccctgaccttgtcccgtgaagcccagaagttcgccttggccagggaagtggtgtacctggaaagcagtaccactgccgtgcacgccctgctggccccagcttgcctggcagggacctgggcactgggcgtgggtgccaagtacaccctggggctccatgcaggccccatgaatttacgggctgccttcagcttggtggcagcagtggcaggctttgtggcctacgccttctcccaggattctctcactcatgccgtggagtcctggctggaccgccgcacggcctccctctctgcagcctatgcctgtggtggagtggagttctatgagaagcttctgtcgggcaacctggccctgcgcagtctcttgggcaaagagggggagaagctgtatacacccagcgggaacatcgtccccagacacttgttccgaatcaaacatttaccctacaccacccgccgggactctgtgctgcagatgtggagggggatgctcaatccgggccgctcctgatgggctcatcacaaggacacttccagcttgtgcagacaccaccctgccattgagtctggagggccctgttggagcctttggacctatagctcaaggccagaaaaatcactggctttggaattaaatagcttagattgtactataaccactacttatgaactcagggactatgagggactattcaggggctatgaatctgagcctttgtttcttgaactgtaaagtggagatgatgtaaaccgccttgcaagattgtagagttgggtaaggtcatgaacataagggcctggcacaaagggtgcactgtaaataaacagacatccctccttaaaaat

SEQ ID NO: 142470 - DNA, 1010 bp, Homo sapiens
  misc_feature (830)..(830): n is a, c, g, or t
  misc_feature (834)..(834): n is a, c, g, or t
ggccgccctgccgcgcgcacatgtaggcgttccgagcggcggcggaggtgagcgcacggacgagcgggagggacccttctccggcctgatgcgacccgattgtccgcagtgactacactcatggcaggtcccctgtggcggaccgcagcatttgtgcagagacacaggacaggcctcttggtgggttcctgtgcaggcctgtttggagttccagtctcgtaccacctcttcccggatcccgtggtccaatggctctaccagtactggcctcagggccagccagctccgctccctccacagctgcagagcctcttccaagaggtgctacaggacataggtgttccttcaggccattgctacaagcccttcaccaccttcaccttccagcctgtgagtgcaggcttcccaagactccctgctggggctgtggtgggcatccctgccagtttcttgggagacctagtgatcaacactaaccatcccgtggtcatacatgggcatacagtggactggcggagcccagcaggcgcccggctgagagcttccctgaccttgtcccgtgaagcccagaagttcgccttggccagggaagtggtgtacctggaaagcagtaccactgccgtgcacgccctgctggccccagcttgcctggcagggacctgggcactgggcgtgggtgccaagtacaccctggggctccatgcaggccccatgaatttacgggctgccttcagcttggtggcagcagtggcaggctttgtggcctacgccttctcccaggattctctcactcatgccgtggagtcctggctggaccgccgaggctcccntgancatgcgggggtggatggcctcaaaaagcgacgggaacggcgccaaacatggagaacggaacgggaacaacgggacggcacacgggcagaacttccaacaccggacggcgagggggagacgcggcaacgacacaaaggacaccaaagggcgcggagcaacgaaaagggaacaaggag

SEQ ID NO: 142471 - DNA, 1253 bp, Homo sapiens
ggccgccctgccgcgcgcacatgtaggcgttccgagcggcggcggaggtgagcgcacggacgagcgggagggacccttctccggcctgatgcgacccggtaacgcgttcagactgcggagtagcctaggggcccagagtggaagcgtagcgaggacccctctgcggggctcctgcagcccctcctcccccagccaccggcgggctgcatggtactgtgttctaggcccaccccgcagcgcgatggccctagggacgttggactttggtccagacctttcctttcttagcctcactttccgcattgggaaaaaaaaaaagcccgaatgataatgattcttataggagttcttgattaagataggccaagcggtaccctgcgtttttgtttgcggcaactcattcgttgctcattaagcacttttcacggacaggaatacaattgtccgcagtgactacactcatggcaggtcccctgtggcggaccgcagcatttgtgcagagacacaggacaggcctcttggtgggttcctgtgcaggcctgtttggagttccagtctcgtaccacctcttcccggatcccgtggtccaatggctctaccagtactggcctcagggccagccagctccgctccctccacagctgcagagcctcttccaagaggtgctacaggacataggtgttccttcaggccattgctacaagcccttcaccaccttcaccttccagcctgaaagggaacatcacagaaaggtgaagaaatttgccctaaatcataaaactttgtaagtggcagaacaaggatttgaagctggcagtctggttccagagatggggttttactatgttacccaggctggtcttgaacttctgttctcaagagatccacacacctcagcctcccaaagtgctgggattacaggcgtgagtcacttcacctggcccatactggtaattttaaaatactaaagcattaagtgttagtaaggttgtagtaaaattgatacaagcatatgcccttggtgacatttgtgttaggcagcttttaagatgaccctaatgatccctggtcctaatatttttggccctggttcataatccactccccttgctcctcttggttctaaacaatagaatacagatatacattgagggtatatcacctcagtgattagattacaacagattatgacttctgtcttgctaagaggcccttgtcttcttggcttcacatgttttatcttgaagcacgtt

SEQ ID NO: 142472 - DNA, 533 bp, Homo sapiens
ttcatttaggccaattatactaaactgttttaccccaaacattaaaccaatcccaaaaaagtcacataaagtgtgaagaaactgttgcttacaaatgaattgttactttttttttttgcatcccttcatttatagcaaagcaaatttatcaactgcactttatagtttaaattccttgttttgtgggcttgagttctgtttacaaaatgatgaacaggaatagaggctcatgaagtcctaaaaattagaatctaaaatgtaactataacacgcatatttggttaacttctaaattaccaagaaaaggtggagaaaaaagactgagttcactattggaaacaagtatttcagtttttaataaataatgcaataactctgaattcagcaggaatagacccttcaagaaacactgctacaatatcctgctatagtaagccaattacacctttctctaatattttgcaatgtaaaaatttactcacaaataatcagtcattaaaccatcatcaatctgcctaaataaggtaccagac

SEQ ID NO: 142473 - DNA, 396 bp, Homo sapiens
attatattacccatttaccataggtgtgagtggcagtctgaatggagaagttccatagttctgattgcagatcctatgcaggagagatagtaaggaaaataatctttgtctcctggattaagctgaggctggcaaagagaggaatgtcccaagccttctaccaaccagcagaatgcattatgttgtgctggatgctggtctgcttgccaaacatgtggaactggccccgtatatgtgtatcaacccaaaccaggagatacttaaatttatgaacacggggtatatgagtaaagtcaatttgccaatcttgtgtcagagtaaatccaagagcctgatgcgtaggaaagcaaggagtcctgagagaaccttaggggttggtgacaagcagtcagagca

SEQ ID NO: 142474 - DNA, 482 bp, Homo sapiens
cgatacctcagatggtagagaacagtgaacttgtatgctaaagatctgagggctgtgaatattttagttcatccacttgacttttgatgttaattttaatttcgtcagattgtacatttattttgatacaatactttaaaaaattttacttataaatgagctagagaagctccgtcatgctttgagtttgtgttattgaacacaaaggagacctaagaggcaatatacctctaggtagatagagcaggtctgtcctcgtaccaaattgacaactcagaatatctgcagatgatgggacactggtgtcaactgtgtaaatggtaacacaccgttattttgctgtagtgactcaaagcagtaatagtatatgatatcctggatcagtgcttctcacatttttctgctgagatacccctgatggtagagaacagtgaacttgtatgctaaaggtctgaggcagagggtagagtagttggctgata

SEQ ID NO: 142475 - DNA, 1009 bp, Homo sapiens
ctgcaccgccgccgcgccccattgggccgggtgctggggcatcccgggcgctgggtgccccgagcggctacgacgagtcccaggtggggccgggctccaggcccgcgggggagcggagccgtgcgccgcaggcgggctccgtgacgccgggtggggaacgccgggccggtggcgggacttccgccacgggactcggaaggggccgcgccgccgctgctgggagttgtagtccggccgtggttgggggagccgcggctcatgcgcggtgcacagaggcttgtttcacatctgtaacaacaggaggaggcccagcctcgtgatgaggaatagcaaggagagaattcagctccagttcaaaagcctacaaaatctgagactgtcattgcttttataaggattccagctttccctcctggccagaaatgttcagcctggactcattcagaaaagcatccctggatgtgaatgaggaccctccttaaacaggaatggagaggttgagctggtcatttccaaccttagcttcaaggcagaactggaattagtttcaaaataaaccttgatcctaggcacttagttctagaagatcctacaagcacgtctgctgtaactctatgtatgttttctgtaaaatcacatacctataaaataaaaagaaaaaaatcacacatctataatattataagagagcttatgggaaaaatagaattgggccaatgcaactgcaactttttgaccaaaatatgacaaaaaacaattattggtgcttgggaagatgctttggactacctagacaggcagctcagggtgatgtgatgctgcaaatgtacaaagagccgtcttcttttttttttttttttttttaagacggagtcttgttctgtggccaggctggagtgcaatggcgcgatctcggctcactgcatcctccgcctcccgggttcaagtcattctcgtgcctcagcctcctgagtagctgggactacaggcacacgccaccatgccctgc

SEQ ID NO: 142476 - DNA, 4109 bp, Homo sapiens
ctgcaccgccgccgcgccccattgggccgggtgctggggcatcccgggcgctgggtgccccgagcggctacgacgagtcccaggtggggccgggctccaggcccgcgggggagcggagccgtgcgccgcaggcgggctccgtgacgccgggtggggaacgccgggccggtggcgggacttccgccacgggactcggaaggggccgcgccgccgctgctgggagttgtagtccggccgtggttgggggagccgcggctcatgcgcggtgcacagaggcttgtttcacatctgtaacaacaggaggaggcccagcctcgtgatgaggaatagcaaggagagaattcagctccagttcaaaagcctacaaaatctgagactgtcattgcttttataaggattccagctttccctcctggccagaaatgttcagcctggactcattcagaaaagatcgggcccagcacaggcagcgtcagtgcaaacttcccccaccccgccttccacccatgtgtgtcaaccctaccccaggagggaccatctctcgaggctgaacgttaacatttccaacatggcagcttctagggacctattaaaagagttcccacagcccaaaaatcttctcaacagtgtgattggaagagccctcggcatctcacatgcaaaagacaaactagtctacgtgcacacaaatggaccgaagaaaaagaaagtcacactgcacataaaatggcccaagagcgtggaggtagaaggctatggcagcaagaagatcgatgctgagcggcaggctgcagctgcagcctgccagctgttcaagggttggggtctgctaggtccccggaatgagttgtttgacgcagccaaataccgagtgctagctgatcgctttggctcccctgccgacagctggtggcgtccggaacccaccatgccccctacttcctggcggcagctgaatccagagagtattcgaccagggggacctgggggcctatcccgctctttaggccgggaagaagaggaggacgaggaggaagagctagaagaagggaccatagatgttaccgacttcttgtccatgacccagcaggattcccacgctccactcagggactcaagggggagttcctttgagatgacagatgacgacagtgccattagggctctgacccagtttccacttcccaagaaccttctggccaaggtgattcagattgcaacgtcatcctccacagctaagaacctcatgcagttccatactgtgggcaccaagaccaagctgtctacactcaccctgctctggccctgccccatgacctttgttgccaaagggcgccgcaaagcagaggctgagaataaggcggcagccttggcctgcaagaaactgaagagcctgggcctggtggacaggaacaacgaaccgcttacacacgccatgtataacctggcctctttgcgtgagctgggtgagacccagcgccgaccatgcaccatccaggtgcccgagcccatcctccgcaagatagagaccttcctgaaccattaccctgtggagagttcatggatcgccccagaactccggctgcagagtgatgacatcttgcccttgggcaaggactcagggcctctgagtgaccctatcacaggcaagccctatgtgcccctgttggaagcagaggaggtacgtctcagccagagtctgctagaactgtggcggcggcgagggccggtctggcaggaggccccccagctacctgtggacccacatcgggacaccatcctcaacgccattgagcagcacccggtggtggtcatctctggggacacgggctgtgggaagaccacgcgcatcccccagctgttgctggagcgctatgtgaccgagggccgaggtgcccgctgcaatgttatcatcacccaacctcgccgcatctctgctgtgtctgtggcacagcgggtcagccacgaactgggcccctccctgcgccggaatgtgggcttccaggtgcggttggaaagtaagcccccatcccgaggcggggccctgctcttctgcactgtgggtatcctgctgcgtaagctgcagagcaaccccagcctggagggcgtgagccacgtcatcgtggatgaggtgcatgagcgggacgtgaacacagactttctgctgatcctgctcaagggcctgcagcggctcaacccggccctgcggctggtgctcatgagtgccacaggggacaatgagcgcttctcccgatactttggtggctgccccgtcatcaaggtgcctggcttcatgtacccagtcaaggagcactacctagaggacatcctggccaagttgggcaagcaccagtacctgcaccggcaccggcaccatgagtctgaggatgaatgcgcactcgatttggaccttgtgactgatctggttctgcacatcgatgctcgcggggaaccaggtgggatcctgtgcttcctgcctgggtggcaggagatcaaaggagtgcagcagcgcctccaggaggccctgggcatgcacgagagcaagtacctcatcctgccagtgcactccaacatccccatgatggatcagaaggccatattccagcagcctccagttggggtgcgcaagattgtcttggccaccaacattgctgagacttccatcacaatcaatgacatcgtgcatgtggtggacagtgggctgcacaaggaagaacgctatgacctgaagaccaaggtgtcctgcctggagacagtgtgggtatcaagagccaatgtgatccagcgccggggccgggcgggccgctgccagtccggctttgcctaccacttgttccctcgaagccggctggagaaaatggtccctttccaagtgccagagatcctgcgcacacctcttgagaacctggtgctgcaagcgaaaatccacatgcctgagaagacggcggtggagttcctgtccaaggctgtggacagtccaaacatcaaggcagtggacgaggctgtgatcttgctccaggagatcggggtgctggaccagcgggagtacctgactaccctggggcagcgcctggctcacatctccaccgacccccggttggccaaggccattgtgttggctgccatcttccgttgcctgcacccactactggtggtcgtttcctgcctcacccgggaccccttcagcagcagcctacagaaccgggcagaggtggacaaggtgaaagcactgttgagccatgacagcggcagtgaccacctggcctttgtgcgggctgtcgccggctgggaggaggtgctgcgttggcaggaccgcagctcccgggagaattacctggaggaaaacctgctgtacgcacccagcctgcgcttcatccacggactcatcaagcagttctcagagaacatttatgaggccttcctggtggggaagccctcggactgcaccctggcctccgcccagtgcaacgagtacagtgaggaggaggagctggtgaagggcgtgctgatggccggcctctaccccaacctcatccaggtgaggcagggcaaggtcacccggcaggggaagttcaagcccaacagcgtcacatataggaccaaatcaggcaacatcctgctgcacaagtcgaccattaacagggaggccacacggttacggagccgatggctgacgtatttcatggcagtcaagtccaatggcagcgtcttcgtccgggactcctctcaggtgcacccgctagctgtgctgctgctgaccgacggggacgtgcacatccgtgatgacgggcgccgggccaccatctcactgagcgacagtgacctgctgcggctggagggtgactcgcgtaccgtgcggctgctgaaggagctgcggcgggccctgggccgcatggtggagcggagcctgcgcagcgagctggctgcacttccccccagcgtacaggaggagcacgggcagctgcttgcgctactggcagagctgctgcgaggaccctgtggcagctttgatgtgcgcaagacagctgacgactgagccctgcttctgctggggctgtgtacagagtgcaaatgtttatttaaaataaagttctatttatcccttgtga

SEQ ID NO: 142477 - DNA, 632 bp, Homo sapiens
gagaactagtctcgagactagttctctctctctggccggcctctaccccaacctcatccaggtgaggcagggcaaggtcacccggcaggggaagttcaagcccaacagcgtcacatataggaccaaatcaggcaacatcctgctgcacaagtcgaccattaacagggaggccacacggttacggagccgatggctgacgtatttcatggcagtcaagtccaatggcagcgtcttcgtccgggactcctctcaggtgcacccgctagctgtgctgctgctgaccgacggggacgtgcacatccgtgatgacgggcgccgggccaccatctcactgagcgacagtgacctgctgcggctggagggtgactcgcgtaccgtgcggctgctgaaggagctgcggcgggccctgggccgcatggtggagcggagcctgcgcagcgagctggctgcacttccccccagcgtacaggaggagcacgggcagctgcttgcgctactggcagagctgctgcgaggaccctgtggcagctttgatgtgcgcaagacagctgacgactgagccctgcttctgctggggctgtgtacagagtgcaaatgtttatttaaaataaagttctatttatcccttgtga

SEQ ID NO: 142478 - DNA, 4590 bp, Homo sapiens
ctgcaccgccgccgcgccccattgggccgggtgctggggcatcccgggcgctgggtgccccgagcggctacgacgagtcccaggtggggccgggctccaggcccgcgggggagcggagccgtgcgccgcaggcgggctccgtgacgccgggtggggaacgccgggccggtggcgggacttccgccacgggactcggaaggggccgcgccgccgctgctgggagttgtagtccggccgtggttgggggagccgcggctcatgcgcggtgcacagaggcttgtttcacatctgtaacaacaggaggaggcccagcctcgtgatgaggaatagcaaggagagaattcagctccagttcaaaagcctacaaaatctgagactgtcattgcttttataaggattccagctttccctcctggccagaaatgttcagcctggactcattcagaaaagatcgggcccagcacaggcagcgtcagtgcaaacttcccccaccccgccttccacccatgtgtgtcaaccctaccccaggagggaccatctctcgaggctgaacgttaacatttccaacatggcagcctcattccatcttcctgccttccatccacacgactgctggtttagatttgctggagagtgagctctgcagggtcctagccctgggcagcgccgagcccgcctactgaaggcccagggctgtggtgagcgaggacgggctgctgatgccctcgcctaggcttgggcttcgggtccgcccggcccgcagggggcgcgcggcgctcgggccggccgctcccgttctcttcgcccggtccctgccgcgcacaggcctcggggtcggcgggagcacgatggcggccgctaggagactcatggcgctggccgccggcatctctccgcgcctgcagccgctgggtccccgcgctgctgggcgacagggtcgctcgcgcggcttctcttcaagctgcgcccaccccgaccacaccaaggaagccgccgaggccgagtcagggatggcccccggcgggcctggggaaggcgacggaagcttggtgaacgcttctagggacctattaaaagagttcccacagcccaaaaatcttctcaacagtgtgattggaagagccctcggcatctcacatgcaaaagacaaactagtctacgtgcacacaaatggaccgaagaaaaagaaagtcacactgcacataaaatggcccaagagcgtggaggtagaaggctatggcagcaagaagatcgatgctgagcggcaggctgcagctgcagcctgccagctgttcaagggttggggtctgctaggtccccggaatgagttgtttgacgcagccaaataccgagtgctagctgatcgctttggctcccctgccgacagctggtggcgtccggaacccaccatgccccctacttcctggcggcagctgaatccagagagtattcgaccagggggacctgggggcctatcccgctctttaggccgggaagaagaggaggacgaggaggaagagctagaagaagggaccatagatgttaccgacttcttgtccatgacccagcaggattcccacgctccactcagggactcaagggggagttcctttgagatgacagatgacgacagtgccattagggctctgacccagtttccacttcccaagaaccttctggccaaggtgattcagattgcaacgtcatcctccacagctaagaacctcatgcagttccatactgtgggcaccaagaccaagctgtctacactcaccctgctctggccctgccccatgacctttgttgccaaagggcgccgcaaagcagaggctgagaataaggcggcagccttggcctgcaagaaactgaagagcctgggcctggtggacaggaacaacgaaccgcttacacacgccatgtataacctggcctctttgcgtgagctgggtgagacccagcgccgaccatgcaccatccaggtgcccgagcccatcctccgcaagatagagaccttcctgaaccattaccctgtggagagttcatggatcgccccagaactccggctgcagagtgatgacatcttgcccttgggcaaggactcagggcctctgagtgaccctatcacaggcaagccctatgtgcccctgttggaagcagaggaggtacgtctcagccagagtctgctagaactgtggcggcggcgagggccggtctggcaggaggccccccagctacctgtggacccacatcgggacaccatcctcaacgccattgagcagcacccggtggtggtcatctctggggacacgggctgtgggaagaccacgcgcatcccccagctgttgctggagcgctatgtgaccgagggccgaggtgcccgctgcaatgttatcatcacccaacctcgccgcatctctgctgtgtctgtggcacagcgggtcagccacgaactgggcccctccctgcgccggaatgtgggcttccaggtgcggttggaaagtaagcccccatcccgaggcggggccctgctcttctgcactgtgggtatcctgctgcgtaagctgcagagcaaccccagcctggagggcgtgagccacgtcatcgtggatgaggtgcatgagcgggacgtgaacacagactttctgctgatcctgctcaagggcctgcagcggctcaacccggccctgcggctggtgctcatgagtgccacaggggacaatgagcgcttctcccgatactttggtggctgccccgtcatcaaggtgcctggcttcatgtacccagtcaaggagcactacctagaggacatcctggccaagttgggcaagcaccagtacctgcaccggcaccggcaccatgagtctgaggatgaatgcgcactcgatttggaccttgtgactgatctggttctgcacatcgatgctcgcggggaaccaggtgggatcctgtgcttcctgcctgggtggcaggagatcaaaggagtgcagcagcgcctccaggaggccctgggcatgcacgagagcaagtacctcatcctgccagtgcactccaacatccccatgatggatcagaaggccatattccagcagcctccagttggggtgcgcaagattgtcttggccaccaacattgctgagacttccatcacaatcaatgacatcgtgcatgtggtggacagtgggctgcacaaggaagaacgctatgacctgaagaccaaggtgtcctgcctggagacagtgtgggtatcaagagccaatgtgatccagcgccggggccgggcgggccgctgccagtccggctttgcctaccacttgttccctcgaagccggctggagaaaatggtccctttccaagtgccagagatcctgcgcacacctcttgagaacctggtgctgcaagcgaaaatccacatgcctgagaagacggcggtggagttcctgtccaaggctgtggacagtccaaacatcaaggcagtggacgaggctgtgatcttgctccaggagatcggggtgctggaccagcgggagtacctgactaccctggggcagcgcctggctcacatctccaccgacccccggttggccaaggccattgtgttggctgccatcttccgttgcctgcacccactactggtggtcgtttcctgcctcacccgggaccccttcagcagcagcctacagaaccgggcagaggtggacaaggtgaaagcactgttgagccatgacagcggcagtgaccacctggcctttgtgcgggctgtcgccggctgggaggaggtgctgcgttggcaggaccgcagctcccgggagaattacctggaggaaaacctgctgtacgcacccagcctgcgcttcatccacggactcatcaagcagttctcagagaacatttatgaggccttcctggtggggaagccctcggactgcaccctggcctccgcccagtgcaacgagtacagtgaggaggaggagctggtgaagggcgtgctgatggccggcctctaccccaacctcatccaggtgaggcagggcaaggtcacccggcaggggaagttcaagcccaacagcgtcacatataggaccaaatcaggcaacatcctgctgcacaagtcgaccattaacagggaggccacacggttacggagccgatggctgacgtatttcatggcagtcaagtccaatggcagcgtcttcgtccgggactcctctcaggtgcacccgctagctgtgctgctgctgaccgacggggacgtgcacatccgtgatgacgggcgccgggccaccatctcactgagcgacagtgacctgctgcggctggagggtgactcgcgtaccgtgcggctgctgaaggagctgcggcgggccctgggccgcatggtggagcggagcctgcgcagcgagctggctgcacttccccccagcgtacaggaggagcacgggcagctgcttgcgctactggcagagctgctgcgaggaccctgtggcagctttgatgtgcgcaagacagctgacgactgagccctgcttctgctggggctgtgtacagagtgcaaatgtttatttaaaataaagttctatttatcccttgtga

SEQ ID NO: 142479 - DNA, 4725 bp, Homo sapiens
ctgcaccgccgccgcgccccattgggccgggtgctggggcatcccgggcgctgggtgccccgagcggctacgacgagtcccaggtggggccgggctccaggcccgcgggggagcggagccgtgcgccgcaggcgggctccgtgacgccgggtggggaacgccgggccggtggcgggacttccgccacgggactcggaaggggccgcgccgccgctgctgggagttgtagtccggccgtggttgggggagccgcggctcatgcgcggtgcacagaggcttgtttcacatctgtaacaacaggaggaggcccagcctcgtgatgaggaatagcaaggagagaattcagctccagttcaaaagcctacaaaatctgagactgtcattgcttttataaggattccagctttccctcctggccagaaatgttcagcctggactcattcagaaaagatcgggcccagcacaggcagcgtcagtgcaaacttcccccaccccgccttccacccatgtgtgtcaaccctaccccaggagggaccatctctcgaggctgaacgttaacatttccaacatggcaggcaggggtctggatttggtctgcaggctgtagttttccaactcctgctctagaccagtgaggagaagaacacagaagcagaagagttccaagagctgctgtaaagagttgcccttatcttacaagagtcattgagcctcattccatcttcctgccttccatccacacgactgctggtttagatttgctggagagtgagctctgcagggtcctagccctgggcagcgccgagcccgcctactgaaggcccagggctgtggtgagcgaggacgggctgctgatgccctcgcctaggcttgggcttcgggtccgcccggcccgcagggggcgcgcggcgctcgggccggccgctcccgttctcttcgcccggtccctgccgcgcacaggcctcggggtcggcgggagcacgatggcggccgctaggagactcatggcgctggccgccggcatctctccgcgcctgcagccgctgggtccccgcgctgctgggcgacagggtcgctcgcgcggcttctcttcaagctgcgcccaccccgaccacaccaaggaagccgccgaggccgagtcagggatggcccccggcgggcctggggaaggcgacggaagcttggtgaacgcttctagggacctattaaaagagttcccacagcccaaaaatcttctcaacagtgtgattggaagagccctcggcatctcacatgcaaaagacaaactagtctacgtgcacacaaatggaccgaagaaaaagaaagtcacactgcacataaaatggcccaagagcgtggaggtagaaggctatggcagcaagaagatcgatgctgagcggcaggctgcagctgcagcctgccagctgttcaagggttggggtctgctaggtccccggaatgagttgtttgacgcagccaaataccgagtgctagctgatcgctttggctcccctgccgacagctggtggcgtccggaacccaccatgccccctacttcctggcggcagctgaatccagagagtattcgaccagggggacctgggggcctatcccgctctttaggccgggaagaagaggaggacgaggaggaagagctagaagaagggaccatagatgttaccgacttcttgtccatgacccagcaggattcccacgctccactcagggactcaagggggagttcctttgagatgacagatgacgacagtgccattagggctctgacccagtttccacttcccaagaaccttctggccaaggtgattcagattgcaacgtcatcctccacagctaagaacctcatgcagttccatactgtgggcaccaagaccaagctgtctacactcaccctgctctggccctgccccatgacctttgttgccaaagggcgccgcaaagcagaggctgagaataaggcggcagccttggcctgcaagaaactgaagagcctgggcctggtggacaggaacaacgaaccgcttacacacgccatgtataacctggcctctttgcgtgagctgggtgagacccagcgccgaccatgcaccatccaggtgcccgagcccatcctccgcaagatagagaccttcctgaaccattaccctgtggagagttcatggatcgccccagaactccggctgcagagtgatgacatcttgcccttgggcaaggactcagggcctctgagtgaccctatcacaggcaagccctatgtgcccctgttggaagcagaggaggtacgtctcagccagagtctgctagaactgtggcggcggcgagggccggtctggcaggaggccccccagctacctgtggacccacatcgggacaccatcctcaacgccattgagcagcacccggtggtggtcatctctggggacacgggctgtgggaagaccacgcgcatcccccagctgttgctggagcgctatgtgaccgagggccgaggtgcccgctgcaatgttatcatcacccaacctcgccgcatctctgctgtgtctgtggcacagcgggtcagccacgaactgggcccctccctgcgccggaatgtgggcttccaggtgcggttggaaagtaagcccccatcccgaggcggggccctgctcttctgcactgtgggtatcctgctgcgtaagctgcagagcaaccccagcctggagggcgtgagccacgtcatcgtggatgaggtgcatgagcgggacgtgaacacagactttctgctgatcctgctcaagggcctgcagcggctcaacccggccctgcggctggtgctcatgagtgccacaggggacaatgagcgcttctcccgatactttggtggctgccccgtcatcaaggtgcctggcttcatgtacccagtcaaggagcactacctagaggacatcctggccaagttgggcaagcaccagtacctgcaccggcaccggcaccatgagtctgaggatgaatgcgcactcgatttggaccttgtgactgatctggttctgcacatcgatgctcgcggggaaccaggtgggatcctgtgcttcctgcctgggtggcaggagatcaaaggagtgcagcagcgcctccaggaggccctgggcatgcacgagagcaagtacctcatcctgccagtgcactccaacatccccatgatggatcagaaggccatattccagcagcctccagttggggtgcgcaagattgtcttggccaccaacattgctgagacttccatcacaatcaatgacatcgtgcatgtggtggacagtgggctgcacaaggaagaacgctatgacctgaagaccaaggtgtcctgcctggagacagtgtgggtatcaagagccaatgtgatccagcgccggggccgggcgggccgctgccagtccggctttgcctaccacttgttccctcgaagccggctggagaaaatggtccctttccaagtgccagagatcctgcgcacacctcttgagaacctggtgctgcaagcgaaaatccacatgcctgagaagacggcggtggagttcctgtccaaggctgtggacagtccaaacatcaaggcagtggacgaggctgtgatcttgctccaggagatcggggtgctggaccagcgggagtacctgactaccctggggcagcgcctggctcacatctccaccgacccccggttggccaaggccattgtgttggctgccatcttccgttgcctgcacccactactggtggtcgtttcctgcctcacccgggaccccttcagcagcagcctacagaaccgggcagaggtggacaaggtgaaagcactgttgagccatgacagcggcagtgaccacctggcctttgtgcgggctgtcgccggctgggaggaggtgctgcgttggcaggaccgcagctcccgggagaattacctggaggaaaacctgctgtacgcacccagcctgcgcttcatccacggactcatcaagcagttctcagagaacatttatgaggccttcctggtggggaagccctcggactgcaccctggcctccgcccagtgcaacgagtacagtgaggaggaggagctggtgaagggcgtgctgatggccggcctctaccccaacctcatccaggtgaggcagggcaaggtcacccggcaggggaagttcaagcccaacagcgtcacatataggaccaaatcaggcaacatcctgctgcacaagtcgaccattaacagggaggccacacggttacggagccgatggctgacgtatttcatggcagtcaagtccaatggcagcgtcttcgtccgggactcctctcaggtgcacccgctagctgtgctgctgctgaccgacggggacgtgcacatccgtgatgacgggcgccgggccaccatctcactgagcgacagtgacctgctgcggctggagggtgactcgcgtaccgtgcggctgctgaaggagctgcggcgggccctgggccgcatggtggagcggagcctgcgcagcgagctggctgcacttccccccagcgtacaggaggagcacgggcagctgcttgcgctactggcagagctgctgcgaggaccctgtggcagctttgatgtgcgcaagacagctgacgactgagccctgcttctgctggggctgtgtacagagtgcaaatgtttatttaaaataaagttctatttatcccttgtga

SEQ ID NO: 142480 - DNA, 4894 bp, Homo sapiens
ctgcaccgccgccgcgccccattgggccgggtgctggggcatcccgggcgctgggtgccccgagcggctacgacgagtcccaggtggggccgggctccaggcccgcgggggagcggagccgtgcgccgcaggcgggctccgtgacgccgggtggggaacgccgggccggtggcgggacttccgccacgggactcggaaggggccgcgccgccgctgctgggagttgtagtccggccgtggttgggggagccgcggctcatgcgcggtgcacagaggcttgtttcacatctgtaacaacaggaggaggcccagcctcgtgatgaggaatagcaaggagagaattcagctccagttcaaaagcctacaaaatctgagactgtcattgcttttataaggattccagctttccctcctggccagaaatgttcagcctggactcattcagaaaagatcgggcccagcacaggcagcgtcagtgcaaacttcccccaccccgccttccacccatgtgtgtcaaccctaccccaggagggaccatctctcgaggctgaacgttaacatttccaacatggcagcctcattccatcttcctgccttccatccacacgactgctggtttagatttgctggagagtgagctctgcagggtcctagccctgggcagcgccgagcccgcctactgaaggcccagggctgtggtgagcgaggacgggctgctgatgccctcgcctaggcttgggcttcgggtccgcccggcccgcagggggcgcgcggcgctcgggccggccgctcccgttctcttcgcccggtccctgccgcgcacaggcctcggggtcggcgggagcacgatggcggccgctaggagactcatggcgctggccgccggcatctctccgcgcctgcagccgctgggtccccgcgctgctgggcgacagggtcgctcgcgcggcttctcttcaagctgcgcccaccccgaccacaccaaggaagccgccgaggccgagtcagggatggcccccggcgggcctggggaaggcgacggaagcttggtgaacgcttctagggacctattaaaagagttcccacagcccaaaaatcttctcaacagtgtgattggaagagccctcggcatctcacatgcaaaagacaaactagtctacgtgcacacaaatggaccgaagaaaaagaaagtcacactgcacataaaatggcccaagagcgtggaggtagaaggctatggcagcaagaagatcgatgctgagcggcaggctgcagctgcagcctgccagctgttcaagggttggggtctgctaggtccccggaatgagttgtttgacgcagccaaataccgagtgctagctgatcgctttggctcccctgccgacagctggtggcgtccggaacccaccatgccccctacttcctggcggcagctgaatccagagagtattcgaccagggggacctgggggcctatcccgctctttaggccgggaagaagaggaggacgaggaggaagagctagaagaagggaccatagatgttaccgacttcttgtccatgacccagcaggattcccacgctccactcagggactcaagggggagttcctttgagatgacagatgacgacagtgccattagggctctgacccagtttccacttcccaagaaccttctggccaaggtgattcagattgcaacgtcatcctccacagctaagaacctcatgcagttccatactgtgggcaccaagaccaagctgtctacactcaccctgctctggccctgccccatgacctttgttgccaaagggcgccgcaaagcagaggctgagaataaggcggcagccttggcctgcaagaaactgaagagcctgggcctggtggacaggaacaacgaaccgcttacacacgccatgtataacctggcctctttgcgtgagctgggtgagacccagcgccgaccatgcaccatccaggtgcccgagcccatcctccgcaagatagagaccttcctgaaccattaccctgtggagagttcatggatcgccccagaactccggctgcagagtgatgacatcttgcccttgggcaaggactcagggcctctgagtgaccctatcacaggcaagccctatgtgcccctgttggaagcagaggaggtacgtctcagccagagtctgctagaactgtggcggcggcgagggccggtctggcaggaggccccccagctacctgtggacccacatcgggacaccatcctcaacgccattgagcagcacccggtggtggtcatctctggggacacgggctgtgggaagaccacgcgcatcccccagctgttgctggagcgctatgtgaccgagggccgaggtgcccgctgcaatgttatcatcacccaacctcgccgcatctctgctgtgtctgtggcacagcgggtcagccacgaactgggcccctccctgcgccggaatgtgggcttccaggtgcggttggaaagtaagcccccatcccgaggcggggccctgctcttctgcactgtgggtatcctgctgcgtaagctgcagagcaaccccagcctggagggcgtgagccacgtcatcgtggatgaggtgcatgagcgggacgtgaacacagactttctgctgatcctgctcaagggcctgcagcggctcaacccggccctgcggctggtgctcatgagtgccacaggggacaatgagcgcttctcccgatactttggtggctgccccgtcatcaaggtgcctggcttcatgtacccagtcaaggagcactacctagaggacatcctggccaagttgggcaagcaccagtacctgcaccggcaccggcaccatgagtctgaggatgaatgcgcactcgatttggaccttgtgactgatctggttctgcacatcgatgctcgcggggaaccaggtgggatcctgtgcttcctgcctgggtggcaggagatcaaaggagtgcagcagcgcctccaggaggccctgggcatgcacgagagcaagtacctcatcctgccagtgcactccaacatccccatgatggatcagaaggccatattccagcagcctccagttggggtgcgcaagattgtcttggccaccaacattgctgagacttccatcacaatcaatgacatcgtgcatgtggtggacagtgggctgcacaaggaagaacgctatgacctgaagaccaaggtgtcctgcctggagacagtgtgggtatcaagagccaatgtgatccagcgccggggccgggcgggccgctgccagtccggctttgcctaccacttgttccctcgaagccggctggagaaaatggtccctttccaagtgccagagatcctgcgcacacctcttgagaacctggtgctgcaagcgaaaatccacatgcctgagaagacggcggtggagttcctgtccaaggctgtggacagtccaaacatcaaggcagtggacgaggctgtgatcttgctccaggagatcggggtgctggaccagcgggagtacctgactaccctggggcagcgcctggctcacatctccaccgacccccggttggccaaggccattgtgttggctgccatcttccgttgcctgcacccactactggtggtcgtttcctgcctcacccgggaccccttcagcagcagcctacagaaccgggcagaggtggacaaggtgaaagcactgttgagccatgacagcggcagtgaccacctggcctttgtgcgggctgtcgccggctgggaggaggtgctgcgttggcaggaccgcagctcccgggagaattacctggaggaaaacctgctgtacgcacccagcctgcgcttcatccacggactcatcaagcagttctcagagaacatttatgaggccttcctggtggggaagccctcggactgcaccctggcctccgcccagtgcaacgagtacagtgaggaggaggagctggtgaagggcgtgctgatggccggcctctaccccaacctcatccaggtgaggcagggcaaggtcacccggcaggggaagttcaagcccaacagcgtcacatataggaccaaatcaggcaacatcctgctgcacaagtcgaccattaacagggaggccacacggttacggagccgatggctgacgtatttcatggcagtcaagtccaatggcagcgtcttcgtccgggactcctctcaggtgcacccgctagctgtgctgctgctgaccgacggggacgtgcacatccgtgatgacgggcgccgggccaccatctcactgagcgacagtgacctgctgcggctggagggtgactcgcgtaccgtgcggctgctgaaggagctgcggcgggccctgggccgcatggtggagcggagcctgcgcagcgagctggctgcacttccccccagcgtacaggaggagcacgggcagctgcttgcgctactggcagagctgctgcgaggaccctgtggcagctttgatgtgcgcaagacagctgacgactgagccctgcttctgctggggctgtgtacagagtgcaaatgtttatttaaaataaagttctatttatcccttgtgaaaaaaaaaacaaaaaaaaaaaactcggagggctctctattgccggggtgcgcgggaaacaagagaggcgtcatgcgaattggcgcccttggcgtcatacgctggttcccttggacccaggttttcctttcgtacacaggtgcgtagaatcgtggcggagctcccccctaatagagaggaggtgcgtatataaattggcgaataggcccgggtttaacccgggctttagtgactcgccgcaaaaatccaatagatctacaaacacagaacacacaaaaaaggagctcaacccaatcagacacaga

SEQ ID NO: 142481 - DNA, 3697 bp, Homo sapiens
ttaccggggagcgcgctctcggcaggctgttttctgtcgccaagggtcccggaccgagtacacagtgatcgggcccagcacaggcagcgtcagtgcaaacttcccccaccccgccttccacccatgtgtgtcaaccctaccccaggagggaccatctctcgagcttctagggacctattaaaagagttcccacagcccaaaaatcttctcaacagtgtgattggaagagccctcggcatctcacatgcaaaagacaaactagtctacgtgcacacaaatggaccgaagaaaaagaaagtcacactgcacataaaatggcccaagagcgtggaggtagaaggctatggcagcaagaagatcgatgctgagcggcaggctgcagctgcagcctgccagctgttcaagggttggggtctgctaggtccccggaatgagttgtttgacgcagccaaataccgagtgctagctgatcgctttggctcccctgccgacagctggtggcgtccggaacccaccatgccccctacttcctggcggcagctgaatccagagagtattcgaccagggggacctgggggcctatcccgctctttaggccgggaagaagaggaggacgaggaggaagagctagaagaagggaccatagatgttaccgacttcttgtccatgacccagcaggattcccacgctccactcagggactcaagggggagttcctttgagatgacagatgacgacagtgccattagggctctgacccagtttccacttcccaagaaccttctggccaaggtgattcagattgcaacgtcatcctccacagctaagaacctcatgcagttccatactgtgggcaccaagaccaagctgtctacactcaccctgctctggccctgccccatgacctttgttgccaaagggcgccgcaaagcagaggctgagaataaggcggcagccttggcctgcaagaaactgaagagcctgggcctggtggacaggaacaacgaaccgcttacacacgccatgtataacctggcctctttgcgtgagctgggtgagacccagcgccgaccatgcaccatccaggtgcccgagcccatcctccgcaagatagagaccttcctgaaccattaccctgtggagagttcatggatcgccccagaactccggctgcagagtgatgacatcttgcccttgggcaaggactcagggcctctgagtgaccctatcacaggcaagccctatgtgcccctgttggaagcagaggaggtacgtctcagccagagtctgctagaactgtggcggcggcgagggccggtctggcaggaggccccccagctacctgtggacccacatcgggacaccatcctcaacgccattgagcagcacccggtggtggtcatctctggggacacgggctgtgggaagaccacgcgcatcccccagctgttgctggagcgctatgtgaccgagggccgaggtgcccgctgcaatgttatcatcacccaacctcgccgcatctctgctgtgtctgtggcacagcgggtcagccacgaactgggcccctccctgcgccggaatgtgggcttccaggtgcggttggaaagtaagcccccatcccgaggcggggccctgctcttctgcactgtgggtatcctgctgcgtaagctgcagagcaaccccagcctggagggcgtgagccacgtcatcgtggatgaggtgcatgagcgggacgtgaacacagactttctgctgatcctgctcaagggcctgcagcggctcaacccggccctgcggctggtgctcatgagtgccacaggggacaatgagcgcttctcccgatactttggtggctgccccgtcatcaaggtgcctggcttcatgtacccagtcaaggagcactacctagaggacatcctggccaagttgggcaagcaccagtacctgcaccggcaccggcaccatgagtctgaggatgaatgcgcactcgatttggaccttgtgactgatctggttctgcacatcgatgctcgcggggaaccaggtgggatcctgtgcttcctgcctgggtggcaggagatcaaaggagtgcagcagcgcctccaggaggccctgggcatgcacgagagcaagtacctcatcctgccagtgcactccaacatccccatgatggatcagaaggccatattccagcagcctccagttggggtgcgcaagattgtcttggccaccaacattgctgagacttccatcacaatcaatgacatcgtgcatgtggtggacagtgggctgcacaaggaagaacgctatgacctgaagaccaaggtgtcctgcctggagacagtgtgggtatcaagagccaatgtgatccagcgccggggccgggcgggccgctgccagtccggctttgcctaccacttgttccctcgaagccggctggagaaaatggtccctttccaagtgccagagatcctgcgcacacctcttgagaacctggtgctgcaagcgaaaatccacatgcctgagaagacggcggtggagttcctgtccaaggctgtggacagtccaaacatcaaggcagtggacgaggctgtgatcttgctccaggagatcggggtgctggaccagcgggagtacctgactaccctggggcagcgcctggctcacatctccaccgacccccggttggccaaggccattgtgttggctgccatcttccgttgcctgcacccactactggtggtcgtttcctgcctcacccgggaccccttcagcagcagcctacagaaccgggcagaggtggacaaggtgaaagcactgttgagccatgacagcggcagtgaccacctggcctttgtgcgggctgtcgccggctgggaggaggtgctgcgttggcaggaccgcagctcccgggagaattacctggaggaaaacctgctgtacgcacccagcctgcgcttcatccacggactcatcaagcagttctcagagaacatttatgaggccttcctggtggggaagccctcggactgcaccctggcctccgcccagtgcaacgagtacagtgaggaggaggagctggtgaagggcgtgctgatggccggcctctaccccaacctcatccaggtgaggcagggcaaggtcacccggcaggggaagttcaagcccaacagcgtcacatataggaccaaatcaggcaacatcctgctgcacaagtcgaccattaacagggaggccacacggttacggagccgatggctgacgtatttcatggcagtcaagtccaatggcagcgtcttcgtccgggactcctctcaggtgcacccgctagctgtgctgctgctgaccgacggggacgtgcacatccgtgatgacgggcgccgggccaccatctcactgagcgacagtgacctgctgcggctggagggtgactcgcgtaccgtgcggctgctgaaggagctgcggcgggccctgggccgcatggtggagcggagcctgcgcagcgagctggctgcacttccccccagcgtacaggaggagcacgggcagctgcttgcgctactggcagagctgctgcgaggaccctgtggcagctttgatgtgcgcaagacagctgacgactgagccctgcttctgctggggctgtgtacagagtgcaaatgtttatttaaaataaagttctatttatcccttgtga

SEQ ID NO: 142482 - DNA, 2893 bp, Homo sapiens
ggcagggatatgcttccccccttcaacctcatgcagttccatactgtgggcaccaagaccaagctgtctacactcaccctgctctggccctgccccatgacctttgttgccaaagggcgccgcaaagcagaggctgagaataaggcggcagccttggcctgcaagaaactgaagagcctgggcctggtggacaggaacaacgaaccgcttacacacgccatgtataacctggcctctttgcgtgagctgggtgagacccagcgccgaccatgcaccatccaggtgcccgagcccatcctccgcaagatagagaccttcctgaaccattaccctgtggagagttcatggatcgccccagaactccggctgcagagtgatgacatcttgcccttgggcaaggactcagggcctctgagtgaccctatcacaggcaagccctatgtgcccctgttggaagcagaggaggtacgtctcagccagagtctgctagaactgtggcggcggcgagggccggtctggcaggaggccccccagctacctgtggacccacatcgggacaccatcctcaacgccattgagcagcacccggtggtggtcatctctggggacacgggctgtgggaagaccacgcgcatcccccagctgttgctggagcgctatgtgaccgagggccgaggtgcccgctgcaatgttatcatcacccaacctcgccgcatctctgctgtgtctgtggcacagcgggtcagccacgaactgggcccctccctgcgccggaatgtgggcttccaggtgcggttggaaagtaagcccccatcccgaggcggggccctgctcttctgcactgtgggtatcctgctgcgtaagctgcagagcaaccccagcctggagggcgtgagccacgtcatcgtggatgaggtgcatgagcgggacgtgaacacagactttctgctgatcctgctcaagggcctgcagcggctcaacccggccctgcggctggtgctcatgagtgccacaggggacaatgagcgcttctcccgatactttggtggctgccccgtcatcaaggtgcctggcttcatgtacccagtcaaggagcactacctagaggacatcctggccaagttgggcaagcaccagtacctgcaccggcaccggcaccatgagtctgaggatgaatgcgcactcgatttggaccttgtgactgatctggttctgcacatcgatgctcgcggggaaccaggtgggatcctgtgcttcctgcctgggtggcaggagatcaaaggagtgcagcagcgcctccaggaggccctgggcatgcacgagagcaagtacctcatcctgccagtgcactccaacatccccatgatggatcagaaggccatattccagcagcctccagttggggtgcgcaagattgtcttggccaccaacattgctgagacttccatcacaatcaatgacatcgtgcatgtggtggacagtgggctgcacaaggaagaacgctatgacctgaagaccaaggtgtcctgcctggagacagtgtgggtatcaagagccaatgtgatccagcgccggggccgggcgggccgctgccagtccggctttgcctaccacttgttccctcgaagccggctggagaaaatggtccctttccaagtgccagagatcctgcgcacacctcttgagaacctggtgctgcaagcgaaaatccacatgcctgagaagacggcggtggagttcctgtccaaggctgtggacagtccaaacatcaaggcagtggacgaggctgtgatcttgctccaggagatcggggtgctggaccagcgggagtacctgactaccctggggcagcgcctggctcacatctccaccgacccccggttggccaaggccattgtgttggctgccatcttccgttgcctgcacccactactggtggtcgtttcctgcctcacccgggaccccttcagcagcagcctacagaaccgggcagaggtggacaaggtgaaagcactgttgagccatgacagcggcagtgaccacctggcctttgtgcgggctgtcgccggctgggaggaggtgctgcgttggcaggaccgcagctcccgggagaattacctggaggaaaacctgctgtacgcacccagcctgcgcttcatccacggactcatcaagcagttctcagagaacatttatgaggccttcctggtggggaagccctcggactgcaccctggcctccgcccagtgcaacgagtacagtgaggaggaggagctggtgaagggcgtgctgatggccggcctctaccccaacctcatccaggtgaggcagggcaaggtcacccggcaggggaagttcaagcccaacagcgtcacatataggaccaaatcaggcaacatcctgctgcacaagtcgaccattaacagggaggccacacggttacggagccgatggctgacgtatttcatggcagtcaagtccaatggcagcgtcttcgtccgggactcctctcaggtgcacccgctagctgtgctgctgctgaccgacggggacgtgcacatccgtgatgacgggcgccgggccaccatctcactgagcgacagtgacctgctgcggctggagggtgactcgcgtaccgtgcggctgctgaaggagctgcggcgggccctgggccgcatggtggagcggagcctgcgcagcgagctggctgcacttccccccagcgtacaggaggagcacgggcagctgcttgcgctactggcagagctgctgcgaggaccctgtggcagctttgatgtgcgcaagacagctgacgactgagccctgcttctgctggggctgtgtacagagtgcaaatgtttatttaaaataaagttctatttatcccttgtga

SEQ ID NO: 142483 - DNA, 4908 bp, Homo sapiens
ctgcaccgccgccgcgccccattgggccgggtgctggggcatcccgggcgctgggtgccccgagcggctacgacgagtcccaggtggggccgggctccaggcccgcgggggagcggagccgtgcgccgcaggcgggctccgtgacgccgggtggggaacgccgggccggtggcgggacttccgccacgggactcggaaggggccgcgccgccgctgctgggagttgtagtccggccgtggttgggggagccgcggctcatgcgcggtgcacagaggcttgtttcacatctgtaacaacaggaggaggcccagcctcgtgatgaggaatagcaaggagagaattcagctccagttcaaaagcctacaaaatctgagactgtcattgcttttataaggattccagctttccctcctggccagaaatgttcagcctggactcattcagaaaagatcgggcccagcacaggcagcgtcagtgcaaacttcccccaccccgccttccacccatgtgtgtcaaccctaccccaggagggaccatctctcgaggctgaacgttaacatttccaacatggcagcctcattccatcttcctgccttccatccacacgactgctggtttagatttgctggagagtgagctctgcagggtcctagccctgggcagcgccgagcccgcctactgaaggcccagggctgtggtgagcgaggacgggctgctgatgccctcgcctaggcttgggcttcgggtccgcccggcccgcagggggcgcgcggcgctcgggccggccgctcccgttctcttcgcccggtccctgccgcgcacaggcctcggggtcggcgggagcacgatggcggccgctaggagactcatggcgctggccgccggcatctctccgcgcctgcagccgctgggtccccgcgctgctgggcgacagggtcgctcgcgcggcttctcttcaagctgcgcccaccccgaccacaccaaggaagccgccgaggccgagtcagggatggcccccggcgggcctggggaaggcgacggaagcttggtgaacgcttctagggacctattaaaagagttcccacagcccaaaaatcttctcaacagtgtgattggaagagccctcggcatctcacatgcaaaagacaaactagtctacgtgcacacaaatggaccgaagaaaaagaaagtcacactgcacataaaatggcccaagagcgtggaggtagaaggctatggcagcaagaagatcgatgctgagcggcaggctgcagctgcagcctgccagctgttcaagggttggggtctgctaggtccccggaatgagttgtttgacgcagccaaataccgagtgctagctgatcgctttggctcccctgccgacagctggtggcgtccggaacccaccatgccccctacttcctggcggcagctgaatccagagagtattcgaccagggggacctgggggcctatcccgctctttaggccgggaagaagaggaggacgaggaggaagagctagaagaagggaccatagatgttaccgacttcttgtccatgacccagcaggattcccacgctccactcagggactcaagggggagttcctttgagatgacagatgacgacagtgccattagggctctgacccagtttccacttcccaagaaccttctggccaaggtgattcagattgcaacgtcatcctccacagctaagaacctcatgcagttccatactgtgggcaccaagaccaagctgtctacactcaccctgctctggccctgccccatgacctttgttgccaaagggcgccgcaaagcagaggctgagaataaggcggcagccttggcctgcaagaaactgaagagcctgggcctggtggacaggaacaacgaaccgcttacacacgccatgtataacctggcctctttgcgtgagctgggtgagacccagcgccgaccatgcaccatccaggtgcccgagcccatcctccgcaagatagagaccttcctgaaccattaccctgtggagagttcatggatcgccccagaactccggctgcagagtgatgacatcttgcccttgggcaaggactcagggcctctgagtgaccctatcacaggcaagccctatgtgcccctgttggaagcagaggaggtacgtctcagccagagtctgctagaactgtggcggcggcgagggccggtctggcaggaggccccccagctacctgtggacccacatcgggacaccatcctcaacgccattgagcagcacccggtggtggtcatctctggggacacgggctgtgggaagaccacgcgcatcccccagctgttgctggagcgctatgtgaccgagggccgaggtgcccgctgcaatgttatcatcacccaacctcgccgcatctctgctgtgtctgtggcacagcgggtcagccacgaactgggcccctccctgcgccggaatgtgggcttccaggtgcggttggaaagtaagcccccatcccgaggcggggccctgctcttctgcactgtgggtatcctgctgcgtaagctgcagagcaaccccagcctggagggcgtgagccacgtcatcgtggatgaggtgcatgagcgggacgtgaacacagactttctgctgatcctgctcaagggcctgcagcggctcaacccggccctgcggctggtgctcatgagtgccacaggggacaatgagcgcttctcccgatactttggtggctgccccgtcatcaaggtgcctggcttcatgtacccagtcaaggagcactacctagaggacatcctggccaagttgggcaagcaccagtacctgcaccggcaccggcaccatgagtctgaggatgaatgcgcactcgatttggaccttgtgactgatctggttctgcacatcgatgctcgcggggaaccaggtgggatcctgtgcttcctgcctgggtggcaggagatcaaaggagtgcagcagcgcctccaggaggccctgggcatgcacgagagcaagtacctcatcctgccagtgcactccaacatccccatgatggatcagaaggccatattccagcagcctccagttggggtgcgcaagattgtcttggccaccaacattgctgagacttccatcacaatcaatgacatcgtgcatgtggtggacagtgggctgcacaaggaagaacgctatgacctgaagaccaaggtgtcctgcctggagacagtgtgggtatcaagagccaatgtgatccagcgccggggccgggcgggccgctgccagtccggctttgcctaccacttgttccctcgaagccggctggagaaaatggtccctttccaagtgccagagatcctgcgcacacctcttgagaacctggtgctgcaagcgaaaatccacatgcctgagaagacggcggtggagttcctgtccaaggctgtggacagtccaaacatcaaggcagtggacgaggctgtgatcttgctccaggagatcggggtgctggaccagcgggagtacctgactaccctggggcagcgcctggctcacatctccaccgacccccggttggccaaggccattgtgttggctgccatcttccgttgcctgcacccactactggtggtcgtttcctgcctcacccgggaccccttcagcagcagcctacagaaccgggcagaggtggacaaggtgaaagcactgttgagccatgacagcggcagtgaccacctggcctttgtgcgggctgtcgccggctgggaggaggtgctgcgttggcaggaccgcagctcccgggagaattacctggaggaaaacctgctgtacgcacccagcctgcgcttcatccacggactcatcaagcagttctcagagaacatttatgaggccttcctggtggggaagccctcggactgcaccctggcctccgcccagtgcaacgagtacagtgaggaggaggagctggtgaagggcgtgctgatggccggcctctaccccaacctcatccaggtgaggcagggcaaggtcacccggcaggggaagttcaagcccaacagcgtcacatataggaccaaatcaggcaacatcctgctgcacaagtcgaccattaacagggaggccacacggttacggagccgatggctgacgtatttcatggcagtcaagtccaatggcagcgtcttcgtccgggactcctctcaggtgcacccgctagctgtgctgctgctgaccgacggggacgtgcacatccgtgatgacgggcgccgggccaccatctcactgagcgacagtgacctgctgcggctggagggtgactcgcgtaccgtgcggctgctgaaggagctgcggcgggccctgggccgcatggtggagcggagcctgcgcagcgagctggctgcacttccccccagcgtacaggaggagcacgggcagctgcttgcgctactggcagagctgctgcgaggaccctgtggcagctttgatgtgcgcaagacagctgacgactgagccctgcttctgctggggctgtgtacagagtgcaaatgtttatttaaaataaagttctatttatcccttgtgagggcgccgggccaccatctcactgagcgacagtgacctgctgcggctggagggtgactcgcgtaccgtgcggctgctgaaggagctgcggcgggccctgggccgcatggtggagcggagcctgcgcagcgagctggctgcacttccccccagcgtacaggaggagcacgggcagctgcttgcgctactggcagagctgctgcgaggaccctgtggcagctttgatgtgcgcaagacagctgacgactgagccctgcttctgctggggctgtgtacagagtgcaaatgtttatttaaaataaagttctatttatccctt

SEQ ID NO: 142484 - DNA, 4536 bp, Homo sapiens
ctgcaccgccgccgcgccccattgggccgggtgctggggcatcccgggcgctgggtgccccgagcggctacgacgagtcccaggtggggccgggctccaggcccgcgggggagcggagccgtgcgccgcaggcgggctccgtgacgccgggtggggaacgccgggccggtggcgggacttccgccacgggactcggaaggggccgcgccgccgctgctgggagttgtagtccggccgtggttgggggagccgcggctcatgcgcggtgcacagaggcttgtttcacatctgtaacaacaggaggaggcccagcctcgtgatgaggaatagcaaggagagaattcagctccagttcaaaagcctacaaaatctgagactgtcattgcttttataaggattccagctttccctcctggccagaaatgttcagcctggactcattcagaaaagatcgggcccagcacaggcagcgtcagtgcaaacttcccccaccccgccttccacccatgtgtgtcaaccctaccccaggagggaccatctctcgaggctgaacgttaacatttccaacatggcagcctcattccatcttcctgccttccatccacacgactgctggtttagatttgctggagagtgagctctgcagggtcctagccctgggcagcgccgagcccgcctactgaaggcccagggctgtggtgagcgaggacgggctgctgatgccctcgcctaggcttgggcttcgggtccgcccggcccgcagggggcgcgcggcgctcgggccggccgctcccgttctcttcgcccggtccctgccgcgcacaggcctcggggtcggcgggagcacgatggcggccgctaggagactcatggcgctggccgccggcatctctccgcgcctgcagccgctgggtccccgcgctgctgggcgacagggtcgctcgcgcggcttctcttcaagctgcgcccaccccgaccacaccaaggaagccgccgaggccgagtcagggatggcccccggcgggcctggggaaggcgacggaagcttggtgaacgcttctagggacctattaaaagagttcccacagcccaaaaatcttctcaacagtgtgattggaagagccctcggcatctcacatgcaaaagacaaactagtctacgtgcacacaaatggaccgaagaaaaagaaagtcacactgcacataaaatggcccaagagcgtggaggtagaaggctatggcagcaagaagatcgatgctgagcggcaggctgcagctgcagcctgccagctgttcaagggttggggtctgctaggtccccggaatgagttgtttgacgcagccaaataccgagtgctagctgatcgctttggctcccctgccgacagctggtggcgtccggaacccaccatgccccctacttcctggcggcagctgaatccagagagtattcgaccagggggacctgggggcctatcccgctctttaggccgggaagaagaggaggacgaggaggaagagctagaagaagggaccatagatgttaccgacttcttgtccatgacccagcaggattcccacgctccactcagggactcaagggggagttcctttgagatgacagatgacgacagtgccattagggctctgacccagtttccacttcccaagaaccttctggccaaggtgattcagattgcaacgtcatcctccacagctaagaacctcatgcagttccatactgtgggcaccaagaccaagctgtctacactcaccctgctctggccctgccccatgacctttgttgccaaagggcgccgcaaagcagaggctgagaataaggcggcagccttggcctgcaagaaactgaagagcctgggcctggtggacaggaacaacgaaccgcttacacacgccatgtataacctggcctctttgcgtgagctgggtgagacccagcgccgaccatgcaccatccaggtgcccgagcccatcctccgcaagatagagaccttcctgaaccattaccctgtggagagttcatggatcgccccagaactccggctgcagagtgatgacatcttgcccttgggcaaggactcagggcctctgagtgaccctatcacaggcaagccctatgtgcccctgttggaagcagaggaggtacgtctcagccagagtctgctagaactgtggcggcggcgagggccggtctggcaggaggccccccagctacctgtggacccacatcgggacaccatcctcaacgccattgagcagcacccggtggtggtcatctctggggacacgggctgtgggaagaccacgcgcatcccccagctgttgctggagcgctatgtgaccgagggccgaggtgcccgctgcaatgttatcatcacccaacctcgccgcatctctgctgtgtctgtggcacagcgggtcagccacgaactgggcccctccctgcgccggaatgtgggcttccaggtgcggttggaaagtaagcccccatcccgaggcggggccctgctcttctgcactgtgggtatcctgctgcgtaagctgcagagcaaccccagcctggagggcgtgagccacgtcatcgtggatgaggtgcatgagcgggacgtgaacacagactttctgctgatcctgctcaagggcctgcagcggctcaacccggccctgcggctggtgctcatgagtgccacaggggacaatgagcgcttctcccgatactttggtggctgccccgtcatcaaggtgcctggcttcatgtacccagtcaaggagcactacctagaggacatcctggccaagttgggcaagcaccagtacctgcaccggcaccggcaccatgagtctgaggatgaatgcgcactcgatttggaccttgtgactgatctggttctgcacatcgatgctcgcggggaaccaggtgggatcctgtgcttcctgcctgggtggcaggagatcaaaggagtgcagcagcgcctccaggaggccctgggcatgcacgagagcaagtacctcatcctgccagtgcactccaacatccccatgatggatcagaaggccatattccagcagcctccagttggggtgcgcaagattgtcttggccaccaacattgctgagacttccatcacaatcaatgacatcgtgcatgtggtggacagtgggctgcacaaggaagaacgctatgacctgaagaccaaggtgtcctgcctggagacagtgtgggtatcaagagccaatgtgatccagcgccggggccgggcgggccgctgccagtccggctttgcctaccacttgttccctcgaagccggctggagaaaatggtccctttccaagtgccagagatcctgcgcacacctcttgagaacctggtgctgcaagcgagtccaaacatcaaggcagtggacgaggctgtgatcttgctccaggagatcggggtgctggaccagcgggagtacctgactaccctggggcagcgcctggctcacatctccaccgacccccggttggccaaggccattgtgttggctgccatcttccgttgcctgcacccactactggtggtcgtttcctgcctcacccgggaccccttcagcagcagcctacagaaccgggcagaggtggacaaggtgaaagcactgttgagccatgacagcggcagtgaccacctggcctttgtgcgggctgtcgccggctgggaggaggtgctgcgttggcaggaccgcagctcccgggagaattacctggaggaaaacctgctgtacgcacccagcctgcgcttcatccacggactcatcaagcagttctcagagaacatttatgaggccttcctggtggggaagccctcggactgcaccctggcctccgcccagtgcaacgagtacagtgaggaggaggagctggtgaagggcgtgctgatggccggcctctaccccaacctcatccaggtgaggcagggcaaggtcacccggcaggggaagttcaagcccaacagcgtcacatataggaccaaatcaggcaacatcctgctgcacaagtcgaccattaacagggaggccacacggttacggagccgatggctgacgtatttcatggcagtcaagtccaatggcagcgtcttcgtccgggactcctctcaggtgcacccgctagctgtgctgctgctgaccgacggggacgtgcacatccgtgatgacgggcgccgggccaccatctcactgagcgacagtgacctgctgcggctggagggtgactcgcgtaccgtgcggctgctgaaggagctgcggcgggccctgggccgcatggtggagcggagcctgcgcagcgagctggctgcacttccccccagcgtacaggaggagcacgggcagctgcttgcgctactggcagagctgctgcgaggaccctgtggcagctttgatgtgcgcaagacagctgacgactgagccctgcttctgctggggctgtgtacagagtgcaaatgtttatttaaaataaagttctatttatcccttgtga

SEQ ID NO: 142485 - DNA, 2270 bp, Homo sapiens
gtagctagtacgagggctggtttaatcggccgaggctgtgcgcgagggccgaggtgcccgctgcaatgttatcatcacccaacctcgccgcatctctgctgtgtctgtggcacagcgggtcagccacgaactgggcccctccctgcgccggaatgtgggcttccaggtgcggttggaaagtaagcccccatcccgaggcggggccctgctcttctgcactgtgggtatcctgctgcgtaagctgcagagcaaccccagcctggagggcgtgagccacgtcatcgtggatgaggtgcatgagcgggacgtgaacacagactttctgctgatcctgctcaagggcctgcagcggctcaacccggccctgcggctggtgctcatgagtgccacaggggacaatgagcgcttctcccgatactttggtggctgccccgtcatcaaggtgcctggcttcatgtacccagtcaaggagcactacctagaggacatcctggccaagttgggcaagcaccagtacctgcaccggcaccggcaccatgagtctgaggatgaatgcgcactcgatttggaccttgtgactgatctggttctgcacatcgatgctcgcggggaaccaggtgggatcctgtgcttcctgcctgggtggcaggagatcaaaggagtgcagcagcgcctccaggaggccctgggcatgcacgagagcaagtacctcatcctgccagtgcactccaacatccccatgatggatcagaaggccatattccagcagcctccagttggggtgcgcaagattgtcttggccaccaacattgctgagacttccatcacaatcaatgacatcgtgcatgtggtggacagtgggctgcacaaggaagaacgctatgacctgaagaccaaggtgtcctgcctggagacagtgtgggtatcaagagccaatgtgatccagcgccggggccgggcgggccgctgccagtccggctttgcctaccacttgttccctcgaagccggctggagaaaatggtccctttccaagtgccagagatcctgcgcacacctcttgagaacctggtgctgcaagcgaaaatccacatgcctgagaagacggcggtggagttcctgtccaaggctgtggacagtccaaacatcaaggcagtggacgaggctgtgatcttgctccaggagatcggggtgctggaccagcgggagtacctgactaccctggggcagcgcctggctcacatctccaccgacccccggttggccaaggccattgtgttggctgccatcttccgttgcctgcacccactactggtggtcgtttcctgcctcacccgggaccccttcagcagcagcctacagaaccgggcagaggtggacaaggtgaaagcactgttgagccatgacagcggcagtgaccacctggcctttgtgcgggctgtcgccggctgggaggaggtgctgcgttggcaggaccgcagctcccgggagaattacctggaggaaaacctgctgtacgcacccagcctgcgcttcatccacggactcatcaagcagttctcagagaacatttatgaggccttcctggtggggaagccctcggactgcaccctggcctccgcccagtgcaacgagtacagtgaggaggaggagctggtgaagggcgtgctgatggccggcctctaccccaacctcatccaggtgaggcagggcaaggtcacccggcaggggaagttcaagcccaacagcgtcacatataggaccaaatcaggcaacatcctgctgcacaagtcgaccattaacagggaggccacacggttacggagccgatggctgacgtatttcatggcagtcaagtccaatggcagcgtcttcgtccgggactcctctcaggtgcacccgctagctgtgctgctgctgaccgacggggacgtgcacatccgtgatgacgggcgccgggccaccatctcactgagcgacagtgacctgctgcggctggagggtgactcgcgtaccgtgcggctgctgaaggagctgcggcgggccctgggccgcatggtggagcggagcctgcgcagcgagctggctgcacttccccccagcgtacaggaggagcacgggcagctgcttgcgctactggcagagctgctgcgaggaccctgtggcagctttgatgtgcgcaagacagctgacgactgagccctgcttctgctggggctgtgtacagagtgcaaatgtttatttaaaataaagttctatttatcccttgtga

SEQ ID NO: 142486 - DNA, 2189 bp, Homo sapiens
aacagaagatgtacggacggcaggcacgcggtttgtaatttcattacggtggacctgtcgctttcagcctgtaaattacatggcccctaggctgacaatgtaaagcccatcccgaggcggggccctgctcttctgcactgtgggtatcctgctgcgtaagctgcagagcaaccccagcctggagggcgtgagccacgtcatcgtggatgaggtgcatgagcgggacgtgaacacagactttctgctgatcctgctcaagggcctgcagcggctcaacccggccctgcggctggtgctcatgagtgccacaggggacaatgagcgcttctcccgatactttggtggctgccccgtcatcaaggtgcctggcttcatgtacccagtcaaggagcactacctagaggacatcctggccaagttgggcaagcaccagtacctgcaccggcaccggcaccatgagtctgaggatgaatgcgcactcgatttggaccttgtgactgatctggttctgcacatcgatgctcgcggggaaccaggtgggatcctgtgcttcctgcctgggtggcaggagatcaaaggagtgcagcagcgcctccaggaggccctgggcatgcacgagagcaagtacctcatcctgccagtgcactccaacatccccatgatggatcagaaggccatattccagcagcctccagttggggtgcgcaagattgtcttggccaccaacattgctgagacttccatcacaatcaatgacatcgtgcatgtggtggacagtgggctgcacaaggaagaacgctatgacctgaagaccaaggtgtcctgcctggagacagtgtgggtatcaagagccaatgtgatccagcgccggggccgggcgggccgctgccagtccggctttgcctaccacttgttccctcgaagccggctggagaaaatggtccctttccaagtgccagagatcctgcgcacacctcttgagaacctggtgctgcaagcgaaaatccacatgcctgagaagacggcggtggagttcctgtccaaggctgtggacagtccaaacatcaaggcagtggacgaggctgtgatcttgctccaggagatcggggtgctggaccagcgggagtacctgactaccctggggcagcgcctggctcacatctccaccgacccccggttggccaaggccattgtgttggctgccatcttccgttgcctgcacccactactggtggtcgtttcctgcctcacccgggaccccttcagcagcagcctacagaaccgggcagaggtggacaaggtgaaagcactgttgagccatgacagcggcagtgaccacctggcctttgtgcgggctgtcgccggctgggaggaggtgctgcgttggcaggaccgcagctcccgggagaattacctggaggaaaacctgctgtacgcacccagcctgcgcttcatccacggactcatcaagcagttctcagagaacatttatgaggccttcctggtggggaagccctcggactgcaccctggcctccgcccagtgcaacgagtacagtgaggaggaggagctggtgaagggcgtgctgatggccggcctctaccccaacctcatccaggtgaggcagggcaaggtcacccggcaggggaagttcaagcccaacagcgtcacatataggaccaaatcaggcaacatcctgctgcacaagtcgaccattaacagggaggccacacggttacggagccgatggctgacgtatttcatggcagtcaagtccaatggcagcgtcttcgtccgggactcctctcaggtgcacccgctagctgtgctgctgctgaccgacggggacgtgcacatccgtgatgacgggcgccgggccaccatctcactgagcgacagtgacctgctgcggctggagggtgactcgcgtaccgtgcggctgctgaaggagctgcggcgggccctgggccgcatggtggagcggagcctgcgcagcgagctggctgcacttccccccagcgtacaggaggagcacgggcagctgcttgcgctactggcagagctgctgcgaggaccctgtggcagctttgatgtgcgcaagacagctgacgactgagccctgcttctgctggggctgtgtacagagtgcaaatgtttatttaaaataaagttctatttatcccttgtga

SEQ ID NO: 142487 - DNA, 2380 bp, Homo sapiens
ctgcaccgccgccgcgccccattgggccgggtgctggggcatcccgggcgctgggtgccccgagcggctacgacgagtcccaggtggggccgggctccaggcccgcgggggagcggagccgtgcgccgcaggcgggctccgtgacgccgggtggggaacgccgggccggtggcgggacttccgccacgggactcggaaggggccgcgccgccgctgctgggagttgtagtccggccgtggttgggggagccgcggctcatgcgcggtgcacagaggcttgtttcacatctgtaacaacaggaggaggcccagcctcgtgatgaggaatagcaaggagagaattcagctccagttcaaaagcctacaaaatctgagactgtcattgcttttataaggattccagctttccctcctggccagaaatgttcagcctggactcattcagaaaagatcgggcccagcacaggcagcgtcagtgcaaacttcccccaccccgccttccacccatgtgtgtcaaccctaccccaggagggaccatctctcgaggctgaacgttaacatttccaacatggcagcctcattccatcttcctgccttccatccacacgactgctggtttagatttgctggagagtgagctctgcagggtcctagccctgggcagcgccgagcccgcctactgaaggcccagggctgtggtgagcgaggacgggctgctgatgccctcgcctaggcttgggcttcgggtccgcccggcccgcagggggcgcgcggcgctcgggccggccgctcccgttctcttcgcccggtccctgccgcgcacaggcctcggggtcggcgggagcacgatggcggccgctaggagactcatggcgctggccgccggcatctctccgcgcctgcagccgctgggtccccgcgctgctgggcgacagggtcgctcgcgcggcttctcttcaagctgcgcccaccccgaccacaccaaggaagccgccgaggccgagtcagggatggcccccggcgggcctggggaaggcgacggaagcttggtgaacgcttctagggacctattaaaagagttcccacagcccaaaaatcttctcaacagtgtgattggaagagccctcggcatctcacatgcaaaagacaaactagtctacgtgcacacaaatggaccgaagaaaaagaaagtcacactgcacataaaatggcccaagagcgtggaggtagaaggctatggcagcaagaagatcgatgctgagcggcaggctgcagctgcagcctgccagctgttcaagggttggggtctgctaggtccccggaatgagttgtttgacgcagccaaataccgagtgctagctgatcgctttggctcccctgccgacagctggtggcgtccggaacccaccatgccccctacttcctggcggcagctgaatccagagagtattcgaccagggggacctgggggcctatcccgctctttaggccgggaagaagaggaggacgaggaggaagagctagaagaagggaccatagatgttaccgacttcttgtccatgacccagcaggattcccacgctccactcagggactcaagggggagttcctttgagatgacagatgacgacagtgccattagggctctgacccagtttccacttcccaagaaccttctggccaaggtgattcagattgcaacgtcatcctccacagctaagaacctcatgcagttccatactgtgggcaccaagaccaagctgtctacactcaccctgctctggccctgccccatgacctttgttgccaaagggcgccgcaaagcagaggctgagaataaggcggcagccttggcctgcaagaaactgaagagcctgggcctggtggacaggaacaacgaaccgcttacacacggaggccacacggttacggagccgatggctgacgtatttcatggcagtcaagtccaatggcagcgtcttcgtccgggactcctctcaggtgcacccgctagctgtgctgctgctgaccgacggggacgtgcacatccgtgatgacgggcgccgggccaccatctcactgagcgacagtgacctgctgcggctggagggtgactcgcgtaccgtgcggctgctgaaggagctgcggcgggccctgggccgcatggtggagcggagcctgcgcagcgagctggctgcacttccccccagcgtacaggaggagcacgggcagctgcttgcgctactggcagagctgctgcgaggaccctgtggcagctttgatgtgcgcaagacagctgacgactgagccctgcttctgctggggctgtgtacagagtgcaaatgtttatttaaaataaagttctatttatcccttgtga

SEQ ID NO: 142488 - DNA, 1441 bp, Homo sapiens
ctgcaccgccgccgcgccccattgggccgggtgctggggcatcccgggcgctgggtgccccgagcggctacgacgagtcccaggtggggccgggctccaggcccgcgggggagcggagccgtgcgccgcaggcgggctccgtgacgccgggtggggaacgccgggccggtggcgggacttccgccacgggactcggaaggggccgcgccgccgctgctgggagttgtagtccggccgtggttgggggagccgcggctcatgcgcggtgcacagaggcttgtttcacatctgtaacaacaggaggaggcccagcctcgtgatgaggaatagcaaggagagaattcagctccagttcaaaagcctacaaaatctgagactgtcattgcttttataaggattccagctttccctcctggccagaaatgttcagcctggactcattcagaaaagatcgggcccagcacaggcagcgtcagtgcaaacttcccccaccccgccttccacccatgtgtgtcaaccctaccccaggagggaccatctctcgaggctgaacgttaacatttccaacatggcagcctcattccatcttcctgccttccatccacacgactgctggtttagatttgctggagagtgagctctgcagggtcctagccctgggcagcgccgagcccgcctactgaaggcccagggctgtggtgagcgaggacgggctgctgatgccctcgcctaggcttgggcttcgggtccgcccggcccgcagggggcgcgcggcgctcgggccggccgctcccgttctcttcgcccggtccctgccgcgcacaggcctcggggtcggcgggagcacgatggcggccgctaggagactcatggcgctggccgccggcatctctccgcgcctgcagccgctgggtccccgcgctgctgggcgacagggtcgctcgcgcggcttctcttcaagctgcgcccaccccgaccacaccaaggaagccgccgaggccgagtcagggatggcccccggcgggcctggggaaggcgacggaagcttggtgaacggtgagggcatcggcgggggcgggcggtccgcagcgcccttgactcctgggatggcagagctaggggcgcgggccgaaatcgggcctggcggccgggggtcctctcttccatagtggccaagttcgccatccgtcggcgggcagcggccttgctgtttgtaaagcttagcgtggcacaggcccgaatggacccttagagtacctgctcccggcaagaataggtgagaggtgcgagacctcgagggagtggggaaaacgagtaaaagtccaactcctgccaggatgagtggccaagggctagagcttctagggacaagcatgccctcaccagtgtgagaaatagcccaaagtaactcctgggacatcaggatctcaaatagagacag

SEQ ID NO: 142489 - DNA, 4080 bp, Homo sapiens
ctgcaccgccgccgcgccccattgggccgggtgctggggcatcccgggcgctgggtgccccgagcggctacgacgagtcccaggtggggccgggctccaggcccgcgggggagcggagccgtgcgccgcaggcgggctccgtgacgccgggtggggaacgccgggccggtggcgggacttccgccacgggactcggaaggggccgcgccgccgctgctgggagttgtagtccggccgtggttgggggagccgcggctcatgcgcggtgcacagaggcttgtttcacatctgtaacaacaggaggaggcccagcctcgtgatgaggaatagcaaggagagaattcagctccagttcaaaagcctacaaaatctgagactgtcattgcttttataaggattccagctttccctcctggccagaaatgttcagcctggactcattcagaaaagatcgggcccagcacaggcagcgtcagtgcaaacttcccccaccccgccttccacccatgtgtgtcaaccctaccccaggagggaccatctctcgagcttctagggacctattaaaagagttcccacagcccaaaaatcttctcaacagtgtgattggaagagccctcggcatctcacatgcaaaagacaaactagtctacgtgcacacaaatggaccgaagaaaaagaaagtcacactgcacataaaatggcccaagagcgtggaggtagaaggctatggcagcaagaagatcgatgctgagcggcaggctgcagctgcagcctgccagctgttcaagggttggggtctgctaggtccccggaatgagttgtttgacgcagccaaataccgagtgctagctgatcgctttggctcccctgccgacagctggtggcgtccggaacccaccatgccccctacttcctggcggcagctgaatccagagagtattcgaccagggggacctgggggcctatcccgctctttaggccgggaagaagaggaggacgaggaggaagagctagaagaagggaccatagatgttaccgacttcttgtccatgacccagcaggattcccacgctccactcagggactcaagggggagttcctttgagatgacagatgacgacagtgccattagggctctgacccagtttccacttcccaagaaccttctggccaaggtgattcagattgcaacgtcatcctccacagctaagaacctcatgcagttccatactgtgggcaccaagaccaagctgtctacactcaccctgctctggccctgccccatgacctttgttgccaaagggcgccgcaaagcagaggctgagaataaggcggcagccttggcctgcaagaaactgaagagcctgggcctggtggacaggaacaacgaaccgcttacacacgccatgtataacctggcctctttgcgtgagctgggtgagacccagcgccgaccatgcaccatccaggtgcccgagcccatcctccgcaagatagagaccttcctgaaccattaccctgtggagagttcatggatcgccccagaactccggctgcagagtgatgacatcttgcccttgggcaaggactcagggcctctgagtgaccctatcacaggcaagccctatgtgcccctgttggaagcagaggaggtacgtctcagccagagtctgctagaactgtggcggcggcgagggccggtctggcaggaggccccccagctacctgtggacccacatcgggacaccatcctcaacgccattgagcagcacccggtggtggtcatctctggggacacgggctgtgggaagaccacgcgcatcccccagctgttgctggagcgctatgtgaccgagggccgaggtgcccgctgcaatgttatcatcacccaacctcgccgcatctctgctgtgtctgtggcacagcgggtcagccacgaactgggcccctccctgcgccggaatgtgggcttccaggtgcggttggaaagtaagcccccatcccgaggcggggccctgctcttctgcactgtgggtatcctgctgcgtaagctgcagagcaaccccagcctggagggcgtgagccacgtcatcgtggatgaggtgcatgagcgggacgtgaacacagactttctgctgatcctgctcaagggcctgcagcggctcaacccggccctgcggctggtgctcatgagtgccacaggggacaatgagcgcttctcccgatactttggtggctgccccgtcatcaaggtgcctggcttcatgtacccagtcaaggagcactacctagaggacatcctggccaagttgggcaagcaccagtacctgcaccggcaccggcaccatgagtctgaggatgaatgcgcactcgatttggaccttgtgactgatctggttctgcacatcgatgctcgcggggaaccaggtgggatcctgtgcttcctgcctgggtggcaggagatcaaaggagtgcagcagcgcctccaggaggccctgggcatgcacgagagcaagtacctcatcctgccagtgcactccaacatccccatgatggatcagaaggccatattccagcagcctccagttggggtgcgcaagattgtcttggccaccaacattgctgagacttccatcacaatcaatgacatcgtgcatgtggtggacagtgggctgcacaaggaagaacgctatgacctgaagaccaaggtgtcctgcctggagacagtgtgggtatcaagagccaatgtgatccagcgccggggccgggcgggccgctgccagtccggctttgcctaccacttgttccctcgaagccggctggagaaaatggtccctttccaagtgccagagatcctgcgcacacctcttgagaacctggtgctgcaagcgaaaatccacatgcctgagaagacggcggtggagttcctgtccaaggctgtggacagtccaaacatcaaggcagtggacgaggctgtgatcttgctccaggagatcggggtgctggaccagcgggagtacctgactaccctggggcagcgcctggctcacatctccaccgacccccggttggccaaggccattgtgttggctgccatcttccgttgcctgcacccactactggtggtcgtttcctgcctcacccgggaccccttcagcagcagcctacagaaccgggcagaggtggacaaggtgaaagcactgttgagccatgacagcggcagtgaccacctggcctttgtgcgggctgtcgccggctgggaggaggtgctgcgttggcaggaccgcagctcccgggagaattacctggaggaaaacctgctgtacgcacccagcctgcgcttcatccacggactcatcaagcagttctcagagaacatttatgaggccttcctggtggggaagccctcggactgcaccctggcctccgcccagtgcaacgagtacagtgaggaggaggagctggtgaagggcgtgctgatggccggcctctaccccaacctcatccaggtgaggcagggcaaggtcacccggcaggggaagttcaagcccaacagcgtcacatataggaccaaatcaggcaacatcctgctgcacaagtcgaccattaacagggaggccacacggttacggagccgatggctgacgtatttcatggcagtcaagtccaatggcagcgtcttcgtccgggactcctctcaggtgcacccgctagctgtgctgctgctgaccgacggggacgtgcacatccgtgatgacgggcgccgggccaccatctcactgagcgacagtgacctgctgcggctggagggtgactcgcgtaccgtgcggctgctgaaggagctgcggcgggccctgggccgcatggtggagcggagcctgcgcagcgagctggctgcacttccccccagcgtacaggaggagcacgggcagctgcttgcgctactggcagagctgctgcgaggaccctgtggcagctttgatgtgcgcaagacagctgacgactgagccctgcttctgctggggctgtgtacagagtgcaaatgtttatttaaaataaagttctatttatcccttgtga

SEQ ID NO: 142490 - DNA, 835 bp, Homo sapiens
gtcttcagaaggccgcgcttgtggggtctcagtgttcctgatgtagggggctggtgagggttactcagggagtggggaagcactgaggaagtggcatttgtgtgctgcttacttgccacctcctccaggtgtcctgcctggagacagtgtgggtatcaagagccaatgtgatccagcgccggggccgggcgggccgctgccagtccggctttgcctaccacttgttccctcgaagccggctggagaaaatggtccctttccaagtgccagagatcctgcgcacacctcttgagaacctggtgctgcaagcgaaaatccacatgcctgagaagacggcggtggagttcctgtccaaggctgtggacagtccaaacatcaaggcagtggacgaggctgtgatcttgctccaggagatcggggtgctggaccagcgggagtacctgactaccctggggcagcgcctggctcacatctccaccgacccccggttggccaaggccattgtgttggctgccatcttccgttgcctgcacccactactggtggtcgtttcctgcctcacccgggaccccttcagcagcagcctacagaaccgggcagaggtggacaaggtgaaagcactgttgagccatgacagcggcagtgaccacctggcctttgtgcgggctgtcgccggctgggaggaggtgctgcgttggcaggaccgcagctcccgggagaattacctggaggaaaacctgctgtacgcacccagcctgcgcttcatccacggtcagtcgggcccacacctgctctcctgagcccctcccacccccactgagtttctgtcacctcc

SEQ ID NO: 142491 - DNA, 3803 bp, Homo sapiens
tgactcagcgttgtacttctcaggaggaggcccagcctcgtgatgaggaatagcaaggagagaattcagctccagttcaaaagcctacaaaatctgagactgtcattgcttttataaggattccagctttccctcctggccagaaatgttcagcctggactcattcagaaaagatcgggcccagcacaggcagcgtcagtgcaaacttcccccaccccgccttccacccatgtgtgtcaaccctaccccaggagggaccatctctcgagcttctagggacctattaaaagagttcccacagcccaaaaatcttctcaacagtgtgattggaagagccctcggcatctcacatgcaaaagacaaactagtctacgtgcacacaaatggaccgaagaaaaagaaagtcacactgcacataaaatggcccaagagcgtggaggtagaaggctatggcagcaagaagatcgatgctgagcggcaggctgcagctgcagcctgccagctgttcaagggttggggtctgctaggtccccggaatgagttgtttgacgcagccaaataccgagtgctagctgatcgctttggctcccctgccgacagctggtggcgtccggaacccaccatgccccctacttcctggcggcagctgaatccagagagtattcgaccagggggacctgggggcctatcccgctctttaggccgggaagaagaggaggacgaggaggaagagctagaagaagggaccatagatgttaccgacttcttgtccatgacccagcaggattcccacgctccactcagggactcaagggggagttcctttgagatgacagatgacgacagtgccattagggctctgacccagtttccacttcccaagaaccttctggccaaggtgattcagattgcaacgtcatcctccacagctaagaacctcatgcagttccatactgtgggcaccaagaccaagctgtctacactcaccctgctctggccctgccccatgacctttgttgccaaagggcgccgcaaagcagaggctgagaataaggcggcagccttggcctgcaagaaactgaagagcctgggcctggtggacaggaacaacgaaccgcttacacacgccatgtataacctggcctctttgcgtgagctgggtgagacccagcgccgaccatgcaccatccaggtgcccgagcccatcctccgcaagatagagaccttcctgaaccattaccctgtggagagttcatggatcgccccagaactccggctgcagagtgatgacatcttgcccttgggcaaggactcagggcctctgagtgaccctatcacaggcaagccctatgtgcccctgttggaagcagaggaggtacgtctcagccagagtctgctagaactgtggcggcggcgagggccggtctggcaggaggccccccagctacctgtggacccacatcgggacaccatcctcaacgccattgagcagcacccggtggtggtcatctctggggacacgggctgtgggaagaccacgcgcatcccccagctgttgctggagcgctatgtgaccgagggccgaggtgcccgctgcaatgttatcatcacccaacctcgccgcatctctgctgtgtctgtggcacagcgggtcagccacgaactgggcccctccctgcgccggaatgtgggcttccaggtgcggttggaaagtaagcccccatcccgaggcggggccctgctcttctgcactgtgggtatcctgctgcgtaagctgcagagcaaccccagcctggagggcgtgagccacgtcatcgtggatgaggtgcatgagcgggacgtgaacacagactttctgctgatcctgctcaagggcctgcagcggctcaacccggccctgcggctggtgctcatgagtgccacaggggacaatgagcgcttctcccgatactttggtggctgccccgtcatcaaggtgcctggcttcatgtacccagtcaaggagcactacctagaggacatcctggccaagttgggcaagcaccagtacctgcaccggcaccggcaccatgagtctgaggatgaatgcgcactcgatttggaccttgtgactgatctggttctgcacatcgatgctcgcggggaaccaggtgggatcctgtgcttcctgcctgggtggcaggagatcaaaggagtgcagcagcgcctccaggaggccctgggcatgcacgagagcaagtacctcatcctgccagtgcactccaacatccccatgatggatcagaaggccatattccagcagcctccagttggggtgcgcaagattgtcttggccaccaacattgctgagacttccatcacaatcaatgacatcgtgcatgtggtggacagtgggctgcacaaggaagaacgctatgacctgaagaccaaggtgtcctgcctggagacagtgtgggtatcaagagccaatgtgatccagcgccggggccgggcgggccgctgccagtccggctttgcctaccacttgttccctcgaagccggctggagaaaatggtccctttccaagtgccagagatcctgcgcacacctcttgagaacctggtgctgcaagcgaaaatccacatgcctgagaagacggcggtggagttcctgtccaaggctgtggacagtccaaacatcaaggcagtggacgaggctgtgatcttgctccaggagatcggggtgctggaccagcgggagtacctgactaccctggggcagcgcctggctcacatctccaccgacccccggttggccaaggccattgtgttggctgccatcttccgttgcctgcacccactactggtggtcgtttcctgcctcacccgggaccccttcagcagcagcctacagaaccgggcagaggtggacaaggtgaaagcactgttgagccatgacagcggcagtgaccacctggcctttgtgcgggctgtcgccggctgggaggaggtgctgcgttggcaggaccgcagctcccgggagaattacctggaggaaaacctgctgtacgcacccagcctgcgcttcatccacggactcatcaagcagttctcagagaacatttatgaggccttcctggtggggaagccctcggactgcaccctggcctccgcccagtgcaacgagtacagtgaggaggaggagctggtgaagggcgtgctgatggccggcctctaccccaacctcatccaggtgaggcagggcaaggtcacccggcaggggaagttcaagcccaacagcgtcacatataggaccaaatcaggcaacatcctgctgcacaagtcgaccattaacagggaggccacacggttacggagccgatggctgacgtatttcatggcagtcaagtccaatggcagcgtcttcgtccgggactcctctcaggtgcacccgctagctgtgctgctgctgaccgacggggacgtgcacatccgtgatgacgggcgccgggccaccatctcactgagcgacagtgacctgctgcggctggagggtgactcgcgtaccgtgcggctgctgaaggagctgcggcgggccctgggccgcatggtggagcggagcctgcgcagcgagctggctgcacttccccccagcgtacaggaggagcacgggcagctgcttgcgctactggcagagctgctgcgaggaccctgtggcagctttgatgtgcgcaagacagctgacgactgagccctgcttctgctggggctgtgtacagagtgcaaatgtttatttaaaataaagttctatttatcccttgtga

SEQ ID NO: 142492 - DNA, 4479 bp, Homo sapiens
ctgcaccgccgccgcgccccattgggccgggtgctggggcatcccgggcgctgggtgccccgagcggctacgacgagtcccaggtggggccgggctccaggcccgcgggggagcggagccgtgcgccgcaggcgggctccgtgacgccgggtggggaacgccgggccggtggcgggacttccgccacgggactcggaaggggccgcgccgccgctgctgggagttgtagtccggccgtggttgggggagccgcggctcatgcgcggtgcacagaggcttgtttcacatctgtaacaacaggaggaggcccagcctcgtgatgaggaatagcaaggagagaattcagctccagttcaaaagcctacaaaatctgagactgtcattgcttttataaggattccagctttccctcctggccagaaatgttcagcctggactcattcagaaaagatcgggcccagcacaggcagcgtcagtgcaaacttcccccaccccgccttccacccatgtgtgtcaaccctaccccaggagggaccatctctcgaggctgaacgttaacatttccaacatggcagcctcattccatcttcctgccttccatccacacgactgctggtttagatttgctggagagtgagctctgcagggtcctagccctgggcagcgccgagcccgcctactgaaggcccagggctgtggtgagcgaggacgggctgctgatgccctcgcctaggcttgggcttcgggtccgcccggcccgcagggggcgcgcggcgctcgggccggccgctcccgttctcttcgcccggtccctgccgcgcacaggcctcggggtcggcgggagcacgatggcggccgctaggagactcatggcgctggccgccggcatctctccgcgcctgcagccgctgggtccccgcgctgctgggcgacagggtcgctcgcgcggcttctcttcaagctgcgcccaccccgaccacaccaaggaagccgccgaggccgagtcagggatggcccccggcgggcctggggaaggcgacggaagcttggtgaacgcttctagggacctattaaaagagttcccacagcccaaaaatcttctcaacagtgtgattggaagagccctcggcatctcacatgcaaaagacaaactagtctacgtgcacacaaatggaccgaagaaaaagggttggggtctgctaggtccccggaatgagttgtttgacgcagccaaataccgagtgctagctgatcgctttggctcccctgccgacagctggtggcgtccggaacccaccatgccccctacttcctggcggcagctgaatccagagagtattcgaccagggggacctgggggcctatcccgctctttaggccgggaagaagaggaggacgaggaggaagagctagaagaagggaccatagatgttaccgacttcttgtccatgacccagcaggattcccacgctccactcagggactcaagggggagttcctttgagatgacagatgacgacagtgccattagggctctgacccagtttccacttcccaagaaccttctggccaaggtgattcagattgcaacgtcatcctccacagctaagaacctcatgcagttccatactgtgggcaccaagaccaagctgtctacactcaccctgctctggccctgccccatgacctttgttgccaaagggcgccgcaaagcagaggctgagaataaggcggcagccttggcctgcaagaaactgaagagcctgggcctggtggacaggaacaacgaaccgcttacacacgccatgtataacctggcctctttgcgtgagctgggtgagacccagcgccgaccatgcaccatccaggtgcccgagcccatcctccgcaagatagagaccttcctgaaccattaccctgtggagagttcatggatcgccccagaactccggctgcagagtgatgacatcttgcccttgggcaaggactcagggcctctgagtgaccctatcacaggcaagccctatgtgcccctgttggaagcagaggaggtacgtctcagccagagtctgctagaactgtggcggcggcgagggccggtctggcaggaggccccccagctacctgtggacccacatcgggacaccatcctcaacgccattgagcagcacccggtggtggtcatctctggggacacgggctgtgggaagaccacgcgcatcccccagctgttgctggagcgctatgtgaccgagggccgaggtgcccgctgcaatgttatcatcacccaacctcgccgcatctctgctgtgtctgtggcacagcgggtcagccacgaactgggcccctccctgcgccggaatgtgggcttccaggtgcggttggaaagtaagcccccatcccgaggcggggccctgctcttctgcactgtgggtatcctgctgcgtaagctgcagagcaaccccagcctggagggcgtgagccacgtcatcgtggatgaggtgcatgagcgggacgtgaacacagactttctgctgatcctgctcaagggcctgcagcggctcaacccggccctgcggctggtgctcatgagtgccacaggggacaatgagcgcttctcccgatactttggtggctgccccgtcatcaaggtgcctggcttcatgtacccagtcaaggagcactacctagaggacatcctggccaagttgggcaagcaccagtacctgcaccggcaccggcaccatgagtctgaggatgaatgcgcactcgatttggaccttgtgactgatctggttctgcacatcgatgctcgcggggaaccaggtgggatcctgtgcttcctgcctgggtggcaggagatcaaaggagtgcagcagcgcctccaggaggccctgggcatgcacgagagcaagtacctcatcctgccagtgcactccaacatccccatgatggatcagaaggccatattccagcagcctccagttggggtgcgcaagattgtcttggccaccaacattgctgagacttccatcacaatcaatgacatcgtgcatgtggtggacagtgggctgcacaaggaagaacgctatgacctgaagaccaaggtgtcctgcctggagacagtgtgggtatcaagagccaatgtgatccagcgccggggccgggcgggccgctgccagtccggctttgcctaccacttgttccctcgaagccggctggagaaaatggtccctttccaagtgccagagatcctgcgcacacctcttgagaacctggtgctgcaagcgaaaatccacatgcctgagaagacggcggtggagttcctgtccaaggctgtggacagtccaaacatcaaggcagtggacgaggctgtgatcttgctccaggagatcggggtgctggaccagcgggagtacctgactaccctggggcagcgcctggctcacatctccaccgacccccggttggccaaggccattgtgttggctgccatcttccgttgcctgcacccactactggtggtcgtttcctgcctcacccgggaccccttcagcagcagcctacagaaccgggcagaggtggacaaggtgaaagcactgttgagccatgacagcggcagtgaccacctggcctttgtgcgggctgtcgccggctgggaggaggtgctgcgttggcaggaccgcagctcccgggagaattacctggaggaaaacctgctgtacgcacccagcctgcgcttcatccacggactcatcaagcagttctcagagaacatttatgaggccttcctggtggggaagccctcggactgcaccctggcctccgcccagtgcaacgagtacagtgaggaggaggagctggtgaagggcgtgctgatggccggcctctaccccaacctcatccaggtgaggcagggcaaggtcacccggcaggggaagttcaagcccaacagcgtcacatataggaccaaatcaggcaacatcctgctgcacaagtcgaccattaacagggaggccacacggttacggagccgatggctgacgtatttcatggcagtcaagtccaatggcagcgtcttcgtccgggactcctctcaggtgcacccgctagctgtgctgctgctgaccgacggggacgtgcacatccgtgatgacgggcgccgggccaccatctcactgagcgacagtgacctgctgcggctggagggtgactcgcgtaccgtgcggctgctgaaggagctgcggcgggccctgggccgcatggtggagcggagcctgcgcagcgagctggctgcacttccccccagcgtacaggaggagcacgggcagctgcttgcgctactggcagagctgctgcgaggaccctgtggcagctttgatgtgcgcaagacagctgacgactgagccctgcttctgctggggctgtgtacagagtgcaaatgtttatttaaaataaagttctatttatcccttgtga

SEQ ID NO: 142493 - DNA, 3536 bp, Homo sapiens
caactctgaacctagcacattgctgctgtgaggtctgctgctgtgaggtccaccactgtttattttccatgtaatttgcaacaactctagtctggagtggcaagacttctgatttctctcttctcttccccagaaagtcacactgcacataaaatggcccaagagcgtggaggtagaaggctatggcagcaagaagatcgatgctgagcggcaggctgcagctgcagcctgccagctgttcaagggttggggtctgctaggtccccggaatgagttgtttgacgcagccaaataccgagtgctagctgatcgctttggctcccctgccgacagctggtggcgtccggaacccaccatgccccctacttcctggcggcagctgaatccagagagtattcgaccagggggacctgggggcctatcccgctctttaggccgggaagaagaggaggacgaggaggaagagctagaagaagggaccatagatgttaccgacttcttgtccatgacccagcaggattcccacgctccactcagggactcaagggggagttcctttgagatgacagatgacgacagtgccattagggctctgacccagtttccacttcccaagaaccttctggccaaggtgattcagattgcaacgtcatcctccacagctaagaacctcatgcagttccatactgtgggcaccaagaccaagctgtctacactcaccctgctctggccctgccccatgacctttgttgccaaagggcgccgcaaagcagaggctgagaataaggcggcagccttggcctgcaagaaactgaagagcctgggcctggtggacaggaacaacgaaccgcttacacacgccatgtataacctggcctctttgcgtgagctgggtgagacccagcgccgaccatgcaccatccaggtgcccgagcccatcctccgcaagatagagaccttcctgaaccattaccctgtggagagttcatggatcgccccagaactccggctgcagagtgatgacatcttgcccttgggcaaggactcagggcctctgagtgaccctatcacaggcaagccctatgtgcccctgttggaagcagaggaggtacgtctcagccagagtctgctagaactgtggcggcggcgagggccggtctggcaggaggccccccagctacctgtggacccacatcgggacaccatcctcaacgccattgagcagcacccggtggtggtcatctctggggacacgggctgtgggaagaccacgcgcatcccccagctgttgctggagcgctatgtgaccgagggccgaggtgcccgctgcaatgttatcatcacccaacctcgccgcatctctgctgtgtctgtggcacagcgggtcagccacgaactgggcccctccctgcgccggaatgtgggcttccaggtgcggttggaaagtaagcccccatcccgaggcggggccctgctcttctgcactgtgggtatcctgctgcgtaagctgcagagcaaccccagcctggagggcgtgagccacgtcatcgtggatgaggtgcatgagcgggacgtgaacacagactttctgctgatcctgctcaagggcctgcagcggctcaacccggccctgcggctggtgctcatgagtgccacaggggacaatgagcgcttctcccgatactttggtggctgccccgtcatcaaggtgcctggcttcatgtacccagtcaaggagcactacctagaggacatcctggccaagttgggcaagcaccagtacctgcaccggcaccggcaccatgagtctgaggatgaatgcgcactcgatttggaccttgtgactgatctggttctgcacatcgatgctcgcggggaaccaggtgggatcctgtgcttcctgcctgggtggcaggagatcaaaggagtgcagcagcgcctccaggaggccctgggcatgcacgagagcaagtacctcatcctgccagtgcactccaacatccccatgatggatcagaaggccatattccagcagcctccagttggggtgcgcaagattgtcttggccaccaacattgctgagacttccatcacaatcaatgacatcgtgcatgtggtggacagtgggctgcacaaggaagaacgctatgacctgaagaccaaggtgtcctgcctggagacagtgtgggtatcaagagccaatgtgatccagcgccggggccgggcgggccgctgccagtccggctttgcctaccacttgttccctcgaagccggctggagaaaatggtccctttccaagtgccagagatcctgcgcacacctcttgagaacctggtgctgcaagcgaaaatccacatgcctgagaagacggcggtggagttcctgtccaaggctgtggacagtccaaacatcaaggcagtggacgaggctgtgatcttgctccaggagatcggggtgctggaccagcgggagtacctgactaccctggggcagcgcctggctcacatctccaccgacccccggttggccaaggccattgtgttggctgccatcttccgttgcctgcacccactactggtggtcgtttcctgcctcacccgggaccccttcagcagcagcctacagaaccgggcagaggtggacaaggtgaaagcactgttgagccatgacagcggcagtgaccacctggcctttgtgcgggctgtcgccggctgggaggaggtgctgcgttggcaggaccgcagctcccgggagaattacctggaggaaaacctgctgtacgcacccagcctgcgcttcatccacggactcatcaagcagttctcagagaacatttatgaggccttcctggtggggaagccctcggactgcaccctggcctccgcccagtgcaacgagtacagtgaggaggaggagctggtgaagggcgtgctgatggccggcctctaccccaacctcatccaggtgaggcagggcaaggtcacccggcaggggaagttcaagcccaacagcgtcacatataggaccaaatcaggcaacatcctgctgcacaagtcgaccattaacagggaggccacacggttacggagccgatggctgacgtatttcatggcagtcaagtccaatggcagcgtcttcgtccgggactcctctcaggtgcacccgctagctgtgctgctgctgaccgacggggacgtgcacatccgtgatgacgggcgccgggccaccatctcactgagcgacagtgacctgctgcggctggagggtgactcgcgtaccgtgcggctgctgaaggagctgcggcgggccctgggccgcatggtggagcggagcctgcgcagcgagctggctgcacttccccccagcgtacaggaggagcacgggcagctgcttgcgctactggcagagctgctgcgaggaccctgtggcagctttgatgtgcgcaagacagctgacgactgagccctgcttctgctggggctgtgtacagagtgcaaatgtttatttaaaataaagttctatttatcccttgtga

SEQ ID NO: 142494 - DNA, 2917 bp, Homo sapiens
tcattttttaaaacgtttattttggtaagttaacattttcctagttcataatttctccctccatcaccatgtcagccaaaatccaaaatctcttagagattacttggcacaacttatgcgttggagctcctgagcttgtctgggctggtttttggggagccccagagcatagactgagtcttgcatgtccccctgcagagcctgggcctggtggacaggaacaacgaaccgcttacacacgccatgtataacctggcctctttgcgtgagctgggtgagacccagcgccgaccatgcaccatccaggtgcccgagcccatcctccgcaagatagagaccttcctgaaccattaccctgtggagagttcatggatcgccccagaactccggctgcagagtgatgacatcttgcccttgggcaaggactcagggcctctgagtgaccctatcacaggcaagccctatgtgcccctgttggaagcagaggaggtacgtctcagccagagtctgctagaactgtggcggcggcgagggccggtctggcaggaggccccccagctacctgtggacccacatcgggacaccatcctcaacgccattgagcagcacccggtggtggtcatctctggggacacgggctgtgggaagaccacgcgcatcccccagctgttgctggagcgctatgtgaccgagggccgaggtgcccgctgcaatgttatcatcacccaacctcgccgcatctctgctgtgtctgtggcacagcgggtcagccacgaactgggcccctccctgcgccggaatgtgggcttccaggtgcggttggaaagtaagcccccatcccgaggcggggccctgctcttctgcactgtgggtatcctgctgcgtaagctgcagagcaaccccagcctggagggcgtgagccacgtcatcgtggatgaggtgcatgagcgggacgtgaacacagactttctgctgatcctgctcaagggcctgcagcggctcaacccggccctgcggctggtgctcatgagtgccacaggggacaatgagcgcttctcccgatactttggtggctgccccgtcatcaaggtgcctggcttcatgtacccagtcaaggagcactacctagaggacatcctggccaagttgggcaagcaccagtacctgcaccggcaccggcaccatgagtctgaggatgaatgcgcactcgatttggaccttgtgactgatctggttctgcacatcgatgctcgcggggaaccaggtgggatcctgtgcttcctgcctgggtggcaggagatcaaaggagtgcagcagcgcctccaggaggccctgggcatgcacgagagcaagtacctcatcctgccagtgcactccaacatccccatgatggatcagaaggccatattccagcagcctccagttggggtgcgcaagattgtcttggccaccaacattgctgagacttccatcacaatcaatgacatcgtgcatgtggtggacagtgggctgcacaaggaagaacgctatgacctgaagaccaaggtgtcctgcctggagacagtgtgggtatcaagagccaatgtgatccagcgccggggccgggcgggccgctgccagtccggctttgcctaccacttgttccctcgaagccggctggagaaaatggtccctttccaagtgccagagatcctgcgcacacctcttgagaacctggtgctgcaagcgaaaatccacatgcctgagaagacggcggtggagttcctgtccaaggctgtggacagtccaaacatcaaggcagtggacgaggctgtgatcttgctccaggagatcggggtgctggaccagcgggagtacctgactaccctggggcagcgcctggctcacatctccaccgacccccggttggccaaggccattgtgttggctgccatcttccgttgcctgcacccactactggtggtcgtttcctgcctcacccgggaccccttcagcagcagcctacagaaccgggcagaggtggacaaggtgaaagcactgttgagccatgacagcggcagtgaccacctggcctttgtgcgggctgtcgccggctgggaggaggtgctgcgttggcaggaccgcagctcccgggagaattacctggaggaaaacctgctgtacgcacccagcctgcgcttcatccacggactcatcaagcagttctcagagaacatttatgaggccttcctggtggggaagccctcggactgcaccctggcctccgcccagtgcaacgagtacagtgaggaggaggagctggtgaagggcgtgctgatggccggcctctaccccaacctcatccaggtgaggcagggcaaggtcacccggcaggggaagttcaagcccaacagcgtcacatataggaccaaatcaggcaacatcctgctgcacaagtcgaccattaacagggaggccacacggttacggagccgatggctgacgtatttcatggcagtcaagtccaatggcagcgtcttcgtccgggactcctctcaggtgcacccgctagctgtgctgctgctgaccgacggggacgtgcacatccgtgatgacgggcgccgggccaccatctcactgagcgacagtgacctgctgcggctggagggtgactcgcgtaccgtgcggctgctgaaggagctgcggcgggccctgggccgcatggtggagcggagcctgcgcagcgagctggctgcacttccccccagcgtacaggaggagcacgggcagctgcttgcgctactggcagagctgctgcgaggaccctgtggcagctttgatgtgcgcaagacagctgacgactgagccctgcttctgctggggctgtgtacagagtgcaaatgtttatttaaaataaagttctatttatcccttgtga

SEQ ID NO: 142495 - DNA, 4687 bp, Homo sapiens
ctgcaccgccgccgcgccccattgggccgggtgctggggcatcccgggcgctgggtgccccgagcggctacgacgagtcccaggtggggccgggctccaggcccgcgggggagcggagccgtgcgccgcaggcgggctccgtgacgccgggtggggaacgccgggccggtggcgggacttccgccacgggactcggaaggggccgcgccgccgctgctgggagttgtagtccggccgtggttgggggagccgcggctcatgcgcggtgcacagaggcttgtttcacatctgtaacaacaggaggaggcccagcctcgtgatgaggaatagcaaggagagaattcagctccagttcaaaagcctacaaaatctgagactgtcattgcttttataaggattccagctttccctcctggccagaaatgttcagcctggactcattcagaaaagatcgggcccagcacaggcagcgtcagtgcaaacttcccccaccccgccttccacccatgtgtgtcaaccctaccccaggagggaccatctctcgaggctgaacgttaacatttccaacatggcagcctcattccatcttcctgccttccatccacacgactgctggtttagatttgctggagagtgagctctgcagggtcctagccctgggcagcgccgagcccgcctactgaaggcccagggctgtggtgagcgaggacgggctgctgatgccctcgcctaggcttgggcttcgggtccgcccggcccgcagggggcgcgcggcgctcgggccggccgctcccgttctcttcgcccggtccctgccgcgcacaggcctcggggtcggcgggagcacgatggcggccgctaggagactcatggcgctggccgccggcatctctccgcgcctgcagccgctgggtccccgcgctgctgggcgacagggtcgctcgcgcggcttctcttcaagctgcgcccaccccgaccacaccaaggaagccgccgaggccgagtcagggatggcccccggcgggcctggggaaggcgacggaagcttggtgaacgcttctagggacctattaaaagagttcccacagcccaaaaatcttctcaacagtgtgattggaagagccctcggcatctcacatgcaaaagacaaactagtctacgtgcacacaaatggaccgaagaaaaagaaagtcacactgcacataaaatggcccaagagcgtggaggtagaaggctatggcagcaagaagatcgatgctgagcggcaggctgcagctgcagcctgccagctgttcaagggttggggtctgctaggtccccggaatgagttgtttgacgcagccaaataccgagtgctagctgatcgctttggctcccctgccgacagctggtggcgtccggaacccaccatgccccctacttcctggcggcagctgaatccagagagtattcgaccagggggacctgggggcctatcccgctctttaggccgggaagaagaggaggacgaggaggaagagctagaagaagggaccatagatgttaccgacttcttgtccatgacccagcaggattcccacgctccactcagggactcaagggggagttcctttgagatgacagatgacgacagtgccattagggctctgacccagtttccacttcccaagaaccttctggccaaggtgattcagattgcaacgtcatcctccacagctaagaacctcatgcagttccatactgtgggcaccaagaccaagctgtctacactcaccctgctctggccctgccccatgacctttgttgccaaagggcgccgcaaagcagaggctgagaataaggcggcagccttggcctgcaagaaactgaagagcctgggcctggtggacaggaacaacgaaccgcttacacacgccatgtataacctggcctctttgcgtgagctgggtgagacccagcgccgaccatgcaccatccaggtgcccgagcccatcctccgcaagatagagaccttcctgaaccattaccctgtggagagttcatggatcgccccagaactccggctgcagagtgatgacatcttgcccttgggcaaggactcagggcctctgagtgaccctatcacaggcaagccctatgtgcccctgttggaagcagaggaggtacgtctcagccagagtctgctagaactgtggcggcggcgagggccggtctggcaggaggccccccagctacctgtggacccacatcgggacaccatcctcaacgccattgagcagcacccggtggtggtcatctctggggacacgggctgtgggaagaccacgcgcatcccccagctgttgctggagcgctatgtgaccgagggccgaggtgcccgctgcaatgttatcatcacccaacctcgccgcatctctgctgtgtctgtggcacagcgggtcagccacgaactgggcccctccctgcgccggaatgtgggcttccaggtgcggttggaaagtaagcccccatcccgaggcggggccctgctcttctgcactgtgggtatcctgctgcgtaagctgcagagcaaccccagcctggagggcgtgagccacgtcatcgtggatgaggtgcatgagcgggacgtgaacacagactttctgctgatcctgctcaagggcctgcagcggctcaacccggccctgcggctggtgctcatgagtgccacaggggacaatgagcgcttctcccgatactttggtggctgccccgtcatcaaggtgcctggcttcatgtacccagtcaaggagcactacctagaggacatcctggccaagttgggcaagcaccagtacctgcaccggcaccggcaccatgagtctgaggatgaatgcgcactcgatttggaccttgtgactgatctggttctgcacatcgatgctcgcggggaaccaggtgggatcctgtgcttcctgcctgggtggcaggagatcaaaggagtgcagcagcgcctccaggaggccctgggcatgcacgagagcaagtacctcatcctgccagtgcactccaacatccccatgatggatcagaaggccatattccagcagcctccagttggggtgcgcaagattgtcttggccaccaacattgctgagacttccatcacaatcaatgacatcgtgcatgtggtggacagtgggctgcacaaggaagaacgctatgacctgaagaccaaggtgtcctgcctggagacagtgtgggtatcaagagccaatgtgatccagcgccggggccgggcgggccgctgccagtccggctttgcctaccacttgttccctcgaagccggctggagaaaatggtccctttccaagtgccagagatcctgcgcacacctcttgagaacctggtgctgcaagcgaaaatccacatgcctgagaagacggcggtggagttcctgtccaaggctgtggacagtccaaacatcaaggcagtggacgaggctgtgatcttgctccaggagatcggggtgctggaccagcgggagtacctgactaccctggggcagcgcctggctcacatctccaccgacccccggttggccaaggccattgtgttggctgccatcttccgttgcctgcacccactactggtggtcgtttcctgcctcacccgggaccccttcagcagcagcctacagaaccgggcagaggtggacaaggtgaaagcactgttgagccatgacagcggcagtgaccacctggcctttgtgcgggctgtcgccggctgggaggaggtgctgcgttggcaggaccgcagctcccgggagaattacctggaggaaaacctgctgtacgcacccagcctgcgcttcatccacggactcatcaagcagttctcagagaacatttatgaggccttcctggtggggaagccctcggactgcaccctggcctccgcccagtgcaacgagtacagtgaggaggaggagctggtgaagggcgtgctgatggccggcctctaccccaacctcatccaggtgaggcagggcaaggtcacccggcaggggaagttcaagcccaacagcgtcacatataggaccaaatcaggcaacatcctgctgcacaagtcgaccattaacagggaggccacacggttacggagccgatggctgacgtatttcatggcagtcaagtccaatggcagcgtcttcgtccgggactcctctcaggtgcacccgctagctgtgctgctgctgaccgacggggacgtgcacatccgtggtgggtgcctgcaggcctcccgcccaccccgctctgcagctgctcctccggggcctgggctcaccacagttccccaccatcttttccattccctcagatgacgggcgccgggccaccatctcactgagcgacagtgacctgctgcggctggagggtgactcgcgtaccgtgcggctgctgaaggagctgcggcgggccctgggccgcatggtggagcggagcctgcgcagcgagctggctgcacttccccccagcgtacaggaggagcacgggcagctgcttgcgctactggcagagctgctgcgaggaccctgtggcagctttgatgtgcgcaagacagctgacgactgagccctgcttctgctggggctgtgtacagagtgcaaatgtttatttaaaataaagttctatttatcccttgtga

SEQ ID NO: 142496 - DNA, 4563 bp, Homo sapiens
ctgcaccgccgccgcgccccattgggccgggtgctggggcatcccgggcgctgggtgccccgagcggctacgacgagtcccaggtggggccgggctccaggcccgcgggggagcggagccgtgcgccgcaggcgggctccgtgacgccgggtggggaacgccgggccggtggcgggacttccgccacgggactcggaaggggccgcgccgccgctgctgggagttgtagtccggccgtggttgggggagccgcggctcatgcgcggtgcacagaggcttgtttcacatctgtaacaacaggaggaggcccagcctcgtgatgaggaatagcaaggagagaattcagctccagttcaaaagcctacaaaatctgagactgtcattgcttttataaggattccagctttccctcctggccagaaatgttcagcctggactcattcagaaaagatcgggcccagcacaggcagcgtcagtgcaaacttcccccaccccgccttccacccatgtgtgtcaaccctaccccaggagggaccatctctcgaggctgaacgttaacatttccaacatggcagcctcattccatcttcctgccttccatccacacgactgctggtttagatttgctggagagtgagctctgcagggtcctagccctgggcagcgccgagcccgcctactgaaggcccagggctgtggtgagcgaggacgggctgctgatgccctcgcctaggcttgggcttcgggtccgcccggcccgcagggggcgcgcggcgctcgggccggccgctcccgttctcttcgcccggtccctgccgcgcacaggcctcggggtcggcgggagcacgatggcggccgctaggagactcatggcgctggccgccggcatctctccgcgcctgcagccgctgggtccccgcgctgctgggcgacagggtcgctcgcgcggcttctcttcaagctgcgcccaccccgaccacaccaaggaagccgccgaggccgagtcagggatggcccccggcgggcctggggaaggcgacggaagcttggtgaacgcttctagggacctattaaaagagttcccacagcccaaaaatcttctcaacagtgtgattggaagagccctcggcatctcacatgcaaaagacaaactagtctacgtgcacacaaatggaccgaagaaaaagaaagtcacactgcacataaaatggcccaagagcgtggaggtagaaggctatggcagcaagaagatcgatgctgagcggcaggctgcagctgcagcctgccagctgttcaagggttggggtctgctaggtccccggaatgagttgtttgacgcagccaaataccgagtgctagctgatcgctttggctcccctgccgacagctggtggcgtccggaacccaccatgccccctacttcctggcggcagctgaatccagagagtattcgaccagggggacctgggggcctatcccgctctttaggccgggaagaagaggaggacgaggaggaagagctagaagaagggaccatagatgttaccgacttcttgtccatgacccagcaggattcccacgctccactcagggactcaagggggagttcctttgagatgacagatgacgacagtgccattagggctctgacccagtttccacttcccaagaaccttctggccaaggtgattcagattgcaacgtcatcctccacagctaagaacctcatgcagttccatactgtgggcaccaagaccaagctgtctacactcaccctgctctggccctgccccatgacctttgttgccaaagggcgccgcaaagcagaggctgagaataaggcggcagccttggcctgcaagaaactgaagagcctgggcctggtggacaggaacaacgaaccgcttacacacgccatgtataacctggcctctttgcgtgagctgggtgagacccagcgccgaccatgcaccatccaggtgcccgagcccatcctccgcaagatagagaccttcctgaaccattaccctgtggagagttcatggatcgccccagaactccggctgcagagtgatgacatcttgcccttgggcaaggactcagggcctctgagtgaccctatcacaggcaagccctatgtgcccctgttggaagcagaggaggtacgtctcagccagagtctgctagaactgtggcggcggcgagggccggtctggcaggaggccccccagctacctgtggacccacatcgggacaccatcctcaacgccattgagcagcacccggtggtggtcatctctggggacacgggctgtgggaagaccacgcgcatcccccagctgttgctggagcgctatgtgaccgagggccgaggtgcccgctgcaatgttatcatcacccaacctcgccgcatctctgctgtgtctgtggcacagcgggtcagccacgaactgggcccctccctgcgccggaatgtgggcttccaggtgcggttggaaagtaagcccccatcccgaggcggggccctgctcttctgcactgtgggtatcctgctgcgtaagctgcagagcaaccccagcctggagggcgtgagccacgtcatcgtggatgaggtgcatgagcgggacgtgaacacagactttctgctgatcctgctcaagggcctgcagcggctcaacccggccctgcggctggtgctcatgagtgccacaggggacaatgagcgcttctcccgatactttggtggctgccccgtcatcaaggtgcctggcttcatgtacccagtcaaggagcactacctagaggacatcctggccaagttgggcaagcaccagtacctgcaccggcaccggcaccatgagtctgaggatgaatgcgcactcgatttggaccttgtgactgatctggttctgcacatcgatgctcgcggggaaccaggtgggatcctgtgcttcctgcctgggtggcaggagatcaaaggagtgcagcagcgcctccaggaggccctgggcatgcacgagagcaagtacctcatcctgccagtgcactccaacatccccatgatggatcagaaggccatattccagcagcctccagttggggtgcgcaagattgtcttggccaccaacattgctgagacttccatcacaatcaatgacatcgtgcatgtggtggacagtgggctgcacaaggaagaacgctatgacctgaagaccaaggtgtcctgcctggagacagtgtgggtatcaagagccaatgtgatccagcgccggggccgggcgggccgctgccagtccggctttgcctaccacttgttccctcgaagccggctggagaaaatggtccctttccaagtgccagagatcctgcgcacacctcttgagaacctggtgctgcaagcgaaaatccacatgcctgagaagacggcggtggagttcctgtccaaggctgtggacagtccaaacatcaaggcagtggacgaggctgtgatcttgctccaggagatcggggtgctggaccagcgggagtacctgactaccctggggcagcgcctggctcacatctccaccgacccccggttggccaaggccattgtgttggctgccatcttccgttgcctgcacccccgggaccccttcagcagcagcctacagaaccgggcagaggtggacaaggtgaaagcactgttgagccatgacagcggcagtgaccacctggcctttgtgcgggctgtcgccggctgggaggaggtgctgcgttggcaggaccgcagctcccgggagaattacctggaggaaaacctgctgtacgcacccagcctgcgcttcatccacggactcatcaagcagttctcagagaacatttatgaggccttcctggtggggaagccctcggactgcaccctggcctccgcccagtgcaacgagtacagtgaggaggaggagctggtgaagggcgtgctgatggccggcctctaccccaacctcatccaggtgaggcagggcaaggtcacccggcaggggaagttcaagcccaacagcgtcacatataggaccaaatcaggcaacatcctgctgcacaagtcgaccattaacagggaggccacacggttacggagccgatggctgacgtatttcatggcagtcaagtccaatggcagcgtcttcgtccgggactcctctcaggtgcacccgctagctgtgctgctgctgaccgacggggacgtgcacatccgtgatgacgggcgccgggccaccatctcactgagcgacagtgacctgctgcggctggagggtgactcgcgtaccgtgcggctgctgaaggagctgcggcgggccctgggccgcatggtggagcggagcctgcgcagcgagctggctgcacttccccccagcgtacaggaggagcacgggcagctgcttgcgctactggcagagctgctgcgaggaccctgtggcagctttgatgtgcgcaagacagctgacgactgagccctgcttctgctggggctgtgtacagagtgcaaatgtttatttaaaataaagttctatttatcccttgtga

SEQ ID NO: 142497 - DNA, 3925 bp, Homo sapiens
ctgcaccgccgccgcgccccattgggccgggtgctggggcatcccgggcgctgggtgccccgagcggctacgacgagtcccaggtggggccgggctccaggcccgcgggggagcggagccgtgcgccgcaggcgggctccgtgacgccgggtggggaacgccgggccggtggcgggacttccgccacgggactcggaaggggccgcgccgccgctgctgggagttgtagtccggccgtggttgggggagccgcggctcatgcgcggtgcacagaggcttgtttcacatctgtaacaacaggaggaggcccagcctcgtgatgaggaatagcaaggagagaattcagctccagttcaaaagcctacaaaatctgagactgtcattgcttttataaggattccagctttccctcctggccagaaatgttcagcctggactcattcagaaaagatcgggcccagcacaggcagcgtcagtgcaaacttcccccaccccgccttccacccatgtgtgtcaaccctaccccaggagggaccatctctcgaggctgaacgttaacatttccaacatggcagcctcattccatcttcctgccttccatccacacgactgctggtttagatttgctggagagtgagctctgcagggtcctagccctgggcagcgccgagcccgcctactgaaggcccagggctgtggtgagcgaggacgggctgctgatgccctcgcctaggcttgggcttcgggtccgcccggcccgcagggggcgcgcggcgctcgggccggccgctcccgttctcttcgcccggtccctgccgcgcacaggcctcggggtcggcgggagcacgatggcggccgctaggagactcatggcgctggccgccggcatctctccgcgcctgcagccgctgggtccccgcgctgctgggcgacagggtcgctcgcgcggcttctcttcaagctgcgcccaccccgaccacaccaaggaagccgccgaggccgagtcagggatggcccccggcgggcctggggaaggcgacggaagcttggtgaacgcttctagggacctattaaaagagttcccacagcccaaaaatcttctcaacagtgtgattggaagagccctcggcatctcacatgcaaaagacaaactagtctacgtgcacacaaatggaccgaagaaaaagaaagtcacactgcacataaaatggcccaagagcgtggaggtagaaggctatggcagcaagaagatcgatgctgagcggcaggctgcagctgcagcctgccagctgttcaagggttggggtctgctaggtccccggaatgagttgtttgacgcagccaaataccgagtgctagctgatcgctttggctcccctgccgacagctggtggcgtccggaacccaccatgccccctacttcctggcggcagctgaatccagagagtattcgaccagggggacctgggggcctatcccgctctttaggccgggaagaagaggaggacgaggaggaagagctagaagaagggaccatagatgttaccgacttcttgtccatgacccagcaggattcccacgctccactcagggactcaagggggagttcctttgagatgacagatgacgacagtgccattagggctctgacccagtttccacttcccaagaaccttctggccaaggtgattcagattgcaacgtcatcctccacagctaagaacctcatgcagttccatactgtgggcaccaagaccaagctgtctacactcaccctgctctggccctgccccatgacctttgttgccaaagggcgccgcaaagcagaggctgagaataaggcggcagccttggcctgcaagaaactgaagagcctgggcctggtggacaggaacaacgaaccgcttacacacgccatgtataacctggcctctttgcgtgagctgggtgagacccagcgccgaccatgcaccatccaggtgcccgagcccatcctccgcaagatagagaccttcctgaaccattaccctgtggagagttcatggatcgccccagaactccggctgcagagtgatgacatcttgcccttgggcaaggactcagggcctctgagtgaccctatcacaggcaagccctatgtgcccctgttggaagcagaggaggtacgtctcagccagagtctgctagaactgtggcggcggcgagggccggtctggcaggaggccccccagctacctgtggacccacatcgggacaccatcctcaacgccattgagcagcacccggtggtggtcatctctggggacacgggctgtgggaagaccacgcgcatcccccagctgttgctggagcgctatgtgaccgagggccgaggtgcccgctgcaatgttatcatcacccaacctcgccgcatctctgctgtgtctgtggcacagcgggtcagccacgaactgggcccctccctgcgccggaatgtgggcttccaggtgcggttggaaagtaagcccccatcccgaggcggggccctgctcttctgcactgtgggtatcctgctgcgtaagctgcagagcaaccccagcctggagggcgtgagccacgtcatcgtggatgaggtgcatgagcgggacgtgaacacagactttctgctgatcctgctcaagggcctgcagcggctcaacccggccctgcggctggtgctcatgagtgccacaggggacaatgagcgcttctcccgatactttggtggctgccccgtcatcaaggtgcctggcttcatgtacccagtcaaggagcactacctagaggacatcctggccaagttgggcaagcaccagtacctgcaccggcaccggcaccatgagtctgaggatgaatgcgcactcgatttggaccttgtgactgatctggttctgcacatcgatgctcgcggggaaccaggtgggatcctgtgcttcctgcctgggtggcaggagatcaaaggagtgcagcagcgcctccaggaggccctgggcatgcacgagagcaagtacctcatcctgccagtgcactccaacatccccatgatggatcagaaggccatattccagcagcctccagttggggtgcgcaagattgtcttggccaccaacattgctgagacttccatcacaatcaatgacatcgtgcatgtggtggacagtgggctgcacaaggaagaacgctatgacctgaagaccaaggtgtcctgcctggagacagtgtgggtatcaagagccaatgtgatccagcgccggggccgggcgggccgctgccagtccggctttgcctaccacttgttccctcgaagccggctggagaaaatggtccctttccaagtgccagagatcctgcgcacacctcttgagaacctggtgctgcaagcgaaaatccacatgcctgagaagacggcggtggagttcctgtccaaggctgtggacagtccaaacatcaaggcagtggacgaggctgtgatcttgctccaggagatcggggtgctggaccagcgggagtacctgactaccctggggcagcgcctggctcacatctccaccgacccccggttggccaaggccattgtgttggctgccatcttccgttgcctgcacccactactggtggtcgtttcctgcctcacccgggaccccttcagcagcagcctacagaaccgggcagaggtggacaaggtgaaagcactgttgagccatgacagcggcagtgaccacctggcctttgtgcgggctgtcgccggctgggaggaggtgctgcgttggcaggaccgcagctcccgggagaattacctggaggaaaacctgctgtacgcacccagcctgcgcttcatccacggtcagtcgggcccacacctgctctcctgagcccctcccacccccactgagtttctgtcacctcc

SEQ ID NO: 142498 - DNA, 2543 bp, Homo sapiens
ctgcaccgccgccgcgccccattgggccgggtgctggggcatcccgggcgctgggtgccccgagcggctacgacgagtcccaggtggggccgggctccaggcccgcgggggagcggagccgtgcgccgcaggcgggctccgtgacgccgggtggggaacgccgggccggtggcgggacttccgccacgggactcggaaggggccgcgccgccgctgctgggagttgtagtccggccgtggttgggggagccgcggctcatgcgcggtgcacagaggcttgtttcacatctgtaacaacaggaggaggcccagcctcgtgatgaggaatagcaaggagagaattcagctccagttcaaaagcctacaaaatctgagactgtcattgcttttataaggattccagctttccctcctggccagaaatgttcagcctggactcattcagaaaagatcgggcccagcacaggcagcgtcagtgcaaacttcccccaccccgccttccacccatgtgtgtcaaccctaccccaggagggaccatctctcgaggctgaacgttaacatttccaacatggcagcctcattccatcttcctgccttccatccacacgactgctggtttagatttgctggagagtgagctctgcagggtcctagccctgggcagcgccgagcccgcctactgaaggcccagggctgtggtgagcgaggacgggctgctgatgccctcgcctaggcttgggcttcgggtccgcccggcccgcagggggcgcgcggcgctcgggccggccgctcccgttctcttcgcccggtccctgccgcgcacaggcctcggggtcggcgggagcacgatggcggccgctaggagactcatggcgctggccgccggcatctctccgcgcctgcagccgctgggtccccgcgctgctgggcgacagggtcgctcgcgcggcttctcttcaagctgcgcccaccccgaccacaccaaggaagccgccgaggccgagtcagggatggcccccggcgggcctggggaaggcgacggaagcttggtgaacgcttctagggacctattaaaagagttcccacagcccaaaaatcttctcaacagtgtgattggaagagccctcggcatctcacatgcaaaagacaaactagtctacgtgcacacaaatggaccgaagaaaaagaaagtcacactgcacataaaatggcccaagagcgtggaggtagaaggctatggcagcaagaagatcgatgctgagcggcaggctgcagctgcagcctgccagctgttcaagggttggggtctgctaggtccccggaatgagttgtttgacgcagccaaataccgagtgctagctgatcgctttggctcccctgccgacagctggtggcgtccggaacccaccatgccccctacttcctggcggcagctgaatccagagagtattcgaccagggggacctgggggcctatcccgctctttaggccgggaagaagaggaggacgaggaggaagagctagaagaagggaccatagatgttaccgacttcttgtccatgacccagcaggattcccacgctccactcagggactcaagggggagttcctttgagatgacagatgacgacagtgccattagggctctgacccagtttccacttcccaagaaccttctggccaaggtgattcagattgcaacgtcatcctccacagctaagaacctcatgcagttccatactgtgggcaccaagaccaagctgtctacactcaccctgctctggccctgccccatgacctttgttgccaaagggcgccgcaaagcagaggctgagaataaggcggcagccttggcctgcaagaaactgaagagcctgggcctggtggacaggaacaacgaaccgcttacacacgccatgtataacctggcctctttgcgtgagctgggtgagacccagcgccgaccatgcaccatccaggtgcccgagcccatcctccgcaagatagagaccttcctgaaccattaccctgtggagagttcatggatcgccccagaactccggctgcagagtgatgacatcttgcccttgggcaaggactcagggcctctgagtgaccctatcacaggcaagccctatgtgcccctgttggaagcagaggaggtacgtctcagccagagtctgctagaactgtggcggcggcgagggccggtctggcaggaggccccccagctaccatctcactgagcgacagtgacctgctgcggctggagggtgactcgcgtaccgtgcggctgctgaaggagctgcggcgggccctgggccgcatggtggagcggagcctgcgcagcgagctggctgcacttccccccagcgtacaggaggagcacgggcagctgcttgcgctactggcagagctgctgcgaggaccctgtggcagctttgatgtgcgcaagacagctgacgactgagccctgcttctgctggggctgtgtacagagtgcaaatgtttatttaaaataaagttctatttatcccttgtga

SEQ ID NO: 142499 - DNA, 689 bp, Homo sapiens
cttctgcaaagcatctaattgtctccttatggatgggatggtaaaacacaggctagatgatagtactgctaggtttgcagctagagagcaattgaagccagctgattaacgtcatggttatcttgatgcgggtctctggtggaataccatggagctctgacatgtaaccttccatttaaaattttaattaggaatttgaatgaagacacatgggatggatatttaccaagtacacagatggcccaaagttgggagggataataagagcaatagatgagtcaatcaacattcagaacactgctgatcatctgaaacgctgcatggaatccagaatgattggatttaatgaagctaaaggtgaagacattaagctctcacaatatcaacccgagtaagaaaggagattgtgggctgggttcaatggctcacgcctgtgatcccagcactttgggaggccgagatgggcggatcacgaggtcagggatggagaccatcctgactagcgcggtgaaaccctgtctctactggaaatacaaaagatcagccgggcgtggtggcgggcgcctgtggtcccagctaccagggaggctgaggcaggggaatggcatgagcccggggggcggagcttgcagtgggccgagattgcgccactgcactccagcctcggagacagagcaacactctgcctc

SEQ ID NO: 142500 - DNA, 1030 bp, Homo sapiens
cgtctcgctgcaacgtgcgttcccattggcgggcgcaggggctgctggcgtctcgtgaccgtctccatagcgccggcgcgcggagaagcggaggtaggctgtcggcagtcggcttggcgctgacttgtaggaccccgggaccgggcgcctgggccaacttgggaccgctgggagtgcagaggggccccagcgcccgagccttccgggaatggacgtgcgcgcccttggggccggcgcatcatccaccgcccactagcgttggcccgccctggggagaggagaaaatgccagaggccgacacttgactgatggcgctgcggacctcgctggtcttggggacaaggcggcagatttcctttagaaaaacttccctctcgcgtctccctggccccgcggcgaccgaagagttggggttcggctttcttctcctgggatttaagtgttatttgaaacagctccctgcgcggcccttttctcctaaactttgacagaaacttccctttgtccctaccaatcctcagtgagttctttacaggggtccgagacaggttgtagatatgatgcggcttatcggctttaccccgatcctagcggagttaggacttgctgatgtaattggccagcacctgcctaacaatgaaggtttagttatgctacaagtaatgcacctctaaaaaaacgtaaaacaggctttacgttttacctgctatctccacaggtttactagctgcttaatacaatatgcttgtatatcaaggtgagcaaatttcagcaaatgtcattgtaaatagtcccaacttaaatggaattgaactctggaactcaatgtgcatagaagtccctgagactgacgccattctagatctaccactagatggtttgcgatgtacggaattaaaggcagtcacttctacctgaattgtgatgaaagtagtttacctgaacatgctgggaaagtgtgctaccctgttttgtattagaaaccagtttccaagtaaattgaaaagcaaattttcagacttgacattaa

SEQ ID NO: 142501 - DNA, 351 bp, Homo sapiens
ggaggggacaaaagggatatgttctgagaaatgcatccataggtgattctgtcattgtgcaaacatcacagagtgaacttacacaatctagatggtacaacctactccatgcctaggctgtagggtatggcctattgctcctagtccacacacctgtgcagcatatgactgtcgtgccagatactatctaccaggaggtggctggatatccccttccaaaggaagttaggctcgcctaggagcaagaggaggtggtatgatggagacggcccctccatgctccatttgtgccttaaaagcacaaagacatgattggtcacaggctgagtccctcctatgctctcatcacat

SEQ ID NO: 142502 - DNA, 853 bp, Homo sapiens
gagagaatagactataaatgtttcttaacagacctaaggtctgtgttgttgtaaattccggagaggtataatgagacatgtcagattcccacttctcatcatggcctgaaccagtctttcaggttaaattttaaagccctggcttaagaggaggtccattcagatcggtgaagggtattagaattttatttttagtttacaggaggcattgccatcataccttcctaaaacatggtttctcttggttctctgaatgcataaatattttttgctttgaaatttttgttaattgcaacatctggactctctttcaagtggtcttgttacctgtctttaaaaattctgtgtttgtgtaaaagttacctgtctctttgtgttttgtgattgtttgttaaaaattttggacaatatttttgtaataaatgtagcaaatttgaaaaataatcccctcaccaacaaaacttaaaaggattttcttaaagagcgcgcagtggaggaggctaaacaaagcatggccacgtggttacaggtcatgcttcaaaggaggtaaaacaagatggagacctgcagcaaagtttgctactgaccatccagaaagacacgcaaagtacaccagattggctacagcttaacaccaacctcacaaatcctttttcataattaaaactttacaaagactattagcaatgatccttattattcctgggctagtaaaacatcttttaaaaagaaaaaaagcatcccttaaaagttaactcctgacctggtagagaaaagagaaaaaaggggggggcaaaaaatcccgggggccaagtcggttccggttttgtaaggggcctagggggcttaaagg

SEQ ID NO: 142503 - DNA, 182 bp, Homo sapiens
gatgtttccgaggctcccagttaatcagatctgtcagcccagtgtccacagggtgcctgagagcccagcccatccacactgggtgccccagaccttccacggggtctggtggggacctgccagggctgtcaatggccccagtggagaggcccactgagcatcctgagaagttcctgtgcttg

SEQ ID NO: 142504 - DNA, 180 bp, Homo sapiens
cttccccaagctagagaggaatctggtttgcccagaagtaccagattaggagctttccaggctcctcaaagcctgtgccccactaccctgtccttggctctctctgctcagttcttccctcttcaccggcccttcacgagacactgtggagataacaccagtttttgagtcagacctgtt

SEQ ID NO: 142505 - DNA, 231 bp, Homo sapiens
cacggaaaggacaggaatcttgccctcacctggctcccgagccaggggccggggcaccctgtgaggacactcagagggagggagtgtgcaaagcctgcagggcctgggaggatgcgtgctggggctgcctctcccaaatcctgctggggcgcaggctctcagggtggcttctgatgacaaatccaggcagtaataaggggcccagggcatcacatcccatagcgtcatgag

SEQ ID NO: 142506 - DNA, 362 bp, Homo sapiens
acatattccgtggtgtatctgtatggcagtttcttcatccctgaagctgtgtacggacagcttggaagctgtcactcctgtcctcacaacgacaacaaaaaacaccttgaacaaactgaaaattacaacttttcttagatccatcagagacttgaggttaacagggaaaaccgttatcccccaaattggagaggcagtgagtcccagcctaacaggatcggaggctggccactggagccagaaccacggtgggaagacttacatgtaaacaacaaatcgctggaggctccatgcacataaacttgagaattaagaattaagggagcccagtcttagggggccctacactttctgaacctcca

SEQ ID NO: 142507 - DNA, 729 bp, Homo sapiens
caggaagagggtattgccttgaaatgccgagcaactttccacagattattaacaagccgagtgctgtccactggctacactttcagcaactgggagaataagcccttcattcctgaaggatcagttgggcggtgcatctactatactgattaggtcagaatcttttggtgtggggcctgggaatcagtattttataaagtgcaccagggtattgtaacatccaacatagagaactattgctctgaataaccacaataaaagcaaaaaagaagagagcaataagaaagaccgtgtatttcaggctcatatgcagctgagctgcactgaaaccaggcatggtagcccagcagattttgtggtagccaaaggcctgtgcaaggatatgtctgtgtagtgcccctgcccaggtcccccaccctgaagtgctgggagacgttcctgtgaccatacagctgggcagcaacagagttagatgaatggtcttcctgcccctaggtagctttttcattgtgagtgactcagaaagctggagtcagatcagtagtcctcatgtgtaccctgtaagccaggaacccctgtcaaggcttcagagatcaagagttttccagagctatgacacccaaacctacgctactgttttccacatgtggtttctgtccacagagagtacatgtttctccaaaattcttgccattgagaaaggagttttaagtcacagagcacccaaat

SEQ ID NO: 142508 - DNA, 401 bp, Homo sapiens
gatttggtgtctcttgcaggatgataagttttatctttttaaagttttttcccttaagttacgaaccattctgaagagtgacaaatgttaaagggggtataaaacggcagcacttccacaaaagaaataaggtgctttaagccaggcacagtggctcacacctataatctcagcactttgggaggccgaggcgggtggatcacgaggtcaggagatcaagaccatcctggctaacatggtgaaaccccttctctactaaaaatacaaaaaattacaggcatgagccactgcacccaacccgtgctttgtgttatgataagataacaaatgtgctcaaatgtggggaaggaattcctggtcactgaaggacttttagagatctttttcttacttggcatctt

SEQ ID NO: 142509 - DNA, 156 bp, Homo sapiens
ggggcagggctggatagggggaagaacccaatacaggggcgggaaaaggtttttcagactcctgaattaaaatttcactttgcactgccaaagccaaagcatgggctagcagccttcactatttcatagattacataaacttgtagtctgatgctg

SEQ ID NO: 142510 - DNA, 272 bp, Homo sapiens
gtagctctaggaaggaaaaaggttgactatcttttgtatggtcaatctataaatatttctgtagaaaacagaagcattaaacattttctgcataggctcttgggctcccagcctcgggcctaactcagttcaaacacctactgtgtttctattttgtgtcaggtgctatagtaacctgacaaagggagagctaatctgccgaaggatgaggtcactgtggttttcagaggctcaggtatgatgggggaataagggcgaaattcaaatacaag

SEQ ID NO: 142511 - DNA, 468 bp, Homo sapiens
ttcatgtctcaaacaagctttacatgtgcaccactgtaaagactacaatttgtcaacttcaaattcaccttgaacccacacagacagtaacctcacatggttattatttagcacttgaggtctacagatttatgtcaaatcaactgccatctgaaggttattgtgggccaagtaacagcattgaacatctcaaactaaaatgaagactatcaggaatacaaacaaccccaggtctccatggattgattatctctgggcataacctgatcataactatccattcttatttcatggtggaccaccaagtccttgtgttccacaggcagtccctctcctttgtacaaaggtataaaagctggagacagttccccttgtccctctcatctggccagcatccgtgcgagaatattccttccacctatctatcctcggtgtacgtacacacacacatgcacatacatacacaca

SEQ ID NO: 142512 - DNA, 159 bp, Homo sapiens
ctctgtcaaaataacgcaaactattttctccagtggcaaaacttttagcccaaagagctagaactagctaccaagagttaaaagacttgctctccaatcctggtccctctgttaactcactgtatagccacagacaaatgactgtttccctcaacaata

SEQ ID NO: 142513 - DNA, 476 bp, Homo sapiens
cttctctgtttcatactcttagcctacacttctgtttgccaatatagcattgctaaataaattattcacatgtaatctttattgcaggcttttgctttcagatcttaggcttatcttgatcagcctaagacaatttgtgcagaaaggaaattctcagaagctgaatttgaaactgaaccactattccactattaaatggccaggaggcattaaagaccccgttggtgatggttcatgggattcttatagatcacaataataagacttttgtcaaatgggttgaggtgcagattcaaagtgaaacgtggggttatgcagtagttgtggcacttctaaagtatagaagaaaaggtaataacatgaattgtgaattcaaatgactttgtcaactgctttggaagccttgagaaaagagaaagtgagaactagagatccttccttatctttcaaagttacaggaaagaatgtgatgaaaa

SEQ ID NO: 142514 - DNA, 368 bp, Homo sapiens
tatgacctgatcattagaaaaatgtcaattatggatgatctatgctttaataaagacttaagcataactccaaacttaaatatagaggaaataatgatgtcatattttattgatgatctatgctttaataaagacttaagcataactccaaacttaaatatagaggaaaaaatgatgtaatcttgggctgaaataatttagggtgagaatttatttcagaatgatatgttgtgttttagtttatattaactgagattcaatgagagattacattagtcagaactgaaaatgaaattgctagttaaaatatggtatatttgatatcaataactatgactgtgatctaacaaaagaaaataaatcattta

SEQ ID NO: 142515 - DNA, 383 bp, Homo sapiens
ccaggacagatcagcatgagagctttgaccagctccgtctctgacttgggtaggttcagccctccttaggcaacctggtggtcctcccagtccagggaggtcatcatattaatgtagacgctggatcagcatagctcactacagctcagaactcccgagctcaagcaatcctcccgcctcagcctcctgagtagctgggaccacaggtgtgcaccaccacaccgggctactttttgtatttgtagagacagggtcctttttgttgcccgggctagtcttgaactcctaacctcaagcaatcctcctgcctcagcctcccaaactgctgggactacaggtgggtaacactatgcccagccacttgcaattattaatggcattgt

SEQ ID NO: 142516 - DNA, 471 bp, Homo sapiens
aagaaaccttcccaggaccccttttcctctctatctgcctacaataataactcctgcaacgtaagtgtaaaagctaaacctctagaagtctttgcagcctggggctaaataaagatttcttagactggatgcagaaaacgtgatccataaaagaaaaaacttgatattagacttcatcgaaatttaatgatacgaagttacagttagacaggaaaataagttttggtgttctgttacacagtagagtaagtatagcaaataacaatgtagagcatatttcaagattgctagaagagaaaatgttaagtattgtcaccacaaagaaatgataaatgtttaacatgatatggcattaactctgatttgatcattatactatgtattcatgcattgaaacatcacattgtactctatacatatatacagttattatgggccaattataaattaaattttttcttaatttaaact

SEQ ID NO: 142517 - DNA, 712 bp, Homo sapiens
cggacgcgtgggtcgacccacgcgtccgagaagacagtgatgggctcaggggctattcaggcatcagatgacccaaagaaagtggcagcatcttgcccaggtgagcagagttcaggaactcagaaatgagaaccttctacacataagttcagggagtcagatgagagagctgttagaactaagcagtgtagcaggaaccaaagaaaaagtccaggtctgaagactgggacacaaaagaatataggaaaccataccccaggagcccttggttagtttcaggacacgggactgtgagttcaggaaggcagctaatgtccaactccgctgaagagggagctggatggagaattgatctgaggaaacaggaattggttggaaggagaaatcagctggaggatctaggggtggtgaaaaccaggaaaagctcccagacctaacattagtttgcatcaccaagaggcatttttaatgttggccctgttttgtggtgtccctccttacattctatccccagtttcctggattaatttctttctttagcatcttcatttctggaaatagacaaaagtccccttggagtccctcagttccagtgtctaagtctttctgcccataattgctactactacagatgctgatcttttcatcttttccattctctttatcttttggcttttgcacatttgagcgtttcatcacactgttcagtggg

SEQ ID NO: 142518 - DNA, 327 bp, Homo sapiens
tatagagatggggtttcgccatgttggccaggcttgtctcgacctcctgggttcaagcagtccacctgcctcggcttcccgaagtgctggattacaggcatgagccactgtacctggtctgtatttacttttgagaggaatttaatagaaatgacttaggaatgcaaatgggataatggtttactgcttatggaatggccttaggaggacatttgtggagagttcttacacccggcagggattagactggattagaatttcacatcaaaatagtctggcaaacaaagtctagctttttctgtgtggagtcctggagtgagtgggtgc

SEQ ID NO: 142519 - DNA, 733 bp, Homo sapiens
gaaagctaccacagggaaataagactacagaaagtgggaagattctaaagcaaaaaaataaaagtactgtacccaccaggaaactaaataaaatacaggaaaaagttgctttgggccaacacaggaaagagcaaattaaagcagatgtggctgagtgataaaacgggcaggcaggaagtcaacgtaagcaaagctagaagatgcgcaaacacagggagagaaaacagaagcagaggcgcgcagcttggagagctgcaggaaacagacctaaagaagagtaaagcagaattaagaatatattctttagtgcctacagctttacaaggacctagatataaagatattcagccggctgtagtagtgtgatcccagcactttgggaggcagaggttgcaataagtcgagatcacactattgcgctccagcccgggtgatggagtgagactctgtctcaaaataaataaattaataggtgagccactgtgcctggcccaagtaattgcttctgtaaagggagagaggggacgggaaacatcagggaggtacgccagttgcaaatgcataatgctaaggctcttatgctggtcttgatgtgtacacagtggttatgaagagttgacaatttgacacaggcctagagatgaaaaacatttgtatcctcttgaagctctggaccagagtgttcagtagtcgcgatggcaggatggaaccattaccatggatattactacgt

SEQ ID NO: 142520 - DNA, 916 bp, Homo sapiens
agcaggcttgagtccccgatataatgtcattcccaacgaatgcacctccaagagcagcatcaaagtttccataatcacttcgacctctgtggttggataaagcacatatccatctctgacattgacagggttctgcttaacttcacagtcagttgccatatgccgtatgttattgctgactgcacactcttaaatctggagcccaaacctgtcgtgaataccctacatccaattcgttatcagtgagtgattacctgtaggctgtttgatattgtacatccagaatagttgctttgggccaacacaggaaagagcaaattaaagcagatgtggctgagtgataaaacgggcaggcaggaagtcaacgtaagcaaagctagaagatgcgcaaacacagggagagaaaacagaagcagaggcgcgcagcttggagagctgcaggaaacagacctaaagaagagtaaagcagaattaagaatatattctttagtgcctacagctttacaaggacctagatataaagatattcagccggctgtagtagtgtgatcccagcactttgggaggcagaggttgcaataagtcgagatcacactattgcgctccagcccgggtgatggagtgagactctgtctcaaaataaataaattaataggtgagccactgtgcctggcccaagtaattgcttctgtaaagggagagaggggacgggaaacatcagggaggtacgccagttgcaaatgcataatgctaaggctcttatgctggtcttgatgtgtacacagtggttatgaagagttgacaatttgacacaggcctagagatgaaaaacatttgtatcctcttgaagctctggaccagagtgttcagtagtcgcgatggcaggatggaaccattaccatggatattactacgt

SEQ ID NO: 142521 - DNA, 373 bp, Homo sapiens
agtgataaaacgggcaggcaggaagtcaacgtaagcaaagctagaagatgcgcaaacacagggagagaaaacagaagcagaggcgcgcagcttggagagctgcaggaaacagacctaaagaagagtaaagcagaattaagaatatattctttagtgcctacagctttacaaggacctagatataaagatattcagccggctgtagtagtgtgatcccagcactttgggaggcaaggcaggaagatcacctgagttcaggagttcgagaccagcctggccaacaaggtgaaaccctgtcactactaaaaatgcaacaaatgacaaagtaagagttctatctgcagaaacggaaaaatgtccaaaaccagttaag

SEQ ID NO: 142522 - DNA, 795 bp, Homo sapiens
gacctgcagtttgggtgcagtgatgagaattagggtgggaacctgtgtcctggtcaccatcagtgatatctgctgagcatctgctgagccaggtactgtgtatgtgtcatagtggccccagggagcaaactgctgtggccagtttgcccagacccacttcagaggatccagctggggctgctggaggcctggctgcaggtcacacctctgcactccaatttacccctcaggacgggctgtgaagggggttgagaggaatctctggaccaccctcgaagtgcacctcagccagcagtcctggtgtcttgccctcttgtgtgtggtccaacccagctagagtcttaggctgtgaacttcggatgtctgataaaagacagaggtcaggatttatgctgtatctggaaagatggggagctttagagtccaacacgcaggtgtgatttcctcaaatcctgaggccctggggaagtctcttctctctgtccaggctgcaggcctcactcgttgaaccagagggcctctaaggtcatgctgaactgcatggaggcaaattcaaaaccataataggactcaagtctggggctcaggcaagtaatggactcctgagagggggccttggcgtttcccccgttacccagcaagttccacggaggaccagggacattttaaaccattgggcctatggcatcgtgtccttttgggaacatctgctgtgaggcaggtcacatgaaggtggcctctgagggagacagggagcaaagatgagggaggatgcagcataggtggggcctggat

SEQ ID NO: 142523 - DNA, 329 bp, Homo sapiens
gatgaacctgaactcttgcaagcggtctgaccttgcacacattccttaaactctgctctctagttgcttaatcttgacagatggagaaatggggaaaatgcctgcttcctggggttgtagaattaaagtatttaaagtacttattgtcctgcatggtatgtagtaggcatttggtaaatgttagattagtacttttatttttgttgtttttattgttaacacaagatgtttggtgtcacaagggtttggtctttgtgccgaaggcctgaagagtatttgcaggttttaaatacaggagcatgtgataagacctgtgtgtgtgtgtgtgt

SEQ ID NO: 142524 - DNA, 369 bp, Homo sapiens
attacacccagggactccttttctgtgatctctgaggtccctgctgctctgaagaagctcagactcccagcgagcaggagaggggtccaagatttcatcagtgtaggctcacacatacatcagtacaggtgaggaacctgagctccagaaggggacagtgactgtccacaggcccatgatgaggaagcaagcagtcccagctggaaagccaggttccctgttcctccacagaacacacttaacaccaggccacacgcaccagggtgcttctccttagggacaaaaccttgccagtggaggcagaactaggtgatgctcttccctttaggtccttttcagctgcttcctccctttttctttgcggaactc

SEQ ID NO: 142525 - DNA, 473 bp, Homo sapiens
caattccagggcaaaaggaacacagcacaatagacactcggatattcttacaggaattcagaaagaagagaaacaactaatatagcagtcctttattttgcaacaaaatagtcacatttttttaaatggctgttttaattctttcaaccactggtttgtacctgcttcaagaaatgcacagatcaccttttccatttatgtaccactatcttccacctcttcccaagcaagttccaagacagtctgcatgtcacctctctagtacagtcccttcctcatggctcccaatctcacattctcagcaaggcctggccctgcaggaaaaccaaaggaagagacagacccaactagagggggtgcaggactcagcctctgcgggctttcacagggttcaaggagctgtgatggaaggcagcctcatcccactgtgacgctcccagtatcagctggagagatggccaccaagcccctgg

SEQ ID NO: 142526 - DNA, 914 bp, Homo sapiens
  misc_feature (470)..(470): n is a, c, g, or t
  misc_feature (588)..(588): n is a, c, g, or t
  misc_feature (601)..(601): n is a, c, g, or t
  misc_feature (609)..(609): n is a, c, g, or t
  misc_feature (642)..(642): n is a, c, g, or t
  misc_feature (667)..(667): n is a, c, g, or t
  misc_feature (670)..(671): n is a, c, g, or t
  misc_feature (689)..(689): n is a, c, g, or t
  misc_feature (694)..(694): n is a, c, g, or t
  misc_feature (714)..(714): n is a, c, g, or t
  misc_feature (735)..(735): n is a, c, g, or t
acaggcaggtccctccataggtacgagtcacagtgccgtgcccggctctggcacccgtcctgagctccgtgggtgatgccttccaagcatttagccatgaggtggcggctctcagagcggtcccaaaactggctccagggctgcccgagtggcaggcagaagtaggtgggggcttatttgggtgcaggcagagtggcgtaaagaactgccctcacatgctgtttttgttgtccgctgggcggtggctgtgcagcccacctgaccagctgtggaaagtgaagaaggcattgaagatgactattttttggagaggcctgatgcccgaatttcagtttggcacttacagcgaatctgagaggaaaaccgaggagtacgatactcaggccatgaagtacttgtcatacctgctgtaccctctctgtgtcgggggtgctgtctattcactcctgaatatcaaatataagagctgntactcctggttaatcaacagcttcgtcaacggggtctatgcctttggtttcctcttcatgctgccccagctctttgtgaactacaagttgaagtcagtggcacatctgcctggaaggncttcactacaagnttcaaagncttcattgatgacgtcttgccttcatcatcacnatgcccacgtctcaccggctgggcngcnntccggacgacgtggggtnactgnctaccggtaccagcggggcntatcctggggataaagcaagngacgagttgggaacccacaaggaaggccacggggccaaagagagggcgcagggtgcgcgacaagcgcaggatgaaagactaggacgtggggaaccagaggggaggacgaacgaggaagagcaccacagaaagaggggaaagcccggaagtgaaaggcagaggggcgagggggaggggca

SEQ ID NO: 142527 - DNA, 1047 bp, Homo sapiens
aattgggggcgggggtcccgcggggcctctccgtcccgtgggcaccgtgcccaccttactttctaacctgcacctcaagcttgcagccgggggtggaaagatgacatgggtgggtgccagcaccaaaccgggcagaacacagcgtcagtcacccgcccttgccagctgggaggatgcccagaggccttacaaggccgccagggagggggagatctgaaccacctagtgccaatgggcatgatcctcccttaaactcgtggcaaaccagccctcttcctagagcacaccctttgaaacaaatgaggcgggtgagaaagcaagtgggcaagtttcttaggtgtcagaggagccattataatttattggcaggtccatttaactgatggttgccggccatgttggggattgtgaaccctaaaattactgctgttgataaatgccctcccacattaaactgatttatagttaaccctgtactgcaagtcttttacatattcaacaggtatccccttgtctctacttctaaaaaaagttaaaggtaccttgcaaattatgacatccctatggagagatattttaagataagatcaaacaggaacagggtcttttggataagatgttgacccttacagaatagataaattggcctggcacttaacctttagatcctaaagctagatcttactccctttgacgttccaacaattcctttgagtataagccttttactgatggcttctggacatttattatgatggctactggatattattcaaccagtggcaactggccattacatggagtttggtataggtgatgggtacttttttcctctttggtgtccccagtgggtcaggacacacaagtttgaaagagctagatgccaaggattgatacttggccgtaatcctcgttactcactatggtgagaaaagccttgttttctctgagaggcagcaaccaggctggcctggctttgagctctggctacactacttcctttctgtgagttccatctagtcttgtcacctctctgagtctctgttc

SEQ ID NO: 142528 - DNA, 191 bp, Homo sapiens
tcacagaccaccaccatgaggaagtagaagggtagggaaaggctggtgccattatactctaaagctccttccctgcccagagaaacaaacatcaggaatatggaagaggcaccccctctccaaaggcctgcaggtaggcatagtataatgttgagtcctgaaaagaaaagttaaaaatatttaaaggaggc

SEQ ID NO: 142529 - DNA, 704 bp, Homo sapiens
aactgctacctgcagagatctgagaaggctgcctggaagagtaggcacaatttgggcaggccagagtatcgtacctttaaggcaggagcagacgaaataggagagccctaataaaggaagagaactgttagctttgctggtgtgttggtggcctctagcggttatggcagagattacaggcttcctggacttgataacttagctgggctgctgtgggtcggccatgggagctactgagtataacggtttgcttccctgaagcagaacaaaagagcccaaggagaggctaggggtggcagctggctgaaagaggctcggaatagtgtggacagagcaccttgcactggagaaatcaattgacctttcgtggttttttgttgttgtcaatgcctctgttgcccaggctggagtgaagtggtgcaatctcggttcactgcaacctccacctcgcaggtttaaatgatcttcccacctcagcctctggagtagctgggactacaggcatgcaccaccacacccagctaattgttgtattttttctagagacagggttttgccatgttgctcacacttgtctcgaactcctggactcaagtgatctgctcacctcagcctgccaaagtgctgggattacaggcttgcaccaccacgcctggcctcagttgaccttattaaaggatggagcagctggacatggtggcaca

SEQ ID NO: 142530 - DNA, 278 bp, Homo sapiens
gcaagtgcaacgtgtcagggttacacgaggaattctctttacctctgatcaaaataaagtcatcagctcttcaagtttaaccttaaaaacacaggtctgggctgggcgcagtgactcatgcctgtaatcctagcactttgggaggccgaggcgggcatataacctgaggccaggaattcgagaccagcctggccaacatggtgaactccatctccactaaaaatacaaaattaggtgggtgtggtggcagagggaattcagacactttgcatccagag

SEQ ID NO: 142531 - DNA, 479 bp, Homo sapiens
cccccaagtagctgggattacagccacgcgccaaagtgccaggctaatttttgtatttttagtagagacgaggtttcaccatgttggcaggaaaatcgcttgaacctgggaagcaaagttgcagtgagccgagatcgtgccatcgcactccagcctgggtgacagagcaagactccatctcgaaaaataataataataataattttacactggcacagaccactttaccaaaaaaagcatcttatattaactgtactctctgacctagttacctaatgtacagacacacagtacatcttatattacttggcacaccaacaagttagctatacaaatcacaattccaacccaaacttgaagctagtaaatatatttagtatttgaacttgagttgtgttcaaatgttcattaaattggcctatgcaatcttaacaatgttctaacacatatttaaaatgctcatttctcctccattattt

SEQ ID NO: 142532 - DNA, 361 bp, Homo sapiens
atatagaacatttccatcattgaaaattctgttgaatagtgctgctttcttttttaccttagatattccaatgtaccctctccttcttggaaggactgttccaccaacttgtcaccaggctaacacctaaacatctgtcaaatctcagagtaaatgtcattacagcaaggtcttcccaatccaaattagacccctttgttatctatattagaagctacttcctttgatagtacacatcataatttgtaattacgtattgtatatatttgaagcttaccttttctactgtacacttggaaaaggcagagactaggttattttgttcattactgaacacacaataaatactactgaggccagg

SEQ ID NO: 142533 - DNA, 363 bp, Homo sapiens
gcttcaaggaaagagccatgccaagagagggagtctgcttcatctttactatacggtcggtaactcggaaatgaccagcctgtcttacagctctagtggaggtcaaaggagagagagtgaataatattcatgtacacacatgaagtatacatgaagtgtacctgtcaacaaaattcatatgtacaatgaagaattacactaaaagcaatgcttttctccagcacttataactacctcttctcccttcttctcttccatgggtcctttcttccattattatttcatctatccatctgtttttacgcccatccttccatctgtcttgctatccatatctccattcattcattccgtactccccag

SEQ ID NO: 142534 - DNA, 802 bp, Homo sapiens
gtattttaagctaatttttattttgttcatctgttcacccagtacaacctttctgctgtgaggacagaattctggctctgtgacaggcgtcttttttggagaccctccttcaagagccctgctgcctataaatcataggtaagccttgctttcccaagattttttttgccttccttcaaaaagtgcttatgtcattcctctgattctgtaccttcatggttatcagagacagggagaatccccttcacgtttttgaaacttctgtattactgatcctttaaaaatttaggttatagtacattgtactatctgacattaatggcagctgttcatttttatttgttcccctttagaacatctgaaatagttgatggtcctgattgaaccactcagcatatagagaagtagcaaactcgaatctttaaatctcatgacaatttggaaatcagctttttctttattctttttttaaaaaaacttaacctaattttccccccattttgttaaaagactcagtcttgtctccacttaggttaaataacaagatgttaaccattgtgagtattttcaacattatttcctcaatgccatataatttttattataatcactaaagttttcaagatattttgaaagagacttaaaatgggggtcagtacttcacttatttttgagacagagtcgtacgtcttactctgttgcccaggctggagtacagtggtgagatcatggctcactgcagccttgaactccagggttcaagtgatcctgccaccaagtggctagcaatttttaaattttt

SEQ ID NO: 142535 - DNA, 344 bp, Homo sapiens
tgggtcttggctggtcctaagagggaacggggagcacagctggggtcacagcctcagccgggactcctgccctccagcccctcagcatcctccctgcgtgtgctctcctgggggctgctcagggcaggtggcgagtaggggagctgtgggaccagagagagggggtggacgtgcccagggcctgccctcttggcctgccgtggagacccacccaggcatacctgggggctgaccctcccctgcagagagcagggtgaaccccagccctgccctcgcctaagagccaggttcgaggggagtgtaatttataatgaaccccactcctccccccaacacccaccaca

SEQ ID NO: 142536 - DNA, 450 bp, Homo sapiens
cccacactccacactggccttgcaaccatgcccctcccactgtctctctctgaccaggcttcaccctggctcatgaatgttcggcttactctccaccccatcaaggacgtcctccagcattgaaggccctccacaatctgtcctccatctaactttgccctccttgttctacctggccaagttctggggtctgatggaacccctgtgaaggggttgagaaggggaaagataaaggatggggtgagggagagagtgttagcacagcctctgatctcaaatggaaaagtgctttgaaaagtgtaaggactttgccaaaggaagttctgattgctcttcctgtaagtgtctgtgcacccatgtacctgtgggaatgacacccatgggacaaggcttctttcagggtgtgtgtgtgggcacatctgtgtgtcggaatgggtgtgtgtgtgcacc

SEQ ID NO: 142537 - DNA, 187 bp, Homo sapiens
gattccagtaatgtttcgctcaactttccctggagccttcgcccgcagtctcctcaaggccctgccagctttcacgcacggtctcactgagggtgtcaggcgcctcccacacatgttaggttctgctacggcagtgcctcacttccaggtaccaaatcctgttccaggcatctgttgctgcatagca

SEQ ID NO: 142538 - DNA, 606 bp, Homo sapiens
ccgagtagctgggactacaggcgcccatcaccatgcccggctaattttttgtattttttagtagagatagggtttcaccgtgttagccaggatggccttgatctcttgacctcgtgatccacccgcctcggcctcccaaagtgctgggattacaggcgtgagccaccacgcccggctcttttctggactcttaacaatcagtagccactgttgataagtctgcaaatatgagaggtaaacactatagagggagagaatgaacagcctggtacaatgagatattttcttaagaaagaacttcccaggctgactggactttggattgatcctccactaggcttcacagaaatccctaagactttgcattacagtattacatttcttttacatttcctagaataaaggtggtaagagaatagatcaatgaatttttaagactgtaagagagctaaagaagtcaagagtgttctcttgaagagggtctgggcgtaggaggctgtgtgctttgggtgaatatctttgctcaggtacttcctaacagaaaagcagtgtgaatgcataacaggtaaactgaggccaggtttatccacatgagactactcatag

SEQ ID NO: 142539 - DNA, 238 bp, Homo sapiens
ctctgtctcccaagctgaaagtgctactttcagtttgttaaagtaaatgttaaagtacttactttaacattccaaaaaattattcttataccaaaaacatttttagagattgaagaacagtataaaaccttttcctgttcactgacattagtgtttatttttctgacttttaaaattatgtcactgatccaaatattctttgtgaatgctagagaaagtatttcattctctttttgtg

SEQ ID NO: 142540 - DNA, 387 bp, Homo sapiens
ataaactgtatcagagcagaaaccttcaccctcttaatttaaccgccatattcccggtacctacaacagcgtctggcacatagaaggcatttttaaacatccttgctgagtgaaccaatatcccagaaacctctcacagctagttcatcttacaggagaaacagtattaaagagttaattaaatggccaggcgcggtggctcacgcctgtaatcccagcacattgggaggccgaggcgggcggatcactcgaggtcaggagatcgacaccagcctggccaacatggtgaaaccccctctctactgaaaatacaaacattagccaggcgtgatggtggaagcctgtaatcccagctactcaggaggctgaggtgggacaatcgcttga

SEQ ID NO: 142541 - DNA, 379 bp, Homo sapiens
acagtgtgtcttctgcacacaaaggaggcatggctaatctcacattgtttatgaccactgctctggagtgaagggagatgttgcatagtgcagagaaaagcaaaaatgatctgggaatgaccagagctgggttctggtgccacagctgtttctcagagcttgagtttctggtcccatagaaagagggtgtatagttatcagaattttccaaacctcaatttattcacacactattttcataagtttcatcagagcttcaaatatatattttttcaattggctttttttttttttttcaaaattcgcatgcgtttatcctcttatctgcccccacttctttcctacctacggtgggactgtgcctacggggggtacggtg

SEQ ID NO: 142542 - DNA, 625 bp, Homo sapiens
atacacataacattatcacacagatttttctgacatacgatcttggtgtaattgaagacatactagttatattatgtcacgataatgtcaacttgatttgaatatggtctagccttctaaatcatattttttttattgtggtaagtacacttaacgtgaaatcttccctcttaatacatttttaagtgcacaatacagtattgataactataggtacaatattgtacggcagatctctagagctgattcagggtaaagtatcagttatgcattctctactttaaatagcccaccttcctctgaggtggctacaaaagaaaaataaatagcatcttttccaatgtcccatcataaattattgtggattgatgatttatttttagacatttatcctgcactgtgtgtataatttagggggagaacaagcaaaaaaggaattttcttaaccaaaacaacaataatgatcatacaaacaaaagacacaaaatgaattctggagacagacagatttaaatccagggtcacaatttacttgttgtgtgaccttgggcaagctactcctaagtcttagtttagaagataatcatatctatttcacaggattaaataagatagtatacagaaa

SEQ ID NO: 142543 - DNA, 161 bp, Homo sapiens
gtcttttggtgtggctgaagctgctgaggccatggggggagatttgtaaacaaggatttaaaaagtatgtttatttaatctaattgaatttggccaaaggacttaaatgcaggaattgagtggccaaagctttgtttttgggtcacttgctcttaataact

SEQ ID NO: 142544 - DNA, 424 bp, Homo sapiens
tgggtattgaagggcaacttaacactagctgggcagagcaacaggagaaggctggacctggtaggacaaccttagtatgcagttctggagtcttgagagatcctgactcttacactaaccacaagtcacttgaggtggcaacagtatagcagagttagcaagtacaggcttcgtgttcatttcacacatatttgaatatttgtctttgtgtctttgggcaagttattgaacctctctaagcctcaaatccaaaagcgataataataggaccagctagtgttaagttgcccttcaatacccagttcagaagccctttccttcaggaagccctcctgggctgcacgtaccctcccaccaggccaaaggcctccctgcccctacacaccccactggtctggatcggcggccccggctctgcactagt

SEQ ID NO: 142545 - DNA, 106 bp, Homo sapiens
ttcactggccaagcccctggatgtctctcagtgagggaggagcatcttagatctacagggacaaggagacttcttgggctggaccacttcttgtggagaattataa

SEQ ID NO: 142546 - DNA, 576 bp, Homo sapiens
gtcagcagctaagtgaaaaagtcacccgatcaaaccttgagatgactacagccccaggtggcaccttgattgcagctttggaagagaccctgagctagaggatactcaacagcaaggccccctggattcaaaacccactgaaaccataagataatctgtttttgttgttttaagccattaagttttggagtgacttgtgacacagcaagaggtagtgaatatactgtgtgatgtagtcaaggacatagctccagaaaaatctctcccctttctcttgcaacatcaaaccaaatagcctgtagtcccaattatttgggaggctgagaaaggaggatcacttgagcccaggagttctgggctgtagtgcactatgcccattggatgcctgcaataagttcagcatcaatatgttgacctcctggtagatagggaccaccaggttgcctaaggaggggtgaactggcacaggttggaaatggagcaagtcaaaactcctgcactgatgagtagtacgattgcacctgtaaatagccaaagcaatgtagcctggacaacatagcaagaccccatctcttt

SEQ ID NO: 142547 - DNA, 243 bp, Homo sapiens
cgctaaaatggtaaagaaaccccgagtgggatgaacataaaactcaggatcgattactctgtggagagggagaggacaggtgacagcacagcctgctcctggggacagaggaaggtggtcagaggagggcagagaaggaaggagccgcttggacagacctggcaatgagtgggggacacagcagggtgagagctgggctctgcaccccaatccccagctgccccaagccccacctgcgcctgc

SEQ ID NO: 142548 - DNA, 440 bp, Homo sapiens
tccgtccatgatactctctttgctaggctgttgattttaggtgattcaaggaacacctactatttcaggcttttttaaacatcctggtaaataacctaaccacttgagtggtcactgaaaaatgttccaacgaaggttatcacgggaccttagttaaatcaacatatttttcagttcttgcttaacttgctttatctacaacagttacaatgtggcagtgtactaccaatagttgttcaatgaatgttacatgtccacaaaatggatggcactaaatcatctacacaagggaatattttgtccttcaaagtttaactttggccatgattttaaaagccacactggagcagtaaaacaatttgggctgattaaagtacaaagtaaaaagggttcttaaacatttaaagaaagcaggctgctttgtaaaaagcctcttcctc

SEQ ID NO: 142549 - DNA, 374 bp, Homo sapiens
ggctctggactatggaggaacgctgctttcccttccgggccaatttgctacttcagtgggctgtgtttgcgctgggctcttctgtttcaaagtattagagcactcgatgtgcacaacttggaaaacatctgaatttctgcacgaaattaattttgcccaagagtcgggacacatcgacacatccacttttgggggggcttggtgcactcctgggacagtgtggggtgaaagggtccctttcaggagtgaattccctgaccctggacactcagctctcctcctggttggcagagtgaagagtgtcatgatttccaggacccctccccgcttcagctttcagttcatcgctcactctggcttgaaaacagtactga

SEQ ID NO: 142550 - DNA, 250 bp, Homo sapiens
gaaatgagctaaagatgtttactagttttttaattgggaaattcatgttcagttaaggtaaatgttttctccagaataaagattgtgattttttacttaaggattctgtgtctcaacccagatttctttcaagccatgaattatatatatagttgtcccttgtggggaattggttccaggaccttcctcagataccaaaatccatggatgctcaagtccctgatataaaatctgtagtatttgcacatag

SEQ ID NO: 142551 - DNA, 205 bp, Homo sapiens
ggatttgctggtgcagtacaactaggcttaatagctcgaattcgaggctcgaattcgactcgaattcgaggccagggaggctagaacagccttgaggaaggatgagaagggtgtggaaaagatgctggagagggaaaattttcgtttttatactaagaacaatggaaacataaaaatgaaaggatcaaaatcgctgaacactaaa

SEQ ID NO: 142552 - DNA, 209 bp, Homo sapiens
tgcttcctctttctgacctcacagcttctgagccacttttttcatctatttccaactcatttttgcctccttccttggaacccaagcaacaagctgacattatttccttgtctctaggcatccttttaaagatcatgtttccccatgatactgtcaagttgtgttttgttttttatggttttatcctttcactgccatcttcctctgct

SEQ ID NO: 142553 - DNA, 296 bp, Homo sapiens
acgctcagtagggtacgggacgcgcgcggggagaccctgtgcagcgacaccggggctgtagtcgccgtctggaaccagcgcgggaataggtgcgcaggcgcacagtggctggagggcagcggcggcgtggtctcgggccacttccaagcagagggcagcacctgtcccctcggaggcgctgccagcgccctccctcctcctccgcagggcgcgggacctctatttatatcgcccagccagcacaggcccatattgggcagtggcctcagtcaggcccgctggccgccctgccacac

SEQ ID NO: 142554 - DNA, 333 bp, Homo sapiens
gtttaactcttgatgagggaaatatgtttccaaggttcttcagagaactcttcatcacctcctgttccaatgtttgttagttaattaactaataaaacactttatgtcatacgatcgtagtccctttcattagagggtctgaaagcaagctgttgcttaatcaagggcccagtcacagttgagttcagggatgctgaactcagtgatgcttcccagcccaagcaggaacaaagcaaatctgcccaataatttggaacatacagggaagtttgtgtattcccttgaaaacaggattgccatcactgacctagactcctgctgacagggcaggag

SEQ ID NO: 142555 - DNA, 417 bp, Homo sapiens
ccctgcccttcccctcttgggatggtgcaccatggtgtttacggcacccctacaaggcagctctgtcttctcactttgaaacctcagcttacagggccacagctgtcacttgccatttgggcttcccccaggtgaaagggaaggccagggtgatcaagttgactagcggctttgattcccctggactggaatgtgctcagtaagccacagaaacaggagctgtcagagcagaggcttaggagacgagcaggcgagttctcgtgggtgatccatcatgcaggacttgcgctcgtgatgaatgcggagatagtactgaacctgaatccgatcaactgtgttattcacagtattgacaacttccttcctggcctctgacctgccagtgatgagcctgtgttgtctgacttatattcttgg

SEQ ID NO: 142556 - DNA, 436 bp, Homo sapiens
tatatgtatatacaccatggaatactactcagtcataaaaagaaatgcaataatggcatttgcagcaacctgagtggaattggagaccattattctaagtgaagtaactcaggaatggaaaaccaaacatcgcatgttctcactcctaagtgggagctaagctatgaggatgcaaagacatgagaatgatacagtgggccgggcacatgctgggattacaggcatgagccaccacacccggccacaatttggtaagttttaacatctgtatatacccataaaaccatcaccaggatatgatgagcatatccatccaaccaacaaagagttcttgtgctctcttcttccttctccccaagtaagatttgaactccaatgctactgattagttcaacttttttcagaattttgtataaatcatcatacagggccaggc

SEQ ID NO: 142557 - DNA, 485 bp, Homo sapiens
tacaggggtgagccactgcgcccggcccccagtgctactttctgtaccaccttttggatttgtattagcccatcctcagaatcttgggtaccttttgcattttcttccaagttcccttggtggaaaaacaaaaacaatctctgtaccatatttcagagccacattctatagaaaatcatattttcaaaagatggcagcgacaatatctctcacccttaatgttcttttccaatatgactttaccacaccccttattaagaacaggagcctatttcttcttctcttggatttggattggcccaagcaacatgctaactagtagaatgaatcagaagggatgttctgggacttatgagactagttcacaagaggacttgctcttggatcagtccttttcagacttgccatgccccaaccaatgctgttggaagctcatgccaaatggagaggccacatacatgttctgtgcttgacaaccccagctg

SEQ ID NO: 142558 - DNA, 710 bp, Homo sapiens
gattcatccatatgtttgtgtgtagcggtagtacatcctttttcattgctatatagtattccattgtttgtttataccacattttattgattctgttgctggtggacatttgtactgtttccagttgctatggacatttttgtacatatctcctgaggtctatgtacattggaactgctgcatcttagaatgtgtgctccttgggccgggccgtggtggttcacacctgtaatcccagcactttgggagaccgaagtgggtggatcatgaggtcaagagatcaagaccatcctggctaacacagtgaaaccccgtctcaactaaaaatacaaaaaattagccgggtgtggtggcgcactcggtggcgcaatcccagctgctctggaggctgaggcaggagaatcactgaacctgggaggcagaggatgcagtgagttgagatcgcaccactgcattccagcctgggcgacagagtgagactccatctcaaaaaaaaaaaaaaaaaaaagtgtgctccttcaactttacgagataatgcggaactattttccaagtggctgcactgatttaccctcccaccagcagagatgagtttcatttgctccatgtgctcagatatgttcactttagcattttgatcgtgtagagtgtgatagccgatggttttagattgcatttctgtgattactaatgaagttgagtacagactt

SEQ ID NO: 142559 - DNA, 428 bp, Homo sapiens
tctctgcctgtgtctcctttgtaagcttcatctgaggttttcctacttaagccatggcctggaaatcctggcataacttcttcccacaaatcatggcacagagaccttgccaccaggaacaggcaaagtgatttgatattcaaagacccttggagcaaggaggcatattgctaggagatgaaaaataggttggaggtttaggcagcgacgttcaaaaggtagacactcacaccataaggcctacctttattaactagcttaaggtgggtatctattttgggatccaacagaaggtgggaaggctgggtttcctccttgttgaagccaccctactcttcatgcctgagtcctaatggggtaaagccaccaggtatttgtttggattctgttcctggctcagaaaatgacacagaactttcttccagtac

SEQ ID NO: 142560 - DNA, 165 bp, Homo sapiens
aaaaccaaaccaatggaataaaactaatattttaaaagataatctaagaaaatgttccagaagtaaaaggaagacataaatttgtattttgaaagagttcatgcacttagaaaagttgacccagaatggttaatttgaatatagactaggaaaactattagaatt

SEQ ID NO: 142561 - DNA, 164 bp, Homo sapiens
tctatgaagagatgactgattctaacacctacttcacaagggtgttacaagcaataattcagacatttcaagttaattagaaaatgaaagtatcggcaatgattattctaaaaaagctcaacagtacttaacttattactgttattattatttctgagataggg

SEQ ID NO: 142562 - DNA, 202 bp, Homo sapiens
agcagtatctttagcctctcttcctcccactgttgactctctctgtgtgttggtatagcacagggagctctgggctgacatgattccagtttaggaagtccagaggaaagataacactttccaaccccatataatagatgccagggggctccgcacagtggtttaggcttaacaatcccagcactttgggaggccaaggtgg

SEQ ID NO: 142563 - DNA, 734 bp, Homo sapiens
gggccaggcactttgacctcatgaagttggccttgtctcccaattcgtgcattttcggagcaatgtcacttccttactctgagatctctctggtactactttttgtcatttctctctgcttcttcttaaactcagttttttgaacccggaatcaacaacatcaaaaattcctagattttactgtatttttttgctgtgggaaattgtctgacactcagtcaaaacacaggtatttactcaggacctgctggctgctggtcagcactggatgagaggttctgcaggattacacatgaacagcacatcacagttcctaacatgaatgaacatataagctatttggaaagaaaagatgatagagaacaacagaagatgttctgtaatggatggataaaacgtatcactggctccagtacaggtagaccccagagatgaagtttgaggctagaagtggcaaaagaccattgtaggcaagatccagggttggggtttggcattgtgtgcatagtgggggcaaaaaaggcagtcctgtgtggttgaccctgtggccaaggctgagagagatgatttgtatgatcaagagaggctgatggactatgtgaagtgtatatcttatctcaatcacccaacactttatattgaaagtgaggatatcacacaagtaaattttgtttgtgtttatataacttggcacttatgttttcaatatcatgttgtaaaataaatgtctttaa

SEQ ID NO: 142564 - DNA, 396 bp, Homo sapiens
acagaacagtcactcagttcctaaagtcagtgccagtcatgcctgggtaaaaagccttacctacgctcttccctgtaccttccacaatctacctcaatgcctggaatgactggggctgtcggcaccaccccctcactgtaggagttcctatggtagggtcattccagatgggggctgtgggagtgacccctcacactcatagaagttcgggaagcaaagttagaccttcagccccccactgacagcatcccagctacagagagtgcagccgccctccttaccttgaaaccctccctcccttttcgcttctgaaaacctgagtcctggccccggctgggcaagctggctcaagcctgtaatcccagcaggaagcccaggcaggcagatcacctgagc

SEQ ID NO: 142565 - DNA, 383 bp, Homo sapiens
ggtgccctggtatgtgtcccaaaagaatgggacaggggacaccacggtccagaaatctgctttctgaaaccccagccctggccctctggcctcagagtgtgtatagttagttctctctctctttttttttttttttttttggaaagggagttcggctcttgtggcccaggttagagtgcaatggggcgatctgggctcacggaaacctctgcctcccaggtgcaaacgatttctcctgtttcaacctcccgaatagcgggaataacgggattgcgccaccacactgggcaaatttggaatctccagtggaggcagggttcctccgtgaagctacagggttggtctcgaactcccgacctcgggtgatctgccagttgtgtcac

SEQ ID NO: 142566 - DNA, 424 bp, Homo sapiens
tttataatattcagtttaatgaagttgctgcactttcgagcactgtgatcaggggtttcagtatggaaaaatctcatcctgtccctgaaggatgattttggcaatatgtatcaaaagccagacaaacacaccctttgacctagcaatcctacttcaagatgtttatcattggaaaagaaacagcaatctgtgctaacatacctattgaagacaatcattacaaaactatatccgggaaattgaaagcaaccctaaggtttcgagaagtggtattaatttaagatgccgagcgcggtggctcacacctgtaatcccagcattttgggaggccaaggcaggcagatcacctgaggtcaggagttcaagaccagcatggccaacatggtgaaaccccatctctactaaaaatacaaaaattagctcg

SEQ ID NO: 142567 - DNA, 340 bp, Homo sapiens
agaagaaagcagcggttagaaccgtattattctctttgatgtaataaagtcagctattagatatgagaaagggatttcagaagcctggattaaggtggcatctttggaactttgattatcaaggaggaaatgagtggcaattactgactttattacatcaaagagaataatacggttctgaccgctgctttcttgatttcctgaggaattacaagtagcagagaggaaaaaaattactcttctacctaccagaaaagaacttacaagatgtgaattcctgcttagtagccatgtaccctggagtaaatgacaacctcatgtataagatggctaataaact

SEQ ID NO: 142568 - DNA, 283 bp, Homo sapiens
caggctgatggtagggaactgctctgctagagaggctttggcaattactcagagatgtttacaaggatttatttcttagagtggtttgatttccagaaaaattgcctttaaaaaaagctggataaaacaggttccacattacacttgtatgagttgtcctgaatggcataaattatttttcctgaggctattagctcagagtctgagcaacacactggtgtttttacaggagtctaatgcatagagattacggctgactctccattttatataattcctgacc

SEQ ID NO: 142569 - DNA, 268 bp, Homo sapiens
aaaattaggacaaatgtaaatgcagtagatgaaagcagtcatctgttgaagtgatcaggatgttgcctttaaatgatggtctgaaccaatcatgatgggacagttattgacctaaagacaagtaacatttagccagttttattgagtcttgtttgaagaaaaatcaggaacttaaaagcaagaaatctgtagtatttatctgatgttaacagagacagaaagagagagagagaattcaatcttgccaatgatccaatggtttattggg

SEQ ID NO: 142570 - DNA, 397 bp, Homo sapiens
gaccacagggtcactcagaccttctcctgatgctgaagctgagtccgtgttatcagaacattgattccagagggaaccgctgttcccagttgacccattgcagctcagctcagcttttgcccttttcttggttgttcctctccagcccctcctaagattttcgggatggggtggcagattcgaggagcaggaggggcctggacatggtgggcagagtcaggagcagctccatgccccagggtcagccgattccctccgagcctcaggtgccttgctgtgaaatagggagaccataggtgcctgggcatggatcggcctcgggggccaggtcagccgtgaatgtccaggcgaagctgtgtttggccagggcatggaagggtgtggtcatgtgaggggc

SEQ ID NO: 142571 - DNA, 306 bp, Homo sapiens
ttattcttagaccatagcttgggtctttgatctagtccagagtaagagaattttagtatatgaaggacctggaaattataaccaatggtataataatagtcattcttagaattgaaggaactttagtttgtaaagcatttttcatgcatcatctcattttgatattttcagaatcaagtagagattatcgtaatcttatacagatgaggaaactgactctgaaagtttaataatttacctacatctggcctttcaacaaccaagtttagtgctattatactacttctaattattttgagaaaagag

SEQ ID NO: 142572 - DNA, 305 bp, Homo sapiens
ccagagatgaatcacagtgaaaagtgggcaccacctccagataattaagcttgagctccaacttattgcaggtgagtaagtgatcagaaaggaagatgaagctggtgaattatggccctgctttcttctactgcaagcagccttctagaagccttaaatctgcttttcttagagtctttaaagctactatttaatactccagagagacaacaaaactagattaggtttgactctcaaggatatgaccttacttgtctggggaaataagcataagacggtaggttcacagctttcctgttctttaa

SEQ ID NO: 142573 - DNA, 345 bp, Homo sapiens
aagtaagtgagcatggaagccgtctttaccatggtggcgtcttctattttcagtaaatttgaactttattttatcagtatttcatggtaagagtgacaaatatcaaagcttaggatgtccacttctaacaggagaccctccccattataagcgggaatacaaaatcttcactttcaggttgtgaaaaaggatgaggcgtcctgagtagttatagcctagattccaagtgcctgagtattctggggaaccccaagtcttgattgtggcatcgataaacaccggtgtttatcgatgccaccaatgccccatcgtggagagcggcggggcattggtggtatgggtacc

SEQ ID NO: 142574 - DNA, 245 bp, Homo sapiens
atgcacctgtaattctaggtgctattaagttagttagccatgtaaaaaaaaacccatagagatgggagaccaaggataatttgtgattcataacctgtaacaacgcatgtcaagcgtgttcacgtttttttagttgatcttgatttatcattattagagtcctttagatgtctttataagttattcttgatgcaaaaacattcattataacataatagcaaaaaagaagccatttagttatacag

SEQ ID NO: 142575 - DNA, 235 bp, Homo sapiens
ggcgaatatagactctcccaactcacgtgcgttattctgtctccatctctcccacaaggttaccaagcaccttagacacccccctaacaaagaacacacacacacacacaagaaagtgagcaggatttactcagagttggggtttcacctactggtttactcagaagctacacaaaagaataaggcagttatgtgtattagcaaatgtgttgctgaaataagggaccacgtggat

SEQ ID NO: 142576 - DNA, 368 bp, Homo sapiens
gatgtctattagtgtttttaatccacagataatgtatatgatatatgtctaccaagagatatgaaattgcatttctagtatttagacattaagcagtgcaattgccaggaatcagctggcaggattgtctgtcgtgaactggccttgcatagaatagagagaggagaagcacggagggtatgtcgtttgttttagactcattagtcctattagtttgttaagccagttgcatgtattagtttaatttaaaaaaataacttcatttgggaggccaaggtgggtggattacctgaggtcaggagtttgagaccagcctgaccaacacggtgaaaccccgtctctactaataatacaaaaaaaatagccag

SEQ ID NO: 142577 - DNA, 115 bp, Homo sapiens
ggcatagggagagtagagagaagggctgagccagcagaaaaaagccttttgagcttacagaaaaaagttctgatcaaatttaaggtcaaagtcaggtttacagttcaaggtcaag

SEQ ID NO: 142578 - DNA, 169 bp, Homo sapiens
caaaccatgctagcaaggaagagaagggacaccaaaaaaaggagaaaaatgcctgaacaattcacaagctattaaaaaaaattttttaaggccgctggatctagaattattttctagtctttttttctgaaaaagagcaataacgcctgaacaactcacaaactattaa

SEQ ID NO: 142579 - DNA, 320 bp, Homo sapiens
ttgctgccatcccatcatcctgccacccaagatccccactatcctgacaaagccacaatcggagccgcttcttcatgaagtctctgatctccccaaatggatgtaagctttctctctgtgcatcccatggtgcttggttccggcttctcatgccgtatcctgctttgtagaaccatcatcagagagtgttaaaagagcttcaacgaataccttctttcagggcaccaggcctcactgttgtacatatggtttcacttaatcctccaatactcctagagttttatgttcttgtcattctgcctccctgtcagtggacagta

SEQ ID NO: 142580 - DNA, 581 bp, Homo sapiens
ttagcctcaagcatacccatccaatcagcttaaattgttcagcagttgacctctgtgcttcttcctttgggggtgtttaatctttggtaacagttgtgcagtggtagccttatttcggggggcagtccctactttctgtcacttatcgaggcctttgccaaagaaaagtggaagccgtttccttgacatagccttatatgacctgatgtcattaggagaagagttaaaagacagtatcccctctctcctgcttgtgtgccaagttcagtgttccctttgcatttttttggggtgggttggctatattacagaattccaccaaaagtgctaagtgtcccctcctgcagaagtatcgtttgtattcacagtaggctacgtgtggatgtttcagccatctgctctgctccctgggtccccgggtcaccaccatactgagaaatataggactctgccaaagagacgtggaggccacgtcggcttgtcatggtgtcctggaagactctccagcagccagaagaaccttctgtgctgttttcactagagaagatttgagttgcagcctcttggaaagaacatgacgg

SEQ ID NO: 142581 - DNA, 181 bp, Homo sapiens
ccgttctctggctgagcagttccagaggatgcagggtgtctccatgagggatagtacaggtttcaaggatagaagtttgtcaggtagtctaaggaagaactcttccccttctgattctaagcctcctttctcacagggtcaagagaaaggccactggccatgggcaaagcaacaatcctct

SEQ ID NO: 142582 - DNA, 297 bp, Homo sapiens
gctgtccgtgggctgtctgagggcaggtggacaggatgttccctggggcagcagacattcctggtcgaaggtgacaggcagcggggagatttaccatttccggtaacccgagtccctgggatgtcgcattctctttgccaaggacacggcatccctcccttgccagcccttcctgccatttcctaggctgggcctgtctgactggggcttgaagacaggctggagggaccagctctgggtgccagaggttgagactgagggctctggccctgattagcacccccacaaagacctagc

SEQ ID NO: 142583 - DNA, 233 bp, Homo sapiens
caatagtcctcccttatccacagtttcactctctacagtttcagttacctgcggtcaatcatggtctgaactattaaatggaaaactccagaaacaaacaactcataagttttaaattgcacaccattctgagtagcatgataaaatctctcaacattctgtgccatcctgcccaggaggtgaatgtccttttgtccagcatatccacactatagatgctacttgcctgttag

SEQ ID NO: 142584 - DNA, 729 bp, Homo sapiens
tcatcacacctgccacctgccaggcaagcgggagcctcgtagcagaggcctcgcatcccacaggccctcctggaggggtgggcagagggcagcccgccaacaccgtctgtcatccagctgtcaaagccattaccaacacggcaagataaccatccttgtggggaattattatttggaagtaggaccagaaatgcaagttaaaccgcaagatgccaccacacagccataattaaaaagacaaatgccaccaagtgctggcatgatgcagaagagctagagtccttccacaccactcgacggggcacgaatggggcagcaactatgggaagaattgagcagctcccggaaagacagccacagagtgaccactcggccagccctagagcagtgacaccctcgtccacacaggcacgtgcatattcacaaacagtacactagccacgatagccccgacgtccatctgtgggcgactggagaaacgaggtatgcctccactcaggggacactgctcagccatgaaacagggaagacaagcccaggcgcagtggctcacacctgtcatcccagcactttgggaggccgaagcgggtggatcacttgagctcaggagttcgagaccagcctggccaacatgatgaaaccccgtctttactgcaaatacaaaaaattagccaggcatggtggtgggcgcctgtactatcagcatcatggggacttggagcgctcgtg

SEQ ID NO: 142585 - DNA, 776 bp, Homo sapiens
aaagttacccactgctaccccaaatactgaatattgccagaaaatctgtaaatgattacataatgtttacacctttataagtggtaactttgtaggtaaatattattcaagttatgaacctctgatttaggaaacctccttatgcaaatggttggcttcccactacagaaacatcagtaataagatagtggtttagactcccaaatctgcgaccagtctgtatgtttgaatcctggcttatgatcagtcatagctgagtgatcgtgggcaagttattcaaccgctttgtgcctcagtttcctcatctgtaaaaggataataggataataatggctcctaccttatgggattgtgaaaattaaatgagaatgtgtgtttatgtatgtgtgtgtttgtctgtatttgtacctaataccctattggagtttaccactattatttactgttcctcttctcttttcctccctgtgtaaacagccccataagttatctggaagttccctagtatctctttcttatcttctgttactggaagactcctttttcttctgtctttggtcccgtgttagttgcttcattttaattgaggctatcttgttctagtgtgcaatacattctcattgatcccttccctatacatttcttgcctagacactttgaaaaagtgtttttgttttgggtggaaactgaacattttctaataatgactcataaacccagccaggtgttaaggatactcctatatcaaggaaaatgaaagctatacagtctcaagc

SEQ ID NO: 142586 - DNA, 1020 bp, Homo sapiens
aggacatcgggggaaggctttagacttcctcagaacatggcttctaatccccagaaccctctagagctgagagtcaaggccaactgagcatgctgagctcccacctttctcttcccagtaggaagcccagggaccttggctctgaaagtatcaaccgaggccagaggcgaagcaaggcaggtcccagccatggccgccacaccacagcttgtccccctcattgctgtgcattccttcagcacttggagcgcagttttagtttgcactccgttaatttgtaagtgttcttttgtcttttttccttggctgtcctgactccctcacccaacaggggctccccaagggtgggggctgccttccttgtcagcctcctcagcggaagccctgcactagtgcccctgcacccaaaggctatagggtgcgtggcacggaccctgcaaagagcaaaagagctgctggatggtgcaaaatgcaaagccccaacaaacaaggtgatgaaggggcagtgtcctcattttccaggtgggaaactgaggctgagggaggctccacagccacatcagactggcagaaagaggtggagcaggaacctagattttgttttcctaccagagcctcagctcactctgctacactgccctgcctccctaccacacagtcctgcacttccagagtacatgtgagattagcaagccttcaaggcacaaactgggtcttattcatcttcatcttcctgggggaacccgggctgaacttttcttctccccagggaccctccaaagaacttcagggaaggaccagtgaaacatgaggctgccaggagcaccaaactctgacctctcatcaccttatcagaggggctcctttggagcctgagatgtgagagtatgtggcacccagacactaggcaggtcccaggctggacgggttcagtcccagaataatcaacccacttgccatggatacggaaggggggaagggaagggcacggtctctggctagggctccacccccaggcct

SEQ ID NO: 142587 - DNA, 120 bp, Homo sapiens
atcctctggagaaccctgactatacattatgttctatatattttgttcactttattcttccttgtcacggttaaacacaaaagtcaccccttataaataaaacaaacacccaaatcgagg

SEQ ID NO: 142588 - DNA, 427 bp, Homo sapiens
cttgtctttttattaaagtgaaaaataattcatataccatcaattcacccttttaaagtgtacaatttggtggttctctgtgcatttacaaaattgtacaactgtcaccactctaattccagaacatttttatcaccccaaaagaaaccctgtacctattaccagtcactacccattctcctatgatgccagctaaaatctactttgtgtttctatggatttgccaattttggacattttatatgaatggtcatacagtatatagccatgtagccttatgtgtctagcttcttttatttagtataatgttttcaaggaggaactgccaaacttccaaagcagctgtaccactttacattaagaagagtgatgtatgagggtttcagtttctccacatcttctgcaacttaccatctcttttactaca

SEQ ID NO: 142589 - DNA, 228 bp, Homo sapiens
gcaccctgccctgaattccaaaaattacctgcccccaattttcagtgggccctgctcatgttttggcataatttgcaattccacttggagcacctggtgccagctacttagctgaatcgctatgtggaaggctgaactccttgcacctgtgccttctccaacctctcctgttagcttggcctgtcccactctgaagggcatgtctagtgccaagtctcagtccctttc

SEQ ID NO: 142590 - DNA, 253 bp, Homo sapiens
cattaaacaaataagcacaccagtaacgacacaaaaataattgtgaaagtgctctgaaggaaaagtacaggatagatagagcaagaaaatgccttcctgagaaaggctgtatacctgagatttgaaggggggcatgccctgaggcaggaaggagcttggcacattccagaaactgaggggcagccaatgagaaaatgcatggcattcatttgaatagtctcactggaggtaaatctgcatcatcctctgaggg

SEQ ID NO: 142591 - DNA, 349 bp, Homo sapiens
gcagtgatatatttttatgatataatggaacttggttggcctggatttgcttttgtcttcaattcccaatattatgttttattcacctgagcttttggtaaacacggaggggctgtaagcttgggattaagttaagctccctgacaaatttcggaaatgtagatatcagttatgatctgaatgacactggatttgaggaaattgttaatggtttcttgtgacttgtgtggcaggtagatgaccttcttacttttatttaccttgagtagcattttgggtagaatgtgcagtaactagtaaatttgaaatttgtgaagagtttaagatttgcccttttcgaaaatgggat

SEQ ID NO: 142592 - DNA, 383 bp, Homo sapiens
ggcaacatagtgaaaccccatctctattaaaaattacaattataagtgctgggtgtgcacctatagtcccagctacttgggaggttgaatcaggaggaatcccttgagcctagcagttcaaagttgcagtgagctatgatcacgccactgcactccagcctgggcaacagagctagatcctatctcaaaaaataaaaataaaaataaaaaattaggagttcaaaaaaaggcagggtggttaaagtattaaaggcagtggtcaggggaagcctggctgggaaggcaagatttgagcaaacattggaaggagggtagggagtgacctatggggaggggcagccaagcaaagtccccgtggtgggaacagaataataagcagtggc

SEQ ID NO: 142593 - DNA, 271 bp, Homo sapiens
tctagaagcgttgagaccacaaatcccttgaaattgtatgcaatgtagtacatacatgtttattttgggggatggagggtatagaaagttttcatcagattctcaaaaaggtccagtgaccccttcaccccaaaaaccacattgccttaagaaactgactggctgtcaaatctgaaaacaagaaggaacaccatgtttagctatgtgcaaggagttatctggcattctttagtaacaaaaattatattattaatggacattgagagattta

SEQ ID NO: 142594 - DNA, 455 bp, Homo sapiens
caagatgaaatttgggtggggacacagccaaaccatatcaatgctgctatgaacattggtgtacaaatatctgctttcaaatcctagagtatattcctacaaatattaatgctgtttctaacctgaagtaattgagatgcagagatgtgaagtaattgagatgcagagatgtatgtctgaagtcatacaactacttggtgatggtgctgggtttctgggtttacttgttcccttccattgatcccaaaggacacatgcgagactgccttaaggcgaagtgttttccttccttttttgagatgacagtgtcagcttgtgggaaaggttggcattgaagtctaccagatctgagttcaaaaccaggcacttgcctttgctaagcatgatgtcgtagccaatctctggctccatttgcgatgtctacctcatggggattgttgaaatgattaaatgtg

SEQ ID NO: 142595 - DNA, 735 bp, Homo sapiens
atggtggttgtaatcacatggtctgtcgtaaccagaattgtaaagcagagttttgctgggtgtgtcttggcccatgggaaccacatggatctgcctggtacaactgtaaccgctataatgaggatgatgcaaaggcagcaagagatgcacaggagcgatctagggcagccctgcagaggtacctgttctactgtaatcgctatatgaaccacatgcagagcctgcgctttgagcacaaactatatgctcaggtgaaacagaaaatggaggagatgcagcagcacaacatgtcctggattgaggtgcagttcctgaagaaggcagttgatgtcctctgccagtgtcgtgccacactcatgtacacttatgtcttcgctttctacctcaaaaagaataaccagtccattatctttgagaataaccaagcagatctagagaatgccacagaggtgctctcgggctaccttgaacgagatatttcccaagattctctgcaggatataaagcagaaagtacaagacaagtacagatactgtgagagtcgagcgaagggttttgttacagcatgtgcatgaaggctatgaaaaagatctgtgggagtacattgaggactgagaatggacctgcataaaatgaactctgaaaactttaccatctagagtgtctcatgcaattaagactatacaaacacatatctaggaggcactaagcctattacgacacggctggtctgta

SEQ ID NO: 142596 - DNA, 471 bp, Homo sapiens
tgccaagagacagaatcttttctcagatgccatatcttctagaaggaccaggtgatgctccttctctgaagttcttctcaaagctgtgaccacaaaacccagcttcaggagtagtgacagggtgacacagaggcccctttatggagagttgacgggcgatttttttgaagatcccaatggctgtgggtcccgccagaaagtcttatcttttctcagaataggggaaatgcattgtcggggaaacatcagaggctcccttacttgagacactcattaaaacagttgaggggataagagccaggcctcccagcgataagaggtctgagttcttgggatcagaatgtctggatgggtgattcccactccaggggcagacctcagcatgtgggagctgcctcagcacaacaaggctattgtaggatgccaagagcaaggacaatgcactgagctccggtctctgcccccagatct

SEQ ID NO: 142597 - DNA, 174 bp, Homo sapiens
ggagttcaagatcagtctgggcaacatagcaagatcctgtctccaacaaaaataaccccaaaactcccttttccctttttccaaacacttaatcccgaagaatgtccagatcaaactcttaaaaccatctgcatctttccattccaaagtctactcactgatctgaagcaccaa

SEQ ID NO: 142598 - DNA, 434 bp, Homo sapiens
cttagattccctgcctccagacccaggtgttttctcttttagaaagttagcataaattgacctcagattccgtgcccccaaatcttggtgtttttccttgattcagcacgaaatggccttcagttccctgcctccagaccctattctcctgcctcagttggggaaatgtgtaagtatttctaattcacccttatactaaagggtagatccttgtgatttcagcactgtgtgaagttctactcgtagatataaactgtattttccatcttctgttgacaaggctgtgaaaacccatgctcaggttcatccagctcagcaaacgtctcaaggaagaagtcatctctctgggttctgccttcaattagtttttctccagagtgtttttttctctctctttccagattaaagacctatttaaagaaaactttaaaata

SEQ ID NO: 142599 - DNA, 724 bp, Homo sapiens
ttagtccatcctagaattatctccttaggacactggtatttttctgcctttggactccaagtgaaacactgactcttcctgggtctcaaacctgccagcctgaaggctggaacttcaccatcagttctcctgggtctccagtttgctgaatgcatatcttggaacttgtcaactttcatagtcataatcttgctttgtcacccaggctggagtgcagtggcatgatctcagctcattacaacatctgcctcccaggttcaagcaattttcctgcctccacctcctgagtagctgggactacagttgcataccaccacatctggctaatttttgtatttttagtagagagagggtttcaacgtgttgaccagctggtctcgaactcctgacctcaggtgatccacccgccttggccttctgaagtactgtgattacaaccgtgagccaccgcgcccagcctgaatcctgactttctgacctagggcaatttaacaaaattttctgaatctcagtttctccatatttcattgagcaatgaaagtgtctttctcacaacattgtgatgaatcataaaatggaaaagaacaaagcaacacagaatattaaactcaatgcctgttacataatcaatgatgcatacattagtactattagagtcaggtattgctatgtctatgacaataactacagatgttctttactagaacgtgaagaaggaacaaaa

SEQ ID NO: 142600 - DNA, 693 bp, Homo sapiens
ggacgtcggggaggcctcttgctcatgcatggttcgcctcatgacggccaccgtggcagccacagcctgagctcccaggctcctcttttcagcagtggatttcaggagtgaaatggaggccgggtgcggtggctcacgcctgtaatcccagcactttgggaggctgaggtgggcagatcacctgaggttaggagttagagaccagcctggccaacatggtgaaaccccatctctactaaaaatacaaaaattagccaggcgtggtggcgcacatctgtagtcccagctactcgggaggctgaagcacgagaattgcttgaacccaggaggcagaggttgcagtgagcctgggcgacagagcaagactctgtctcaaaaaaaaaaaacagaagaaagaaactgaataaggccgggtgcggcggctcacacctgtaattccagcactttgggaggccaaggagggcggatcacgaggtcaggagatcgagaccatcctggctaacacggtgaaaccccatctctactaaaaatagaaaaaaaattagccgggcgtggtggcgggtgcctgtagtcccagctactcgagaggctgaggcaggagaacggcgtgaacccgggaggcagaggtttcagtgagctgagaccgtgctactgcactccagcctgggcgacagagcgagactctgtctcaaa

SEQ ID NO: 142601 - DNA, 507 bp, Homo sapiens
attttctgtgtttgcatctcagctctgccactttgtagctctgtgacctaggactaactcaacttcctgagtctcaattttcttgtctataaaatgatgaaaatgctgcccatctcatagagttatgaggattaaatgagcgaatacatgtagattccttagaatagtggctgacacttggtaagtgtcattagatatcattagcatttctatatctttcactttatatgtctcttctggctgtcttcatgtgtgcatagttgtactcttgctaagaaatgcatagatttacttaaggatgttgtgaagcttgtccacagaattataatgtggttttggagtctttagtatattataatagagggaaaagttattactgtcaattttttccaccttcaaaaacaattattgcttaagaattactgggattaattatcttttaaatgtttaaatctgaattcatatttataaaattaatacctgttcaaaatcaatattagtagaagc

SEQ ID NO: 142602 - DNA, 284 bp, Homo sapiens
atgaaactgccagtaaaatcatagaaatgcctcctatcaattatacatttgttagcaatgacaaccttcacatccatttttacttgcgccactaaaactttaagtaatataatacttagagtttctccttttctctatgcttcaaactacagacttctccacatgttctttaccttctctccacacatacacacacatacacatgcaagctttatgcttgtcagaaatcactgaattactcttcccagaaatgtcagctcagaatggtttagacacccagctgg

SEQ ID NO: 142603 - DNA, 483 bp, Homo sapiens
gatgtgagcagaaacaaaggaagacaaatctagactgatgggattttcattgacataagcaatagaggcaatcagtgagatttgtttggacatcttgagtttgaggagcccatagattaccccagcaggattgcccagttagtaactggatagacaggtctggagctcagaaaagaagccgaggctggagatgcagatctggaaatcagtaacatataactgaagccatggtagtaagtggaatcatccacagagactgtgtagcatgaggaccaaaagccaaggagagagcctgagaaattcctaatgcttaaaggatggccagaagaagagagatcagaggagactgtgaagaagtggtttattgaagttggagaaggtagcagacgttatttctcaaagtcaagagagggcagatttttgagaaatgaagagtggtcaatagtgttgaacggcattgagaagtcaagtaggatgaggcct

SEQ ID NO: 142604 - DNA, 399 bp, Homo sapiens
cagtagagatgagacagagaaagatactattgactggcaaggacctttactctgtgtgatctgaggattcactgaaggtggccaaatctgtatttaaataagatgactatggccgcaggttgaaggatggattaaattggaggcagggaaagtgggccatagaagatatttaaacaaaaggtgagtaggcactgaattaggatagcagcaaaagtacagaaattaaaatggacttagaagaaaaaaaggttggacatggctggttgagggtaggagttgtgagagaaggaagtcaaattcgtattgcctgacttaatttaaaaagaggccagatatgatggctcacgcctgtactttggaatgctggggctggtggatcacctgaggtcaggagtttga

SEQ ID NO: 142605 - DNA, 740 bp, Homo sapiens
ggtgtgatggcggggacctgtaatctcagctactcgggaggctgaggtaggagaattgcttgaacctgggaggcagaggttgcggtgagccaagatcacgccaccgactctagcctggccgacagagcaagactccgtctcaaaacaaaaacaaaaacaaaagacaatgttgagtggtgggtcttctgctttaacccctccaacacctctgactcccgccttgtctccctccagccatgcgggttcccaccctccagcctcagcctgtccccatctgtgtccctcagactcagaggtgtcctccccagagacgcagacatgggcctctgccaccctgtattacagtgccctgcagtcaccgcctgcctgtgcatcccttgccatgctgtgacctcttgtgtctctgttttcttcttggtaaaacggggatacctcagagggcagctgtgcaacaggacaaattcacacacgagacactcgggatgctcctggcacacagacagggtgaagcatcccttgtccccattgtcaccttctctattagctcgggctgccataacaaagtgccatagactgcgcggcttacacagcagaaatttacttcctcctagttctggaggccagaaggccaagatcaaggtgccagcgaattcagtttctgtggaaattctcttccgccttctcactatatcctcacagggcctcttctctagacatgcataaagggagacagatccctg

SEQ ID NO: 142606 - DNA, 548 bp, Homo sapiens
cagtagcaaaacggctgtgcctgctgctctgtatagaaatgtgttaccagaaatatatgccaggaagggtcagtggctttgcatttatgaatcaggtgtgggagctctcaaagaaaaagaactgattgaggtttaccatctctgaggtcatatgcctaaaggtggacttccataggagtctgagagacctgagatatacccatgaaagatacatccttcaaaggcaaaagccaaatagtagccaaagaagaaagcatgagttattttagcctaccaattggtgaagtttgtgaatcacagtctatcactagttaatgcagattatcaagtgtgcaaagcatggagaggaaagatgtcttagccttcctgtctccagagaggtatctgaaattcatgcccgaagtacaactcaagtagatgctaatagagatagagaaaataacaggagaagcagagttggtgagggataaatgacttgctattgaaactgtaaaattatcatgctagaaaggatgaccagccaagattagaattcagggattccaggg

SEQ ID NO: 142607 - DNA, 185 bp, Homo sapiens
cagagaggagtgaagttcagatccggctccagcagagcccctccacccactcaccacataccccttaggcagcagtttccctgcaagtgctggggcagccattcacacacacacagtctgactcagagatttcatcttcccacctgttcacctttgctcaggaagcccctgcccacatcccattc

SEQ ID NO: 142608 - DNA, 303 bp, Homo sapiens
gtcccttatataaaatggcattttatttgcatataacctacatgcatcctcctgcatactctcaatcatccctagattacctaatacctaatacaatgtaactgctacggatgtaagtaattagattatatttttttaatttgttttttttttttgttttttcagaaggggtcttgctatgttgcccaggctgatctcaaattcctgggctcaagccatcctcccatctcagccacccaagtagctgggattacaggtgtgcgtcaccacgtcgggcttaattcatatttttttattattgta

SEQ ID NO: 142609 - DNA, 100 bp, Homo sapiens
ccctagcctctgtgctcagtacaacccaaaaatttccctttgtggtttcatctttactgcattaaacatgcccactctctacccgagacttaaactgaaa

SEQ ID NO: 142610 - DNA, 659 bp, Homo sapiens
acttctctttcctgctgccatgtgaagaaggatgtatttgcttctccttctgccatgatcgtaagtttcctgaggcctccccagccatgttgaactgcaaagacactttcagaagaggaacgaaggcctggaaggaaaagcatcaggggaacgacgcttacgtctctcctcctccctccggtctcccaccagtgctcccattggctgaagccaaccagaagccacaggactctatcacccaggctggagtgcagcagcgcgatctcggctcactgcaacgtccgcctcctgggttcaagtgattctcctgcctcagcctcctgagtagctaggattacaggaatcctgaggtcagcatcatcccaatttcacagagtatgacatgacgtctcagagagggtaagcagcttgccaaacattccacagccaggaagctgtaggaccagcctgtgctcctaaggactggctcctggctgctatatatagaactaagcctggtggaggtgtcagaaatagaggttcacttctgtcatcaccgacctccctccacacctttgcaaaggaggaaactgagaggcagggatttccgcagagcaaggaacccaaattgctgcctcctgtgatttatacactgcaccccaagctgtaggggtaaccca

SEQ ID NO: 142611 - DNA, 538 bp, Homo sapiens
acttctctttcctgctgccatgtgaagaaggatgtatttgcttctccttctgccatgatcgcaaagacactttcagaagaggaacgaaggcctggaaggaaaagcatcaggggaacgacgcttacgtctctcctcctccctccggtctcccaccagtgctcccattggctgaagccaaccagaagccacagggtaagggatcccaggccatagggcacccccaggtcagccatccagggttcggagcaagctgaagggaagatggtaggtggagaggggcaaatggagaacagtcaagtctaggcagatggcactgtgcatgtaaaacccagctaggagagccaccagggggctggtgagcagccagaacccagctcttcaaatcttcaggccagtgtcctcacctgtaaaacaaggatttgaacccaaagaacaccaagatcccctctcatactaggattccagctgatcaccccggcctgggcctgggctctgctctttgcccctgctccccccagcagagaagtagtccagcaag

SEQ ID NO: 142612 - DNA, 494 bp, Homo sapiens
gaaagacctaatacatataataaaggtaacacaagacaaaactctcaccacagcctaacatcttagatgctctacggggtctctgcagtttctattagggaccccatgggtttgaattccattctagatttgataagaaaatccaaatgctcaaccccctcaactccctacccctccaccccatttacaaaagccaagtgaaaactaaggaggggccgggtgcggtggttcacacctgtaatcccagcactttgggaggccgagacgaggagaacacctgaggtcaggagttcaagaccagcctgactaacatggtgaaaccccgtctctactaaaaacacaaaaattagccaggtgtggtggtggacgcctgtaatccctgctacttgggaggctgaggcaggagaatcgcttgaacccggaggcagaggttgcagtgagtggagattgcgccattgcactccagcctgggcgacaagagcgaaactccaaag

SEQ ID NO: 142613 - DNA, 513 bp, Homo sapiens
agaaacatgcccccctcctatcatgcacttcccagcacagaggttgagctgcagtggtcatggagaggcgctgtggagctgaatggagtttgaggctgtctgcccgttagttgtacctattccaccaggtgttttggtgttggaagacttgagatcaagttctcagttggcagtggtttcaaagccctgctgagaagactgactgcctttttgggtacctctattttgaagtggctgtgacatttgactgtaatgtttagctcgaatgtgttttgtgcttgatgagctaatagcatgccttcctctaaagatagtatttcagtggtggcagaagaggcttcctctttggtcttgggggacggggacagaagtcagcttctacccctcgatagaaacttacctggtgccccagaattagtgcagaatacccaaataacaccaagataaaaaaaaggtatcccaccgaattgagttgaggaggggcatcttaattttggttgcatatagaggggg

SEQ ID NO: 142614 - DNA, 391 bp, Homo sapiens
agaaacatgcccccctcctatcatgcacttcccagcacagaggttgagctgcagtggtcatggagaggcgctgtggagctgaatggagtttgaggctgtctgcccgttagttgtacctattccaccaggtgttttggtgttggaagacttgagatcaagttctcagttggcagtggtttcaaagccctgctgagaagactgactgcctttttgggtacctctattttgaagtggctgtgacatttgactgtaatgtttagctcgaattgtatcttctagtgctatcatgtaatgtaactaggcatgccgttactctcgtagaagagtaatatctctagtcggtggctagaagaggggtcctcggtgcacacggggaatcggcaacagaagg

SEQ ID NO: 142615 - DNA, 181 bp, Homo sapiens
ttgtctgtcttcggagacatctgggagaacaggattcctgaggtcacagggtggggagctaagctctggctgccgggctgtaaagctgatgttcaaggggagaggtcccaggctcctctggtggctgggggatggggctataagatggtgagctcgaagctccagggaggagtgggctggg

SEQ ID NO: 142616 - DNA, 210 bp, Homo sapiens
gtattagccacccacagaaaaactcattggaaaaaactcccaacctcgtccatctcatcaagacatacattttaacataaatttacttggaatgttatttatttgtcaaattgtatagcacacatatgctcttttgttcaagtatatattactaacaagttagtactgatgtaatgatcgtgcaattcagaataaatttcttatgtttag

SEQ ID NO: 142617 - DNA, 371 bp, Homo sapiens
ctgcgtcttctgcaactaggcagctctgcatacctctgggcctccccggggtcttgccaggcccctccctggaggttttaagggaaaagcagagagcagaacagagcagaagagtgaggcaccatggaagaaaacatatgtccttcccatgggagactaaacgttccgccaaagtcagcacctttgaacatcatctttgactattaaggcagttgctgacaccaccatttacttctctctcctcttcctcaaaacagacttctatcaaaagacataaaggcagaaccgtgggatcagcaccacacacagctgctttcttcgaacatctgaattatgacttcctgttcctgggatgatgctgggaacagcca

SEQ ID NO: 142618 - DNA, 321 bp, Homo sapiens
ggagtgtgtagactgtagagggatagttggagataatttcagagaaggaaattggaggagggcatgtagggctttgattccagagtgaggagtgttatgtgcttaggaggcaacagggagccgcttgtctgaactctcatctggactggtggaagtccagggtgctggcggtgagagaacaaagtagactcggactgccctggaaaatgcagaaccctgggcacgtaggaccaaaaggggaatcaagactgagactgtcactgaagcataaattcaaagagatgcagatgagaggaggggcctggtggaagatgaaagtct

SEQ ID NO: 142619 - DNA, 453 bp, Homo sapiens
cctgactagccttcctagagcataattccattcacacaatggtccatattcctaactgcacatccaataactgatgattaaaatccacgacccccgccctggtactcaatgccttctatgatctggctgcaacctccctcacggcctagtcttctccctccatctccttcatgcttcctccctctacttccttgcgagtcttgagccccaaattaaacccttccttcttgccctttgatactcaaatttttcctctacaaccctcttacctcctcccactaaaaatgttctcctccatttttttatgtctttctagactcaactagacaattccctgcactagaaagtctcctctaacccttccagacagacagacagatataagccctcctctttaccatgacaagcaggacctaaaatgatgttgacgaccaggtattgagcaccttggta

SEQ ID NO: 142620 - DNA, 161 bp, Homo sapiens
acaaatggatggaaggaaggatgaatgagtggacagatggatgaatgaaggagtagtactctttgtggggcttaactgcactgtctgaattgattagtgtctctactacatttctcatgtgtctctattacatctatgtaacttgggaaagaatatttcct

SEQ ID NO: 142621 - DNA, 373 bp, Homo sapiens
gctccagctccctcttcacttaatcacaggaaaattcctgtccccttggtgcccaagatctaagtctccagttaggaagaaagccttgagtgaattccagtgctaatccgagagccttctcagaggtttttgtttttaaaagactaaaatgggccaggtgcggtggcttgcctgtaatcccaacactttgggaggccaaggcgggtggaccacctgaggttgggagttcaagaccagcctggccaacatggtgaaaccccgtctctactgaaaatacaaaaattagccagcgtggtggcgggcgcctgtaatcccagctacttgggaggctgaagcaagagaatcacttaaacttgggaagcagaagttgcag

SEQ ID NO: 142622 - DNA, 288 bp, Homo sapiens
agcggaaggcggagccaggccggcctagagtcacttctccccgcccctgactgggccgggagcccggggctggtctctaagagtgggtaccgagaacagcctgaccgtggagaagggctgcgggaagcagaacaccgcccccagcgcccagcgtgctccagaaacatgagcacaaacgcctcagcctccttccccggcggcaccggcaccggcaccagtacccgcaccagtaccggcaccggcaccagtacccgcaccagtaccggcaccggcaccagtacccgcacc

SEQ ID NO: 142623 - DNA, 389 bp, Homo sapiens
ctttcctggagggagtcagcagggtccccttgagtggtgggtaaccctaagatggtcttgttggctaacccttggacctggacacaggagaacattcgaaattggccttagcctggagaatctgggatggattcttgtagtttatataggagtccgtgctggggaggagcagttggggctatattcctactgctgggacctcattttttcctttcctcccagaagctcaagtgtaatgggaagggaaaggtgttgaagtcagggtaaggtgacggggccgccaagacaggaggcgcggggcacacccagggccagctttgcagcaagttgggctgcagcctggtggttgtggggatttctgcacctggtgcttacaggtgtcaagagtg

SEQ ID NO: 142624 - DNA, 732 bp, Homo sapiens
gccagttgaggatcagtgagaagataaattacctttgaaattgtaatgttaaatttggggagaatgagactgaaattagaggggatttaaagtatagcaatgaaatatgttggcttctagcaagtaccgttacactgttttcctgtctctgttaattaacatcagtttgctgttaccttactttgttgctttaaacaaaaatttcagcctctagatctgtaaagtgatctatacatttaaaggaatgaaatagtttatttaatcagaatatagaataaatgtagcaaataggagtgtagagtacccaaggattgtcagaagctttttgctaacctattcattgtgtgttacaaccacctcaccaaagttcacctgtctacctatctatccttgaatgagattaaatgctattatgaggttattttctttgtgtttttttttttttagacggagtcttgctctgtcacctaggctggagcacggtggcgcgatctcggctcactgatcctggctctctgcctcccgggttcaagcgattctcctgcctcagcctcccgggtagctgggactacagacgtgcaccaccacacccggctaatttttgaatttttaatagaaacgaggcttagccatgttggtcaggcatgtcttgaactcctgacctcaggtgatccgcccacctcagcctcccaaagtgctgggattacaggcatgagccactgtgcctggcca

SEQ ID NO: 142625 - DNA, 638 bp, Homo sapiens
ctggatggtgtggtgtggcatgtgattcccagaagcacccaggatggagccaagaggaccaagaggaagcagagccaactcctgatgggccaggcctcaagcctcacctacccctgcatggctcactgtgtgagaattattattattgtttaagtcattaattttgcagtgggttttctgattcagcagctaaaggcttcccaaaagattcacattccttcaggagtgggttttcttccctgacccatttcctggatatagtgctcagaacgcaaacttgaaatcagttatttaaaatgatgcttgcacgttgctgaatggagacgttctactgtacccaacagaaacttaagtgagttacttatatcagccaaaccttgatcctactgagattaaaacccagcctgggctcctgcctgggactcataccagtgggccttgctccctctctggagtcttctccgtgtgtcagcagcataagcatcaagatgaacagttttgaaagacagcctttgccaccaaatgtcccttaattctcttaatggcatcatcatcctttaaagcatccaggctcaaaatcttggtcctcatggacacccgcctccctggcctctatcatgcattcaggcattcagttc

SEQ ID NO: 142626 - DNA, 585 bp, Homo sapiens
gcctcctgagtaattgggattacagggacgcacacacaccagctaattttttgtatctttagtagagatgggatggggtgtcaccatgtcggccaggctggtctcgaactcctgacctcatgatctgcccacctcggcctcccaataaatggctgttgttttaagctgctgagcctgcagtaatttgttacaacagtgatagaaaatgaatacaggataacaggtaactcctgcttcagggcaggaggcctgatgggtcccatgtctcgctgcatagacagacaggccaccctttcagacctacaggaatacttgtcgtttcattggtgcttgtcgtggctgcagatcaaacactggatttacacccctggcactcatgcacaaaagtcttatcctggaaaaacaattcagcagcctgttcaaaacattttttttcctgctgagccatggagttctttgttgcaattccaagtttggggatcacagatataatttacttaaccttaaaaaaaatttttttttatcaagtgctatgctgtctattagaaaaaggaaagtgagaaatcccagtgcaactgtagggtc

SEQ ID NO: 142627 - DNA, 540 bp, Homo sapiens
catacgaaaactagctgggattacaggcacttgccaccacgcctggcttatttttgtatttttagtagagatggggtttcaccatgttggccaggctggtcttgaactcctggcctcaagtgatccgtccgcctcggcctcccaaagtgctgggattataggcatgagccactgctcccagctcagccattattttaatttatgaatggtttgtatacctagttaaaaaataatttggggggatgggggggacagagtctccttctgtcacccaggctggagtgcagtggtgcagtcatggctcactgcagccttgacctcactggctcaagcagtcctcctaccccaggctcccaagtagctggaaccctaggtgcgcatcaccacactcagctaagttttaaatttttttatagagaccaggtctcactgtggtgcccaggctggtcttgaactcctgtgcttaaccagtccacctacctcagcctcccaaagtgctgggattacaggcatgagctaccatgcccaacaacaaaaaaa

SEQ ID NO: 142628 - DNA, 601 bp, Homo sapiens
accagttcacctcctattcaccactccactaatgcaccagttcacctcctattcaccactccactaattcaccagttcacctcctattcaccactccactaattcaccagttcacctcctattcaccactccactaattcaccagttcacctcctattcaccactccactaatgcaccagttcacctcctattcaccactccactaattcaccagttcacctcctattcaccactccactaatgcaccagttcacctcctattcaccactccactaatgcaccagttcacctcctattcaccactccactaatgcaccagttcacctcctattcaccactccactaatgcaccagttcacctcctattcaccactccgctaatgcaccagttcacctcctattcaccactccgctaattcaccagttcacctcctattcaccactccgctaattcaccagttcacctcctattcaccactccgctaatgcaccagttcacctcctattcaccactccgctaatgcaccagttcacctcctattcaccactccgctaatgcaccagttcacctcctattcaccactccgctaatgcaccagt

SEQ ID NO: 142629 - DNA, 360 bp, Homo sapiens
cgttcctcccagagaggaagggagtgatgctgctggagctgtttcaaacggacggacggaatcacttcatctgtaatccagacacatgcatgcatcaggcaaacataaaattctgttgtcttctctgaagtagaattctataaaggcagcatttccaaggccaaaaagatgaccgaacagacagtgccctgttgatccagctagaatgagctctgcaacaccatcaattttgtcctacagctctttttctggtccttgtccgtgtaccagtcactccttataatgaagtcacttgattgagtgttgttcctgttgcaagcagggagaggaaagctgagaagccattcaataaatgttatg

SEQ ID NO: 142630 - DNA, 164 bp, Homo sapiens
gttaatattctgtgcatattcttccagatagttttaaatacaaacataaacacacatatgcacacacgtgttttataatagaggttatgttacacatgctattaaataacctgactttctaccttattgtgtcagagatattttataaatagttacttttaaag

SEQ ID NO: 142631 - DNA, 268 bp, Homo sapiens
ttcacaaaccggacaacaggcctattcctgtgcacctgaagtagaccatcagcccagtaccagccctttggaccaaggtcctggagacagtagagaccaccctgggcccagacaggatccacgcctgctagagcccctgatagtaggctcaccaactgtggactccattgtggacccagcagcagtcatgttacctggctccaaaagcatttggctacaatcccataggcaaactcatttgcctgggaacttgtactgcctgggaact

SEQ ID NO: 142632 - DNA, 294 bp, Homo sapiens
ccggctcccagcaggcgtcgttgcctctgccctcctgctcgctctatgctctgccaccagcatttcatcctgtggatgacaacgccaggtggatgcagtgttcttccattggttacttagctccccagattatctgtggaaaggagtgggggcttctaaactgtccactgccaatggggtgcagggtgactgttcctgaaggcagcccttcagggcacagctggccaggggtggccttgtgagtggacacaacaggcttttaggtctctttcttgggcagggcatctcttgcca

SEQ ID NO: 142633 - DNA, 315 bp, Homo sapiens
gaaggctggggtggctgtggcaatgtattaaaataagacagcactgaagtttgccatagtgattaactcttcctttcacaaaaagagttctctgtgccatactatgctgtttgatggcattttacacaatagaactttcaaacttggagtcaatcaatcctctcaaatcttgtcacatcaaccaagtttatgtaatattgtaaatcctttgttgtcatttaacaatgttcacatcatcttcaccaagagtagattctatctgaagaaatcactttctttgctcatgcataagaggcaactcttcatcctttcaag

SEQ ID NO: 142634 - DNA, 397 bp, Homo sapiens
ggagatgcagatgggatggggatggccccataggctggtctggactttccctgtgcccaaggccagacactggggaaagctcagggagagaagagaacttgcaaagcggagtcacattcttctctctcatggcgggttcctcctgaggggcctgctcttgtgagatgacatgaagaaggggaatggggagaatggcggccagaagaagacatatgacattccccagggtcaatggtgcggcccgtgtgtctatctactggccctccactcctcctgcgccactttcttccttccccacagccaccatcctagtccaggccatgcccggccactggctgcagcctccattgcctcccttctccatcctttgggtcctctgcccacagccagagggacc

SEQ ID NO: 142635 - DNA, 767 bp, Homo sapiens
cctcatataacatagaaacaattgcccaaatagcaggggaaacaaaggagacacctatccatggagggcaaatggtgctgattgatgttagtaggggggcgtccagtgaaggtctcctgcagttcccctcggcttgttaatcccttcatgggttccaggaaagatgatgcaggtgaatcccaaaactggggctcagcccaggagggttcttggcttcatgcaggaaggaattcaagggtgagccaacagagtaaagtgaaagcaaaccaagtttattaagagcaacagaatacaggaaaatggctgctccatagatagagcagggctaccccataagcagagtagcactcatggattgctgactaactctatttatagctactccttaattatatgctaaataaggggcaggttattcataaatttcctagaaaaggatgaggagttctcaaaaccaaaggttcctcctcttttaaaccatataatagcttctggacattgccatggcatttgtaaactgttatggcaccagtgtgagtatcttttagcatgctaatgtattataattagtgtataacacagatcaagggcaattagagatcacattcgttgccatcttggttttagctgatttagctgatttatttaatgcctcctgttttgattagcaaggttgtgaccagtgtttggaaaacaagtcctgctgatctacctctatataagataattaaattagataatccatgtaaagtgttcatttggaacat

SEQ ID NO: 142636 - DNA, 319 bp, Homo sapiens
catttaggctgttttcatttttcacttgttcaatcaatgctgccatgtacactccagcagtacactgcagtagtggcttgtgtgagatttctccaggtgtgtcctagggttggagctgctgggttgcagggtctgttcatctccaaggaggttgtccacaccagggcttttaccgccagctgcctcacaatagagaagcatccagtcaccagggcctcccttggccccatgcaggtccgggtgtccaccccaatcaacagttttgcttatttctggtccacaaaaaggtttcagttattttgatcttggctagaccttt

SEQ ID NO: 142637 - DNA, 262 bp, Homo sapiens
agcagattatttgtgctggtgtgttggaggggaagaaggatgaaaaatcatgaaatctgagacccaatgagttcaatttcttggttcacagatgaggaaagggatgtttctaaatgtttaatagaaaggtaaagaggtttgctcagtgtcacatatttagtggcataccaaatgatctgttgaaatgagcacagggctgggagtcaggagtctggattcttccaataactgattccgatagctttcctgtgcccactggcct

SEQ ID NO: 142638 - DNA, 415 bp, Homo sapiens
gaggggactacacaaggacagaaacaccagaaggcgagaatgactggggctatgttagaagccaagatttggtctcagaaagtaatgtgtaaagtaattttaattatttgttatttttaatgagcaaggtccacaggccggacgtggtggctcacgcctgtaatcccagcactttgggaggctgaggtgggtggatcacgaggtcaagagttcaggaccagcctggccaatgtggtgaaaccccgtctctgctaaaaatacaaaaattagctgggcgtggtggtgcgcatgtagtcccagctgctcgggaggctgaggcaggagaatcatttgaacccaggaagtggaggttgcagtgagccaagactgcaccactgcactccagcctgggcgatagagcgacactgtctcaaaa

SEQ ID NO: 142639 - DNA, 341 bp, Homo sapiens
tgcttggcgtgcaagagacacacacacgtttggtgtcagaagcgtgtatgagagtagaggaaattgtatggtttgtttgttcttttataagctacattcttaaggccaaggataaagccttggtctttcaagttaaaaaaacaaaatataccttttgtaaatcttacctcaacccctatgaaataagcaaaagtgagatcagcacacccatttgcaaatgaggctcaagagtggtcaaatcccctgcatgcaggggctggtaagaactgcggatttaattctaatttagaacaggccagagaaccagaagtcatgaatgatacctacaaagaatgcaagaa

SEQ ID NO: 142640 - DNA, 503 bp, Homo sapiens
tcctggcattacttctgtttcattcaacagcatacacaccagagtgtctcttacatattatatacatcagtagaggccgggcgaggtggctcatgcctgtaatctcagcactttgggaggccaaggcaggcagatcacctgagggcaggagttccagaggatcctgggcaacatggtgaaaccctgtctctacgaaaaaaatataaaacttagctgggcgtggtggcttgtgcctgtggtcccagctacttgggaggctgaggtgggagaatctcttgagccctggaggtggaggttacagtagctaagatcacacagtccagcctgggtgacagaatgagaccctgtcttaaaaaaaattgtggaaatgttgaggaaataaaacactaaaatttagcaattcaaggaattattattggactaatgattgactagttggatttcctttttttttttacagtttaatctggaaaaatggacctgccagtatattttgtaattcg

SEQ ID NO: 142641 - DNA, 525 bp, Homo sapiens
aactatgtaacctctctgtgtctcagttacaaaagaaacttttcctatgttggctggaagggttaaattaaataatgcatataaatggcttataaaattatatggtcaaaggaattacattctaatttttgaaattttttcaaaggaaattttcagttttaatgcccaatctactgggtgaaacaaaagagattccaggtataccttcccctttcccaaaaaaagataatcaaaagcaaaacatagtagcttatcccttgtcctgatacaagcaagctaataaaatcttgtgtactttagggcaggtagtgccacctcacatacatggtttaactgaagtgtttcactgaagttagctgatcaagagccactttgcacttgaccaatctttaagtgctgctatgcctggaccaaatgtgacttcagccaggagaacccaggccttagaatttaggagccattaggtcaagatgtctccagtggtgggtggggcagcagaagggtgatggttgatggagcaggtgt

SEQ ID NO: 142642 - DNA, 458 bp, Homo sapiens
ggcagggaagcaattgcagtggtctgggcccaacccttctggcagagcaaacaggcactctcaagtctcctctgtgcctcagctcaggttgtgtctgggtgcttcccaccctgttcctgagaaggcctctccctcaggcccttctcacgcaggttcctgagaaggccacctgcttgctgtgacccaaccatttccccgacatcacctggtgcccagccctgtctgattgccaagagaacaggcactgagggcactcatggcagccccagattttggaaatggggaaggaacaggcaagactgcttagagataggaaagaatatatgtgagtttggtggtcaagggtgttcagagaatggattctggccagtgagcatgactgactgaagatgtattagtatagaaaccagaacctgaaacttaaaaaatacatacatatatatatcctttttagccct

SEQ ID NO: 142643 - DNA, 705 bp, Homo sapiens
tgttaagtgaatttcccaaggtccacacaagtcagtggtagaagcaatcttcagagtgcatattctaacccctccaccataaacctctctagattctctagactggttctaaattctgtagcctcacattcaccttcctccctaagcattgtttactactgtaactttccctcgttgcttccaccagggatgctaaacctcaccactattaacattttggaatgcataattccttgttgtggagtttgacagcatccctggcctctatgtactagacacagtagccacaacctcctccccagtgtgatgatcaaaaacgtctgtagacattgccaaatgttccctgtgagcaaaatctactgactgagaaccactgacttacatggattcttctgattaaactgaattacctgatactcctaaaacacatatttctccctctatgctttttcacatttgttttcccctcttgagcttacagtgttcttggcctcctcctcatcaatcttctctgtttcatagtctttcagttcctcagcatcttttacagccagaggaaatactaacctgtctggttactgatctgcttgtttctatgccttttttgtttaaaaaatggtcaccacttccaaacttttgatttaaagtcccttaaagatccctggagtcttgagtttaaaatttagtttgtactatgcattccac

SEQ ID NO: 142644 - DNA, 302 bp, Homo sapiens
taaaagacaacgaggcaaagggagacgttaggatgtgagtctgatcagggagaaaggagtttagaactttctctcagggatccaggaagctaacaccccagcttcataactcacttccactgtacctactctagtaactggtaatatgccggctcaagggggtgtgtggaggaaggtcaggaaaaagggagggaggaagtcagccttattctgtgagctgtatttgtctgggggtgccctccccactagaaaatgttccccaatctcagcagggccctcaatagtcccattctccaccccat

SEQ ID NO: 142645 - DNA, 471 bp, Homo sapiens
tctgaggatccccgtttggggtctttgctggtactgtggagtctgtgtcacctggtattattgggaggatgagggagaattaaatgaattgctggggtgtttggagaagctgtaagtttcaatgaaggggtcactcatgacaggaggacccattcccttcctactccaccccttctcctgctccacagaaaggagagatggagaagaccctctccaggtcaagtgaccttacaataaggccaccaccttgctgtgttccgcaggacaggagactatgggactcctcctcctcacccaactctaatagcaagtgaatggtcagtctgtcattcctctgatcacaacaccttggggaaggcggagcagtgagtgaagatgaagcccattagaaacgttccaggagagttccaaccctgagcagggtttccacctgccccttggagacaagaaaggctggcataaccgcaaaag

SEQ ID NO: 142646 - DNA, 239 bp, Homo sapiens
atctgggattacaggcacctgccaccatgcctggctaattttttctgtatttttagtagagacagggtttcaccatgttggccaggctggtcttgaactcctgacctcaggtgatctgcctacctcggcctcccaaagtgttgggattaccagcatgagccaccgcacctggccagttagttattttcaattctatcccttcactacaattcgaatactcacttttcttcctctagctg

SEQ ID NO: 142647 - DNA, 281 bp, Homo sapiens
agcagatttaaagagagatctgcaccttgcttccaaggttcacatagtttgccctgtaggagtaaagagcgtcctgccagccacaaagaagcaaagtaggcctaggcctctgatccataagtagaggaataagagtaggaattcttttttcatcctgaaggccagaaaggggctctaggctgggcatggtggctcatgcctgtaatccctgcagtttgggaggccgatgtgggtggattgcttgagggcagatgtttgaaaccagcctgggccacatagca

SEQ ID NO: 142648 - DNA, 408 bp, Homo sapiens
agcactgatgccctggccacccacccctggttcccacctcctgagcctgctggggctcctttttacattcctttggggatcagagggcaggctggttctactgctcaggctggagggatgggatgggaacagaccatcatgggattagctgaaccgctccctctccctgggccactccaatgtggcttttaggtactggcttgccttttgggccagtgaccagggaggggcttcttggaatgtggggacacatgggggcatggggagcccatgtggtgctccctgaatctcatgtggtccacctgactgtttgccaggatttgaccccaggaatcctgaaaccctaaccctgaagcagcaaaggagggccttgaaagaagaaggtggatggaaagttctagatccaaa

SEQ ID NO: 142649 - DNA, 785 bp, Homo sapiens
tgtatcattaaaatttccacagaacaatgaaccttaataggcgctaatgcaattgtgaattatggtaattgttacctaaattaatctctgtactttccattccttattgccctgtgcataaggagtgtgaaaaagataatgttgaaactgacatttgtataaatggtataaaaatttatcttatttaataaaaatttaatataagaacttgctactttgtaaagtagtttactcagaaaaaaatgttagatttgttgcaagttgggtttataaaatctttaatttgtgaaatttgggagggaaactggcagttgactcattatggttatctttggggtatgtgtatgcaccgaggtatcgggatggtacatgtatgttcctccgtgcacatattgccagggcagtgtatgcattcgtacccttatctgtgtgcctggcctctttctgtgtgtttatgtttactcatttacgtaaactaccctcttggtgtaataaaatccaccattatgtgttgaattgtgttcctctcaaattcatatgctgaagtctcctagttcttcagaatgtgaccatatttgaagataggacctttaaagaggtgattaagttaaaattaggccgtatgtttgggctctaatccagtgtgactggtgtccatctaagaagaaattaggacagagacatagagggaagaccattggaagacacagggataagatggctgtctacaagccaaggagagaggctcctgaagaaaccggccctgccaataccatcttgtcaga

SEQ ID NO: 142650 - DNA, 341 bp, Homo sapiens
tccagtcttgggagggctggctgggaggccaagagcccacctgttctgcttggcttagaggctgggcagtagcagggctgagccactgcctcagagggtggtagtcgggggtggtctgttttgacaagtggagaggagtgaaggggagaaggagagctcgccatccttcttgggcttgctgagtttatgcatttgttttgttttactggcctctgttagtccctggtgcctaccgttctccgtccagcctcaggacttttgcgcatgtggtttccttagcctggaatgtaaagggagccttccttcctgacctggttcgtgcctcttacccctcagatctc

SEQ ID NO: 142651 - DNA, 346 bp, Homo sapiens
ccttacctcagacagataaggactagctatacatgaaacgcagactgtggctaactttaattctttcccaaatcagattttcatgagacattttcagttctttcagtgaggcaaatgaatttctttaatattttacatatccattgttaaaattcaatgcaaaaacaactctaatgtcaaatataaattattttgttgttaagtttaattttgaataatcttcttctcttttctttggcattagaacaaattgcaattactgaagtccaaagaattataaagcactatttaagcatttacattagatatcaaaattgaagaatacaaagactagtttattaatgga

SEQ ID NO: 142652 - DNA, 339 bp, Homo sapiens
gcagaggccaagtcaggaaagcagctaagggaacgtgtacacacatccatgacgtggatagattcccacagtggcctgtagcccctgtgtcagtcctggaacccagtgctatctatgcctgtgaggaccctgcaccaggtccctgctgctctggcctattagagaaaaggaaccttgggggtcattcaggccagaagtccacagacagagctcaggccttctctgcccaagctctaccagagagtttctgcttttattcttttgtatttgtttttctcaatgaggtagtgttttaaaatctggttccatgaggagaaggagaaaggtgaaaatcacctg

SEQ ID NO: 142653 - DNA, 569 bp, Homo sapiens
ttaatattctactcattcgaaaaatatattaaaaattaagatggaaagggaaaaataaacctaaaactgcaagtgtactgaagaaaatgaatctaattgtatttcaaatgaataccataattatggtaaggaaaaaaaacaaagatagaaccaattcaagcaactagtgaatgcagtatttgtgttcagtgttttgtcaggatggaattgagttgggaaggaatttcatacaagtcctaaacctttttttgttttgttttgttttgttttattgttttagtggtggggcaaagcagttctgaaacaattttagatgctttataggtctgagcaaatgtgttcattgttgttgagaagcagaatctcaatgaaaaagaaaagataaaatagaatgaatgaagtcaagaaaggaccctgagttgggtgtgatggtatgcatctatagttccagccacttgggaggctgaagtgggaggatggcttgaggccacagtgtgctattatggtgcctgtgactagccactgtattccagcctgggcaacatagtgacaccttgtctcttaaaagg

SEQ ID NO: 142654 - DNA, 400 bp, Homo sapiens
ccgagggggagtttccttgttgctatatggttaggggagtacatgtaaatcacctgctgtctggagaatgctgaacagaaaagcatcagtgagcagactgttcaggtttgggtgtttggcagacattctttcaaaaataagcgagtgaacctaccactccggagcaaacaacagaccatatctgttgccagtgataaaatttaagctttcaagtgaaaatcagaattttaggaaacttgtattcaccactgtgagcttgacaacttctaggtacttgagactcttctgatgagattggcagcgaccttaacaaacgtgctgttgtatgataaactgtgtcaatgcttttaaaatctgcataactaggtgagctgtcgttttccaaatgaccagtgcatga

SEQ ID NO: 142655 - DNA, 157 bp, Homo sapiens
gccgacgacagggtggacagggagacagttggggggaggaaaggagccagtgtgcaagatagaggatcggagcaccttgttctgcacaggctcagagaacgattctcaaggggaaggagggaggagtggctcatctgtgccaaatgtgaatgaagtt

SEQ ID NO: 142656 - DNA, 383 bp, Homo sapiens
gaactctttccccagcactccatatactatgaataattcctttcttcttctttggatagcattttagtcatatctctattaccccacttgtcacatgataatcagtggctcacccatccatctcccttgattgctcatgagctccttgagaagagtctgattttcagcaccttgaacagtgtgccacacatacatgcttcatacgcagagaaggaaatgatttcactacagtgtaattattcccagaattcaatatctgtatttctaaattgttctagatactctgccaacaacctgagaatgttatgttttttccccaaaacttccatccattattgtgtgtctatggtcatagttaactcaattgtgacgtcacctttgga

SEQ ID NO: 142657 - DNA, 868 bp, Homo sapiens
aggactgtgggctggaattgggaggccaattctggaactataatatttgattactaaaataaatgaatatgttttgctttttcttttgcttttgaaatgtattcaaaaatagaaaaatgtttatattaattagttctcatgctgctatgaagaactgcccgagattgggtaatttataaaggaaagaagtttaattgactcacagttctgcagggctggggaggcatcaggaaacttacaatcatggcagaagcagaaacaaacacatccttcttcaaatggtggcaggagagagaaataagtgcccagtgaagggggcagccccttataaaaccatcagatctcatgagaactaactcactgtcacaaaaatagcatgagggtaaccaccccgttattcaattacctcccactgggtccctcccatgacacatagggattacgggaaatagaattcaagatgagatttaggtggtgacgcctaaatcaaaacattgataaactatatcaatgtttaatttggttttgactatatttttagagaatataataaagcttctacatatgaaaatttttttttttttgagacggagttttcactcttgtcacccaggctggagtacaatagtgcgatctcggctcaccgcaacccccacctcactggttcaagcaattctcctacctcagcctcccaagtagctggaattacaggcatgtgcctggttaattttgtatttttaatagagacagggtttctccatgttggtcaggctggtctcaaactcctgacctcaggtgatctgcccgccttggcctcccaaagtgctgggattacaggcgtgagccaccacacccggccggaatgttt

SEQ ID NO: 142658 - DNA, 289 bp, Homo sapiens
ggcaataggacgtggagtgctgtggatcaaaggcactggtggtggctcttgtgatggagaggaagttttggcagagagaggttgaaggaggatgacctgaaggattaaaatgggagccagataagtgagatgtgcagggtgaagggaaggaaggggatggttggggagagataaggatcgccaggggtctaaagttctgaccttatcctgaccaacgtcctgtctattgccataaagggagagaacttttccctctagaaggaaaagaacattgtgataatggtaatgg

SEQ ID NO: 142659 - DNA, 187 bp, Homo sapiens
cagcagcttagccacagcatggcacagtcgcctccttcctgctcataaacctcatccttctctctccttgcagctcctagacacccttaacagaggcttctctttgcttctccctccccatgggaaacaagtagatttggacctcagcttgtcctttgggtagaaagagaccacagatttaccctta

SEQ ID NO: 142660 - DNA, 151 bp, Homo sapiens
ggtattctttcctctgcactaattccacctcctggtggtgcatgccttggagtcccagctactcaggaggccacggtggaaggacagcatgagcccaaaagtttgaggctgcagtgagctatgaccatgcatgtgaatagccactgcaatc

SEQ ID NO: 142661 - DNA, 226 bp, Homo sapiens
  misc_feature (38)..(38): n is a, c, g, or t
  misc_feature (49)..(49): n is a, c, g, or t
tggtgccttcatctcgtcccacctccaccaagtaagtnaatcttaactnctccacttcagaatgctgcctttccccttaaacctcttcttcattcttcccaaagattaactcaaaaaatatttattgagggcaccctacattctaagcattatatcagaacattaaggccaggcacactggcttacacctataatctcggcgctttgggaggtgggaggagaggaa

SEQ ID NO: 142662 - DNA, 213 bp, Homo sapiens
ttttccctgcatctatcctttaaggcttcctgagtctctgaggttgcatttataatggattgttctcattggttaatctttctgagggttagttactcttccactcccatggtttcaactccacatatatatacagtgcaagctcccacatgttaaaacaccagtccagatctctatactaagcttctgatatctacgtttaattccctactt

SEQ ID NO: 142663 - DNA, 1113 bp, Homo sapiens
cagaacttggaagacagagaagttttgaatggtgtacagacagaactactaacttcgccaagaactaaggacacattgagtgatatgacaagaacagtggagatttctggggaaggaggcccattgggaatacatgtagtgcccttcttttcatctctgagtggaaggattctaggactcttcatccgaggcattgaagacaacagcaggtccaagcgggagggactatttcacgaaaatgaatgtattgtaaaaatcaacaatgtggatctcgtagacaaaacctttgctcaggctcaagatgtcttccgccaggcaatgaaatctccaagtgtgctcctccacgtgcttcctccacaaaaccgtgaacagtatgaaaagtcagtcattggctctcttaacatttttggtaataatgatggcgttttgaaaaccaaagtgccgcctcctgtccatggaaaatcgggactaaagacagcaaatctcacaggaaccgatagtcctgaaacagatgcatcagcttccctgcaacaaaacaagagtccccgagtaccaaggctgggaggaaaaccatcctctccctcactctcgcctctcatgggatttggcagcaataaaaatgcaaagaaaattaagattgacctaaagaaaggccctgaaggacttggtttcactgtggttaccagagactcttccatacatggtcccggtcccatttttgtaaaaaacattttaccaaagggagcagcaataaaagatggccgcctacaatcaggggacagaattttggaggtaaatgggagagatgtcaccggacgaacccaggaagagcttgtggccatgctcaggagcaccaagcagggggagacagcatcgctggtcattgcccgccaagaaggacattttctgccccgagagttgaaaggagaacctgactgctgtgcactctctctggagacaagcgagcagctcacctttgagatccccctgaatgattcaggttctgctggcctcggggtgagcttaaaagggaacaaatccagagaaactggaacagacttggggatttttatcaaatccatcattcatggaggcgctgcttttaaggtgggt

SEQ ID NO: 142664 - DNA, 538 bp, Homo sapiens
ttaagctgccagggtttgaccttctcacagaatcatttggattattacccaagaccccaattttctagcccagtgtttcaaaaaatgtggtcggtggattacttgagcaccatcccagataaacagaatcataaaatgcataaaattttatgcacgatgatctctgagaacctgtatagacacctgcagaataaactggaggccactgagctttagttgtcttacactttagttggcaaagcttatgataaaaaagtagatcttagtcagtacaccaatatgctttcaaagaatcaaactaataattagtacatagttttaagaataagcagagttatccctctcattatttccatggtactaccaagttaaaacattaaagctactggggaatctaaagtaactacattatgaattcactgcttcatccaagtaagtatccctgatggtttacttagaaaacattttatttttcaccaacatcacagaaggcatgttattgaatcattagttctgatacgtaacacaacttagtctc

SEQ ID NO: 142665 - DNA, 396 bp, Homo sapiens
cgtaacgtcagctctttcacttggcacagatcctggacttgcagaaggcaggagttcgatttctataatggttcttcatcactatctgaaattatcctttttcctattcatttagtgtgcattgcacacccactatatgctagacactgtgtgtgtgcagcaggaatgcagcttacataggagataaaataagacagcaactgaaaaaatgctggtatatgatgtcagcacaggtgttctgaggaagaccgtgcccctgccatcatgcagaggaggagggaaaagaactgggacacataccagtcactagaggccatgagatttttctcttatctgaaagaagaatataaactcaatgtgtcacagactgaggccattctgcagccactaggccat

SEQ ID NO: 142666 - DNA, 372 bp, Homo sapiens
gtcatttaacctgcagatttttaaagtttttttctcccttgttggtgacggctcagtaggagttgagctatatacttaaaattggattttgaatgaaaccttcacatacatcctcctcaacaactcactctcagtttgaaaaagccgtagggggtgacagggcagtggttggactccaaggctatttttaaatgggaatttttgttgttgttttccaagtgtaagaacctttttgttgcctggtatattagggcaacattggaggctgcgaaggttaaggttcaatcattattcattaggttatacaggtatcccacaccaaatctgtttggttcctgggttcaaatagaaagaaccagagagttagtttag

SEQ ID NO: 142667 - DNA, 130 bp, Homo sapiens
cagggtaggtgccagctgaccacagggcgcatcccgattgcatgccctggacaccatcaacctcaagaggcctttgtatgagattctgaagtgattataccataaagatcatatttcaggtccaaaactc

SEQ ID NO: 142668 - DNA, 199 bp, Homo sapiens
cctgtggcttctgcatgcaccttcctcaacccctgaggagggttagatcatcggagcaatattcttgtccaagttccagttttctacagtctggctgtgtagtcatttctgtgtgcttgaaggagcttgtacaagtattgaccacataaggcagcatgttgcaagggtcctacccaacagattaacaggaaagaaatgg

SEQ ID NO: 142669 - DNA, 610 bp, Homo sapiens
gaaaggagacagggaaattagaagtcatttgtaatgaagaggtcatgaatcaaagcaatggctctgatgacacagagaagaaatttgagaaataataaaaagtaaaaccattagatgttagttactgtgagaatgtggggcgtggggtctaaaagtctacattctagctttggtgactgagtggatgtgcaattcccagagataggaaatggttattttcagacatactggatttgaggtgccaccaggagatggcaaatagatcactcagttggagagaaagatctgtaaattatcgataactaagtaatgaaaggaacctggatgagagatcacccagggagagcataaagagtgagaagagatgaaggctgagtctgagattagcaacatttaagtacagtcccattttcctgttaaaaggggtacttttttttacataatcataaactttgttcatgttgggagaaataggaaatgatttagtctttcttcattttgcagatcagaaaactgagggtgtcaaagaggttatgtgactttatttaaagctgttaatctgtagaagtcaatgagaactcaggtttccaaactgaggccaggcagttcc

SEQ ID NO: 142670 - DNA, 339 bp, Homo sapiens
gtgagaaagccagatctaccggtgctcgttatcttcctcctgacttcctcctcctggtatatgctcaggctggagtttaacgagtgagaagagatgaaggctgagtctgagattagcaacatttaagtacagtcccattttcctgttaaaaggggtacttttttttacataatcataaactttgttcatgttgggagaaataggaaatgatttagtctttcttcattttgcagatcagaaaactgagggtgtcaaagaggttatgtgactttatttaaagctgttaatctgtagaagtcaatgagaactcaggtttccaaactgaggccaggcagttcc

SEQ ID NO: 142671 - DNA, 459 bp, Homo sapiens
tagttatgcgcgcacacacacacacacacacatccatccatattcctaattacctaaacatgtcaaaagccatggtttacgcgaatgctttggattcatttgtaacttctttctcctgtggtggggaacccagctcttattatctacagtccttttacttattgttcagttccagtgtacacttattttcagaactgcccatacccgtgtagggaacacacattgactgactagatgagagcatttatgtggttttgtggtttttgcctttggccttacactatccagtcaagacagtggtttccagttacttgtagttcccagtcccttcagtgtggttatcttactatttgtaacatggttagcttcatctgttcgtgttttatttcactttcggcaccctccccatcctagttggttttaatgatttattttgaggggtgtatgaatagtatctga

SEQ ID NO: 142672 - DNA, 348 bp, Homo sapiens
cactctgtcgcccaggctggagcgcagtggcatgatctcggctcactgcaacctctgcctcccaggttcaagcaattcttctgcctcagactactgagtagctgggactacaggtggctgccaccatgccaggctaatttttgtatttttagtagacagggtttcaccatattggccaggctgatctcaaactcctgaccttgtgatccgcccgcttcggcctcccaaagtgctgggattataggcttgagccaccatgcccagcctcatcatgtgtttttataggccaggcttgtggcttctttggcgatccaattctatcaaaagttggaaacatcctgatctatt

SEQ ID NO: 142673 - DNA, 237 bp, Homo sapiens
attaaatacagtcgatggaggtgaggagaggagggagacatcccaggcactggctgctgcacagggaaaagctcgaagtcagctcggtgcatctgttgagagggggattcctgatagaggctgtgaagattaaagaggggaggggcaggatgacaaaggttctcaaaaaacagcgtcccatctggaggcctgtgtcactggagcacttgtattaatagaaacttggccatctctgcc

SEQ ID NO: 142674 - DNA, 354 bp, Homo sapiens
accaaagagagaaacagagggatccaatcacactctccaagccactggcctgggaaggggaaaggacagacaaaggtcatagctgggcttggtcacaggaactgacctggagctgctgactaagggcatcttgaaggatgtaattaccttcctcccttggggccccagaacaaggaagccctacagctgaaaaacagtaattaccaggcagatcgagaagacagcctgggactcgtccctgaggtataaaaggaggactggcggatgtggagccataagacctggggtaaaggagggttctactctcctagctgggagacactgggcagctcatgagcttcctaggacactcag

SEQ ID NO: 142675 - DNA, 425 bp, Homo sapiens
ccacacggtgttctgcaaggaggcgcgtgcatcctgtgcgtgcatcgaacctgctgaatgggaaagtgatcagtgtgaggcggggagtggagggcgggggccgtgagctgagcataggagaggaaaatgaacacgtcgtcccctgcacccttgtcccccacgatgaaggaagaacaaagagccaggcacctgtcagatgaggggaaggacagaatgactcaaggacgggatggacccactccaggctgagccctccctgccctgggcagcccctgcagtcaccttttatcaggatgacacgttcactgccttgtcttggtcaccttttatcaggatcacaccttcactgccttgtcttggttctcatgaattttaggtcttcttggaagccctgcacttcctagccagtgctcagaacacacaag

SEQ ID NO: 142676 - DNA, 334 bp, Homo sapiens
acagggtgcaggaagtataggcgggatgctaacgtggctccagaggagccaatcctgacacgtcacatcctagaggcctgacaacggttacacacacctaccaaggtgcccctcccacaggagctggggcctgccgctctccaaagccctcagccaacaagcccctctcccctcttttcctcctgcctcgtccaccttttctccccacagttctgcaggctcctggtgactggtgcccagggactaatatgaacagacaaacccgctccatgctggcagctaaaccccgtccctcccgtgtgcccaggaccctgatctcagccagtaggagggg

SEQ ID NO: 142677 - DNA, 385 bp, Homo sapiens
gtggagagggagggagattatggtaataatgcaagaccaggctttaggaggagcacgccgggagcaatgtgcaaaatggaattgaggagggagagacagatgcagggtgaatctttacaataccccagctttccaagaaaattgtggttctagttctccaacctcaaagttgaacttctgtagcagcatgggacatggaaggagggtggagatgtgacagggacttaccagacaaaaggggctgcaggacctcaccacactgggctcattcatcttgcaccaatgacttgctcttccaaacaacactgccctttgttaatcttttcttgaaccaggacccacagaaatacactgaccattttctggacctaattccagaatacgc

SEQ ID NO: 142678 - DNA, 166 bp, Homo sapiens
gcagcctctggcctgagcctggccctggcttctgaggagcagcccccagaactcccctccaccccttccccggtgcccagtccagttctgtctccaactcaggaacaggccctggctccagcatccacggcatcaggcgcagcctctgtgggacagacatcagcta

SEQ ID NO: 142679 - DNA, 500 bp, Homo sapiens
tacagattctggaattttccagttttacgtatagataagttttgaaagtatgatttaagaggatatgaaatgtttgtattggctatacttgaatttttttattgcaaaaatgtctgattttctgagactggttttctaactatttataaagaaaattggttgtggtctctttggaaaatgtagaagaaatgtagttgtgtgttctagtgccttggccagataggcttgctagtctttattgaagtttaatgtattctgacatgaatacaataactaataagggctaaagttgtattgttgttgctttttttttcttaacatttgcaatccacattgaacagtgttttataacaaaatcttagcttatgattcagaataaataattcagaacattcagaataaataatttggtggcagcagcaggagttaagttagtgattttttagagttaagttttaggagctacaatttataaattaaaaattttcctattaaagtta

SEQ ID NO: 142680 - DNA, 382 bp, Homo sapiens
catgctctagccacagggacaagctcaagtggggatagatcactgtgtaaagggaaaatctcatgcaatcttttagctcagagccttctgccattctgtttcttctgccctaagcatatttaaagtcgccaacagagacaaatggagatgaagattaagaaaaagggaaaggctgggcactgtggcttacagctgtaagtccagtgctttggggactgaggcgggaggtttgcttgaagccaggagttcatgaacagtctgtgtaacgaagtgagatatcgtctctacgaaagattaaaaaatttgctgggcatggtggctcatgtctgtggtcccagttactcgggaagttaaggcagcaggattgcttagccctagaggt

SEQ ID NO: 142681 - DNA, 702 bp, Homo sapiens
ctgtagtttcgcttttaaaactgttctgtgaaaataccttatgcagtgctttcttaaaagccccatttgtttacttttactaagctgaaagcacactttacgtctgggagcaaccaaataacagatttgctctcctttgaggactcatcattcagttaaacatttttgaataatgacagtgggtcttgggtttcaaagatgagacccaatttctgcacttgaggaaaccacaggtctaatcggagggcaacagtgtcatctggaagtgccggctcagggatgccgtcctgacggaagtcatgaatgctggaagtgggtctcgcagggtgagaggagtcaccaggtaaagatgggttggaaggacctggcaggcagagcagggagcaggaccccagtccagggcagcagggaagcgggagtctgggcagagctgattccaggcagctcagtattgctggcctgtgcatcctgagacttatccgagtcgcaggtgaagctggtgggaatcaggcagagtgcagagctttagctggggcagggttagccaagagcctgtcatggagctgctctctgggcactgggaaacataagtctggaggctttggctgcagctgcagataaagatgcaggggcctctgacgatgggggccttagtcatctcagaggtggtgcagagggtagaagcctgactggggtcagaga

SEQ ID NO: 142682 - DNA, 392 bp, Homo sapiens
tgtattaacacatggaaaacattgtacaactctctgaagttccttaaaaatcaagttttttacaccaaaagggagaagaagtttagtatgctgggctcctaaccgtgattacctttcctgcagatcccttaaaattaaaccagagctactcttgttttcataaaaaatgcttctgcaaactgtggaatacatagccagtcctcactattaacttgttctcctcacctttctgacaggaattcaacagaatttactgagcactccttgcaaaatcagagcagaagcaggaagtactaacagtgctgaaataacactaactaaaatcttgtctgagagaacagactggatatcattataggctgccatgttctggaaggaaagcttctggtttg

SEQ ID NO: 142683 - DNA, 301 bp, Homo sapiens
tgtatgtgtaaatatacttacatatctagtagggacagcttattgagtacttactagatatacttttaagactttatggttgttgctgggcgcggtggctcacgcctgtaatcccagcactttgggaggccgaggcgggcagatcacgaggtcaggagatcgagaccatcctggataacatggtgaaaccccgtctctactaaaaatataaaaaaattagccaggcgtggtagcgggcgcctgtagtcccagctactagggaggctgaggcaggagaatggcgtgaatccaggaagcgcag

SEQ ID NO: 142684 - DNA, 201 bp, Homo sapiens
tgcctatagccccagctactcaggaggctgaagcagtaggatagcttgcacctatgaggttcaagctgagctgtgattgcatcattgcgcaccagcgtgggtgacaggccctgtctcaaaaaaagaaaagagatggccctgcatggtggtacacacctgtaatcccagcactttgggaggccaaggtgggatgatcacttg

SEQ ID NO: 142685 - DNA, 884 bp, Homo sapiens
gcaaaggacttttcttgttcttgttctctggtagagaataactaagactggtgttaatatttttcttaattctttggataattaattagtaaaatctgagcatgaattgtttttatgtacaggtttttaattatgtatttattttctctgatagaggaccattcatatttgctgtttcttcttgtttcactctctgtaatttgataaaatttcaagtttatttacgtaaaattgtttatgatgatattgttttttaaaactctataggatctttagtggtgacccatcttgattcctgttattggtattttgtgatttctcttctttacttatttagtcttttaaggaaccaacttttgccttttaaaatattctgtactgtatgttctttcctatttttatttgcttttatatttataattttctttcttttatttctttagttttaatttactattgttttctaaattctgaaaatctctatttcattcattgatttcaacctttgttctttttttagtaaatgcacttaagactataaatttccctctaagcatggctatactagcatcccacaaatcttagtatatttcattttgttaacattcagtttaaaatattttctcacctctattttgatttttaaaaatcttactagaaacttagaagagaactgcttaatttccaaatacttgaaaaagtttctagatatatttatttagatttctaatttaatttcctacattcagataatatcgataatatactttgtataatcttaattatttaacttttgggggaaaatgctttgtagctcagcatctatcaaatgtgtcatgtatttcatatgtagttgaaaataaagtacatttcagttgttaagt

SEQ ID NO: 142686 - DNA, 408 bp, Homo sapiens
atagccggaggggagcggttacgatcatatatgcatacgtttctgacaggcagaggaaaccatgtccacaaaactgatgttctttggggtttgatgtacagacttgtccaatcatgtgtgtggttcctgcgagtgctgatgactccgcagtgaagctctctgagttctttgatttaaagttgtgatatatggggggaggcagaagacaaacagaaccgtgtgaacctttttatcatgtaatcagagacacctcacactgttttgttgcatctctgtgtgtgagtcagttcccaggcctggccagcttttcgtgccatttggcaacatctctggggactgtttttctttctgtctctgtggaactttctgagacaagaatgtatctatcctgctcggccttctacctgg

SEQ ID NO: 142687 - DNA, 203 bp, Homo sapiens
ctcagacctgggctttttagttacataaaatccaaaccaactgtcagccttcctagatctcattccctgcttaataaatacacaaacccactaattcttatattgatagtaggcataatcactactagagctacatggtggttaactctagaggttaacagaaatggataaattaagtgggacatttccaggaatgctaaact

SEQ ID NO: 142688 - DNA, 587 bp, Homo sapiens
aagtgattctcctgcctcagcctcccaagtagctgggattacaggcacctgccaccacacctggctagttttgtatttttagtagagaaggggtttcaccaagtcggtcaggctggtctcgaactcccaacctcagatgatctgcccccctgggcctcccaaagtgctgggattacgggcatgagccactgtgcccggtgtgataaattgagattatatatttaaaatttctaacatagagtctggcctactagttccttctttatccatttatctccagtatctaggactgtgggctagatggtatgttttaaggatgcaaggatagagcatgatgagaagagggtttatcaagagtcctgggacaggactgagaggaaggctgggatgcagctggggagggatcatgcaggagggctgtgctgggagttgcaccagaggcgttgctgcaggtagcctaagggatggcttattgaggattcagagaggcctcaagccaaaaacccttgtcaagagccaggtttcttagccccagtggactcagtcatccagaacacttgtcatttaacttagagaggttccaagat

SEQ ID NO: 142689 - DNA, 296 bp, Homo sapiens
agagcttcactggagccttcctcttcagcatgaccgtccctggccacctgatccagagctggcggctcccaggcatagcccatccctgctgcggctctgcactgccccagtcctcacctgcatgcaggggactattcacatgctgaccgtctgtccatctcccgtaagaacgtcggctccttccacgtctgctgggcgtggaggatccctcacagcctccccgacctcagagccatgagagacttgcaaagcttgaaacaaactctgaaaggactcttcacagataaattcctcca

SEQ ID NO: 142690 - DNA, 203 bp, Homo sapiens
acactgttctcaaggctaatagacgtactgttaattttagctcatgtgtttaaatggattgtctatcaggggaaaaaagtcaaatatgaaattgttctaatgataatttgctgtaattctaaagccaatatgtgaaagagctgtgtaataatatatttaaatactaaaaaatcttttggacattaaccttagatgctgatgtc

SEQ ID NO: 142691 - DNA, 324 bp, Homo sapiens
acctcaggcctcttccccaaaccagcttccagaacgcaaaacaatcggcctgggactaggagatccctctgcgagggaaagtgatccaagagaaaagacctgcaagcactcaatcaccctgtgtaaggcttacacttaacaactcccatggacaaagagtttttactcagctttttattgattcggtctttaatctgaacagatggccaaagtttactaaacaactgaggaaaatctctaacatgaaataaagaggccaagataacaaaacaggagacaccaaattaacagacaaaatagaaagaaagaaagaaaaaagagaag

SEQ ID NO: 142692 - DNA, 424 bp, Homo sapiens
ggtatgggagtgggggaggaggcagattatggcaaaacagaaagggaggccactaaagtttatcacaaggcagataatctgccacaaatgaagctactactctgttccctcacgggaagagaggtctaaaccctggggtggatagcaggttggccagggatctgatgcctccccacccgaggcctgggaaacctgagggtaggcagatgtcctgaagatccaggaataccccaggacctttgaaccccatgtatggagggtctccatcccacaggacaagtccaccaccaggcggcccactagaaggcggcaggggagcaaagggaggccatgggcagcaaggagacagaggctgaagagaccccccagatttggcgagaggagccagtaaagctaggtgaaggggaaggaggccagcagcctg

SEQ ID NO: 142693 - DNA, 295 bp, Homo sapiens
ctggtgactcccagaagaagacagaaggttaagctcacagtttggacccactttttgtgctaggaggtgtgggattctggttgtgcatgtgtgtgtggactgtgaccagtgtgcaccctggaccagggagctggatgcttcaggcttcaccctgactctgcctgccttgctcttggcccttggagagcacttggatcttggttttctcactggagtgagttgtaggcagctagagctgttttggactgctgaatggaggggctgtactggctttcctggcacttaggcgatccta

SEQ ID NO: 142694 - DNA, 227 bp, Homo sapiens
tggaaaaacttttaaaatgtagagagctgaaacccatccctgcagattctgatttgaagggccaacagatagggatctgtacttcaaaaggctttacaagtgactctgatgtatgtccccagtaaaaaatgactgctcaggctgggcccagtaactcacacctataattccacagcactttcccagaggccgaagcaggcagattgcttgagctcaggagttcgaga

SEQ ID NO: 142695 - DNA, 2810 bp, Homo sapiens
ttgcaggcgggcggaccctcggccgcgctcggggctccggcgccgccgctcctcctgctcggcctgagctgcccgggctcggcgcgcgcttggggcgaggctcggcgggcgcggacgcgcagcatggcggtggaggacgaggggctccgggtcttccagagcgtgaagatcaagatcggtgaagccaaaaaccttccctcttacccggggccgagcaagatgagggattgctactgcacggtgaacctggaccaggaggaggttttcaggaccaaaattgtggaaaagtcactctgcccgttttacggagaagacttttactgtgaaattcctcggagctttcgtcacctgtccttctacattttcgatagagacgttttccggagggattccatcatagggaaggtggccatccagaaggaggacttgcagaagtaccacaacagggacacctggttccagctgcagcacgtggacgctgactcggaagtgcagggcaaagtgcacctggagctgcggctgagcgaggtcatcacagacactggggtcgtctgccacaagctcgccacacgcatcgtcgagtgccagggcctccccatcgtgaatgggcaatgtgacccctacgccaccgtgacgctggcaggacccttcagatcagaagcaaagaagacgaaagtgaagaggaagaccaacaatccccagttcgatgaagtgttttattttgaggtgacccggccctgtagctacagcaagaagtcccactttgactttgaggaggaagacgtggacaagctcgaaatcagagttgacctctggaatgccagtaacctgaagtttggagatgaattcctgggagaactaaggatcccgttgaaagtcctgcggcagtccagctcctacgaggcgtggtacttcctccagccccgggacaatggtagcaagagcctaaagccagacgacctgggctccctgcggctgaacgtggtatacacggaagaccacgtgttttcttctgactattacagccctctgcgggacctgctgttgaagtctgcggatgtggagcccgtgtcagcgtctgcggcccacatcctgggcgaggtttgccgggagaagcaggaggcggccgtcccgctggtgcggctcttcctacactatggcagggtggtgccattcatcagtgccatcgccagcgcggaggtgaagcggacccaggaccccaacaccatcttccgaggaaactcactggcgtccaagtgcatcgacgagaccatgaagctggcggggatgcattacctgcatgtcaccctgaagcccgccatcgaggagatatgccagagccacaaaccctgtgaaatcgaccctgtgaagttgaaagacggagaaaaccttgaaaacaacatggagaacctacggcagtatgtggaccgcgtcttccacgccatcaccgagtctggggtgagctgcccgaccgtcatgtgtgacatcttcttctccctccgggaggcggcggccaagcgcttccaggatgacccggacgtcaggtacactgcagtgagcagcttcatcttcctgaggttctttgcgcccgccattctctcccccaacctcttccagctcacgccgcaccacacggacccccagacgtccaggacgctgacattgatctccaagaccgttcagaccctcggcagcctgtccaagtccaaatctgcgagttttaaggagtcctacatggctacattttatgaattcttcaatgagcagaaatatgctgatgcggtgaagaacttcttggatctgatttcgtcctcggggagaagagaccccaagagtgttgagcagcccatcgtgcttaaagaagggttcatgatcaagagggcccaaggacggaagcgctttgggatgaagaattttaagaagagatggtttcgcttgaccaaccatgaatttacctaccacaaaagcaaaggggaccagcctctctacagcattcccatcgagaacatcctggcagtggagaagctggaggaggagtctttcaaaatgaaaaacatgttccaggtcatccagccagagcgtgcgctgtacatccaggccaacaactgcgtggaggccaaggactggatcgacattctcaccaaagtgagccagtgcaaccagaagcgcctcaccgtctaccacccgtccgcctacctgagcggccactggctgtgctgtagggcgccatccgactcggctccgggctgctcgccctgcactggcggcctcccagccaacatccagctggacattgatggggaccgtgagacggagcgtatctactccctcttcaacttgtacatgagcaagctggagaagatgcaggaggcctgtgggagcaaatctgtgtatgacggcccggagcaggaggagtattcgacgttcgtcattgacgacccccaggagacctacaagacgctaaagcaagtcatcgctggggttggggctttggagcaggagcacgcccagtataagagggacaagttcaagaagacgaaatatggaagccaggagcaccccatcggagacaagagcttccagaactacatccggcagcagtccgagacctccactcattccatttaaagtctgcgggacgcgcccagttggtgccagcaagcttgcccatgcaaaagccgcagcctttgggagggacgaagagaaggaagagcgcagagccggcaaagtgagatgcaccgccgttccgtgccatagacaagtggcgcctggggtattccctctccagaaccgttgcatcactgcacgcc

SEQ ID NO: 142696 - DNA, 872 bp, Homo sapiens
agtctccgtttgggaagacgagagtgttccagagaggacggtggtgatggttgcacaactcggtgaacgtggttaatgccacagaactgtgcacgcgagcaggtcagagatggaaaattgtatgttaaaaattaaaataaagggactaatgcaggtaaacaagacacagcaatcctgagtcccaggctggcaggtccctgcttgcgggacttgcattagagggtggcgtgcatgtccctcgcctttcggcagtacacatggggtgcacgtccacattttgacttgtggtggcaaaaaaaccaaggctttatagagagctagtgaatgcacacaagcaaaggctggaaacgtgtctgcgatgtagcagggaacaaacatttctacgctgctgatgatgtatgtcgcttttactttttaggtgaagccaaaaaccttccctcttacccggggccgagcaagatgagggattgctactgcacggtgaacctggaccaggaggaggttttcaggaccaaaattgtggaaaagtcactctggtaatgtcttctgttgctttacttggcactgatgtgttttctttggtgtagagaatgtccccagggtgtacgtcaccttcccattttcccatgtgtggagaacgtcccgagcgtgtacgtcaccatcccgttttcccgcatgtagggaatttttctgtgcgtagacaatgtcccgagcgtgtacgtcaccgtcccgttttcccgcgtgtagggaatttttctgtgcgtagacaatgtcccgagcgtgtacgtcaccgtcccgttttcctgcgtgtagggaatttttctgtgtgtagacagtgtcccaagcatgtacatcaccgtcccattttccca

SEQ ID NO: 142697 - DNA, 2599 bp, Homo sapiens
ttgcaggcgggcggaccctcggccgcgctcggggctccggcgccgccgctcctcctgctcggcctgagctgcccgggctcggcgcgcgcttggggcgaggctcggcgggcgcggacgcgcagcatggcggtggaggacgaggggctccgggtcttccagagcgtgaagatcaagatcggtgaagccaaaaaccttccctcttacccggggccgagcaagatgagggattgctactgcacggtgaacctggaccaggaggaggttttcaggaccaaaattgtggaaaagtcactctgcccgttttacggagaagacttttactgtgaaattcctcggagctttcgtcacctgtccttctacattttcgatagagacgttttccggagggattccatcatagggaaggtggccatccagaaggaggacttgcagaagtaccacaacagggacacctggttccagctgcagcacgtggacgctgactcggaagtgcagggcaaagtgcacctggagctgcggctgagcgaggtcatcacagacactggggtcgtctgccacaagctcgccacacgcatcgtcgagtgccagggcctccccatcgtgaatgggcaatgtgacccctacgccaccgtgacgctggcaggacccttcagatcagaagcaaagaagacgaaagtgaagaggaagaccaacaatccccagttcgatgaagtgttttattttgaggtgacccggccctgtagctacagcaagaagtcccactttgactttgaggaggaagacgtggacaagctcgaaatcagagttgacctctggaatgccagtaacctgaagtttggagatgaattcctgggagaactaaggatcccgttgaaagtcctgcggcagtccagctcctacgaggcgtggtacttcctccagccccgggacaatggtagcaagagcctaaagccagacgacctgggctccctgcggctgaacgtggtatacacggaagaccacgtgttttcttctgactattacagccctctgcgggacctgctgttgaagtctgcggatgtggagcccgtgtcagcgtctgcggcccacatcctgggcgaggtttgccgggagaagcaggaggcggccgtcccgctggtgcggctcttcctacactatggcagggtggtgccattcatcagtgccatcgccagcgcggaggtgaagcggacccaggaccccaacaccatcttccgaggaaactcactggcgtccaagtgcatcgacgagaccatgaagctggcggggatgcattacctgcatgtcaccctgaagcccgccatcgaggagatatgccagagccacaaaccctgtgaaatcgaccctgtgaagttgaaagacggagaaaaccttgaaaacaacatggagaacctacggcagtatgtggaccgcgtcttccacgccatcaccgagtctggggtgagctgcccgaccgtcatgtgtgacatcttcttctccctccgggaggcggcggccaagcgcttccaggatgacccggacgtcaggtacactgcagtgagcagcttcatcttcctgaggttctttgcgcccgccattctctcccccaacctcttccagctcacgccgcaccacacggacccccagacgtccaggacgctgacattgatctccaagaccgttcagaccctcggcagcctgtccaagtccaaatctgcgagttttaaggagtcctacatggctacattttatgaattcttcaatgagcagaaatatgctgatgcggtgaagaacttcttggatctgatttcgtcctcggggagaagagaccccaagagtgttgagcagcccatcgtgcttaaagaagggttcatgatcaagagggcccaaggacggaagcgctttgggatgaagaattttaagaagagatggtttcgcttgaccaaccatgaatttacctaccacaaaagcaaaggggaccagcctctctacagcattcccatcgagaacatcctggcagtggagaagctggaggaggagtctttcaaaatgaaaaacgtgagtgtggggcccccaagcctctctttcgggttgaggcctggccaggttttctctgctctcttcccgtacctggccctgggctcacccttccccacccactgcactccaggcttctcagagtcttcgtgttactcgggttgttcaccaggtgctggtgagtttgtgtcggaatctcgcatcaaagcagccacactctctgtgcccggggtcaccggggtggggtggaacctgccggaaggtggggcctgagctgcttcaggtggcgtcccccgcagggtccccaatgtcaaggggccctctgtcaaagacatcccagaagcaggcttgggaccgtctggaattccttttggaagcttttttattttgatataattttgaatttatagaagttgcacgagtagaacaagtactttccacacacccttgacccagacccgtgtgtggcctcgttccccggtcacgcttgacccgggcccacgtgtggcctcgttccccggtcacgcttgacccggacccacatgtcgcctcgttccccagtcac

SEQ ID NO: 142698 - DNA, 1170 bp, Homo sapiens
ggtgccatcaccatactggtgactcaaagcagtcagcgctcaacttttcaaaggagaggcattgccttccaattttaatctcatcactcggagtaaaatgataagatattgaaaatccactgcctgcctcaggtctcagaacgcagaaagtggggggtgtggtttttcacctgtgcagggaggcagctgaggcccggaccccggccctgtgtgctcttcacacaggttcatgatcaagagggcccaaggacggaagcgctttgggatgaagaattttaagaagagatggtttcgcttgaccaaccatgaatttacctaccacaaaagcaaaggggaccagcctctctacagcattcccatcgagaacatcctggcagtggagaagctggaggaggagtctttcaaaatgaaaaacatgttccaggtcatccagccagagcgtgcgctgtacatccaggccaacaactgcgtggaggccaaggactggatcgacattctcaccaaagtgagccagtgcaaccagaagcgcctcaccgtctaccacccgtccgcctacctgagcggccactggctgtgctgtagggcgccatccgactcggctccgggctgctcgccctgcactggcggcctcccagccaacatccagctggacattgatggggaccgtgagacggagcgtatctactccctcttcaacttgtacatgagcaagctggagaagatgcaggaggcctgtgggagcaaatctgtgtatgacggcccggagcaggaggagtattcgacgttcgtcattgacgacccccaggagacctacaagacgctaaagcaagtcatcgctggggttggggctttggagcaggagcacgcccagtataagagggacaagttcaagaagacgaaatatggaagccaggagcaccccatcggagacaagagcttccagaactacatccggcagcagtccgagacctccactcattccatttaaagtctgcgggacgcgcccagttggtgccagcaagcttgcccatgcaaaagccgcagcctttgggagggacgaagagaaggaagagcgcagagccggcaaagtgagatgcaccgccgttccgtgccatagacaagtggcgcctggggtattccctctccagaaccgttgcatcactgcacgcc

SEQ ID NO: 142699 - DNA, 462 bp, Homo sapiens
cggacgccctgttctagaaacatctggctgcacctgcagccactgtagctgacaggagggtttgcttctctgctggcccttggatgctgccagggtctggtgcccaactctctgcacaggcagaggccgcagaggggagagggcgggagggcgaaggccagccaggctcctcctgagctggtggccacgcaggtagccgaacggttccctctggcagtgttgacacaggacggttccatggccagggcctccaagcacctggcctggttgtgctccttgtaaaatgtcaggaagccgactgatgggcgtgcactgacctcacagcccacaggcaggtgctcggggccaggctctgctccgtctgcacttccgcgtccccaggagacaaacgctgtccccatcgccatttcccagggaccccaacaccatcttccgaggaaactcactggcgtccaagtgcat

SEQ ID NO: 142700 - DNA, 272 bp, Homo sapiens
gcgagttttaaggagtcctacatggctacattttatgaattcttcaatgagcagaaatatgctgatgcggtgaagaacgtaagtatcgactcaccctccgaccgcccgtgtgccgtgctcaggagacggagttctcttttaaaattgagatagaacccacatgacacagacttggccattagcgattttaaacaataaaggcgttcggtgcattcacagcgctgtccagacagccttgtcccaagtcctgggacacctcctcccacagttgg

SEQ ID NO: 142701 - DNA, 3050 bp, Homo sapiens
agtctccgtttgggaagacgagagtgttccagagaggacggtggtgatggttgcacaactcggtgaacgtggttaatgccacagaactgtgcacgcgagcaggtcagagatggaaaattgtatgttaaaaattaaaataaagggactaatgcaggtaaacaagacacagcaatcctgagtcccaggctggcaggtccctgcttgcgggacttgcattagagggtggcgtgcatgtccctcgcctttcggcagtacacatggggtgcacgtccacattttgacttgtggtggcaaaaaaaccaaggctttatagagagctagtgaatgcacacaagcaaaggctggaaacgtgtctgcgatgtagcagggaacaaacatttctacgctgctgatgatgtatgtcgcttttactttttaggtgaagccaaaaaccttccctcttacccggggccgagcaagatgagggattgctactgcacggtgaacctggaccaggaggaggttttcaggaccaaaattgtggaaaagtcactctgcccgttttacggagaagacttttactgtgaaattcctcggagctttcgtcacctgtccttctacattttcgatagagacgttttccggagggattccatcatagggaaggtggccatccagaaggaggacttgcagaagtaccacaacagggacacctggttccagctgcagcacgtggacgctgactcggaagtgcagggcaaagtgcacctggagctgcggctgagcgaggtcatcacagacactggggtcgtctgccacaagctcgccacacgcatcgtcgagtgccagggcctccccatcgtgaatgggcaatgtgacccctacgccaccgtgacgctggcaggacccttcagatcagaagcaaagaagacgaaagtgaagaggaagaccaacaatccccagttcgatgaagtgttttattttgaggtgacccggccctgtagctacagcaagaagtcccactttgactttgaggaggaagacgtggacaagctcgaaatcagagttgacctctggaatgccagtaacctgaagtttggagatgaattcctgggagaactaaggatcccgttgaaagtcctgcggcagtccagctcctacgaggcgtggtacttcctccagccccgggacaatggtagcaagagcctaaagccagacgacctgggctccctgcggctgaacgtggtatacacggaagaccacgtgttttcttctgactattacagccctctgcgggacctgctgttgaagtctgcggatgtggagcccgtgtcagcgtctgcggcccacatcctgggcgaggtttgccgggagaagcaggaggcggccgtcccgctggtgcggctcttcctacactatggcagggtggtgccattcatcagtgccatcgccagcgcggaggtgaagcggacccaggaccccaacaccatcttccgaggaaactcactggcgtccaagtgcatcgacgagaccatgaagctggcggggatgcattacctgcatgtcaccctgaagcccgccatcgaggagatatgccagagccacaaaccctgtgaaatcgaccctgtgaagttgaaagacggagaaaaccttgaaaacaacatggagaacctacggcagtatgtggaccgcgtcttccacgccatcaccgagtctggggtgagctgcccgaccgtcatgtgtgacatcttcttctccctccgggaggcggcggccaagcgcttccaggatgacccggacgtcaggtacactgcagtgagcagcttcatcttcctgaggttctttgcgcccgccattctctcccccaacctcttccagctcacgccgcaccacacggacccccagacgtccaggacgctgacattgatctccaagaccgttcagaccctcggcagcctgtccaagtccaaatctgcgagttttaaggagtcctacatggctacattttatgaattcttcaatgagcagaaatatgctgatgcggtgaagaacttcttggatctgatttcgtcctcggggagaagagaccccaagagtgttgagcagcccatcgtgcttaaagaagggttcatgatcaagagggcccaaggacggaagcgctttgggatgaagaattttaagaagagatggtttcgcttgaccaaccatgaatttacctaccacaaaagcaaaggggaccagcctctctacagcattcccatcgagaacatcctggcagtggagaagctggaggaggagtctttcaaaatgaaaaacatgttccaggtcatccagccagagcgtgcgctgtacatccaggccaacaactgcgtggaggccaaggactggatcgacattctcaccaaagtgagccagtgcaaccagaagcgcctcaccgtctaccacccgtccgcctacctgagcggccactggctgtgctgtagggcgccatccgactcggctccgggctgctcgccctgcactggcggcctcccagccaacatccagctggacattgatggggaccgtgagacggagcgtatctactccctcttcaacttgtacatgagcaagctggagaagatgcaggaggcctgtgggagcaaatctgtgtatgacggcccggagcaggaggagtattcgacgttcgtcattgacgacccccaggagacctacaagacgctaaagcaagtcatcgctggggttggggctttggagcaggagcacgcccagtataagagggacaagttcaagaagacgaaatatggaagccaggagcaccccatcggagacaagagcttccagaactacatccggcagcagtccgagacctccactcattccatttaaagtctgcgggacgcgcccagttggtgccagcaagcttgcccatgcaaaagccgcagcctttgggagggacgaagagaaggaagagcgcagagccggcaaagtgagatgcaccgccgttccgtgccatagacaagtggcgcctggggtattccctctccagaaccgttgcatcactgcacgcc

SEQ ID NO: 142702 - DNA, 1862 bp, Homo sapiens
  misc_feature (1341)..(1341): n is a, c, g, or t
ttgcaggcgggcggaccctcggccgcgctcggggctccggcgccgccgctcctcctgctcggcctgagctgcccgggctcggcgcgcgcttggggcgaggctcggcgggcgcggacgcgcagcatggcggtggaggacgaggggctccgggtcttccagagcgtgaagatcaagatcggtgaagccaaaaaccttccctcttacccggggccgagcaagatgagggattgctactgcacggtgaacctggaccaggaggaggttttcaggaccaaaattgtggaaaagtcactctgcccgttttacggagaagacttttactgtgaaattcctcggagctttcgtcacctgtccttctacattttcgatagagacgttttccggagggattccatcatagggaaggtggccatccagaaggaggacttgcagaagtaccacaacagggacacctggttccagctgcagcacgtggacgctgactcggaagtgcagggcaaagtgcacctggagctgcggctgagcgaggtcatcacagacactggggtcgtctgccacaagctcgccacacgcatcgtcgagtgccagggcctccccatcgtgaatgggcaatgtgacccctacgccaccgtgacgctggcaggacccttcagatcagaagcaaagaagacgaaagtgaagaggaagaccaacaatccccagttcgatgaagtgttttattttgaggtgacccggccctgtagctacagcaagaagtcccactttgactttgaggaggaagacgtggacaagctcgaaatcagagttgacctctggaatgccagtaacctgaagtttggagatgaattcctgggagaactaaggatcccgttgaaagtcctgcggcagtccagctcctacgaggcgtggtacttcctccagccccgggacaatggtagcaagagcctaaagccagacgacctgggctccctgcggctgaacgtggtatacacggaagaccacgtgttttcttctgactattacagccctctgcgggacctgctgttgaagtctgcggatgtggagcccgtgtcagcgtctgcggcccacatcctgggcgaggtttgccgggagaagcaggaggcggccgtcccgctggtgcggctcttcctacactatggcagggtggtgccattcatcagtgccatcgccagcgcggaggtgaagcggacccaggaccccaacaccatcttccgaggaaactcactggcgtccaagtgcatcgacgagaccatgaagctggcggggatgcattacctgcatgtcaccctgaagcccgccatcgaggagaaactctgagtntgaggtacaggggcttcggggtgcagacgtccctccagggcccatggtcagtattgcacctgtgttatgaacccccagatgctgtgcagggcaggggcgggggctgctgttttattggggaggggagcatcctaaaaatggggtccaggcagacccctccagacctcacactgccgaggaggcctttcccaaagggcgtcctcccgggatgcagacggcaggtgtgtgggaagcgccgtttaaatacacagcacgacgtatccttgtaccgacttctcccggttcttgtttgaaaatactgtagttcaggctcttgatctagatggcagataggaactttcttgtcacaaaaatactggaggaaaatgttgtaaaaatagacttttggacacacagctgttggggctgcactgagctgcaatttttaacatggatttataacttaatgtttctgtttataaaatactaatgatttgcaatgtattttactggccaattaaaacagatgttttattctttct

SEQ ID NO: 142703 - DNA, 405 bp, Homo sapiens
cgaggacggccaggtgcctggtggactcttgcacgtgctcagccacgagacctcatgtgcgctgtcctgagcccacctgtgtcctcagatgttccaggtcatccagccagagcgtgcgctgtacatccaggccaacaactgcgtggaggccaaggactggatcgacattctcaccaaagtgagccagtgcaaccagaagcgcctcaccgtctaccacccgtccgcctacctgagcggccactggctgtgctgtagggcgccatccgactcggctccgggctgctcgccctgcactgggtaggtctgtgcctcggtgcccagctcgtgcactgtgcaggaaatgtggccaaggggctgagtagggagggaccagcagacagtgcatgcctgcctgtaagctgcaca

SEQ ID NO: 142704 - DNA, 421 bp, Homo sapiens
gagcctagagactaggggatgatggggcttgttttatagagagtagccataggagacctggtaagataaccaagcagatacctgagggaagtgagagagctggctggcagccatctgggagctcttggctgaggggcaacagtgtatgtgtgaggaccctgaggtgggagcctgcctcactcatccagtagaagttagccaggccgggtgtcgtggcttatgcctgtaatcccagcactttgggaggccaaggtgggtggatcacctgaggtcaagagttcgagaccagcctagccaacatggtgaaaccccgtctttactaaaaatacaaaaaaattagctgggtgtggtggtgcacacctagtggtcagctactggggaggctgaggcaggagaatcgcttgaacccaggaggcagaga

SEQ ID NO: 142705 - DNA, 366 bp, Homo sapiens
aggtttcctgccgagcttgcacttctatttgcaaggtgtttaatggtttggtctgaaaacactctggaggaaaacactgtcctcctcaagacttatccagcccctcacacagctctgggccagccaagagggcccagcccagtctgtgacaggagataggtgccccagccaaagccctgcatcctgacaatgactatgcaaaagggaatggctggcttcaaacacactctcgccgttcatctccaagacagaaatgtgcacaagcttagtctagtcccctcagcttttagcatctgagaaagcatccattcctaaccttagaactagacaggacctgtgaagctatcctgcaaacctctgcatcct

SEQ ID NO: 142706 - DNA, 159 bp, Homo sapiens
ttccatttgtggcacatgaacatgtgaactgtatcgagtcagtgtggattaagtggttgtgaggaaatgagtcccatctgttaaagcagaatatctgagaagtcattcatcacacttgttctgcattcagttgatgtggacataatggaactaaattat

SEQ ID NO: 142707 - DNA, 511 bp, Homo sapiens
ggacctctggatgcaagtgtcctctggatgcaagctgacacacactcccatgcactctcacatacacttacccctcccaatgcatacaaaaactcacatatgcactcacactcctcaacactagtaatgaccgattactcacccactcacacctttacccacacactttctcactttacactcacacctatactgttataacctcccattcactgacacaagcaaaatgctcacattcactcacacgcattcacaataacatcactcgtgctcacactgacacaaggcactcatacacatttacacaaatgctcacactcaatcgcacacttacacttgtgcctgccacccactcatacttcctcacactcaccaaccctcactgacttacacttacactgggtgtctcattcgcacacccagtaatcccctcacactcacactcatgcctccctcgtgctcaccctcacacacacacattggctcaatgcaccgacgctttcactcccac

SEQ ID NO: 142708 - DNA, 325 bp, Homo sapiens
gaacgagcccattaagtaactgtcacaaatgtaaaatgagaacagttatgatgatttaaggcatgtcaaagacttggccaagtataaaaacatatcttatttaccataacaaaaattcgtaaaattaaaaagaataataggaaattctcaactccagattgctgctggggaaattagctttaaaagtactaagtttgggccgggcacggtggctcacggctgtaatcccagcactttgagaggccgaggcaggtggatcatgaggtcaggagttcaagaccagcctggccaatatggtgaaaccccatctctactaaaaaaaaaa

SEQ ID NO: 142709 - DNA, 386 bp, Homo sapiens
tgcaggctcatccatatattatctcaggtaatcctcacagaaatctagttaagtggctatgcttattaccccattgtagagatgaggaattggaggctttgagaggttaaataacttgcccagaatcacagagcacatgggaagcagagccaggattcagggtaggtttgactctagaacttccatcctgaccacgattcccacggttttctgagtgatggcctattgacatggccctttagcccaacacagggtctcccacagggcttggtgggtacctgaatgaatgaatgactacaagaatgaatgaaccaatgacaaagtgaatgagatttctgaagactggattttcaaaaaaacatactttatctcagtaagaaaagcaa

SEQ ID NO: 142710 - DNA, 274 bp, Homo sapiens
tgttgggattacaggcgtgagccactgcatccagcctcatccccaagataatttaaaaaaaaaaaaaaaagtcctcctttccttagaattccaaaagttttcactgagtttttccagcacatttacagttttgtgttttgctttgaaatcagttccagctggaccttgcaagagtgtgtgtcagagaggaaggaggtgatctgaatgtttttaaacaaaggacaaagcagttgtctccacatgtcaacactgactaatccgtcttgtggctttg

SEQ ID NO: 142711 - DNA, 905 bp, Homo sapiens
gtgggtttgagagtagaataaagacattcggacttgcaaggtctttagaatgtattctttctcgggaagctactagaggatgtgccgtgttgagaaaagggtgttaagcaagagagatgcatgggatctgagaaatggacttttcataggagagaaactaagggaaggcagacgatgatgatggtgaaggagcagcagttcttcaggacatcccgaaagccatgaggggtgtctccaggagaaggtggaaatgcttgccgacttgacatgttggatactgtggaaattggtatttagagacagccaggttagcatacttttggctgcaagttgcaaaagatccaactcaaaactgacctaaaatgaaaaactggggtttattctctcacataaccagaagtccacggctagcgcagctccaggagttaacttattcaacagctcaacatcatcaaagttccagactcttttcacaaacctttgctcagccatcctcggcatatttgctatttcctgtcaggcttctagcttgcaggctgggcctagtcctgcacataccaaagctgacgggcaggaaggggactctctacaacccaagagacctaagaaaccctcccaggaataccatctctcttccaactttcactggtcaggctccttcctaaatccgtcactgatttaagaaatgggcctccggactcggtcataccagtgctcttctgcataggacacacaagcgaatcaggtgtacagccgggtggggtaatgaatgaggttgtcaaaatcccaacacattcacaaccaactagagaaacactgaattatatcagttaggatatttaagccacgtggaaaggagcagacaccagaataacacagaagccttggtgggctaaaaaaaaaaa

SEQ ID NO: 142712 - DNA, 269 bp, Homo sapiens
ttctgggattacaggggtgagccactgtgccaggctcaattttggtttttaatgataatagctaattctgatgagaatccttgaagcaaaactctcacaccttgctagtgttccagcatgtataatcccctgttatagcctgaatgtgtcccccagaatatgtgtgttggatacttaatccccagtgtaacagtgttgggagatggtgtctaatgggaggtgtttagataatgagagctctaccctcaaaaatggattaacactgcaat

SEQ ID NO: 142713 - DNA, 152 bp, Homo sapiens
agcaacactttccaactcatacacgtttaacaacatggagttgaatatttgattcctcctctccatgaactgccatatttctcacatctgtgtatttctattttcatagctgtcatatcttatcacttcacatgggatatttattttcttgg

SEQ ID NO: 142714 - DNA, 261 bp, Homo sapiens
tgagattcagaagtataggggtgttggccgtgggggagtcatccaacaggccccaggcagggtaagccccaccgaagcctccaggcctgacagcctactggtctcctggtggccacaacgtcactggaagccccctttctaaagcacagctccaatcatgtcagaaacatccagggcttacgaggaaactgctccactccctggcctggcactcaaggcctggagatccggcccccacttgcctttccagtcttagaattc

SEQ ID NO: 142715 - DNA, 193 bp, Homo sapiens
ttgctacgttggccaggctggtcttgaactcctggcctggagagaacagtcaaattgttatttcagcctcccaaagtgctgtgattacaggggtgaggtaccatgccctgctgaaatcaatattaggaaaacatcctggtcaaggttatgcaactcatgtgatcttggagaagtatattcaccttttgtttag

SEQ ID NO: 142716 - DNA, 530 bp, Homo sapiens
tactgacgccaattcggccaatgggagccctttcaagcaggcttctgtgcccttttgatgtgtctccaccacttttgagcatgtctttgtttctggtgtaacaagatgttctccattcatactttcatgcatttcatcatttctcaaaagagctttatttccttttagtaggaatagatctagaaatcaagatttgggtgctaatatgttcactgctactgatctccaggtacttctgattctatctttgacgtacctctttcattctctttgttgcattgtcactatctctgacttggcttgtagttttactgtctgcttcctggactgctgtagtaacccgccattagtcctcttgcttccatgatttcctctttcatttcatccttcacacagccattggaattttctccccaagccacatttaagatcgtcttggctgggcgtggtggctcatgcctataatcccagcactttgggagtctgtggtgggaggattgcttgagcccaggaattcaagatgagcctgg

SEQ ID NO: 142717 - DNA, 134 bp, Homo sapiens
cctgatttctttcaccacacacgacctcttgtaccatgggaacaattcagaacttggagaggggaaacttagttttaaatctcagctctactacttactagggtttaaattagtataactgaatctaaattagg

SEQ ID NO: 142718 - DNA, 397 bp, Homo sapiens
gatttcattcaaatgtgaatttcattagctgaaaaatcccaagataaacagttgtttaaaagataaaatcccatttttcatgtttttcaaaaagaattaaattcacatcatgttgcttgaagtcccagaccacctctaaaaaaaagtaccatgaactccacaatttttcaattactttggtccagaccagcagtgataaaaatgctcactttctaaaaagtgtatttatgtatcactgtgcatacacacatggatttatttggttttattctttggatttatttgaatgaaatcaatttgcaaagttaaattagggatttaagcatttggaggtggactaggagaccctgaatgagctcagtattctctctgagtctctgttccctccacttgaaga

SEQ ID NO: 142719 - DNA, 421 bp, Homo sapiens
cgataattattttctattcagtgccctcatacttctgattctgtacattgctgtacttctttaaaacctctcagagtttaaatttgtttgcaatactatcctttagtttggaagcaatgttttgttactgtcaagataatcttaaactattaaaagcctttaaatccagctgattctcagaaattcttccacctataaaacatgagaattataaccaaattaacaaatcagatatcagaatgccaaaaattaagtcattaaaagagaatccagtgaaagagccagttgtgaaagaacaggaagtgatgtacactgccattttgtagatgaactatttagaaacataagaagtgccatactaatctagaatcaactcagactaacagctctcagcattttctttctgacagtggcatcagag

SEQ ID NO: 142720 - DNA, 537 bp, Homo sapiens
ccgtggactgctgtggggacaaacagaatcagagccgaagggcggccaggaagctctgcgtccctaagagccaccacactgggcgagaggccctgcccatgttcttttgtttgtttgtttttgtttgttttgttttgttttttgagacgaagtctcactcttgtgccccaggctggagtgcgatggcacgatctcggctcactgcaacctccacctcccaggttcagcctcctgagtagctgggattacaggtgcctgccaccacacccagctaatttttgtatttttttagtagagatggggtttcaccatgttggccaggctgctctacaaacttctgacctcaggtgatccacccgccctggcctcccaaagtgctgggattacaggcgtgagccaccaagcctggccatgcacttttcttcttgatcatcaagcctctttctacccccagcctgggtgcttgatgtattctttaatcttacaaaactcactgcattacacctttactctaaaaccttcctagtctatcattcc

SEQ ID NO: 142721 - DNA, 223 bp, Homo sapiens
aggatggcaatctgttatttttacatattttcaaacattacagttcattctttcattttatctatgtttttataacatgcaaaagcttaaaaaacaatttatgagcacagtgtcattgcttgtcctctttgtgatttttctcttctacagtaattataaaaactcttcttctcttcagagatttgatgaatatccaacttcagtttttcaatagtttgtttta

SEQ ID NO: 142722 - DNA, 173 bp, Homo sapiens
aggccacgtttgaactgagacctgagggatgggatggagccgagcatgtaaagatgtggcagaggcaaaggcccagaggtgagaataagcttggcctattcgagagacgaataacctgtgtagccggagcagagtgaatttgtgcaaaactaggctggaaaaggggtagaaac

SEQ ID NO: 142723 - DNA, 439 bp, Homo sapiens
catgatcttaagagaatgaaaagacaaatgacaaactgggaaaaaatatttgcaaatcatatatatgacaaaggacttgtatctagaactaaaaaaaattattagaactcaataaaacaacccagtgtaaaagtggacaaaagatttgaatagatattttgcttaagaatatataaaaggggctaataggcacataaaaagatgcccaactttgttagtcactagggaaatgcaaattaaaagcactgtgagataccactagtgttatacccgctacaatggccataatcaaaaaaacagacaatactgctgggcacagtcacatgcacctgtaatcccagctacttgtgaggcagaggatggcagggaaggactgtttgacaacaggagtttgaagtttgagactagccaaggcaccatagcaagacccctttctcag

SEQ ID NO: 142724 - DNA, 134 bp, Homo sapiens
gttaaactaggattttatacacattttacattttgtagcaatttgagattaggtttcttatttcacaagaatgtctgatcatttacagatgctgagaaatcataggtaattgtaaattataatagttacttttg

SEQ ID NO: 142725 - DNA, 101 bp, Homo sapiens
aaacttaaaactctttcttgaaatattatattagcttctgaaatgataccattagaggctaggacattcatgccccactagtacattcatgcctcactctt

SEQ ID NO: 142726 - DNA, 601 bp, Homo sapiens
gctcttagcttttcaggttcagaaactgatttaatcaagatacagaaaagagattcattatcagagttggtctcaccttaaccaagctcacaagattgatctgtaaagcaaaatgccacttgacatttaagcaaagaaatataactgatggatattcttaaagtaaaaacgactagctcattctttcctgcaggcaggcctacacagggaggcagatcataatcaggaggttctttggtgaacacgaaatcagaataaagctgaatcatatgcttaatggtatagactaagaaaatagtccatcccacaccaaatatgaccctgccagtggaactaagttcctttgaaggctgtcaactatgactccctctgctctggtcagtgtttggatagacacctgccaatgttttgtctcatttttttatgcctcagggctaacccaggcccatacccacccaaatcacttcccaagttagtctttctcctagatgttaatactttcccatcagcttacagtgtcattctttctccttaagcttacagtttaaatctcagcaatcttattttcaaattcttaagggatcccttgctgaacttacat

SEQ ID NO: 142727 - DNA, 1013 bp, Homo sapiens
gaagaaaggaacaaggatacacaaaacaaccagaaggttaacaaaatacaggataagtcttcagctgtcaataataatcttgaatcagattaaattccacacttaaaatatgtagataaactgatttttttgtagacccaattatatactgcctacaagacacttacttcacctatgaagacatatagaccgaaagtgaagggatggaacaagatattttatgcaaatggaaaccaaaagtgattaggagtactatacttctatttagataaagtggacattaagtcgaaaactgcaaaaagagataacatggggtcattacatagtgataaagggatcagtacagcaagaggatataacaatggtaaatatatacgcacccaatataggagcacccagatacataaagcaaatgttattagatctaaagggagagaacaactccaatatggtaatagttggggacttcaacacttcacgctcagaattgggcaggtcagctgtgcagaaaatcagcaaaaactgtggatttaaaccacactttacaccaaatggacctgactggtatttacagaacattttatccagcagccagagaatacacattcttctcatcagcacatggatcattctctaggatagaccaaacaagtctcaacaaattttttaaaaccaaaatcatatcatgtattttcttagaccaaaatggaataaaactagatatccagaagaagaggaactttggaaactatataaatacaaggaaattaaacagcatgctcccgaacaatcactgggtcaatgaagatactaagaatgaaataaaaaaaatttcttacaacaaatgggatatagcaaaagcagagttaagagggaagtttacagccaataagtgcctccattaaaaaagtagaaagatatcacataaactacctaatgctgcacctcagggaactagaaaagttaagaacaaactaaatcctcaaattagtagaaaaaaagaaataataaag

SEQ ID NO: 142728 - DNA, 390 bp, Homo sapiens
caatatgtctaattaaaagaataaaagctaaaacaaaatgaactttggaagttagtgcagaatataacaaaagtggctttttaactatgggcaaaataagaagatggataaaataggcttaccagcagtttcaactcttatttctgttctgactcaccaacaggggaaacattaagatttatcagatacttatgtccttgaacaaactagctagctagctatattcttattaaaccctcaagacaatcctgtgaagttctatcatgcccactttataattgagcaaatagactcagataggttaacttgttttagtcatataactaataggtggcagatccagaatatgaacgaaattatgtgataccacccaaattacatgacaccaaa

SEQ ID NO: 142729 - DNA, 145 bp, Homo sapiens
gactgctagcttcaaagtcctggctaaacgttccttgtgtcttcacatgtcttcacaggacggccccaggccctttcagcatccttgctacttgattctgagcacattttaaacagacagccctctaagtctggcatccatacca

SEQ ID NO: 142730 - DNA, 284 bp, Homo sapiens
taagttccaaattcacagagcgcacagtcctaacaggctgtcatgcctcagttgtttatttgtgacagtgtttcccacagacttttaattttggaatgataggatgtggtgctctggaatggtgtcccagggttttggagaactgagagtaacctgggaaagcaggttacagtgagagaaagttatgaccaggagttgtaccaaaacgcaggaaacatgatatgtatattgttatggtgcataaaaatacttacaattaaaagtcctgaacctacactacatct

SEQ ID NO: 142731 - DNA, 488 bp, Homo sapiens
aaactctgcttcccgggtcaagcgattctcctgcctcagcctcctgagtagctgggattacaggcatgcgccaccacgcctggctaattttgtatttttagtagagacggggtttctccgtgttggtcaggctggtctcgaactcctgacctcaggcgatccgcctgcttcatcttcccaaagtactgggattacaggggtgagccactgtgcccggccttcagtcacttttatggggaatcttatcctgttgattatttttatttctagaatatcctattgatagttttttggggggattgggcatgatgtattttatcctaaaataagatgttactgaatgttaattgcagaattaatgtaaaattgactacatctttcacagatgaaatacatcgtgtatagctgtgggtctgaaaatgtgtggagtggcctggactttacagagcacctggatcaatgtttttcagccttactttgtagtagca

SEQ ID NO: 142732 - DNA, 182 bp, Homo sapiens
tgaagccactgtaatatttcaagactaaattagacactctcttcctagccccctttcactcctccaccctccaccacataggacactttctggaaaagaagtccaggcaaagagacgttagtttaattgttgctaacgtcatataaaaatgatcaccaacttggaatttctgaattcacatg

SEQ ID NO: 142733 - DNA, 521 bp, Homo sapiens
gtcaagtgatctcagccgggcacgatttttttgcgttagatagagacggggtacaccatgttagccaggatagtctcgatttcttgacctcatgatccgcccgccttggcctcccaaagtgctgggattacaggcgtgagccaccacgcccggccccacttacacttgatattttttgagatggagtctcgctctatcgcccaggctggagtgcagtggcgcgatctcggctcactgcaacctctgcatcccgggttcaattgattctcctgcctcagcctcccgagtagctgggactacaggcgcaggtcaccacgcccagctaatttttgtatttttagttgagacggggtttcaccatgttggccaggatggtcttgatctcctgacctcgtgatccacccacctcggtctcccaaagtgctggaattacaggcgtgagccactgcgcccggccgattcccttttattaatacattttcccgtcttctggggcacagtatcattggagtttcactttt

SEQ ID NO: 142734 - DNA, 121 bp, Homo sapiens
caagtttggccagaagtaggtcatcttaatgcaatctgggattaaaataatccaaagctaggcctcagttcttgtgaagtctgttctcattcacatttattcctgagatgatgcccttcag

SEQ ID NO: 142735 - DNA, 653 bp, Homo sapiens
actgaaattgtgcaggaatctcttactggaacacagcaaatgttatccacccaaggccaaatgacaccagaaagttctacccaaataatgctttgactagacctgttcataaaaaaagttttcttcagaaattgtattggtcattgaagtcttgagtaaattcaaattgacagtattttgtttagatccaaatgagtcttataggtcaggcatagtggctcatgcctgtaatcccaacaatttgggaggccgaggagggtgaatcacttgagcccaggagtttgagaccagcttggccaacatagtgaaaccccgtccctacaaaaaatacagagtagcgaggtctgtagtcccagccacttgggaggctgaggtgggagaattgcttgagccctagaggcagaggttgcagtgagctgagaccatgtcgctgcactccggtctgggtgaccctgtctcaataacagaaacaaatgagtcttatagagtgtacacctctcctagtaagtgagcatttcaaataatcttcacaggctgttggggagaatgaaatgcccaacgaaggacaagttctagaaggcttgaatataccataatctgatgagaacctctgagtcagctgctaaatttaagtcagatctcagtgtcctttt

SEQ ID NO: 142736 - DNA, 186 bp, Homo sapiens
gacagaaagcagatagccaaattctctctaccacattttggaaactatgtgtttgagtctgatcaagcatgatttagattcaaattcagaaaccatgtattagccttagttatgtgccaggcagtcctgcactggatccgttcatgtgaatggctctgttgagccctcaccaagacaaatacatct

SEQ ID NO: 142737 - DNA, 146 bp, Homo sapiens
gccttgaccttcaggccacgcggcacacacgtgtggagggtcagccctatttgttgtagtcttcatgccacttgataagccttcagcccttcatagtccatttgcaaattttatttctaaatagcaaaacctgcataagaaataca

SEQ ID NO: 142738 - DNA, 245 bp, Homo sapiens
ttgctcatccagtgctctggttatagctttgtgaatcatctctgcaggcttttccacctcaatcaaaacagtactttatgtctttaatcactgtatagcttcttcttcctctaccattctatctatccctgatatgctgttaattataatattttttctctaaatcagtacagtgttacaatgcaatatgggagtgtgaaagagggaggctaatttatttattttgtttacatttgcttctattc

SEQ ID NO: 142739 - DNA, 229 bp, Homo sapiens
ttcaccgcgcttggccagcaggaccagaaggccttggctgtttgaggactgcggtggaaaggtcctggttggctcctaggaggcctccctcctccttccaaggctcctgctgcctctgaagtagccagaggcctcacttatctcatttccttggagttatgttgagttgagctctgtgaacctttcaaattgaagtcacatctcacaattatttggtagaaaaacacaa

SEQ ID NO: 142740 - DNA, 253 bp, Homo sapiens
catgctttggctctccatgtgcagggcaagcagaggctcctgaggggtttagggggcatttctctggccactggggtaatgtttcaggaaggaacatagctgcctctgccacataaaagagttcacaagcctcacccagctctcatgcacttggcaaggcaggtctctcacctatagtgttcactagcagccgctagctaaattccaggccgtgtaagctcagaactcaaaactgccctaggccataagcctt

SEQ ID NO: 142741 - DNA, 492 bp, Homo sapiens
gacttcaaagagtcacagtaaaaattgaaagtccatctaactttgaagttcaaaaggcaagagacagactgcagtcaacccatccataccaccaaggggtagcccacagaggccagagcaagccaagaggattaaggacaacattgtgcttgggtgagcaatcttattgccacagtctgtcttcctgtgttcaaatagttccgtgttcaaatgagatcagcacacacagagctggccctttctcttacagaaacattaagattgcacactcctggaagtatgtcaactgccacagtctttagtgagtatgggaatcttgggcaagtcttcttggaaattgccacttatgccacagtcttatagaaaattcaggaccttgagatcccctaattttatcattcttctcttggatcctctcttaatgtctgccttccctccactctaaactagcatttactatttattataaatcatggcgtattgttaccaact

SEQ ID NO: 142742 - DNA, 237 bp, Homo sapiens
agtaacttagtctgattcaatattctatagatttaaaaaagagagagagagagagagagagagggaggctgaggttacttaaaattgattttgagaatatgaaaacatcattttggattttgatgttttctgctccataatggagcagaaaattaattttcattttccttatatttgtttttctcctaagacccaattgaggggggagaaaacccatagcatcttaaagatctttat

SEQ ID NO: 142743 - DNA, 504 bp, Homo sapiens
gttactaacagcctggacagcaggaatccacgctttccactgctgtgttgctctgatgggggtgagggcgatgggaagagaaacctgttccgtacacccacgggcaggctccctgccaaaacccgccacacaccatcttcctgttcattttgcctcacggatgatttttaaagctttttaattgtccttaataaattacctacatgtgcatgattgttacaatagtttcattaatttttctctgagcatctaagctgtttatcacagaagtgttaatggaaaagaaaaacatgtcaggcaggcactttctcacacactctgggcttgggcaaattaatgctcatgggattgctttcccacaccccaaacaattagggacgtctttatttcatgccagcaaatcatctttcagcaaggctagaaggaggatgcccaccagagagccctgcagctgcccagtgtggaagcggcacacagatgcctgcctgcctcccgttcagtaac

SEQ ID NO: 142744 - DNA, 511 bp, Homo sapiens
tgaggtctcagggaaaatcagaaaacaagtttttactgaatgaaaacagaaatataacttattaaaattcgtgtaatatagttagtgtttaagagaactttatagcagtaaatgtctctactaaaaatacaaaaaaaaaattagccgggcgtggtggcaggtacctttactcccagctactcagtagtctgaggcaagataattgcttgaacccaggaggcagaggctgcagtgagccgagatcacgccactctgcactccatcctgggtgacaaagtgaggctccatctgaaaaaaaaaaaaaataaataaaactggcatggtatggtaggtggagtaccccaagaagcaggagctgagataaggacttaagtaaaatttatctagaagaaaattccaggaagtaccagtaagggaggggaagtcgagtcaaggagaatctgggggagactgtataaaacacgtctcagaatgggtttattctaggggcaaagaagctggaggttttacc

SEQ ID NO: 142745 - DNA, 505 bp, Homo sapiens
gtagcagcttgcgggaagctggaatggggaagctgacttcaagtaggaacctgaaagccagggcgaggaaatagttttccagaagtaaaattacaaccgtggggatcgtttccttcccgctcctcccttcccccaacctgtgacctagattgaagaagaatgggcagagtggccaccacgtgtctggcttcattaaggatacccgtgcagcccttgggcagtgggagccttagaaagtgtcctacttgagcgactgcctgcctgcttccctgcgtggacagcaaggcaggcctgaaagagagccgccgtctgataccgcaccagtcccagtaccagaggctgtgtccaggacgaggtgcccaggagggcagggaagttaagggacttgcttcctggcaccatgtccctcagcccatgtccctctctctgggaacccgagctcttgccgtattgttacacctttacactttcctggaagtggtgtggcttcgcctgcccccacctt

SEQ ID NO: 142746 - DNA, 672 bp, Homo sapiens
agaaagatgaatccctgtgtctgtcttcctcctgcgaaggggctgcaggcaccccgaggcctgctggagaaccggcctgggttactcagtttgtgcagaagaaagaagagagggacctggtgaaccgactgaaggcggagcaggccaggaggaagcagcgagaagaacgcctgcagcagctgcagcacagggtgcagctcaagtatgcagccaagcgcctgaggcaggaagaagaagaaagagagaatctcctccgcctcagcagggagatgctagagacaggcccggaggctgagcggccggagcagctggagtctggggaggaggagctggtcctcgccgaatacgagagtgatgaggagaaaaaggtggcgagcggagtggatgaggatgaggatgacctggaggaagaacacataactaagatttatcactgtagtcggacacactcccagctggcccagtttgtgcatgaggtgaagaagagcccctttggcaaggatgttcggctggtctccctcggctcccggcagaacctttgtgtaaatgaagacgtgagaagcctaggttctgtgcagcttatcaacaaccgctgcgtggacatgcagagaagcaggcacggtagccaccaggaccatggtgtagccgcaggtggtctggagagagtgaggc

SEQ ID NO: 142747 - DNA, 391 bp, Homo sapiens
gataaaaggaagcaaaagatcgtatctattggggctacccgtgagttagccacttttcttcattctccagggaagagaatgaacaaagtagatgacaggggctggagtatgcattcgggcctttgattccatagagaaatgcatctgtcctatccccgtgtttacatggctgatgaaatcatagcctgcctctcctgcaaatgccccttttctttgccatgtggcagtgagccctatcattgctgtgcctcagggacatcacgtcctggccatatttcagtggtaaagtatgatatggcatccctcactccctcatgttttgggtgaaagctcaaatgaatgaaactcttagaaggtgaccgttattgccttcctggaggtagacagaaag

SEQ ID NO: 142748 - DNA, 362 bp, Homo sapiens
agcaggggtctttgctggtaaccaagttgtcactgtattttgttggcttccaaagtgcaaatgtgccctgcttccccaggcccaaacctctggaacaggcctccctctccagagccatgccagtgttgcactttgacctctagaatcagagtaacagctgtagctctgccccatggggctaagctaccgaagagcatctcagattcttagtctgcttggtggaagagctgcatccatgtaaacttaagagagtaaacctgcatccatgtcacaggtgcctcagtaattaaacaagacactgagccctgcactccagctccacaccacactgaacacctatgccttggaacacagcatcagtt

SEQ ID NO: 142749 - DNA, 233 bp, Homo sapiens
gtgttatataatttaatccacccccaaagcctatgaattgggaactacaatatctaaattgtattgatgaagaaatttagagattatctagaaaggaattttaattgaaagcaattaaatttcacttccattttgattacataaaaatgttatacccaacaatattgatgtaattttattatatgtaagtctaaaatatctaggatcttgaatttaaaacactaatacacaca

SEQ ID NO: 142750 - DNA, 325 bp, Homo sapiens
acctcagcctccgaaagtgtcaggattataggcgtgagccacctcgcccggccgcccaaacattttaaagttagaatctctttttataagcaaaattttccatagaaggtgactgtgtgccactttcctctccaagcacctgatctgcttcatttcacagaatccttagaacagctccacgagtaggtactctgaatactcccgctttacagatgtggaagctcaaatgcagagaggttgggcaacatgcccaaggtcaatgaatgcagaactgctgcagtgggagcaggggtgggtgacacccactagggaggtgctttcaaac

SEQ ID NO: 142751 - DNA, 1000 bp, Homo sapiens
ccatgacagtcagaaacacgtgcacctgacattactacattctctttaagctctaaaaaaaaccccagatgtttattactctgcagaattgcttgattgtaactacatttaatattcattttgtcaaatgcctctgttttatttaaacaagcaataaaagaccacaaaaggtaataaggcaaggtttagggttagaaaagataatcaataaagagggtgacagggacttctctatgctcttttccccccagttcaggtttaccttagagaaaaatccaaatgtgttgattttagtttagtagtgagctgaatctgctgagggttggaactgcttccactctagtctttagattgtaaaggagttattctttagcagaagggccaaagacatgaccttggaataaccagcctgagtttattagaagtctggtttcccactgggcaaggctgcatgggatgctgaaagcagggcaggctctggagcttcattggctactggcctggggcaaattccatgacatctcatcttaaaatggacaagctgcaataatgcccactcatggtaatgccatttgtaggagattggtaagggtggtgggaaaaattgcagaagatgcaaaccttcttggaaggctggaaggttttacaaaagcttcggaaaaggatttggctgaaggcagccagattcttttatctggtgcctgaaagcttacgttagataacaaggggatataaataaactgatctaggtaagttagtttacttaggccttggaacctcgcccttaagcatccacgcacagaactactctctccgggtctgggtgaccatgtgaattgcccacaaatgtgttgactcaaggcctttgtcattaaatctatactgaataaatgcccacagtgccggcttttcggggctgtggctgctgactcattacagcaccctccttggtgtctgtgggtggccgggtcccctagcctgctctttcactggattcttg

SEQ ID NO: 142752 - DNA, 550 bp, Homo sapiens
aaaaccacataggagtcacagtggaaacaattataggcaataccaattcttatcattttaatgaggagaagttaaagttggtcttttcgttgtggttcttaaatgcaaggtataacctatagtccataacaaatttttctttagaaattatcaagtacacagtgggttttctttagaaaccacaattctagattttttaaagcagaaaatatgctgtcctccttcattttaattcttttggaggaatagaactttttttttctttctatagttaactagagttgccacaggcaagaggactaacagagtaaaatactaactgatccaatatatactgcatttatctaactggatttcatctagctcaacatcatggctttgtagtctaagcagtagatgaacagaaacaataaactgggcaagtaatgttttgtgtgaataacagaaaagagtgaacagaaatataacacttcaccattgcacaaaatacaattaaatatgatttttaaaaacccagccactgatccactgcccaatcataaaagaattg

SEQ ID NO: 142753 - DNA, 419 bp, Homo sapiens
ctatgcattgtatgtctccagttaaatctcttctttcatagctctgccagctaagctttggggatccagctgaatccttctccatacctctagcatcatgcacagtttctgacaatgtatgaactagaagatttgtgtttcgttgttagagggatttatatataaatgtatgtacagcaagatagagctctgtctaggatttcaatgaaaaacaccaactaggaagaaacaggcttcaagaaatggatgagaggagtaggactgaggaagatacattatttgagacacctcaatgcatttgatactgcaaagggtatatttgctctgtgaatgtgtgtgattttgtatgtccacaaattaagctacagacacaaggagcaatctcccacccctgaattttgactctaagcttggtatag

SEQ ID NO: 142754 - DNA, 370 bp, Homo sapiens
caggctccccttaactctagaatacctagggtaatgacagaaatagggcaatccaggagccccaggcacgccccagctgagctcacaacccaaggtcagctctgggagcaggtaccctggaaatacgatggttcctgagccccactgatgggccacttcccaaggcttgtcatctcattcagccctctcagaattgctcttgagaggcagcccagcaccctggttaaatgcgtggactctgggccagactgcctgacttctgacccaggctctgctataagtcactttatggctctgtgcctcagtttgctcgtctataaaatggggattacaagacatctagcagtagccatcccagaagagtactgtg

SEQ ID NO: 142755 - DNA, 167 bp, Homo sapiens
gaggtgttggggagccttctagggcaaaaggagtattttagccaaatcttgatactggtttcgccagtatgtgcacatacgtaaaaatgcaccaagctgaatgtgtgcccattagttcatgtgtattatacctccattaaagtgagagagatggatggatggatggg

SEQ ID NO: 142756 - DNA, 290 bp, Homo sapiens
ggaacagtaagacaactgggcagctggagggaagtgagcagaagtaatgaggtcaaaaagacagtggggtggacatatcatgtcagaccttatttaaggactttggcttttactccatgcgagatgagaagtcagataaaagttttgagcagaggacactgactaagagtcagtgacatgatcacacttacacttttgaacaggaccaggttggctgttgtgttgaaaatagagtgaatggcatggtggtggggcaaagccagagtcaaagagaccaggtaacaaaaata

SEQ ID NO: 142757 - DNA, 375 bp, Homo sapiens
gtatgtactctgcaagaaaataaaatttgaacttgtattatgtcttattatccaagtcagattagttatgcagaagaagcaacactttggattattgtcattacgcaattcaaatgttagaactagaaggtaacattagtgattaatcaaattttcttactttaacagataggaaaattgagacctcaagagatcaagtgatttactgaggcttttacaactgattaatggtaggaccatcttaggaacccaagtctcctgacttaaatcagtattcttttcacacattgtttagagtttagaggctagtttttaaaatacttttagcctagcttagaatttcacacacaatgcagcaaagccacataacagaag

SEQ ID NO: 142758 - DNA, 465 bp, Homo sapiens
ttggtcacctggcttggccatccactggccctgggaccttgactgtggcatttccagagccacatcccagatgctcccatgtggctgtgtccactctcgggtggggcagctgactgcactggccaaatgtgtctgaaaggtgacagatggtggacttgccccaccagcagtgtgacatggatgcactgatgtgggggtgggaggcgctacagggagaacttcacaggggcctggctggccctgaccctttggactccagcagattctcaccatctcctgaggaagacaggtttataggtgtccctggcccccaccccagggtgtccccacaacccaactccaatctcatgcagtctctcccctcttcactcattcagttgctgaaagtctgtgtcatctactagctgtgacctcaactgtggcatctccagagccacattccagctgctcccacgtggctgtgtc

SEQ ID NO: 142759 - DNA, 459 bp, Homo sapiens
gctgggattacaggtatgagtcactgcacccggcctgcaactttgatattttaaaaagaaattcttttgaaactaagagctttcttaataaccgtacttctcaaaatcagagttttactgtttcaataaatgttcaccctagattgtaagttttttgttgttgagccctagatttttttctactagtgtaaatctgtattccctccaagtatggtgataaggggactgagtcttatttacatttgtacaatcactactttacctgttgtatttgcagtaagtcttttgagccctattaaacctgtcaattttcttgtcctgtcagaaaactgagaatttgacttttggctcaaaatggatgttattaacaaaggggtaacaatatagatgtcttagtacaaagaaaaatgaaatgtaagaggagattgtctggagttcaggggatagagtgtcaagtct

SEQ ID NO: 142760 - DNA, 283 bp, Homo sapiens
tggactctctttttggcctgacctttaaagcacattatttcttactgcattagattttcattagttaatatctcatgaaaccacctgttattaacctaaaagttcattttgtggactattcagcccctttcttgctgtccatcttcaaggcgggttttttcttgggatcgtcaccagaagtgctagtaaaattacctgacttctcacacaatcaaaacaggaattggtggggagggggcaaaggggagaagaaacaaaagtataattcagcaaactgaaagcc

SEQ ID NO: 142761 - DNA, 676 bp, Homo sapiens
aaagaaaatcacttttttcctcctaatgaacatcatacctctgtcccatatttggaaagataaatcctgtcctcacacttatagggtttaaaaaatgaactttgccacacatatcaatatttattcagttttgcaaagtcaagctctcttgccctaaatggaagagaagcagaaaatttcttccactatttctcattgaactgtaagcataaatcactctaaggcaagctgaagtttttaagaagggcatttcttcgcatgtttttaaaccacagcttcctgcttatctttacactaatttcctctgataaattataactctagagaaggatataatagatacatcagtttgctactcagataaccacttccccctctttacactatccatccctcaacttactttatatctttctacaatgctgaagccaataacagcacactgcaacttgtgcaaacagatagggcaaaggtttagagggcgccggtcagcttcttccaagtggaagaagccccagatttccctatcaaaatcctttgctgctatccaccatgccttgtcttgtaaaacttaatgggctggaggtcaaatacttgagaaactgaagtttcagagtcttttcccacaaaagaagtctttttctgaaagtagcaagtactccaaatcctgtctcta

SEQ ID NO: 142762 - DNA, 260 bp, Homo sapiens
gggccaaagcaagaccaggacatgtccaaggccaggtcagggccagaacaggagtaggaccatgaccactggcagggccagtgccatgacatgaccagggtcaggacaaggggtagggccagagccagggccagagccaaggtcaggccagtgcaggttcagggcagggccagtgccggttcagggcagggccagtgccagggcaagaccagggcagggacagggtagcacagggccaagacagggtcaggatgggacca

SEQ ID NO: 142763 - DNA, 139 bp, Homo sapiens
acgagaagggagcatggtggaaagtttgggggtgcccagggcgcggggagggcgtcacttacagcgatgacttctagccgctgccggtagagggagctctccgccatgggcctgttgggagagggcaggggcttcgagg

SEQ ID NO: 142764 - DNA, 146 bp, Homo sapiens
agagcactgtcctggaggaattctgtcttcagactcttagggcagggagaggagaaggaaggaaggggacagcaggcagttgataacatatgatttattaattctatactagacatctaataatcggcctctgctagcaatgtgac

SEQ ID NO: 142765 - DNA, 328 bp, Homo sapiens
tctgtactaggtgagctccgagtcaggtcaaacaaggacaatcctccaccagaccggtctaatgacaattctgtgcgaatggggttttgaagaatttccaactctgttatgccttctccagtgcctcccaggactctggttttcaccatgcccatagaatatgggtttacaaggctacggcgatgctagggtgatggggagggtaatagaataagagaaaacaccagaatgctcaacgttcttactgaattcagccattgtttttaagcaaaccctccccagatgactacatcatttgataaatttctagagttctaaaatttgattc

SEQ ID NO: 142766 - DNA, 159 bp, Homo sapiens
ctccaaaattcatgttgcagcttaatccctactgtggtgatattaagagatggggcctttgggaggtgattaggccattagggctccactcttataaatgggatgagggaccttagaaaagggggctgagcatggtggctcatgcctgtaatcccagca

SEQ ID NO: 142767 - DNA, 332 bp, Homo sapiens
acaaaaattaactcaaagtggatcattgacctaaacgtagacctaaagctataaaacttctgaaggaaacctaggagaaaatctttgtgactgtgacataggcaaagatttcttagataagatgattcataggataaaaagttgatgaactgggcttcatcaaaacaaaaacttatttgttcaaaaccttctttgaaaaatactgtggagaaaatgaaatgacagggcacagactgggagaaaatatttgaaaaaattaaaatctgataaaggatttgtttacagaatatataaagaactgtcattagtcactaagaaaaaacccaaacaac

SEQ ID NO: 142768 - DNA, 163 bp, Homo sapiens
cgttctttatgtccagcaggccacgtttgaggaggctggctggggtcccatctgagatgagtgccggtgtggtgcggagttccctgccaaaggagggtctacacagtctcaagatggcctctctgccagggtacacctcagaagggatcttagaggctgcgta

SEQ ID NO: 142769 - DNA, 129 bp, Homo sapiens
cacaaatctctgcaaggaggttcctctttagtgacaatgagtcagatatgtattaactcagaaatgaatttaagaagaaaaaaaagtttgtcatcttatgaataagtgtttcatcttggtttagttgat

SEQ ID NO: 142770 - DNA, 312 bp, Homo sapiens
gggattaaaaaaaaagcagtgagacactgggaaatactttaggttaaaattgtcacgaaagtccagtttgagcaaagactcaacatgggggagaagtgagtcaagcaaagagcttccaggtagaggcaacagcaggcacacacaaaaaatccaatgcatagaatgttaggaatcctaaaaatttaattataacctctagaaatcctagaaatttatcatatagccaaatatgttatacatatacatataatgaaaacaacatatacaaaggtgctatagagataactggagaaaagatgagcttagcaataa

SEQ ID NO: 142771 - DNA, 154 bp, Homo sapiens
gtcctgaaattgcatgagggagcattcggggcagaaaacacaggagtgtcaagggcaatgctgagaggagcagggctctcctgctgctttcgagagtgggtgtcgcagaaggcttgcggggaaggaggatcttggtgtccatacagccccccgt

SEQ ID NO: 142772 - DNA, 429 bp, Homo sapiens
cctagcttctcccatcctcgcggggccaaccgcagaccaattcctttcagatgcttgaaacaggcttccctccagtctgtgccaacaggacagctcccaaaccaaggctcagcttcttgctctggccttctgcagcaggacaaccccctcacaggtcacctaagggtcccatggtgatgggatgccatctgcccctggatggtggggggagtgggaggggctaacaatggaacatgggcagggggatgtcactcaaccttgaataagaccctagagggatgccctctagggtcctgcctatgagcaaaggctctggggcctgactgtcagggtcccatttctgcctctggccaggcatggttgctgatatctgtaatcccagcactttgggaggctgaagcaggaggaacacttgagcctaggagttca

SEQ ID NO: 142773 - DNA, 158 bp, Homo sapiens
cactgtgatctttgtatggaagaaatacactctagccaagtgcagtttagcttggagccacagcagaaagaaaaggcgactttactgagctaccaggcagaaacggagggcaatatagtggctggagaatagacactgtgaaaattaccttagatgtt

SEQ ID NO: 142774 - DNA, 309 bp, Homo sapiens
gccaagagaaatgcccaaggtcccccagctcgcccgtgccggggccaggattgcacccgggccagctgtcacagagtccaaccctttccccaggctgcatggctgcagtctgaatttggacagtttggggtttgtttttttgcctgaagtatgcattgcctcttaaaatgtacttcaccaaccagagtgtaccagactgggaccctctcctctctcctgtgctgaaggtttacggacagctgaccttagctgcatcgagcctgagaagtgcctgtcacagtcctagctggggacagtttggcagctctg

SEQ ID NO: 142775 - DNA, 353 bp, Homo sapiens
atggttgggattggccaatggtgacaagtagtgggaggggaggtctcccagcagaagatgggaaggaggaaggaaagtgggctcaggcaacttccgctctggctctttctctttgactacatgattggcaatcaggatttttctcagggggctgattctttacagctgtctctcttgtgacttccttaactgacccctcctatggtagtaagtactggttattgcccctacacccactcctttgtgtaactaaaccctcctgtacttactcaaccgattcaggtgtgccatcagtctccggcgagacctgggagtgataaaggagcaataatataacagacatggcctgtctg

SEQ ID NO: 142776 - DNA, 325 bp, Homo sapiens
aagtcccccgtgcgtcagccacctcctctcccgcggacctccgtcctcctctctttttggatgactccctggaacccctccgacttcctgcgtccctctccggctccgttctcccttccccattctgtcacagcccgcgtctcctctatttccagtggggctgggatctgtgaccctttggttgtcctcgcctcctaactgaataaccttaacttcagttttccaggctctgctgtactctttgtgcaccctgggtggaaagcctcctaattctttcagtggtcaatgatgagccgaaaaactgccggttctttcgtcttacggc

SEQ ID NO: 142777 - DNA, 175 bp, Homo sapiens
ttcctacagtgatgaaatcaggtttttaaaattctggcccaaagtgagggctggatgcatgtttgttaaatgacagaagacaagttgtatcgaggaactcatatggagaccaaggatatggcagcaaggctgctttgtgcttggccaagaatgtcatctctttctctctctctgt

SEQ ID NO: 142778 - DNA, 416 bp, Homo sapiens
tggtctagagggcaaggtcttggccactgacctcatctggctccctagcttagattccttgttctgggacacccactgggccccaaatcttaagctcctggatgtcaagagggagcctggctgctactcagaaagaggacttgtctcatctagtaccaagtcatggtgccatatcgccaacctttcaaaagtagagtctggaattgccatttacatatactgagcccagtgttggggtgttttcacatcgggagacactaattaggggtcctagaattctaaaatctgtagactcctagactgcagaactgttgcaaggggctttagggagcatgatgctgagcttcagaggggttctgggatttgtctgggatcacacagcaggctagagagacacactgtgggctagaacccag

SEQ ID NO: 142779 - DNA, 635 bp, Homo sapiens
gagaagcttgtgaagccatgtgctgtccgaggggttggggacacaggagtggacaagagagagaaggccttcccctcccacaggttttgcgtggttgggaggtagacacagacatgagagtgaacagacatggtcatttcagacagcgatacgtgccttgagggaaacgcagccagggagtgactgggtggtgccaataaggggccgggtttcaaagagtcactggggccatcagatcagatcatgcagcaaattccttggcacataatcagcactcaacagacaaaggggttctcctgtcctcccactgcacaggtggggcaagtgaagtcagaaagagaaaggctgggccaggcgcgtggctcacgcatgtaatcccagcactttgggaggccgaggcaggcaaatcacttgaggtcaggagttcgagaccagcctggccaacatggtgaaacccctgcctctactaaaaatacaaaaattagccaggcgttgtggtgtgtgcctgcagtcccagctactcgggtggctgaggcaggagaatcgcttgaacccggggagcagaggttgcagtgagccgagatcgtgccactgcactccagcctgggtgacagagtgagactccgtctcaaaaa

SEQ ID NO: 142780 - DNA, 434 bp, Homo sapiens
aggctagttagggaggcagatattttaattccaaattgtcatggttcatctgggctggtctttttattgcttctactggcttaggggctgaatgatgtgttcctgaaattggggttttaattcacatagctccacaagatgttctcaggctcgttttttattttctaacttccagcgctggaattagccattctgtgaggaaccggggttccctttagtggagagcagtgtttagaaaccaagatctgggtattaggcatgtgtgttactactggatatcattgtttctagatccagttagcaggcagagctaggatgtgtatgtataccagcctgtgcctattaacttcccctaactccagacttgtaaggttatattaatttcaattccagtccaacactagaagattttattttattttttttgagacaga

SEQ ID NO: 142781 - DNA, 191 bp, Homo sapiens
aggtccagaagaatatacaataatagcaagtaggcctcccatgtcactatcctatttccattttgttttcattatagaactcatcactatctaacatatgcttggttttatatacttatttaattccttattacctttctccctaactagaacgtaaacacctatggccattgtatcctctaaccagccca

SEQ ID NO: 142782 - DNA, 346 bp, Homo sapiens
tgggcctagcccacacagggtcacctctggctccaatgttgacttttctcactctcgctgtctgtgtcccatctgccacccaaactgggggttcctgttccttctcctccttacccccacaggagtcgtgctaacacaggtccctaacatttcccatcaggggcatcaacaccgccatagagcagccagagaacgtaaaaaaaacaacacagccactgtgagaacccattagcagtgtcctgtgatcctggaatgaagtgcaggctaacagggtcccccctagtttggccccatctctagtctcacctgtacctcttcctccccaacttagcctcaggcttttcct

SEQ ID NO: 142783 - DNA, 187 bp, Homo sapiens
gcagggagaagaggcaggaaggtgacgcgtgatcatccgctgggcgcccgcacagtgccgtctgcacaggtgccatctcctttacttgtcactctcctcgctgagccctttcccctttttgcagatgagagagcattgcctcccagaggttaagaaatgggcccagagtcactcagctgatcagcgt

SEQ ID NO: 142784 - DNA, 329 bp, Homo sapiens
caataagctgagcagaagaggttggttttaaagacagaaaaggcctgaggaaagcagtaacaaaaagtgggtatcatttcaaagtttccttgtgaaggttaagacaaagaggactggctgggtgtggtggctcacacctgtaatcccagcactttgggaggccgaggcgggctgatcacctgaggtcaggagtttgagaccagcctgggcaaccccacctctggtggtgaaaccccacctctactaaaaatacaaacattagccaggcgaaagaaacagcctgggcgaaagaaacagcctgggcgaaagaaacagccgggcgaaagaaa

SEQ ID NO: 142785 - DNA, 565 bp, Homo sapiens
ttgacgactgttactgtggtggtgtaagagaagagagaaaaggtggtttgagagtttttcccaaacaatagctatttgacaatctattttaaaagccctaaaacaatgcatccccgcaaatatgtgagacaaattccacatgcagaaatctgtcctcagaaactagatgtacaagtacagaaagatgtatgaataaggctttgattataataatgaaatgttggaaagatcctatacatctacctttagggcactagttcaataagctgtgttgcagccatataataatgtcatgaaaaaatgatactgcaggtgtataattaccaacaaagaagtaggtacacactaaactggaatataagtcagttcatatattataatcccctttaaaaaatagacatacatattggaatggaaaaatctgcaataatatagacaaatgttagttaagagtcagtgttcagtatattataatttcaggtttttttagtttaaaatttttgtttatttgtattttctaacttttccaaaacattaatgctttaatttaaagctggcttagact

SEQ ID NO: 142786 - DNA, 544 bp, Homo sapiens
cagagcgcacccagccggcgccgcgcagcactgggaccctgctcgccctgcagcccagccagcctgctccgcatccccctgctggtctgcccgccgacctgcgcgccctcgctgccgcccgtgtgcgcccctcgaccccagcggcaccatgcatctctcccagctgctggcctgcgccctgctgctcacgctgctctccctccggccctccgaagccaagcccggggcgccgccgaaggtcccgcgaaccccgccggcagaggagctggccgagccgcaggctgcgggcggcggtcagaagaagggcgacaaggctcccgggggcgggggcgccaatctcaagggcgaccggtcgcgactgctccgggacctgcgcgtggacaccaagtcgcgggcagcgtgggctcgccttctgcaagagcaccccaacgcgcgcaaatacaaaggagccaacaagaagggcttgtccaagggctgcttcggcctcaagctggaccgaatcggctccatgagcggcctgggatgttagtgcggcgccccctgg

SEQ ID NO: 142787 - DNA, 156 bp, Homo sapiens
tggtactctttgtggtctatctaccaccatagatgagtcctggcaaggtatcgagtaacttaccacagtttgtatataatttatagatttgggtttctataggaaaaattgcctttaataaattcagatcatcatgctatattatttcatttgggt

SEQ ID NO: 142788 - DNA, 323 bp, Homo sapiens
attgagaccatcctggccaacatgatgaaaccccgtctgtactaaaaatacaaaacattagctgggagtggtggcacatgcctgtagtcccagctacttgcgaggctgaggcaggagaatcgcttgaaccagggaggcagaggttgcagtgagctgagatcgcgccactgcactccagcctggcgacagagtgagactccatctcaaataaataaattaaaaaaaactgctccaaacaaaaagatataacttactttagtgcataattctaaacggtgtttttgctataaagggcatcattgggataaatggtgaaacttgaa

SEQ ID NO: 142789 - DNA, 501 bp, Homo sapiens
tggtgattcccttgtctctactaaaaatacataacttagccaggtgtggtggcaggcgcctgtagtctcagctactcaggaggctgagacacgagaatcacttgaacctgggagatggaggttgcagtgagccaagattacgccactttactccagcctgggcaacagaatgagactctatccaaaacaaaaagaaaatgaaaatatatttgttcttaaatgttagtttttaaatgattataattatatagtccttttcatagtgacagctgaatagatattagttgcaaggtaaacacagtgtgctattatgaaccttcattacaaaaaggaaattcttactccttttttagaaatttttattgcactataaaaaaaatggaggaagtactaatcatttattttgctgaattgtttatactgattgcttaatataagtaatgtgggtaatgtcaaaacttgcctcaagtatgatttttgggaagcctttccagacaaagt

SEQ ID NO: 142790 - DNA, 1531 bp, Homo sapiens
atgtgtatgggttgaaggtactttaagttgtgagccagctgctgcccatattgggtcaccaatgcacttgtcaagcccatgtaaccacatgaagtttgatagaaatataaacatttattttgaaataattccatgtgcacggttggaaaaacagtctcccttccctgagaggaatgagtaatttctcccttttcaagaagtgtacagtagaaaatgtaatgagattggaatggattccaaatcagtgacctttttaaggctgaaaccactattttaaatgaaaactttaagttcatacagtttcttatagtaattctacttttattttttagtcagtgtgcttaatcttttaggaaaaaaaactaaccagttattttttactaaagtatgtgaattacaaacaggatgtgcaatgaccaggcagaaagatatttaaaggtgtaattattctaaaggaagatgagaaaaaattcatctgctacagattcaactgtcttttaaatgcctcccttgtcatggagtaaatgactactcaaaaggatttcacaaaagacttaaatctcacccttagcaatcaaccggtcggccacagctcagatgcctcattagcaaaatgaaattgcacaacagacgaaacatagcaaaagaatgtagacatttccatggggtggaagaaaagaagaaagaaaaagcaccatggtgaactctgcttgcataaacaagaatgttttagtggaataaatgtaagctttctcttgaaggaatcccagttagaatgtcattggaaacggcaaaactatttcagcttcatagcagtaatatattccaactttattaccactgaggcacaaagctaaatttgtcagggggaaaggtaagcaaaaattactgacattgcaaccgataaaatgatcttgtgagactcaatattgagaaagaaaattaaaatagctaatatttctgttataattccagtgattactaagacttctgccaagggataaaattacttttccttctctcattataaatttctatatagagctattttaatgcagtaaggactgtattttcatattttaataaatccctcacgttgaatttgccccccatttcagatttgattaggaaatactaaattgagaaggcaggtttttccatctttttaaaaacaagtatgcaccataagcattttcagcggatgtctgccttaagcaatcttggtagagctgtcaatcagtggcaggtgcttgtttaaggaagagaacctgtgaatagatttagcctttcttcctcacagacagctgctcattcacacacgctcatctcgtcttcctcaacttcttgcaccaatcccgcctcttggattgacccacatccacctagcagttgaacaaactgcagattctaattacatgtcccgacagttgctcaacttaatttttcaccaactgaatttcatgcattgccccttgatgttccttccctctgttcactcttttctataagtccttgcatttgatatacttta

SEQ ID NO: 142791 - DNA, 419 bp, Homo sapiens
gaagccccagctgcccgccgagtaaccgacatttaggggaagaatgaataaggagctggcacttggcggctgcttactttggcctggcagcagaaagcaggcctggaggtggcccgagcaccgggtggtggcctcaatccctctggctttcagacatccatctggaccatccccaccaaccgttagggaaagaattcccgcagccaggccatgggaggcttggaagccattaggagcaggcagccaagaactgggggtggcgcaaacggactgggctcaggcagcctgctctagggagtacagaagccacagataggcccaggccagtgctggcttagagggcaggggcagactctttgaaatgcaaggagaaagaccctgaaaaacctcactgagtagtttttaagtgtttggaatta

SEQ ID NO: 142792 - DNA, 486 bp, Homo sapiens
tcatttcttctggtacgaacacttaaaatctactgtcttagcaattttcaaatatacaacatattgttattaactgcagtcaccatgatttacaagtctttgaatttattcctccactttaaataaatttttctgtcttttaaccaacatctccctaattcctcccacaccctagcctctgataatcaacatttcactgtttctatgaggtcaacatttttacactacacttataataagtaagatcatgagtatgtctttctgtgcctgacttatttcacttaacataatgtcctacaggttgatccatgatgttgagaatgacaggatttccttcttttgttaagggtgaatgatatttcactgtgtatatataacatgttttcttcatccattcacccattaatggacacttagattgattccacatcttggctattggaaataacgccacaatgaacatggaagtgatggtagtagtggggc

SEQ ID NO: 142793 - DNA, 117 bp, Homo sapiens
ccacctctcagagcgctggggccacacaggcgttcacaaactcatctagaggaaaatttgtattttcttttcacagatgcaatttcctggctatgctctcccaaaatgtgtaattag

SEQ ID NO: 142794 - DNA, 254 bp, Homo sapiens
ctttgctgagagtaagggctcttttcccaggattgttctagatccccagatcactggaaccctgagcatagatactaggctttagcttcctggctaccacagagccacacactctcaggtagaaaaatccctaaactggctgggcatggtggctcatgccagtaatcccagcacttttggaggcccaggcaggtggatcacctgacgtcaggagttcaagaccagcctggccaacatggtaaaaccctgtctct

SEQ ID NO: 142795 - DNA, 1120 bp, Homo sapiens
ttccaacttcaaagaaggagactcaacattttacaaaagatgctttgtaaagcaagtggcatcccaccaggtagaaatggcctcttgatgggaccaaaggaggctggaacttgttcatgttgtaaaagttaagctccctaagagagccacactacaaagccattatgagtagtacacagtgccataaaactccagattcaaagttaccaacgctttaatcaaatacacgtgccgactgccgaaatcatcacagagataactgcagcttttgtttggctgattcatgttctgccgtcttggggttcccactttagaagtcagttctggtttggcctgtccaggaggcctgggaggaaagggtaggagcgccagagtcctggaagcatgaggttcctgacctactggcatctaagagggactgagtttgcaggcgcaagttgaatgtagactcatcagcacttctaacaacacagctctaagcaatctggctgtgcccatctcttccacgggctccgctctgaccactcgggcctttctgctcctcgggggcccccttgcttggttttctctgttggaagcgcgttcctctggtgctctcttggttctctctttctcatccgttaaggaacagctgaaatgccacctctttgagaccttcctctccatctgaagtacctgcactgcacactcctcccctcaccacccgctcgcaaagccattcccaatcactagacttcagtgtagtgtagaaataacagcataaacttgaaagcctcaacttctacattcaaatcctggcactgtcacaggggcaagtggcttaaaggcccatggatccatttctgcatgtaagggtaacaacacctgcttcacaagattatacaagtgagtccatgggtcgggcatggtggctcgcgcctgtaatcccagcacttggggtggctgaggcgggtgggtcacctgaggttgggagttcaaggccagcctgaccaacaaggagaaaccccgtctctactaaaaatacaaaaattagccaggcatggtggcacgtgcctgtaatcccagctactcgggaggctgaggcaggagaattgcttgaacccaggagacggaggttgca

SEQ ID NO: 142796 - DNA, 376 bp, Homo sapiens
tgtgtaaggtgactctaccggatctttcaccgtatgcgggggatgcagaaaggcataatataggggagaactggcaagcaatatttatagctggaatacagcatgcataaggaagatgggtagatacatttgcaaaggttggaaaaggacccatcatgttgggccttgtgtgtcatgtcaaggagcttagatcttgtccatgctggaaagacgatgcagagccattgagagattgttaagtcaagaagtgtgatcgtcaggtgtgaaggctaggtgcaactacaggcaccatatagatgatagtttgggtcgggtccttaactggaccatcagaacacattcagagtggctcaactgagagtggttaggtgcctaa

SEQ ID NO: 142797 - DNA, 481 bp, Homo sapiens
gttcccaagctctgagtgttttcacaattttacagcaaatgttttgtttcttctgaacactcagaaatgagtccttctgcctaacaaaattcgatacatagctaaatatttgctctcataagcatcacttttcattgtaatcattttcaatggttgtcttagagcatattcggcatattttagcctttacaatgatattattacagttgcctgtttttattgtagaaacattagaaaacatgctaataaaacccaccacgaaggcacacagcgtcttaggacaggtgctgtgctgaagcagggatgtggtccccttatttagtggcatggagccatgaacttcaggctctgcgactggagctctgtctgctttggattctgatgttggctcccctattgttgtcaaagggtgtcatttatgtttgccgtcaagatgtctatcagcagagtgcttctcagacctctccttttgtttctttga

SEQ ID NO: 142798 - DNA, 464 bp, Homo sapiens
caaatatttataagcccaaacttaaatctaccaggagtcacaaacatgcagaaatctgtgtaaggtgtataacataatggcaatacattttataaaagatcagcaagaacaacctctattgaaaaaaagacagtatgacttagcactaatcataactcataaatttagccaaagaatcatgcatgtacagatgacaagttccatgtaattactttataatttactacaacaaattatgcataagattctctctaaaaatatatccaccttagaccttgcttgggacagcagggggtaggggggctgttaatgcaagtactggaaagatctactttcacctctaatgatcttaaataactaatccaaagaacagtgttaccaggaggctctcagtatatttgattggcaagatctatcccacagatgactccctaagacctcaatactccttatttgcaacatat

SEQ ID NO: 142799 - DNA, 832 bp, Homo sapiens
actttgcctctcgcctctggacggcggcggggcggccgccggattcgcggccgcagggagcgccggagacggggagctattccgccccggcgctccattcggcgcccgcagccctcagggggtcggccccgcggcttgggagagggcaccgcggcctcggtgtgcgcagccctcgggcgcgagggtcggcaggcagcggacacagccgcgttcccagccggtggggctcagccgtggcgccggcgaggactccccggccacccgcaggtaacgccgggcggagggcgcgctactagcagcgccggagatactcgagcccagggacccccgggccagcggagggcaggagcggagccccgagggagcgcgggccccgacggcgcgctcccccgtcagccacgggcaggcaggccccgcgtggcggcttggggtggggggctgcagcggggccctcgggccgaaagtcccccgggcggccagccatgaccttcgggcgcagcggggcggcctcggtggtgctgaacgtgggcggcgcccggtattcgctgtcccgggagctgctgaaggacttcccgctgcgccgcgtgagccggctgcacggctgccgctccgagcgcgacgtgctcgaggtgtgcgacgactacgaccgcgagcgcaacgagtacttcttcgaccggcactcggaggccttcggcttcatcctgctctacgtgcgcggccacggcaagctgcgcttcgcgccgcggatgtgcgagctctccttctacaacgagatgatctactggggcctggagggcgcgcacctcgagtactgctgccagcgccgcctcga

SEQ ID NO: 142800 - DNA, 146 bp, Homo sapiens
ctaattttttatcctaacatatgtcaaacattatgccttgttcaaggctgagttctgaaatctcctgcacgcacatacacacacacagcaaatgggatctagaaagaagtactacagtgtaagtgcagacaacatagaagagtaaa

SEQ ID NO: 142801 - DNA, 754 bp, Homo sapiens
gagccacttagtagttatgcgagtggatagattggtatgtagagggaaagaggtctgctgtaaagaacaacacttgtttgtctgtggggaaagaaaagcagaatacttgagatgaaagttggcatacaaataggatactatcgccagtagttatattacaaacattatcggcctttctagtgtgaatgaacattagacacattattgtcattcctagtttaaagttaaggttgcgtggttggatttttccactatctttttctaatttttctaccatttggagaccgtaggcatttgggcctgtcaccccttggatgggttcctagtttgtttacattttcctgaaccctcctgagcgcccgttcttggtctaatccccagtcgtgatgattccacacttcctcagccgcatgttgtcttgcctcattcatgagctggtcagcgtttcgtctctttaactgacatgttccccagtgctgtttgaactgttgagtttccgttgctggctgagtgcgttttgtccttcacgtaaccttcgctggtaaaaataagcccatgtgatgtccaccagtggatgaatgctggaccgagagccctagcttctggatccaggtctaggcccttcatctgctgctctgtggcccagggcaggtttgcttgacctctgcctcagttctcgactctaaaggacatactgacctacctcacaggggtgttgtgaggattaataaatgttggtactctgctttggaaa

SEQ ID NO: 142802 - DNA, 737 bp, Homo sapiens
ggttactgcctagtctgaaccctcagctgatgatagttttggggttatattggtgttgggaagatcactagtgaaaatggcaggggttcatttctagaggtaagaaccttaatatccttgatcttagttctaatatgtccctcaaatgaaagatggcattccctgtacttgtaccattcctaatcataaaatgatttgcagctaaaacattttagcctcacagcagtgaagctttatcattcctaagaattgttcattacatgagcgtcacttcatcccatttaaagatttagctcacaaattgtatttgtccatatgccttagaagctactgtcctaccgtgtcttgtatttcatatggtagaagagtctgagttttttgggttttggtttggtttttcttccttaggtcttgaaaggtagacagaggagtttgctttctctgaagaagcatggatggtaacacatcctcctgttttaattctccattttcttcattgtttacaggtcctaaaccttggcttaaattcataaaagatgccttttcatctatcccagtaatctttagttttatagatttaaaacaaaatttgagtcttgaatcaatggaccagtctatttcttggatgtcaacaatagtgtacattttggatggttctgtatttctcatttgcatgtgaaacatgcttaattataggtatttctgtggttaagtaaatctggttttgacctaccttt

SEQ ID NO: 142803 - DNA, 488 bp, Homo sapiens
ggagattccctgagctcagtccgacttgggagcagggaaaacccaaggtgcttctcaggcatggatgtccagaagtccatgggaaaacggactctctcagtcaaaactctgaaaaaaaatcagtctcacattttttcttctccactttcctgcaggatatgagacctgggtctttgtagactcaatctgtgtggaacagatgaggaaacagacctacacctgattcaagggggtaatgccttgggggtgggaatcttggggtcagctgctccctttctttttggcttttgatctttctttctggcttctgacctttgcaaactttcacaaaagtcatgagattgagagaatgaacccccggtacccatcactcagggtcactcacgaccaacacagtccctctccccccaccaatatgctccccgccccaatatacactagattattctcagcagctgcttctttctcaacctgtttctcaccaacac

SEQ ID NO: 142804 - DNA, 397 bp, Homo sapiens
tgggctcaggggcaggttcagctcaggcctacggcctgctgggcttgagaagcttcgcctttgtgcctcggtttccttctccgtgaaatgggaggtgcagcgtggtgctaacgtctgtgcagccctgggcacgcctggctccggaagcactggccagtggaggtggcagcaagggatctgcacctgtgcactcgctggacctgccttggggagcagcacgtgtgggtccaggctgcgaatcccgaccggattctcagggaggggttctgcaaggtgcacccggtgggggctgggagctcctccggggcgtgtttccctgtgacgtaaaatgacctctatccctgagccctcccatgtagaaagcgggaaggaggctggccgctgtgtgtgggtgtgg

SEQ ID NO: 142805 - DNA, 571 bp, Homo sapiens
tggaggtaaaattcacgaaagtgcaggcggggggcaccccttataactgggttccccaggagttttaattcttagactgtccacattgagcctccaccaattcttcaattactgacaggttcttctaccctggcactggttcccatggtggtttccactcatgaatctctgctccagtaagatataatttcctgtatttgcctgctggtctctcctatcttaggggcagcagtttgacttgtatcctcacctttcttacagatctaggaagagctgttgatttttcaggctgtttagctttttacttgttagaatgaagtggcgactttcaagttccttacatgcggatctggaaaataagtctcctcattcttttttacagttgcatagtattctgttgtatggtcatacctgtaacttgtttacttactcttcttaaatgatagacaatttgtttccagtcttttactaatataagtagtaaataataaataattttgtagactattatttcccacgtgtaaatatctttaggctaaaatcctggaagtagaattgccaggtcacactg

SEQ ID NO: 142806 - DNA, 2439 bp, Homo sapiens
gaatgtaaagagatccagggctcttggagagggacaagtgagagccagccaaaaaggaaaaagcaaaggcagaaacggcatcaggagagacagagatgtgaaggagggaaggagcaggagagcaggaaggaaacgcaggaggagggagcagcatctcctgtgaacacagaggagcacctgtttgctgttaaaatcgatctccctcggcaccctgagcaatggatataatatttggcaggaataggaaagaacagctggagcctgtgagggccaaagtgacaggcaagattccagcatggctgcagggaaccctgctccgcaatgggcctgggatgcacacagttggggagtccagatacaaccattggttcgacggccttgccctgctccacagcttcaccatcagagacggtgaagtctattacaggagcaaatacctgagaagcgatacctacaacaccaatattgaggcaaacaggattgtggtgtctgagtttggaacaatggcctatccggacccctgcaaaaacatattttccaaagctttctcctacttgtctcacaccatccccgatttcacagacaactgcctgatcaacatcatgaagtgcggagaagacttctacgcgacctcagagaccaattacatcaggaaaatcaacccacagactctggaaaccctggagaaggttgattatcgtaaatacgtggcggtaaatctggcaacgtcacatccccattatgatgaggctggaaatgttctaaacatgggcacatccattgtggaaaaggggaagacaaagtatgtgatttttaagatccctgccacagtaccagagggcaagaagcaggggaagagcccctggaagcacacagaggtgttctgctccatcccatcccgctccctgctctccccaagctactaccacagctttggagtcaccgagaactatgtcatcttccttgagcagcctttcaggttggatattctcaagatggcaaccgcatacatccggagaatgagctgggcctcctgcctggctttccacagggaggagaagacttatatccacatcatcgaccaaaggaccaggcagcctgtgcagaccaagttttacacaggcgccatggtggtcttccatcacgtcaacgcctacgaagaggacggctgcatcgtgtttgacgtcattgcctacgaggacaacagcctctaccagctcttctacctggccaacctgaaccaggacttcaaggagaactccaggctcacctcggtccccaccctcaggaggtttgccgtgcccctccacgtggacaagaatgcagaagtgggcacaaatttaatcaaagtggcatctacaacagccacggccctgaaggaagaagatggccaagtctactgccagccggaatttctttatgaaggcttagagcttccacgggtcaattatgctcacaatggaaagcaataccgatatgtctttgctacaggagttcagtggagtccaatcccaaccaagataataaaatatgacattctcacaaagtcatccttaaaatggagagaggacgactgctggccagcggaacccctgtttgtgcccgcgccaggtgccaaggatgaggatgacggagtaatcttatcagccattgtctctactgatccccaaaagctgccttttctgctcattctggatgccaaaagctttacggaattggcccgtgcctctgttgatgtcgatatgcacatggatctccatggattattcattacagacatggactgggacacaaaaaagcaggccgcttctgaggaacagcgggacagggcttccgactgccacggggctcctctgacctgatggtgttggggtttgggtaggggaggggagctcggctgtcagaactccatggatatgtttctttggatggaggggagggcctttgttaccttttgcacttattctttctgtgggtgctttgacaagggcatggcaagagagcttgtcagtatcatttctttcattttattttggctgtaaaaattttgtttgaaagtcaaacatttgaacatcaaatatgtattgattagatccagtccttctaagaaacctcctttcctttaacaaaaagaccttgaccatgaatcagagattgtattcaatgacattatcatcatttttagaacgagccactaacctattagagaagaggcagataattatttatcattgtgccttcctctgtctctttctctttcctttgctccctcccatgtttctggtggactaaattgtgtatctgggagttctcactttctagccaggcctgatgagttaagttacatgaccaggaaggttatgccactttgtggtcattccatgcaagtcatggcgtaatataaaataataaaaactttaaagtctgatcagactttat

SEQ ID NO: 142807 - DNA, 965 bp, Homo sapiens
tgtgcaaaaaaaaatccacttgcaatggtaagaaattgaagtatccttaaaggccatgaagccatatgtccctaaagcctgtgtggagaatgctttattttattcttatttatatacactatattaataataaccaaaatgttctaagattctgccattttacaaccctggaggaagtaatttacaaactcacgctgagttccattctttccttcacctgctctccaataagatgactttctgatagacaaagcttagggtgtaataaacagggaagaaaagaaggtaagactgtacttaaactgatgaagataagattgattccttttcattttccagataaaattgtatttactcatgaatttatacaactttacagataagaacattttaatggataaactctataattaccaagttgcaaatatttagaaaattctatttcacaggttagtgccaaaatgtcttcatagagtaggaataatattccattttaagattattcattattgactttaatagagtaagaaaacattattgtttatcaaagctctttttttatccaattgatggttatctacacatatcacttataaactaaagttatttatgaaaagctagtatgtctttttctcgtatttggaatgaaagtacccacattttacaatgtagtgttgagaatgtggctgccaataaatttagcacaatgcaatttatttaccttaaaaaacaaacaaaaacaaaaataaagaaaaatactgatttcaaatcagactcttaaaaagctggaacattagacctgatattttattatgatttttcccagaataagtttaatttctctttgactttcatagaaacactttccccttatagaaattgcactatctccaatttatttctagtttgagttgaaatgaatattttatcagattaattatgtgtcacatttttggtgggttttc

SEQ ID NO: 142808 - DNA, 461 bp, Homo sapiens
ctgacaagagaaagagatttataaccaaattctgtaattgggacttccagtctttccccaagtagagaattggacttactctatatgctaaaaacccatggttgaaatatgaattagttcttaagtgatttttggcttgcataccatttttgcaaacacaaattgtcattactctgctcatttaataaaagaataatttgtagtataggtatatacctcaatcagtgattttgttgttggaaacagaacagtaaatcacactggccatgatgctaacagcgtgatagattttctgttcttgggacaccaatgtcactgtatctcatagcgaaggattatctgctgtaggagcattctcttgactacttataacatttgctgggtgaaataattctccaggttaaggcctcttctaaacagatgaggtcagcactaactgcatttgccagagaagacatatg

SEQ ID NO: 142809 - DNA, 252 bp, Homo sapiens
aacattttttcatttcaccacatgaaatatcaaaactcacccttgtttccactgagacaactttaatccctctgggaatcgacactccacttcaaatttaaaacaaaaaaaatattatttcagggctccctaaggagaagattagccaatttgcagaggaagagcatggttattttatccttatagtgagaactgagaaaaaccatgagtaaagtatgctattctatggaaccagaaaaaatgactgggccc

SEQ ID NO: 142810 - DNA, 389 bp, Homo sapiens
taaactagtttgagccaatcataacatgtttgaatctcattaatcaagacataaaaggaacgagcctgtttgatccaggaggaaccactcttatctggtttaagtcattcacaactagtttgaaccatccagaactggtttattcccatgaataaatgcagcaacacagagctctagaatctccaccacgataccaaaactacctagaatcatgggcaaaccaggactccaggaacacttaaggtgtgtttatgtcatccacatgccattgtgccaccagcacctggaaccactgggcagcctccccgagccttgaggccactgtcacctagagccctagggacagcatcatggtagaagtccaggaccaggtatttccagcaagttgg

SEQ ID NO: 142811 - DNA, 426 bp, Homo sapiens
agtacgggggcctcgtagaccctggtgtggatggagggttcagcgcaggagggatgtgaatggacttcacatctcagaagaagccctcggtgctgtgtttcaaatagtccatatcagtcaaccattctcatctgggggcaattttgtaacacttccccacccactggcaatgtttggagacatttttggttgtcacacctggggttggggtgctcctggcacctaatggagggaggccagggagataccacccaacatcctacaaaatgtagaacagggcccccaacagagaatttctagattgtgtcagtaattgtgctgacagatctgggtatggcaggagaagccaagggtctagtttagattatgtaaatttgagcagctgttacacccctaggtggagaggtcaatagggcagctggaggc

SEQ ID NO: 142812 - DNA, 1047 bp, Homo sapiens
aggccgtggactgcagctgcactccagtctttaagcccagctgtgctcgggtgtctcactttctacaccccaccctcagcatcagatatactctatctcagaagcaaaaagccatccatgaacaaagacctgggaccaagccgactcataatactagtgggaaacggccccaccagcagcccgcacctgcatcctgctctcccgctgcctcactggacccttgcagttaactgggacttcagcagagcagagcctcatcttacggaggtcaagtgtcccactgctgcagggccttcaacctggctatctggtgatgtaggaataggagaggtatccattggttcagactcttcagttgacgcctccactgtagtttctgtaatgacatctggcctcatagcagcatggataaattctggagttgatacacaggagggacaaatacttccacaggacttctcgaatccctcaagcaggtaggagattccacatgaagcagggcttcagcagcttcgactgtcttatctgtacagtgtacattactgctgtgagcagatgcttccacccccgagatgagcagatccagctggttcatgggtccctcatgcagagacgttgccacgttcatcccggggctggagctgctgcttcacactgacttacaccgtgagcagcggcggcaggggaggaggtggaacccgcggcgagctgctgcttcacactgacttacaccgtgagcagcggcggcaggggaggaggtggaacccgcggccggagacacacgccgtggggtcggtcaacacacactcacgcacttgcacacgctccaaggcccggaaggaagctgaggccggcccgcctcccgccaaagggccgaggaatcccgccacctaacggcaggggcaggggccacagctggcaacgcctactttaattttaaaaataatcactggggcctggagcagcggctctcgcctgtaatcccagcactttgggaggccgaggtgggcagatcacctgaggtcaggagttcgagtccagcctggc

SEQ ID NO: 142813 - DNA, 130 bp, Homo sapiens
actttaacaatgtacactattatattttaccctgaatgacttgtgtggctcttacggaggatcctttaagctaagttgctggccagttcctttccacgttgctgagagctccccgcttcaattttaaaaa

SEQ ID NO: 142814 - DNA, 302 bp, Homo sapiens
ttctaagggacacattaatatccaaatgttctcctactcttgccacccaccacccaactctgagcaataaaagacctccccttataaaacttcaccaactctagtagtcgtttcagctggattttaggcagtactcccttgcctttcgaatactcccaatagtacaaactagctaagcaagtacatttttttcctagtattttatccaaaaacattaatactgcattttttattaaatatttaaattttaaataatcctttaggtgactaacacaagtacttacatattcaaacaagacagg

SEQ ID NO: 142815 - DNA, 525 bp, Homo sapiens
acatcatgcaagccacacataaaatgttaaatgttttagtagccatattaaaaaaataaaaagaaacagggaaaatcaattttaataagatattttatttaacccaataggactgaaatatcatttcaatatagaagttattaatgggaatattttacattatatttttaaatatggagtaagtcttctaaatgaagtatgtattttacactttaaaacacatctcattttgggctagacacatttcatatgctcaataaccacatgtgtttagtagctactatattgaacaatgagaatgattttaaaagagtattaaaaattgagcttaaagctatttacgtcatttaaggaataccttcgaaattacctactttattttagaataagtttaggtttacagaatttgcaaaattagtacagagtataatctgtacccagttttctcttgttaacctcatctattaatatagcacatttgccacaattaacaggccaatattaatatcactgttaactaaactc

SEQ ID NO: 142816 - DNA, 204 bp, Homo sapiens
aaatagccaagcagggaggtgggaaggttcgagaaggaaagtcagaccctctccaagcattacaacattcagccttcccgagagctcacttcatagaggagacactggagcctaaagcactgaataaccttccccgaggctgtgcagcagcgaggggtggagaaggaattcccctctgtgaacggccagcctgcggcctcccca

SEQ ID NO: 142817 - DNA, 494 bp, Homo sapiens
gggagaggtgccctggcggggcagggagcgggactgagcttacaagggcctcgggacacattcttgtcacagcagccactgagggccctgtgcagaaccacggcacatgcagaagccacggcccacggagaggaggtgagccgccaaagcaggacgagaccaatcctggtcgccatactcggtcctgtactctttccatagcaccacgtctgccctcggggcttatgtattggtcaacagacacaggcaaacaaaagtcagaaccatgaggagacggctggaatttctaactgtaaaacatacaggatactcacagaactaccggagggagagagtgtgtaaaaaggaaaggacttggcttggatttaagaggaactcctctacgtgactattttgaatattcaagagccctagttccctgaaatgttaaagttagtaacacgaaagcaaatacctcctaaccttcaaaagtacaaatatagtttatcttgaaa

SEQ ID NO: 142818 - DNA, 381 bp, Homo sapiens
ccatccggcggttgtactccaccggcaggttgtactccaccggcaggttgtactccaccggcaggttgtactccaccggcaggttgtactcccgttgttatggtagcgcacacctgtagtcccagctacttgggaggctgaggcaagagaattgcttgaacccgggaggcagaggttgcagtgagccgatccagcctgggagagagtgagactcggtctcaataaatacataaatgggaagtcatatcatcacgaggtccccacttaccctcatgacctcatctaaccctaataaccttccagaggccccgtctccaagtatatgatcatgttggggaatagggtttcaacacataaacctggggaggccggactcacaca

SEQ ID NO: 142819 - DNA, 543 bp, Homo sapiens
accctcgctgccgcctcctgcaactccttcactacttcatagcgtttttctctgggtcacttatttccgcctggtggctctgatagtgtgatttccaaggtgactatccttctgagtctcagctcatccccagtcagccaagaaagaagaaacagcaaggtttggggaatagcaagagtgcccctaacattgctgccagttccctttggaagccccagtctggagtcccaacacactggccaagacagcaatgtcgaggccgtcctggtcccagctgctctgggactgcctccagctcagctcaaaggaaagccatgagttaggttttatcatcaaagagtccattcccctcctccatccttttgtacaaaattatatttagttctgccaaagagatttctgagttgccataaattctccttgctatcagaacgagataaggaattgaaaaggggttacatggagggcagacttcaaagggggaaaataaaatagtctgaaatcacctctaccctctgaattcctccaggcaccagctttatg

SEQ ID NO: 142820 - DNA, 158 bp, Homo sapiens
gcagagcatttagtatctgcaggtcaatagaacacaattagcattcatgcaatagtagtttcaggaagaaagagaggaagtaagtatttgaaaaaaacgttgaatgagaactttacaaaatttaagaaaattatcatcccacggatattagaaaatcc

SEQ ID NO: 142821 - DNA, 252 bp, Homo sapiens
aattacagggagggaatggctttgcaaaattcagagtgaatcttgctggaaggagggtaggtttcaaaacttcagaaagaaccaggatgactccaaaaggaaagatgctttctgaaagttgcaaaactctcaagaagtgataatcacaaatgagaagagaaaattaacccccaaacccagtatagtttcactgggagtcttttttgagaataatccataaggatttttaaagaactttgtccatccattgat

SEQ ID NO: 142822 - DNA, 546 bp, Homo sapiens
gagatacttatgactgtgattagaaatactgtcaagcaatgtttgagattcaccactaaagccctaaatttgttttatttacttgtgtttaactctctctcactgcaggtttgtggaagcatttttcctagtgcttcaatttcttccatgaaatgggaagcaaggacatgttggatgtttgaagaaacagaaggtatgaaatagtcttctaggagagtgggagagtaaatggattgaggaaacaaaataagatttctggtggcaaaggtacagttgaagtcagtagtcatgaatttaaagtgatatcaggcagcatgtagagctataaaatattgttttcaataggttttgaactctggcagtttcatagatttaaatatttattggaatatagataggaggagacaataactaaagaagtgaaatacatggtatgccaggtggtgacaatggctatggggaaaacagaggatagagattggagatagaaattgacaactctttcaaggagttttgctgtgatgagaagaagggaaatgccggtaa

SEQ ID NO: 142823 - DNA, 460 bp, Homo sapiens
ccccatcccctcctggtggtcataagggtcatctctcatcccaggctctggcgaacactgtgctgagagtccttgcatacagctctcccggtgcccacaggcaggaacacaggcgacagaaagtttccacgtggaactgcagagttcaagagcaagtgtgatttcaattttgatgagattgtacatgacctctaaaagaggttatactggccgggcacggtggctcacgcctgtaatctcaacactttgggagaccgaggtgggtggatcacctgaggtcaggagttcgagaccaacctgggcaacatggtgaaaccccgtttctactaaaaatacaaaaaattagctgggcatggtggtgcgtgcctgtaatctcagctactcgggaggccaaggcacgagaatcgcttgaacctgggaggcagagattgcagtgagctaagattgcaccactgtactc

SEQ ID NO: 142824 - DNA, 269 bp, Homo sapiens
ctgctaatcctaatgtattttcctcctatggttaatagcaacaccatccactcaaatcagaaacctgaaattgatgccctgtacctcttcctcatcatgctcccccaatatccaaaagcctaacaattttacttcattaacatttttcacaactgtcccctcctctccatccctacctcagatcctcttcaattctgagttatacaatttcacaagcctcctgattattctacctgcctccagtctctcctaatgtccttagccgctca

SEQ ID NO: 142825 - DNA, 352 bp, Homo sapiens
ctccggtgatctgaggatccctataggcgcataggttacatacatcagtcaaaagcagcatgttctgttatttgcaacgcatatgtttaaaactgatacactatgtttgtggacagcactgttcactaaggtattttaaaggcaaaagttaaagaaatgtcagggaaaacagtgctaaggttgacaggaaaaggttccacaagctagacttggtaagctctttgctcctaggatggcctagttttgaactcagatcatagtccatgaagggccagcatatcacatcccatctgcaacacaagactgccagagtgtgtacccaaaggacacctaggcgcctataggggtctca

SEQ ID NO: 142826 - DNA, 449 bp, Homo sapiens
gtctgaggggaaggtgcgtagtctctttgtgtcaggaatcttttaaaatataatcagggcctttcaagggctttctagaaggaatctgcattccaatcagatttatagtattgaaatattgtgccagttcaaatgcatttttaatttttggctcctaaatttaacagaaaattattgttctttttctgttgtattttttctgttttctgttgtaaatctattataaggaattctttcatactaagaaaaatgaaaacattgggttcaacctgttgggtattatgctcactggctggggtgataggactgttgggaccccaagcctcagtgtcactccatataccaaacctgcatgtgtaccctttatagttaaagttgaaattaattttttaaattaggtttaaatctctttagagataagagaatactatgttataggaagaaatagg

SEQ ID NO: 142827 - DNA, 364 bp, Homo sapiens
atgacagctctcagagtcgtggttggaatgaaatgagaaaatgtgtgtggagcccttagcgctcaaggaactggcgctgaagtactcaatgaatggtagctgtgctgtttactaagaacttaataacaaagctgaaaaggatgtgcagatcgcatgagttttggtgggatttcaaagtcctgttttctcagtatgatagagaagtatgccctgttttagtcccacgtcttcctttaatggatccctcattagatgctgcccacgtggaaggatgtgtggatgctgcatgtgatgtgggttagcttgagctagattcttctgtcctgtcggactagggttctcttgggctcattgtaagtgattt

SEQ ID NO: 142828 - DNA, 412 bp, Homo sapiens
aagaaacacagtctcgctctgtcacccaggctagagtgcagtggtacattcatagctcactgtaacttcaaactcctggactcaagcaatcctcctatctctacctcccaagtagctgggatcgcttgagcttgggaggtcaagactgtagtgagcgctgattatgccactgcactccagcccaggtgacagagtgagaccctgtcttaaaacaaaatgaaatttaaacaataaaataccatcgtgtcaaaagtagtttttctaaactccatatttcataaaaagccagagcatgcaacggcacctgttctagacatcaaaaggacatggacaatgcaagtcccaccgcccagtgctcatcacactcatctggagaaccctgaaagtccctgccaggaccagcccaagcaca

SEQ ID NO: 142829 - DNA, 238 bp, Homo sapiens
ttcctatgtttccttcctctctcccaaagcctatcattttctgcaacataatgcgggtaagggaggacatgttaggaaagctggcagagagttctggaggctcccttacactcctgcctactctaatcttagccatctaccacctccaagtactgcctcccaagtactgcccactctgtacaaaccaggccaattttcttttccttctcctctccccttgaggtctgctgtcccctac

SEQ ID NO: 142830 - DNA, 511 bp, Homo sapiens
tgtttgctagggtggtaagcatctttctgatcgcaccagtgaccagatgaagttggccttggctttctagtccctggacaccctcctccacctcagggggcgcttctacctgcccgctcctatctaaccctgcgttctggcacctctcaggccctggctgtcacctaccacatctgcaccccactgggcctgggctgaggaggtgtgctccttgctgcttccaagccgttccccttcctcctcaataaaaaccgttcacaaccaatcttgtgtcaggtatcactcaccagccctagttcctgatgccatttacaaatctttctcattctctggcaatttatttgacttcctatgagctggggaccttgttcttctcacaagaacaagtcactgccatagccacaccttacacctcagaagagagatgccagccctgggaaccttccacaagtacctactctgcctagcactgcccagctcgccatcctgagcgcctcaactccaccagtcc

SEQ ID NO: 142831 - DNA, 377 bp, Homo sapiens
tcctccccacccatctgacaggtgaaatggcattgcaacttaaggtgctttctttgagttggttagactgaaaaacctgtcgggatttcaggccattcgtatttgtcttactgttacctgttctgattttcctgctaggttgcttgtcttgtagaatttttgggaacttttcatacactacagctttaacacaaagtgattatgtcaagtaaccctctctcctgtttcaatgactgaacaaggaagtctatctccacttcatccacttattgataaacagaatctattaaacaccaccgcctacatagtaccatgtgactggtgaggcaacctctgccctggacgtttcccgctgtgccctaaatcccacaacgaag

SEQ ID NO: 142832 - DNA, 379 bp, Homo sapiens
ccagggcctttgcacacactggtccttctgtctggaatgctttcccccaacacatatacaaccttttcatttgcatgactttatttatcccttattaatcagtttggcctttcagaagtcatcctgatccactcctagggtgggtcaggggctccctcagtgctcccacgctgccctgtgattctccaccacaatctcttttattctttcttcttttttttaaagacagggtcttgttctgtcacccaggctgcagtggcacaatcatagctcactgcagcatccaactcctggactcaagcaatcctcccacctcagcttcctgagtacctgggacacactaccacgcccaactaatgtttttgtttttatttttatt

SEQ ID NO: 142833 - DNA, 465 bp, Homo sapiens
tacgcgttacgaacattgaggtttaagtgggtttgagccacgtgttcatcttgggcaacaacatcagtggctgaatgtctgttggtgactccttaggctttaaatattttgtatcccatgttggggtgggggcgtccacagcttccattaccctttgtcctctcctggagccttacctcttcccgctgggttgctgtgttggtggtctccattgacatctgtcaacattttgttttcttttcttgggtttttatttttatatttcctcaatagaacatatgttctgcaggacgcagctacatccagccatgattccccacggccaaaacaatgcctggcacatagtagttgctcactaaatgttggttgaaggaattgtaacctaactcgtgatctttggggctggaggttgctgagttatgctgtgaaaagtaaacattttccaaaaattgaggatcaaggtag

SEQ ID NO: 142834 - DNA, 371 bp, Homo sapiens
ggccaaaaataagcaagatacccactcttgcctaatatactcagtgctcaatgctcaccttgaaattacatttccctcattgttgatgaaattgcagaggagttatcaaaactgacccaagagaagtttggccattaagcaaaatggttaacaacaagagcatgttgtaccatgcacctgtttttaaagccatctgaacacaactcttaattgtattgtccaaggttaagttggagtttcgtgaagaggatgataattaagtactacatgcctcttataagtaatcgctctattgactaaacctcaataaatatacattatttatttactagtgatatcaatagttctttacatctcagcagccaaactcc

SEQ ID NO: 142835 - DNA, 238 bp, Homo sapiens
ctggtgtttgattacacgcacacacatacacacacacatacacacgtgtcatttttgttgtgggtctagcagactttaccaaaggactgaaggttggaagaaaaggcaaagaagtgtggcatttacttcaagcaatcaagcaacttaaaaatttcaaatttattatgaaatacttttgttaataaaggacctttggatagtctactctgttacttggccatcctcttcctctccttcc

SEQ ID NO: 142836 - DNA, 235 bp, Homo sapiens
agaaaacagcaacactctctgaataatgtcttggtctgtcagcaacgctagctgtctgtttcgctcttgtcaagggtcttgcaggtgggatgccacggtcagtccttccagatagaaacacgaagcctacggcccttgctctaagaagcttgaattctgacatcttaagcattggactcaacccagtcccaggattaagccctccaggactgtctgcttatctttccagcttcag

SEQ ID NO: 142837 - DNA, 466 bp, Homo sapiens
ccaggttgggagacagcaaatttgccaggaagagagccctacagtgttacctaattcaggtgtcctctctaattcttaggcagttggcctttcagtcatgagggaggatctctcagagtgacctacagctccttctgtctcctgcctggatgtcagatgttagagacgcactaaaggcttgctacttagagtgcagcagcagaccagtttgctgttggaataacctggtagctggctagaagtacagaatctcaggctgcacctcagacctcctgaatcaaacttgcagtttcacaagatttgtatggacattagagtttgagaaacacttgtctaaggcttggagatacagccatgagtggaagctgtagcttctggggattcagggcaaagaatgacatgaatttttgtaggtaaattgtgaccaatggaccaagtgtatcgttgtatcagagattactcttca

SEQ ID NO: 142838 - DNA, 293 bp, Homo sapiens
ggctctcaccgtccatttagactaaagggatcagtattttgggcacacccataaccattcatagtaccttagttggggagctctgccttatgtcctggtatttcttaagattcctttcttggctctcttcccactgcacatgcttctttgacaatctcatttacttccatggctcagtcacatctgatatccacgtccaatcaatcatgcagcccaggtaatttacctcctcaaaagcttttaatttgtcatttgtcttcatgtttctaccttagtttaagttaccatcattt

SEQ ID NO: 142839 - DNA, 300 bp, Homo sapiens
gacatggtattctaatggttatgtattgctttacccacagtggagctttaccttacaaagcaaaacagctgtagctgaatgatgaggtcaccgtcataaggccgcatctatgtgaaatggtataccctgtgccactctcaagcaccttcctgtgagccccttcccatgagattaggccttttataaaaatgcagacacctggcttcaggacttaggagagctggcccttaatgagagggaaccctattttcttgtcagttaactgcatgtgtaacaatgcgcatttgtctggtaggtgaa

SEQ ID NO: 142840 - DNA, 199 bp, Homo sapiens
acagaaaaaggaaataattaacattaaccaagcccaggtaacagacagagaccttttctctataaatattttttaaaaattggctgggcatggtagatgtgcctgtggtccagctattcaggaggctgagtgggaggatcactggatcaccaaaggtggaggctgcaatgagccataatcgtgccactgtcctccagcc

SEQ ID NO: 142841 - DNA, 486 bp, Homo sapiens
tgcaagaccccattgcaatcatccttatacctatcatgacagttttgaatgaagtctgccttactgtgctttaacaggtatcattgaattatttttctttaacacatcttagcagtaaaattatcttcaaaattttcttagaatgtatgatcatcatctcttatagctgtatcctgatttccactttacaatagagtgctcatattatcatctcatttgtgcctttaacaaaccttttggggtaacaattgttatttccatgtgatagctggagaaactgagtttgaatgagttcctcaggggaacacagctagaaagtagtattgtggggctggcacacagtggctcatgcttgcaatcccagccctttgggggccgagtggggaagactgcttgaggccatgagttcaatactgacctgggcaacatagtgagacccccatctctacaaaaaaaaattctaaaaataaattagtcagatgtggt

SEQ ID NO: 142842 - DNA, 339 bp, Homo sapiens
gggctcctgggaagggtagagcggtttggcttcaccagcgcgctaactaaaggcccgcaggggagagtaaattaagcgctaattaggaggtaatggagggggagacgcagaaggccctcttactcttggccctcagggaaaaggagttttcctctcactgcctgtagaataggaaggtggctggcaagaaaagtccaaagggaagagaaagtagggggttgagacatctggatcagagggaggaggggctgaaactcctgggttttggtccgcagggcactgggggacgcagactccccagctggacccagggggggggcagggcccgggtgcgctggc

SEQ ID NO: 142843 - DNA, 1541 bp, Homo sapiens
gttgaccagactggtcttgactcctgaccacgtgatttgcccttcttggtctcccaaagtgctaggattacaggcgtgagccaccacacccggctggtgattagaaaattttctaattggtacttggaaagtttcagacactaggaagtaaatgttaagaaggtgaaatacaatgttgtgttaggaggggattaggaagaccgttttgtcattgtggtcaggaggagatgacatttgagttgaaaccttaatgataaccaggtggacatgtgaaaatgtatccacgtgtaaggacgagccacaacacaggaactgaaagaccaaatgacaggggcttggtgagcaagggggagcacgaaggaaggaaaattcaaagaggttagaccctaggtcatgtcacgatcttaaaggccatgctaacagtttggaattgtacaataagaatgatgggaaagcattggagagtttgaaggtgagtagtggcagaatcccacctgtttctgacagaagtccccctggcactggatgaggaatagattataggggctgtgaatgagaacagagattattaataaggaaacagtgattcccttccacaaagtagattctgttaattggtagagagtattcatcagaacacgtagcagggttgggaaaggaggcaaaataagtagaaataaggagtttatggtctagttgagatgaaatattttcagaacattgcaaatgagaaagataatgtcatgaagctaaaccaagtgacatatttatatactttaaaggttagcctgaaaccaaagccaattagactccatgtgtataatgaggactttaatatcacatgctttgaaatattacgtatttttcataacctgtccttcagaagcaatcacatggtatcattcgatcaaatttaaagtgatgtccttggatttttgcagtaggaaactttgacattttagtggagatgtttaaaattattatcatttttctggatctcatgttttaggaatgtacagtgtaaaatatcttgtcatagaagtcacattaaagtgatgttaatgtgaaatttaaatctggaaaagcccccaagtggtttatctgtacttgaagttacttgtttttctgttcttttcctctccaatacatgcaggaaaatacatacttttttgacattcatatagattgttcttattacaatcatccattcatccgtttgcccaacaaacatttattgaccacctacattgtatcttttttgtttttctttaaataacatactactattagttgaaagtatgtgagcatttgtctacgggagtgttttgactttaccagagtaccttttcaatttctgtctttgttgtatcttcattttactgttaattctgcaggggttctcgtttatctttgaattgtaattcttattgaaagtaaaataaaaaaattatgcataagtatataatttgaccacttttccaaatttctataatatgggcttttatagctttttaaaaaagcaggaatagtttctttttaaa

SEQ ID NO: 142844 - DNA, 444 bp, Homo sapiens
ttttttttttttgtagagacagggtttcaccgcattgcccaggttggtcttgaactcctggcttcaagtgatcctcctgtcttggcctcccgagtgctgggattacaggcgtgatccaccacacctggcccagaatttttcttataactgaatacttcctatggattactttattttccttgaattaacaccagaatgtattttatcccccttctgtcgtcttagatatacttgcatgtttggtttttttgttttttgtttttttgttttttttccctctcctgcagttccgtttcctttttctttcacctgttttcatttccctataaatccctgcaccccattccagctattgcataggattcttctagttatttcagtctgtttccttggtgttcatggtggtgttcaaactgagatttgtgttccatcctgggtaccata

SEQ ID NO: 142845 - DNA, 300 bp, Homo sapiens
acattagtagaccttaaacgacgatatagtttccaaatccaaacaaagggtaaacgctaacattctaggaccataccatttgtatctcctatggtacacaagactgaatttttttttccttatctcacctcaagtacccctggcaatctttctttcttttctttttttttttttttttggaaaaaaagcttaactccttcacccaggtgggggggaaagggggaaatttaagttaattgaaacctgcgtttctgggaataaagaaattttcttgcctaagcctccttagaagttggaata

SEQ ID NO: 142846 - DNA, 273 bp, Homo sapiens
taatgccaaaacatggatgaacctaggaaacattatgctaaatgaaataagccagacacaaaaggataaacatggtgattccaattacatgaaatctctagaataggcaactttatagagttagagagtagattagaaggttccagggactaagggaaggggaatggggagttattgcttagtgggtacagtttctgtttggagtgatgaaaatgtttttaaaatagaggtgatgaaggccggatgcagtagcttatgcctataatcccagca

SEQ ID NO: 142847 - DNA, 311 bp, Homo sapiens
gggtgcaggctttggtgaaagcttgaatctggtgtactttaattcccttctaattataacatcccagtagtctgcgtccctttacaggacaaacacgagttaggggacactgagaaaggaaccgaggctctctggggtggctactgctgagtgaggcacatgtggaatgaatggcctggactagattactgggtcttaaacgttctagatgttataaatcatacgtacttttaaaaattattaaatcaatagagtggccaactttttattttttgctgtgtaagaacttgaatgcatacatgctcgtgcaa

SEQ ID NO: 142848 - DNA, 1674 bp, Homo sapiens
cacacacacacacacatatatacacacacacacacatacacacacatatatacacacacacacacatatatacacacacacacagaaaccctatatatatatatctcagagctgagaaaggtatgtgtatatgtacatatctgtctcagctccgtccaccaagagggactagaagtgacacccagtggttatgagcacagctagcaccaagatgctgatttccaaaccctccactaaaaatggaattgaattgacagtccagaaataagcccacacatctacagtcaactgattttcaacaagggtgccaagactatgggagagaatagtcttcaacaactggcgaatggacaagtggatatccacgtgcaaaataatgaagttggactgagatcccacacgataaatgaatattaactccaaacgtattgaagacttaaattcaagagcttaaacaataaaaactttataagaaaacagtagtaaatctttacgatcttggtttttacaatggattcttagatatgacaccaaagtacaagcaacaaataaaaaatagataaattggaatttatggaagttagaaaattttgtgcatccaaagacatgatcaaaaagtgaaaactcaggacaatggcagaaaatatttgcaaatcctatgtataagagtctagtatgcaaaatatataaagaacactgaaaacaacaaaaaccaaacagcacaattcaaaaatgggcaaaggacctaaatagaaattttccaaagaagacctacaaattgcgaagaagcacatgaaaagatgcttgacgttactagtcaccagagaaataaaaatcatgagatatgactttatactaaccagaataaaaatgtaagagaataacaagtgttggtgaggctgtggagaaattggaactcttgtacactacaggtaggaatataaaatggtgtagacaatttggaaaactggctgatggctcctccaaaacttaaacacagaattaccataagacctagcaagggcatttctaggtgtatatcccacagaactgaagacagaaatttaaacaaaaactagacaacccaaatgtctatcaaccaatgaatgggtaaacaaaatgcagtctgttcttcaatggaatattatttggccataaaaaggaatgaggggtaggagggagcagggatagagggttgatggctaagagggatgaggtttctttttgaggtgatgaaaatattctaagttgactgcagtgatggttgtacagctctatgactatactaaaagtcattaaattgttcactttaaatgggtgaattgtgtataaattatgtctccataaagctgtttatttttttaaaagacacacaaaagaagaaactttcctgcagctccagctgaccttgcaggctggcctcttccgctctgacctgtgctccctaagctccctgcgaaggagataaaatgagctcctggtctgcaacagctattggttattgtaatgtctgcttttgtttaaaaagaaaaaaagacccaactccttatacagtttgaattgtatatatttggggatctctgagtttcctgtatctggatgtctaaatctcttactagacttaggaagttttcagcaagatgactggatgatcatgtttcagcctctgtgaga

SEQ ID NO: 142849 - DNA, 765 bp, Homo sapiens
ctctaaaatatattggcattgagctcatttgttaggtttgcccaccttattgaacagatttattttccttatacatacttgtgttgtccttggttacgtgtgtccccaaatgtaaataccaaatttttataaatcaaaaattttttagtgtgtaagagattttatgtaattttaagggccttttcagttcatccttttgcaaaaccatcaccacttaattatacttttgcatcagtctagaagactgcatattggaaagcagtgtaaatctataatgatgtatattctggtgagctgaatagggcattatgcatgtcctacaggtctccgccacctctcatgcccatcatcttccttttgtaggtgtaattcataacatatgcctttctgctgtctttaggtataatcagcaacagcagtcattctttgagtgactaatgtatacttggggttggggttgaaattccttaagccaaatgagttttagcttactgttttgaagtgccattttgtattgttaacaagtgtcatgaagggaaggaactaaaatcaaactgacagagtgtcaaggcaacaaaataacataaacaaaataataacattgtacaacagtctagttcttttatcctttcatatagagcctattttttatatacttttatatttctctactggaccaaattcatgttattaacatcagactttaattgtgggatacttaatgaatatagaactctaatataaagacttacctctagctgaatt

SEQ ID NO: 142850 - DNA, 334 bp, Homo sapiens
ccatgcacagttcggtggcattaagcacattcacattgttgtacaaccatcaacacgacgcatttctagaagtttcatctcttcaaactgaaactttatatccatcaaacaattccccatttccccttcccctgaaagctatcattctattttctgtctcttgaattttactactttaagcaccttaaaagtgaaattgtcggccgggcatggtggctcatgcctgtaatcccagcactctgagaagccgaggcgggtggatcatgaggtcaggagttcgagaccagcccagccaatacggcgaaaccccgtctctacaaaaaatacaaaaatt

SEQ ID NO: 142851 - DNA, 723 bp, Homo sapiens
ggaatttttttacttaaatggtttgattgatacaatgagaggttacagggatctaaggaagtctaggcagtaatctgtcgaagctgctggagaggatgacgaaatggggcgaggaggcaagatgcgggggcctttccatggcaagaaaatactgaatgcactgccataatgtaaatatgagagttacacagacaaagcaaggcaaataccaaagagaatcaggaaagaatgccctgaagatctgcattaaaactgttctctgaaattaagcttgtcttgtgaggattcactgaaaatgagagtcaaccactaaggagatttgtatgaaaagaacccagcgaattagagaaaagatagatgctggcagctaagacaggagagggacatgtgagttgggccagggtacagaaaatgcagtgtggcaaagggcagagtgggaaaggtgggagggagctgccaggtctcaaccacctgggggagaccatgacaaagtaagagacacttatgaggtatttccagaaagctttgttagaataataattaaagaaaagggtatgtcactagggcaaaagattagaaagaaggcaaaagagatggatctgtacaggctaactgcagcagtctatgcaggtctggactgaactgagaagcaatgggtgcagcatagtgtgtaggacatcgaggaaagctgggcagtgagtgccaaaataagcaatacacacc

SEQ ID NO: 142852 - DNA, 320 bp, Homo sapiens
gcagtatggtgggtaagaaaacaaaatattttgatgactaaataaacagtcaaatagagatctccactcagtttctaaaatgcaagatttattacttgcttcaatataaatttatgaggcatcatcttagactcttagagttacatagaaaacaacatagtttctacctttgaggtttataatcaatgtaggtgggaatgcatactcataagagattatttaacaaagtaactgaaacactgaggctgtttcacatttcttgaccactttttttcctgtaaaacaagtcacttcattcattcattcattctatggttgtc

SEQ ID NO: 142853 - DNA, 463 bp, Homo sapiens
aatgaagctgaccttcatatattccttactttaagaaatcaaattgccaactattttcaaaaatactctatattttggaatctagttgagtttaaaaccccacaatctgatggaccaaccagtggtcattcagattgggaccagactcccagggcaattatttgtctgggatatgcctaatcaggcatgctttagaataggttcaaacctttaaagccaatatttaactagaccaatttcccagaacaaatagtaaaaggtaaaggaaatagatgctttcttcttgaccttatgttctattttaatttattgtccgatgtgttcacattaacctcattgcagagaaagctgtatttattggcatcaatttcactgactgcctgccttctccattaatacaatcttcttgagtgagtgaaacatgattttcttttgttctttttttatactagttgtcattatg

SEQ ID NO: 142854 - DNA, 285 bp, Homo sapiens
ggaaaatagaaactaaagagggctacaactagaactgtttggcagtttacataagatgacagatatgaacatgcaaatggcaaagttctctataaatgtgaatacagatgattcactgtagacaccccccaaaccagataggctggaatctgctggattcgggaccaggaaaatggcttcaagacttaggggaccctaccggcctttcagtgtcaaattaggaaagcccaattaatagctgctgataaatttctttagggatgaatatcagaattattgaattcc

SEQ ID NO: 142855 - DNA, 310 bp, Homo sapiens
cttccctggtgatctatgccatttttcccagtggaggtgttgtagctgacaaaattcagttctcagtcgagatgtgctttgacaatcaggtttcccttggcttctccccctcccagcagcttccaggagcagaagtggagctgcagctgcaggcagctcccggatccctgtgtgcgctccgggcggtggatgagagtgtcttactgcttaggccagacagagagctgagcaaccgctctgtctatgggatgtttccattctggtatggtcactacccctatcaagtggctgagtatgatcagtgtccagt

SEQ ID NO: 142856 - DNA, 957 bp, Homo sapiens
agctatatccagcctggagaagtttccagctgttgtgttgaaaaaatacactaatattatggttataaaattaaactgcacttggtggtgggctggaggctaagctttcagagggtcccttgcctgggttcaggatcttgttggcccttttggcccccaaatgtcgtcttgtcactgtacctagaggggttctgagacattatcagatttcttggggatcaacataggctaaacaagctcatggacattggggttactcattcacaatgagaaatagaaccaggctgtaaggcttggccattcagggtttctcccccatctgaaagagtgagtctgtggggaagacaggctagccagaatgtcactcatgagcaggtggaattggctgggtgacttcagtcaattggtcaatcaagctttgatagccacctctgtcatcacaccaactcttctcaggggcagtccatgacactagaagacccttttctgttcacagtggctaattaagttaagcttgagcattgcttgcgtgttgattgtttacgtcacatgtttacacaatcatgtttttctaaaaccccctcaccttgatggacttgggtttgtaaaatttcttaggcatccattttccagccatctagggtgggctgaatctagagatgcttattttgtttgtgcatttgaattttccataatttcattgtgggagggcagcctaaagtcctgatgttgccttctccatccactgaccaccccaaggtactttgcataatgcagaaaaggccagtgtaatgggagttgggactgctgtgtcctgggctctctgagtggtcctgagcaggtcatgtcccttctagactttaatccttcctcagttggcctctgatgtccccttttccttcctgaaagctacacgcccttgctggggagaggctggcctctccactactgggatca

SEQ ID NO: 142857 - DNA, 597 bp, Homo sapiens
catggtggcacgctcctgtgataccagctactcaggaggctgaggcaggtgaatcagttaaacccaggaggcagtggctgcagtgagctgagatcaggccactgcactccagcctgggcaacaaagcaagaccctgtctcaaaaaacaaaaaccacaaaaaaccaagtactaggttctcaaccttaaatacggtaattaatcattttagagaatggtgaagtcatgaacttctgatccagcactaatgaagagaaatataataagtcacaagtgcaagccacatatgtgattaaaaatttactgagctgggtgtggtggctcacgcctgtaatcccagcactttgggaggctgaggcgggcggatcacgaggtcaagagattcagaccatcctagccaacatggtgaaaccccctctctactgaaaatacaaacgtcagctgtgcatggtagcatgtgcctgtagtcccagctactcgtgaggctgaagcaggagaatccgctgaacccaggagacggaggtcacagtgagctgagatcatgccactgcactccagcctggtgacagagtgagactccatctcaaaaaaaaaaaaaa

SEQ ID NO: 142858 - DNA, 357 bp, Homo sapiens
ccgcgctcgcctgagttctcgccgaaggccagggcggctctgcggcctggcgccggttagttagtgtggtgcaaaagccggaaggagacacatttggtcctggcctcccggcagtcaccgtgccaaggacgaatggactatcgcttgatttggagtacacttcctcctctttaaagattacagatgagggggatctcgcgttctggggtgccctaaagccctcttttggcagggcgcagtggctcacgcctgtaatccctacactttgggaagccgaggagggaggattgcttgagcccaggaattcaagacaagcctgggcaacatagggagcctacctctctctcttaaaaaaaa

SEQ ID NO: 142859 - DNA, 557 bp, Homo sapiens
gactagttctgatcgcgagcccgccctttttttttttcaagatacagatgctggtgactcaactatttcttgaaaaggaaagaggcctggaagcttgggagagggggccaaactttctctggtcatcttcccactgttgccagcaatggtgagccggaaattgaaagaatgacacaaggttgcctgtacagacccacacaccctcccaggaaattggggaagctgggcatccctaacagtccatttaatggaggtggaaaagaggctgtggcttgagcttacaatgccctcacccagtcttcagatgaactcacagctcccaccctaaaatgagggggaaacattaaaatttagagtgggtcttgcctgcctgactttcctctgccaagataagctcaataaggcctgttcacagatgatgcatggctggtataatgggaccaaatgctgcccttgattctactcagaagtagaaagtgggtgagtaccaaacacaggccagcggcgcaaaagggcggcggcgatgaccttctgccggctgctgaaccggtgtggcg

SEQ ID NO: 142860 - DNA, 169 bp, Homo sapiens
tcattaaaaatattatagcctgtgtttgattgtgatgaagttcttacagaagccagtattttggagaaccaagtggctgttacatttgaccattactgtagcattggtgaccataaagactgtgaggtagggtagcttatagaaataagtggtgcctgtaatcccagca

SEQ ID NO: 142861 - DNA, 252 bp, Homo sapiens
tgtgaccctcctgaagaaagcaagggcttcccttgtctatctactacttctttttctatttttattttttataatttcaaatttaattttagattcaaggggcacatgtgcaggtttgttacctgggtatattgcatgatgctgaagtttagggtgcaaatgatcctgtcactcaggtactgaacgtagtacctgatagattttcaactcttgcccactcccttcctccccactctagtagtccccagtttc

SEQ ID NO: 142862 - DNA, 225 bp, Homo sapiens
cttgtgtttaaggcaatgctggagaccatgttggtttgtctgattccagcctgttacagtctgagaggccacactgccgccccacagtggtgtccctacagccccccgggtgtctagtgctgaagccctacttgggtagcatctcatgccctgtggccacggccaggaggcctggtgcctcccccttggctagtattgagcagcatttgggtctttgagatgaaa

SEQ ID NO: 142863 - DNA, 468 bp, Homo sapiens
caggggactagttcaggcattgtggttggcacaaaggtctctggtctcaaagtttataatcccattggcaaactgaaacatagtccccagaatatgaaacagtgacactggacactgtacaattaaaaatcaaatgagtgaggacttctgcttccagccaacaaacaataataacaaggaccacatttacccttccacctaaaacaacagaaaccaaaccaacactggtttttaagacaatggatgtcaagcaacgaaaaaatgagaggtggaaaacacatgtgctgagccctatgcttgctcctgctcactgcccgaagagtttccaggatacagcacaaggaagatgtgttaagtttgccagagctgctgtaacaaagtaccacacactgaatggcttaaatgtcagaaatttattgaccacagttctgcaggccagaagtctgaaatcaaaatatcagcagcatt

SEQ ID NO: 142864 - DNA, 413 bp, Homo sapiens
gcgtctctaccaagcgcttatccagaatctgcttcaagtgcacttcccaagacagccctctccacactaggaaacagcctttcagagagaacatttccatttcacatctgcccattggttctttgttcatcctcagggctccacagagcaatttcttttccagatacagtgcctcagacatttgaaaacagccactccatgcccctcagagataagcaggtatagttacttcaacttttcttcctgagacatcgtttccctacctaatgatcaaggggtttggtgactacgtgagtcactcaggaaccagctgcattcacccaagccccgtgagtgttctgcagaaggcagggagagagggcactgatttcatgtttggggtgggtggtgcaggaaagggggattctggggct

SEQ ID NO: 142865 - DNA, 420 bp, Homo sapiens
gacacattaccttttctatatttagatacacaaatgccattgtgttacaattgcctacagtattcagtacagtcacatgctgtacaggtttgtagcctaggggtgataggctatattatatagtctaggtgtatactaggctataccacctaggtttgtgtacgtatactctatgatgtttgcacaataacagaattgtctaacgatccatttcccagaacatatcatcattaagcaatgcaaaactatattgtcattttctgaaaaactgtgggattgaaatggataactccttaagcttactttcaggcctgtatatgtccttaatattgattggctgaatgcctacaacaagaatagcaaataatatttactgatctgttaagacgtgccaggcataggatctaattgtttttacat

SEQ ID NO: 142866 - DNA, 406 bp, Homo sapiens
attcccactagaggagtggagactcctctgaaaagaggacaagatcaggtatcagatagactggagttggaatcctgactttcctacttggatgtgtcctcttggggaagttccttgcccatctgtagaaggggtgtagcagaggtaccactcctcccaggatggctggggggactaagtgaaatgatggatatgaggcccttggcttggggcctggcacagagtaagggtaaacaaatgcgagtggtttcctgctgcaccaggatgtgggtcaggtcttctccctgctgagtgctgagccatcaatggtacccagctatcccagggctatctgaagcaatgcaggagccagctggtcccctagaacctgccctgggcacaggcgaagcctcctcctcctgggatc

SEQ ID NO: 142867 - DNA, 154 bp, Homo sapiens
gctgcagttgacctggcaatcagctgtacaccccaggctgtttctcatggacagatgaatggatggatgctcaaccagctctccgtgaccctgaacttgtataattgctttgttggaacctgaatgttgtcttttttcatttgtcctcattaaa

SEQ ID NO: 142868 - DNA, 213 bp, Homo sapiens
acttcctccccttcctcagtttctcctccccggggcccattcacaggcacgcactgtggagatgcccacaccacagccatagtcacacacttagtcactcccgctcccggcacaaacacacacagccgtagcccacactcctgacaccagagggttcctccccgtctcctgctgcccacccagcacctccacccagaagtctcaagccttttg

SEQ ID NO: 142869 - DNA, 97 bp, Homo sapiens
cccagctggaacgccttccacataaaagggatagctcccctaaaaggtatatattttatgtctttttttttaactttttttttttaagatgggattt

SEQ ID NO: 142870 - DNA, 420 bp, Homo sapiens
aaggcaattaatgtttactgaacatgtgcctatgggtttagagtatctcagttgaatctccacaagaatcccatccagtgggtacttaaatccacattttgcaaatatgaagacgggaccagaggggctgagtaatgtgccctgttccaaaagcaggaagcagagtagagaatgtgtgtggcgggcccctcaaattctacatgctctgaactaaactcagactctcccctttgcaagtctctgaatttgacaccattctctgttagctcagacctgcgggctggtctcccttagctctccctaccctcatccctgctgatctggctcttcctggagtgtagaagtcaagggctcaggctccagagtcagagagaaccaggttggactcctggctcctccatcaccagccatgtatccccc

SEQ ID NO: 142871 - DNA, 230 bp, Homo sapiens
cagagaggaaggacaagcgtgaggaataggaaaatttcacctgtaggtgggatggaaaaagcttggaataattggccgggcatggtggctcacgcctgtaatcccagcactttgggaggctgaggtgggcggatcacctaaggtcaggagttcaagaccagtctggccaacatggtgaaacccccatctctaataaaaataaaaaaattagctgggcatggtggcatgtg

SEQ ID NO: 142872 - DNA, 262 bp, Homo sapiens
aactcctgggctaagcgatcctcccacctcaccctcccatgtagctgggactacaggcacacaccaccaaacctggctaatttttgtattttttgtagagatggagttttaccatgttgtccaggctgatctggaattcctgggctcaagcgatccacccacttgggcctcccaaacactcacaaagtgtttgggattatgggcctgagccactgcgcctggccctaaataattcttaaatccatcctctcctctctatccc

SEQ ID NO: 142873 - DNA, 708 bp, Homo sapiens
ctgaacttagaagtttgttctttaaaatacaataaagttatatggagctatactttaggactgttaatcttgtagcctgtgtgtaggagtggagagggaccgcagaaaaattaatcataaataacatttcattcatccaaccaacaaatatatattgacactgtgcgtcaggagttggtctaggtgctgggaatataagaggccttccttattctctggactctcattcttttgggagacatacaataaataacagtagagtgctcaaggaaggcctctgaaagcatgacatttaaggtgaaacctgaatgacaggagaggtctgaggggaaaacatactgaagatacagcaagtgtgaagcagtcttgacttactgaagaaagaagggaagaggtattttagaattcttgtattatttattctattggaatatgtatttaagggctgtactgacatactggtgaaggatgagataatgtattttttagtaattaatttcccttggttactactcagttgtcttaataccttgagtcattttgccagataacaagatcttatataaagctattatattttatatatataaaaaatatgtaataattcattgatggccttagaataatttttttttctgggcatccagtgtcttaggcagctgaaactctctaggaccattgtatcattgggaagggaggttaatatat

SEQ ID NO: 142874 - DNA, 352 bp, Homo sapiens
ttcaccagggaccgtggtaccaccatcaccttggtgggtttgatgcaacatgaggaggtggatgatggaacaggcgcccctagattgggtcctctgctatgggggaggggtcattaaaagatctgctttaggtgaatcactctaggctggggcagggtcccagcagaatgtgatttctacttctaaaggtacccagaggtaccaatttcactctgaaaggagccagttcttgctctgctccaatttgctctttagtcttctgggttgagacaaatatgttcaacagagcccccttgtggagagagacaatgtacaactgtctatcaaaggccctgagaaggcctgtagcaaa

SEQ ID NO: 142875 - DNA, 974 bp, Homo sapiens
  misc_feature (730)..(730): n is a, c, g, or t
gctgcgctcccgctccagctaggactctctctgccgcctcctcctcctcctccgacctcagtcctcaccaccctcctcccgctcctcaaaagcacccccgagtccccaccccctcacgccgcacccgcgggaacgaggccttgggaattcaggggagtggctgtgggggcgcgtcgcggctcccagctcggccagcccctctttcaagacatggtctgatccccattgtaaaagctgcgccccgaagaggaggagagagtcgtgctccctgcctggggctgcagggagctctccgtgctgaagctcttgcattattttagggtggggcgaagagggccctggattttggggagtgggggtgggtggggaggaggacccgaggggggcaaggactctgtgggggagtcggtgagagactatggggaaggaccaggagctgctggaagctgctcgcactggaaatgtggctctggtggagaaactcctgtctggcaggaaaggagggatcctgggcggtggatccggacccctgcccctgtctaatctgctaagcatctggcgaggccccaatgtgaactgcacagacagttcgggtaacactgctttacaccacgcagccttaaatggacactcaggacatcagtctccaacctacttcagtatgaggcatcaacaaatgtagcagacaacaaagggtatcttcctattcacctggctgcctggacaggcnatgtggcaacgcgacgctctagtcagcagaacatcaagtccgggccatgaccagccaatgaacataactgcgcgacaggggcactcaatggacgccacaacggcgccaaaaatccacgacgacatcacacacggcacactcgaccgagcccacgcgcaatggacacgaccgcgcaccccacgacgcacgatcgcagaatgcactagacgacagccaggcgcaacacacgaagagaagagtgcca

SEQ ID NO: 142876 - DNA, 99 bp, Homo sapiens
atggggtttagtaacttaaccaaggtcacactggtagcaagtggaagacctaggatttaaacactgaaatatgctttgtttctttttttcaggtaaagc

SEQ ID NO: 142877 - DNA, 265 bp, Homo sapiens
cttaaatgcccatgtgatgagatgtggtgaatgacataggccttgtaatgcagccttaggctcctactgaccttgaacacaagcccactgcagtactgccacagtcactctgataaccaagacagctactaagtgactaatgggcagacagtgtgtgcagcatggatatgctggacaaagggatgactcctatccagcgagacagagcagggtgactcaagatttcgtcacaacattcagaagggcttacaatttaaaacttatg

SEQ ID NO: 142878 - DNA, 484 bp, Homo sapiens
attgtggtagctatctctatttccatattttttttcttatacattgaagtatgactttttctgtaaaagagatagaattgggtatccagaatcagaaagttttccaagagtgcaaaggagatttggaacttaaaagctgttaacatttttgctggactgcctgtttcaggatggcacataattatgctagaaaatctgtggaatagaggctgggctagtatttaggaaaatatggcagtataattgtggaaaaggagatatcagaaggaattaacaaagaatactgggactaagaggtgaatgagagcagattcatacacacattgagatgaccatgggtgtctcttaccactgtttggtttggtatatgaacaacacagaggtgggctgctactacaaccatgtgtgtggagtgttgcatggtggatcaccataataggatcaggtagaacaagcagtggagaagaacagaatcttagcacct

SEQ ID NO: 142879 - DNA, 412 bp, Homo sapiens
ccctggctcccctctttctgcacagttgaccacttgccacaggggcaggctggggagccccactcttctgtactcttgagagggtttgagacttaaagaaataacgttcctacaagaatagagttttctagggtgagaatcccttgtctttcccagctgcgattccttgcagcctggccatggagagaggctggcccatcagacctagaacatgtgctttgagagccgtattcagtgaaaattgctttcttaagtccggatccaggtaatttcatcccccagatgctgcctggggaagtgtcttcttctgggacaggccctggaggccccagctaacctatgccgctgccgccccagccctcacctggttgcccaccccctctgcttgcacctctatcatccctggtggtct

SEQ ID NO: 142880 - DNA, 299 bp, Homo sapiens
ctctatgccattttcatagtactctaggtgtatttcatcacactcctttgcatgttatattgcaactgtttactttttgggtcacttcattaaactacgaactctttaagaatagagacttgtatatctttttcattttgtgtcttcagtgtcaagcctgatgcctggcttatagaagatattccttgatagatgaatagaaagaagagaaggagaaataaatgagctcgtatatgtgaaggcattttgtaaactataaagtgctatgcaaatgttagtgtgattttacattgcattcc

SEQ ID NO: 142881 - DNA, 473 bp, Homo sapiens
atgatcagaattaagaaaatttcatttccttctacttacaaaagagaaaggtaaaaacggtcacatagtttaaaatgcaaatcactgttaaaatttgtattgcactaaacagctttttgcccataagcttagtatgcatacaaggcacctgcaattcatacatcaattacagtcccgtatgcgcatgcagcatcttcattatccaaatgtgatcataaaactaaaatgtaatgctttacaagtgtttcccttggtagaaattcttgtcgaaggcccttagccaatttacatgtctcagtaattcaagtagtctattacgttcgaatactcactctccatcaaaaacatctttttaaaacttcccttggaaaggtaaatggcatgcaccatttactgagtacattcaagatatgaggaaactgtcccagtgaattttaaatagggtgcctaaaagctaaaaggaatcttgctta

SEQ ID NO: 142882 - DNA, 442 bp, Homo sapiens
gccaagtattgtactttcacttctaggacaatcttacgggttttattttctccataaactattaaatttaacctcaaggataagtttaatcattggaaatgccactggatactgaaatgtgccttctcttttttgagacggagtttcattcttatcacccaggatggagtgcagtggtgcgatctcggttcactgcaacctctgcctcccggattcaagtgatcctcctgcctcagccttctgtcccaagtaggtggacctacaggagtgtgccaccactctcagctagcaccttttaaatacatttagaatcaagaacttggggagggcctcaaggaaccatctaatccaacctcttcagttacagatggggaaaccaaggcagaagcaaactgaccttattacgcacctacaatgttccaggcactgtgtgaagccctgt

SEQ ID NO: 142883 - DNA, 210 bp, Homo sapiens
ggggctgtctgataaagaacctgtgtaggtttccatatggctatatacaaagtatatgagcgtagaatagttttaaattttgtcttagttatacttggtaagttttaaaacgttatttaaatagccttaaggtgatatggattgctttagtgactgctgttttaggaatttagttggcttattgctgactatagagggaacgttttatct

SEQ ID NO: 142884 - DNA, 344 bp, Homo sapiens
gcgtaagcagtatagggtccctcaagggagggggaggatcctgggggtcctgggggtgcaataagcccggcaccccttctcttgcttccagctaccccgcctcatcctccagaacggcaagagggagggaaatagaagggaggtgaggggcgagcgggaagagcggcggcgcgccagcggctggagagagaaaaagtttttgcaaaagggaaaaaaaaagtttgcgcttctcgcgggtggtccgggcttgcggcccggcgggctgggccggcgggagggctgggggccaggttgggggggtgggggtggcatcgaggctgcgctgccgtggccctctccgcccc

SEQ ID NO: 142885 - DNA, 741 bp, Homo sapiens
aaataaaacccactttatcagcataatacagtaactccactccactccactcctaagtatatgccaataaaaatgcatatgtacatatgttcaccaaaaggcatacaccagaatgctaggccatctactcgcatgtgctcactattcacaacagctgtcaacaatggaataggtgactaaaccacggtcttctcatccgtgggctagtccttggcaatgagaatgagcaaaccattgccacgagcaacaacatggaggaatctcacaaatccaacgttgagcataaaagccagacacgaaagaaaacaccgtttgattccattgataggaaattcaaaacccaatccaatgaattgatggcattaaaactcaggagcatggctgttttaggtgggggtgtgacggaggggcacaaggggatttctgggggtctttttgaatttgggagttggttacatgcatgtgttcactttgtaaacattaattgagctatacattttatgcttaaaagtgaaacatgtaaaaatcattgctaatataggcctttctgtgactctccttctttcccattctccatccttcccttgtggttttctgaagttggccttcccaagtaagttttctactcttactcctttggtattgcttgggtatctcaaaattttcttttgttttagttatttatttttattcacttttggggcatagtaaagtatgaagcaattaaaattttaaatgaaa

SEQ ID NO: 142886 - DNA, 576 bp, Homo sapiens
agcagtggcaaccccttcgggtctgcttctgtgttgtggaagctttgttctttacctctttgcagtaactcttgcttctgctcactgtttgggtccacactgcctttatgagctgtaacactcaccgcgaaggtgtacagcttcactgctgaagcccccgaaaccacgaacccaccaggaagaacgaataactccagacgcgcccccttaagagctgtaacactcaccgcgaaggtctgcagcttcactcctgagccagcgagaccacgaacccaccagaaggaacaaactccgaacacatcagaacatgagaaggaacaaactccggacacgcggcctttaagaactgtaacactcactgcgagggtcggcggcttcattcttgaagtcagtgagaccaagtacccaccaattccggacacactattagctagctaactcctatttatcctcccttaaatatcaccttctgagagaagcctaccctgaccgtccacacctgggtccaagagcactcaaacttcttttttacagcatttggcacacttgacagagaaatagctaatggtgtacgca

SEQ ID NO: 142887 - DNA, 241 bp, Homo sapiens
ataatattaattgttggtaaaggtacaaataaaggacatactcattctctggcaataacaatgcaaactagtacatctatcttgtaaaattatttgtcaatatgggtaaaagccttaagaacatcaatacataactttaattttaatacagcaactttttttaaaatttatttattttactttaagttctgggatacatgtgctgaatgtgcaggtttgtaacataggtatacatgtgcca

SEQ ID NO: 142888 - DNA, 126 bp, Homo sapiens
cattgtctgtgttaggcactgggctacacaatagggaaggcagtatatagatatgactgagcttaccatctggggaagcaaacatatttaataacacaaattattaattgtaattatgataaattg

SEQ ID NO: 142889 - DNA, 452 bp, Homo sapiens
gagtgcaatggtgcgatctcagctcactgcagtctccacctcagcaggagagcaggaatcttcagtgatccacgggcagatctgcagccattgtgggcacctgttcctccctgcgacctttgtgcccacgtctctccctccagtacctattgcacgacccccacgtccgcctcctgccattgccagcaagtgccttgcgcgggtacctggctgcgcttattaatccattatggtcgctctgtcactggtgccattatgtgctcacgtgcccactccctcaggtttagaagtcgcgtcgcccggcaacagaacaatctgctggcttagcctttggccaagttggcagctggacgaggacgctcagagcccagctctcgagagttcaagtatccgacagttccccactgctcccaggagcggttacccgggcactctgtgcccctcattcctgt

SEQ ID NO: 142890 - DNA, 550 bp, Homo sapiens
cgggagtgggctccttatcacgtgagtggctttcttatcaaagtgagctctctttggctctctggctcttgccctgtcaccatgtgatgccctctgcgggttttgacataccaagaaggccctcaccagatgctggcaccttgatcttggacttcccagcctccagaactgtgagcgcaataaccttctgttgcttataatttacccagcctgtgatattctgttacagcagcagaaaacataccaagacatggatgtgtgtgtgtgttggtgggcggtgaggaggaagagagggagagagagaaaagcttttcagtactctttgtattgaagtacttatctcaggtcagcacagtggctcacacttgtaatcccagcacttgggaggccaaggcgggtagattggagtttaagaccagcctggccaacatggtgaaaccctgtctcttctaaaaatacaaaattagccaggcatggtggcacacgcctgtaatcccaactacccgggaggctgaggcaggagaattgcttgaacctgggaggaggagat

SEQ ID NO: 142891 - DNA, 394 bp, Homo sapiens
ctcctcaacccccgacatcctccaaaagtttagtttgagaaacagctatctgaccttatggctatttctatccaagagggactccattggctctgatcaccacttactaactaggcctactaaaatgtgatgatcttgctgggctcttctacgaaaatatctagcaacccaaggaaggcttgcacttgctcattttgctgaaatcaaggatgctcatgctggccgggaacagtggctcatccctgtaatcccagcactttggaaggccgaggcaggtggatcacttgaggccaggagttcgagacaacatggtgaaaccccatctctactaaagatacaaaaatcagccagacgtggtagcaggtgcctgtagtcctagctacttgggggctga

SEQ ID NO: 142892 - DNA, 503 bp, Homo sapiens
gagctcggcaccccgaaggccggcatcagcagccggtgggccttgccccagttgggctcgtcgttgcgggcggtgaacagcccgtccccgccgaggtcgcggagcatctccagcggccggtgcagcttcttctcgaactctcatatgaaatgtaccaaaacaaaagggctgagtaaggattaaatgaaagaatgcacacaaagaacctagaacacacattacattcagtaagtattaacagttattattatcatcatcaacatttatcaaataaatacttagagcattctagatagtatgaaacctgcatttagaccaaaggaggcagagtgggaaggagcacactaaccttggcttccactggggtccagggacaaggatgagcttatggacaactgagagcacctggatattgtagggacctctgaaaacagctggggaccatgaagcccaaactgggcaagttgccatttctgcaacgttaaaaggtaaactttccacct

SEQ ID NO: 142893 - DNA, 451 bp, Homo sapiens
aggaaaggtaggccaggctgtaaacagaaaaccttaagatggttttccagtatgaccagacaaacattgcaaaaagtagatgataggccattaggcacacaactaaaatgagagaaacataattatcattataatatgcaagtacagactaaaattatggtattcacaaatgatctgcttgttttaaaataaccaaattaccaggagaagaatacaatatctcagacaagggagatgatgaagacccagaattagagcagtgataaactgcccattaactgacataagaaacagatgactcacagtctggggaaggagaaggtgatgacgtctgtttttgatgttttgtatttgagatgttggtggaattatcaagaagctatgcttggcagggggatacataagtttgaaatttaagggggagtttagaactcaaaacagatttgggagt

SEQ ID NO: 142894 - DNA, 468 bp, Homo sapiens
tcataatttattacaacactcacaagaaatgaacaaaatgaccctccctcaaaaaacagtgtgaagacaaagtgtcatgaaagcagccccagcctggtacatggtgatgtggtttggcttgtgtccccacccgaatctcatctggaattgtatttggctctgtgtccccacccaaatctaatctggaattgtaatcctcatgtgtgaggggagggacctggtaggtgacaggatcatgggaacagtttcccccatgctgttctcctgatagtgagggagttctcaggcaacctggttgtttgataaatgtctggcacttcccccttctctctctctctctctctctctcctggcaccatgtaagatgtgccttgcttccccttcaccttctgccatgattgtaagcttcctgaggtctctccagccatgtggaactgtgaatcaattaaacctcttttcgttatagat

SEQ ID NO: 142895 - DNA, 430 bp, Homo sapiens
ccacctccctcctttacagatgaggacaatggagaccagagagtgactcttagagcctggggttctgcttgttaggtgactaactgattcacagagctcctaagtattgcaaaaagaagtgttttaactgactgacagcggtcctaagcattccaaaaagaagcggccccatccctcagccacattttctaatccctggctctggggcatccaaaatgtttgacatctaacattcaaatgctccctgcagccgcaactccatgtaaatcccactcaaggaaaatgtcaggcagtgatcaattctgctgctgtgctgcaagagcaggcaaaagttataaaatggaatagctaatgcctgaaccttgaggatttgggaaacaacttttaagcacaccacggtgctcttaagccattctgtgaggtccagtct

SEQ ID NO: 142896 - DNA, 155 bp, Homo sapiens
tagctcggtacccccgcgcgtcacccagaggcggacttcgccgcgcatcaggcgatcaccctcggaggtcccatgtttgacagggcctgtggctctccctcggggccacttggcaaatctaagcaggttcctgccccagtctagcctagaagcag

SEQ ID NO: 142897 - DNA, 809 bp, Homo sapiens
ttttaagaaaggggaaaagactaatattaattgaatacctattatgtgttttaatgtcttaagtacttttctgggcatttcatttaaattatttgattctcacaacaactcagagccagagatattattccaattttataataaggaagatgcaaataaatcataaataaatcaataaatgatgtagtaatttgctcagggtaagtgaacaaaccataattaaattctgttctacttccagagtctgaaccttaaatattttttgtaaatacaatgactcttccttcaaaatgtacatttgtcctatttataatagtaatgtagtgactcattatggaggaattagaagaaacattttggtatatttcctttcagtcttttaaatattatgttataaagttgaatttatgtattttcagtcgttctgcttttttcacatagtatcattttatatatatacacacatttttatatggtaaatatttcttgaaattaacattttaatggccacttgataatgcattatgtggatatattctaaattaatttttttctattgggcattaatgtcgtttctagttacagagaggaatattggtaagcagtttatctttgtgtataaatcagtgtcagtgtctctcttttcttagatttcctggaaggatatcatttaattaaagggtatacactttctaaggccacttgatgtgtcaaatgtgtatttgacaattgttgaattgtcaaacatgctcataatgtataaattaacaaggctcaatctgattgactctaatgtgtgactataatca

SEQ ID NO: 142898 - DNA, 368 bp, Homo sapiens
tgtgcctcagcctcctgagtagctgggactacaggcatgtactaccatgcctggctgatttttgttgttttagtagagatggggttttgtcatgttggccaggctggtctcaaactccaggcctcaagtgatctgcttgcctcaggctcccaaggtgctgggattacaggtgtgagccaccatgccaagatgatcattgtatgattaactaaaataatgaatgtacatgctcaataagtagtagttattacaattctttttcatggttttgttattgaaacagcaaggttccagtctaggtcctgctgctcacttcgtagaaagccaatcactgagacaacaagtattgccaatgaagaaggctttaa

SEQ ID NO: 142899 - DNA, 801 bp, Homo sapiens
ggaaaacaaaatatatgtagagtgccatcactgttctgttatcattatcactctggtctcacccggattactgcaaaagcttcccaaatggtgtaaaccaaaaataaaatttaaaggtgtcggccaggcgcagtggctcacacctgtaatcccagcactttgggaggctgaagcgggtggatcacctgaggtcaggagttcgagaccagccatggctaacatcatgaaaccccgtttctactaaaaatacaaaaaaattagccgggcgtggtggcacatgcctgtaatcccagctactcgggaggctgacgcaggagaatggcttgaacccaggaggcagaggttacagtgagccgagatcataccactgcacttcagtttgggcaacaagagcgaaactccgtctaaaaaaaaaaaaaaattcacaagtgtcccaaccacctaaatggactccctccttggccaaggtactcaaaagttaacctcaaagactggttcaggccttgacaggaagtggggttcagccatgcctcattatgccctccttccgtttggggtttgggaaaagtgaccagcatttaacatcaacacagaccttaagtcttgaagaaacatttacaatctattttctttgaagcctgctacctggaggcctcatctgcatgagaaaactttgatctccacaagctcttatcataacccagactatcctttctattgataataactctttcaaccagttgccaatcagaaacatttaaaatttacctataacctggaagcaccccctgcaccctccct

SEQ ID NO: 142900 - DNA, 233 bp, Homo sapiens
gccagggtcgactcacacaacactcttccctgacagcaccacaagctcaggcatcgttgaagcatctacacgcttccagtgggtggtggaacgagcatactaccaagggccagtgatttgtggaggattgattttgcacaactgcatctagaggccttgggaaacctccagccctctagccatcttgcccaaaatgtgcggacccacaaacgagaagcagccagacttttctg

SEQ ID NO: 142901 - DNA, 393 bp, Homo sapiens
ccaggcttgtgctccaggccagccttctctcctgacagtgctgatagctcacctccaatcagaccttgaatcatggtctctaatcttgcccctcgcactcattattcctggtgcagtgactcagttttttaatctgcaaaattaggcactggggcctgatgatgttaaaggctacccccaacccctttccttctttggaagtgaggaccctgtgttgacatgctccttgacaaattaactttttgtgactgtatttgtgaattctccagacagatggtaaaatctttgaggaaagaggtttttaatcttagagcaaaccttgaggcccccaaagcctgattagacacagtgggtaccgtgtgtctactgttaaagaaagctatgtgatgagag

SEQ ID NO: 142902 - DNA, 285 bp, Homo sapiens
agcgagtttatgttccaataattaattttcctcagaacacataacagtaataaaatattacaaaaaaagaaaccaaaaaacactggctgggcttatatacaacaaaaatatttgttaattatggacagaacaaaaatcaaaagcagaaaatgcagctgagctctgcctgtgggagcagacagtgatgactgtgagcttatcttttgccaggtaagtggggtgggcaaggggaaatgtggttggtataagaaaatattgagccagactatggtgccatctcacatt

SEQ ID NO: 142903 - DNA, 263 bp, Homo sapiens
gagtagtcctggtagtgagctctctgtcactagaagcattcaaggcagggtggatgatcagtaggcaggaaaggctcagatgatgttcatgacagggagctacataaccaaggtccttgaaccttggattctaagcaaaagaacaaaatccctacagctcttatcactatggttgctgttggcagagcaggaataacacctactgagtgtcgccacgtgctgggcacgttaatctcattatcacatggaatcttcctggtgac

SEQ ID NO: 142904 - DNA, 440 bp, Homo sapiens
ttgctgagcagtgggctttagagtaggtcagtcatctggaggatctgcagtggggagatgggcgagtcttcactggacccctgcctgcggtgctgcttgggagggcagggccccagtgaatgtctcagtgagtaaatgactgtccccaaagaagccataataacctacgaggagatgagatggaggtgaggataagcagagcctggaatttgtgcaaagctgaagggaagtccttcccctggctgccctggggttggcctgccagtaaggggatgccaattaatttctcttgcaggaagctagttcgtgtccaaaaggctcaagttatgaagtacgaattaatccatttaaccagcttctcggagggaaagcccatgacaactgcattttcaaatgccatcctgaaagcgatatttcaagtggcagtgggtgggattaga

SEQ ID NO: 142905 - DNA, 296 bp, Homo sapiens
ggtttgccctttgtgttttaattcacaacatctctctgtagccctcgttgaatatctgggtgacaatacatttctcaacacttagaaataagtcctccacagccattacaactataaagtacagctgctaatagcatgcgatccaagtttcccaggctctcagaaaacatcaaagttttccattgccagaaactttgggtggaaagaaaagtgaaaaggagccttctgatccaacgtgtgagctgaggaatggtgagtgggttagatttatgaactgttagccgtcgtccttggat

SEQ ID NO: 142906 - DNA, 549 bp, Homo sapiens
aaaggagaccaggtggttcgcagaatcgctgtgagcctgttgctcatgggaacccgtctggggtggggggcaccaggcggccactgagagctcagcccctgttcctccagagaggggatcttgttgcaattgccacctctccgtgcaacgaagcacctgccaccatctccgctgctttgtgtcaccagcgtctgatttgaagtctgattgcattgccgcggtctcaggcccacaacctagctaagagggaggctgggaagacaagtgttgcatttcagtttctgcagcagacagcaggtccctctgcccaccaaacaacccttacccagagtgggcacatgtcaagcttttattcaactcggtgttgagggaatcagcgtaacacagctgattcaaaggaggagatgagagactagtattggtttctcatctgtctgtctgtctgttgtcagtgaagataaagaatgccagaatcaaacagctctgttagatgcgaaagtggttcatgccctacagtaaatacaaccataacctttggagtcatcttct

SEQ ID NO: 142907 - DNA, 411 bp, Homo sapiens
agtcatatccagcacctaatccattctcatctggcaccaaccacatccaaccacactcacactttaacattttacatacgtagtgttctatcattggagcagtttggaaagatgtgcctggttgcaatttctttttaacagacacaactacataaatgctgggcttgaaaactattcttcaacaccctcgacagagctttgtcaagtttaaaggaactccttttattaatgttagtctttttcaggttcacagatctgtttttagcctactcttgttgcttttctagagccactgacctattctggctagattaagcattcatttagcttatctcctgagtccatttatacttttcaacccctttggttgtttagaataatagttctccaagtttgttttgaagaatgtcc

SEQ ID NO: 142908 - DNA, 1033 bp, Homo sapiens
gggtccccgcgccgcccaggcctaccccggctccttgggatagatggggaagctgaggcccagaagggggctgagaccacctcccagtttccccagtgaggtggcgcctgagccacggccaggcccggcctccttccacccggccctgctgtgcgcgcggcgggtgctgacctggcgaggccggacaggggaccaggtcggggtgaccgtcactgacacctggacagtcctcgttgtgttcggggtgggaagcccacggggaagagtgtatcacagccattgggaactttcttcacccatcaaagcctcagggctgaagcatcctgaacaagaactcaggagagtgaaagaaacagttacctgtcggctgcagctggtacagctccccaccccgtacagagaccgaagcgtctctctctccccatcacccagcaccagactctgccccgcgactcagcctgcacctgcttcctggctccatccagccttccagcctcactagatcatcatgggccactggccaacacacagggcagtgccgagccaggccgtggtcacacatggctgggttagtagctgaaaacattgtttttcactggcctcacagtaatggcacctgcccccattttctgtgattgaatttttggatcctgctaccaggttatgatagatttatggtatgtctcaagatattgagataccaggtaataaaacagctataagtcctggctcaagaagtgttacaaacccaagcagggtaaatacaagaaaactgcacccagacacaacatagtaaaattgctgaaaaccaaagattgaatagaacacttaacagtggagcgcaccaaaagccacattaccttccataaggacaccaaatcacacttagcatctgtacttcgaaaatacgacatttcaaaagcccaactcaccagggacttgtggatcttccaaatcttggacaagaatctaattgttcaggtgaaataattaactggcaacctaaattctatcctaggtggaatactctcca

SEQ ID NO: 142909 - DNA, 746 bp, Homo sapiens
gggtccccgcgccgcccaggcctaccccggctccttgggatagatggggaagctgaggcccagaagggggctgagaccacctcccagtttccccagtgaggtggcgcctgagccacggccaggcccggcctccttccacccggccctgctgtgcgcgcggcgggtgctgacctggcgaggccggacaggggaccaggtcggggtgaccgtcactgacacctggacagtcctcgttgtgttcggggtgggaagcccacgggaagacatcaacacaggagactcccaagactgctggggccaaatgtggcaggtggacgtctccccgccaccgagcaagccatcagttctgcagcggacaccagccgagtgtcctccaacaccatccggtactgcagatagcgtcagatccagacacctacacacacacacacacacacacacacacatatgcacacatatgagctgcgagggccagcctctggaacttcttagcgagtggcccgacgttgaggttcccagtgtgagaggaacgcttgctcaccaggactctggtttagtgaaacgtgaccagagtgactccatcttgacgtgagtaggaggcactcaccaaggcacctataaggcgaatgcttagtgggtctaaaaatagccgtgtcatcaagcttggacaccaattactacttcacagaatatcggtgcgcatatggcggcatctccgagcagagcccgcagacgtgtccagatag

SEQ ID NO: 142910 - DNA, 1785 bp, Homo sapiens
  misc_feature (961)..(961): n is a, c, g, or t
  misc_feature (989)..(989): n is a, c, g, or t
gggtccccgcgccgcccaggcctaccccggctccttgggatagatggggaagctgaggcccagaagggggctgagaccacctcccagtttccccagtgaggtggcgcctgagccacggccaggcccggcctccttccacccggccctgctgtgcgcgcggcgggtgctgacctggcgaggccggacaggggaccaggtcggggtgaccgtcactgacacctggacagtcctcgttgtgttcggggtgggaagcccacgggtctggggacccaagatcttattttcctttctgtcacccccgcttggttttggattccatgacagctggacccggcttctgcgtgatcttcagagggaaggcaccaggagtggactgcgggacacccagagtggactgcaggaggacacagaagctaggctgaagcgggaggaagctgggaaccctgcacggggccactgcgcactgggactcgttactggtccccaagactcagggagaatgggtgagttgaactggcaaggaggagcccactgtcattacgggcctctggaatcccggcaggaggagattaaccacatggacattcgaggtggcagagagagctgcctagagaaggtgcgggggcagcagccagctgaggcagagcccggagggtttggtgcaggagcgtctgtagtggagggccatcccccaggctcaaattcctcccataggagattttagccctagtggagctgttgtatgtgatctttgtggggtggtcttgcccatcagatggggccagtctgacccgagcatgccttggtctgctggcctctcccagggccccggcctggccacgcctgcttgcagggcagctctgggtgccctgggggcctgcagcatagcttctgcactggcagaccatgcctgattggtggagagctccagcagggcagcccccacatccctgtgccagcntgcccactgcctcccacactgtagcttntccagggcccactgtcaccccccatcttgcttttgccagtgcatgtctgtgcaggtgggttttgctttccttgcccgccagtgtacctgtgtgtttgcaccctgccctgccattgctgtggcaggagtaccgtttgcccaacgccccctgctgactgccattgcagttggagccttggcagacacagagccagccagccccacctcccttgcaccccactcttgcaccaacactgttgcgggagtgaaactaggcacggaatagggaccaccctgcctgtggggcacaaagaatgccacaggcctgggcctgccggtgctccacctccatcccaacaccaccgccagcatggctgttgccagcagggggccctgccccccaggtgctttcgtctgccactgtggtgaacacctgcacagaggcaggcaccccagcacttgctagcaccctgccacagccgatgaacgtgcaccctgtgctgctgccaccacggctgctggcatgtgcaagcaagaatggatcccgctgccactgcactgcaaaatgcactggctggcaccacctatcagagtgtagtgaccggtagtgaggagcaccttgatccctcagtgcagttgattcctaacctccgggagccagagaacaaagttggtgcctgatacaagtaccccagttagagcacacagtctgggagttgggaactgagccttggccccctaaaatcatccagaaacaaagccagtcagctgaatccaacttatactacaatcaaatcctcaaggtcatcaaataggat

SEQ ID NO: 142911 - DNA, 1193 bp, Homo sapiens
gggtccccgcgccgcccaggcctaccccggctccttgggatagatggggaagctgaggcccagaagggggctgagaccacctcccagtttccccagtgaggtggcgcctgagccacggccaggcccggcctccttccacccggccctgctgtgcgcgcggcgggtgctgacctggcgaggccggacaggggaccaggtcggggtgaccgtcactgacacctggacagtcctcgttgtgttcggggtgggaagcccacgggatcttcagagggaaggcaccaggagtggactgcgggacacccagagtggactgcaggaggacacagaagctaggctgaagcgggaggaagctgggaaccctgcacggggccactgcgcactgggactcgttactggtccccaagactcagggagaatggggaagagtgtatcacagccattgggaactttcttcacccatcaaagcctcagggctgaagcatcctgaacaagaactcaggagagtgaaagaaacagttacctgtcggctgcagctggtacagctccccaccccgtacagagaccgaagcgtctctctctccccatcacccagcaccagactctgccccgcgactcagcctgcacctgcttcctggctccatccagccttccagcctcactagatcatcatgggccactggccaacacacagggcagtgccgagccaggccgtggtcacacatggctgggttagtagctgaaaacattgtttttcactggcctcacagtaatggcacctgcccccattttctgtgattgaatttttggatcctgctaccaggttatgatagatttatggtatgtctcaagatattgagataccaggtaataaaacagctataagtcctggctcaagaagtgttacaaacccaagcagggtaaatacaagaaaactgcacccagacacaacatagtaaaattgctgaaaaccaaagattgaatagaacacttaacagtggagcgcaccaaaagccacattaccttccataaggacaccaaatcacacttagcatctgtacttcgaaaatacgacatttcaaaagcccaactcaccagggacttgtggatcttccaaatcttggacaagaatctaattgttcaggtgaaataattaactggcaacctaaattctatcctaggtggaatactctcca

SEQ ID NO: 142912 - DNA, 409 bp, Homo sapiens
gagatatgtggtattgttctattcattgtgctagttattgcctgaataccttagtttttcatttccattgtgttgttttataggccctgtgagatttatgatttaaggagtttctactttggtgtattttgaggttttgtttcaagatttagaactccctttaactgctcttgtagtgctgccttggtagtggtgaattctctcagcatttctctgaaaatgactttatctttgcttcatttatgaagcttagtttcaatggatacaaaattcttggctgataattattttaaggagtctaaaggtaggactccaattccttctagcttgtagggtttctgctaagaaatctgctattgatctgataggttttcctttataggttacctgatgcttttgcctcatagct

SEQ ID NO: 142913 - DNA, 232 bp, Homo sapiens
gttttctttgggcccagtgcagcttcttgccaaccagttcagggtgtattgaaggcattgtgccagggctggggaatagaatgattggtgaacaaaaatcagtccttgccaccacggagcccacacccaactgggggcacagacaaacggggaagtgtaaaagagaagttgatgagggtcatggggcaggagagggacaatcagcatgtattgagcacctactgtgtaccag

SEQ ID NO: 142914 - DNA, 789 bp, Homo sapiens
agaggaactagcagtgcacaggaccctaggactccctggattatatgccctttgtcttccactaccacagtgcgtagggaaggaccatcaggtgggggcagggctaggcatgtctgagctcagactctccttgggtgggtcttgctgcagagtatttggggtgtctcctaggtcctgcagtagcagtccacttccttcaaagggtctgtggctcctcttgggattgctggtttgttcttgaagtcgatccagagctaaagttcacatgcaagcctctgcacactgctctgttagtccgagtcagagctgcaatctagtcctgcctctcgtctgccatgatcccacctcttgggattggcttctttttttttttctttttttgacagagtctcactgtcacctaggctggagtgcagtggcatgatttcggctcactgcaactttcatctcctgggttcaagccctggtgttttcttgccactatttatatgatcatgtggttcttcctgtttcgttaacctgataaatagcattgattgattaattgtcagatcttaaatcaggcttgtattactggtgtaaacagtttataaagtataattattttttatgttcttagattcagtgtatttagtatgttatttagtgttcttttttgttgttgtttgctttttcacccaagctggagtgcagtggcgtgatctcagcttccggttgcaagtgtttctcctgcctcagcctcccaagtagctgggattacaggtgcccgtgaccacgcctagctaaatt

SEQ ID NO: 142915 - DNA, 295 bp, Homo sapiens
gggaacatcacacaccagggtctgtcatggggtcgggggaggggaagggatagcattaggagatatacctaatgtaaatgacgagttaatgggtgcagcacgccaacatggtgcatgtatacatatgtaacaaacctgcacattgtgcacatgtcccctagaacttaaagtatgataaagacaaaaatagatctagaataggcaaatccacagaagcatattcatggttgcaaggggctgtgggaaggaggaatagggagtgactgcgtaatgagtatggggtttctttttggaa

SEQ ID NO: 142916 - DNA, 724 bp, Homo sapiens
cgattgtagttttactctatgaaaatattttgtaagttacctctgagacttgtttcttttcctccactcagtgggagagagcaaacagtagttgtaatgatagtgtccttcctttttctgtttcttctcctaaaattcaagacacagcatacctttgtaggcctgaattggtaagaaggcaaggcaggggaggtgtgagcagtagaaataaccagggagaatgtttttgatgttctctatgtattcatttactccttttttcatgcattttacagatacttactgagtacctatttactgaacaccttatagatacttactgagtacctatttactgaacacctctgtgacagctctgagctgattactgtaaatataggaattctcctagcagatacagtcactgccgtcatagagcttttaaactagtaaagaagataaatattaggcattgtaagtttgataattattacaaaggaaatgtacagtacattttaaagacatgttactagatccatgaaaaaaatgacagattcaggacctagcaataaatcagcacaatttttcaagcaggcaatagaaataatgtgcttgccccctgaagccctaacaatgattagcatctgccacctgagcaaggtgcctgatgccaacatgaagtcctatgtgtcagggtggctccagctacaataaagaaaccctcctactcagctggctcaaataa

SEQ ID NO: 142917 - DNA, 382 bp, Homo sapiens
gcctcactttgttgcccagggtggtttcaaactcctaggctcaagcgatccttctgccttggcatcccaaagtgttaatttttttatggtgttacttatatagttttaatgtttgaaaacaagtgaataaggaattgtgtttgaggatagatgtttcttaatcgctctattgttaatgaaacttctcactgagaatatctgaatggttgacacccctaataacaagttttatccagaaagcatgtgtaaggttatctgcattttcattaaaaaaaattttgtttttgagatagggtttactctgttgcctgggctgtagtgcagtggcacgatcatggctcactgcagcctcaatttccggggctcagatgatcctcccacc

SEQ ID NO: 142918 - DNA, 339 bp, Homo sapiens
caccatgatcgcgcacatctcggccgcggtcgggagctacgcggagaccctgtccaccatccagattgcatcgagagtcttgaggatgaagaaaaagaagacgaagtacacatccagctcgtccggcggggagagctcctgcgaagaaggccgcatgcgcaggcccacccagctgagacccttccacaccagggccacggtggaccctgacttccccatcgctcacctgtccagcgaccccgactactcctccagcagcgagcagtcctgcgacaccgtcatctacatcgggcccaacggcacggccctctctgacaaggagctcaccgacaacgaggg

SEQ ID NO: 142919 - DNA, 157 bp, Homo sapiens
gtggattttcttaaagtcttgtcaggatgggaataacttttcatgattgcatttgtttgttgtccatcagaccacagatacgacattttgacgcatttgggaatcaattttaacatacagtgctatttccaccttctcacaaccaaataacatctca

SEQ ID NO: 142920 - DNA, 384 bp, Homo sapiens
ggtcaaagctgacataaacagctaaagaaattaacaacagagtctcagaagacaaggccaggggagccaaaaggacacaggtgctacacacccaggcagttgttgtctgctcccagagcacctgacttcagcagccacagcacctgctcctcaagcgcagcggcgcctttgagggagcacagcctggaaggtttacccttcgcagagacgcttgctcttggacttctggctgtacattctgagggttcaaatgaaggatgggacaatgggaaagcttaaatcctctggaaacgtcactgtgatcaatggcttcaaccctcctctacctcataccagttcactggagctgctaacactaagtttccttctttatccgcccatctc

SEQ ID NO: 142921 - DNA, 370 bp, Homo sapiens
gcactcttgctaggaagtgaatgaaagaaattcatttagttttaaagcattagattgagcacatatgcttcaaatgccataaatctttacaggtaaggattaaacactactccactctaggccagacgcagtggctcatgcctgtaatcccagcactttgggaggccgaggaaggcgaatcacttgagatcaggagtttgagaccaacctggccaacatgatgaaaccccatctctactaaaaatacaaaaattagccgggtgtggtgacacatatctgtaattgcagctactcaggaggctgaggaaggagaatcacctgaacctgggaggcggaggttttagtgagccgagattgagccaccgcactc

SEQ ID NO: 142922 - DNA, 435 bp, Homo sapiens
aatgactaccccaatattttatctgcttatgcaaaacctttgagtcctagctcaagtcccactgttgctggaagcctgccagagtttgcccagcccacgatgattgaaagcagccttctgtcatcaacatcacaggtcttagaagagtcctaatagaagtcagctcagtctaggtgatccttggccagcttgtgagctccccgagcttatgctctagaattctcccttgggttcactactcggatggatgtatcctaggtacacagtaaatgtttactgatgctaattgatgattaaaatgcagcatgcttggccgggcgcggtggttcacgcctgtaatcctagcactttgggaggccgaggcgggtggatcacctgaggtcaggagttcgagaccaccctggccaacatggtgaaaccccatctccactaaag

SEQ ID NO: 142923 - DNA, 400 bp, Homo sapiens
gtttccaccttcttgagagccatcttttttagagaagtgcagagttcactatccaggtcctttggctgcatcctggccgggggtgggggcaacatacagatcatttccctcaagtaaaacattgaggcacactggttagtgcttggttcatgcctgtgttttttctttttctggagtcttgccttaatatatatgtatatattttttttgctaatagactgtcctttcctccctccctccctttagaagagatggtaggtttcattttgcctcttgtctccaggtttcaggaaaatgaaaatgatttataagagaggtgacaaatctgcatagagtttttgtttgtttgtttgtttgtttgtttttagtttcagctaaggccccagataaaaatgtaagg

SEQ ID NO: 142924 - DNA, 248 bp, Homo sapiens
agtgtattatcatgttttaaaaacatgttagtgcaaactacaaactcatttattcatctaaatgttttgagcacttactttattgaggctgacactaggttcagactgggaacaggaagatggataagctcatctcttcccatgtgagacagatgcataaacaagtacaatgttgtgtgctaaattgtcacggtgtttaaagtgctatacagatagctactctcacttgattagtttttcattcattt

SEQ ID NO: 142925 - DNA, 867 bp, Homo sapiens
tgcactcactccttcccgccgccttatgaagaagatgcctgctcctctttgccttctaccgtgtttataagtttcctgaggcctctccagccatgcagaactgccccagtgctaatatccagaatctacaatgaattcaaacaagaatttacagagaaaaaaacaagagaactcccatcaagagaagtgggcaagggatatgaacagacacttctcaagaagaagacatttatgcagccaacagacacatgaagaaatgctcatcatcactggccatcagagaaatgcaaatcaaaaccacaatgagatatcatctaacaccagttagaatggccatcattaaaaagtcaggaaacaacaggtgctggagaggatgtggagaaataggaacatttttacactgttggtgggactgtaaactagttcaaccattgtggaagacagtgtggcgattcctcaaggatctagaactagaaataccatttgacccagcatcccattactgggtatatacccaaaggattacaaatcatgctgtataaagacacatgcacacgtatgttatggtggcactgttcacaatagcaaagacttgaacccaatccaaaatggtccacaatgatagactggttacgaaaatgtggccatattcaccatggatattatgggactaaaaatgagaggtctgtctgtggggctgggtcacgtggaccattctttcgccaccttgcgggcgcaaaccacacccagttcccctgtggactggccggactggccgaggcgctctttacaaacagggcgttaagcgggggctccccagctggagacaacgcgttcggcaacccgctccgcgcgggggaatacacc

SEQ ID NO: 142926 - DNA, 347 bp, Homo sapiens
tgagcagggcttgcctcggaggaaagcgggaggggcaggagacatactggtatgccagtagtagattcggaatgtctcttctgatcaagtactgtattggtgacataggtggtgcatactaattcccaattgaccaagggacagaagccaccagagcagtgagctcagagccctgctctctttgatgccatttctttcaggctggctgggttctgactggtcaggataagttggtctatctggtatctcagcaactagtcacctctagtatttaaccttgtcatttgatgcactttcttggtcatcgtgcttatcccaattaggatttaattagagccccataatag

SEQ ID NO: 142927 - DNA, 211 bp, Homo sapiens
ttattggcatttatactcggatgtctccaggcaccccaaacgcactggaaacggaacatgatgttacccaccccacaaggtagaccctcttctagtgtctcccctcaaacaacaggccaccaaattgttcaagccaaaaatctccctcactccccaaatccgatcctttaatctctctctcttttttttttttttttttttgagacagagt

SEQ ID NO: 142928 - DNA, 288 bp, Homo sapiens
tggggttgctaagaaagtatttaagtaagtgaagtaataaggatggggctctgatttaataagattagtgtccttataagaaaatacaccagagagcttgtcttgtccctctacatgtcctcatcttcacacaatgaactcacttaggaaaggccatgtgaggacacagcaagccagaagagaagagagccctcaccagaaactcaattgactgtagccttggttatagacgtctagcttccaaactatgaaaaaatacacttctgttgtttaagccacccagtctgt

SEQ ID NO: 142929 - DNA, 389 bp, Homo sapiens
tttgtgtgttgctgtgagacagaaaatacaagggcacatcttagtacagagattgcagtaacagttgaataaacatgcaatccgatacctcacatctggcatgtcatcatccccaatattttactgacaatcaaatatgtttaaggctgtggctactttataggtacaaatgtccttatcaggacattatcatgcaccaaacctctctcaataaaagctgtcataaacaacaatctcttccctgggtctgcctctgtgctctgtgacttgcccgatattttgatgaggcgggctttggcaactgtctcttagatgaatggttctattacaaacacagtagcttccatgaccgcttagaagagattgttgtttatggcagcttttattga

SEQ ID NO: 142930 - DNA, 233 bp, Homo sapiens
tggtgcagtgcttgcttcctcacagatactcaaatgctggttttctttcttccttcacactccctcacagagttcactgtcaagtaagggagacaggcataattaaatatgtatgcaagaaaaggaaggggactttagagataatgggacttcatttgtggaggaagagagacacgagaaagcaaatagccttgaggaagaatggatagaaacaagttcacactacaatattt

SEQ ID NO: 142931 - DNA, 330 bp, Homo sapiens
ataacatctatctagtaagtttgttgtaatgattaaaagagatcacctctgtaaagtatctggcacctgaatgttagcccccttaaaatgcaggcccggtagaacacatcactatcaaaagaaattatcctccccaatttcaagacatcctgatgctggagcggcattagacactactgcagtagttggaacagaaagaaactgcaatggaaaaaatatgtgcctatcccatcacagttaaaaatgaaatcactcagctgggtacagtagctcacgcctgtaatcccagcactttgggaggccgaggtgggtggatcacctgaggtcagg

SEQ ID NO: 142932 - DNA, 345 bp, Homo sapiens
aaccaatcgtccacttgtgcagtgagcggcagagaaagaaacaacggcacagtgcaaggccccagtctcactgggcagcggctctgcctacaatgaaatatgacttctgagcttggactcttttaaaggccctggggtctacatctggctgactccaggcagctagtgacacgctaaggatataactaaattccacccaaagtgactgatcccatgcctgttatgtgcaaagcactgtgacaactggggtttaagagaaatgggcaaacccccagtccttattcttggaaagcacagagtggtggggttgcggggggtgcgaggctatgaacatacactcctgga

SEQ ID NO: 142933 - DNA, 111 bp, Homo sapiens
tgcaggtttcttcaacatctccctctctgcttcccatcaaacttcaacactgcttgcatttcagtaacacagtcttcaagaatcagcctaattatctccagccacagcaaa

SEQ ID NO: 142934 - DNA, 307 bp, Homo sapiens
ggaccatgggtctaacccaagcacaatggaaggagcctttgttgagcagaaaattgacatgttctgatatatgtttcgaaaatttaacttattactgttgtatggcagatgtgttggagagaagcaaaaatggttgttaggaagcttttacagatgtcttggcaaaagatggttgcttttgtggtaggtaggtggtgcctgtggtgattgagagaagtaggtaactctgggatattgtttgaatataaaactgatagaatttggtgatggattggatataggagagaaagaggaaaaagttaaagat

SEQ ID NO: 142935 - DNA, 300 bp, Homo sapiens
gctgtaacaagaaaatatgagagatccctgtaagaacccaaaattagatttcccccttggaactaaagctaaaagaataccatcaatacattgaaaatttataatctgtggttttattcccttttgtttataaataaagctcattttttgtgtgcaataaatcaaattccttcactttcccaatctgatataggtcaggaggatccttttaaatggaagtcagtggagggaggatgttccttggcatggtcttcctccatgtgccgtgtggctatggcttctcttccaggcaactggacg

SEQ ID NO: 142936 - DNA, 225 bp, Homo sapiens
aatagaagataagagaatccaaacatggtgtttagaaaaaattgctacctgtgcagcatgcgacggagaggcaaatagaaaaacattccattctctgcctctcggtcatgtatactctatctttcttcaagattacatggccaaatgaaaaagtgagactttgttgtgaccccccgaaaatgttctacctttccctttgtttctaaagattaaatgttcaaaaac

SEQ ID NO: 142937 - DNA, 145 bp, Homo sapiens
tacttgaacagactagactgaagtgtagtagcagagtccaaattgtttgaacatctttcagcagcaagaacacaatgttatctggcaattcattgtaaaaaagcagcatgaacttgtctgggtgctctccaggtaatgagaaata

SEQ ID NO: 142938 - DNA, 792 bp, Homo sapiens
ggaccagcatcacagtatgtaatacgtttttgaataatctttctgatggggcaaatatcccaaattattactttgttgctcacgtagtaaaagatcatgctaaaccaaacttgcattagagaccattggtgatagagggcgctattttttcccaaagagaaattacttaatgtctattgccgctttaaaaaatgggctactggggaggctgaggcaggagaatggcgtgaacccgggaggcggagcttgcagtgagcccagatcgcgccactgcactccagcctgggtgacagcgagactccgtctcaaaaaaaaaaaaaaaaaaaaaaaaaaaaaaaaaaaaaaaaaaaaaaaaaaaaaaaaaaaaaggggggggggggaaaaaaaaaccccggggggggccatggcccacaaccccagtttttgttggacaaaaggggggccacccaaagaagaagagggcgctatataatataaagacaggagaggaggaggaggcggcgagtgttaaaaaccagcgcgtggtcgggaggcggggagacacaccgcggcgacacggcgggacccgtatgggagaagaagaaccccactttcgttggggcgcgggaggcgaccaatatggggggcacaccacccaccaagaggagaattaaccgcggcaggaggaaaactataaacactaccacgcggaaacgggcggtcaacaccacgcggaagttatgcctggccgagaagaaaattcggccaacagagagacgtttacaacaatatacagagagtgtagaaaaaaag

SEQ ID NO: 142939 - DNA, 434 bp, Homo sapiens
tggttaggctgatcatttatgatggtagacagttgtattagttatctattgctccataacaaattaccacaaacctagaggcttaaaacaatatacatttatcattttccagtttccctgggtgaggagtccaggcatgactcaaatgggtcctctgctgagggtcacacaagactgcgatcaaggtgtcagccaggctgcctgcctttcttgagtttgaggctcttttctaagctcagatggttgttgccagaattcatttttttgtggctgtaggactgtggttcctcttttcttctgaatgtcacccaagggcttctctgagttcccttcctagaggccacctgcagttccttgccatggggccctctcacaacatggcagcttcttcaaagccagcaggagaatcttttgctccaatctgcaaagatgga

SEQ ID NO: 142940 - DNA, 222 bp, Homo sapiens
tgtgtgtgtacccgtgctcatctgtgtgtgtgcatgtgggtgtgtgtgtgtgtacccgtgctcatgtgtgtgtacctgcatgtgtgtgcatgtgggtgtctgtatgtgtgtacccgtgctcatgtgtgtgtgcatgtgggtgtgtgtgtacctgtgctcatctgtgtgtgtacctgcatgtgtgtgcatgtgtgtgtgcctgcatgtgtgtgcgtgtgtacc

SEQ ID NO: 142941 - DNA, 336 bp, Homo sapiens
cagccccctgtgcagccatcacacatcaggaaaatacacacatgacacccctatgcaaccatcacaccaggcaaaagcacagacataaaatgctaagtcaataggaatgaacagctcataaaagcctactggaatagatcacatcacagccaggtacatctgttctcagcactaaccattatcattagcttaaaatgcttgaaatcactgtgcatcctcaggtctagggacagattattccaagaagattctgctaaatagatttggcaatgcagtgaaggggacctctactacattaaagtgatacattttgcatctcaaaggctgtcaactgta

SEQ ID NO: 142942 - DNA, 375 bp, Homo sapiens
aatttaaggtttgaaggcataattcaatttggatctcagattacttgcatcatcatcatcattgaattgtgaaattttgacatttattgacatttattcatatctacctcaaaggactttcagaagtttacagattagcttaattttggataaatgggacaatgctatatattgattctgttgacgaaccacagcatttcttctttaaagcagttctcctgactgacatacgtatcactccatccatccatcgttcatcatccatccaccatcagtttatttggaaattaagtgaggctatgtatggtgttttgggtgataataataaagaatttaggaggccccttctagattttatttatttatttagagaca

SEQ ID NO: 142943 - DNA, 492 bp, Homo sapiens
ttctaccatttttgccactagagaggaaaattcaggataatgatctttatttaataagtgtcaaaagtaaaacaaaaactattaatagatgtggtggtacctgagacgcatgttcaaaaggacatgcggcaatataccttgcaggactgggctgcttcttagaattttaaaaggcagtcttctgcagtagcacactgctgtttcaattcacagccacaggtgatctgcaatcaagatcagttattgacatatggctattaaggctttgaagtaaatctgcattttacttcaagtaaaaataataataactctagtgaggccacttagaattaatcaagagtgtccaattcattttacatattgttcacattaaaaagacaaagcttgctcgggcgcggtggctcacgcctgtaatcccagcactttgggaggccaaggcgggcggatcatgaggtcaggagatcgagaccattctggttaacaatggtgaaa

SEQ ID NO: 142944 - DNA, 500 bp, Homo sapiens
ttaactgatgacattatctggtgaaatgccttctcctggctcatccaggctctagagctcccctactgagcacctgtgacccccactcctgcctgccagagaacaaccccctttgactgtaattttcctttacctacccacatcttataaaacggccccacccctatctcccttcgctgactctcttttcggactcagcccgcctgcacccaggtgaaataagcagccttgttgctcacacacagcctgtttggtggtctcttcacacggatatgagtgaaagttcccagctcgtggaggggagaagagcagttctgtgggtttggccttagacgacaaaggctagggttcactgccccgtgcagacacagtccacaggcactgtcactctgacagcctgatatcactagggcctgagagactgggcaagacagagggctgtcaacatatgttgaccacgtcactgtctgcacttaacagagcagattatcaagatcgta

SEQ ID NO: 142945 - DNA, 330 bp, Homo sapiens
attgtggtgttggtgaaaatgaccaaagaatcagtcagctgactttctccctaagcgctgataaggaatcttttgggagtaagatttgggggtggtaggttttaaataggagaggacagaagggagccagacttgggtccaggagacatagtctggggttcttgacaaatgtaagcagagtgaaaacctgggtagagtagaggagtgggtgagagaagcggggaggcgcctcaagagaacaatcagacagcgaggtgagggaatggaagaaacacagtgaaaacctgggtagagtagaggagtgggtgagagaagcggggaggcgcctca

SEQ ID NO: 142946 - DNA, 389 bp, Homo sapiens
aacgttcatcacaaaactggccgccccaaagggacaccatacagccaatgaaaaacaagagtctccaactggccatgatgaaagaccccagaggcgttaagtgagcaccacagagagcaaaacagcaggagcaaaaagctctgtttccataagatgcaaggaacaggtcacgtatggagggagcaagctctgttttccatcaagtacaaagaacaggtcgtgtatgggcctacccaatttaaggggaaggacacagacgaaacataatagtgaaaccttctgatttctaaaaatggaagtacatctccctggctgggtctcccgcgcaggcccgacccacccctcactgaggtcaagagaggagacctggagcccacctaccctccggc

SEQ ID NO: 142947 - DNA, 474 bp, Homo sapiens
actgcacccctacttcattctacctaaataaatccattcttagtggactatagacctaaatgtgaaagcaacaccttcagataaaatccaggaggactgtcttcatgcccacaggtcagagaagactttggtaatacacaaaaagcacaactacagaggaaacaatacattcaatgacataaaactaagtttattttcattaaaagctatgaactgggaaaagacattcgcagcactcctgacaaaggctaagtgatcaccatcctgtgctgagggcttgtttttgccaactgcaccacacgcatatccacccactaccttcccctccttcatcctaattcaaaacctagcagtaaaatcagaactgcacccagttaaagagttgtgctaaggaaggtcatttgtgtgcccgtcaatgataagactgcataaggaaaatgtggcacatatacaccacggaatactatgcagcca

SEQ ID NO: 142948 - DNA, 136 bp, Homo sapiens
ttgaaggtttgggcatgtcaaggctgagatgctgatgaggcatctagggatgtcaggaggcaggtggataattatgactgctgctcaggaatgaggcctgcttgaaaatacagatttttgcatcatcagcctacac

SEQ ID NO: 142949 - DNA, 488 bp, Homo sapiens
ccctctagtgtccttgtttgaggaactgggtaggtgatggtaccatttactggcatggggaagaccgaaagagaaagaattcaggagtttcaaatgggatgactatttgagatgcctgtgaagtattcaaggggaggtgttcatatagcattgccatctgactctttctctgggttcatttcctaactgtctaactttgggtaagttacttaacctctgtgtaccttagtttcctcatctgcaaagtgaagacgataacacctatttcatggggtcactgtgaagagtggatggtttgtgacatgtcaagagcttagcgtggtgcctggtacatggtaactcctgtaaaggtattagttgctggtatattatcatccttttcatctttatcattgtcattatcctcatgatcactggcgtcattatcacgcgtatatagaagacaggttgagctagagatacaagttgggagttcaaaagatcgtatt

SEQ ID NO: 142950 - DNA, 790 bp, Homo sapiens
ggtccccttccacactgtggaagctttgttctttcgctctttgcgataaatcttgctactgctcactctttgggtccacactgcttttatgagccgtaacactcaccacgaaggtctgcagcttcactcctgaagccagcgagaccacaagcccaccaggaggaatgaacaactccagacgtgctgccttaagagctgtaacactcactgggaaggtctgcagcttcactcctgaacccagcgagaccacgagcccaccgggaggaatgaacaactccagacgctgtcttaagagctgtaacactcactgcgaaggtctgcagcttcactcctgagccagcgagaccacgagcccaccggaaggaagaaactccaaacacaaccgaacatcagaaggaacaaactccagacgcgccaccttaagagctgtaacactcaccgcaagggtctgcggcttcattcttgaagtcagtgagaccaagaacccaccaattctggacacactactagtagttaaacagagctatggtttgaatgtttggatcccgtcccaaatttacgttaaagcttaattcccaaagaaatagtattaagaggtggtacctttaggaaatgattcagtcaggagatttcctcctttgtgaatgggattcaggacatcataaaagtggcattatacagtggtaggtccgttttggctttctgtcccttcaccaggaaaggacacttggagaaagcctgtctatgaggaatgggcctgaccgtgaatgccggtaccttgatattggac

SEQ ID NO: 142951 - DNA, 221 bp, Homo sapiens
tatttttgggataattttaactatacacaactttcactttatttttatcttaagaattgcacctctttataaaattctttttgagaaagagtctcactctgttacccaggctggagtgcagtggtgtgatctcagctcactgcagcctccgcctcccaggttcaagcgattctcctgcctcagcctcccaagtagctgggactacaagtgcgcgccaccat

SEQ ID NO: 142952 - DNA, 489 bp, Homo sapiens
ttcacccaccgcaggagacactagctccctcactccagccttcacccctggagcagaagcccccaggagtttactgggggcaaagaacagccaatgacctttcacaagctcagattatctatgctgcaacaaacatttggaagtggcaattcccagcaaattgcaggcaatttagagtcatttgccaagatgcaatctgccctattgctccagggtctttacaaaggccagccagactgcagcccttgcagaccgcagggtggcaagtctcacgccagcctcagagcctcctcagcagaagtctgaatacatcacttacccagaaccaggttgccggcttacagtcatggtccctgaatcctgcataaaactcacctgaaggagaccagctcttagtgttgaagctacaagacgaaaataacaacttctgaaagccacgtcttattaaaaattaaaacactggacacttatcaatctagttaaggtaaa

SEQ ID NO: 142953 - DNA, 606 bp, Homo sapiens
ctagccccacaggcaatgcaaccccccttggctggtgcctctgcagccaccctgctcactacagcacagcccccctctgtcaccctctgtgggtgtgcaaagcctcaggaaggcgacacccacacccgcataggtgcaggtgtgggaggcctagcgctgccgtcttctgtcccacctatggcctgcagttgctccccagcagctgtccccgcgggcttgtctccgcctatcatcacccactgtggacctgtgccttcagaaccccattcgggttattttaatcttcactgtcaattcttcagaggccccagcagcttttaggataaaagcccgaggctgcatgcagaccctgtaccactttctcgttcttaccctgtcagtgtccttggtgacgcctcagacccagtctcaagcttggcgcccacatgaagcccgggctgctgggctgggccattctctcacaccctggttggcttctgtggtggcctggacagtcacaggagggcatcagggccagctcccatgtgacacacatgctctatctgctgagaagaggcgggctctggtctcagagtcacagcatcatgaacgtggagcacggggcat

SEQ ID NO: 142954 - DNA, 478 bp, Homo sapiens
ccattcatagtataaattgtggtgtcctcatttaatgaaataccaccagcaattacgatgaataaaactatacaatgtgaacaaatttacaaacattattttgagcacagaaattcagcaagaaagaatatatactgtgtgatgatatataaatgatcccacttacgtaaggtcaaaaacaagcaaaactggccaggcacagtggctcacgcctgtaatcccaacactttgggaaacaggtgggcagatcacttgacatcaggagttcaagaccagcctggccaacatggtaaaatctcttctctactaaaaatacaaaaattagccaggcatggtggcacacgcctgtagtcacagctacttgggaggctgaggcaggagaactgcttgaacccgggaggcagagtttgcagtgagctgatatcacaccactgcattccagcctgggcaacagagggagactccatctcaaaaaaaa

SEQ ID NO: 142955 - DNA, 309 bp, Homo sapiens
tcatggctgtggcttactaaagacagaacatgctagcctatgtccacttcctcgctatcaaaaaaccttgcaaactttttggttccccctttgtaagttccaatccaggtgttatttcctatttatccccctgctttttataagcactgattgttctccgatgctggctttttatggacttaatagtctggaacatgcaatccaacagtctcaatataaccctggacctcaacttagaaaatcagttcttttccaaatagacatcctacataggataattttttaaaaacatgaacagccatttaggta

SEQ ID NO: 142956 - DNA, 444 bp, Homo sapiens
ccagtgacaaagatgacattacaaaacaacagtgattccgagtctcaaggcctacaatgcagccttatcttacacactgtcataagcaatgtaggtttcattcaacagccttgggaggtgtgttctttttactgcatttccacaaactgggagaggaaagggctgcggtgacctctgcccctcccagcaaaacctaaaaataatttcaaggctggttacttctccccatctaaactgctagcagcgtagttcaggccatcacaatttctagtgatttccaccaagaagagttttccaagtccttctctgcagagcttcccaacatggtaggactaaaacccaggctcttccccatggctgctgcctgcctcggcccctctccacaccctccctgccccctgctcccagtgctctggccatgatgaccggggcaggcctcagctc

SEQ ID NO: 142957 - DNA, 103 bp, Homo sapiens
ggtctgaaggatctggcttctaggggcagaggcatggaggatgatagtagagaacatatctaccaagggacccagtaactcactgaacctaaactatggctgc

SEQ ID NO: 142958 - DNA, 426 bp, Homo sapiens
tcgcccggtgaaggagcatgggcgggagtctggctgcctggctgcctccgcagcctcctctctgccctttgccctggtctgccattgtccctgggtgtcctctgtcctctgtcctagcctcctgaaggagagtcaggcacattcgtagctcagcttatcagaggggccttctccatgacctcggagtctgagtcaccaccacatcccctgagaggccacatgaatggccagagagatttgggggcccggcctcagggcccctgctcctttcaccaccacgggggctccagggaggaggcgcctctcagacccgagctggctgatgacaccatcagtgccatctccaggctgctggaggccatttatagcaactgcccttctgagtgaggagcaaatgagtattttaaacacaccaggaagccatgc

SEQ ID NO: 142959 - DNA, 433 bp, Homo sapiens
caacgctcctgaaacatgtgattaaccacatgcccaaaataacaaaccaaagcaaacaacagaaactcctttgttacttagttccttcaaatcgtttacttaaggttgtgattccttcatgcaccaaacatttcatgtgtgctaggcatgagagacacagaggtttcatcttaaacaactatttaaatgctcatgccctttaatttttcctgagtaaatactatgttaaaaagctacattgaagaacaagttgtttatatacaggaggcagttccgggtagacctactgagaatgaaggaggtggcacaggaaaagtcagctaccacaaacttctgacttttcccagccaatcagaaagaatgcttccctggtaacactgggagtggtgaagaaagtacacacaaaaaggctgggtgcagtggctcacacctg

SEQ ID NO: 142960 - DNA, 490 bp, Homo sapiens
ggcagatcctcttaaaaagcttttcaagaaaccaggtattaaaaaaatccctaaatcaagggaagaactatcaatacaaatttttctttaaaggaatttaaaaaacgcacaagagctttctgtgagattacatctcagttttatccctaagagacataattcctctacagaggctgcctactgagaactgttgatcaaccagaggccaaatgtgagtttacttctgaccatgccactcactggaatctgatttttttattttcatgtctataaagtgaggatggggacactatcctgtctaactcatggggttgtgtgagaattaaatgaattttcacagctaacctatgacagtaccttacactcaaccctcaataaatcagaagagttttcccccaatgattctgtgtgtcagaaagtgtgaagggtgaatcagagttaattatagaggccctgtgatcctaatccacagtctccctattcttttgtc

SEQ ID NO: 142961 - DNA, 283 bp, Homo sapiens
attcagtttaaatgactatgatgtctattttctttctactgggtgacattttcttcctgcttattaaaatacaaaagatctgtaatcccagcactttgggaggctgaggcgggcggatcatgaggtcaggagtttgagaccagcctgaccaacatggtgaaaccccgtctctactaaaaaatacaaaaattagctgggtttggtggtgggtgcctgtaatccccagctactcaggaggctgaggcaggagaatcgcttgaacccaggaggcagaggttgcagt

SEQ ID NO: 142962 - DNA, 311 bp, Homo sapiens
ctgggcgacagagcgagactctcttaaaaaaacaaaaaacaaaaaacaaaaaacccccccaaaattccatttaatttaatgccatcatttatgcattcagcaatatttttgagggcctactatgtgccaggcactagttggagttgctgagggtataagatgaggttccaattctcatggagcttatcgtttagagggaaaacaatacaaaagtaaacaagtaggtgaggatttctgagtgtgctaagaacaaagtagagcagggtactgaggtgtgagcacatcagtagatttcgtaggaaaggcctttc

SEQ ID NO: 142963 - DNA, 820 bp, Homo sapiens
attaccggatgcataacctctggttttatttacttggtgcagctttcatagaaggcatggaaaggagagaaatacagagagggagctgccaaaagttagattcaggcagcaacagaaaaaagattagaatccacattgtcagggaattcatccaccccttggtctcccggcaaagtggctgaaggaatagattcccccagacaacttatttctggttgatttccttggggagaactagacctcttttcccaactgtggctctcaggactgtgtgcatatagttgtttgtgtctgctctgcttacacttgacacctgggctcaggaatgctcctgatggcttcctctgcagagtgaggactgacagctccttcatcacggttctcctcagtgccttgcacaggacttggcacaaggtcaggaaatattttactgagtggatgaatgaaagaagctcaaagtaaaactgttccatcaggccagatgacgttaattctccaccagcttttatacagggtgaccatgttcctggttcatctccttgtaattattaatagcaccccttttgctctaaaggtgacctgatttgaaggataaattacagtcgtcctacatttcaggtactattgacagattggtgaacatatttgcagtagctaaaagaacgtgcaactcagtttgggcaaaatgcatggcctatttctagggctcataagaacttcagttgtcccagaagaacagattgagagggatctacaatgttgtttagcataagtttgatcctgttcacctattaactatgacttgctacgttagtagcaa

SEQ ID NO: 142964 - DNA, 463 bp, Homo sapiens
aacaaatataatgaattgcaaggttctgcagatttacggctaattactcttttctacttcttcatctatatttatcataatgtgatccaagatcaagttgcatcaaaatcaccaggatccttacataaaatactcattctccaacataagcccagaactatttaaccaacacctttatggtggactcaggtataaggcattaaaaattttccaaaaagggacaatgaggcatgctgaagtgtgaagaatgcacctagctttatggaaattggtgtttaacgtctaggtggtgtatttattttaacaatgtacacttaatgatgggacacacatagatagttaaaagcaaataaatagtacccaatgggtagttttttgcctttgcaccttccctccttcccatcacacaatatacccatgtaacaaacctgcacatgtacccactgaatctaaacaaaagtta

SEQ ID NO: 142965 - DNA, 331 bp, Homo sapiens
tggaaggggctagattgctccaggttcataactctgattgcaaccaccctctttctcagcctttctggaatgtggctgtttatgctccatgtacccctgggaacttcctgattgcccaacaaagattcaataccccaggctttggagtcattagactggagtttgaatcccaggttcctgactcaagtgggcatgttatgtaacctgtctgagactcagtttcctcatctgaaaatgtggccaataatagtctagacctcccagagtggtggagattaaaagaggcaatgactgtagagtgcttagcacccaatcaatgtcaactattagg

SEQ ID NO: 142966 - DNA, 777 bp, Homo sapiens
gcggccgcctactactactactgctcgaattcaagcttctaacgatgtacggggacatgtgggaaagagtattgatggttagtcactataaaactgctagttgttattcaggatacaggaagagtttcaagagaggacatttggtataacattatatacagccaatggtttaaggaggacaatgtagaagaggttgtggatttggcacttaggaggtcattgttgacagaccttgtgaatagatgagggtaggaaccagattcctgggctttaagtaagaagaggggtagtccaataggccagttatatatttggctgtgaaagaggaaaataaaatctgagtacctttgagagtcaaaggctatttccaggtaaagaaacccagtgcacttcaccattctcttttagataactgctgggaagaagtaggatgattgtaacaccctccacattgacacagaactctaaatgggagcctagggaaagggcacattttttgaaggggtaggcaagaggatattctctagagtaccagtttccaactgttgtacacatttatggaccaagaacataaaagaaacattgttcagttccgacctgaagttatgtagaacaaacattgttctgagttcaactagatgatctttctttcatagctgtgtggacattatgttacctgcagggagtaagtcactgaaggtagagcctcaaaaaaacaccctttgatcttactcctaagaaaaaagagagaaattggaaaaattcatcatagaaaca

SEQ ID NO: 142967 - DNA, 724 bp, Homo sapiens
gcagagtcgttgtgacagtcaatagttacattattaaatgtaataatatttgtattaaatgtaatcattaatttaacagttctgcatttaaaatgtctgttgaatgctttaggtctcatgctttctgtgacacattgataacatttttaggtcggctggtagcaggtgagtcagtaggtaaaacctcagagtttcattacacgttgttcatgctcagatttttagatctgaaagttacatatagattgggatttccaattcttcaaatggcttgaatattgggccaagaaaatatttgtgtgttaaataagctgataagtattttcaagcacttagttcggggcacagttctgggtgctcaggagatacatggagaagacagatccagtccccaaatacaaaggggttatgtgacaaaactgctcaccaagagctgtgcctaggacaagtgtggtaagtgtgagatctttcagagggtgctggagttggaagggaaacacaccatcatttgatgagaatgatggagcaagtagactgcagtcagcccagttgctacacctttgcagcctgcttggctccttctctccctcctccatctggagacttgcccttgggcttggcgtcagcatcatttctcctttagagcctttcccaaccctccccacgcagggatctccagaagagtcgaatgttcttcctctctcacctaaaacagcttacttta

SEQ ID NO: 142968 - DNA, 259 bp, Homo sapiens
cagtttaaggagcggggaggtgcagtgctgtgggtgccaggagtttaaggagcgtggagatgcagtgccgtgggtgccagtagctttttgcagacaagagtccttctgtgctgtgctgcagcgagagctacgacattccaccaaattacttgccacatttctggcattagcaggagatagctgaaggtctgggaattaagtcatctcataaacattcaaattcatggtaaaattactatttaattaggaaaagatctgt

SEQ ID NO: 142969 - DNA, 528 bp, Homo sapiens
tgtctaagatagcacaatttccgtggtacttactattaactatttctaatacatgttgtttttatgctattcaattaaagtaagctgtctttactgaacagcacaagctgcttgtgaccacccagagtcggtggagaacctgactccagtctgccatgccagtgttctttgatccccagtttgacaccatcctttacaaatgtatgtacatgcttcctaaaagctttttaaaaattagcacattcagaataatgattacctctagctgggaaatggggaaatgttattggaaggagaccaggaaatgtcttggtaaatattctacttcttaagctgggtgataggtacccagatgttggctttattattatttgttgttatttacatatatacatcatcttttgtagatatgaaacatttcataataaaacatgaaggaagaaatgaatctagtcatgattcacttgctctaatatcattttttgtttctctccagtttgatgtgatgtagctctctggatgcaaacc

SEQ ID NO: 142970 - DNA, 181 bp, Homo sapiens
ctatgtttacttcttttccccactggactataagccttacaagggaagggaccatgttcatttattcaccaatgcattcccaaagtgtaggattaagactggtggatactggactgctagtaaatatttactgaatgaaagaattttttaagtgagtgaatgaacttcatatgcatatgtt

SEQ ID NO: 142971 - DNA, 195 bp, Homo sapiens
ttctctcggaagggcgcttttcctccatattggaccccctcctatcatccagcgctgtgttcccccctctggacgcccctcttcgtgtcgagccactcccactctagaatcctgcttttatcccagcatctttgctttctatgttgctcagtcgccctatgtctgctttttcatttttcctgttcctcgtctcct

SEQ ID NO: 142972 - DNA, 136 bp, Homo sapiens
gttaattcatgtaaagttcatagaactgtgcctcacaaactgtaagttttcaggaaatgctggccattaatgttttcaaaaatatttttaggctgggcaggatggctcaagcctgtaatcccagcactttgagagg

SEQ ID NO: 142973 - DNA, 167 bp, Homo sapiens
ccacaaacatgtcactggctaagagggatgcattcttccctccaatccaaggaaaaacaagtgtgtgatcacttgaaagatgaccctgtatttctaactggatgtccctggagtctgctgtattagtgtgggggatgacagctgccctgattctatttccccttccc

SEQ ID NO: 142974 - DNA, 358 bp, Homo sapiens
cggggcagctgcaccaccagtgagtctcatgtggttggtgctgagcctgcatctgagcgagtgagccgaggcctggtggaattgccctgcggtctcggtccattgcctcctcctccagtgagagcccccgcctgagcacacccaacctgccacctgtctttacctttcctctgcggtccctgactctgaactcttcaagtaatgtggagttagtcagcactttattgcttctagggaagcagaggtgagaatttaggggtggaccaagaaagctagatcctatctgtggagatccaggttgtgggaggaggtttcatgacatttcttagctgttcctaaaagacatgcgaagcttcac

SEQ ID NO: 142975 - DNA, 426 bp, Homo sapiens
ttttcctgaatggcctgtcttgctactccaagtgcaatctgaagatgagcagcaccagaacaatctgggagttagaaatagacacttggatccactacaggcctgcagaattgggaagggtcttgttcctactcttttcaaagttagagatgtactgccttaaggtttagactatttggtaagccacctgagagttcaatgacaaggcttacgtctcttcctgcatcaaggaaacttaccctagagctaaccttcctggcttaaccaaatgtcaaaatgtttcaaggatcaaaggctcctagtatctactctcctagctagcacccagacactgctatctttagaacgcaatttagaaaaattaaccagcttttctcagaagccccatttttactaggaacaagagaattccaaatttttgtgcaa

SEQ ID NO: 142976 - DNA, 712 bp, Homo sapiens
gacatagaaacacaaagtgagtacatgttattggaaaaaatggtgccaatagacttgcttgatgcagcattgccacaatattcaattggtaaaagcacaatattgtgaagtgtgataaagcaatgtgttagtctgttttgcatggctataaaggaatacgtgtgactggctaatttacaaagaaaagagatttatttggctcattgtttagcagggtgtctgggcaaggcaccagcatctgcttggcttttgtgaggcttcaggaagcttttattcatggcagaaggtgaagggggagcagctttgtcagatgacaagagagggaataagagagggggcaggtgccatattctttaaacaattagatctcacaataactcatgaccacagggagggcaccaagccatttatgagggctctgaccccatgacccaagcatctcccactaggcccaccatcaacattgggaatcaaatctcaacatgagatttggagggtataaatacccaaaccatatcaagcaaagcacaataaaacaagtatgcctgtatttatacacatattacaaaaaatatataaactcactcaaaaaaatgtttttggggggcgctctgggccttcggaaaaaatttttttaaccccctttgtgttggggcgcgggggcccaatttgtttagtgaacacctggccaaacagcgtgtccacgggaaac

SEQ ID NO: 142977 - DNA, 291 bp, Homo sapiens
ttcaactatcagagctatttaaagtcctgcttcccaccccaagtctaaacctccaactctggcctctcttccaagctcctgacatttgtttccaattacctgacatctccacctggattgaatcccaaaccaaaaccatcatcctccccctgctccaaacatgtttccttatattcctataatggctactggcttgaaatcctagaaactaagttcttattcatttatttcctccatatctgaattggttagaatcagattgtaagatcaactgcatgtaacagaatctca

SEQ ID NO: 142978 - DNA, 394 bp, Homo sapiens
tcgccaggacgcggccactgtctggatgtagagagagggacggccacaatgggtcactgctgagtctggacaggcagggaagccatcacagaggggtgaggggagtttcgttgctgtctttggttgagagcacacgcagcacccccagatcaaggtgacctgtgggcaggaatgagtccatcttggcctggaacccgggcgatgggtgccctgaatgtttctcccgttggctagagccgattcctccccacccctcgccatgccacacggtcgcttccttgggaggtgttagcaagaaaagcagaagaaagcggccccaggcatgttgggggaggagccccacccagtggggtgggaagacatcctccgtggctgccccaggagcttaggaact

SEQ ID NO: 142979 - DNA, 361 bp, Homo sapiens
atagttttcctgaaatgtattcttggaatggaattgtatgatacgcttagaaaattctgcataccttatacttcagaatgtgtatgtaaaagactccagtaaatgatccaggaagcaaaaatatttgtgtgttttgcgagttgtattcatatgtgtataaaattcccacagcactttgggtaacaatgctctgcacacttttcctgtgctccttttatccattcccacacttccagcatttcctttgacgtttgattttctttatttttttttactccaatattttcctgtaggtttcaaacctatattttaaaatatcaactgattctctccctctgtcttcaccacctgcatctcaaat

SEQ ID NO: 142980 - DNA, 133 bp, Homo sapiens
caggtataagctataacacaggtgggctgagccagtgcataagccaagcatggcccagtgggtcgagtgtgtgggtgccttctgtggcaggcctgggttgggggtgtcaccagccacggaggtccccggttgg

SEQ ID NO: 142981 - DNA, 190 bp, Homo sapiens
accctcagcatccaggccaccttcctctgggtgaattttcacaccttgatcatccctcagtgtatcctggcattatgttagtgctttaagcagagctggtacatgctctgcccctggtgggtcaaatcaagtcctggtcctgccccttactaactgggtgacaccaggcaagttacttaacctgagtttc

SEQ ID NO: 142982 - DNA, 609 bp, Homo sapiens
tgtttatttccttaaacagaaataaattcaagcatagttttatgttttattagaaataagccactgcagttgctagaactgacatgctttcattttcaaggggttaacttttattgcatggcatagattattagtaatatcctgcattgtatacttttccaaaaagggttggactcctaaggattagaatccttataagcttgagggaaagctgaaactaatttgaacagtaatagaagggattatttttaatttcatagttaacactttacaatggattagatttattacctagtataatccgtagcagatcagatcaaagtttactgttttaccaatatattcatttgaaaaaatacagtggaggaaaagacactttagatggtagttttatggtgcttttctctgctgtaccaaagtgctttgtcatcaatgaaatgttaaccctatgctactttttctgcatgcttcttaaatgtcatcttaatgcttaattgtcctaacttgtaatatttttgtattaaatttttttaggagttccttgtaatttctttacaatttaaaatatattaaacacaaagtgtttagtaaagtacagaagacaattac

SEQ ID NO: 142983 - DNA, 674 bp, Homo sapiens
gtaaccacaggataaaagaagaataaaaatatagagagagaatattagatcagtgctatgaaaaaatagaacataggaatggggatgttgctatttagcctagacaaggaacacataactgataaggtgacatttgagtagagacctgagagaaatgaagtaatgagacctggatattgagataagtaagtgcaaaggtcccaatttaaaatgattgatgggaccaaggaatagatattgatagtccagactaagtggtagtagaagtgctgaaacatggtcagattgtggatttgttttaaaggtgggaccaagaggatttgccaatggattggatgttgcaagtgagggaaaatggtagtcaagggttactatagtattttgaaccttagcaattaaaaagtgggcttattatttataatgggaagagaagagttgaaagaagtaaagaccattgaggtagcagaaagaaatgggagagttgcaaagggtatataggatgaaaatgggggaactattatagtttgtaaactgatgagcaagagctatggattcaggctgccaggtttgaatcctggctccctggctgtgtgagcttggacagtgtttggcacatagtaagtgcttattgttagctgttatttgaataattttttacgtaatagataggtttg

SEQ ID NO: 142984 - DNA, 388 bp, Homo sapiens
aggtcgggagttcaaaaccagcctggccaaaatggtgaaaccctgtctctattaaaaatacaaaaattagctgggcacagtggcgggcacctgtaatcccagctacttgggaggctgaggcaggagaatcgcttgaatccgggaggcagaggttgtagtgagccgagatcacaccactgcactgggcattagagcaagactccgtctcaaaaaaaaaaaaaaaatggactttaaaaagtgacacagaaagccggctccagtggatgggtggatggagagaaagctgcagtcaagagtgaatcagatgggctttaaaagagcatcagacttaattttttatgtttccttttatttgtagtcattcttttacttgtcacatattcattgc

SEQ ID NO: 142985 - DNA, 278 bp, Homo sapiens
tctgtcctgaaggcccataagtcacagaatgcggtgtgttggaatgtgaaatcctttcagccttgcagaatctttatcattgtgctaaattgccatgtggaagaatggcaggtggcagttagaacttagggctttctatttattctctttctattttgcattagtcagttaaggttctgatcttcagaactttgtatgaaagtcagtgcttcatacaatttcacatcaaactgtggcattgcaagaggcaaaccatttggaattcttccttaaattac

SEQ ID NO: 142986 - DNA, 446 bp, Homo sapiens
gcgactctaaggatctccccgggagcctgaaccctctgtgaggactgagcaggaaatgggcggaaatggttcagcacagtgagtgctcagtgatgcggttgtcattgataatccatctggaagggattgcttgtcagtttcaggagactcagagaccactccctcctccaggaagtcttccaggctttaagtcttgggtgggaactcaaactgtgggtgagttgaattggattttcctttccacaaggtgtctgtccccctgtgactctcactgcctgtctctcatcatgggcagggactaggctgaattcctctctgcatcctaggactctgctcagaccctgtcacaaagtcggttttgggagctgttagataaatgaatgaatgaatgttttgaggactcagcactgagcattcctggacacgataccattgttctgagagcc

SEQ ID NO: 142987 - DNA, 346 bp, Homo sapiens
gcacagcccaaaaaaccagatctggagttagatggacgcggtttgaatcctcgttggtctcttagccttggtgtgacttgggcaaactgacttcctttttccgagcctcagtcttctcatctgtaaaatgggcctgatggcactcctctcatcctggggctactataaggagtcagtgagtgtgtgactgggagtcagtgaagggcctgacccattgcaaggctgttacagatcatggtgttgtggcaggttgtaatgccccccaaaagatgtccaggtccttatccttacaacctgtgaatttgttaccttacatggtaaaaaggaccttgcaggtgggattaag

SEQ ID NO: 142988 - DNA, 442 bp, Homo sapiens
gacctaatcaataaaaagcaggcaaagatctcaataaataggagagccttccaggcaacataaggcccaagcaaaggcacagagatgatggggaaaaggctgaccatgttcaaatacatattcttaaagaacaggagatgtacttcataaaagagtgaggtcctatatgaagtagagtcaaagggactaggtccatttaatcagaaaagaaagatggcagtattttaatagaaccttcaattatttaaaggaagtaaacaggggaagaggatggaaaataatggtgggaaacttcctttacattgtcaaaggcctttttttataagtgacactttagcagggacctaagaagaagagaaggaaccagccatggaaggaatgggaggaatgacacatgcagagaacatgaatcaaaaggagctttacattatttggggaatgt

SEQ ID NO: 142989 - DNA, 276 bp, Homo sapiens
gcacctgttaagggaatgggaggaactgatgagaactctagagcagcagaaattggtagcccatagcagttcagaaagagaataacttgaaaaacagatggaaagggggtggggaagagccatgtgagttagaagaacaaaagaagaaaatggtgcaacatcctaaatatttcatgtatcagacccgtgtttttggttcttatacttgttcccaaagctcagaccctcatctccgtgtgagggatgactgcttttcagcagtatcccatgcttcca

SEQ ID NO: 142990 - DNA, 334 bp, Homo sapiens
tcctgcttcaacccgccgagtttgtctttccaaatcacatgggcaattgattacaccatcaacaaaccccatgtaaccctccaaggaacgaggtgcgtcccttgcagtagaaaaccgataacccaagacatgaaggttcgaatggatgattggcttagctggaattgtgctcctctggaggagactttttaaatgtattcctagttgcaagtccagaagcaagggaagtgaggccctcagggttctatcagagcctgggaaggggaggagagcagagatgctaaagcagtagcagaagatccacagacccctggaaggacatggaagctcgctt

SEQ ID NO: 142991 - DNA, 702 bp, Homo sapiens
ataaggcagacagcaacctcatcctactctttatgtatttcttattctccccttgttttctgatggttgtactaatcaatgttagaatgtttaattatttcttatattgactcacttgtgattatctaccaataaaaatatatttgcaagtaatcatcagatcatgtcattatcaatctcccacctccccttttttgtttgtctgaagctcattttctaaaacattcctcaagaagggcttatagaaacagtggtccttgagtttctgcatgttcctcacagtttgcctgtggcctttgttttaacggtcagtttggctggatataaaatctgtggatcccattttctttctttaatattttaaatacattctcattgttttctggcataaaacattgctgtcaaaagtataacaatatggtcaggtacaggtactcacaactgtaatcccagcactttgggaggccaaggcaagtgcatcacctgagctcaggagttcgagaccagcctgggcaacatggcgaaaccctgtctctacaaaaaatacaaaaaattagctgggtgtggtggtgcacacctgtggtcccagctacttgggaggctgaggtgggaggatcacttgagcctgggagatggaggttgcagtgagccgagatagtgccactgcactccaaactgggtaacagagtgagaccccgtctc

SEQ ID NO: 142992 - DNA, 334 bp, Homo sapiens
tgtacatacatccattctttgtctgaagtgtaagtggatgatgttttcttaccagctttgagatagagtctacatataatgtgcacttcaggaagttttaacagatgcatgcagttacgtaaccggcaccacggtcaagatggaatctttcttggtagaatggtagaatattgctaccacccccgaaattgccatgaccacttttgcagtcagccctctcccctgactcctagcccttggcggtcccccatttgctttctgttactatattttgcgatttctagaaccttatctaaatgcagtcatgtatttcatagtcttttgtatctggctt

SEQ ID NO: 142993 - DNA, 550 bp, Homo sapiens
agtttagagtagtgatggtgagggcattggagtgatgatgatagtggtcggaacatggtcttcacagttgccttattggtcatagcctaggagtattgcctactaacaaacccaaatgtaactttgtccctgctatggaacatttaggatgttttccatttttgccccttataaatcatgtctcactaaacgtcttccttcatacagttttattcttcttttgaatgtaacgtttggatgggttcctagcagtaaaattactgagtgaagggatatgtgcattcataaagctctcgataaatgaatattgcctgattacttttcacaagggtgctatgaatttatactcccacccaaatcaagagaatggctatttatagatgctttcagagccttagcttatcttgtttcctgtttgaactttattacataaattttcctttaaaactgtcacacacacacacacacacacacacacacacacttttatggggccttggggccaaagatggaatgaaactatcatttatcacatgattttgataggaag

SEQ ID NO: 142994 - DNA, 176 bp, Homo sapiens
cagcgtcatgattatcgtagctctgtgcaacctgaaactcctgggcacaagcaagctttttgcctcagcctcccagctgggaccgctggtgcacatcaccatgcctggctaattgctctttttctttttttttttttgttttttattttttttttgtttatttatttataaggggg

SEQ ID NO: 142995 - DNA, 230 bp, Homo sapiens
cagctgacccctactgatccttccagtctcaaaataaacaagcctttttttcagtctctcatgaccctactttgcttccatttactttgttacaatttccaactggatattcatttatgtgattacttgttcattgtctgtcttctctattaaccgtccctaccctaagaggaggggccatgtctgttttgttcatctggatgtcttccgtatattttaaatgttggttg

SEQ ID NO: 142996 - DNA, 748 bp, Homo sapiens
ctaaattattttaataaataatgtagtttatatagtgttattctcatttaatgatagtagttgaggcaagtgaggcttagagaggttaaataatacacagttcatattatccctctagaattactggatttttacttctgatcttacttttctaaaaaatcactgtgaaaatcgaatgtctataattaacatgaaattaattaccttaaaacttaaacacatatttttaaatgatgctttgtaacagtggttttcagtgtgtgttttgtattccctttgtgttttcccaaggacctagatgatagcaagcaggaagatacagtcttccacttcagctagagcagtgctgcctttttgttttatggggtgacattgcccactgtgtttttttgtttctaaagcacgttccattgctaaaatgatttgaaacactgtactttattaatacttgttaattgttattaatactaattaattgttttctctttttcccccattgatgactttctgttgcttggaacattttttttctgttgcttgaaacatttttttcccctcttggcttccattgtactataattgggtggctttcttccttcagtttttagctgtccctttttaatttctttgtggtcctccccagtctccatgtcctgtaaagtgtgaaaatgttccaggcctcactcttaggatctctccttttttttctgtttatcctcacaccctaggtgatttcatctaatcacct

SEQ ID NO: 142997 - DNA, 687 bp, Homo sapiens
agcgaatgttatttaaatcaacttgtgaagtcttcattttagatatagaatttgtgttaatgaactggaaaataacattctattgcttggaagatgtgttaaagcctaaaattttatgactttgtaaaagaagaaaaccagctggtgatcagttggcattagtatataaggatgtactcatatttgataatagccatttttttctaacaagagtaagggagttgggaatgggaggcagagacagggacacagatatataaaaaattgtagacaaaactgtattgcgttctgagtatggttctgtgatccatggttcagtttgagaggttcctgtgtcccttatgagaagggacaggaaagccaggaggacaggagtatgtttgggcctgtgcctgtgcttccaccacagaagtcagcagctctacctttctcttttctcctctttatctaataattgtttcctcttcaaatttgggaaatgagcttaatcaaatatttgttgtgtttgttgtttttgaaatgtggcctcagtgtgtttgcccaggctgatcttaaactcctgggctcaagtgatcctccctctcagcgtcctgtgtagctgggactacaggcttgtgccaccacaccagctaagttaatgctaatgtgtagtttatctgattcagttttgaagggcggggtatatat

SEQ ID NO: 142998 - DNA, 215 bp, Homo sapiens
aagggatccacggaataaaaaagacggcattcatgcagccctgcgccactcaggatgccttcagaaatggccacaaaaaggaatagagatgccagagggtcaattcacccagttttgtgctgcaaccataattactgagcacataaaacccgcacttggctatttatctcacaagttatgtttccagatggtaatcacacccaggactttggaca

SEQ ID NO: 142999 - DNA, 669 bp, Homo sapiens
accgtaactgaaagtgttctttccattcctgctatcctcacactagtcaagctatatcacctcacccccttctaatctgttacagtcggctcaaaagcccccctccatctctgatgctgttattcttagagtcctagaaatgagagatggaaaacttcaattaaattcatctagtccgtctcccctgacaatgaaaaaaaatagtatttcacattatattatctaatgctttttcaggccttccatgataacctctgagagactgtccaataggctaatagacctcactttgaggtcttcattttgacccatcatttctcattattatattccttaaagccatcatcctcaatattcatactttgtgaacttgaatgagattagcacagtctctgttagtcataagaaaatcaacatactatatagagtatgtatgacattcaatttacaataaaatttaaaaaaaatcagtatacgcctcattaacaggaactgaagtgttctacagaagtgaattttccagatactaaacttttcttccttaaccaccagatttagtttggttttaataattttgagggggttttccctcctatgtgttatttccgtactttcttgagtgaattcaacttttcttaataattcacattaatcattatcagcattctg

SEQ ID NO: 143000 - DNA, 426 bp, Homo sapiens
attctggtatttcccaataaattgatcaaataatgcaaaatgccaaaagtgagagtccccattctatttttatttccatgttagaagtgaattttgacttataagaacataaaacatcaagctaaagcagaactcaccttgtgaaatttcctcataccttattttagatactgatttaattagccttctaattattttggtgggtgggagtgggtagataatgatagcacataacataagaccatctttaactttaattagattagaataaaccaaatccaagctcacatgtaattaagcagaaagcatcaatgtcaataagaatttgaaaataaaacaggaaactcataatgtgatagaatattcatttggttttgatgtgctagagaaactggtacacattataaaatgtatcagatgacacaa

SEQ ID NO: 143001 - DNA, 292 bp, Homo sapiens
aaggagagatgacacagccgccatctctcgatggaggaattgcaaagttctggaatgaacatatgggattgaaaataatgttgtggccttatttggaaaatacagtctgccacaggacatttcacagatgttgaggggcagggcagtccccagctgatatctgagttacaatcaggaaaaaacaacaaaactattttttttttaaaaaagacaaaatattaactgaaatagacttcaaatcaaatctaagattatttagaagaacatggatgaagaatagggacttttattg

SEQ ID NO: 143002 - DNA, 236 bp, Homo sapiens
agcaaatacaaaatttgctagagaatatattttagaaatcaaaattttaggagttctaatggtaagtaaagaattttaaatttacttttctgtaatgtagtgtaacttaatttctatgcagaatcttctactttaagagtgaatgttaaacatggcaaaataataaagtgacctctgtgaatttgaaatttgagataatatttcttttccatactgatattacaatttgaagaaat

SEQ ID NO: 143003 - DNA, 468 bp, Homo sapiens
gcaactggggagacagagcttctgccgtgaactgatgggttccagaaaatggtcttaagtccattggtcccttgaatcagcagaagtgacatgatccaggcttccctgacacgtcatggggtcaggaaaagtccttgtgtttttttcttggcctcctgctctttgtgcctatgacacagagaaggcagctggctttccccaaacagggagttacactcagaccttacgtcttttctaatcaatgtttaatgtgaatcactgatttttttctagtagactgatttctaatactttcaatctaggatgcttaggattcaactaattgtcaggaatcttacttttttccccctttgattgatctgagtgaaaactggtttttcattgttaatcagaacgtgtgtggcagttttctttgcatactgtgtggctgtgttctttgttatatgagcatctggccttggctaagta

SEQ ID NO: 143004 - DNA, 775 bp, Homo sapiens
gggatttttaaaggtagccagtccacaacaatgaaaaaaaaattaccaaaatgtatattttctttttttctctttgaaaatgtatattttctttttttctattttgaaaaatttggccgggcacggggagagcatgcatggtaaacacagacaacatatatgggagagccgagtgggaccagaattacaatcatgtaaccctgcacgctcaggtggttaagaaaaagcgactctggcacaacatggatgcaaacacccgatattaaccggataacaaatatggcggagccgcctattagcccagacgtactacggcacgctgacaaacatacgagaaaatagatttgaaaatccgcaaagtatggaagtttgaaggaggggaacgaaaacagacggacaaactgaacaatctacagtgcgtgaacgacaggaagatgagtaaattcaggtggtcgcaaaaaaaaacaacagcaaaccaaagaaagacaagagctgacaggatcaacgcaaacgcaagcataacaccatactaaaaacaccacacaggtgtagcacgcgcgggcgcacaacagacgagaaaggagagtagacaacaaagaagaccaacacagaacaaacacacgagtcaacacatacatggcaacaagaccaaatcaagaaccaaaactcggtgggcaacaagagtagacactagcaacaaccacgcaatcgacgggtaagaagccaaaatgaagaaaaaatcacgagcgtgtcgacgactacacctacaagtacc

SEQ ID NO: 143005 - DNA, 454 bp, Homo sapiens
atgtcatgcgtgaataacaccagcagcaaacactcacacatcacgcagacacggccggcagcatgctgacgcttttaggtatttttcactcatgcaattttcacatattttcactcatttcatttgcacggaaattctatgaggtagatgctgttatcaaatccacattacagatgagggacccagggtccaggaaggtgaactggcagaagtctcccagctggtagaacagggctgcaaggcatcgattcccaggtgtctcacagccctgagaagatggcgttttccctatcagtggctctgaggaagtcaagccttcagtctctacctctcccaccaattcttttggaaacagcaaaccaatgttacacacacttcctaatccagaggaagctagaacacgatttttaaatttatttagtaaaataaaactttttttgcagatgtaacgaat

SEQ ID NO: 143006 - DNA, 801 bp, Homo sapiens
acttgagcccagaagattgagaccagcctgggaaacataaggagactgtgtctctataaaaaaatattttttaaaaaattagccaggtgtgatagcgtgtacctgtagtcccagctacttgggaggctgagggttggaggatggcctgagcccaggaagtcgaggctacagtgagccatgatcatgccactgcactccatcgtgggctacagagggaaaccctgtctcaaaagaaaaaaaaaagagtgtggtggggtctgcaagctggtcagagaatgctaattggtccagacacactctaggagaacataaaatttggtctccatcttgaagcatatatagcactgaatagatggacagaaagacaggtgccacaaaagcagaaggaagaaggcagactgaagtctagtgtgcctgcgggacagtgaggggctggagtcgagagagagggaggagaggaaaaaaccaaggctgaaaatttggatgaagccagaccctggaggatcttcagcagtcaggaggaacatgcatgcaaagccagaaagaagatagttgatggtcagggtttcagggcttgctgaccaatgaaaccctggtcctgtaattctgtaagctccagaccatttcctccacagccacacctaccaacccatctaaattgacagccccggaggctgggggcacacggaggtcccactgcgcactattctgtgagtctggattgagtagcactgccacggggttcacctagcccaacacattcaggtcatccggccgcacacccacagtccacccttttct

SEQ ID NO: 143007 - DNA, 352 bp, Homo sapiens
cagggcgtacaaggactaaggatgacagatgaagaagagggcaggatctagtggcttgaattggaaaggtgactcatgtcatctattacccatgcctgatggcgtatcgcctcatgtactaactcatctctctgtcaatgcccggctctgagtgctttgggaattctatactagacacagtgggtgtcatgaggttaggtcagaccatggcagcctcttactggtggcgtagccttagttgagtaactcaccttcctgggcccaaattttctcttccaaactggggctgctagtgcctgcctcttagggtgtgaaggagccagtaaggcatggatatgcccagcatggctgt

SEQ ID NO: 143008 - DNA, 397 bp, Homo sapiens
cagcggggaggcaggaatagggatctgcagggcagagagacttctcaaccttcccagggagagaggagacatggaaaaatcccacagttaagctgtgattggtcggtctgtccaggagaacccagggatctcaagttcaagtctcacctaaaagcgttcacgttctttgaccctatacttccccttataggaaaacactgagctgttcactgcaatgttatttataataacaaaaaatcagaaatggcccaatgcccaataatagaggaatggttaaatatattagggcacacccagacaactgagtattacctagtcattaaactcatgttttcatagaatatttaataacataagtgaaaaatacaatacgaatttacataaagatcatgattct

SEQ ID NO: 143009 - DNA, 407 bp, Homo sapiens
gcactctgggaacaggcatcatccatttattagcgacttttgttggctgttagttcaacaacaggtgaacatatacttgttcagtagccagtagccactatgtgccaagagctgtgccgcatgtgcaggtttcaaagatgagcaaactgtggtgactgtccttgaggagcaatggtctgggaaggggaccaaggaacaggcaagtaatctcaatgaaattgccaaatatcagaagcggaagtcacagaagcacagggcccttccctagccttccagttcttctctctcttccttgagaaccgaagttctcacctgggccatctacaggtgctgagttcatttccccacccccatctggctgctgccccaccactccacacaagcagctggggacaccaatgtcctcg

SEQ ID NO: 143010 - DNA, 701 bp, Homo sapiens
cactaactttataaggatggacaaggcagatgagaaacaaagtggaattagataacagaatgtagactttgactctctcacttttaaggactgtgaagttgtggaaatagtagaaaggtcaaagaagggagacagtagaccattatatcaattttttaaaagactgcaaagaatattagattcattattaagactttagaggcctctacaactatatagagtcagaattatgaaggtaaagtcacattgcagggcaactttgaatagatagaatacttaagctaaggaaatcaggaattagaggtaggtaacagtacactcagaaggtatggggatactaaatatttctcttgaacacaaaacagaaattgtcctgacccccttccccataatgtcttgaaggagtaacttgaggccagtatgacaatcactctggaagccaagaagtggctgtcttctatctaaattaagatttgcattacttgctaatagaatggaacattaagcagtagtttggaatcttcctcacagagaaagtacaagccagtggtggctcatgcctgtaatcctagcactttgggaggccaaggccagcagatcacttgaggtcaggagttcgagaccagcctggccaacatagtaaaaccctgcctttactaaaaaatagaaaaattagccaggtgcagtggtacatgcctgta

SEQ ID NO: 143011 - DNA, 728 bp, Homo sapiens
gttctccttagcagaagataagatttcaagatttcagctaagactcatctctctgcaaatctttcttttgagagcatcttcaccaggaggagattccatctcaagagaccactttcactgctcatatgtaagaagcaactcttcatctgttcaagtttgatcatgagagtgcggcaattcagtcacaacttcaggctccacttctagttctagttctcttgctgtttccaccacatctacagcgacttcctccactgaagacgtgaacccctgaaagtcatctatgggggttggaatcaatgtctttcacactcctgttaatgttggtattttgacctcctcccatgaattacaaatgttcctaatggcatctagaataatgactactttccagaagcttttcaatttgctttgctcagatccatcaatggaatcactatcaatggtagctatataaactatataaggctatatatatatatatagctatttcttaatagccttatgaaatatatttcttaataagacttgaaagtcttggtccatggactgcagaatggatgtttgtgttagcagggatgaaaacaacatgaatattctcgtacatctccaacacagctcttgatcgacatggtgcagagcagtaatattttgaaaggaatctttttttctgagcaatagttctcaatagtgggcttgaaatattcagtaaaccatgctgtaaacag

SEQ ID NO: 143012 - DNA, 816 bp, Homo sapiens
tttataagtgtagttctttattatttttattgaggaagaacacacttagtggtacagcttggtgagttttgatatgcacacatgcatgtaactaccactccggatcaagatgataaggaacatccctatcacttcagaaggtgccttttgctccacccagagcatcttcaccaggaggagattccatctcaagagaccactttcactgctcatatgtaagaagcaactcttcatctgttcaagtttgatcatgagagtgcggcaattcagtcacaacttcaggctccacttctagttctagttctcttgctgtttccaccacatctacagcgacttcctccactgaagacgtgaacccctgaaagtcatctatgggggttggaatcaatgtctttcacactcctgttaatgttggtattttgacctcctcccatgaattacaaatgttcctaatggcatctagaataatgactactttccagaagcttttcaatttgctttgctcagatccatcaatggaatcactatcaatggtagctatataaactatataaggctatatatatatatatagctatttcttaatagccttatgaaatatatttcttaataagacttgaaagtcttggtccatggactgcagaatggatgtttgtgttagcagggatgaaaacaacatgaatattctcgtacatctccaacacagctcttgatcgacatggtgcagagcagtaatattttgaaaggaatctttttttctgagcaatagttctcaatagtgggcttgaaatattcagtaaaccatgctgtaaacag

SEQ ID NO: 143013 - DNA, 182 bp, Homo sapiens
acacacacacacacacacaaatatattactattaagttaaaaataaataaaagagttgatgtaaaagtctaggagaatcatttagtttacaacatttcagttacttgggtgggagttaccctggctgggatataaggggaaggcacataggataattatgggtgtagtattggccaaacagt

SEQ ID NO: 143014 - DNA, 203 bp, Homo sapiens
gaaagtataaatgaaaagaattaaaatatcagaatagttgctaaataaacaccagaaagctgctggtcaaagtcaggaaagttgtaggaaagttgttgtgataacaggcaaggctgaaaggatgcatattccaagctgagcaaatgttgtgagcatggcctcgaggtggggcacttctgggaatggcaagtggtttggttcaa

SEQ ID NO: 143015 - DNA, 205 bp, Homo sapiens
aatcctcagagccgccctgtgcggcaggcgtcatttttattctcattttacagatgaggatacagtggctgggagaggtcaagtcacttgtctgagatcacacagctagttagttacaaagctgagcctcaaaggcgggcctgaagcatggcctctcaccacccatggagacgggtccacctttcaagcgttcttgctccagatg

SEQ ID NO: 143016 - DNA, 350 bp, Homo sapiens
cattcaaacacaatgctgctgtttatccatgcagtagaaaaagaaatattttttttcttggttttaaaaagtacagcatttgggttacttttaaaacccataattgaataacattctgtattatatttgtgactcactctcaagtgaaatgtcaccgtatacccactcttcttttttaggtgataaataataaaatattagaacagaactttagttataaagttccttacaatttacagggaacaagtccttctaaaataataaaaattaagagactctgtcatcttgtttttacttttttacggtttagagcccaggaaaaattaactgggtctgaggaggtattaatc

SEQ ID NO: 143017 - DNA, 725 bp, Homo sapiens
taagacgaaatctcgctttgttgcccaggcttgcagtgagccaagatcatgctactgcgctccagccaggacgacagagtgagactcctctcaaaaaaagtaaaaactattcatagcttcagggccttgagaagccagatttgccaaccctgatacaaatgactgaaggctgtgctgccatttcctgtgctgtaagacagtatttaatatagtgccatggaaatttttttatttttattttgtttatttattttttttgagatggagtctccctcttgctcaggctggagtgcagtggtgcgatctcagctcactgcaacctccacctcctgggttcgtgccattctcctgcctcagcctcctgcgtcgtggaaatattcttcataatatagttgagtgaaaatgacacgttaagtcgctgggcgcggtggctcacacctgcaatcccggcactttgggaggccaaggagggtggatcacctgaggtcaggagttcgagatcagcctgaccaacatggtgaaaccccttctctactaaaaatacaaaaattagccgggcatggtaatgctcctgtaatcccagctactcaggaggctgaggcaggagaagtgcttgaacttgggaggcggaggttgcagtgagccaaggtcgcgccactgtagtccagcctgggtggcagagacagactccatctcaaaaataaataaataaataatacaaaatt

SEQ ID NO: 143018 - DNA, 116 bp, Homo sapiens
aggagtaatccttggcctactctctcttcaatctacattgcttggtgatctcccatctcatggctttcagtaccacgtatgcgctgaagactcccagatctccatctccagcatag

SEQ ID NO: 143019 - DNA, 309 bp, Homo sapiens
tcgcatttggtttgtttttaattttctttatatatatataatttttataaatcatagtattatcaccattttgcatgtaattttttgaatatggggccatttctttaggataaatccttccaaatgagatgtttttctcatttatttctttattcacttatttattgagatggggctcgctatgttgcccaggctgcatttgaattcgtgggctcaagcgatctcccgtcgcagcctcctcagctgggaccacaggcacgtgccagtgcacctgactccaagatggttttagagtttaaataaagttta

SEQ ID NO: 143020 - DNA, 253 bp, Homo sapiens
ttgggtgtctcccaggagcactgggagggacgacttggcctcagttctgctttctcagtccctctgtggctggagtggcagagccacacagaagcccggggttctgatgaagccacccccaggcagcccgaggaaacagctcccagaaacgggcagcctgtcccttgtcccttgtgccttttcttgtaccctggcctggccactccaacgtccaaagggccagcccgggaagccgccccaaggcctcctttga

SEQ ID NO: 143021 - DNA, 790 bp, Homo sapiens
gggttccaatcccaattttggagtagcagagggtgtttgttgacctcaatgccagtattccccaggggagactgagtgtccgtgcccatgttggtgagtggacgctaggtccagtctacatcgctgggtttgcagtgaatatgatcgaggtgctttgcttggaggctactgatgccaaagacccaagcactcagttctgagatcactgaggcagcaggctagagctgcgggtcagggggaggttggtactcaggccaaaggcctattctgaaggcaactggctacaggtctcaaattctggtgttgagttattgagatgctgagaccagaagcttccatctggggtgatcaagactagggtcccagggccggaggtggtggttcatgcctgtaattccagcactttggaaggccaagacgcttgagcccaggagttcaagatcagcctgggcaacatagtaagactccatcaaaaatatgaaaacctgccagatgcggtggctcatgcctgtaatcccagcaagttgggaggttgaggcaggcggatcacgaggttaggagtttgagaccagcctggccaacatggtgaaacccatctctacttaaaaaaaaaaaaaaaaaatattatccaggtgtggtggtgcacgcttgtaatcccagctacttgggaggctgaggcaggagaatggcttgaacccaggaggtggaggttgcagtgatccgagttcgcgccattgcactccagcctgggcgaaagagcaagactctgtctcgagaaaaaataaataaa

SEQ ID NO: 143022 - DNA, 140 bp, Homo sapiens
agaatggggagagggcttgattaaaccacccccagactcccgccacttcctgcccaagcttccccagggaagcttccccagggtgcccagttagcaaggggagaactgagtgcaaaggtggggacctggcacttcttatc

SEQ ID NO: 143023 - DNA, 415 bp, Homo sapiens
atttaaaataattaaaatgaaataaattgttttaaaaattcagctcctcagtcacattagccacatttcaactactcagcagccacatgtggctagtggctgctgcaatgaatgtttccatttctgccctcacagaaagctctggacaacgctactcagtgctttgctcctctcgctcctgccttgcaggccctgtctcttacaacccaattcctgtgccattttttaaagaaaggcacttgatcccatcagctaatgataatttcttctctcctgtatattcccagtaactgtatctgtaccattctatggcatttcaccttatgctagtgtaatatagagctgcactgtctttgctattagccccataatatttcttggagaaagaattgttgtctggcctgtttgtccccct

SEQ ID NO: 143024 - DNA, 120 bp, Homo sapiens
cttaaatccttttataagccaggttaactttgatataaaatcccaacagaagctgggcgtggtggctcacgcttgtaatcacagcattttgggaggctgaggggtggatcgcctgagccc

SEQ ID NO: 143025 - DNA, 502 bp, Homo sapiens
tgtattattctttagtttcggactgtagggtcatagagatgaatcctccaggggttgcttatttgttcccagttaatttttgtatttatttcttttgcttttgatagtcttctctaaaatttgtaggaatcatttattgtcataaatataatttgaaagtagtatagcttgatggctattaatatgaatgtatctggtggaaacaagctatctttttcagatcagaaaaaataatataaagaataaatatttttctttccaattcagttacctaacataatcagggtagaagtctggagtgggaaggcaaaagttattgactagattttctctcaaataattacatatatcaagttaatatagctgtttaaatcattaagttttttttttccacatgaagatcctaggaatataaaaatcttacctgaacgttaaaaaatactggttttatgtaagatttacataaagaaaataataacactttagggaagggtacaaagca

SEQ ID NO: 143026 - DNA, 405 bp, Homo sapiens
gatggcaccttctaagaggttccaagggcggaaacaaggggcagttccactgggtttcagacacagagatcccagcctggattgtcgtggaggatgaagctgctccatcttggatgctgatccgccatgttgtcctctggttaacccctgttctggaatgcctcctctaagattgccactttatctactgtgaccttaaatcctgctcttaggtagattcacatagcattctgcgcctttccctgaggggttgacttcagtggtgccacacatttctactgaggcatgtgtaccttttgcatcaggtatatcagccctgggactcggggataactgactgacggctgcctggcttctgtttctaagttgctattaaatgtttctttctgagaaactggatacatc

SEQ ID NO: 143027 - DNA, 1484 bp, Homo sapiens
tggcaacaatttgagaagtcttctggttttttcctacatttgtctcgtgtagtcatgtattatatcttaacaaaaaactataaaattagggagccaggcatggtaactcatgcctgtagtcccagaaactccagaggttgaggcagggggatggcttgagcccaggagttcaaggctgcagtgagctgtgattgtgccactgccctccagcctgggtaatagagcaagactgtctctttagaagaaaaaggctgggcatggtggctcgcacctataatcctaatattttgtaatgccaaggtaggaggatcacttgagcccaggaattcaagaccagcctaaacaacatagagagaccccatcactatttatttaaaaaaattaaaaaggtgaccgggcacggtggcccatgcctataatcccagcactttgggaggcccaggcaggtggatcacttgaggtcaggagttcgagaccagcctggccaacatggtgaaaccctgtgtctactaaaaatacaaaaattagctgggcgtggtggcggccacctgtaatcccggctactcaggaggctgaggcacgagaattgcttgaacctgggaggcggaggttgcagtgagccaagattgcaccattgtactccaggctgggcaacaagagtgaaactccatctcaaaaataaataactaaagtaaggaaaaaaaaattaagtggccaggcatggtggctcacatgtaatcccgacactttggaaggctacagcaggaggattgcttgagaccaggagttcaagaccatcctggacaaaaaagtgagaccctgtctctacaaaaaataaaaaaatcagctgggcatggtggctcatgcctgttgtcccagctccttgggagatggaggcagaagaatcatcttagcccagttggttgaggctgcagtgagacaaggttgtgcctctacactctagcctgggcagcagagcaagaccctttctctcaaaaaataaagataggctgggcacagtgactcacgcctgtaatccctgtctctacaaaaaaaaaaaaaaaaaaaagctgggcacagtgtagtcccagctactcagggggctgaggcaggagaatcacttgagcccaggaggtcgaggctacagtgagctgtgatggggcaactgtgctcgagcctaggtaacagcgagaccctatctcaaaaagtaaataatattttttaaatgttttaaaaatgaaaaattaagttataaaattttataatttataaccaagttcttccagagtttttagggtattttcattgggaaatgcctttaacaacctccaaagaatccagcagggagcaatttgtggcgggtagactggagagtctacagatgggatgggtctgaccccttgtgggatgaaagccaaacctttcccatcgtccgtattctggcactcctcttcctgttaaaaccatgagaattcacttgagag

SEQ ID NO: 143028 - DNA, 430 bp, Homo sapiens
tgacagtattagacagatcactgaagcagaaaactaacaaagatatttgggacctgaactcaacacttgaccaaatggatctaacagatatctacagagcactccacccaacaacagaatatacattctcctcatctgcacaaggcacatactctaaaactgcacatgacacataccaaatgctcagccataaagcaattctcaacaaattacgattctcaaaatcataccaaccacaccctcagaccacagcataaaaatttaaatcagtaccaggaagatctcttaaaggaaattaaacaatctgctcattactaactttggggtaaacaatgaaattaaggcagaaataaaaaaattctttgaaactaatgaaaacaaagccacaacatatcagaatctgtgagacatggctaaagcagtgttaaga

SEQ ID NO: 143029 - DNA, 166 bp, Homo sapiens
agctttggaggctttgagcttcattacccattttgaatttacaatatcagtgtgatgtagctctgttttttaagatatttcttttatctttccaattatttgggagacttttatctctagcactcttagttgctttaatcctgttgtaataatctatttgcttcct

SEQ ID NO: 143030 - DNA, 415 bp, Homo sapiens
atgcagtcgtggaaaaagctaataaactgactttagagactaaataccctaaaccaagctacactgctcctcatcaagtcagtgccaagaggcccccttcattgctgtgtggacttggtagataaagtgttctcaagccagagagatgtaccagatcggcccctcggggactcagacattgaatactctactgatggaagcaatttcatactaaagggagtccaccaagctgggtacgcagtggtgacttcggactcagtagtaaaggtgcagtctttgcctacagaaacttctgcttagaaatcagagctgatagctctgacaagaactccctggctaggaaaagaccaaaagacaaatatttacaaagattccaaatatgcttctgccactttgcatgttcatgaggctattt

SEQ ID NO: 143031 - DNA, 484 bp, Homo sapiens
gtctttcagatgtctatagtttgaaaagtatgcttattttgcactatgttacctaaagtgtaccccagactcaactatccctggggctgaatgctgatgcatgttgacatcctgagagggtctcaacaacactgctatgcagggattccacctctacccaacaggaccaacggcagcaaaggaaccatctgtaacttgccaacaatggggatgctgctaagtattaagtaactggtctctcatcaccccccttgagctaaacccagacctgcaaagaagctctagtgtgtctcaggaccaccagccaatgaagatatcacctgggtcctggaatctgggaaaaggaacaaaaaacttccttctttctttaccagaaaaattcccaagagcagatcctggcagcatgtatccatttatagctacaattgagctcagacagaagagtgtagaagaggttgggggaaatcaatactgtattagtcca

SEQ ID NO: 143032 - DNA, 1784 bp, Homo sapiens
ggagaatcacttgaacccgggaggaggctgcagtgagctgagattgcaccactgtactccagccttggcaacacagcgagactccatctcaagaaaaaaaaaaagtgggatgattacccaaaaaagtatagataagtggagcaggaatacaaacagaggggtcgtggggccactaagaatgacacaggtcctcaactggggagtataagctgtaacaatgcaaaaatataacatccaaacctctaagtgatccctcacattttacgtgtcagaccctagtggtaaccacaggaaaataaaaataaaaacaaacaaaaaaacaaaaaaaaaaaaaaaaaaaaaaaaaaaaaaaaaaaaaaaacaaacagaggggcgcggcgcgccccacaaaaaaacccccccgcggggcgccacacagaagaagacacaaacacacgacaattcgatgctagcaccagagaggaggccacacacaatacaggagggcaggacacaaaaaaaaacacaacagaagacagccgacagcgacatacacaaccacgaaagacgaggacaaaaacagcagcacacacacgagacacctgcgcgaaagaggacgcccacccaccactacgccggggcagcgaagcgagaccgatgaggcgcgaaacaccaccacagcccagaaagaaaaaacagaactcgacgcaggagtacaacatcaacacacccagcggggagtcgagagaagtggtggaaaacaaagcgcgccacaccgcgccgccgcccgggcacaaaattgccgccacacagacgcgcaatctcacgacgagaacaacactataactaacccggaggcccaacacacccactgacaacaacatccaaccgacggcagcgccgcaccgcgtacaagacgcgagcacacgcagaccgacgccacaccaacgccacccgccacgccacgcacgactgcaggctcaacacgaaaccgcatcacgcacgacgacaccagacacgagccgatcgacaaccaggccgccatcgcgcgagaccaacgacccgaaccaagcccacgccaaaaccacgaacgcagagaatggcagcaagaacaacagacacagtgaagcggaacacaaccgaaggacagcaaatcaccagacgaggacacgacccacgacacaagcacagcagcatcacagccgcagcgcaaccaccgacgctacacggcgaactgaccccaacacccgcacgcaagaacgagcactcacagaaagatgcacaccgagacgcaaccagcagtagcgacaccactcagcacacggccgacacccgaacgccggacacgccccacgacacccaccaacccccgcgccccaccgacgcgaccccgaccccgcaccgacgacacgcagcacgcgaccagcccgaccggagccgccacccagagcgcacgagggcggagcagcgaaggacggcaggacggcagagagagggcagaagccgcaggagccgcagcgagacagacgcagacacacggtgaacgaccgaggacggacagagcaggcacagcgcgagacgaccgcacgagccgagagagcacaagcaaggcagaggtcgcaaagcagagcgcaagacgacagcgcacgagcagcggacacacgaacaccgacaccgcgcaacacagaaagaacacagacaacaggagaaaacgagagagagagcgacgaacggagagacagtcacagcaggcagacacaaagaccacggaaagacacgaaacataaacaacgaggacatagaga

SEQ ID NO: 143033 - DNA, 507 bp, Homo sapiens
gggaacttgggatccaaggaatggcatggtgagttccctgttttttttttttcccttacatttcccaaattggggttgaagaagctggcaacctggaaatggaccattttgtccccctaaagcctgctttatttagccaaagggccagaaaagtggcatcctagcaagacagaaaccttttgattaataactgctctattccactcaaactctgtaggaaaaaatacagcccaatccccacccaggccagcagaggccgtgtggggactggcctctacttccacactaatgaggttataatgacgctctccaaatcccttgctggggtggtgtctcagaagggtgagtaaggatctgaggattttatccccactggctagggactagcccctaccttgtggcatcagagaagaccatgggcagagtctggacttcactctgccaggcagcagtcctctctctctccctattggagtgatcagaggaggccttgtagagagtcaggac

SEQ ID NO: 143034 - DNA, 277 bp, Homo sapiens
aggccttgcttgcatgcctatcgtgccacacatcatatctcttttaggaagtccttgccttttccaaagatcctgctttgcagctgactgtaccctctgcctgcctcccccaggatactgcctccttcctgaaaccacagcccccgctcaggtcttccttccttcctcatcaccagggagccccctgcagagctcccagtccatcccggtggccttctgagcctcacctcccctcccttcccctcccatttcctccctctccccatcccccgtcgac

SEQ ID NO: 143035 - DNA, 394 bp, Homo sapiens
caggaggatggtgggtgagttactgagaagggcagagtttgccgttatttattgatgggtcatggaaggcctggtcaataaggcaacatttgaaccaagagctgaaggaagcaagagagccatacagatatctaggggaagaatgtttcaaacagaaatattaagttcagaagccctgaagctggagttttttagtatcacccttgggagagcccatcaactaccatgcctcttccccaagagacacagctgtgtatatatcagtgtctcaaaaaagtgtttcctccaaactcccaccatagtaattcacccagtgtttatcaatctaaatctcttttgaatccattccttcctctctattcccattcagtctctcagttcagaccctcttcat

SEQ ID NO: 143036 - DNA, 440 bp, Homo sapiens
ccacttactgtttgataagaaagcctcttttgttgtaactacatattaattcccagcagtgcatgtccttgattctcaggaagaagggaagttgaaaaaaaccatataagcccatttaccatactctcattagtagtatgtactcacagaacaatccttcttaacatctacttgtcaatcataagacttaaggaaaaatctaaagtttcacagttagaaaatcaggccctgtgaagatggtggtgagggaaatgaagggactctgggtgtgggtctggctttctgctactgactcatgttggcagatatcttatttattaatttattctcaacttactttttacagatttgccatcatttgatttgtctgattaactttgatttttatcccaaataatttttttcatctgtttatcttcaatacaatattcagaatatca

SEQ ID NO: 143037 - DNA, 276 bp, Homo sapiens
tggcggtgaggggaatgtgcagcctggagaaaagggcagcaagtctgtaaacaaccagagaaatattagggcaaagaagaagtaggtgtattttggcttgacccaaaagtcagaactagagctgtactgtggaatttatacagaagcaaattttcatttagactaagaaaaactgcaaacaattagagctgcccatcgctggaaagggctggctgccaagaataagagctccattaccgaaggcattcttgcaaagactgaatggccaagcctggg

SEQ ID NO: 143038 - DNA, 156 bp, Homo sapiens
cgaacacttgacctcaagtgaacctcctgcctcagccccacaaatctctgcaattataggtgtgagccactgtggctggctacaatactatttatttatattttagaccaacagatattctagtatataagaaatgtgatgctctctgtacattga

SEQ ID NO: 143039 - DNA, 317 bp, Homo sapiens
gtcagctactgcattggttccgctgatcttggctgtactgcctcccatgtctgggttctgggctggaatggtgatcttggctccacgtggcctccacctctcattctccaggaggctaatgcagacttgttcatatagtggcaacagggttgcaaaagagggtagaagcctccacagcctcttgaagtacaggccagaacctgttaaatgtcatttctgccatactatgttggccaacataaatcaaaggctatctggggagattcaggaatcctggccattgaagagaaagtggtctacacaacttagttctcttc

SEQ ID NO: 143040 - DNA, 373 bp, Homo sapiens
ggcgttaggagatgaggtctcttcattgaatagttgaggcgtggcagcaggaagagttaggtagatacaaggaggcacatgactgaatccagtacaatctcagtatcactaagagtagaacagagagatatttatgtgtctcctggtgagttattatacagtaggaactgtgctgtacatatcttctacgaaagttaaaaaaacttcaaactcagaatttagtcagtcttttacatgagtagttctcaaatgtggctgcacaatagaatgacctggggagctgttaaaaaacccagatatccaatccaagtattgggtattaaatgatattaagaagttaattttgtgagatgaagtggcatggtggtgatta

SEQ ID NO: 143041 - DNA, 434 bp, Homo sapiens
ggctgagaattatcctcccctctccctgccacagagccggccacgtggcctgccccggcacctgctccgccttacatgtcattatgcgtctccgagacagcgtctctcacatctcaccgtttaaatgagcgtctagcaagtattctatggagtgcaatgcttgttggatacatctggcattttcatcttcgcagagtgggtttgtgacggggtgaaaaacaaaaaaacaaattcttgattcttgatggaaatctctcagtcctgagagatttataaaaaaggcttgtaggaaaactttgtacgcgtagcttttatactcatagaccaaattataattttttattcaatcttattttctgaataggtaacgtgttcacttggtctaaaatcaaaattttagccaggtccggtcactcgcacctgtaatggcagta

SEQ ID NO: 143042 - DNA, 187 bp, Homo sapiens
ctacaagaaatgctagttattattgtactaacaattagaatcaaatcatcagacataggaaattattggcataaccattctacagatgaagaaactggagctcagagaagcttggatttcctaaggcagttgatagatggaaaatccaaggctccagcccaaggccatgtggtagtgcctctgtttg

SEQ ID NO: 143043 - DNA, 513 bp, Homo sapiens
ggtagactgtcgtcgtatgtacaatcagggcatcagctatgagtgtgagtagtcgtaagacacgatgaaggtgtgcccggcttcatttgtcaaaacgatcagagaaaagtactaacctaggaaacagtgtatcccgagcccatctttgggaatctcaattcctgcttctccctctcctccccaccccccactttttattaggggaattttaaaacatacacaaaagttgagggaatcaagagccccccaccacacagctttatcaatatgtggacaatgttatttatattttctttcctacctctccacccccaccagattatcttgaagcaaatctcagatataatatactcttagtatatttttagaacaaaaggaaatctcaaaagaccatttagtccccagtgtcacttctgaacagaaccagtggcttcataaaaaaagatggcacaacttctgctattgcagactcttccagaatttagtgataagacattaaccgttttcttaact

SEQ ID NO: 143044 - DNA, 264 bp, Homo sapiens
accgaacagggacaggctttgaatggacttttccctttatgtcactatatcaaaaagggagcaccctgcctttatgaaccccaaagaccacccactccgccatgcaggcagtcagtgagtattgactcaactgatacttttgacttagagaaagttttgatggtattcatggatacagcaaaattatctgaagttcatttactcaaatgcttacttgaaaaccatatcccatcctgaccacacctgaccctccccactcccatc

SEQ ID NO: 143045 - DNA, 359 bp, Homo sapiens
gacaggcttgcccatgatagttagaatcaatatatttccattctggtagccttcaagtatggaagttgtcccaaaatcaaactgcggatgtagtatgtcaccgtgcagcctggtgctgatggagcatatgtaaattaaattcattcgctacgatcatgcttcttccaaaggaactctcaatttcttcctaacagaaacaattcaagtatctaccctctccaaacactcttaacaatgaagttgagaggtgccattaagagatccatttctcagccaggcgtagtggctcatgcctgtaatcccagcactttgggagggtgaggcaggcggatcacccaaggtcagaaattcgagaccag

SEQ ID NO: 143046 - DNA, 213 bp, Homo sapiens
ctagtggctgtctctgttccagttgtgagtcctgtgcactaatatatttaaatccttaagtgttgaaattatactaggtcagatccactcactcagcgctctgaggagttgtccaggctactttctcatactggacatttactgtattaaatattggtttaaaggaatatattgcctggaattctacatatctagcactgaaatatttttgaa

SEQ ID NO: 143047 - DNA, 449 bp, Homo sapiens
tgcctcagcctcccacagtgctgggattacaggcgtgagccaccacacccggccagcaaactaattttaaactgattaacctttttgaatctgttatttccaatgtaggttctatctgccaaagaatcattttacaattaaaatgtgctgttttgatttgcatacttgttgctggaatattattatagtaactgttgggcccttatcctgtactatgaaactcacaggtattgaattcagtccttatctctgctttataggcgaggaaattgaggctcagagaggttaagtaatttgccaaaggttatagagctctgaagtggactttgaacttggctcctgctgttttcagaaaccatgctgcttcctgttacttttcttaatgccgaattctctaaattactcctttgtcagattgacctgggttcaagttcaggctctacagcttg

SEQ ID NO: 143048 - DNA, 1338 bp, Homo sapiens
  misc_feature (1300)..(1300): n is a, c, g, or t
  misc_feature (1304)..(1305): n is a, c, g, or t
ataattaattttatctgctttcagacttgttctcacttacgaggttgctaagtagatttcctgtaatgtcagggacttcattttatcaggaaataaaaggaacaataataagacaagagaagaacatatttcacagctgcacatttttgacagtcctttcataaatattttccttttgtttggaaataattctaaaagaaaagatagctatacctcatttgagatacagatgttagctgatactaaggttagctgatactaatgagattaaaacctttcactcttgacaaacagctcaatccaaaagatcatactttccccaaaaaaatcctaaattcaaacacagtatgtttttgaaactacatttgaaaaagggaactctaattccatttttaagcaacaaggggaaaaatatatttaacttcaattttagtgttatattttaggaaaggacaaaaactcatgatctttgcttagaagacgtatacacaattttacccgctaaaaaattactgtttttctttaagccttggccaacattccctaacaaattgctgctgtagtataggaaatggtgcctctaaatcagaaagtccaggtacaggtagttttcaaacttacagtgaagattttgctcacactcatcacacttttctaaaggtttaaatagcctcactaggagtcgagcttatgacattctctaccaatcctggtggttatcatgaaccagtacactcattaactattgcaaaggcaatttgtcagcacagtgaaaagacccaaggcgggtctgtaggcggaggtgagaggggaacaaaatatccaacgtgccaggataagaattagaactgtatgaaattgataaaccagaaaatccaagtttcataagataattaggagtactaaatatcctgagtatcttaaatctccaacattaaaatgtgctttagtacacataaagtgtctggaaggatacacgagaaattggtaaccatggctaatatatggggaagaatctaagtgttccgggctggggcagtattactttcttaagtatttttggacttcttgaattacgtatcatgtcaaatatctgatatattcaaagaaaaaaaattgaattgcatctcataaaacatatgggttgcgaagaactaccttaatttaaaaaattctgaattatttattagacatggggcctcactatgtttcccagactggccctgaatttctggcctcaattcctcctgcctcagtcttccaagtagatgggacttacaggtgtgtaccaccacacccnagtnnatttttattttccccatctattgctagagatat

SEQ ID NO: 143049 - DNA, 468 bp, Homo sapiens
atacaaagtggaaaagatgctattatgtttatgaagcaaaatagtaacttaacataatgaaggcattggaaatgactgtagagctcctctggtgtaatccatatttacagagatagctagtgatattcaaattggtgaaagggcattgaaatcatcatgagaatgtgcacagctatgaagggaagtcagccaggtgaaatcaaacagccctggacttggagctgggatccccagaggagtcctggatctgtcgcttagtgagtggctttggacaaaccacctgggctctctgggctttagttttcacttcagtgaaatgggacttctctgcctttctcactaggtgaagacagggtgcaagcaaaatgttggatatgaacaggaatgatgttaaagaccttaaaccatgggcccaatccagctcacagatgagtttggtttggctggcactgtgtttggtttggctgg

SEQ ID NO: 143050 - DNA, 753 bp, Homo sapiens
ggatcagacttggtttaacaggctctgtctgggtgttgtaatggctgagtggggcaaggatgggcctaggaggcccagaaggggctattgcacttgtctggctgagtgatgatgcggcctgaacaggaagggggtagtcaccagagggtgacctgaggaaactgtggtcaagcctctccatggtgtaaacagtaaacacgatactgattctaaggacttggtagtaacatggaaatggtgactgtgtataatgctatgtgaaaataggattagaaaattgtacattaaaaacacaccagcccagatgcaaaaggctgcagatcatatgattccattcatacgaaatgcccaggacaggcgaatccagagagacagacaggaggtgagcaattgccaggggctgggggtggggaaatggggggtgactgcctatgggaacaggtttctttttgggagggggatgaaaatgttctgaaattaggtagcagtgatagttgcacaacttcatgaatataccaaaaccctgagttgtcccctttaaaagggtgaattttatagtgagtgaattatacctcaaaaaaaaaattttttttaaggcatgtccagatttctaaccaaaattggatgcacatagaaaacattgcaaggagctgggcgtgatggtgcctgtggtccccactgcttgggaggccaaggcaggtgaatcacctaagcccaggagttcaagactagagcctgggtgatatagtgaga

SEQ ID NO: 143051 - DNA, 455 bp, Homo sapiens
gaatgtatcagtctcattgcagatgatccttgaaaatggtaacccaaatgtaggtttgtagcttagtagagaaatctgttagagataaatatatggaagttgcaggtatttggtaataaagacattagcttgaattaaaatacttatggagggtcagaaaggagaaaaaggggctgatgctgccgccaaggaactccagtgtataggaatgggcagaagaggagttgatagatgtggtcagaactgtaggaaaatggagagtgttgtgttagggtctgtagcctagagtacagcgagtttcaagaaggaatgatcagatgatagaggtgaaggagacttgttgaggtttaggaaaaaatgaagagatcattggatttgaaaacaggacagtttcatttgggtaatgtgagggcaggcagtgtattatagtagctgatgagtatttgggcagtaaa

SEQ ID NO: 143052 - DNA, 562 bp, Homo sapiens
attagccattctggcattttgtggctgatgatcagcgatacttcagacaggtgaaatagctggtttggatggtgatcaatgaagaattgaggtaaggttaggcagtttacatttcaaatctggtggaatattgaagcagaggttgcccaggagacagttgtaagttgagatatggaattcaggaaatagattagagctactgaatggattacggaattttcatttagggttgaaagttggaaattcgggactgaaaaagatctatagaaagagtgtagaggtaagaagaaagaagtacggagacacttgctttaagatcccatattaataggctaatatgtttaggagagatgacaccttcagctcttaagagttaacacctggctgggcacagtggctcacacctgtaatcccagcgctttgtgaagctgagccaggaggatcacttaaggccacaagttcaagaccatcctgggcaacacagcaagactccatctctacaaaaaaattaaaaattagctgggcatggtggcatgcacttgtagtcctagctactagagag

SEQ ID NO: 143053 - DNA, 206 bp, Homo sapiens
ttcactagcttcttgggtggggaagttgatgagccagtgaatatatagatttctttttgcttttggtatttggctatttttttctccccagggagaaatttccatggctttcatgagagtctcaaaagggtccttggatctgcctaaattaagaaccactgtcccttgatcagaaatttctcaactgttgaagctcttgtcccctt

SEQ ID NO: 143054 - DNA, 318 bp, Homo sapiens
ttgtattcacttaaagttaagaatgtactcatttaaatttaagtattcacttaaatttaagaatgaagttgtctgatatttccaagactactcaaagagtgcatggtcttctcatataacataatccatttgacataaatggtctaatgtctagtctaagtcccttctgtacaattttagttccagtcctctattttacttgtcaaaaacagttatcatcctagataatacctaattaaaggtagtaaaacatgtatttagagattccggggcttataaacaaaccactgaatatagttttcaatgttaagttaaata

SEQ ID NO: 143055 - DNA, 418 bp, Homo sapiens
ctctttttgcagatgacatgatcgtacctatagaaaacctaaacactcttcgaactgatgaatgatgtcaataaagttgcacaatatgaaatcagaaaaaaaaatcagtagtgtttctatatgccaataataactaggtgaaaaagaaatcaagaaagcaatcccatttataattggtacaaaaaagtatatgaataaacaaccccaaattaaatgttctctatgataaaaacaatgaaataaatagacgaggacacaaacaaatgaaaagacatcttatgttcatggagcaaaataatactgttgagatgaccatactgcccaaagcaatctacagattcactgcaatacctattaaaataccagtgatattctttataaaaatagacaaaatactcctagaattcataaggaacca

SEQ ID NO: 143056 - DNA, 514 bp, Homo sapiens
tccctgcgtccatgtgaggacaggtcatccttctcggtattgcttgtagccatctctgttctgtgtttccatttccttcccttttgcctggcctccatctgtatgtttctgccatttctttcttctccctgcagtgatcacacacactgaaaccagatcatctttctaacatcactttccctctctcaccagtcagcttggaggcctgcagtctctctctgttggtttggccagtgctcccgacagccctgggtcatctcccccagtgcctcagaggtcatctcagaggcagcagcctatcttagttttttaacatatcaggcttctgggccaggcttggaggttcatgcctgtaatcccagcacttttggaggccaaggtgagaggattgcttgaggccaggagtttgagatcagcctgggcaacaaagcgagacctctacagaagcactttaaaaatagccgggcatggtggcatgcacctgtagttccagctactcgggaggctgaggtgg

SEQ ID NO: 143057 - DNA, 372 bp, Homo sapiens
tcaggttgcgggtgtgtggggtcatgacctcatcctctgctcccatttccccaacagcacctaatgcacagcggacacgggcagacccttcacacgtgactatgtcccaatgatctttatgtgttggagaggcctgctttggaggtcacctggacccaaaaggcacggcttagctggcaccgtctgcataagcagatgaaacctcagacgtccctctgatccaaacacaatatgactatatgagagcaaagagattgctttaatgtcctctaacaggttaaaggccaacacagctaaagtaggggccacaggtgatggattcagaaagaaaagccactttcatgaccgaaatcggctaaggctgggccggta

SEQ ID NO: 143058 - DNA, 764 bp, Homo sapiens
tgtataaagaggcaaagtattaaattagggatatttttaagaaagcacagtataccataatctaagtacttgtacagaattccatgtttcaagtaacttgctagaatgcagcatcgtatagtgcaaaggacatgaattctggagtcagacaaatgggtaaaatactcatttttttcattaccagttgtgtgagtttgaaaaattattcattctttctgaacctcagtttcctcagtggcaaaatgaacattataatccctaacttatggtatatttcaagttttaaatgaaataatgtaaatcaagaatttagatagtaggtcttcattaatgacaccttatcccttggaatgaaatgaaagttaactgaggagatacctggtaaatacttaaacattatttctgaaattaaatattcacaaagcaataagcgctacatatgtatttattagataaatacagataaatatgaaaatataatattatttaaatattctaattagaatatttgaagtgtagtgtttaatatgacttaaggaaaattatgtctcctaagtaatgaaaagtgaaaagtgttctatggggaagaaggggctctagacattcccataaatttctttcatttgttatattgattttttaaaaaaattatttattggataaatttggtatgtcagaaaatgtgacctaattttaatctgtagtctgcttcattcacggtaaaacacttaaatgtaaatttccacccattgctgaagtgaggc

SEQ ID NO: 143059 - DNA, 362 bp, Homo sapiens
ggcagcaacagaggggtcagactccaagtctgactttgattctaattatgctagactatcccaatagcaccttgtccttttcttttccctttgaaatggccctgaaattctgttaccctttgactaatcaaagtctcactgttaatgtttctttagtagctcttataaaggcccaaaagtacttgatggaattttaaggcccataaaaatagatttttttttttctggactataaagaggaaccttgattgcttgtacatggaatgctctcatctgtggagtgagagcagcaaggccttcccagccccgctctgtcccaggtgctgaggccccctgaggcctgtgacttaatcctgctttca

SEQ ID NO: 143060 - DNA, 227 bp, Homo sapiens
ttaattagtcacatctagcccactatagcactcataattgatttttttgtattttgttgtttggaaatatattactacttagacactaagaaactaataggaaaagtactctttaccaacttttctgctagtgatgcacttccttctccttcacctcagcctctgctatctgtctgtgtctttcagcttccaaactgttttgcctgatcatgtccaatcgctgaagt

SEQ ID NO: 143061 - DNA, 126 bp, Homo sapiens
tcaaggattcccctggtggagacagctcttgccagcatctcagtacagccattgaatatagcgattttttcattcgaatgcttccagtgaaagtaatggcgtggaatcttactgatttggattggt

SEQ ID NO: 143062 - DNA, 339 bp, Homo sapiens
gttagaagaaaacatagggataaatcttcatgccctcagattagataatggtttctttagatatgataccaaagcacaagcaacaaaagaaaaaaaatgggtacattggattccatcataataaaatgttttgcacttcgagaaagtgcaaaagacaccatcaagaaagtgaaaaggctatagaagaaaatatttgtagagcatatatctgataaaggacttgtgtgtagaatacataaagaattcctacaactcaataataaaaggacaactcaattttaaaatgaaaattatgtctttatatctaagaaaatatatgaatggccaataaacacctga

SEQ ID NO: 143063 - DNA, 548 bp, Homo sapiens
tgtgatgaaatttatgccattacaagaactgcgagccatccctttgtccagcgtgtccatgctgtggatgctgccagcctgttacttagtagccaacgcagttatcagatcaactgtctcagtatcacagtgcttgtcttcaagtaaccctttatttattagaagggcccccaaagtgtaaggatagtgatgctggcaattcagatatgccaaagagaagccaaaaatgcttcctttaagtgaaacggcaaaagtctcaataaggaaaaaaaaagaggtaaggatgttaagatcttcggtaagaacgaatcttctacccatgaaattgtgaagaaaagtgaaattcgtgtgtagtatatacagggttcagtaccatctgtggtttcaggcattcattgggggtcttggaacgtatcaccaagaatacgcagcagggtagatgagagtgcagggggagatggttactatatttttaaaaatacaaccccaggcatggcactcctgggccaaatggtacgctgcccatgagataaaacctccacacaatc

SEQ ID NO: 143064 - DNA, 681 bp, Homo sapiens
ataccaacagaggtaagtttcaggcccacaagaaagttattgcttctacactcccagaaatgttaagaaccacgggagaatgccatttttcgcaaaatgaagatacttattcatgttttctgaaaaatcttgatgttaactccttttcctctttaatgagctgaatgccttgcttttatttttatgtatttaataattttagtaactatttaattgagattcttacttgcttccgaaacatcaggataaatagatacaagaggcacaatttaacatattttattggctgaacataaaggtcacaattaccaagctttatagacacaccattagaagtatacagtagatcctttgtagagaccatgaatgagagccagtgtaggcgatgtcaggaacagcaatacaaattttgagttgctgtctgtgacgaaagcccagcaattgtcaagagtttgactgggtcgcaaaagaatttaaagggccagcagctctttaagaatgcatgcgttagctttatccttatgtaacatttactgtgaggcaaggcatgccaaatattaagcaatctactgaattctgctgagtccctacccagtgattctattttcaaatgagataagtaggtgagatatacaaatgaaatcagaggcttgattaatgctgcccatccagaaatctaca

SEQ ID NO: 143065 - DNA, 283 bp, Homo sapiens
aaactgaagaggaggaagtgacatgggagcaaaacgaggggcggggaaggaccccctctcctcgtgccagataacaagctgctgtctctcagctccaagtctcgctcctatgcttagcctcggctgagctacacatctctccgttctcagccgactccttgttgaccttgcaaatgggaggttctagaaggaaacaagaaggcacttgctccttcccgtcgtgcccactgtcctgatggtggcatgtcagcaacagcccttcatgccaacaggggcggctggt

SEQ ID NO: 143066 - DNA, 444 bp, Homo sapiens
attttctgccagtgtgtataaacagcccacaccagggactttttgtagatactgttagtcatgttaagcagatgaacagggtgcatataaagtgtttgttgaacatgagagttggttgtaggaaaattcccactgagcccagtgctgcacacatattcagcactcgtgaaccaggccttctgctagattacaggaatagaaagataataaatcccagtttctgccctttaagggcttatgttctaggagagggtaagggtcatgaaatgaaataaatggagtagttttattagtgagcctggtttgtttccaaaggccagaaactggctcaaggaaaaaagagaattttttggttcatgtatctgaaaattccagaagtagcctttgactctttctgttttcctctctgttggcttcatccttaggttacatctttgtgtgtga

SEQ ID NO: 143067 - DNA, 196 bp, Homo sapiens
ggattacaggtgtgagccaccacatgtggccgccggcaaacattttctataaatggtcagagaattaaatattttcagctttaagggccagtctctgtcacaagtatttaactctgctgctattgcaggaaagcagccatagacaatctgttgatgtgtgaacatggcccctgttccaataaaactttgtttatac

SEQ ID NO: 143068 - DNA, 460 bp, Homo sapiens
gaaaacaaaagaggcaagaggcagccatccccagatagctgtgtggcaggccccaggctgtacgggacacagtggacagacaggcccagccatgccctgcagagctctcggagattccagggcaggaagcagactgtcaataaacagaaagcaaggcaaagaacatgctgggtccagactgaaccctgcagtgaagcaggtgaagcacgcaggccgccaagggcacagaccctgtccgctcagccttcacagccccaaaggggcggccctgctgtgcctggcccgaacatgctgccgtcacagccagccgacatctgtacggggctggagagcatcccctacggttcatgtccttcctggaacctcagaatgccaccttctttggaaataggatcacagcggatgtcatgagtgacgatgaggtcaccctggagtaaggtgggcccttaatccactgtga

SEQ ID NO: 143069 - DNA, 491 bp, Homo sapiens
ctgattctttccttagaataactccgagaagtggaattctggatagaagggcataaacatacttaatcctctagtcttacatagtcatactgacctttaaaactatttactaatttctctgaaaatgctcacgacatcacgtttaccaaaactgtgtattattgttaagggaaaggaaaaacacttggtcaatttcatagattaaacaacagcatctcttcattttaatttgctattgattttaaatattacttttaattttctatattttctatatgtttaatggtaatttggactttgacttttgtaaactttctttctgtgtccttggctcaaaccgaaacttcttgaaaggatgctctctctcctcacatctcgctctctgaaacctgggctctgtcctcaatccatccctcacagcacgtcaccagttggttccttgcatgctaaatcctgccagcttttcagcagttattagtagaccttcttag

SEQ ID NO: 143070 - DNA, 533 bp, Homo sapiens
ctcttgcttcctgatatccattctctctaaagcaatctctttggaaatcttggcctgtggcatgatcccgccgttgtttcctgaacacagaaggatgacagggccttatctcttggcttgtttcgtgctagtacagttgtgtgacctttagtagtaagtcttgctggacatacatcaatttgagaatcctttatagaagcacggtgtagtaggggagcttttaaactggcattgcaacaaactcatttttgaaagttgaataagtcagttggaagaattttctttcttccttttactcaaagttgtgaatgatagcgatcagagcaactgaaagctgtggctagtgatatttaaagccactactcctgctttatgccatgaacatcagatttaagaagagtaaaactggccgggcgcggtgtcacgcctgtaatcccaggactttgggaggccgaggcgggcggattacctgagctcaggagttcgcgaccagcctgggtaacacggtgaaaccccgtctctactaaaataca

SEQ ID NO: 143071 - DNA, 898 bp, Homo sapiens
gtgtgtgtgtgtacacagtggctcaattatggatcactacatcctcaacctcttgggttcgagcagtcctcccacctcagcctccgaaatagctgggactacaagcacacgccgtcacacctggctaattattttttgtagagaagggggttttgctacgttgcccaggttggtctcaaactcctggcctcaagcaatcctcgtgcctgggaggatcttaacccaagaagacaaggaatgcttcttgaaagacattatccaaatgaaatacagtgagagttgctaaatactttgttactagtcttccagttaggacttatccttccagggcaaatgttcagacctgggggccgcacattttcctgaatgcattccaggttggcagcacataagacttcaattgagggggaaggtgggctgttcacctgcccaggtgctttagcccaactctcctgccccaggtgcaccctggacagccaagtgctgtctgtggcactgtaatcagtggcgtatttctccttactctatatttaccaagttgatatactggaaggattccaagagcaagcgagtgatagcagacaactgaatgcagtcatgtctttccatgaaaactgcttttcttggctttcttccaacaatggtaggttgccaagagaaaatgcttttggctttacaaatgatctggccgtagtctggggtggttctggttctttatgtcattgaaaatgataaatatttctggctattcaattatttagcaaacttttgctcttgatgtactgaactgtgttgtttttttacaccttatatgaatttgtggttttacatgtataccaacttgtggagaaagatgctaaaaaaactccagcttgaaaaatatgtcaggttaggctga

SEQ ID NO: 143072 - DNA, 661 bp, Homo sapiens
tctctgccatctgcaaagtgtcacgtctcttagtaaccaccccttccccaaatgtcagacgacgaacacagcacggggcttcccaaagatgtgggtgttgggaggctggcactcatctgttccttgtcttggggagtagactctggtcccccctgggccacactgatatacagagttcaaaatagaaaagaaatgccccacttcccaccggcctactttccaattcagagctggcattagcaagggaggcaacgggaggcacagagactgggaggaaaaactcaacctgccgattcttcaactcagatttgtgcagatggcagattacttagaagtcatgatgcctcttacagaacacagtgaaatatggacacgtcaaatggaatttaaaaatggaagagtgtgtgtgaaagcaggttccatctaatactggactgaaagttttaagtaatatttgtgaggaaaaacacaagcaatttctacccactggtttttatctttcctgcccaccttctcagttcccaaaccagaatgggaccaccattcctaaagctgatcagtggccctgttcacagaacacacagtggcacagtgtgcaaaccgaatgcatcatgagtaacgtggatgtccacagattcaaatggaggggccgtgggagcag

SEQ ID NO: 143073 - DNA, 102 bp, Homo sapiens
ccccttactttcttctattgatttaaacagaaatttacttggatgtgacccatttgataaggaccagctgataaagtataccagctgattcaaataattgct

SEQ ID NO: 143074 - DNA, 945 bp, Homo sapiens
atctttatggtaggatgatttatattcctctgggtatatatccaataatgggattgctggatcgaatgatagttctacaaacaatacttatcaaaacttgtggttgcagctaaagttgtattaagagggaaattatagccttaaatactatattaaattaattaaattctggtaagattggtcaagaaaaacaacaaaaaagggatgaagataatgctaatgcaaattagaaaatgttataaattttaatcatatttaaataaacttatatgtaaaataatcagttatgagaaaagtatgggaccaaaacattcaaaaagaaatagaaaatctgaatggccctatggccattaaaaatgttggtttattagttaaaagttttccttccctcaatactcacctgagtttggacagatgctaattccagggttacataagctttttcaaaaaacgggggggaaaagtagcaattctcttttcattttctgagtcttatgtactacaatcttgttaaaaaaactagcaaggagagtaagaatgaaacttaaaagctagtctcacttaggaacctagcaaaacaaccccaaaatccagcaatgtataaaacagataacatgaccaaatttgacttattctagaaatgcaaggtttaattaatattagaaaattgtccaaaatatttacacattaatgaaattatgttactacacattataggcctttgcattattgatttagtatagtcttagttaaatctgagaatgccaggtggctggagagcatgttgaataactaaaattcagttttgagtggaatactgtggaccacagtagatggcacaattaatttgattaaagggagtcagatggtctctcagaggtggcaaaatgtgagttaggtcttgatgaataatatttttatcagcatgtttgagatttcaagtgg

SEQ ID NO: 143075 - DNA, 301 bp, Homo sapiens
gtaaaatggggatgataatgtttctctcatggagtttacattgaggacaaaataattatttgtagaaataccctataaactgaaaggtactttataaataataatttttaggccaggcacagtggctcacacctgtaatcccagcactttgggaggccaaggcgggcggatcacgaagtcaggagttcgagaccagcctggccaatatggtgaagccccatctctactagaaatacaaaaattagcccagcatggtggcgcatacccttagtcccagctacttgggaggcccttgaacccg

SEQ ID NO: 143076 - DNA, 300 bp, Homo sapiens
agtggctggaaatggcaccactgtttgatatccttcattttcctttattcttctttgctaaccatccttagctcttgtctctgagctttcatttctaagcggcaattaggaaatgccttggtggatcttctccttaacttgtctctctttctcatttcccttctcagaaccacagcattgtctcactgttctgaccttttatttatatatggtacaaattctctcatctctttcaactcttttatagtccatttttccccttggcaacaaggggcatcaaaaacttttctatctcctagg

SEQ ID NO: 143077 - DNA, 487 bp, Homo sapiens
ttgcatgagggttctgagaagagtatgggtaactatttgggcaaagaatttgagatctataggccaaagggaaaatataaaccccataaaatgtttatttacatatggagataatagttagaattatagcgtattactttttttcagcctaagggctaaaacataatactccccaggttacctacaaaaattgtttccttggaaagtggtaaggggtactggatataacaacatgcatctgccacttcacctagcacctaacaactgtgaagacatgtgtttgtttactttaaaagctctcagtgataggaagatttattaaagaaatgaaacatttcacctctaaaagctcacagaaccctgtttttgttacattagtcttgccaggagaattctgaatgtgtttgcattctatcagtcgacagtgtgagtcagtgtgtcccaaaccagttttctaaccagaaagctgagaagtttgatgacacat

SEQ ID NO: 143078 - DNA, 304 bp, Homo sapiens
acacacaggcaaacacagacacacaatggatggtatcgatatctatgaacagatgagagagagagacagagcaggaggtcatctgctccccacccctcttctccccactgtcaccacctctctcccaagtctagctgcaggccctgtgagctgtggaagtggcttttttaagctgtcttcttagattgagtcattgggcagtgaggaaggtaaattttctctaagaagcctcccaaatctgtatcttatgggatttccgtctcaataattgagctaatagtacctgtaagcaagtggatagtca

SEQ ID NO: 143079 - DNA, 181 bp, Homo sapiens
aaagatcctacaatagtaggacttgacttagaggaaaggcttctatgagaaagtcatgattcagatctggaaaataagtagatattaataaggcaaaatgtatggaggtaagggagccagtagaacattctaataaaagaaatgacaaatggaaaggcctcatggtggaggaagcataatg

SEQ ID NO: 143080 - DNA, 134 bp, Homo sapiens
gaagttggatgagcttaaaaggaggttcgaaatattgatcctctagaatctgccttctcatcaacacttttccactgggactttgactccccaatcaggcttcacagaaaacatagctgaccaagctcccggag

SEQ ID NO: 143081 - DNA, 185 bp, Homo sapiens
ctgttgcgaggaatgctgagggcaagtacaaacctttatgggataagaaacttacaagtcacacataatttcttaaatgaaaaaagttctaattgatcatcatgattcttattattctattgacctgggttggaatctcagcgtggccacgttctactccctctgtgcctcagtttccctctctg

SEQ ID NO: 143082 - DNA, 376 bp, Homo sapiens
tgtcttctttctacttcttcttgaatatacttttcaaacaaaatttacatgaatcatctagggaaggaaaaatgatgcttttaactctaggtgaattctgtttcccaaaaagcttttcaaaactctacaacaattcaacaaacatttttgagacaattattatttcaggctttcgtgagcattattgcattgagcattgtttcaccattacacttctcttgagaaggcataaatgttttcattttgcagatgaaacagggaaactcagaaaggatcagttgggctgtatttcatgtaaaattagtaggtggcaaagattatatcagggctcaagactacgagccttgacataagatgtgtacttaatgcttatttt

SEQ ID NO: 143083 - DNA, 487 bp, Homo sapiens
tcggtaccctctggatgcaagtgtccagtgatagatggtgtttcaggaaatgacagggacatggaacaagccgtccccttcttgtcttccctcttgtaacttaaagagtgctaacacctgctgccaacccaccccctcaaaactgacaaaaacatttcagttcctcagaagcaggtgcctgaaaatttgaagtgttaattcagtcatgcaaatcaataccaggcgttgaacctaagaggattcaggtaagaattgaagaaatatttcaggtctttttccctaaatgcctttcacaattaggccacaattcagaggtcttattctatttactcattttatccatgagttcagaatgcagcaaaaattttcttcctaggcctctcagaaactattggagaaaaaaaaatagaagaaaggaaccgaatatcccccatctagcggccacaaaccagacatagtgacactttgcatccagagatttatcttc

SEQ ID NO: 143084 - DNA, 370 bp, Homo sapiens
agggctgtatacaatcgccttgcaagtgtgcaagctatgtcagtccctacgatatcagtgcctgaaaatttgaagtgttaattcagtcatgcaaatcaataccaggcgttgaacctaagaggattcaggtaagaattgaagaaatatttcaggtctttttccctaaatgcctttcacaattaggccacaattcagaggtcttattctatttactcattttatccatgagttcagaatgcagcaaaaattttcttcctaggcctctcagaaactattggagaaaaaaaaatagaagaaaggaaccgaatatcccccatctagcggccacaaaccagacatagtgacactttgcatccagagatttatcttc

SEQ ID NO: 143085 - DNA, 256 bp, Homo sapiens
tccgtcctgagagcaggcagtctggattttttaaaatgttaattccagataatccttaaacttgtaaacattaccactgagtttctagacagccatgagcttgaacagccttccgagtcaggtgctgagatgccctttctccaggctgagacattccggttttgtggtggaaaattggaagagaatgtaaaattcattggttcaggtagagagagaaaatatgtctggcctcaggcatcagggatggtggatggaa

SEQ ID NO: 143086 - DNA, 105 bp, Homo sapiens
caaccccctattttaatttgggatgtttcacagggcgagaggggtgcaggggatctccacagattgccattctccagccccaccacaagcccctgggcaccctct

SEQ ID NO: 143087 - DNA, 310 bp, Homo sapiens
gtttgcagagagtgaaaggagccaacgcaggatagaggcaagccagagcaaacagctctaggctggggtggaggtggactctggcaaatggagaagaacttgggatggaactaactctctgccccaccaagggcatggggaatagcaaagccaaaggggggccatcaattttaagcaagatatctcttgaggaagtactcgctgccaagggagtccatgtttcatcagccagtgggcagatttgactggattgccaaaagggctggctggcctccgggctgccaatcattccccaaaccctgcgtacggg

SEQ ID NO: 143088 - DNA, 756 bp, Homo sapiens
agagatcgcgccactgcactcaagcctgaatcgcaccactgcactccagcctgggtgacagagtgagactctgtctcagaaaaaaaaaaaaacaacagaggaaagaattagacaatcagacttgaagacagaacaataataaattacccaaactaaacaacagaaagacaacagactacgggaaaactacaacaaacagagcctcagggacctcttagactctaacaaaagatccaacactcatgtcatcagagttccaaaaggaagggagaaagaaggtagggctaaaaaggtattcaaagaaacaatgtccaaaagtttcccaggtttgccaaacaaagatggacccattcaggaggctaagtgagctccaaataagtaaactccaaaaaatccaagccaagcaagatacatcatagacaaacctaaaaaccaaagacaacgagaaaaagaaacaaaaaccaaaaaattttaaagcagccagagagaactaataccttatctttaggggaaaaacaattagaatgacaaagatgtctcatcaaaaatcaaggaatccagaaggaagtggcacaacattgaaagaactctcaacctggattctatatctggcaaaaatatcattcaggaataaaggggaaatcgagacaagctcagaaaaaggaatactaacaatttgttgctagcatacctatcctaaaagaatggctaaagaaagctcaagaaaaaaaaatcataaaagaagggactcaaaca

SEQ ID NO: 143089 - DNA, 630 bp, Homo sapiens
gtctgcgcggtgcgtgcggagctccctcccgggacgagactgggaagagcgaggcacgtggaggcggcgcgactgaggctgctggaggcgaagcggctccaggggcgggtaaggggggtggacactcgggactttgggggaaagggaggccggtgtggaaaggaccggagaggcagaaccgagagcatcggcaacagaagagacccagcacccatgcctcttttctgctgggcccttttcgagcctggaagggagagacctggaggtccaacgagcgctcctccaagcggagccttggagggcacggccggcaccattacctccaacgagtggagctctcccacctcccctgaggggagcaccgcctctgggggcagtcaggcactggacaagcccatcgacaatgacgcagagggcgtgtggagcccggatattgagcagagtttccaggaggccctcgccatctacccgccctgtggcaggcgcaaaatcatcctgtcggacgagggcaagatgtatggtcggaacgagctgattgcccgctacatcaagctccggacagggaagacccgaccaggaagcaggtctccagccacatccaggtgctggctcgtcgcaaagctcgcgaga

SEQ ID NO: 143090 - DNA, 398 bp, Homo sapiens
agacatttaccgatagtgacaattatttcacactctatttataattcattgaggtaagcacacagggacgaaggagtcagccagcttctaaaagctccctccccattttgattggcgttctctgggggcccagtggaacattccactttttcaaggtttcctcttgatcctcttggctggaataaatagggaatgctcaccaggaggcttaatcccgcctcttacttgactaggcagggagcctggttgggtcagacatgacaacagagacctgccaacccaaccttaagataacggggttatggcaaaagccaaacgctctgaacttttttccgcctatttttctgggcgtggggcaagatagatttcccttctaaggacctgctttaggtggatag

SEQ ID NO: 143091 - DNA, 344 bp, Homo sapiens
agatgaggttgataggtgagggatttatccagaaatgaacagggaaggaaggagaattaataccaatatgtgctattgagttggccattgcaaggggtgactgattgttcagtcctcaggagtttctgagaagccttgtgaagctctcaaaacccttcttctgaggaacagagaggaaaagcatttatctgtcagcttttgaagtctattgtcaaaagttgaccacaaggcattaattcactggtgttcctgtgttgagcatgcatctgtgcttggttcctggaggagtcctatgttgcatagtcaaagaagccctgaggcaaaagtgaggaaactaggtgcat

SEQ ID NO: 143092 - DNA, 282 bp, Homo sapiens
ctaggtattgaaactgctatacttacgtgagaaaatcggcagtttggcatgtacacatctgtgtacaccacacctgcatattcagtctgatacacacaaaccaccttattttaggtatatttcacctgtgtatttatatgctatggatgctagcatctatacactcacatgcccaaagttaatttaatacattcctttcctttatttcaacctttgttttttattgtgtaaactgtgtggctgaaatatctgttccatttgtctaaatatatggagggagtg

SEQ ID NO: 143093 - DNA, 226 bp, Homo sapiens
ccgaggggttaggtgacttggtctggacttaaaacggggacaggaaattagataccagcattcatttttctgatttacaaatcctttcctgtataaaactcttccaaggcacatatgtgaacatacacagttatgcttcagccggtccctcccatctagagaatccaaccaaggacacacagtgtgtctagggagaagaggttattctgtggcacaggtggctctg

SEQ ID NO: 143094 - DNA, 375 bp, Homo sapiens
ggccaggagtttgagaccagcctgggtaacatagcgagaccccatctctgtgtttttaaaaaaaaattaaaaaaagaagcatttccctcttaaaagctagaaatctggtacccttagtccttttcctccctgtctatttctctattccacacaatccaatctgccatcacatgttatacattgtatgaaagaaagaaaagctctccctttcaaacataaacaccttagggtaccaggcaattcatgtaaacacagcaagtcagctaataaaagacagtagggaggggtggggtctgtggctaactggagaatgctttctcagctctaggacttaagatgtgccagccaaaacctgtctgtcacccttgttgcatg

SEQ ID NO: 143095 - DNA, 718 bp, Homo sapiens
acgcgaagtccccgcggggggtccctatccaacgggttccattccggttaagcggttccttctccaggggtttttcgcctcgccgctgcctctccgcccctgcgagcggggctcagcgaacagccgactccggggccattaccattgttcttcgaggctgggccgcaggggaggactctcgcaagccagacctcgcctttggtctttccctccgccccgcacccgcgccgctgtaagccagcgaagcctccctcgccgatctttgccgaggaagcgagttagcccctgagccctcccgaacggcggccgaggacgcacccgagcgtctccgaagaatcccgacccctagcagtctccggaaagagccgaagaggcttcccaccctcggtttcccgagccattccgaaaaagtccgaagttttccgagcagccgtcctgccggactgctggaggcggcacagcgccatgttggatgctctgctcgttgagtgaagaaaatccaccggcatcgcctgagccccgctaccgagaagggcgccgcttcctccggggagggggataaagatcccccgccgccggcccatgaggatattgccgtgaaaggcacagcgactgcagcaggaaccggacccggcaccggagcggcggcggcggcggcagcagcggtaccgcctcctcacccggcggcggcagcagcggcggcggcggcggcggcggc

SEQ ID NO: 143096 - DNA, 694 bp, Homo sapiens
acgcgaagtccccgcggggggtccctatccaacgggttccattccggttaagcggttccttctccaggggtttttcgcctcgccgctgcctctccgcccctgcgagcggggctcagcgaacagccgactccggggccattaccattgttcttcgaggctgggccgcaggggaggactctcgcaagccagacctcgcctttggtctttccctccgccccgcacccgcgccgctgtaagccagcgaagcctccctcgccgatctttgccgaggaagcgagttagcccctgagccctcccgaacggcggccgaggacgcacccgagcgtctccgaagaatcccgacccctagcagtctccggaaagagccgaagaggcttcccaccctcggtttcccgagccattccgaaaaagtccgaagttttccgagcagccgtcctgccggactgctggaggcggcacagcgccatgttggatgctctgctcgttgagtgaagaaaatccaccggcatcgcctgagccccgctaccgagaagggcgccgcttcctccggggagggggataaagatcccccgccgccggcccatgaggatattgccgtgaaaggtccggtctctccgcctcctgcccccgccgggtccggccccccccctggggtcgcgttgtcacggagaccggcagccggtggtgctggccc

SEQ ID NO: 143097 - DNA, 744 bp, Homo sapiens
catgcagggctattctgtaaaatcaataggcaccaatgccagctgggggcttctccaccatcttgatcattcactgaaagacaccatttaaggttctaaacttggtcagcacagcctgacttcagaaggcaatatagcacagcagaaagaacagtggggtattagttagaaagcttgggtcaaagccagctctgcccctcaattacggaaagacctcagatgagtcacctaacttccttgagtgtcgatttctttaaaattgagctagtaatttataatttgtagtgtctgagtgagaatgagatgagaaaccattggcaaaccctcctattacatatgtgacactattaactttgtgtttgtgtgttttaccatcacaaaaggacatatatttcgagccaactaaatgtttgcaacctactttttacgtttcaaactgaagtggcttcagcatgaagggggctgcgctttggtccagtggatatgttttcttgtaagaaagcacagctaggtgtctatagaaatctagagagagaggagagaatatgtgctcttaatttattgttagcattagaaagggtaggattaagggggatatgtttttcattctgtcagcttgaattctctttccaaattccattctggttatatgatcaggctactgctgtatttatgggtggccacagtctgcctggaggggcatatttagtcagaaaggaagtgttttccttctaaaggcaggca

SEQ ID NO: 143098 - DNA, 209 bp, Homo sapiens
catggatttgctggtgcagtacaactaggcttaataggaccaagtggaatttatgcctgggatacaaggatagttcaacatacacaaatcaattgacacaatacatcagattaacagaataaaggataaaaatcatatgatcattttaactgatgctgaaaaagcactggataaaattcaacattcctttatgataaaaaccctcaaaa

SEQ ID NO: 143099 - DNA, 635 bp, Homo sapiens
ctcagtaaactatcgcaagaacaaaaaaccaaacaccgcatattctcactcataggtgggaattgaacaatgagatcacatggacacaggaaggggaatatcacactctggggactgtggtggggtggggggaggggggagggatagcattgggagatatacctaatgctagatgacgagttagtgggtgcagcgcaccagcatggcacgtgtatacatatgtaagtaacctgcacaatgtgcacatgtaccctaaaacttaaagtataaaaaaaaaaaaaaactaagatgctttattacttttccaaatattttttatgaatatctcatttaatctgtacatttactctttgaaagatgttttttcaccctctttttacaaatgaggaaactggaacccaaaaagaattaaattaggtgattaagaacacaccagtgttaggtggcatcatcattacatttttctacatcttccactctttggattttctactcctgcttcttccttactaattcccttttataatttgtacccatgttgctccacttgagaacagattttgtattaattgatttttctgtattgcgtttgtttttactttcattgatttttgctccattctacattctttaga

SEQ ID NO: 143100 - DNA, 522 bp, Homo sapiens
gttcaaccattacttcagaacttctattatgagacaaatagtgctggtcctcttgagaaaccaagggagtgggctcagctcagtgactgtctggatcagcccagaaacaatgtaggctgccatcttgatctgtgcttttccccagggacatgagcaagggcacttctaggccaagcaaaatcaatcgtgtttcatagatttggatttagagggcgctctaaaccagctcagaggaatggtatgttttagaatcctagggaaattgagttctccaatcatcacttcagtcagctaggaaagatacacttttggcagggtgcggtggctcacgcctgtaatcccagcactttgggaggtcgatcacaaggtccggagttcaagaccagcctggccaatatggtgaaaccctgtctctactaaaaaatacaaaaattagccaggtgtagtggcatgtgcttgtagtcccagctacttgggaggctgaggcaggagagtcgctggaaccagggaggcggagttgca

SEQ ID NO: 143101 - DNA, 472 bp, Homo sapiens
tggtaaagacagataccactaagccctttcaaatcactgagagaagctgaaattttaatgagacatgaaaagtcagaatcacagatatctgacaaccaaaaatgtggtcaacaaatttagaaatttagaaataaaatacaagaagttaaataaagggtcttaactttcacaaccttcctgtcaggataaaaggctgaacactattcataagttgctaacaatgcttttattattccagagctccatttaaataaccaaagctaaagaaaaattttaactatggggtaatacagtgcaggaaaattattaaaccattcaattgataaattctgtaaaccaaaaataaaatttgaagcccccccaaccaaccatctgaatgaacttcctcctctaggccagtgccctataaatttaacctgaaagaccggttcaggccatgacaaaaggcaggggttggacttgcctcatcatg

SEQ ID NO: 143102 - DNA, 133 bp, Homo sapiens
gcttgaaaaataattcattgatttccttggaataagatttttataactttctttattccatagaagtcaaggaaagatatagttataaaaaatcttctgcaggattgcattagtgcctctgaacgattcacat

SEQ ID NO: 143103 - DNA, 1300 bp, Homo sapiens
tcgggtaccgaggcacgcgccgggcgtcacgtgcgtttcgcggcgagcggaaatgacgcgagttgtgtgagccgccagtatggccgggctatggcggcgagcactggctacgtgcgactgtggggagcggcgcggtgctgggtgctgcggcggccgatgctggccgccgccgggggcgggttcccactgtagctggagcgtggttgctccgaggccagcggaccctgcgaccgccctcctcccgtccctatggggccacattgtgcgtggcccgataggcccgggcaaattaggagagtgccaatatgggcggggcagatacaatgggagaaagccagacgcatgcccggacggacagagaagagcagcaattaccgtccggtgcgagagtgccgacagggacacgcaccttcccgtcagcagatacgctgccgtcggaggacggacaacgggcaggcccgtggcggagcagaccggcgcaggcggcaacgcaggacggagtgtcaatgccccggagacagcaaagagccccgaggatccaattaacacggggcgacttcaaccgacccacattgaacggagttcccccggaaatggtagataatacccggacacgccttgtccggtgcttcaattcgggccaatttcacaacccgacaaaaccccaggggatggatccgccggttggcctttttaaattccaatgacttttaatccggcggggatcacacaaaataaaagcaagggttagggcatggaaggcttgccctagacgaaacagtgaaaacagttgccggtccttacgagaccccgagagcccatcacagttagttacggaccgtcacctcaccgctaacaagttactgcagtgcgtgtacgccggccacactccagaaagcttccggagcagtgcatgcggtacggaagaaagggccttggtgcttggacaacaattcctaatccaacaatcaggggagacgtgatatagcgcccccacaactctccattgaaacaattgcctgtgcatccacttttggcagcgacaccacaggccttgcgcgcaattgaagtcaggtcacaatgtggagacacatagcatggacagaaagcatccacttacttccagccgctgaacatgctcgagcaggggtgtggatgaccgccagaagagtaggctcgtagacgagtactgaggcacaaccaaggccaccaaagagcccccgactgagaggcgaaatgatccaaagagcagacgagccacgacacaggtagggcgcagcagtgaccagacacgttgcag

SEQ ID NO: 143104 - DNA, 104 bp, Homo sapiens
ctcaatgtatgccataaagcaggggttttaacaacacatttgaacaattcttgaggattagaaaatgaggtctgttaaccagttcagaattttaagaaaacaaa

SEQ ID NO: 143105 - DNA, 564 bp, Homo sapiens
aaaaagatataccatgtaagtagtagtcaagaaaaatggtagaatggctatatttaggtcgaacagaatatacttagagtagaaatcagtactagaaacaaagacattttataatggtaaaagaatcaatagtgaaaagatacatcaattatcaacacacctcaaaacaaactttttgtagatatatgaaaagaaaatctgtgatatttaagggaaaaacagatattttgactgaagttgttgaaaaatactccacttttgatatttcatagaaaaactggacagaaaattggcagagttttagaagacttgaataacattgtcaatctgacataacagacatccaaagaccacttcagccaacagtagaagcatgcacattcttctcaagcaagtgttagtaacagtctccaggggacaccatatttaagactaaaaataagtcaataaatttaaaatgcttgaagacatacaaaacagttttctgtcaataaatttaaaatgattgaagacatacaaaacagttttctgaccaaaatggaattaaattaaaaatcaacaata

SEQ ID NO: 143106 - DNA, 468 bp, Homo sapiens
ttccaaaatactgggctgagaacgtgaggttctgaaaaaccttagcaatagttgggagacaataacaaaacagttgacaacacacctacacggctattggttcttctaagtgtgaccagatgctgataagctgcattaatattcaaacaaaatgggcagaaaagcaggctactgaacatgcaaatcagaaaagggctttaactggtggttttatgtgcagctctgccctagactatttatgtgactctgaagtcccctaattctcgaatgtttctattccattacatgggaaacaggatccatacaacaacaaatatctgagtacctttgtgccaaacacaattctaaatggttgattaaacatattataataaattatatggtatgttagcaggtgataaatactataaaaaaaacagagaagagtaaggatgattaagagtatatgtgggtatataatagaagtgt

SEQ ID NO: 143107 - DNA, 969 bp, Homo sapiens
acagtttaggaattcttgtttttataggaaaaaaatctgaattgtaaactattgactctgctttggaaaaacaaatttctgaaacaaaccttgtttgttagttgggggttatatatatgttgcatatttatgtatatatgtatatttatattttatcaaaaaggaaagagtttaaattttcttaatctggtaaactaggtacaactttgaatgggggaagaacattacaccccacaccccaaacaaaattatcagaaaattcatggtcatttaacttccttatctaactactaagaatgcttttcattgtgttccagatctctgattatatgacaaacaatactggttctgaatagaagtcttcctataggccaggcctggtggctcacgcctgtaatcccaacactttgggagaccaaggcgggcggatcacctaaggtcgggagtacaagaccagcctggccaacatggcaaaaccccatctctactaaaaatacaaaaattagctgggcgtggtggcacacacctgtagtcccagctgctcaggaggctgaggcaagagaattgcttgaacccaggaggcagaggttgtagtgagcctctgcagtgatcacaccactgcaatgcagcctgggtgacagagtgagactccgtctcaaaaaaaaaaaaacaaaaaaaaaaaaaaatttttgggcggctgggcccgaaaaatttttaaaaccatttgttggggccgcgcggggcgccccaaatgagtggaacgggaaaacctgggcgcacaaagggggggtccccagagaaaaatcccgggggcaaaagaacaaatgcgggggggatctcctaccccaagataaaaaaagcgcccgggcggcacaccagcgcttcctgcgaacaaactccacaaatgggttccagaggggcaacaggggccctcaaacagggatcccagggagcgcaaaacgaatagcc

SEQ ID NO: 143108 - DNA, 821 bp, Homo sapiens
gaagcccacggtgagtctggggacccaagatcttattttcctttctgtcacccccgcttggttttggattccgtgacagctggacccggcttctgcgtggacataattggagacactggttattttaccaaagctttgaccggaaggatgtacttttggatacaaacagactgctttaaggagtcaaagctgacttatgaagttggcctcatcccttgtctacacagtcactgtacagagttccttgcctgtagtatgtaaagaatgtcactttctgacaggctcaggagccccaaattatcctgggaccttgaggagaggacattgcccaatttatataggtattttcaggcaccaataaatcatggctgggctcaaggctttaaaaaaagtcaaatctgggattcgttatagaataaagttccagcaaagccaattttaagacaggcctatatggcaaataattattcgtgctgacattatgcaaacactcaggccaagtataagatgaaaaattattttaaataaatttgtcctactatgatttgtcttcagtaaaaacaggtactgggctgggcatggtggctcacagctgtaatcccagcacactgggaggccaaggcaggcagatcgcttgaggtcaggagtttgagaccagcctggccaacatggtggtgaaacaccatctctaccaaaaaatataaaaattagccaggtgtggtggcatgtgtctgtaatcctagctacccaggaggctgaggcatgagaattgcttgaacccaggaggtggagcttgcctgagtcctggtaaggcacagaca

SEQ ID NO: 143109 - DNA, 367 bp, Homo sapiens
aacctttgcctcctgagttcaaatgattctcctgccgctcagcctcccaaggagctgggattccaggcatgcgccacgacgcccaactaatatttgtatttttagtagagacagggtttcgctggtctcaaactcctgacctcaggtgatccacttgccttggcctcccaaagtgctgggattttaggcgtgagccaccaccacgcccagcccttgtatgtgtattgtaataatgtttactttttaaaaatcaatacattatttgttacttttcagttttttttcctcttagtatttattcttaggtatatgtgtggtttttgaaaagccatcttctgactttaaaaagcactaattttgtggatgc

SEQ ID NO: 143110 - DNA, 366 bp, Homo sapiens
tgacaagcctcttctgcaagaccagattctgaaaactcaaagcaattatttttatatagaggcatgctgcaatcattcagattatggggtgttctataggaatatgtctcctggtttgacacagactgcattttatgactttatttggacaaggaggaaatgcaaatgttaatatttattatgacaccaatatgttaatttgtaagtcctcttactttgtttttcgtttttgaaaactacctctctgattctgcttacttgttccgacaccacctttcaatgtgaaatcattttggtctgtttaataaatatttgtggatattaaagagggaagcccaaaagcaaataaagcttcccaggttgagt

SEQ ID NO: 143111 - DNA, 374 bp, Homo sapiens
caaactgaatgcactaaggttttgagcaggactcaacaatgattgagcaatgtcagaatggttgagaatcccaacctaagagtcccagacttcagagaagtcgtctgtgatttgcttaatgaaaagtcctggtgatcagagaattcaagcagtgtaggttccctctccaaagcagcccctaccccactgacactccactgataagttgataactaagcagtgactggtttatggcagctctccggattcatgtctctcagagcactgcaagcaccctggtggcattgggagggtacgatttgctaaagagaggcaccattccagtcaaggtaagaccaggccaaccatgccctgcctgccctgtttgggtctct

SEQ ID NO: 143112 - DNA, 400 bp, Homo sapiens
cctcttgcaaaagcagggcactgtgcaagggttggggtttaagtcatttatttgggaagtgatcctgacaagtacagtgaaggagtgggaaggaaggtgggaaggaaagcaaggaagagagggtttccactctgagccactgggcgcagtcctgctgtggagcaaatatgcagagagtatctgacaattgtctccccgcagcagggaagctgagacattatatatccaccaacctccgtcccttgttggttgggggctgctcctattaattccttagcatttcctgcatgtcccatgtgcaggataagcaatctgctgtggtcagagaaagacctatggtatataagaatttgacatcataatagaaataggcatctatccaaagcctcatttatttcag

SEQ ID NO: 143113 - DNA, 560 bp, Homo sapiens
tgccccccgagaccctgcacttctgccaggctgagggtgcatctctttcagcacctccatcagaccaggggccgtaacaaaggcggatctgaagcccctgcaagtgggaggggcggctcagtgcatggattgatgcacagatgagtaagagaccctcacacacttgcacccatggccagcatattccaagttgcccagagcacactttgggatacaatccagtgtttattacagatggaggctcagttttctggaaaagagtcaacttgtggtcagacacctgagtgtgttgaatccccaccacgatgctgggtgtgaaacatagaattcccattttacagatgaggaagctgtagcttagagaggttagtaactaggtcagtgtcgcacaggcttggcgagctccaagcctcattttccttacctgtaagatgaagataataacctttgtccaccgtgcaggggagctggggcgctgacccctcagattccctccagccggggctgtgccttgcctccacccatgcccagagtgtggggcagaatatggaaacatcctc

SEQ ID NO: 143114 - DNA, 168 bp, Homo sapiens
acatggtgtgcccatagataacccaggaagaacttccctccaaaatccaaattcctaggaaagcaacacattaataaatgaaggcaaaggtcattaaagtttcttttaagcacattgcctggtttccttgaggggcaatgttgatttatttttcttattttatttata

SEQ ID NO: 143115 - DNA, 525 bp, Homo sapiens
ttgcggtctgcacacagagtgaaggtaatattggattcttaaagctgaggataggtgttgggatacacctgctgtgaaagacgggccattgccactttgcaggcttttagattacccaaactgaggagttatttcttctggtaaacatttttcagatggggtgcggaatgcctcgatctaaccagcgaaggtatcagtaggcattagcaaatatttgaatctcctgcagaaaggtatctgagtaaattagagttgctagctctcacctgggtaggttcctcaatttttttttttggacaggtttacctggagaaggagaaaattgctgttggtttgggtcatgtcaggcacagagctcacagggctgagtcacctgctttcctgtctcaaaaagatttacccctataaacaaatgagacattaacagaagccaggaatcccttctagggtgaaaagaatcattaaagtgctgaattatattcctatgattggtacttggcattagtaatttattaccatcattca

SEQ ID NO: 143116 - DNA, 283 bp, Homo sapiens
ctgtaggaggccaaactggacaacgagaggaatggctgcagggaaggcctgctaggatagaaagcaacaagtagcaaacactggggatgattgagtcagagtggccgcttgtccctatttcctcacaccagcctggactttggaacacgaagccctgatcctgagggagactctgccggctcactcagtagcctgcctgggaggctgtgtcatctcctataaattaaaccttgtgctttctaccctggcaggccttccctgcagccattcctctcattgtcca

SEQ ID NO: 143117 - DNA, 271 bp, Homo sapiens
taatgcaaccgatgccgggtacacaaatggagatgaagagcacttcaaaaagtgcttgagtgcacaaatggctaccagaggattctgttcttagatggcatcagctggtaaactcagttacttaaaggataatgttaagctgtatgctcagttgcaatgtgggtcagttaaatttagagatgctccttggtcacaaatcatggttacattgtaatcatggcagttagggtaacattattatttgtttttgtttttgtttttctgagacaga

SEQ ID NO: 143118 - DNA, 485 bp, Homo sapiens
tcggagacagcaggggcagattcccccagcagggcaaagcaaccctgacctccaagttgcaagggaataggtgactcagggagtacctcctgcagccctgctggtctcaagactcccaccttccagggcctggtcctgtgctcagaaacccctctgcatagggtgctgatgagtcctctgcagctccctcacccaagggaccacactgggaaacccagtagttgtctcggccatggcactaagacctttgcaccctggccatcttgttccgggacagccagcatctgtggtgtggtatagagacaaagctgccacctccaggacacttgctccttcctggccttcctgctgccctgaaacctgtggcctgtgtgttagtggaaacattctcagtttcattgctcagtaaaccttaggttatccaaactgcaaataaaatgttctctactttctagatttttataacttgctattttgagagaaag

SEQ ID NO: 143119 - DNA, 372 bp, Homo sapiens
gcattttataagtgacataatggcagagtaatgttactaatttttcatattaatttaggtcattagtaatactttatttcttatgtggtaaaacacattaatcatgaaaatattttctagcttagttttaaaaattctttgccatataacttttaaataaacaataatatttatcccattgtgtctgcaaatgaaaactacatcctttagtattgaactgataacgttttttgctctcagaaagttaccttgttcagtgctagcctataatggtgtttgaagtttaagagtggcattgttgtttgactcagcaaggaaatatataggaaatattgtaatgaaaatagaatttcgagtggtagtagattattt

SEQ ID NO: 143120 - DNA, 281 bp, Homo sapiens
tgagagtttagaaaaataaacgaagaatatgaaaaacgatgctggcaataaataacgtaaaacttagagtgggaatcccagtgtattattcatggactgctccgttaagactaagtattattttccgtattaggtctgctgtgtttttcagaatgatacagtaatctgaggattgagccaactgtcttccttgcagaaaggcaggctgaattgtgatcctacctttgaacttgaggaaatgattttggagtccaaacctctacataagaaaaaaaagcgtc

SEQ ID NO: 143121 - DNA, 455 bp, Homo sapiens
cccatgtggcctttggggtgtgagctctgtagggcctgtgctgggggtgcctgtgcctctaggaggggtggggtggggtggggcagggcaccctctgatggtcctgggtggtaatagcaggggttggggaggatgctgccagcaaaccagccacaggcctgaacagatcctgagcagggggcctgtgtgcgtgtgcacacacgcatgtgtacctgtacctgtgtgactgcatcggcatctgatgaactcatatgtctgtgtcactgagtctggggacatgtgattatgcacttccctgagggagtgcatctcaagctgtgtgaccgacaccccgtaaccatgtgtggggtgggtattaacatgtgaccagctggggcaacccagtgaaaccccatctctacacaaaacatttaaaaattagccaggcatggtggcacatgactgtggtcccagct

SEQ ID NO: 143122 - DNA, 422 bp, Homo sapiens
ggtggaggaggtgctgagcactaggaagggagtttctgaggcgaggaacccttctctattttgactgtgatgatgtttcttaagacacacagagctgcacgccagaggggtgaatttttactgggtctgcaggtaagcagctgcacagacagatgtgcgggatggtctcactttaagtctgcactgagatctctcttctactctagacagactggaagggctgcgcagaaagcagcagggtggccccccagctgtgggctctgttcccagaagtcccagcggaggacccagggctcaaatggttgggtcagatgaaagtcagaatgggatgtgttagggaaggctggacaagaggggcccggtatcaggagcccacatctagagaaggaagacaggtgcttgactcatcccaccctgcccac

SEQ ID NO: 143123 - DNA, 378 bp, Homo sapiens
tagaaaattacacacttggtaaattcatcagcaagaggcaatcagtggaacactggaggtcaccttcagcatgccctcgctttgctttcataaataatcacctgaaatgcacggcttcagggtgactttttcatctgattcaaatatgagacattcactgctcttttatgtcacaccaggttagttttaaacttggttagcattttaaccaaatgcatggacatttgcaaagtcccctttaacactactctgggaccattttttccacattttcacaggcaaaaagcacaaatgctgaaatactcacatacaaatgctccttttacaatttggaataacctttgcattaaggtgaatatttacataatcatattccag

SEQ ID NO: 143124 - DNA, 360 bp, Homo sapiens
atgcatttcagtagaatcacaggttctccatgggtgagacctggaagaatcctggagcccatgcagtccacctcaaaggtcccatgctccatggctaggatgagaggaatggtgtctcagcaggacccggggacttaatgacacagtaggggaagggaatcctggatagctcgggccaggctcaggttggcccagactgctgggggtggaggaagctgagacagccagcgtcacaagtccccacctgagttccatgctgagccctgcatgtggccagatcacgcagcattcaaggagggcagaggggtggaatttatgcaaaataatgatgtgccagtcttcacccactgggccagggag

SEQ ID NO: 143125 - DNA, 254 bp, Homo sapiens
cagcaaaccagaaccctggcatcctaacctggctgaacagtgagaggaggctggtcttgctggaaacatcaggggctgaaggagtgttatggggagctcacaggtcacccaggggggtgcctcaggctgggtgtggtcagcaacacagggatttgggagcaatgagagggcctgggtcctaacctgccgtagagacccaagcatccctgaggcctcagaacttctgctccggagtcgatggtcttccaaagcca

SEQ ID NO: 143126 - DNA, 315 bp, Homo sapiens
  misc_feature (291)..(291): n is a, c, g, or t
gttgtgttccacttgacaagtgacataggaaacaatcaatggtatctcagcctcctattcccaggcaggcaattgtgccttgttggacagaatactgcatctgaatggggccaacattaaagtgggacccatgcattaatgatgaaatagtcaccgctttcatgacagctttccttgctctccaaactgtgtattattaccatctcttctgtattctaggagaggaggaagagaggtgtatatgcctctttatagcctgtgtaacattctgttttgtattacagccatgtntgtacttgggatggggccaacatt

SEQ ID NO: 143127 - DNA, 982 bp, Homo sapiens
gccaaattcaactcctgagtcctcagtctctagtcccgggaagtctcttctcggcaaagtgaaagaagcggtgaaggtggccattgatgcagaatatcgccacattgactgtgcctatttctatgagaatcaacatgaggtgggagaagccatccaagagaagatccaagagaaggctgtgatgcgggaggacctgttcatcgtcagcaaggtgtggcccactttctttgagagaccccttgtgaggaaagcctttgagaagaccctcaaggacctgaagctgagctatctggacgtctatcttattcactggccacagggattcaaggccatggaggagctggtggacgaggggctggtgaaagcccttggggtctcaaatttcaaccacttccagatcgagaggctcttgaacaaacctggactgaaatataaaccagtgactaaccaggttgagtgtcacccatacctcacgcaggagaaactgatccagtactgccactccaagggcatcaccgttacggcctacagccccctgggctctccggatagaccttgggccaaacctgaggacccttccctgctggaggatcccaagattaaggagattgctgcaaagcacaaaaaaaccacagcccaggttctgatccgtttccatatccagaggaatgtgacagtgatccccaagtctatgacaccagcacacattgttgagaacattcaggtctttgacttttaatgagtgatgaggagatggccaccataactcagttcaagaaacggggggcttgacttaaggaatctctcatggggattcccttgatgcgatatggggtgattccggggagatacacgggatctctttcgggagggaagttcacagaaattagcagtttggataacgaattgctgggacaagggggtgaagattttttgaaaaaaaaggggaagcgcttttatgggacggggaaaaaaaaggttg

SEQ ID NO: 143128 - DNA, 1020 bp, Homo sapiens
agggggactgtactgccctttgagtactactgtgtggccccgcaacccagcacaaccaggtatctgcttggaacccagccaccataaagcctgctagctaaaaaaaattttacatctctcagttcattcggcacagacccctgcctcattcagctgtgactctgcttggaaaattcatcagttacaaagcagccaatgcaattatctcaaggcattgaattctgcatcttttagtgaagaaaataactgaacatggttttcttctgaagacacaaagtccaaaggccaatcacacacctcttacatcgatctcttggaaattgaaaaatggacctttgaaaatgctagatttacaatgagaaatgccataattcaaggtttattctatgggtccttgacatttgggatctggacagctctgttattcatatatttgcaccataatcatgtgagcagctggcagaagaaaagccaggagcctctgtcagcttggtcccctggaaaaaaagtgcatcagcaaattatctatggctcagagcaaataccaaaacctcatgtaatagtcaaaaggactgatgaagataaagcaaagtctatgttaggtacagattttaaccatacaaacccagaacttcataaagaacttttaaaatatggatttaatgtgattatcagtagaagcttgggcatcgaaagagaagtgccagataccaggagtaaaatatgtactgtcaccttattaccataattatcagttgaaggagtaaagagtcaaaaagatgcaaataaggagaagtgtttgaacgagatgacacaacatccaaggcatttagatggatggttttcttcatattgcttctgcctgcaggtgtcttcaaaaacattacccaggccgcctcccgactgccagcattgtcatttgcttctataatgaagaatgtaatgccttgtttcagaccatgtccagtgtcacgaacctcacgccacactattttcttgaagaaattattttggtagatg

SEQ ID NO: 143129 - DNA, 778 bp, Homo sapiens
agggggactgtactgccctttgagtactactgtgtggccccgcaacccagcacaaccaggtatctgcttggaacccagccaccataaagcctgctagctaaaaaaaattttacatctctcagttcattcggcacagacccctgcctcattcagctgtgactctgcttggaaaattcatcagttacaaagcagccaatgcaattatctcaagggaaattgaaaaatggacctttgaaaatgctagatttacaatgagaaatgccataattcaaggtttattctatgggtccttgacatttgggatctggacagctctgttattcatatatttgcaccataatcatgtgagcagctggcagaagaaaagccaggagcctctgtcagcttggtcccctggaaaaaaagtgcatcagcaaattatctatggctcagagcaaataccaaaacctcatgtaatagtcaaaaggactgatgaagataaagcaaagtctatgttaggtacagattttaaccatacaaacccagaacttcataaagaacttttaaaatatggatttaatgtgattatcagtagaagcttgggcatcgaaagagaagtgccagataccaggagtaaaatggatgttctggtgttcctggacagcactgtgaggtgaacagagtatggctggagcccctgctgcatgccattgccaaggaccccaaaatggtggtgtgcgccctgatagatgtccttgatgatagaactctggaagtataaagcctctctcttgtaagg

SEQ ID NO: 143130 - DNA, 828 bp, Homo sapiens
agggggactgtactgccctttgagtactactgtgtggccccgcaacccagcacaaccaggtatctgcttggaacccagccaccataaagcctgctagctaaaaaaaattttacatctctcagttcattcggcacagacccctgcctcattcagctgtgactctgcttggaaaattcatcagttacaaagcagccaatgcaattatctcaaggcattgaattctgcatcttttagtgaagaaaataactgaacatggttttcttctgaagacacaaagtccaaaggccaatcacacacctcttacatcgatctcttgatgcaaccatggcatccggcaatagccatctaccttgcaatatttataattactcctccctgttcctcagtcaagcgcaccaaccagaaaattcctttccacctatattccatcctgattcacagccagtgagattttaacaagcacatatcagccacagtatgccaggggctttcagaacaccacctttccaccagcaatgggatgctcagggccagccgcctggagggtggcttagccctaaaatcccctttacagcccattttcctggaccattagcaaccatcatactaggtcaagttccccaggaagaagactattcgactaagatttgcatggaaaactttattcggagcagatctggggacaaacactgcaaggcagggacacaagtaggttcaatcagaggaagagcctagatggcagtgcagcttccagaagagactccacccaccccacaggcagcttgcgctctccagagtccccccagatagacaagggagctgcaccca

SEQ ID NO: 143131 - DNA, 771 bp, Homo sapiens
agggggactgtactgccctttgagtactactgtgtggccccgcaacccagcacaaccaggtatctgcttggaacccagccaccataaagcctgctagctaaaaaaaattttacatctctcagttcattcggcacagacccctgcctcattcagctgtgactctgcttggaaaattcatcagttacaaagcagccaatgcaattatctcaagggaaattgaaaaatggacctttgaaaatgctagatttacaatgagaaatgccataattcaaggtttattctatgggtccttgacatttgggatctggacagctctgttattcatatatttgcaccataatcatgtgagcagctggcagaagaaaagccaggagcctctgtcagcttggtcccctggaaaaaaagtgcatcagcaaattatctatggctcagagcaaataccaaaacctcatgtaatagtcaaaaggactgatgaagataaagcaaagtctatgttaggtacagattttaaccatacaaacccagaacttcataaagaacttttaaaatatggatttaatgtgattatcagtagaagcttgggcatcgaaagagaagtgccagataccaggagtaaaatgtgtcttcaaaaacattacccaggccgcctcccgactgccagcattgtcatttgcttctataatgaagaatgtaatgccttgtttcagaccatgtccagtgtcacgaacctcacgccacactattttcttgaagaaattattttggtagatg

SEQ ID NO: 143132 - DNA, 481 bp, Homo sapiens
tgttccaacaacttgagagactgaggtggcaggaggattgcttgagcctaggagttaggggctgcagtgagctgtgatcgtgacaccgcactccagtctgggcaacacagcaagaccttgtgtcaaaaaaatttttttaattaaatataaaagagtttcatgacattcagagaccatccaaagaacctgtgggttctggccaggcacagtggctcacgcctgtaatcccagcgctttgggaggccatagcaggtggatcgcttgaggtcaggagtttaagagcagcctggccaacatggtgaaaccccatctcttctaaaaatacaaaaaattagtcaggcatggtggtgggtgcctgtaatcccagccactcaggaggcggggacagcagaatggcttaaacttgggaggcggaggttgcagtgagccaaggtcgcaccattgcactccagcctgggcaacaagagcaaaactacatctc

SEQ ID NO: 143133 - DNA, 349 bp, Homo sapiens
ctggccacaggacaggagaagagcagcatggactaagttcaggcagtgtagctgaagggcgggtgtgtgtgtgtgtgtgtgtgtgtgcacgtgcacatatgtgcatgtgtgtgaagatgcagtaataataggaaactgaggactgattagtgccaggccctgttctatgtactctacataactcactgaatccttaccatgattctgtgaggcggggttctattatcatcacccccatttttcagatgaggaagctgaggcagagagaagcttgcccaaggtcacacaaccagcatgtgatggagccagctgggactcaatccaggccatctggccatgttggcttcca

SEQ ID NO: 143134 - DNA, 370 bp, Homo sapiens
aaaatgtgtagtggttttgtgtcagtatttcctgatgatgttgaacagggacagcgtaaaaagtgatatacattccaaaaaatcagttgataaagtagttttattttcaccttttatcagaaactttgcagatctgccaataagagatgtaatagatttgagttttacctaatcttgtttgtacaaggataagaattattgaaatatgttactagttagctttttcctttgtatttcaattctttttgaaatcttggaagtttggcttagtctttgattacaccaaggatacagggctttgaagacctggagaaactagtgagtattcatttcaaaagcaagtcttaagactggttcagaaccacaagca

SEQ ID NO: 143135 - DNA, 414 bp, Homo sapiens
gagccttcctctgaaccttttgcaatagtgacactgatatcatttataaaattaatgcaccctggttcagtggcatagttgctaagaaaagacaatctcttatggaatacatgagtgaaaaaacaatgaacatagactaacacaaagaataacttctgatgtaagttttttattaagcctggaatagctcttaagaaataagcaggattgacacttctcatttaatgtaggaatgacctactaagcaatgaacaaatcttgcaagttttgtcatttactatcctccagacatctgattcaagacttgatagctgtctgcaccaccctttcagaatctaacaaacaatttgtttgaaagcattggaatgaggtggtgatgccccaaacaaggtttttgcccatatatctttaaac

SEQ ID NO: 143136 - DNA, 144 bp, Homo sapiens
attcttacacatcagtttggcttcaagtttttagttaatgtcagggttcaggatcttcaattatctgagagcttcatagtcctgattgagtcaaattggacaaatttagcagttcaatggcgcaggatttgattggttaaatat

SEQ ID NO: 143137 - DNA, 566 bp, Homo sapiens
  misc_feature (190)..(190): n is a, c, g, or t
  misc_feature (226)..(226): n is a, c, g, or t
cataacacagtaatcattcttcctattgtcacgaaccatgtcttatatagatttcctgaactggacatttcctttcactttagatagctcagtgactttctgagtttttcatccacctgaagttaccgggttactttcttcgctgtctcattcttttcttttttaagacaggggctccctctgtagcccnggctggagtatggtggtgcgatactggctcgttgcnacctctgcttcccgggttcaagcgactctagtgcctcagccttccaagtagctgggactacaggtgcacgccaccatgacccactaattgttgtattttgagtaaatatctgtttattccatagtaaggatagatgctagacaggttatgatttgctttggttctactcccctactttggataggattttacctaggtggagcattggatcatgttcttgagctgtgtggaactttgatttgcttatgtgaatgcttcacactgctggccaccctttgttgcttaagcagtagagacataagctcatcctgggtacaccttttagtgtgcaaggttctgt

SEQ ID NO: 143138 - DNA, 581 bp, Homo sapiens
gaaagatggaacagcagatgtgcatattttcctctgtaatggtcattgatttaatataaaagatatgtctgaagaatgtatgcttggataagtaatatgctgaattctggtgtttggtgtgattgtattagcctagacctgtttagtagtaactttgaaatatgttgcagcaataataaggaatgtagtgggtgcctttctgctgttatcaaaatccattaacaggttttcctatgcttgactgcctttcattgttacgctttatggttcatactgagggggcatgtaaatgacatctcttctatggtttctcaaggtctttaaaacagtgttgtattttgagtaaatatctgtttattccatagtaaggatagatgctagacaggttatgatttgctttggttctactcccctactttggataggattttacctaggtggagcattggatcatgttcttgagctgtgtggaactttgatttgcttatgtgaatgcttcacactgctggccaccctttgttgcttaagcagtagagacataagctcatcctgggtacaccttttagtgtgcaaggttctgt

SEQ ID NO: 143139 - DNA, 676 bp, Homo sapiens
gttttgcttgttgttattaatggtgctagtttcatttctgaaaagagcccataacaatttagtgcttttaggtttaattgaatctgtccctcagatctctattcaacaaatagtggttctgataacatttactacgtgcctaatatattgggtgcctagtataagctttgtgcttggtctaggaagtcacagataaattaggtaaggaggccgggcacggtggctcacacctgtattcccagcaatttgggaggctgaggtgggtagatcacttgaggccaggagtttgagaccagcctggccaacatggaaaaaccctgtctcaactaaaaatacaactgtactccagcctgggtgagagtgacactttatctaaaaaataaatagataaacaaacaaataaataaataaattagataaggcttttatcctcaaggagtgtttagtgtaccttatgatgtcagttctttctggcctagtgttacctgatgggaactggttactatccatggtattgtgatttggtaactcataaccaccaggccactccctgtgctcttactttcatagacaggggagggctgtagaggtcttggtgaaaactgaaattttgtgaatctaaattgcatgtgcttttgattgagattttatagttatcactgcctcatagatgatg

SEQ ID NO: 143140 - DNA, 133 bp, Homo sapiens
caatggctacaaagtgggctttccacatagaaacctgtgtatcctaatggataaaaacccaaggataagaatgaaaaattggcgtcttagcctctgagtgacccagaaacagggcccgcctgagacaggtttg

SEQ ID NO: 143141 - DNA, 994 bp, Homo sapiens
cgcgggggcgcgggggacgcgccgggctgggctgtggggtcgaccccctgcctctcttctccgcgggtgtgcagatcgccgccggccgaggcttgccgccgccgccccgactgggggaatgagcaggcgccaggtcttgaattcctgtcagggccggtctgggggctccctgctgaagcccctgtccctgatcccgcaacctcccgcgtgcgttgggaaggggtcgcgggtagcggccgtcctttggatgcacgtgtgatggctttggcttaatttcacattgttttgtttgttttttgagacagggtctctttcgcccaggctggagtgtaatcacggctactgcagcctcgatctccagggctcaagtgattctctcacgtcggcctcgcagtaactgggaccacagacatgagctaccatgcctggcttttttttgttttgttttgttttgttttttgtagagacagggcggggtgtgagactctcatcttgttgcccaagctggtctcctgagctcaaggatctgccctcctcggcctcccaaagcgctgggattacagcttgataccctaccttgttttaacctgattgactcgctcttagctgagagagcgggacagactccattttggtttcttcgcttgcagcaccttgtccccctcccttaaggacataactggtgcagactgacaccaagcacatccaggaatgtgcttactgataagatactgaggcaagctgtaccagcagctcctgggaacgcgctcggttgatggtacccaaagcccctgcgtttatctctttgtgataatttaagccccatgcacctggaactgtttattttcctgtaactgtttctataaccatttatcttttaactctttgcctgttctgcttctgtaaaaattgcttcagctagactaccccttccctatttagaccaaggtataaaaagaaatctagccccttcttcagggccgagagaattttg

SEQ ID NO: 143142 - DNA, 176 bp, Homo sapiens
taatacactgtattcttaataccttctaagtctatcattatgtcctctttttacttctaacatgcattctctcaccagttttctgacttagacttgtccaagatttgcttattacactgacgtacttctagaactagttgaaaacattctactgtgtttatgttttcttttatctg

SEQ ID NO: 143143 - DNA, 315 bp, Homo sapiens
cgacgctatgagagataaagtattgtctagttgcacgtgggcaggacgaggctccatggaggtgatagacaagtaagaccaattctgatttcatgtgttaagacacaggcaactccaactctacaatctgccactcaccaccaagtagtccatgctccctggttaggaggtctttgggactgggactcaacctccacaaacccccttccaataggagcagctatgtgcagaccctacttcctccagtgtctccaattcctggccaggtgctgtccccagaaactcctgtaaacatgtggccctgagcaaaagttt

SEQ ID NO: 143144 - DNA, 775 bp, Homo sapiens
agacgacaaagggctaatttgggatggacactccttggtgtttggaaatttaaaagccaatgcaaatgctgtataaaacaattgatctttaacggttcagcgggatctataaattttctcctgagtaatgaaagattgctgtgtttttttttgaagtctccttaatgattgtctgtgtacttactccctgttgcaaaacaggtaatgagagtatattaggtgctattttaaaatacacccacaacattaaactaaattcaaataattaattggaaattgttatttctgcaaagtaatttccaccaaatcagtcattaagctatctactaaaaccagtatttagtggcttttagtcaagttggctaatggtagacttctcatggcacgtgggagaagtaagctgaagtagcagaaaatggtatttgcagtgagtgttcaaggcgaacttttaaaaatactttacagtaattacagcatgtggctgaaaataactatttggttctttttttaaaccactatagttagatggactataaacatcattcagtttccctgtgttgtgattcatttccacaaacatgtattgtgccaggcactgatttaggtgccacaaaaaatagataagaaatggcttgacaactgtccttaagtttaataggcatgagatttctagatactgctctactaatgtgtcattgcctacaactcacctgttctgaatgaccactttttttgttatcctatatcagaagtacttggaaaaaaataaccagca

SEQ ID NO: 143145 - DNA, 314 bp, Homo sapiens
ccctaatgtaaattaaaatcagttatttagttgcactagtcacctttcaatactcgatgtccacatatggctagtggccactgtacttgacagggcggttaagtaactaacttgctgaaggtcacatagcaagtaaatggcagaactaggatttcaaccttgtttctgacttcagagctcaagtgttttgaggtcttgcttttctgtttccatttgcaaaacagatttaggtgaactgctctagaacagcactgtcccagtaggactttctgttatgatagacctgttccttatctgccctgtccagtacagtg

SEQ ID NO: 143146 - DNA, 387 bp, Homo sapiens
acacggagctgtaaatattcacccctagacactgccatgaggtcggagcccacagcctgcccatctgtatgctcccccagaggtctgagcagcggggcactgaagaagcgagccactcccccatcgcacgccctgcgagggagacaagggaacttcccgtttcaaatgcatgatgtgttcaagagcagcaatgccagtgtggcagagcagagtgaaggagggggtggggtacaccacagggtcagcaggggagctcacccaggtcagtaggggtggacctcacagggcctgtaggctatggtgaggcctctgtttttcactctgtgatggaagccactgagtggctccgagcaaaaaaggaattgaatctggcatgggctcggctgc

SEQ ID NO: 143147 - DNA, 225 bp, Homo sapiens
atgttggtgttccttttgcatttctgaaaggtcagccccaagtctcaaagcgggagagttctcaaagggtctgaaataaggttcctcagactccacccctcggtggctgggaagctgtttgtggggcagtaggcgatggctgggactgcagacagctgacagaggaggcatcagatcattacagaggaatgcgaaatctggcctatgggctttccagagcaaaca

SEQ ID NO: 143148 - DNA, 373 bp, Homo sapiens
cactgcccctcacctgtctataatattttctatttctttattgatgttctgcatttgttgagacattgttctccttgtatcctttaactctttattcatcgtttcttttagctttttgagcagatttcagacagctgatttaaagtctttgtctagtactttcaatgtctgtgcttccttaaagacaatttgtttcttttgtgaatgggctgtactctcttaatgtcactgcatggtttgtaatttttttttgaaaattggagtcaggcacagtgactcacacctctaatcccttttccccaaaaaaagaaaaagtaaaattaaaaagaaaaaaagagtccaggcgtggtgcctcacgcctgtaatcccagca

SEQ ID NO: 143149 - DNA, 907 bp, Homo sapiens
gacagtttcatagaaacaactatgttttgcacccagatttcattggatagtataatctttaatggataattaattaaaataataagtacatcgtctataaataagtttgctaacacaaagaactgagtcttactcagcatataacttggaggaaagcgtgtgggtgttctagaggacaacctactggtcttgagcatttgtccttaccttagataataacagtataacttttggagacagtgatgcttaccagtattccaaagctcctgtacatttctcagtcttttccgctgttaggttggggacatttgactaacagtaaccaatggaacttgcaagtaggtgcatggtggtgtatgagatgctggaaactccataatctgagtcatttgaataacggtggaattaagtctccttattgagttaagtcactgagatctactttttactgtgggttaagatcttattgcagcataaccttgcccttcctgattatcatgaaatgtttaacttaaggaagaagagagtccttaagttaatagggtgaatcaactgagttaatggaagttaagagatgagtttttaaaacaattaaaaaaataaaaagaaaactttatttgaacaagaaaaagttaaggatgttacacttcaaaagaattttgaactcattaattatttttaattgacaaatcactgtggatttacagggtactgtatgatttttttgatacatgtgattaaaccaggctaattaacatatccatcacttcactttttggtggtatgaatatttaaaatctctctctgcaattttcaaatatacaatacagttggccctctatatctgtgggtttcacatcctctcattcattcaactgtgggttgaaaatatttagaaaaaaatgaa

SEQ ID NO: 143150 - DNA, 211 bp, Homo sapiens
taaggcacagggcaaggaatacaagaatgtgaccctgtcttcttttcctggctttgttttattggactttggcaaatcacctaattacccttcttcaatctccttatcataaaatgagagggaggtaaggaagagtgaactgtggaaggttagaactggttccttccagttctaacactatttccaatccatctagattctctgagaccat

SEQ ID NO: 143151 - DNA, 326 bp, Homo sapiens
ataagcctgggaagttttctcatgggttcctgggtgattgcattgtcggatttgggttggcttactgatatgcctaaaatagctcctggcttctttggtatatcgctgtcctttgcccctcctgagaatctttagtttcatgccagcttagcatctcttctccctgtgggcaggtcccatgcatttactgccattgtcacttctccctgttacccacagtgctgccaccatgcctgggatagacagcaggtaactgatgtgtcctagttgaggtccctatcctttcagaggaggtgacatgggttcagatattttcctatgttcat

SEQ ID NO: 143152 - DNA, 376 bp, Homo sapiens
cattcaacaagatatactacatatataaatcaaactttatcataaaacaaactttaaattaaaaaaaatcacaaagtatgttatctgactgtaatttacttaagccagaaatcaatatcagattatgtagattattctcaaatatgtggaaagcaaacaactcacttctaaatagtccaaaagtcaaagacaggcaagttagaaaacatcttgaattaactgaaataaaaatacaaagtaccaaaaatttgtggaatatagcttggagagaaatgtatgacattaagtgcttatatgagaaataagaaagatctaaaatcaaacatataacatttcacttcaagaaactagaaaaagaagagcaaatttaacccaa

SEQ ID NO: 143153 - DNA, 313 bp, Homo sapiens
ttttgatgtcaccaggtgaccttctgaggcaggtgctgcaatgtgtcccgtcgatagataaataaacaatttttttttttttgagatggagtttcactcttgttgcccaggctggagtgcagtggtgcgatgtcagctcactgcaacctccacctcccaggttcaagcgattctcctgcctcagcctcccgagtagctgggattacaggtgtgtgccaccacacctggctaatttttgtatttttagtagagatggggtttcaccatgttggccaggctggtcttgaactcccgacctcaggtgatctgcctg

SEQ ID NO: 143154 - DNA, 322 bp, Homo sapiens
tggcaagagctccatctttgacaactcagtgggcaaaacaaagtcctggggtgggcccaggaattggccctgcaccagaaattcagatgcgcacttgtgtttgagaattgctattttcatctgaggaaggaggtgcagcctgggataaagggatgtggggttcagtagagcaggaccctactaccagagagcccagcagttagtctgcagggggctttgctctgggaggaagcatgggggctggtatcgcatttgactcaagacactcacctcccccaactctgctttgatgtggtatcctgcaggcatagggagtgccatg

SEQ ID NO: 143155 - DNA, 260 bp, Homo sapiens
attttgaggttttcagtataaaaatcccatacatgttttgttagatttataagtgtttcagtttttttagtgattgcatatggtattacatttttagttttagtttcctttgtttactgccagtatagagaaatagaattgatttttgtaggttgatcttgcagcttgtaaactttctcttttttttttgagacagagtgtctctcttattgcccaggctggagtgcagtggcgcgatcttggctgactgcaccctccgc

SEQ ID NO: 143156 - DNA, 207 bp, Homo sapiens
cttttagataatttatcatttttagcaagaaagataaagtctaactcaggcaaggctttctctttctgagttaaatggtgtagaatatataatggatttctgcctctgcctaattattcaaggataagtcttgtgatctaaaaaggaacaacgtgctgttgtatccacggtaaggggattaacggtcttgtgcttgtaaaacagcag

SEQ ID NO: 143157 - DNA, 462 bp, Homo sapiens
ctggccgccttgcactctagtgggaactatgatgttgggcacaagtgccagcaggaaggtgggaagcttcccggggatgtttttcctggaggtcaagtccccccttgggctgtgaagtagccggtactggggttcatgggcatttcccttccctgactgttcgccagcgtctggcacagcaccagcagcccctggaagtctaggccagatatgccatgtccgagaatcttttgtaaacatttttcatcagtgactcacagctttgagaaaggattatttttatataaaacgatctttcaattttactttaaagacccaaaccattttcttagaatactgtctaaacaagttaatcatgcacagatccagtgaattctgtggcctggttcttataaaatttccaaataattttatactgtcatagacagagccagagctttttagaggtttgaggcatttttt

SEQ ID NO: 143158 - DNA, 156 bp, Homo sapiens
caacactcagctttggcgttagggagatgaatcggagagccttggccatttacagggcagcagctactacccggctccatccagttgttatccttgaggccctgtgttgccagatcctgttatttttaaagagaagccacattttgaaattataaa

SEQ ID NO: 143159 - DNA, 400 bp, Homo sapiens
caggcagcaggctagctactttgcatgcagtttcttagtcctctcgactctgaagtaggtgtctttggtcccactgtacagttgagaacactgaggcttaggagaggtaagtcctttactcagggtcacccagagcaagggcctccagggcagttacacccaggtctggctcatgatttttgttttatcctgataaacagtctcagctgggtgcaatggctcacacctgtaatcccagcactttgggaggctgaggcagaccaatcaattgaggtcagaagtttgtgaccagcctggacaacatggtgaaaccccatctctacaaaaaatacaaaaaaatttagctgggtgtggcagcacacacctgtagtcccagctactcgggaggctgaggcaggac

SEQ ID NO: 143160 - DNA, 222 bp, Homo sapiens
gctacttgggaggctgagatgagatgatcccctgagcccaggaggtcgaggctacagtgagccatgatcataccactgcactccagcctgggcagcagagtgagaccctgtctcaaaatataatcagaacagaagataatattctatgtgtgttctaaccagaagagtggttagtagaactaagaacctcccttctttatctctctgcctctagtaatccaa

SEQ ID NO: 143161 - DNA, 197 bp, Homo sapiens
gacattcaaagaatagacatattggatcaataggagaaaacaaggaagtctgcctgagagggatgatgtctgagttaaggacatcgaagagtggacagaatttaatagcatgagatttgaaattttcttttaaaccctagaggcaagaaaaggcagggcacggctgagacataccaacttgtccagcttggttgaag

SEQ ID NO: 143162 - DNA, 365 bp, Homo sapiens
gggcaggagccaggttaaagtggagacctggctattggtcactgggtactttggcagagggtttaaagcaactactggtgaagctctgccctgggggctaggactctacttttcgttgctgctgatgtagttcctaccctgccacagggcactcacttactccccacctcattttggggggtcatttgcagcaggaccttttcctttaccattgagataaacagataacccaaaggaagggtcaagaggctctaggtgggtggctggaaagggtttttattaagaaggcaatcagggactgagagtcctgtcctaagagtgcttaagaaagagaaagaccaggcgtggtggctcatgagcctgta

SEQ ID NO: 143163 - DNA, 334 bp, Homo sapiens
tcttgttccttgatgtatttgctcacttgcagccttatagaagaatataagctccctgagagcagaagtcttgcatgaagggagaccagatggaaggctgttgcacaaaggtctggcagttgcagacagaaaggcattggctatttagagacatgtgtaaggagggagaggttggtatttagtgattgattgactatgggggatgacaggatgaaggtggacactgggttgccagtccatctcagatcgaggactggcatgggactgagggtatgcatactttaggattgcctggcaaaggccacgctcagacctgtcctactggaggggtaag

SEQ ID NO: 143164 - DNA, 368 bp, Homo sapiens
taaagcggaggccagattggaaagaagaaaatcagggctgatgcagagaaataaggtagaaaaccatgagctaggctaggtaagaggcaatggtaacctgagttggagtggtaacagaggatgagaagtctaagaatgcagcccttgggccaagcactgtggctcacacctgtaataacagggctttgggaggctaaagcaggaggatcacttgaagccaggagtttgagactagctgggtcaacatagtgagaccctgtctctacaaaaaattaaaaatatcagccatgcatggtgacacacacctgtagtcccagctacttggggggctcaggtgggaggatcccttgagcccaggagttcaaggc

SEQ ID NO: 143165 - DNA, 204 bp, Homo sapiens
tctatcttggccacagctaaacctcaaaacgggcgctttccaaggtgcacgttgagaactgctcacactacccagagagcttcaccaccctgcagagaagtgaggactcccacctacccgagttccgcccagcggcagagctaaaagcccaccctgggactaccccagttctgcccagcggcagagctagaagcccaccctggg

SEQ ID NO: 143166 - DNA, 317 bp, Homo sapiens
  misc_feature (264)..(264): n is a, c, g, or t
  misc_feature (291)..(291): n is a, c, g, or t
tgaaaattgggaatgataataatatctacctcatggggttacagtgagaacatggcatatgacaagcacttaattgtttattaatttaaacatacagtgggccctccatatccatgggttcaaccaaccacacatcaaaaatattagggaaaaaataacaatacaattaaaaaatacaaaatatataaaatagaacaattatttactcagtatttacattgtattagatagtctaagtcaagattgtccaacccatgggcctgngatggctttgaaagcggcttaacacanattcataaactttcttaaaacattat

SEQ ID NO: 143167 - DNA, 411 bp, Homo sapiens
ccacttgtaagtgacaatgtgcagtagttagctttccgttccaggtggaattttgaaattgacaatttgtcagatccaaattagatattttgaaattagaattttcaagtaagagtatgggggtcatgtaatacttgtcttaaggtatttaacacattaaaagactatgtcatgaaggccagagggtctctgtcatttttatccttctatgtgatgcttaatggagtgtcaagcacatagtaagtgtgtgccaaatagaagtttattaaatacatgggtgaatgaatattgagttaaattgttctttagagctaatatccaaagtatattaagtttcatgccgataggacatccatgcaaattagcttcctgcacagggcagaattttatcagattattctgagtaccaaa

SEQ ID NO: 143168 - DNA, 110 bp, Homo sapiens
gccccattttataaagaacttagggaaataacaattaagtattttatctgcttaggtcacacaggtaggaaacagtagaatatatattattttgtaaatttataaattta

SEQ ID NO: 143169 - DNA, 146 bp, Homo sapiens
agcatccctcttatcccctcacattccttgttctcagagggatcccagactctgttagaaactcttcgtaccaggcaagacactcagaccacaaaccagactctaggctctgactcgctcaacccccgtccttcacacctaaagtg

SEQ ID NO: 143170 - DNA, 366 bp, Homo sapiens
gtccgtgggcacaggcctgggagtagagccctagtcagggaccacaacctcctctacccaacacttccctgcccgcttctgtatcactattccttcattaattagaaagtatgcattttttaaaattatgaagtgtctaggtgtctgccagcattactcaataggaaactccaatagaggagtaaagttatttctccaaggtcaacaaaattaataaatacaaagccttcatcaccagagccgtggtgaagagctctttgcactatgtgtaagcgaaacatgaaatcaacaatttatttaccttcagtgtaaattgttcattgaatgtcattatgttgtcgattattgattcctaccgcatgtgac

SEQ ID NO: 143171 - DNA, 340 bp, Homo sapiens
attttatgtattcatcacagattaaaaccacagtatttccaaccgtgcccagacaaagggtagctctgccacatcttcaatttttgagaaggatgcctagaaagcggcctcattgttcagtgagtaacaccattaacccatttatgctggaggttgtgattttttttttttaaatgagaccttggcgatgactttgagcaggatataaataactcccacaagcttagcgttccaataatggaacactgcgcataaatgggttaaaggcccaactccacaatttaattcgggaactggaactgaaatgattgccataaaccactagatggcacttccggtc

SEQ ID NO: 143172 - DNA, 647 bp, Homo sapiens
gggtaaatgtatgataatgtacttagtgaagaaacacctaccaaactacttatagtttatagactcttaggtgttaattttaactcatgaaagaaacctgggagtcataggtttctttcttaaatatgggtaaatatatgataatgtacttagtgaagaaacacctaccaaactacttatagtttatagactcttaggtgttaattttaactcatgaaagaaacctgggagtataggctctctcagcatgattattgtctcttccctacagtcaattcaggagggtttattgaggacctactttgtgtgaggataaatatagtgttcttgtacttaaagaacttacatcttttccttccttctggccgggcgcagtggctcacgcctgtaatcccaacactttgggaggccaaggcgggcggatcacaagttcaggagatcgagaccatcctggctaacacggtgaaaccccatctctactaaaaatacaaaaaattagccgggcgaggtggcacacacctgtaatcccagctactcgggaggctgaggcaggggaatggcatgaacccaggaggtggaggttgcagtgagctgagatcatgccactgcactccagcctgggtgacagagtgagactctgtctaaac

SEQ ID NO: 143173 - DNA, 137 bp, Homo sapiens
taaatatctttgctttctaatatacacaatatgatgacatttttaacttaaatgatatgcagcactttttgaacctagaaacttatttaataatgaagctttataactctttgctatagattaataactttccaaac

SEQ ID NO: 143174 - DNA, 389 bp, Homo sapiens
cgtgtttatgcaggctcagcacagttctcagtggagaagaaatactcaggaaacacattcaggatggggagaggaacgcagccgcctcggcccgcagggacgccaggagctccctctccacagggcctggcccctgcctccacttcatccgtgagcttcccagatgaggccagacgtgtcctcagttcagtgggtgtcctttgccttatccagcccagggacattgtacctggaacctcccctcctgtggccactcctgggcagggtgatggggatggacaaggtggggacaactccagcaccagcaataataatccgggagtcagccccaagccctctcttcactgaagtgaactgaaacattgggcagatcaccagtaacccacagg

SEQ ID NO: 143175 - DNA, 541 bp, Homo sapiens
tggcagcagatacttacaggtcatggaaacgtgtgggaggaactgttcgaagcagcattaactctgcagtccccaaaaccccatgttcatgatttccatcacagtacaggtgtggaatctgggacatagagaggctaagtgacctgcccaaggtcctgccactcagtagtcagttcacaccataccccaagtccatgttcctaacagctgcacttcactgctgggtttctgagccacaagcatatcatgtaaaacctcaatcatttcttttcccccttgaaaagtgtcattcatgagtaacaaaattctgaaacctgagagttaatttttgtttaacctatttgacataactcaatccaaacttgctttcagaattattctttaaccctaatttcatagaatttttttttttttaagagacagggtcttgttttgtcagccaggttggagtgcagtggtgcaatcatggctcagtatagcctcaaacacctgggctcaagcaatcctcccgcctcggcctcccgagtagctgggactgcag

SEQ ID NO: 143176 - DNA, 209 bp, Homo sapiens
ctagtttatctatcattcccaaatatactgtgactctgctaccaagcacttgctaatttagctctttctacatctatcagagtcctactctgttcatattgtttcctctgtgatgttttgttttttcattgccctcagcccttgataattgctattaaacatcagatgcctgcaatgccaagaaggcattctacagaattttttaaaat

SEQ ID NO: 143177 - DNA, 532 bp, Homo sapiens
tcctgggacctggtgtgcggggccccagggctgtgctcccaggctgctgcttgtgaacttgctgagagctgccccccaggcatgttgccctaggctggcctcccaacctagtggatacttttgatcattgttcactgtaacctcaagcccctgggctcaagcattcctcctacctcagcctccagagtggctaggactacaggtgtgtgccactgtgcccagccaattaaatttttttttttttgtgtggagagaaggtctcactatgttgcccaggctggtctcgaacatttgggctcaagagatccccctgcctcagcctcccaaagcgctggtattataggcatgagccaccatgcctggcttgaagttaatttcttattaacgttttcagtatcattagaatatagtaatgcagtagatttttgactgtttattggtattgtacatcttgcacctctaatgtgctagcttactgtcttcagtcaatgtaggattggagttctaattgtgtaaaactctgtatataagg

SEQ ID NO: 143178 - DNA, 131 bp, Homo sapiens
actggaggtcgctgtgggggtgaagggtgaggcctgcagtgagtgcagcagtgagtgtgtgtgcacagaggcgcaggccgtggtgttggaggctgtggctgggctctgcctccgggcctgtgctggcagcc

SEQ ID NO: 143179 - DNA, 495 bp, Homo sapiens
gggagcaagacctagaaaaatactggagccacagactttatctgaatgtctgaaatgacctctcttcacattatgggcagcctgaaggccatcggctcccaagttttatgtcctagagctttcaccagtgccaggaaatggaaacttccagttctaaaaaaaatctggggaggggacctttttttcccctgagcttgtgggaaggtgcttaaccacacactaaccttgataaaaatggcacctcccaaggtagccacaagaggagcaggtaggaacagagtttcctggagaagaaggggtcagggatgggtgccaaaaaccaaccccacagctgcatgtttacagtttagaccatctctgtgaattgcatccttatgttctgtattttaaaaggccattttcagctcctacttagcttccactcagaaataccattcacatcaggtctctgtgcatgcatgtggttttttaatccacacattgtcgggaccggcc

SEQ ID NO: 143180 - DNA, 388 bp, Homo sapiens
aggcatcaggtgggttaaaagaggcttgccaaggggcaggactcaggtgatccaaacccccaggcagggccccagacagaggaagtggcctgccaggaactgtgagcctggctgacggtatcctccacagcgaaggtgccacaggtggggtgagaccaggctggagagcaggcagggccacggcaaagggcctgggagcccagcgaggcaactccatttccatttctttacttcctccatgactccttctaaaaaggcttaagggtgaggccaaggaacttcaacttcattctaaaagccctagtgagctatttaaaggcttaagcaggttgaggtctgggtaaatttatattttgggatctatttatgggttaacccgagcgcaaac

SEQ ID NO: 143181 - DNA, 256 bp, Homo sapiens
agtgcctggctataggctccagatcctgttccctctccctctctgaggccctcactgcggccctcactgcatcatgcttaggccctggtgcaaacctttgagttctcatccatgtggtcttgggcaggtttctgcaagcttcagttttctcatctgtaaaatggggaccatattgtcctcattgttgtgaagacttacagagatagtacgtatgaaacacttagaacagtgtttagtacctcatatgcacttaata

SEQ ID NO: 143182 - DNA, 163 bp, Homo sapiens
ggatttgctggtgcagtacaactaggcttaatagggatcatggtactgggaaataatgctaactattaccaaaggaacctcattgcattacctttacttgccattctgagcattagatctgagcacggaaaataaccagggtgtcctaggtgtactttcagga

SEQ ID NO: 143183 - DNA, 563 bp, Homo sapiens
catgacaccatggtaagacaccgaacctaattaccaactctagttacaactgaattcacactataccttcaagtttgaggaaatacttaactaaaaaatagctcaaatgaagttgtttggttacaaaaacatttgcttcctatccactgataaatttagtactttacctttaaaatcctagatttccttgtgcactatgagctttttcttaaaatagataatttaacaaaatgaaaaagtggagagaacaccacacattttttgccttaaaaaacacaaaccctgtgttataaaactatctactacttaattctaactgaaaaggaatgggagacaaaaatgtaaggaaatgagaaaatcaatggctgtcttccttgtaatgaaaaagctgcaaaactgtttataacaatttagctgtgttttgaaaatatgacttccacatcatatgctggtaataaaattatataccactgtcatttttttcctgcccagaaatattaaaggatttacaagcctcaactttcagaccaacaatgttatagattctaaggggcaccatgtgt

SEQ ID NO: 143184 - DNA, 331 bp, Homo sapiens
ctaagtggaaggatcactagatttgctgggttgaataaataatcatgggtggtcacagaagtttcttgccagaaaacattacaaagtcttccaaaggatggacctgtgcctttgatggagggctagggctactccagaggtctcagggtgctatgaacagctcatctggggccttggcccagcactgagcctcagcaggggcacaataacaggagaagaatgtccctattggagaggctgagccatcgctggagaaatcaagccagaattataaatgctcacaaaggaaacaaaacgaacaggacttgaaaaatggaagctgacacttgaa

SEQ ID NO: 143185 - DNA, 431 bp, Homo sapiens
tttccagcacacctcatccacttagaaaaaccaaagtggtatgtagacaatcacactttgaatacattacccaacagggaacacagggttcaacagaaaaagtgaaaggaaactccaaaatctgggaatgagaagaaaagcagacagcctgtcgtggtcaagaccggctgggaactggcaatgaatccctaagagagagtgagtgagtatctttctgcagtccactttcccactggggaatcatacagtccaggccacagcagagcaccctgacccacccaaatcctgaatctgatttagggagcatccaagagactgtgagaaggaactgcttcaaggaggcaacatgccctgggtcccacacaattcctgagaactaagtagccacagtaagatgcgattcttaatcctagctcttagcaaactatgag

SEQ ID NO: 143186 - DNA, 672 bp, Homo sapiens
aaattacttgttggagatggagttgcagacaaaacaaatatttaccactgctttaaaatacgtttattgtactcaggagaagagtctggaactgtggtttcagaatgagcttatccaacagtaagaagaggactggggcataccttttaaaataataatgatatatttataatcatcctagtgtgatttatttaccttttagtaaatcaagttctcagaaaactaaagtaaaaaaatcttaacattacatatgcaggacttaatctgaataatcataaattttcataaacttaatttacataccacaccatagtagctgtgatatagtaaattaataagttttttgtactatggtgtaactctttcatcctaagaataaaaaagattctattatgtcaaaagacatgtatctggatggttaaaaaaatccaatcatacataactgaagaaaatgtaggtattttagtggaataagaatgtgatatatgaaaacagaaaaataaatatcttcaatgttacttaaagaaacagaattaacaaagatgtatcatggaagagaggatagttctgtaaaaacacataaaataactttcaaagatgaaaattttacatatgtaaaagcatttgtcaatgaaagtaataataattccattcatgcatttgttcatgtat

SEQ ID NO: 143187 - DNA, 342 bp, Homo sapiens
caggacactttacaaaatgcagatgcccaggctgggccccccaggtccttctgatccatgatgggcctgagaccctctggctagtcggtccagccccaagcagacatcaggactctgtcacatctatctcccacctattccactccaccttttgctttgcaggtcatgctctggccaaattaaatcaaatatcatcatcgaagcaaacacgcacttgaagcctctgtgcctgcgcttccctgcctgagagaaagctccgccaggcctggaggatgcagctggatggcccacaggcccagctcaagtctcccaacaccactggcagggtaagtcagccctcct

SEQ ID NO: 143188 - DNA, 467 bp, Homo sapiens
tagcagtcattctacattcaccacgtccactccgcctcaagtcctagacaattgctagtatactttctgtctgtatagccttgccaattcgcacgtttgatataaatgaaatcatacagtgcagctggcttctttcattaagtataatgtcaatgtttttgtgactagcttctttcatgacttttgttctttttttaaacggagtctcatgactctcactctgtagcccagatcgcgccactgcactccagcctggaagacagagcaagacaacgtacccaaaaataaataataaagggtaacattaagggtttttttgttgttgttgacagaattgtgcatctattactgtgatctcattttagaatactttcatcactccaaagaaaaatcctgcctccagtagcagtcattctacattcaccacgtccactccagcctgggtgacagagcaggctctgtctcaa

SEQ ID NO: 143189 - DNA, 307 bp, Homo sapiens
tagcatcacctgtactcctattgtcaacttctactggagttgacaataaccagggagaatgaggaaaggaagttgaggttaggaaaactaattgttccaagccctttcccaactttctgcatccatgttcttcaattgtgttgcttgccctagctctcccctttcccatagatgccatgattagaaaacacttgcagggactttggacctttggtcttgctccatagtcttcatgacttctcagactttgtcatttaccaggccattgcagcatgagtgttctgatgcttgcatttggtctgccctg

SEQ ID NO: 143190 - DNA, 444 bp, Homo sapiens
tctacctcccagattcaacaagagttggaatcagataccctactgtatagcccttgctgcttctgagtcttgatgaattatatgttcataatatttactgaacatttattatgaaccaaggcaatgacgatatagcagtgaacttggcatattcaaagttcatgcccttgtgaagcttatattctaagtggggagacaaaagatacctaagaactttaggagttgtggtaagcggtattgaaaaaattaatatagtggcatagagaggaagtggataaaggagaatttaacttcgagaagattatcaaggaagacatctgaagaggtgacatttagaagaggccaaagaatgagaatgagccagctgtcaaaaggtgaggcagaaccttccaggcagcttctctttctttgaggatagcacatacaaaggccctgaggtaggta

SEQ ID NO: 143191 - DNA, 250 bp, Homo sapiens
caaacagggaacccaaaaacaatgggaggggttttgtaaacttacgtagactcagactgaagcctggtgctttgggccattgccgctgccctaggcgactctggccttggggtgcagtcctgtgtgatgcatgtgctgtggctttccagttagcttctccaccctggttaagagtctgctttcaggtcagagactgcagccctgaggtcgtgtgtgtgtagagagctcaatgcctgtcctgggggctccc

SEQ ID NO: 143192 - DNA, 161 bp, Homo sapiens
cagtgaacacacgcaccagcacgcaaagtcggagccctgcagtgtctgcaatgacagcccaagtcctgcggcacagagaggaggggacaccgcctctccactcacgctcactacacagtgggacccactctggcagggactggccttcataaaccatgctg

SEQ ID NO: 143193 - DNA, 262 bp, Homo sapiens
atcagacctccggtataaaataaaataaagcagaatcgttaacagttgaagttagggaagggcgctgaagaccctcccagatcctcagccttcccctagtccaacacacacataggcacacatagacacacacacatatgccagttcctatgtttgttttgtgcagaccatagatgctatctagtctgccccacctgaatacacaggaaggtcctctgtcacgtccctggtaacatccatcatctgttggatacttccaaat

SEQ ID NO: 143194 - DNA, 712 bp, Homo sapiens
atttgctattgattaagaggcattttgtgatatgtttgctttgatgcccagatagtatgtgtacatgaataaagaaaaaaaattataaaaaaaaaaaaaaaaaaaaaaaaaaaaaaaaaaaaaaaaaaaaaaaaaaaaaaaaaaaaaaaaaaaaaaaaaaaaaaaaaaaaaaaaaaaaagaagaagaaaaaaaagagatgacagacagaagcacacaaaaaaatcgaagagcagagacgcacctccatccaacaacagaaaggagaaccaacaggcggccccacaaacaacacactagaaaaaacaacccaacagatagtaaacaccacaaagaaaagagaacacgccgagccaccgaaaccaaaagaaagacacaaccaaacaccccgcgcccacgaaccaggaggcgacaaaacccacacgaacaagagaaaaagaaaagacacataaacagcagacacaaacgaaaaaaaaacagacagagaagaaccagcagcagagaataaccagaacagacagcacacaacaggagaatgaactaacacaaaaaactgcaaacagcaagaagacatagaacacgaaagagaatcaaacagtatacacagcacgccacccacgcaaagcaacaacacaacacgaacgaaaggcgaagcaaacagaaacaaccaagacaaacaacaacgcaagacaacacaaaatgagcatgcgaaag

SEQ ID NO: 143195 - DNA, 389 bp, Homo sapiens
tgagttccgcctcgctgcctgcttcttggcacaggcctttgattcctgaaatgctcagagcaaaccaagaaaaaaaaagtgtttctcaggtgagcctgtccaagaagtttttttccttaaagaataatttcttttcctgctgttcttcctccccacacttcaccaaaaagggtgaagacagacagaacccagaccctcccatagttttccttcagtgtccccttgggaatgatgtcaccttggtctggttgcccccacccatgggcgaggttgtgggtgataactccatgggccatgcagagcatgagggcagcctgcatgaagccggaactcccatccaccttctcgtccccagcctgtgccttggttctgatgccttcccctcgtgc

SEQ ID NO: 143196 - DNA, 338 bp, Homo sapiens
tcggtagaacattttgcaacttgcagtttgttttttgtttttttgccagttcacttgtttgtttttgctgtctcctaactttggaagaggaaccaagacagtctttaatcttgttcatcactgtgcccctagtacttgacacactgagactcaatacattattgttgcttaaaatgcaattcagttttatatataaatatataaaaggtataaaaaggagaatcaagactaaacagatgtttacctcatgcatgctcatttaaatgggaaaaatgaaatattctttaaaactcttaattttacatgtagttccacagtattttttcttaaagcttggc

SEQ ID NO: 143197 - DNA, 269 bp, Homo sapiens
acgcagggccggcctccaggcgcttccccatcaggctcctgcccgcacagcctagctctgatcccaactcgagtgccacttaacaaacgttaggtaacgagggggttttcagaacacgagagagtcttagtcccctgcttgagactgcatggccccggaaggaacccaaacgctgccccgtctccccgccctggcgatcttcactggcacctgccgctttcctgcgccagggcccccgcactggctgctgccctgtgggggacaccccg

SEQ ID NO: 143198 - DNA, 453 bp, Homo sapiens
ctgggagtatgctgatgattgacgctttccagagagttacccgaacaggcagcccatctgcctgagagtttccctgagagaacctccaaggtgatgtttattaggggaagccctagatttttcttggagaatcaccgagaatcacagaatattaacatcagaagagatctcagagctttcagagctgagggccggaatagttacctgacttgttcaaggtaacgtctaaggaatagtcaaagaaagactataatacaggtcttgtcttcagccagcataaatgctcgatcagagaaacctgtgacctctctgttaaggtccgtctcattccacaccattcagcttaaacttgcactgaggtgggcagattttgattcttggtctaatcaaagtccaagaggatgtaatatatatatacacaaaagacgaaagctccccttaaccggcttggga

SEQ ID NO: 143199 - DNA, 951 bp, Homo sapiens
acttgcaaaaaaagctcaagaatattgataaccagcacccaactggtaaaatcagaatgtctggcaaccaataaaaaaataccaaacattcaaagaagcaggaaaatacaactcaaaataaaggaaaaaaaatcaatccatggaaacggagccagaacttatacaagaagttagaattactaaaggcattacaatagttattatattgtattctacatgtacaaaatgttaagcagagacataaaagatcttaaaagacccaagtataacttcaagagatgaaaatcaaagtatttgattgagattgtttaaaagattgatagaattaacagcagcttaaaccaaaataaaagattagtgaaattgagagcacagcaataaaattcatcctaaatgaaaacaagagacaaaaaagactgaaaaagaaataaaaagaacattagtaagacgtgaaacaatttcaagcagcctgatatatatgtaattggagtaatctccttcagggagagaaggggatgaacagaaaaaatatcagatgaaaactataaacccatagattcaaaaagctcaatgaaccccaagtacgggaaacatgaaaactacactatggcacattataatcaatttgcttcaaacttgtaattttaaaaagcttttgaaactagccagagaaggtcaggcacagtggctcatgcatgtaatcccaatactttgggaggctgaggtggaaggatagcttgagcccaggagttggagaccagtctgagaaacactgcgaggccttgtctgtataaaaaataaacaaaattagctgggcatagcggcacgtacctgtagtcccagctacttggtaggccaaggtcggggggatcacctgagccctgtgggtcaagggtgcagtgagccgtgattgtgccactgcactccagcctgggcaacagagtgagaccc

SEQ ID NO: 143200 - DNA, 324 bp, Homo sapiens
ctcctaaatctatacccaagagaaatgatgtgtcgtgtctgcacaaaaactcagacatgaacactcaccgcagcattatccctactagccagaaagtggacacaactcaaacgtccatcaacacatacatagataaacaaagtgtagcatatccatccaatgcagcattattcagtcataaaaggaaatgaactacagaccctcctcaactcacgatggagttacagatgataaacccataaaatgtaagtaccagaagtcaaaaatgaggtcacacacagtggctcatgcctgtaatcccaacacttcaggagactaaggcca

SEQ ID NO: 143201 - DNA, 434 bp, Homo sapiens
ccaagccatactcctaagccacagaagctataagataatcaatgggcattgttgaaagcactaggtttacggtcattgttacatagcaatcagtaactaatacaccaggcgaaacctgactcctgctctacacctgctagaaaagactcattcaggctggcgcagtggctcacgcttgtaatcccagcactgagggaggccgaggcgggcggatcacgaggtcaggagatcgagaccatcgtggctaacacggtgaaaccccgtctctactaaaaatacaaaaaattagccaggcgtggtggcgggcacttgtagtcccagctactcgggaggctgaggcaagagaatggtgtgaacccgggtggtggagcttgcagtgagccgagattgcgccactgcagtccagcctgggggacagatggacactctgtctc

SEQ ID NO: 143202 - DNA, 495 bp, Homo sapiens
cattctgagtgagaaatttcagtcagagcttgtaatgtgtaggacgtgacattagggagtgaagagctttcctcttcactgattcaagatagccagtgccgggtgaggggagcgggacacttgcttcttcagaagagtggatccaaaagttgacctcttccccagactgagtcagcatgggaagagaattgtgctttcacaaaagcagagatgcttttctgtagctttcactgtttcttctttgctctggaaaatggaggacgaaggagttctcaggtcctcagtcactggagtaaagtgacatgcacgtcccagcgtgagtgcctgaatgggtctctcaggtctgaacagaacagccctgtggctgccgcgagctggtgcaggaggaagtacagaggagggtccggttcagagtggcgtgagaccagggttagatgactgttgccagtttagggccagtgagagatttttaatggtaaatatgtaacctctttt

SEQ ID NO: 143203 - DNA, 396 bp, Homo sapiens
tttatttttctagtgctgatgctcatcacagacaatgctgtcacaaaaccacctgatgtgtgtcctgtactatgcactacgggattggggaagttaattaatcagagttctctagagggacagaactataggttgatgcaaaagtaattgctgtttttgccattaaaagcaatggcaaaataaaaggatagacatacatatgaagggtagtttattaaggagtattgactcacacgatcacaaggtgaagtcccacaataggccgtctgcaagctgaggagcaaggaagccagtccgagtcccaaaacctcaaaagtaggggagccaacagtgcagccttcagtctgtggccgaaggcccaagagcccctgacaaagcactggtgtaagcccaaga

SEQ ID NO: 143204 - DNA, 1493 bp, Homo sapiens
tttttttttgtagagatgaggttttgccatgttacccaggctggtcttcaactcctggactcaagcgatccacctgcctcggcctcctaaagtgctgggatttcaggtgtgagccactgtgcccagcccgaagaagctttatctgatctgaacctgatttagataaggaggtcctggactttgttccaatgctgcagagagtgagacttctgtggggagaggagtgtcctttgcatttgggaaagatgtgaactactgtggccagagggtgaactatggtagattgcttctaaagatgggagcagcaatgtttcttcccaagcaacattctcctttgaaatgtgactttgccacccatcgcatcaagaggtaaggtctattctccctccttctgaatctgtccctgtgacttgctttcaccaatagattgtggcagaagtgacagtgtgcaagtatgaatggggtctgccagtaccatgtggagcaaagggaagcatcctcatggatgatgcctgaattcttgatccacagaatagtgagcaataaaatgtttttttctttttaagcagctaagctttgaggtcatttgttacacagcaatagatagctaatacaccatcaaagagttctggggtcatttcaaaacaactcaggaggcaaattgaggagtttctcactaaaagtggggaacttgcacatgcctgtaatcccagctactcggaggctgaggcaggagaatcgcttgcacccaggaggaggaggttgcagtgagtcaagatgacgccactgcactccggcctgggtgacagagtgagactctgtctcaaaaaaaaaaaaaaaaaaaaaaaaagaaaaagtgggcaactcaagcatcaataaaggtattaactgcaatggtttgtagcatgctacgtatatttaaatatgtgggttcaagataattaaattaaaaaatccctggttacctttagaggatattgggacatcaattcattattttgaacattgctaaataaaaaaacaagcatttatcctattttttgtacaacctgtatttcaaggtaaccgaatactgttaaagagaagctatttgcagaataattctgaccaataattatgtaaaaaaaaacctgaatctcatcattttgcaacctctgatgatatcacggatttaggtattgctaaaaccatcaggtgatagatgatcaggctgataacacgtgcacctgctgccaaccttaacataaaaaataatactaaattcccctgtgaagcctgcatgtgccccaaaacccccaaatcaaaacaaacccctcaaaacctgagttaaagcaagcttctagatctaacttctagcttacaaaaaatgagaggaagagaggactataccactaagaaaatgcaaccagaaaattccagattgcaaaaaatgtaataggaccaaaaccctgagttcttcaataaatacatgacaatttatagcttaaaagaga

SEQ ID NO: 143205 - DNA, 1153 bp, Homo sapiens
tccagataaaagacacaacaccaattaaatgtgaatttcagataaatactgaataattttttagtatccatatgcccccagtgtgacatggggcatactgatactcaaaaatctgttacttggccaagtgcagtggctcacacctggaatcctaggactttgggaggctgaggtggggggattgttgatcccaggagtacaagaccagcctaggcaacatggtgaaaccctgtctctacaaaaatacaaaaattagctgagcgaaatggtgcacacctgtagtccaactactcaggaggctgaggtgtggggatcgcctgagcccgaagaggtagaggctgcagtgagccgtaatcacaccactgtactccagcctgggccacagagtgagaccctgtctcaaaaaataaaaataaaaaagtagaataaatataattaaaatttaaaacattttaaaatgtgttatctgaaatttaaatttattacaatttttatttgctaaatgtggccactccaagtgtatggagtatttattctaccatgcagtttttaacacttgcatctctgcatctgcttctgttccaggacagagaaaaactaacacatttctgctgtatctaagaatatgtagatatacctgtgttttgattctttctgatttcagtactaaacatccctcattatcattctcagggaaaagatgaatgtagaatctctgctgagctagtatttcctgacaccctgtttatgtgccttgtgaattgtgggcattgccatgtgggttatttcatttcatcttcacaatcaccctccaaaagtaaaaaacaaagactgcctcactcaaatgtccactgccatcagtgccccatgagtatatatacggtgccaagctctgccatgatctctccagagaagaggagtaaaaccaaagaagtgaagacgtgtctgactggaagggaacatctgtgacaccttcttttccaaatgttctttaaagtttaagcagattattgtaaaggaaatatgaaagagttagtacttaaaaaaaaacctccttgtatcaaaatgtcccattcccagcctctattcaatttcaatcttttaaatgtttgttttcatatttacaatcatggtgctatgtaatattcttaca

SEQ ID NO: 143206 - DNA, 277 bp, Homo sapiens
tgtgatcagcggtacctcaaacgtatcagaaccatatattttttgttttttgtttttttttttgagacggagtctcgctctgtcgcccaggctggagtgcagtggtgcggtctcggctcactgcaagttccacctcctgggttcatgccattctcctgcctcagcctcccgagtagtggaattacaggtgtgagccaccgcgcctggcaagtccatgaacttttaatgtgattactgatctatttggatctcaatctaccatagtattttattgtct

SEQ ID NO: 143207 - DNA, 408 bp, Homo sapiens
aatctggatcagggcctacaactacccactcagtaacgggaaaggactgaccaggaggttagacggagcccatccactttcctttttccacaggggactaaagctgggctgtcaaacacacagaaaacgggaattctaatgcctctgcctacattcaggccacaagttacagtcccaaagattgcttccaggcagcacaatagtctgacagtcaaagcaagtgctaccaagggaggtataagtctgtaaagagacttcagagccctttactgtgccgcagtcattttgtcagacttgaggatcaggcagctatagactcttacaatgtcaaagagttgaccaagtttgggagcaagcaaactggatgattaactgagtgagcctcagcagggcccacaggctcccagt

SEQ ID NO: 143208 - DNA, 720 bp, Homo sapiens
taaaacaaaaatgaagaaagttataaagcatatgaaatatgtataaagcaaatctaaatattatttaggtatatttatagattaacattttttaaggaaggaaatgaaaaacatgagacttaggatagtggttgcctgtgggggtaaagagaagtaaagaagcaagggaatagaattagaaatacagaagaacaaaagagagaggagggctctgagcacccaagtagctatcacatcattaaagccttatgtctacctcttgagttcttatttagatccatactcttatttaaaatttcttcaagttttgctatagtttctgctggccagtcactgagctgagagtgtagaaattaatgatatatataaaatctcccctcattcttgtcaggaaggtgtatgataaacaaattaatatattagataaaatctctggggcccagcagtgcaatagagtgcgatacaccgggaatctattttagagggggagggtggtcaaagaaggtcttttgcgtaggagatagggacagagcatcctaagattcaggagagcattctagtcacagggagcagtgaattcagaggccccaaggtaggagggagtttggtctgtccaaggaaagcaagaaggtcagtgcagctgaggcagagtaagtaggaaggagagaggtcagggctgagatcagggaggtagtctgaggcccctctgtgggggacctg

SEQ ID NO: 143209 - DNA, 383 bp, Homo sapiens
cagagaagcaccttataggaatatagaactttgacatttacaaagttctttcacatgcattgttttatttatcctcacaataactcagcaaagtaagcaggagccacagaaagatgaaatgctttggccaaaggagcacagctagtaagcggcagcactgcggctagagtccggattgtcggcctgtggattgagtctgccaaatgaatagtgatgcaccctaaacctacctcaggttaaagtttgagtaatgggtctaagatatgattaaataacactgaagttaggaaaataattcggcctaggtcgattccacaagaagaggatgaagggctttggttattttgaaaactgcccaacttttaggtaagttaggacaagaa

SEQ ID NO: 143210 - DNA, 285 bp, Homo sapiens
atgaaggttaaagacactgtaccggtagctaatacaggatcatctgaaaccatgttgtacccttcatgaaaatgaagggtaggctctaatgaaccccaggcattatgccagggctcatgaggtcagcacactgtactaagggacaatgacacatcagtgtggcagggatggggctaataccacgatggagacaaaaccactttagtggtggctaatcagcagagtgactaagggctaatgtggggagagcagacaggctgattttttatgaagattgaagacact

SEQ ID NO: 143211 - DNA, 210 bp, Homo sapiens
cgtgccttccctggagtgaggagtccgagctctcctctccgtctctgctcatgatgggggccatgctcccccgtgcccttcccagcaaagatggggcctccagggctccactcccactcccgagccccttcagtgtggacacatctcactgttaccctggtatccgttcacagtcactgagacttggccagcagctttgctgcctttgtg

SEQ ID NO: 143212 - DNA, 252 bp, Homo sapiens
gttgtcataagagaaagaaggaaggaagaatgaattatggagacagcgatggtcaggtttttaattcagtaaaaaccacaaaaaacctttatttctaaactgaaagtttcttaccttaataactaatcagagtgtacattttatttaatctatagggattgtagtagtaatttcctataagaaactagaaagtattctttatttgacatgcatattaatatgtcatatgccttccttccttctcttattgga

SEQ ID NO: 143213 - DNA, 376 bp, Homo sapiens
tcctgagtggctgggactacaggtgcgcgccaccatgcccagctaattttttgtatttttagtagagacggggtttcattgttagccgggatggtttcaatctcttgaccttgtgatctgcccgccttggcctcccacagtgctgggattacagactaactttctgaaggactcactgctagagaattaggtaggtttgttttctcccaaatatatggaatatagcaaagaaataagggaaaatggtggtttctcatccatcctgttttgcctgaggtacctgaagagtagactcagtgtgaccagactggaaggattcctccacagaaacagtcccagcagacaacgatgtggatgttcagatgccacaggggaa

SEQ ID NO: 143214 - DNA, 320 bp, Homo sapiens
ttattcagcaaaagcccaagcaacacacaagggaaaaagttaaatatttcaagaacctctgactcaggacatctgtaagtacatttattctgactttgttcattgactttttttacttactgttaggtacaatgccaaattagatttcctaaaatggagtgatcctagctgctaccatcatatttcagggaatttgcttgctgacgtgttaattctgcttataaaatagtaagagttttaggcttggcattcaaagatctaagttttgcttctttaccacttattgactggggcatccatagatttcctgtagcacttct

SEQ ID NO: 143215 - DNA, 811 bp, Homo sapiens
tgaagcagacccatgcatgtgaagggtggacacctcaggtgacatgctttatagttggcctgagccttgacccagtggttcaacctgagtttggtcttggtaccattcaggtgtttgtgagctgagactgatgagtaggaacaggtgttttatatctcgtcttttgtcaaaagtaaagactcattcctttggtaacccaaccaaatcaggatcagaaactttacaactgaataaatgaatggatataactgtatttgaagttatttatattaataccatgaaatatatttctccagttggccacaagcagtcaattgtcctcttgttctcaaatatctagttactaggctttctaaataattttttgttattgttgttttactttagctctcttcctgccttcttccctggcctcttggagaaggaaatggaaacatgggctgtgtttcatgagagttaaaaactttcaccccagttacctttttatcttggaaggctgatctctgcatctccctccttcctgtcgctcgggggattgaaacctcagtggacactgggcgcagtggctcttgcttcttatcccagcactttgggaggctgaggcaggcagattacttgaggttgggagtttgagaccagcctggccaacatggagaaaccccatctctactaaaaatactaaaattatccgggcgtggtgacacatgcctgtaatcccagctactagggaggctgaggcaggagaatcacttgaacctgggaggcagaggttgcggtgagccgagatcacgccattgcactccagcctggg

SEQ ID NO: 143216 - DNA, 549 bp, Homo sapiens
accttggtctcccgaatgctgggattacaggcataagccaccgtgcctggcctcaaattgctttaaatcagtgaaaaatcttaaaagcagctgtacacacacacacacacacacacaagacattgtgtacagaggaacaaagataagaatgattacaggccaggcgcggtggctcacgcctgtaatcccagcactttgggaggctgaggcgggcggatcacaaggtcaggagatcgagtccatcctggtaaacatggtgaaatcccatctctactaaaaataaaaaaaaatagctgggtgtggtggcacaggcctgtaatcccaggtaactcaggaggctgaggcacgagaaccgcttgaacctgggaggtggaggttgcagtgagccaagatcacgccactgccctccagcctagtgacagagcgagagactccttctaaaaaaataaatgaaaagattgcagtgattgcagacatttcttcaggaataatgcaagtcagaacagagtggaatcacacctttgaagtgctgagggcaagggagaagct

SEQ ID NO: 143217 - DNA, 321 bp, Homo sapiens
gaatttaacaatgtaaaagatggcttctaagaagaaatgggaaagcttcataaattattgatcaatcctcttagaaatgcattctcacagtatacaatgattaaaaatttttactctaaacagctcaaaatatttatatattatttcagttatctttgtaacatatcttttaaaataagactattattattattatgattttgagacagagtttcgctcttgttgcccaggctggagtgtgatggcgcaatctcagctgaccgcaacctccgcctcccaggttcaagggattctcctgcctcagcctcctgagtagctggg

SEQ ID NO: 143218 - DNA, 645 bp, Homo sapiens
aagagattggtaggtagcagaaatattactgaaacccaggtgtcctgcctctgaatcctaacctcactcaggctgctgctttacaacgttcctgataagccactctcacatctgtgcctcccccacttcctgctgatcctctctcaggaacagagctcagaagtagaaacactttttgttcaggcatcctctgaaaagctgggagtggaggtctggtgaccattaaacacaatagggatgaaacattcttggtctgttttccatttcccgcccaaactcaacatgggactgaatttaagctggctttagtgtgtgtgtgtgtgtgtgtgtgtgtgtgtgtgtgtgtgtgtgtgtttagtatgatacatcttctcatttccaactatagtactgctttcaccatctgtttgtgatttctctgtggcaaacctctcagatccccctgagaaggggcgttgtttaccactcctttgttggtcttctcctctgttgacatctactctgcttaaatcccagagggttaaattccacaaatatttacagaaaaactcctttgttcagggtactgggctggacccagcagggaatttaggggtaagagacattcttgctttgccaaaagcttaagatctagttaaaaaaaaa

SEQ ID NO: 143219 - DNA, 255 bp, Homo sapiens
tgcatgagtgtgagtgtattgggggtggttgccctgctggggttgtgtgagtgttgggtggttgccttgctgtgtatgaatgtgagtgtgagggttggttgccttatgggtatgagtgtgagtgtggggtggttgccttgcagagtgtgagtgtgagtgtgaggggtggttgccctgctgggtgtgcgtgaatgtggggtggttgccttgctgtgagtgagtgtggggggtggttgccttctgggtatgagtggg

SEQ ID NO: 143220 - DNA, 527 bp, Homo sapiens
gttaaacagaattaccatgtgacccagcaagtccactcctaggtgtcgacactggaaattggaacagggggactcaggtactcagatgttcattgcagcactattcatgatagccggaaggtggaaacagccccagtgtccttcagctaatgatggataagcaaaaggtggtccatccatacaacaaaatactaatcagccataaaaaggagtggaatgctgacccgcgctacaacataggtgggcctcaaaaacacgatgctaaatgaaaagagacaatcacatggccactcaataccttgagtggccatgtgacaaccaaaaactgcttactgttttattttctaatgaaatgttccaatgtttaagtctatctcctatagcggaaaggcaataaatacaaggacttgaaaagagcaacagacttgtaagatatgagttcgctttgggctagctctgttaccttgtggttagtacttaggtcaccaatttcttcacttataataaggacttaacaccatctgctc

SEQ ID NO: 143221 - DNA, 624 bp, Homo sapiens
gcttagaggatccccatccgcgtgctgatggatagattttcagctttctgtgaaagacagtaaacccactgtggtcagcgacaatgtcttccatatccagtggtcactcatcagctttaaatataccagctacaatgtcagtgagaaggcagggtctgtcagtgtcacggtgcagaggactgggaacctgaaccaatatgccatcgtcctgtgtcgcaccgagcaaggcaccgccagctccagctccagggtcagctcccaacctgggcaacaggactatgtagagtatgctggccaggtccagtttgatgagcgagaggacaccaagtcctgcaccattgtcatcaacgatgatgacgtgtttgaaaatgttgagagtttcactgtggagctcagcatgccagcttatgccctgttaggggaattcacccaggcgaaggtcattatcaacgataccgaggatgaacccacattagagtttgacaagaagatctactgggttaacgagagcgctggttttctgtttgcacctattgaaagaaaaggagatgcaagcagcattgtatctgcaattggctacacagtccctaagtcagctatgggaagtagcctccatgctcatca

SEQ ID NO: 143222 - DNA, 397 bp, Homo sapiens
cattctaactggtgtgagatggtatctcactgtggttttgatttgcatttctgtaaggattcccagggttctaactaactacaaggttggaattccaatatacaacccaccttgtttgtcaggaaatagaagggaactgtcacagcaaggataccaggtacagaagtctaacttgaaaaagtctagagaatgtaaaaaagaatcaactcaggaagccagtaaaatgacaacttttgaaattcttttagtactctactagacaattagtatccagagtcaaatgtcagtaccccagggatacagagattatacacagcaaggcaatccactagggtaaggggaaaaataacagaattcgtatttaaaatttctggttagaaaaccaaacaccacatgt

SEQ ID NO: 143223 - DNA, 162 bp, Homo sapiens
aagaaatagaagttaataaacaggaagcaacatataaaaacattgagtcaaagagatggcacacaaaagctgaaatttccattgctgccaatattccaatctgtagatgggtctttaacagtccccaaagtagggagcccatgagcccatgttctcaggcct

SEQ ID NO: 143224 - DNA, 868 bp, Homo sapiens
gaaacatattttacagctatcaagtgagcagagacctgacttaaactaaagcagttctctacctcatggcattagtcaagtagaccaagctacttctatatattagaaaataaagagtcacagaccgggcacggtgactcgtgcctgtaatcttagcaatttgggaggctgaagcaggtggatcacctgaggtcaggagttccagactagcctggccaacatggtgaaaccctgtctccactaaaaatacaaaaaaattagccaggcatggtggtgtgtgcctgtagtcccagctacttgagaggctgaggcaggagaatcacttgaacctgggaggcagaggttgcagtgagctgagatcatgctgctatagctccagcctgggtgacagagtgacctcgtctcagaaaaaaaaaaaaagatagtcacagagaactttatgctagttattccaactttataagctctatctaacaaaacttacatggattattaaaggcagatgaaatctggcttagaaacttttccctcagatattttgttatattagtatttattatattagtaaacatttcttttttaaaatagtatttatgactacttaaattctgccctggtatattttaggaatgtgggattatttagtgtactgtttagtcaagtttgagctttgtggtgttgatagaagccaacaagatggcttttattattttatgcacatggactccaggaatgtgtcaatactccctgggatcatgttcctcacttaacttttaaaaaattatacagtaattcactcatacactcacattgtagaaatcaacacattaccagcaaagctgaagatcccttgaccactacccacaat

SEQ ID NO: 143225 - DNA, 257 bp, Homo sapiens
atgttagagcttttcatgatccctttaaagttccttttgatgatattgtttccaaagatgcagagtggtaggtattagaaatggatatacattcaccttttgggggctccgagagtgattaattttagagacgtcgccagtaaatatttggcaatgacatgtacgtctttaccctcctggcgctgacttttgtcacagagaagtgtggggccacctgcacaggagatgcatgtcttcataaatgagagaggcaggtt

SEQ ID NO: 143226 - DNA, 268 bp, Homo sapiens
aaaagccttggagcttgagatttatttaacttcttccctaagatggaaggaaatgtaatccatacaacatacttcctaaaactgaatatgaaaaaataaatgtgaaaagttaaatagaaaagatctgatgaattatgcttcaaattattccctttgcaagcttactttaacctgaagcattgacaatgtgacacttaaaatgaagccacagaacacatacctctctgtttcatcgttagcaccacaagctatacagaaaaccttctca

SEQ ID NO: 143227 - DNA, 440 bp, Homo sapiens
ctggatcctagctgggccaggctggggagctggatcccggaatgctcgaggggaccaaaagtagggggtgggggaggctggatgcctccgttccataacataatcatgactgccaaccaagacttacacagtaccaggcaccattctaggagcttctcgtggattaattcatttaatcctcacaacagcccaaggtggacgtccttctgagaccactgtatgggagtgaacagtgtggtccaaggtcgcagagctagaaccgacttcaccgtcctgctgctagctaacgcaggtccctggtagctgtgtcaccccctgcatggctctcttgctgtcttcttctcccagcacacacctgcccagggttaaaggatgccttgcctccactctgaggagggaccaagaaatgctggactggctgtaggcagagatgctcaggg

SEQ ID NO: 143228 - DNA, 325 bp, Homo sapiens
aattccctcagtatcacgagaacagcatgggggcaccgcccccattatccaatcacctcccatgtggtccctcccccaataggtagcgattacaattcgcataacaattcaagatgagatttgggtgggaacacagaaccaggccatatcagaagtgcctcattaagtccaagccacactcaggagagggaattaagatgcacctctggaagggaacagtatcaaatgttttgaatatatgttaaaagcaaaattataactattgtttcaggtttttgaaaatcaaagacttcttttatctaattatttttcattaactctttca

SEQ ID NO: 143229 - DNA, 701 bp, Homo sapiens
cggacgcgtgggtcgacccacgcgtccgggcaccactgcattccagcctgggcgacagagcaaggccttgtctttctttttaaaaaattaaaaaatctgggtttggaggcctagagttgggtgggggagtgtcaatcccaaccccactctaacccctcctgaaagccacaggaagcatctactaaatgtcctcaaacagggttctgcaagcctttaaaagaatctttcttttttttttttttccagactgtgtctcactctgtcacccaggctggagcacagtggcacgatcttggctcattgcaacctcggcctcccgggttgaagcgattctcctgcctcagcctcctgagtagctgggattacaggcacctgccaccgcgccaggctgatttttgtatttttagtagagacggggtttcaccatattggccaggctggtctggaactcctgacctcagttgatccaccctcctcggcctcccaaagtgctgtgattacaggcgtgagccaccacgcccagcccagaatctttctttagagtcaagaatcaggtcacaggcacccatgtcccatggcaggagctggctcctgtggcctaggtcagaaaggtttttcggtagcaaaacccaaaatcgaaaagtcacagccccttttatctagaataaactgagactcttgtttgttgagcattttgcttt

SEQ ID NO: 143230 - DNA, 512 bp, Homo sapiens
ttgtgagtgtacaatgcaatatgccaacatttggaagctctgcaacactcagcaaatggtttccaaacaatccatgcatgatatcacaaaatccattcaaagtacaacagagactgatgtgttttagtgaaacaatgttcaaaaagtcacagacatggcttcagattccacatcatactaataaccttgaagaaagtaacacttgtcaagttttggtgtagtatcgaagaatgttcagatttatctgaaaaagcaattaaacatactctccccttttccaactacatatctgtggtgacagcagtttttcttcatatgcattcaccaaaagaacacatcctaacagactaaatgcagaagcagatatgagcatccagcctgtcttctattgaaacagacactaaagaaatgtgcagcagggcgcagtggctcacgcctgtaatcccagcactttgggaggccgaggcgggtggatcacctgaggtcaagagttccagaccagcctcgccaac

SEQ ID NO: 143231 - DNA, 277 bp, Homo sapiens
agaacaggttattgtgtctggcacttaggaggtcaattgagacccacgagagagcagtttcagtaaatattgaagttggaagccacacttcaatttcaacaatgaatagaatatgtggaagttggggcggctagggtagcctactcttctatgaaatttggtggtgaacaggagagatatggactgtaatttgagaaggaggcagagttaaggaaagaggagatctgactatgcttaggatgaggaagcatgaagacatttgtaggcagcagggaag

SEQ ID NO: 143232 - DNA, 452 bp, Homo sapiens
aaaaccactgacagatgacagactctacttagaagtgaaaaaaatatacatatggtaaaagcagaacaaagtagaataggaaaccctgtcaacaagattaaaaggcgaacaaaaatctagcaaacacttttgctatgtacatatgacaaagggttacaaaaaagttatgtttcatcaacagggaaaagaatatcctgagatataaataggcaaaagaaatagataatctacaaaataataaatataaatggtcagtaaacacatgaaaagatggccagtctcatgagtaatcagaagaatgcaagttaaaatactgaattttgtttacctattagccagctaaaattaaaaagattgacaatacactagggtttgaaaggggatagacaatggaagtcttatgcactattagtgagagaataaactagtatgtttccgagagttggtttggc

SEQ ID NO: 143233 - DNA, 442 bp, Homo sapiens
tcaatgtccaggcaggggatgcctctgaaaagcgccaggccagctggagaggaaagggcaggcatctgcagggaagtgtgggggattagctgcagagttcctgggttctttttcgctttgtctctattttgtgacacttgatcttcaaactagaaacaggagcaaagacattttcaaaaatacagttgtcagaactgcaaaaccacacagggtctgttactggccaccaaacctgctgggcctccctgggtggatgctgtgggagagatgtgggagtgacatggcacagtgctgctgttctgagcggtagccttgctggaggagcgccttgccggaggagcaccttgctccttggccccactctgaccctccgaagctcatgtggaactggacatttaccccaactcggtttcctggtgttggcctgtcaagacttgcctgt

SEQ ID NO: 143234 - DNA, 440 bp, Homo sapiens
tggggcaataaaaccaatggctgcccctgagatacttaatattgtcgggaaagatggcacacaaacaggtaattttaacaggatgtggtaactgctgtaacatagggatgcatcaggttatgaggcagcccagacaagtggtatgtaatgacatcccttatcactgccatttttttgtcacagctcatcacaggtgtctgttcctggtcttcagatgggttactgggatcctctttagggaaggagccatgctgaagattcagtgaaatggagaatacagggattctgagagaatcaatgggacagaatgtgaggggagatgagtggtctctttttgaccactgagaaaacatttcctgagagctcctctgtagacctgattggtgctgtgctgtgtgctgtggatacagatatgaagaaaacattatcccagcgctcca

SEQ ID NO: 143235 - DNA, 214 bp, Homo sapiens
ttttttacgagctgaatggatgtaccacaatttacctcaccagttcaggagaggctgtttttcagatgtaggactccaaccctttattggtaatttcctaacccaaaaagcagtttgatgccaaaactaactgagtaggaaaaccagagccgagtaggaatggggttctttgtggtcttggttcatctcacttagtgtgaatggctacatattt

SEQ ID NO: 143236 - DNA, 117 bp, Homo sapiens
caaactgcatccagcaaaggactagtatctaaaatctacaaggaacttaaacaagtcagcaagaaaaagtcaaataatcctatcaacaactggacaaatgacataaataggcatttc

SEQ ID NO: 143237 - DNA, 445 bp, Homo sapiens
taccaaattatttgcctgttaggaatgggttcagctacaagttacagaacacccacctataaaatggcttaatcaaaggtggcttctcacttatggactacagtagggcaagaatggaagcaggacggtcagttaggaagctctctctcaagtagtccagcagcatcatctactactggactagatggtttagtggaggtggaaagaagtcaaagactcaggatacattttgatagcatcaacaggctttgctgaaggatttaaaggtaaagggatgagataaatcaaaaacagctcgtagaattttagcttgaacaacagaatgagtaccagtgacatttactaaaatgcacaagactgagagaggtgcaggtttgggggtgaaaatcaagattttggggggacacattaagtttgagatgccagtctgacattcatatggaga

SEQ ID NO: 143238 - DNA, 301 bp, Homo sapiens
aggtctgagtactacacgcctcaactttctctgtctctgtggtctgtttctcacccatttctctctctctctctctctctctctggattcaggacttccataaggaaaagttccctttgtgtcactttgtagaagctctaccttctctggattcagacatgtgaataataaatgcttctgaagctgacccagcaagccacaattgcttggagaaagaaaattgcaaggaaatggccaacccccttcaatgtctttggcattagttgtaatgacagccaggcaggttcaagcatcctcaggg

SEQ ID NO: 143239 - DNA, 539 bp, Homo sapiens
ctggagcctcatacttgctcttcctagcctaaattgtgggcaagatggaaactgccagacttaaatgtttcactcctctctgccctgcacagattgagtctctgtgctgcctctgtgacccccagtcagagtgcgccatgcatgccttcccatctcccttacaataaagcccatacccttggccagtcttgcctcagctcttctcatggctgtcttgtggcctggccacaaggaaatgatttccatgctttcgcctgtaagccttggccatgcttacctactgcctgaggcaccattcctcttctcccttgcactggctttctcctcctccattctcaggtgtcacttctgagaggcattgctggaactgagggccactcccacggtaccatttgcctccaattctggacggcttggctacatgcccctttcatagcatccttcggttctcttacaatgacagttctccagttacttagttttatctttgttgcagttgtcttgagggtgggataccagggtaagatcctctagagcga

SEQ ID NO: 143240 - DNA, 389 bp, Homo sapiens
caatacatatttagagagaaagagagggagagagagaccacattcacataagtcttattagagtatattcttataattcttctattagctattgttgttaacctgctacgatgctaattttcaatcacaccttgtcatagatatgtatgtatagaaaaaactaaagtatatattgagttctgtactctctacagttgcagacatctacggggggtcttaagacatactccctgtggataagggggaactactgtattccagttgctaaaatatgattaggttgatattgagtgttattgttaccgagtgcttgcaggaaaatgtaatttatcctagtttgacatatataaaacctgttttacaaatacaatctcatctaaaaataaaaa

SEQ ID NO: 143241 - DNA, 117 bp, Homo sapiens
atcccagccttttgctcatcttaattgagtagaactagtgatcactattcttgcattttgtttttctaagaaaatatgatttaagactcctcaagctacagatttgacattttgtta

SEQ ID NO: 143242 - DNA, 284 bp, Homo sapiens
ctgtccagagtgactgtcttcctgcttttctgtgttttgcaattgggctggtgctgcagcttccccagccagagggactgcctttccaatggcctgaggagggcaaggggtggcccctgaggctctcagatgccccatccccatgctggggtccagtgggggaacatggatgatgctctcagttgggtgcaggctctgggccccctcgctggctggcactggactcgggtcagccgggggctcccaccgcagactgtgcaggccactcaggtctcctttatcta

SEQ ID NO: 143243 - DNA, 172 bp, Homo sapiens
cttgaagcccagtagtattttaacaaatctatgaattttagattttaaaggcagaagtggctcttgctccccattggctttttctgcctttctgggggtttttttctccttgtcaggggcaacctgaagccctacctgggagcagagaaagagcaaggcacccggggtttca

SEQ ID NO: 143244 - DNA, 296 bp, Homo sapiens
tatttttttgcatgctacttaatttaattcaaaatatacagagttaatatgcttttattttaatgccatcctctgcaagttagtaagaaatatgctgagttcaaaaatgcaatggcaaatccttttggctgatccatgtgctgaagcaattctaatcatgtaaacttaatctactgcctaaaaattctacagaaatctcttataaaacagttttaactcagtatcattataggtgtattggaagatggtttgctgttgtgttggttgtttttctcatatagttagtgaaatactta

SEQ ID NO: 143245 - DNA, 371 bp, Homo sapiens
cttggtaacaatgccaataaaaggagtatttgtgattcttcagtcaagccagaaaggatgacaccagaaattgctttgactcattatcacaatttgcagagataagagtgcattcaggaaggcttgagaagttatacatagggagtgtccaagtactcagagattaaatgaatgcctcaggaaacagtaagtctcacatcatcagtgggatattcaagctagactgccccttggcacatatcatggagagaacatgtggcaagaaatgaggatgaactagatcagatatccagtttcttctcatctaaggtctgtgaattaaaataaataatgctaatgatcttagtgtttgtaacaacttaaggtgggtt

SEQ ID NO: 143246 - DNA, 566 bp, Homo sapiens
ataggccagctttagtgacaaagctcagagaccaatttcaactttcacagctaatagaggaaatggatctgtggggatagttgcaggtatggttggatctaggagctcaagcaagatcatgaaggttctttttcccttttttctcctttctactttttgtttctccatttcttctcctgctctaagccctgtgtgtcactgccttgctttgggtctggcctcattctcttcatgcattgggtaagacggattctagcattgtcctatttgttctgtgcctctcttccttcctcagaaaagagaagcaataccttccccctccccatctatctatcaaaaatagcggcagggcactgattgtccttactcggttaatgaagccatccccttacctacaaattgagaggggatagtacatatttgacagttcaggtttatgtgacatactcactcccacaggccaggaagcagaatgctgttgctatctacttcatccaggaatttttaaaatagttttttctgtctatttctatctgctgacctccttctaaatagaccatctgcca

SEQ ID NO: 143247 - DNA, 327 bp, Homo sapiens
tgtgtgtgtgtgtgtgtgtatgtgtgtatacatacacaatggaataatattcagcagtaaaaggaatgaactattgatacatgcaacaacatggtgttctgtgaaagggccatatgtgcaaaacgacccccaaatggtgaaggagctgaaaaaccaaagaaggaggcagacaaatccaatttgtgggtatgggatgatttattgggggaacttacagacgggaatgtcgtattgggtggctgcaatacaggtagatctccacaccacaaccagacagacccaatatgtcttatatcttggggaaagtatacatgctctggaaggaat

SEQ ID NO: 143248 - DNA, 313 bp, Homo sapiens
gcaacccttgataagttttccaaaatttgtaagatcatatgttataagcactcctgttttgttttgatgattacacttttaaaacagctttcagtatgctttagctgtttgaacagtgagacatctttttcatagatagtaaacagtataaaagattgtttttttaaaaaaatgcattgttagacatttaaagattgtgccaaaaggaaggtttattataaaaaactgttaaatgtgcttattggccctcagtttctacctaatcgaatgacctatacccaaaataccgtttaaaggtaaaactggtgaagta

SEQ ID NO: 143249 - DNA, 435 bp, Homo sapiens
actttatttattaccattgagagggatcttaaacattaaattactttaaacttctgttttagagttgggaaattaaagccttgataaattaaggtattttaagcaatgtttattagtccagatgagattaaaacctggatctcttattccccagtgtcttagcttgggctggcataaccaattaccatcaactagatagcttataaacaacaaaaatgtatttctcttagttctgctggaagtcagagatcagagtgccagcatgattgagttcaggtgaggcccctcttctggtttgcagactgaaggcttctcattgtatcctcacatggcgaagagtagagcacagaaagcaagctctcttgtgactcttataagggtcactattcccattcatgagtgcttcactcttatgatcgtatcttattctaatta

SEQ ID NO: 143250 - DNA, 121 bp, Homo sapiens
gaggaaagcgagacttaagcagagacggttcctctccaaactagctcagagcttgcagcttttccttagggaagagaaatggaagactgacaccagaagctggtctgcatcgtttctggtg

SEQ ID NO: 143251 - DNA, 238 bp, Homo sapiens
caaatgactgtgagctggattccaaggtcctccaggaaagaagagagggcccagggggctgggaggcagaaagtgcaggagctgggtggggggcaaactcattttagtcctttgtggtctattgagatgactaaggcctttaatggagcatttccacagtatgggatgcctgtcctctgacctgtgtgagctacaagtctccaggtcacgtgaaggtctgtgtacaccagtgggcagg

SEQ ID NO: 143252 - DNA, 444 bp, Homo sapiens
cttctcattctcttgacagtaacttttgcagagcagagtttttaattttaacaaaatctagctcatcaattatttctttcattattgtgcttttggtgttgtatctgaaaagtcattagacctatccaaggtcatctagatattttcctatgttctaggagtgttctagttttgtgttttacatttaggtgtatggttcatcttgatttttgtgaagagtgtaagatctgttcctagattcaaattttttttttttaatttttcgagacgaagtctcgctctgtcaccaggctggagtgcagtggcgcaatcttggctcactgcaccctccgcctcccaggttcaagtgattctcctgcctcagcctcctgagtagctggaactacaggtgtgcgccactacgcccagctaatttttttatttttagtagagatggggtttcac

SEQ ID NO: 143253 - DNA, 711 bp, Homo sapiens
taactgttctcatagggattgagtattcccacccatccctttaccgtatgtttctgatttatggccctgatgtgagttcagtatttttacatatatcagtgatgttaagagtttgtcttttagatagaatttctaccacgtaataagccttgtgtctgtagttattgaaaatatctattgaacaagttataaaaagaggaagaatccaatagtaatacgtatcctcaagctgctttaaagtataattttctgactttttattatgtagatctgtcaatcatttccttgtttttataagttcagctttagtctttgcctaaatcaatggcaactggaattaatgccaatttgatttagttatctgatgcttactattacagcttgctttaattttgcatgagcagcttcggtgtcagtatggcccagattagaatcgtctcttccgagatggtatctgttaactaaagatagcataacagacttagtagtagcagggatggttaatagccctctttctcttacttttgttttttgctttaaatatatgcaaaatatcatcttcacagagtttattctttccctgccatatcttaacctattttcctcttggaggctaatatagtaattttactgtcagttaccaccacataggatgtcaaaagtgtattagtattttttaaataaaatcaaacaaaattgtaaaaaaaaaaa

SEQ ID NO: 143254 - DNA, 249 bp, Homo sapiens
gcacaggggcagggggcacgccctgcagtcacacgtggaaagtttggcagcagtgatgctcccatttgagaggctgggccacccaggggataggagagagcgaggccacagtgtgaaggaagtggcaaggccattgccaaggtcccattgtagggggtggggtaggtggtggccaagcacaccagggaggcggaaaccggagacacaatgacacagagagacaggatcttcctgaaggcctcattccac

SEQ ID NO: 143255 - DNA, 312 bp, Homo sapiens
cacggcacgcgggcttccggaaaactcccgcttatgaagatgtgcaaccggatctgacccagagtctaaaaagatgatttatctgaagccgagctgcacaggggctcaaataagatgaacaacctaataaggccccaagatgtcctttggagggctcttgtctgcagctggagagccgtgggggagcaaagccaggagctggcggggtggtggggggcgggtggcttggttaagccactaattgtttaccaagcttagttactacatttttgggccagtagccctcgaggttgctgtgagcgacggaagggc

SEQ ID NO: 143256 - DNA, 324 bp, Homo sapiens
tctaaatctctttttcctgactgttggctctgatgcacactgatgattccaggcccaccaccagacacagacgcagcatccttccatagatagactttcctgcctgctccactggacgctcccttccacttgggaagtggggagtgcttgacttcatgggtttccctgccaactccaacctgtccatgcatcccattgcatcggagtgccgatcagtgactttgttctaatcctccaaatccccttcctgtaccttattttcccagctcttcttgcaattatgtaaggttcaatttctataataaattacttttattacatagt

SEQ ID NO: 143257 - DNA, 417 bp, Homo sapiens
tgctgtttattattgatgtgttggacttccttgtattctgtaaactaatccttcattggaaatatgttgtaaatatcttctttgaatttgttccttgtcttttaatttttttcttatgtcttttgataaatgcaagatctcttatttttaatataatggatttttaaaatgttttattactaccatttttatatctttttaaaacaagttcttcaataaacataaaaatatttccttctgatttaatctgtgtatgcaaaaatgctgtaaacatttccaaatatctgtgatgtaaccttaaaaaggtttattttttacacatgttaagagtccagtgcagactggggggaagggaaaggacacacagggatttctgctccacacagtcattcaggtacccagtctccttccatccca

SEQ ID NO: 143258 - DNA, 353 bp, Homo sapiens
tctgctatgacctcagtactacgtgtccaaaatctaattaatcttcttcttcatcagacatcccccatatcccaaataacaaataaaccaaaaacctagtttcttgtctcaatctagcatttctgtctgaccctatcttaaatgaaatcttttagaatagaacatttgaattaaaatttcctcttttttcttttaagtatttacacttctttctttgaaatatcttttagattttccttttccatttccccaagtaggaatcaatgtagaccttatttttgcaaagtttcctttcaggctcttctatttcagtttatcctgcttagtgatatggtagtactaataaatatacc

SEQ ID NO: 143259 - DNA, 274 bp, Homo sapiens
atttttaaaacacatggaaagacatgcagttaggtgagaaaatgggcttcagtatagcatgtataaattcatctctgtgaatctttatgatgtgggcatgtagtgtagatgttctctgagtagtgattaaggttaatttttttgactttttgctcatgtatttcatcaatttcctagaatgaacacaaattgtataagaaaacaaatttttttttttttttaagacagagtcttgctctgtcgcccaggctggagtgcagtggcacaatcccag

SEQ ID NO: 143260 - DNA, 558 bp, Homo sapiens
aaaaaacaaaaaaaaagctttcctattcagcttatctaaactttccccactcccatcagtgtttctgtgcagataattgtattctgttaggcctgatagaaggtgatgctgaatgcaaggtgtcctgtcagtctcacactgcacacacagcaacccgagatggcacttggtcagccgtctctgtttttctttgttattgcatcattgtcttttaaaactctgttgtatgtcggcttttctctgcagacaaaataacttttcttatatacctctgccatttcaaacactagccctctctatacttagagcatagtgtctgtaggattcacaatgcccagttcacccatgggaggttagagaaagctttttagtattgagatgaggtacagatgtgtgcccctccccctcttcaactttacttctgtccatcccagctgagatgacgaacctattcagagtttatcctcatgtcccatctgggctcagtatgaaacactggtgtttgcctttagttaccactaaatccaaagagttaaataaagatcttggcatcttttc

SEQ ID NO: 143261 - DNA, 263 bp, Homo sapiens
ccttgtaaaaccatcagatctcatgagaactcactcactatcataagaacagcatgagagaactgcccccatgatctaatcacctcccacgaggtccctcccccaacacgtggggattacaattcagattacaattcaagatgagatttgggtgtggacacagagccagaccatatcattctgcccttagacccttctaaatcttgtctttctgacatttcaaaacacaattatgccttctcaacagttccgcaaagccttaa

SEQ ID NO: 143262 - DNA, 610 bp, Homo sapiens
gctgaatggataaagaaaatatgatataaatagacaataaaatattactcagccatacaaaagaatgaaattggccaggtgtggtggctcacgcctgtaatcccagcactttgggaggctgagacaggcagatcacctgaggtcaggagttcgagaccagtctggccaatatggtgaaaccccatctctaccaaaaatacaaaaattagccaggcgtagtagcatgtgcctgtaatcccagctactcaggaggctgaggcaggagaattgtttgaacccaggaggcggaggttgcagtgagctgagatcatgccactgcactccagcctgggcaacagagcgagactgtcttaaaaaaaaaaaaagtgaaatcctgttatttcaacaggatatgttgatatatgatacacacatatatattcatgtgacatatgatatacacacatatatatacatatgcacacatacatacatacatacatataaatgacacattccaggtaagcttcatactaaaaaagagaaaattataaaatgataatattataactgtattacagttgggcactggggaatatagcgtttaaatgaccaacctcagttcatacta

SEQ ID NO: 143263 - DNA, 321 bp, Homo sapiens
atcatgccttgatgttgtattattaatcttaatagttcccaaaggatttttgggaaccctttaggaactggattcagtgcttaactaacaatggctgaaatttgctaccctgtgtaacttcagtgataccacatatcatgctaaatgaccaaaggatatagaagaatcagcttgaatgctgaaaaaaaggatagaagaagaacagctgaaggaaatctggataaggttatgtaaagtatacatctagacactatatgtaacaaatctatgcacgagttttaaaaattgagtttaaacggaagtagaacatacttccagaaa

SEQ ID NO: 143264 - DNA, 201 bp, Homo sapiens
aaacagtagatttctataatttttatttaacgtgaaagcccattgtggctaagtgtagacagcaaggatgtatggaaaaagatgaagttaaggagaacagaaaatgctaggccttagaccatgttaagaatatttggtctttaaaagctgtgggaattcattgaaaattcattaaattcattttgagcagaggatgtgggc

SEQ ID NO: 143265 - DNA, 390 bp, Homo sapiens
tttcttcaaatttgcattgtaaaaccatccttcaacttccttgaaataaattttactattttattagtgcaaacaaaatggtaataaaacactaatacagcgtcttgtatccaggggaagagctaaaattaacatagagcgagcagtgtttgctattacattcaattacctttttacttgagatttacattctcatccccttaatctccatagtagtggcttcaaaatcattcctcccaggctctgcccttcccaagcccccacagctggaagccaggcctcctgcccagatggcgctcaccccgggcatggagcctgcccctttctccacagctgcctcttgtcacagggtaccacttctctcccctgcttgtaattgtctcacgtctt

SEQ ID NO: 143266 - DNA, 1150 bp, Homo sapiens
agcggaaaagattaactgtgaactatgtgccaaattaaagtcaccttaaagtttctagatttaagggtttgttgtacaaggaatcagaagaaattattctctgcagtttgtcaattaccacaaccaaatttaaaatcaaatttagtttatttggaatggtttactttacttggttgaaatcatccttatcttctagaacagttgtggtaaatcaatctgtaataatttttattccaatatcttattctaactgtaaaattacttgagtgaatgaaaccctgccttctttagaactatatatggtttaaaatatgctgatttttaaaaacctctctcttagagacagtagagtaataaccggctacttgatgagaaaattctcttaatcaaacccttgttcttcatgctacacctaaagccaccctttcctgacaaatgtgtcatattttggggtagaacaaagatacctgaggcatgatgcatggcctacctcaacagatgacactgctgacagtcactttattcatctttcagtggctctctcaaataactgtctataattaaatatgctcattaatcttaaatagaggacctcctgggcaaatcaaatttcttgtctgatccatttttgtctagtctcataacacaaaaaaatcagatacaaaataatattttatttcagaaggaaattttgaatcttgaaatgatttatttatggtataagtggtattaattttttgcaacgtgttgatcttcagcatctagtttctcactgaaatagattcaagttgtgatcacatagttaagtgagacaatgacagatttttaggtttttagggtaaaagaaaacttcatcaccaaaatcaatttaaagggatgcttaagctgctgattgtgaagtgaaacaactcaagagtatcctggatgttcggataaatttactagtttttcatggacttgaaaaaataaaataaacattcgttttatccttataaagatggagaagaaaaatacaaaaatcagctgggtgtggtggcaggcacctgtagtcccagctactggggaggctgaggcaagagaatcgcttgaaccctggaggtggaggttgtggtgagccgagatgttgccattgcactccagcctgagcaac

SEQ ID NO: 143267 - DNA, 350 bp, Homo sapiens
gatgggctccagtggctgcgcagcctggggcggccgggaggctcctggcggcagtctccgcccgctcccgccccagatctttggaaacattcggggaggcctgcgggggatgggaggagaagctcagctctctggggaccaacccaccggcagccccagcccctctcctgcgcctccccgtgcgcccctcttgctctctcccaccctctcccgccccggcccccgcagggcgccttccgccgcgcgtggctgagccggggccgcgtgcaccgcagccgaggccgccgggtctgagcgcgtgcgcgcaggtggcgggggcgtcccggccgggggcccgcggactcaccgcc

SEQ ID NO: 143268 - DNA, 282 bp, Homo sapiens
ccctttactctccccatctctgtgtgcctgttctgctcttttcttcttctatctctgtctctccttcactcttggtctgtctctgtattttccagtctctttttattttctctcttctcctttcattctccctttccccccaattttttatagtgataaaacacatataacataaaataccatcttacccattttaagtgtgcaggttagtggtattaagtacattcatattgttgtgcagccattaccactctccatcttcagaatgactttcatctcgca

SEQ ID NO: 143269 - DNA, 785 bp, Homo sapiens
tttactagatgtgtatagagatgacacggatgggttgctgggtgaataattagatagcaaacctatttcattgttcttttgcagtgtaatgtcatccttaactctaaaatactaaatatttttggaaagtaaaagtgttctttcatcaagggaaagtttccagaggatattagaaaagtattttttaaaagttgtttacttataaaattcctagaagaatacagtgacctgctactattaaaaaatacttttcttccacttgagttgtttgtgctattattttcaattaatttatatttatgtattttaactccattgtcttttttatttttgtatcaagtgaaaatgttttgaaaatgactctggttaacaaattaattaaacattcaataaaatcacctttatgcctacatcagtaatttaaatgaatcatgttttgaaagttttttaaaaaagaaaaggtagtaggtttcagagcttgaattgaatacccaacaaaattctaaacccttatttagcaactgcttaataagaaattgtaaaataatcaagaataaatccaaatactgtaaaatggattggtaggcttatagataagaggaattctatagatatgctgtttatgaactgaaggtcatttgatgtcattattgaaaaaaatgaggccgggtgcggtggctcacgcctgtaatcccagcactttgggaggctgaagcaggcggatcaagaggtcaggagtttgagaccaacctggccaacatggtgaaaccctgtctgtactaaaa

SEQ ID NO: 143270 - DNA, 173 bp, Homo sapiens
tgaaaaacttaacgctatgtgaatattgctattaaaaatgaatctatggccacacattttacagttaaaaaaaatctcagtgaaacttagattcccactaacaaagaacctaaagaaccactgcctaaagacatttgctagatccgtactgagacctccctggggtgttgttg

SEQ ID NO: 143271 - DNA, 780 bp, Homo sapiens
attatgttcaaatcttgtatttccttatggatttttttttctagttattttatcaactgttgtggcaaggtgttaattcgaactaggattatggaattgccaatttctccatcgagttctgtcaatttttgcttcacgtattttgaagcattgttattataaggtgcatacatatttatctttgttatatcttcctgatgaattgactgttttattttcatgaaacatccctttgtatctctggtaacactttctcttgaaatgtagtttatctgatagtaatatagccatttcagtcttgttatgtttactctttgcatgttatctcttttctcattcattttctttcaactgacctatgtctttatatttaaagtctttatattgtagacaacatatggttaggtcttgcttttttttttttaatctattctgataatctgtgccttttttatttatttttagagacgatgttttgctgtgttgcccaggctattctccaactcgtgggcttaagcaatcctcctgtctcagcctcccaaagtgctgggattacaggcatgagccaccgtgcccagccagtctgtgccttttaattggaatgcgtatttcatgtaattactgatacaattagattaggtctcttttactgtttgtttttttatttgcctcctgttttttttcttcccctgttcctatttctgccttctttgggccaattgaatttttttttttttttagcattctaatttaacttaattcaatataacttaattgcca

SEQ ID NO: 143272 - DNA, 301 bp, Homo sapiens
ttgattcagagtgcttttagtgctgctttcatctgaaggaacatccttcttgtaagccttgcttttcctcctgtaggctggcagaggacagtggagcagccaacacacaaaactacagtttgtgcatggctaaagaccatggtgattttatagcatcctgggcattccacatccatgaagtaggaattggggctctgaaccaggcatttcttcttgtgtttcctcttctcctcttctggagagggatgaaggagatcctttgcaagaggcatgttcttgtgggaaggtcatcaccaccaga

SEQ ID NO: 143273 - DNA, 190 bp, Homo sapiens
agaaaggatggcaggccagtaggggaaggtgcttttgatctgggaaatgtgcaacacctcttggttaattagaccatagaaggagctgtggaaggggcaccctattgcttaacaccctgtggcacagactcattagctttgtgaatttccttggattgattgttagagttataaccttaagttattccct

SEQ ID NO: 143274 - DNA, 262 bp, Homo sapiens
agtctgggcttggactaccctgatccagtctccctcaattgccaatttccccaagaaatggtgttgcccagccaagagaggagagatctgtccacgagaaccttgtcagcagccttctcacatgaggagtgacgagaactgagagacccaaacaattccccgcaaggttttatttttggtatttttcgactgaaatgacagcggacaggtccacctgagaaagcagctgcatctgcctgccttttacagaaactggggtcac

SEQ ID NO: 143275 - DNA, 736 bp, Homo sapiens
gttggggaagcacacagaagggttggcatgaggagctgacacaaccagaacaccagctcccccaggggcagatgagagcacgactgtttcctgcagagccaggtgggaaaggtcagggtcacagaagggctggggtggtacggtgagctagatggagccctaccatgtggtctaaatggcccatgcatgggtcataaggggaaaccaggcacagaggaagagggtctcgcccacggccttccagggagtgagtgagttagcagaactgggggcttgaggccaggtttcctgggtcctatcagtgagtgaattgaagagctcagacctggagctcattctctgctcaagctcaccaatgcttgaggatggtggaatttgtggattcctatcttggtctgccttgcagttaggggttacctgtaccccacctatctgttagactgagccctaggagaggccagagcttggatcttatcagccctgcccccaccatataagaggcttagtaaatgtttgccgagtagaggcatcatcatgagccatggaacccactgagccaaccggaactcccttgggggttttgttaaggaggccacctccttcacagctcccgcgcctcatgtgccaaccgcactgggccccaagaatcctttgtcctagaatgtacccaccaactcccctgctcaggttagtgtcagcttcttagctggccgctaggacctgggcacagatctgg

SEQ ID NO: 143276 - DNA, 710 bp, Homo sapiens
gtattaacagctacattatacagtaaatgtgggataaaatccatttagaaaatgttaaactgcttttccagacatggttgtagcatattttcaattagtgtgtgtatgttaatgtgtaattgatagtagaacaaagttacatttttaaaactgctacttgtataaaccttgcctcttttcccaaatactgtgggttttgtgcatagtttttacaaaccttggatttaccagactgtcttttcactgtttgtgggttttgtagaagttacacatttttatggtagataaaatgttacttctatacaagtactcactccctttttatcaaaagttaattttaatctcacagtctacattgtgctacattatccagcttctttggaacaatgtgtgctctgtatggttttttttggtatgacaactaattaagcaactgacattgaactgagaattctacaaactataaaacattaatttttgaaggtaatttagttttgtggctgggcattcagtgaagtcttaggacttctttgcagacaactgactgggtatatataggaatgaatctggctttagggttaaatcatttaaggtctttttataggcaggcactagtaactaaaactgaaaactaagtaagtttatttttgaggaatgttgttaaaaatgtctttaggaagtcactaaaacttattggaagaaaaaatcat

SEQ ID NO: 143277 - DNA, 322 bp, Homo sapiens
gtcataatcaaatgaaactgagatccaagtgtattgcttaaaattaattcaagtttcagcaagtccaagtggttaccacctacttcgcacacctgcgtatctcaacagttgactctgctacatatacaatgtgatcctcacacacagattcatttatgtaccatccattcccaacaaacatggctggacgctaaccctcttccccaccccaagctgtgatcaaggctgcagttgttctccccaagccctctctctctcactcccatttttcctttcagtttctgatctctcaccagagaggctcaggagcaagatcttcagc

SEQ ID NO: 143278 - DNA, 858 bp, Homo sapiens
attgaaatgtggagacttggaagaaacattgataaccccaagaacccctggtgtgatataaatgttactgctggtgacagaaagttaaatgaatttgaaataaaaataattaatttcattgcttcctggttaaagggaccaggggcgcagaagctccatggaacactgtgagatttgtgatttagttgtaacagatttccataaatgggatttagaactggatttcatccattaaaaattgattgctctggataaagaacagttctaatttcaattacttggccctcatggtccaatgtggtaaatatttcatggcttggtgtacagggctgttttccaggtgtcatatattcacttaacttgcctggctgtgtcccttgggtgtctttttcttcctattgaaaatcttgtttagagcacagactctcctgttgtccccaaagtctggttttcctggtcactgagactggcatttcgcatgaattggttacggcaaagacgtttcttgcctgcgtgaagagatgtggtgcttctgggtattggtgtttcaaattaaatagtggactgttgactgctctgagcgtaattcttccaggaatgtgtatgctactgggcattgttcatctttttctgttgctgtctcttctctttcgttagactgcaagctttaaaaaataaatcccagtgcaaatagctttagaatttttctgattataaaaataatgtttttatggttttgaggtttacatttaagtctttgataggtgcagtaaaccaccatggcacatgtatacctgtgtaacaaacctgcacgttctacacatgtatcccagaatttaaagtaaaataaaaaaaagt

SEQ ID NO: 143279 - DNA, 429 bp, Homo sapiens
cccccctcctatcatgcagtgtctggatgtctgagtgtaaccctgaaagacaaatagggattaacttggtgtgtagctgggagaggaggaagggagagattccaagcagagagactaacatgagcaaacattgagggggtaaaatacctgaggaccaccatccaagtagttttctgtgtaaaccatgtgtggaagacatatagaaggtatcagaaatggagaaaatgaaagatgagggtcagattttggagttcctcgtttgtcaggcctgaagaatgaagactttatcaaggtgatcacagggaggattttaaacaggggaatgacacagtccaagttgtggtttcattagtatggaagatcaattttagcagcatttataatgatttaggtgatagatgaagagggtctggattaaagtagtgcaat

SEQ ID NO: 143280 - DNA, 320 bp, Homo sapiens
tttcctgccacccaaggaagctcacctacaagacaaaaagatctctggacctggtgtggtggctcttgcctgtcaacccagaactttccgatgttgaggtgggaggatcacttgagaccagaagtttgaggccagcctggccaacataatgacacctgtctcttaaaaaaaattaaaaattagccaggcacagtggtgtatacctgcattcccagctacttgggaggctgagatgggaggatcactcgagcccaggctgcagtcagccatgttcacgccactgtactcccgcctgggtgacagagcaaaaccttgtctca

SEQ ID NO: 143281 - DNA, 272 bp, Homo sapiens
atatttggaaaggccaaaaagagatttcctgccaactggcaatacaaaaaagaccccaacctgccaacacgttttgccaggaaatcggtgagtgttttcaaatgccctgtcttataaatgtaaccttcttaagttagcaaatgcttgctgtaaagtatatctgatacagactcattttggatctcagaaaatagaagaaagagaccaaagtgctgtctttatcctttaaaagtgttagcagaaacaaccaccaccaccaccaccaccaactt

SEQ ID NO: 143282 - DNA, 329 bp, Homo sapiens
gcccgttccacaacaggttcttacttggaaaaacctgcggatcataagagaaggagacattactactcctcccagggcaggattatcatttttcaaagctcacatttatagcaaaatttcgagtctgcttacgcagcctgacctctctgagactcccttctgggctcaacctctcctgacttgtaccccttttgtagccccgactacctcccaatgtgactttccactcagcatccttcccctgcaagtcgaggagctaactgtggttgggaccatttattttcctggtacgcaggcctaaagtatcacatcatgaaaatgcattcaat

SEQ ID NO: 143283 - DNA, 691 bp, Homo sapiens
tgtgacaagcagagacacccaatcagaggatgatttttacggcggcgacagcagtgaagaggtacactgcttgataagtgaagtagtcttgaagcacagttgtttccttagctccaataagcactaaaacaagttgaaatgaaagagggaaaatcaactgctatttataaaaatgcaacagattgccatgtcagtccacagttgcatcaggttgttatggtaactttaaactgtcttttttttttttaattaacagtcagccaatttcacttttacttatagaaaccagttttgggtttctttctgttttttcattttaatctttgaatcacaggatgagaaacgatatgcagtttagtgctatgatagcaagaccagtaaaacactgagaatatactgttctagatctctggagaaattgtgttgcagttgctaagcattctaaattgatggttttctggcttccttactcccctgccatcttttcaccttagacctattaggactcattattttccatatggtcccagaatttgaagagttgtgccaattaaagtttagataatgagtcgtggattagtgctgggacttgccttacaggagattttctgtttgcaattatttagaatatggatatatcctataaattagcaaattcgtaaaaagttttaaaatgtttcaaatcaaactg

SEQ ID NO: 143284 - DNA, 450 bp, Homo sapiens
ggaatgagacgatgagattttgttttgggaactcctgggctcaattgatcctcccacctcagcctccctagtagctaggactacaggagtgcaccaccatgcccggctaactttttgctttttaattttttgtagagatgggtctcactgtgttgcccaggctgttctcgaactcctggcctcaagcaagcctcccaccttgcctttcaaagtgcagggattacaggcatgagtcaccgtgcctggccctgagctccttatctttaaaattgttgtaggacatcaggtggagcttttcagcactctgtgggacatcaggtggagctatgggaggacagaatcaaatggggaggaagaaaagaaaaattcctggagaatgccaccacttgaaagttaggtgacagaagaaaagccaggacgaagattgagcaggagcagtaagagataaag

SEQ ID NO: 143285 - DNA, 497 bp, Homo sapiens
caacctccgcctcccggtttcaagcaattctcctgcgtcagcctcctgagtagctgggattacaggtgcacagcccagctaatttttgtatttttaacagagacaggatttcatcatattgcccaggctggtcttgaactcatgagctcatgcaattcacccaccttggcttcccatagtgctgggattacaagtgtgagccatcgtggctgccctagtagaaagtcttaaagaagtattaaacatatactagcacctaactgagactttttccttatatcagttttagtttatatcttgtatacatatctcttataatcattttgtaaaccatgaatagtatatatcccctgctttgggaaacactgtggtgctatactattttattaatgttgttcagctacctggagtatctgaagacctagcacaggttttaccattcacctcctccaaaggggagaggatatacttaaaggggctaactttgaaaatatggg

SEQ ID NO: 143286 - DNA, 396 bp, Homo sapiens
aatgggttcttttctatgcggatgtgactgtgttccaataaagcttcatttaccaaaactggtgcaggctggttgtagcctgaggggcattgtttgcagacggctgctctagtgtataaacctaacagcacggtttctggtgcagggtgagcgctcacccagtaaatagctgtgtctggataatggaggctgagggggcaggaagcactgggcattcctggtggtgggtgggcaggtggcctttttcagggataagggggctagaggcctcttagagagtaggacagcccctgaccccaccaaccccacacttctgggcctcccagaccagccaaggatgagggcacaggtctggaggtgcttggcctgggattggggtgctgggtgagcagggtt

SEQ ID NO: 143287 - DNA, 904 bp, Homo sapiens
gcggcggcgcccttcgtactccgttcctttcccctttcggctgcctccggcctgacccttcccgcaatttctttctttctgactggcaagcgaagccaccgtggcggcttgcgtggactcacggaggccgctgcttctggggaatgatgcccatcccagaacccggtgggagccgccttcgcgcgctcttcggtaacgggaccctgggccccctccgtcagcagcccagcctctgaggtctgaggtctgagggctggcgtgcgggtagtgcctggggctctggctgctgtgtgtccacagcctggcttctgtttcgggggacgctgagaacattccttcctcctggagcatcgcttgtgaacgtgtgcgttgagaaaccacacctccttggaggacccccagttcctgtttcctctgaccgagagccgtttcttagaagagaaactacattccagtcatagcatttttaattactcagttcctggcacattaagaactctggtagagaacatctctagaagatagtgaggaaaagtggatttactcccacactgctactccttgctttatctgtagctggtagaatatccttactcttgtttttacaacttaacggcattttcgttatgatagagcccagagatctgcattttaaaattcacacccctgctgattctgatgcatgttttcagagatcacactttgagaaatagtgatctacagttaattataataacagacattaaagtataaaaaaaaaaaggggggggtaaaaatcccagggcaagttacgtaccggttttggaagggccatgggggattaaagggggggtaaagggggaagttggtcttgggactttgggggaggaaccggaaaggaataatgggtgtgggggtgaaaaat

SEQ ID NO: 143288 - DNA, 253 bp, Homo sapiens
ggacttacagagtgaccttgagaaattccattcccaggctgagctgcagtttgaaagctggagaaagaaatctgcattgatcaaatgtccactgtgagccagattctcttctggaaacttcacatcctcccagggctttgggccaaaaacctggacattgcacgtgatccctgttgctcccttccctgtcacattggccactcagtcgtaccgtagctcgatattcgtatatcatggctcatagcgtgtttcc

SEQ ID NO: 143289 - DNA, 380 bp, Homo sapiens
ggaactttgcattggaactcagtgagtcctttcacaccacaagcaacacagggcagaattcagctggtgcccacagaaggagcatttagatgagccctagccagagaggaatcgcccatcccagtggtcagaacctgagttctggctagtcccaccactgcaagctaaagagctctagggtcttcaataaactagttcttgtggcctagactgcaattactgggcaagtcctggtgctgggctgggctcagagtcagtggacttgggatgcacatgatccagtgggacaccagcttgggtagccaagggagtgcttgtactgccccttctgcaatcccaggcagcacagctcacagctccaggaaaagagggaagagtga

SEQ ID NO: 143290 - DNA, 565 bp, Homo sapiens
taagccactgtgcctggccaccacctgctttcttctattaaaatcttagcataaaacaaaggaaatagaaacaaaaattccaactctttttgtcagaggtagatctcatcagttaccttaaaccataaaatctgaaacagaaagcatatgatacagtaacttagtaccagaagggcaaaaccaaagcacctgcagaggagacgacagtgatatcaggaggttgaaggaggaagggaggcatggtgctaaaaacagatgttcagctgaaagtctgtgaaaggaccagctgaactcccaggtcttcacctcactccagctggacagcaatgttccccaactccacgagatgaggggtttgttctctgaaaaaattggaactacagagaatctagaccaggactcggggacagtggagggtagagttaactgaatgtctggtctgatcttagagcagcaggcaaaacaaatgtcaaaaaaaaagtgctttgaataagaacaaataagacttttaaatatcagtactcaaattgatagcagggtttgcagaatgtttgctttttttttt

SEQ ID NO: 143291 - DNA, 196 bp, Homo sapiens
gagtggaagatgggtactcatgtgcccaggtggatgcaggaggagaagctcaaccctatcctcacttagcctttgccattggtgaggccggagggaaagcagcgttgacagtgtcagtgtgtgtgagtgtgtgtgtgtgcacgcacttgccagcacatgctgaggtgcagtttgaaagatgtgtaaggggaagaag

SEQ ID NO: 143292 - DNA, 741 bp, Homo sapiens
ggaggggatacatctgatattgattttattggtcatttttcttagtgctagtttttctcatgtgctttggaattgcagcttagagcttcatctagagattgttttccatgtattctttctctgcgctcaccctgacccatctagggatttgctgttgccaacttcctacctcccaggaccccagtgcagagtcaagtctaatatttgcagcaagggccttctgttccatgatgatgatggacccagcaccaggccccagacagcatagcccagcgcctggctgtgaggctgtgtctcccttctcacctctccctgggcaagcagatctttaaagctctctttcattgtggtgtgggggcttccccctccacagtttcagatttccagtagtgagcctggctcaggtcccagccttttcctgatgacatttttctcctcattagccctcagaaacaggctaatggacacctttgtctacagtatacttcacatttctatttggttctgatccatggagatacttaatcttttttttgccacattattctttttttttcaggtttgttgagctaataaatgacaaatgaaagttgtatatatttatggtgtataatgtgatgtgttgatacatgtacactttaggaagtgattacccattatcaagctaatatacccatcaccccccatagttatttgtgtgtgtgtgtgtggtaagaacatttaagatctacttttatagcc

SEQ ID NO: 143293 - DNA, 508 bp, Homo sapiens
agtgaaggcaatgacacctgagtaagcatgtatctttatggtttagctaccccattcaaacagttttggtagaaaccaaaatatgactcctaatgggaactgtcactgcctaagcttgggctatataaagtgcacccatggaatgtaactttaacaaacaccctggcccatgactggaccgtcagccgcaaatcccccttcagctaggactccaagaacgcctgctaggcctcacattattctcaggacacctgcacacaggaaggggcacagatgcatgccaaattaaccttacttcctcaacctcacgaggaatcataaagtggccaaactgtttcaatgggacagttaaaaccaaaaagatatatgtccactcggcactatttccttcttcactgcacctgttatttatagtgctgctaaaattaacttgaatttcatctctaaggactaaaagaaccccatggcaattgtatgtgaaggaacacacacaaccgacagctgagac

SEQ ID NO: 143294 - DNA, 696 bp, Homo sapiens
gaatttaaaattatttctttgggattattcaccagaagtaaaattactgggataaataagaggtggaaaccacaaatatgcctgcctttgatacatattgccaatttgcttttcgaaatagttgaactgatttgtagtcttaccaggagtgggcagttctggaggaggtagatgatacccttccttaacttacattgtgatcattactaacaaaggtgaaccttttttcaaatgtttgtgcactgtgttttttcttttgaaaattgccctttctggcgtggtggctcacgcttgtaatcccagcactttgggaggccgaggcaggcggatcacctgaggtcaggagtttgagaccagcctggccaacagggtgaaaccccgcctctaccaaaaatacaaaaattagccggtcatggtggtgggtgcctataatcccagctactcaggaggctgaggcaggagaatcacttgaacccgggaggcggaggttgcagtgagccgagattttgccacctcactccagcctggatgacagaacgagactccgtctcaaaaaaaagaaaaaagaaaattcccttttgtctttcgcgagagcgctcagtgttgctatcaagctgataagtatgtagtctgtgtaaaatattggtaaaatattggtgtaataaccctgtgtgtgtcgtaattcatataaatttt

SEQ ID NO: 143295 - DNA, 418 bp, Homo sapiens
gggtctagcatcatcctggcccagagtagatgtttataagcttcaggttcccccttgtttgtaaatacaagagttatcgcaaggcaaaacaggtcccccagttggcgcagtgcatggtacatagaagacatgaatgtcactgggtgtggtggcttacgcctgtaatcccaacactttgggaagtcaaagtgggtggattgcgtgagcctgggagctcgagaccagcctggacaacgtggtgaaacctgtctctaccaaaaaaatttacccaggcatgatggtgtgtgcctgcagtcctagctactggggaagctgaggtgggaagatcacctgagcccaagaggtcgaggctgcagtgagccgagatcttgccactgcactccagcctgtgtgatggagtgagaccctgtctcaaaaa

SEQ ID NO: 143296 - DNA, 376 bp, Homo sapiens
cgagtgtaagggaattctaagaattagttaaatggtggcattaggaggtagtgaactcagtaagtaaaggctgaatggccacatgttgtaaagaggttaaggtcgtgttggagtttgtgttgtgtgctgtttgggaatcttgaaggtcccttccaagtcatatcatggttttttaccaaggcatcgtggcgactactagtttgtcctcagttcagtaggaaggaacagagcccacagccagggctaccagaagtctttgaggcccaagaagaacacaaaattgtctcttgcacagagtagcattttttgtgagaggagcaagttggtaacatctgtcagggaaatgggttagatgcagctcagtcattcactctcc

SEQ ID NO: 143297 - DNA, 371 bp, Homo sapiens
ctttgtcatgtggaaacagccagggatggcatcaatcaatatctctcgaacacacgtcctccttcctctcccagtgatgcccctcactgcagccattgtcaagaatggatgtccgccccaggtgacttagaaggccacagaccaacaacaaggcagccaaagttcccaggaaggccccaggaacagtagaagtagccagaagaggtgccagcaggtggctttaatgagtctttctgctgtctggagtcttcgaaagcatttgtgttttgtgtgttggttcgttttgcttttggaaatttatcctattgcagtgttttatgggaaatgtttttaatgcttaaacagtttttgaaaggcaatacccttgaaca

SEQ ID NO: 143298 - DNA, 393 bp, Homo sapiens
gggctgtgtcctaagatgaagcaggccaggaagattttagcaggaaatgggtccagttcaaaaaatcaagcaaggcttgggagaggtggtagatcactgaaggtcaaagcacaaaggatcaggatctagtaaacgggctttggaaacggaaaaccttaggagaccctgaacatttcaaaaagacatttgtgctctaccttctttcaaactcttaactctgggcacctacactgtagagatgtaacagaaggcagaagaaatcaggggcatacaggtaggtgtgtcatcttttggttggcacatagatgttctgattacagacagattgtattattttaagagagatggggcatgtgaatatggtgcaagttattttttttttgtcttcagttt

SEQ ID NO: 143299 - DNA, 666 bp, Homo sapiens
gagattcatgatcacatggagcagttgaaggaactgaccagcactgtccggaaagaacacatgacgctggaaaaaggtcttcatttagcaaaggaattctcagataaatgcaaagcactgacacagtggatagcagaataccaggaaattctacatgttcctgaagaacccaaaatggaattatatgagaaaaaagctcagttatctaaatacaaggtagtgtgtttactcattgacagatgcatgcagaggtcacacagagaccaaatgggagggaggtgattcttgctgggtgtcacccgtaacagctgctggaatgcatcccgcatgtgtccgttctgcagctgaccagtgatgccatgacctatggagatttattgggttaaatccactacctcagagttatttttgcattcagagatctgatactcaaagattgtatcaatatatttattgattgtacgtatctgtcaatcaatgaagaccttttctgatgcgtgagccaggtatttggatcctccaggtaaaatcttgctggcatcaggatcccatatctttcccatattgaggcttcccttcatcttctggtacctaaggctagaaactgacctatggtaaattgaaaatgacatatcatatttataagaaaataagttctagttaaca

SEQ ID NO: 143300 - DNA, 337 bp, Homo sapiens
ctaaatgtatcgagcaacacactttgcagataagaaagctaacacactatggtgatttctgtaacactgaacactgctattaggaattggaccaatgccaggagccatttctcattgacaattaaacacccatcaactggtaatgatgactcctcgtaacttgtgacacagaccagacagaagggctatgatctgtatggaaaaggtattttatctcattactcatccgtggagccattcactgcctcagaatgttgaatgactggagccctccctgaagagaaagctacaaattataggggggtttatgagaaatatagatattctattgtaaata

SEQ ID NO: 143301 - DNA, 563 bp, Homo sapiens
ccagaaaaatccttgtttccttcttaatgactctggtaccttagaaactgggaccctgctaagtccttgactaggctatctaccagctcctggtcggattaaagaaaaaacacactttgtgttttttaatcaccaaggcaccctgcagagatatcttcttcttgcaacttcacatctttatcagtaatgtcctctttcctttaaaaattcaagttttaagaacagcattttcatgtaaaaacttgatttgtgttttttccagactgaatacttttcctccctaactctcatcgtctcattgcgcgcaatgcctgattgagcttctgtttgactaaatatcacctactatgtaaaaaatgagcatattggcctcttttctagcatctaataaaggcttaatacactgtactcttttgaaaccatatgattccagtccaactattagccttgatttctaactgatgttcttttcatgagaataactgattattgtgtgatctttgaaaatgtaatagcagcactaaattataaatccttaaaaaacacacatacacatgcaacca

SEQ ID NO: 143302 - DNA, 713 bp, Homo sapiens
ggaatttgtttgcctgttggacactgacagcctttcaaaccttggaatcagcactgtcactttttcatgtcttgttttatattgattttcatactatactttcttttactttttatcacagcagccaccaaaacccagtttcacaaagacacgatattctcgaaaggaatgtagtgtgacttaatgttgaaagtgaattatcttgagctattaaaaatattccaatgcaggccaggctcagtgactcatgcctgtaatcccagcactttgggaggcctaggcaggcggatcacctgaggtcaggagttcaagactagcctggccaatatggcgaaactccatctctactaaaaataaaaaaattagctgggtgtggtggtgcatgcctgtaatcccagctactcgggaggctgaggcagggattatcacttgaacctgggaggtggaggttgtggtgagccaagatcatgcccttgcacttcagcctgggtgacagagtgagattctgtctcaaaaaaaaaaaaatcccaatgcatccctatgagtttgctggcttgctgtggtgccccaggatgcctcaacatacatttagtatttcaggcccaacttgactattcgctctgacatcctagtttagtttctttaatctgcacctcagtttcctccacctcaatactttaatactggatggacatggtggctcacacctataa

SEQ ID NO: 143303 - DNA, 617 bp, Homo sapiens
tgataaattacaatgagagagagccctcaatctaattctgccataccaaaaatgtgttactataatatgttaacaagtgggcacaaacacagtcagacactgaagtatagggagattccattctgcgcctcaggcattccaactaatcccttgcacagaaagtgcaggaaggtaggcatgactactgtctagtggccagagtccatacttataaatgaatctgacgattggacctccatcgattggagggatgcagggactctgaatgtagaaggctacaaatgatggtcttaaaacctccatgtttgctggacttttatttcattccatgggtgaaaagtaatcatgcctgacagtgttaatttctgctgaaagcaaactttatgctatttaacactcctactctctggagtttctgattgggcttcttcaaatattaactgacatttgcagccaaacaccacaccatttatccagaagtattattaaaataaaccatttcacaaacaaaataaggacattttttattatcactattttaaccctgtgttattctcctatccatctgcacctcactttaattcatgaacaaaaagaatctttggtatcaaggataa

SEQ ID NO: 143304 - DNA, 722 bp, Homo sapiens
aaaaattaatttctctctgaaagcacctttttaactctcctcaacggatattgatttttcagttgttacagttttttgcacttgaatattattctccattttggaatattttccaggtatacattataacaaatgcttttggttagtgatcaaaatgctgttaatcacaattgctatttctgtgatggatatccatggcaggaaatcaaaaacaattgagcctgtcaagattaaatggcttgctctgtccataaaggaaacctcacagccctacactggaccatcattcctcctttgagagtcctaaagtagtctgaaaatattataataagtggatagtcagctaattctttgaaatcataaaactaatttgctttttagttttgccgcctttaagaaagctcttcagctgattatccctttatgaaaagaattataaataattcatttgctgggagaaggaagaagaggtcagagcagtatttgaaggcatatatgtaaatgacagatttggaaatgatctgtattcaaagttttaacatgaatgaatataaatcaaaggtttttacagggaaaatatgcaatctgcagaacaatatcccaggtatgctccttatttgggtatgggtttttaatctgttctattacacattctatgcaaccagtaatgtccatagtataagtcttcctcaaaagtttgttatatggcacttccttgaacc

SEQ ID NO: 143305 - DNA, 785 bp, Homo sapiens
gcggaactcctgtttttaagtcctagctccaacactagccttgtcagcctgtaattctgaattactgggcgcctctgaggcttcttgtctcatctgcaaatcaggaacaacggcatagagtggtgaatgcatcaagtgggatgatgtctgcaagtacgcaacccgcttacacaaagaattatctttccataaccttccctggacccctagggccagcagggaatcatagcctccctttgtttctagagcccggaaatcactgggttttccctctgtctggagcagagctgggtgcgaatttgaccaacgggtggcaggaacagccggagcaggatattaaggagcgggcgagcttgccaagcatgcgcagtagcggcgggttggtttgagaagccgccagggagccagcgcggcgacctagctggctggggcaggggaggggcccgccttatatgggagctgcgtggggacaaactgttcgggcccaacgcgcgggtctgagagacagccacgcctgctccgggtcactccggccacctggggggcgtcggcgcgcagactctggccagttcagtattcaaactcttcaggagtgctaacttactcatgacagcgattttctgtatcggggtttcattggtcggtggtttagaaggttttgctcattcattcgttaatgtaattccaacaacctacacgtgtttataagccccctttccatccacgactttgctgtctgacacaaaacggaccatcgcagcccggcagacgctttagacaacaaa

SEQ ID NO: 143306 - DNA, 614 bp, Homo sapiens
ctgtctgggtcaattttcccttctctcttaacttattcattcaatgtaattctttatattcctacgacttcatatatctcagtgactcccaactttgtgtccttcccagagctcttgctttatagttaccgctttatatagatgccctagctatagcttaaattcagaatgttcaagcccagatgtatgagagataccagtcactacctctctctccacatgtagttcctgcagaatgggcactgttaggagatggtgttttgagccaaggtagcctccattcatttctgcctctatcatttattatcatttagtcatacgattttaggcaagtcagttaacttctctaggccttggcttcccttctgtaagtgaggataataatgcatgtttctgaatgactatgagacttcagtaatatattagcatgggacttattgcatagtaagcaccaataaatggtgactttggtttatactacagcacgacctctctgagtaactgattggaccggggtggacacttgagtagcccatttattgctatacatttgaaattggccagatttaaagtgacgacctgggccagtcagttcccccaggaagaaattatgc

SEQ ID NO: 143307 - DNA, 391 bp, Homo sapiens
agagtgagtgatggcccaattacaatcaaggaaaagttcagtctcccaagactacaaacaaacataaaccaacttaggacaagtcaccaaaggaagaccaaattctgtctcagaggttacagcactgaactagttatccaaagacctgaactctaatccaaatactgatcttggtaaaacactaatattctgtctcttgtttccatacaaataacagagtatcatcttcttttccttctcttaagataaatataaaacacagtggagcagtccaaaaatgcaagaagaaattattacgtttcagataaaatagagctgaaggttttaacctacattctgcttcatctggaacacagttatactttttttttttttcctttttttgagacag

SEQ ID NO: 143308 - DNA, 253 bp, Homo sapiens
ttcttggaaatccaggtgtcctacggggaatgggggtgtgtggtctgacaaagtccctggctgctcggcttctaggacctccttcccctgtgacctgtcacctctcttccttcctctccaagcattacaaggaaagggatggggacagaacacacctactgtgcctcaggcttccttcctgtgacaatggaggaggaattctcaaaggcctcctgtccacctggagtctggagcacaggctctttctcctctt

SEQ ID NO: 143309 - DNA, 513 bp, Homo sapiens
ctgtaatcccagctactcgggaggctgaggcaggagaatcactttaacccgggaggtggaggttgcagtgagccgagatcacgccactgtactccagcctggcgacagagtgagactctgtcacaaaaaaaacaggactgcctattgggcctcatatgcttgactgtttgatggcagaaacaactcattggctacaggctttgctttgaatggacccttcttccaggtgaccggtatgatgagaagtagagaggtaggggcaggtgtcagcgtctggatcttctctgggatcccaacagaagacattttcgtcctgctgtgctgaagacgggaccggaaggccattgctcaggtattcactctaccagacggggctttacgctcccaccacttcctcgaatcccccgtgaggtagatattattatcctgactttacctgtgaggacaggaacgcagtggcggggtgggttctcactgtgcgtggaggcagcaggacgcagaaatcgacctccc

SEQ ID NO: 143310 - DNA, 558 bp, Homo sapiens
gagggagaagcagctggtgatgaagcctagaaacgaatcaggtctgcttccttgcttggcattcggtgccattgacagcagcctcccctcagcaagcaaaacttgctccaaattgagctgcgagtttcttgcagggtggagctgccctcggctgagtggagccaggagggtgaagcaggagtgtgaacggtgtgaagcacccattacaaatttctggccgccatcctaattttagaggcttcatgtttcaatatgaaatgctgttgttcgtgccacaaaaggaggaaacaaacagaatcgtgccaggagaaaccccctcccccaccaagtttgatgctgtaaaaatgtctaatggggaaatcttttcagtggtaaattaccccactgccttcttttcctctcattttgcatcggaagctctcctcagttcctactggaagatgttcaaggctgggccaggagaattctagagactttttcccctaataggcaccgtgtttgtggagaagtccactaagaatcccagacttgacatagccctggcattcagcggccgcc

SEQ ID NO: 143311 - DNA, 285 bp, Homo sapiens
aagggagcagctccagggatggctgctctggaaatgtgctttggcagtggccttggggaatctccagtggccctttcagtcccagcagtccacagcctcccctccttctgccagggcccccagcctcctgctgtcttctctgccttctttaggtggatgtgcttggctcttcccttgttctgctcccagatgtgcagaaagactctttgaagctcaggtcttccttctgatcagggctgtcctcctgagcaagaagccgcagttcacagtggaaagcatggttct

SEQ ID NO: 143312 - DNA, 295 bp, Homo sapiens
atatgctcaggtctgcatcccagaaaagaagagcctaggcacaacagctacagccccaccctactcttggccttcgaaccctctaggtggtccgaatagctatgcagacccaaggtcagaaagacagacttctctttgattgcacagtttacttttagaaattgctcacaacagtcagacatttcagacccatcctcaagagagactttccacaaagacgctggcagcgccctgtcatctgtgcaatgccagaaatggtggcaccccatagccacggagacctgagcaagccagg

SEQ ID NO: 143313 - DNA, 327 bp, Homo sapiens
atagcacctgtgcagtgcccacaaggggtctttttagaagtaataagcattcagactcccttggctctcataggccacacctgacaagaggtttactgagaaggacagagtacaggaaacacaatttgccagtagggaagcatctagcattaatggaaataattctcccactattgtatgtctcggtccacatagctgaccagttattctgtttggtcctccaagtgacaggtctaggacaagggagtgagacacatttgcagagccagctttagcccctaaaggagactaaaattttttacaacaactctatagacagagcttcca

SEQ ID NO: 143314 - DNA, 356 bp, Homo sapiens
atttaatagccacctctccaaaagaagtactagtccaaatgattcttgctttgttctgaaacatttccagtgatgttccaaagcagcataggttcattagatcaggtgagtaaggaaagttaacaagaagcaaacgttattaaatagcctctgtttaggatagaggaggcccatctgtctgcagtgaaggcaacacaagagcttacaaataatctgccttccccaaggtacatggctccaggacacctcctttgtgtgcttggaatgtgaagaatttaggagacaatcctagactgttgcagtgttgggggatccttgtttgaattggggacacaatgcagccggctgccactcat

SEQ ID NO: 143315 - DNA, 330 bp, Homo sapiens
atgaacattcactggccctccattttcatcttaattgagttgataccaaggcaccaaatacaatgagctggcataaccaataaagtgaccgatcatagcactttgttcatgttaacgcctttcttctctcaaggcttagcatgtgctaggtccctgctgcctcatgccttcacttttgtctagctgtcctttgaaaaatgaaggcctagttccactggaacaaactcctggttttctgcaaaaattctcaaaaactcctactaacaatactcagagatgaacaaaaagtttccttagataaatgctaagttctgagaagataatttacct

SEQ ID NO: 143316 - DNA, 295 bp, Homo sapiens
  misc_feature (153)..(153): n is a, c, g, or t
ggggaggagacggtggtgaccattgaaagacaccaggttgacagcactggaaactgaagtaccagttgtcgctagaacagtttgttagtggccccaatgaagaaccttcagaacctgtagcacacgtcctggagccagcacagcgccttcgancgagagaatgcccaacaagagaggatccccggcagcgggaggccaggggagaatgagctggggataagagaagtcgcaggaagaatcctctgcccggagcctgcagactccaacccctcagcctggtctcaggagccccaca

SEQ ID NO: 143317 - DNA, 784 bp, Homo sapiens
gatggagagtctctgtcacccagaatggagtgcagtggcaccaactcagctcactgcaacctccgccttccgagttcaagcgattctcctgcctcagacctgtagtcccagccacttgggaggttgaggcaggagaatggcgtgaacccgggaggtggaccttgcaagtgagccaaagtggcgccactgcactccagcctgggtgacacagcaagactctgtctcaaaaaagaaaaaaaaaaatagattccaagagtaaacaaaatcctcaagtgttactgtgcaaagattatactcaccatgtttgatttttttggtctctggtggtcatcccagatgcattcacagtcatttctggacctttaatgtaatccactgttgttattaaatgagctgatccacatggagttactttttgaaatcatgaagttccttatgaatgtttgttattgtgtcttaaattctttaaattcttaaaatatgtcttaactcacttaaagataaaagtaaatgtttctgtggtccttctgggagtggggaaagttacaactccacaaatgttaagagagaagggtgaacagttagcagtcaggcagcatggttgggagtcatgaggaagagcattcaagatgacacaagttttgtaagcagacctaaggaacgggctgaagaatgttgtggagacccaggtacttcgacttagcattctgagttcagagttcgcccaggagttccaggcttgtggcaggtttagaaaatccaggatgatcggccaccttctttc

SEQ ID NO: 143318 - DNA, 439 bp, Homo sapiens
atatttggctcaggagattttgaactaaaaacatggcagttttagcatggatgatgagaaatttctaagagcgagattattttgcttgttaaaaagaattgagcttctcttcatgatgttaccttcatagatccatatgttgaagacctaaacccagttacctgtgaatgtgaccttatttagaaatgaggcctttgctgctataatccagttacgattaggtcatactggattagggtggccctaaatccaaggagaagtgtccttagattgagacttggtgacacagagatgctcagggagatgaccatgtgaaaacagaggcagaactggttacactgccacacccaaggaacacctggggttactaaaagctgaaaagggggagactctagtctttagagaaagtatgatcctgccactacattgattttggact

SEQ ID NO: 143319 - DNA, 281 bp, Homo sapiens
tgctttagcagcatccctagcctctactcattaaataccagtagcactaccccagtctgaccatcagaaatgtccactgctaaatgtttccttgggggcaaaatcatccccagttgagaatctgctttaaatcttctagtatctccaactgtctaaagcctcatccactcatattctctcctcaaagtttcaaaaaatctttcccccagtcttcctggtaatccaagctaaatcccaaagtctaccttagtatttcatttgtctttgccttcaaaatcctc

SEQ ID NO: 143320 - DNA, 157 bp, Homo sapiens
tacttagcatattctggaattggttctggaagtgaccttttttgtttcaatagttattactgagtagtagaaagtgtatgtaaatttggaatgtctttaacatggccttcaaagtgggaaccacagtcagatataacgtgacataaagtaacagaag

SEQ ID NO: 143321 - DNA, 340 bp, Homo sapiens
gtcgtacgcttactcactagtactgcatcagaggctaatggtgggcctgactactgtaaggccctggcagttgcactcagataaaaacctgtgctttagccaattgcttctaatccagcacattgcttcataaatgtctgcttttggccacaagggggactaaatgagaaagcatgggaatagttccttctaatccatcaccactaatagaaaagtaatttgaagctctaatatcctataactctatgaggtctgtagctgatggttaggagccaagataatgaacagcatttaagtagaatttccctgtctcttaaaaaatgtactactgaggtgtaag

SEQ ID NO: 143322 - DNA, 420 bp, Homo sapiens
tgataggtgatgatgggtgggtgggtgggtggatggatgaatagatgggtgatgggtagatgcgcagatagatggatgactagatggagagatggatgatggatgcatggagagatggatgatggatgcatgggtagatgggtggatggatgggtgagtggatggatgatggatgggtgggtagatgggtaaatgagtgaacagatggatgataggttgacggacagatggatggactacaatgagtagatggactggtatatggatgggtggataaatgccatcccgtcctatacctccaggtgctaccatgctctgcatctcacaaagggttgctctctttgtaaggtgagagtcatggctggcaccagagaaggaggctggtacgacagccgcctgcttcctccccttggccaactg

SEQ ID NO: 143323 - DNA, 103 bp, Homo sapiens
agaggtttgtgtaaaaataatatgcactaatacattgaatgactttagcacaatgtcaggcacatatgaaatgtccaaaatgtaacagcacttactcttaaga

SEQ ID NO: 143324 - DNA, 247 bp, Homo sapiens
atttcacctgtgcaaggacccccgcctgcaggagaacctatttttaggtgttaattttctttcttcaggaagagcaagcaagtttcccttctattaaaaaatgtctttgtgctgcaagagatgtttctctgccatctccccacattttctagtatgtaagagaaaagcagtctcaatattgcagccttgcctatcttagtgttgctccccagtaagctctgaaatgagaggtttatcttcttcagct

SEQ ID NO: 143325 - DNA, 123 bp, Homo sapiens
gagaggaggtttcaggtaatgcctgttttaggcatcctctcctttaagaaaaatttttatatcaaggcacctcaacataataatacctttattgcatataggtagaatataaaactgacttgt

SEQ ID NO: 143326 - DNA, 822 bp, Homo sapiens
gatcctctttccctcttccccaccctcattataggctgcgaagcctcctctctgcacctgataacaaaacgtcatatgagaagcatggtagatccttagcatcaaaggttgaggactcttattctgattataagtagtggctcttgactacaatcaagtctcaaataatagtgtaagagaataaagcagaataataagactaagttaacagtttaggcttctttggaatcatgcgggcctagatgaaaatcccaacactgtcctttactagctaagtgaccttgagcaactgattacaccctttgatgcctcagttttctcctctgtgttgtggggtaatagtaatatctacttcctggggttgttcgtgaagattaattaacaattatacttgtcaaagctttagcacagtgccctgtatgttatttccttggccaaactttcttactctgccatttgttcaatgtcctaatgagcatgaacactacattaggtatcatgcagaacactctaaagataagtattatgatctctatttcacagataaggaaatttaaactgggagaggctaaagggctgacttgcccaaggtcactgaactaatatgcagcagagacagaattaggagccaagtatattaagagccaagtgtattgaacctaaaatctgggctcctaaataccaagcttcactgcctctctggttccagtgagagtgggtgctagaaaagtattcaggaatgaagagttctcctcccagaagcaccctggcctctccaaaggcagttcatctgaattagtgaagcttcttagcactgcctag

SEQ ID NO: 143327 - DNA, 120 bp, Homo sapiens
agctccagtttcccggctttggcactaaccgtctcccacttctagcccctcacctctaccccagccctgccaacatctctcctgaccaatattgctctaacataataacaagaacaatta

SEQ ID NO: 143328 - DNA, 440 bp, Homo sapiens
gggctgtctagatattcattttaactacctccaccttggaaacaattgctgaaggggagaggatttgcaatgaccaaccaccttgttgggacgcctgcacacctgtctttcctgcttcaacctgaaagattcctgatgatgataatctggacacacaagccgggcacggtggctctagcctgtaatctcagcactttgggaggcctcagcaggtggatcacctgagatcaagagtttgagaacagcctgaccaacatggtgaaaccccgtctctactaaaaatacaaaaattagccaggtgtggtggcacatacctgtaatcccagctactctggaggctgaggcaggagaatcgcttgaacccacaaggcagaggttgcagtgaggcgagatcatgccattgcactccagcctgtgcaacaagagccaaactccatctc

SEQ ID NO: 143329 - DNA, 216 bp, Homo sapiens
agtgagtggaggagcgaggatttgaacccaaatggtctggctctacattttgtcctctccctaacacagtcagccaggatctgaaggcccactcctgttcctgtgagaggaggaaagaggttccccaggtctgagcccagtccataaacgcccatcagtaaataggtgatctgttaaataaaactgagctaggccaggcacgatggctcatgcctg

SEQ ID NO: 143330 - DNA, 852 bp, Homo sapiens
agcggagttcctcatctggactcactgggagaagtgattcactagaattctcattggaagaaatgacaggaaagctccctccaatatctcaatttccaccccactcagtacctggttttatgattccacaccctcctaatccatcctgccctcctaacacatcccactctcgtaagccatcccactctcgtgcccgcgaatccctccctcttcttccatctgccaagccccttcctcctctccagaagtacgtggatttttcagttttctgccctaactgttatcccactgtggctcatacctgccctccccactaccctaccctaatactctacctgcactgctcttctgctattcattacaaaccatccatttgtcaatgctctagtcccagaactctttctggtaactcccttatcgatcaccctagccctccttctagccctactggtcaacgcttgggtcccagaactcttccctgtgattcccttatccgttctcctgttcctcctcctagccctccttgccaacgctctggtcccagaactcttttctgtgactaccctgtctgtccccctactcctcctcccagccctacttgcaaatgctgtcgtcccagagctgtttcctgggactcctctacctatggcctctacccctcctccttagcctacttctttctagtaccctgtactcctagtccccagcccccagcctgcatccccaaccagaccttatggttcacaagtctcatcttggagaatggtttccctggtcccggggcagttctggaacagttcaggatggccacggactgtggattcccagcagtctgacctcgtggacaaagga

SEQ ID NO: 143331 - DNA, 453 bp, Homo sapiens
cccagaggaaggatcttctaatcaaaagtattagcatgttaaaggccaggagctgagagggaacacactgtcatccaggcatgggggcagtacctcctacctacactcccctatcccaagcctgctctccaggagccattacaaggaatctggcaagctcatcacattaattataaatggtgaatgaaggattaacttgttggccatggtagcttacattttcaacagagaagcctcttgccagataaatgaagctctcatagtaggatctcaggcataaatgataggtcaataaagctagtaaattttgttgggggtacctcctttcttcctattctcacaatggaacttttacccctattgcttaaagttccaagtgtcatatgttttcagacccctccatccctttatgatgcactcagaaaataataaattcattgataaccacagatg

SEQ ID NO: 143332 - DNA, 186 bp, Homo sapiens
gaagatgaggccccatcccaggagctgccacagagcatatggggctatcatcctataaactgaacctttcacaaagagtccttttgccttggcttactaagctctgaataagagttccactctggttacaaagccttggatcctgtcccaccctgaatcatctacctcttggatgggttctatatg

SEQ ID NO: 143333 - DNA, 703 bp, Homo sapiens
gtttgtgtttttcttcccttaattttccccttggggcaggctgtctgcatgcacagtgacctgccagcacttgggaggggccgcatgtgcagtgcgtttactgaagttgtgtgtatgctcgtttgaggcatttttctcttaccagtcaagcattcccagaggaaggtcatataccagttaaactcccattttgcctcttagtgcacatgtttgaaccgactcgcctagctcctgagatcttatcaggaagctgctgatcactagctccaggtattttctatctactgggagactgcaggtccctggaaccagctgcaaccaattatcattttagcgacacagtttaacaactgcctgaccatcacctgatggttgcctgacgacctgataggggccctctcctgccctgctcagttctgcctaactgcctactctaacatactgatttatgtcttggcctgcaacttctgtctccctaaatgtgtaaaaccaagctgtaactgaccacactttctcaggacctcttgggattgttctcccagccatggtcactcatattggctcagaataaacctctttaaatatcttgcagagtttggttttgttcatcaacatggttgtgaatatggattgtgtttattggttaagagataattaactttgaaaagttaatgtctcattaaaataaaacataattactttg

SEQ ID NO: 143334 - DNA, 506 bp, Homo sapiens
aaatgtatgattttattataaagtagactgtgttttccaagctttaccttctgcaccgttgttgattctggtgtgagccccaggggcgtcctcaaccactgctttcttgatcttgaggacatttgaaaatcatcataccaatatttactgatgtgggaaaaaaagattgggagctcttacttttttttactttgtgtatctgcttaacagcaaaaatgttgtattcttaatgctttgctgaaatggacttctttatgcaacattggaaaattgatattttgatgctttaataattcagaagtttccttcctgggctgtttggtacctgggaggtacttcaaggtgattgttaaaaattttgctttttagataagccattttaatttttctgacatattgaaatatgtaaaagcgtttaaaatttgagtcatggatttctaaagttatgctttattaactggagttacatagaattacctataaactttagttttgataatctgaat

SEQ ID NO: 143335 - DNA, 107 bp, Homo sapiens
atccaggtacacattaaacaattaatgtgcatatacagtattatattcagctctgcaaggagttacaaaggaaaaatccactactcctttactttaaaaaagtgttc

SEQ ID NO: 143336 - DNA, 893 bp, Homo sapiens
ctagccataagcattgagtctgcaacgcagagttgtaagtaagaggtagaaacatagagacaggacccttccaaaaagcttagctgcatggaggaaagaggttgcaggatgggaactagagggatagaagagtaacccagaatagttttggtctgagtgccttgagtatatttatatatagactgaaatgagggaggcggtagagatgcggtagagagaaggaggttggtgctggaagaatataagcctggaagacacaggtttcagagtgaatgtagaaagtgaacagcctcttattttcagaaggaaagaagggagggcagaaggatgaaggtatttgatgttggatgggggatctcccttttgcttcgccatcttcgtatcatcctccacttctctaagccacttgaaaccattagccacctcttccttctttgaaactcccttctaagtcttctgtcactctccaagactctaccctggaatgtgcctctagaacagtggaccccaacatttttggcaccaaggaccagtttcgtggaagacaatttttctgaccaggagaggggaagagttggggatgattaaggagcaagcaacctagatccctctcatgcacgtttcacaatagggttcctgctcctatgagaatctaatgcagctgctgatccaacaggaggcagagctcaggcggtgatgcccactcacctgctgctcacctcctgctttaccgaccggttcctaacaggccccagacccttggggagctggggaccccgctctaaaatgtagtgggtggagattggatgagtttgatgctcatatttttgtctgctagctttatatatgtgtgtctaagtctaagtattcttggcctacaggttttcttcttt

SEQ ID NO: 143337 - DNA, 538 bp, Homo sapiens
atttttagagcattatttttaaaaaacaacttgcctacatttctccatatgggatgatactgtatagtagtatggttttgtaaatgtgttatgtgttgtgatgttctctggtagcagccttacctttgtttgttttgttttttgagacagggtctcactctgtcacccaggctggggtgcagtggtgcgatcacagctcactgcagcctcagcctcctgggctcaagtgatcctcccacctcagcttcccaagaatagctgggacaacaggcggtgtcaccatgcccagcttttgtatttttttgtagagacagggtttcgccatgttgcctcagctggttttgaactcctgggtgcaagcaatccaccagcctcggtttctcaaagtgctgggattacaggcttcagccaccatgtccagccacctttctttcttatcttaatttatgttacaagatctgtaaagagaataaagaagtacttttgcagttgttttgaacagctgtaaaaatcatcaacctttttcgggtagtccaaa

SEQ ID NO: 143338 - DNA, 783 bp, Homo sapiens
gacattactactctttttgaccttgagtagatggcttatccttattctgtctctatttccttgtcaatgaaatgggaacgctaatggacattatctcacagagttattgggaagagtacatgagacataatgagtacatggacataataaactgcttgctgcagtgctggacacagaataagtgctagttagtgcctttggttatgttgtgttgagattggaacatttcttaaaacgtttcagtctcatttacttattaattacatttagagtctactctttcctcaaggccgtataaacatgcaagttttaaaaatatgaaatgctaacatcttaaggttgcaactaggttaagtcctgttgatcttcatgaaattgagaactgaccatggcagccctaccaggaaattatgacagagaaaaaaattccattcctcttggaggacagaaagtaataaatatagtgtattagttgtgtgtgtaggtatataaagagaggtcacacacacacacgtttattcttataatatattaataatagatctaaattactgacctgctttcttccctccaaaattcataaaaaaatgaaaatagaaatgaaatcagcattctttatagctcagctgatatatattattacccaatctcaggaataggaatgattcttagacagtaaataaaacttacacttatttttaaaaattcagcctcttagccaggcacggtagctcactcctgtaatcccagcactttgggaggccatggtgggtggatcacttg

SEQ ID NO: 143339 - DNA, 428 bp, Homo sapiens
tcctcagccaagactgccaatgagatcattgatggaaggattcagagggtaaagaagcacattctttatcctatgattactggagatctctttagcccactgggagccctcccagctggcattttctcataattcaatgttgattcaacagcttcataatggccatctacactgtgtctgtccctgtgctagggatccatggtgtgatgcggaacagggcagggcagggcaggctctgctttcatggcagtgatggatagtagaaaggatggacaaaatcaatcaaagttgctctgcagtttagctttgtgggatgaaaacagaagaggagctgagacaaattacaagagaaatcacctcctttagatcaggtattccatgagaacctctcagaagaggtgccattgaaaatgaggcattaaaaaaaa

SEQ ID NO: 143340 - DNA, 164 bp, Homo sapiens
gctgattggcattaaactcgagttaacactgcagacaaccagggatagtcgtatgtaacttctgagccagtagaacagaagtaacactgaagaaagttcagtgcaagaaaacgcagaacagaagtgaggttaaaaaatgagaaggaaataaaaagcatggtata

SEQ ID NO: 143341 - DNA, 434 bp, Homo sapiens
ccctcctcaccacctctgggtctgtggaaaaattgtcctccaagaaactggtccctggtgtcaaaaaggttggagaccactgatttaaagggtgaatagggaaagaattcctcctaagacaaatggtaaggagttttctagaaagtgggataggacatgttccagacaaagattatatcatgtgttgaagagtgacagcttgaaatcatatgcaatccctggggaatcagcagctcagtatggttagattgttgaatatgggggcaggaaggagaggtggaagaggaggtccaagtctgagcttagtatttttggcttaaaagtgggcatctcatccattaaactgcagtggtgttcaagcttggatccatgttagaagcacctgaggagcttttcaaaaatatggctgggccccatctcaggtcaattaaatc

SEQ ID NO: 143342 - DNA, 912 bp, Homo sapiens
catactcaagtggtctctcctcttcccatacacaccttacggattcttcacagggtgtgatgatgggaagcctagacacgcttatcagaagtttgtcctcttatcgggatacgtcagaaattagagagaccctggcaatcacagcttccacctcctcattttacaaatgagcaactaggctcagagtacagaagtggctttcccagggtcacacagccagcttgtgacagagtcaggattcaagtaccatctcctgacttctccattgcaccagacgtcgatagaacacagagaacctaaaagaagaaagaaaaaaaaatagagctttgggaatatattgggcttctggttttcaaggacaattttatgataagtagcaatgatgcctcaaaagctctggtagctagcttgaatgaacttatgtaataaacatttatcacagaacatgtgtcatcaaacacctgccagttctgagcgttggcaccaaagctgctttcattgtcaaagaaaagagggggaaaggaacttggctgaacaaagctggcagacgtttatactagaaaatttagagatgtcaggagcaagggagcaccagtggtagaagaacctgcctcccctggctccatcaaacgcacaggcccatgagaatcacccggcctgctctgagcagcacactcggaggccacagccgcgcacaggaaagtgagaggaagtggaaacgtgcgagcagagggctcaaagcgacgggctcaccaccggaaaaaaaaaataaaaataaacacgctcagaaatagtgtaactgatatgcaaagaagatcaaaacaagggttttaaaatatcttggctgctttagaggagatgggggtggtaattaaagcgaggttgcaaatgcgtgttaggggagtggggcgg

SEQ ID NO: 143343 - DNA, 732 bp, Homo sapiens
gagaaggtttatcccacaaatctcaggcatcacttcttgaacatggagcacctcaatcattcctgtgtctccaacttgttgatttcagaagctgatcctaagctcatcttcaattgtaaatgattttgctaattgttagaaaagcacattgttagaatagctaattgttaaaacagttggttagaatccatgggagcttcagcaattttgagttcaatcccaagagggaagaggattttcttaaggtcaatgtcagagtttggactaaatccccggtctctttcatgcccaagaaagggccctttttcccttttctgactagtagtcaggtttacttccttgggagatggaacaaatgaaacataactgaaatttcatcttgcctctgcagatgtcaggagcaagggagcaccagtggtagaagaacctgcctcccctggctccatcaaacgcacaggcccatgagaatcacccggcctgctctgagcagcacactcggaggccacagccgcgcacaggaaagtgagaggaagtggaaacgtgcgagcagagggctcaaagcgacgggctcaccaccggaaaaaaaaaataaaaataaacacgctcagaaatagtgtaactgatatgcaaagaagatcaaaacaagggttttaaaatatcttggctgctttagaggagatgggggtggtaattaaagcgaggttgcaaatgcgtgttaggggagtggggcgg

SEQ ID NO: 143344 - DNA, 464 bp, Homo sapiens
cctcaagtctgtgaagtacttactatttaaatgatgcccagagcctctgaatcccctagaagtacagaggagggggagatcattaatggtgtggagaagttggaggaggtgagacgatgccagatgtcaggagcaagggagcaccagtggtagaagaacctgcctcccctggctccatcaaacgcacaggcccatgagaatcacccggcctgctctgagcagcacactcggaggccacagccgcgcacaggaaagtgagaggaagtggaaacgtgcgagcagagggctcaaagcgacgggctcaccaccggaaaaaaaaaataaaaataaacacgctcagaaatagtgtaactgatatgcaaagaagatcaaaacaagggttttaaaatatcttggctgctttagaggagatgggggtggtaattaaagcgaggttgcaaatgcgtgttaggggagtggggcgg

SEQ ID NO: 143345 - DNA, 967 bp, Homo sapiens
catactcaagtggtctctcctcttcccatacacaccttacggattcttcacagggtgtgatgatgggaagcctagacacgcttatcagaagtttgtcctcttatcgggatacgtcagaaattagagagaccctggcaatcacagcttccacctcctcattttacaaatgagcaactaggctcagagtacagaagtggctttcccagggtcacacagccagcttgtgacagagtcaggattcaagtaccatctcctgacttctccattgcaccagacgtcgatagaacacagagaacctaaaagaagaaagaaaaaaaaatagagctttgggaatatattgggcttctggttttcaaggacaattttatgataagtagcaatgatgcctcaaaagctctggtagctagcttgaatgaacttatgtaataaacatttatcacagaacatgtgtcatcaaacacctgccagttctgagcgttggcaccaaagctgctttcattgtcaaagaaaagagggggaaaggaacttggctgaacaaagctggcagacgtttatactagaaaatttagaggtaatttctagaggaacagaaacacattttcaaagtcttataaaatttatttaaatgtgattgggtgaatttagcagttaaagaagtgaagaacactgaggtccaattggtgcctgaggcttcttccaggacccagtcttttctgtctgccttgggcacagatttctagatgcctgaagatggacaggcccagaggttgcccagagtgatgtctgagattactgatctctatctaggcttccatagaaacacatcccaaaacgttcttggttcttattggaatctcatctcatttgcagaacatggccagagtcaaagagacatggaccatgtgtcactcagactgagtccatccatacaaagagaattctctagcctgtattggaagtcaatcta

SEQ ID NO: 143346 - DNA, 436 bp, Homo sapiens
atagggcctgggaaatgttcttgtctgtttcaagtttatcttgtattttggggccctggtctcctcagtcttccagcccaacaggtgtgagcgtccagggccgccacccggaagccagctgcctcttcatggggaaatctttgaaattcaaggcttggccatctggatatgcaaatgttccagatttgctgagcccaccaagtggctgagccccccatgcctgggccagcctgtatgtgtgtgtgcagaaggggactgcacatgtgttcaggagcttgagagtgagaattgtgagcatgtacactccttagtgtttatgcatcagggtgtgatgcataaacacgaaggctctgtagcctttgaagaacaggatcagatctgggtttgaatcacaagaccatgggttttcagttgggcaataaacttatctgtcttt

SEQ ID NO: 143347 - DNA, 451 bp, Homo sapiens
aatggtactgtgtctttatttcatgtttttatttgattattgctagcatgtagaaatagaatggtactgtgtatttcttgttttcataggattattggtagcatgcagaaataggatggtactgtctttatttcttgttttcataggattattgcagaaataggataggtgtttgtgtgttgatcttggattctgtgtccttgctgaactctattaaataaagtttcttggaatttttgatagattccttgtgattttcgacatggacacttacaccatcttcagagagagacagttttattccatttcttcctttctgccctgtatgccattccatctgcagccctcagcacgtcactcttgatcatgtcagccttgagttcttggtagttggcctttatcgtgttgaggatgtttctccacactcctgttttcctaggaatttttatcg

SEQ ID NO: 143348 - DNA, 455 bp, Homo sapiens
atgacataaatagtatcacaaaggtttagctaaattcatggataagtccatagtgggttattcagagaaactaggctatctggaggaaaataactctaattctttaagttagcaacaaggacaattgtgtcttatataacagtttcctgtccctgtgatcagaaaatgaatgctgaactgaaaggaccataagcctgaaccagaggggcttttcttataatcacatgcttgtaagaaagtagggactaactatagtgctgatattaagcctgctggggccagaaggtgcacaaattcttgaacctgcagtcacatatgtcacattacctaagctgtattatgccactccttctctgcagcaactattatcatctccatattacagatgagagaagtaaggatcagggaagttcagagacgaaaagtaaattaacaaaggtcacacagctggtaaa

SEQ ID NO: 143349 - DNA, 239 bp, Homo sapiens
ccacagataacttagaatcagcaaagcaaacttacattttgaccctgtaagaagcaaacacccctttcccctttctgcccattggcacatctctggaggacagaatgtcttctttttatacttcctccattaatgtggaaactggttggagagtccctactgtggaggcaagagggacttttctttctcattcagaaaaaactacacaggcttcctaaatataaaggagaagaaacagg

SEQ ID NO: 143350 - DNA, 478 bp, Homo sapiens
  misc_feature (21)..(22): n is a, c, g, or t
tacatggtggtatatttaaanngccaaatcgttgagagaattcattttgtctaggaaacattcgtattctttttctcgcttggatgtgtacattcagactatgatgctcaggatttgaaaaaaaatgcatacttgaattgtgaatttttttttgagatttaactaagttaatttttgtaattagaggaaattaataaaatattttggcctgaaaaatatacatggtggcatcgataaacaccataaattctttagtatttaagctctgcctcagtttctttccaggtccataaggcggtcttacaaaaagcataattgctctaatgtgccatcctaaggacttttaactttaccctgtgaatgatggaaaacaaagtaatgatataatcacatcagattcaaaaaataattattgagaccactgctaatctgagtataaattatttaatacttatgtatttatagttttaaattacaa

SEQ ID NO: 143351 - DNA, 196 bp, Homo sapiens
ttaataatgtaaactggcttttcatctgggttctggctactgcatatctaataagcagctggctagacagactagatgtcaaaacacattactacacatgttatgagtcaaaacatgtaggggtagaggtcctgaaagctatctgcaaagtaaggtaaatgttaaaatctgaggttaaagtaaggtctccaaatct

SEQ ID NO: 143352 - DNA, 217 bp, Homo sapiens
ttcgtatttatgtggatgctgtaattaatcatatgtgtggtaacgctgtgagtgcaggaacaagcagtacctgtggaagttacttcaaccctggaagtagggactttccagcagtcccatattctggatgggatttcaatgatggtaaatgtaaaactggaagtggagatatcgagaactacaatgatgctactcaggtaatttttttacgagagtg

SEQ ID NO: 143353 - DNA, 514 bp, Homo sapiens
gactgtggtttatttgtctcccagcttatgtgaaagtctgtcattcaaaagtcagggctctgaaaacagcatatgatgtgcttaaaaaaatgcagtcaaagaagatggatccacctgatgaggtatgctaccgcattcttatgcaactctgtggacaatatgatcagccagtgcttgcagttcgagtgctttttgaaatgcagaaagctggtattgaccccaatgccattacttatggttattataataaggctgttttggaaagtacctggccttcaagaagtcgtagtggctattttctttggacaaaagtaagaaatgttgttttaggagtaacacagttcaaaagagctttaaagaagcatgcacacttatcacaaacaactctctcaggtggccagtctgatcttggatataattcattatctaaagatgaagttagaagaggggatacatctactgaagacattcaagaagaaaaagataaaaaagggagtgattgtagttcctgtag

SEQ ID NO: 143354 - DNA, 630 bp, Homo sapiens
ccgagctatgcaccactgagtttgtgtcttagtatagacaggttcgccatgtcggtcaagctgatctcgaacgcctgcactcagttgatctacccacctaggcctcccaaaatgttggaattacaggcatgagccactgtgccctgccacaattattgtttaaaatgcattattttattctagatttatgtacatggtgacatctgtgtttcggtacaattttgaacttgtatttcaggtatgctaccgcattcttatgcaactctgtggacaatatgatcagccagtgcttgcagttcgagtgctttttgaaatgcagaaagctggtattgaccccaatgccattacttatggttattataataaggctgttttggaaagtacctggccttcaagaagtcgtagtggctattttctttggacaaaagtaagaaatgttgttttaggagtaacacagttcaaaagagctttaaagaagcatgcacacttatcacaaacaactctctcaggtggccagtctgatcttggatataattcattatctaaagatgaagttagaagaggggatacatctactgaagacattcaagaagaaaaagataaaaaagggagtgattgtagttcctgtag

SEQ ID NO: 143355 - DNA, 329 bp, Homo sapiens
atgaatttatctgcctgcctcctggtatgcccacatggttcaggtgggagggaggtaaccatgggaacagaaggggaagggaaatgatgttgtccccataatgccccatgcggtggcaccaggagcttttcatgggctttattccatttgtttatcacattggggcaatattctcacataatgctgcagctgaggaaactgaggatcagagaggttaagtcaactcacccagtgtcccacagctaataagcagagctaggatatgaacctaagtctgactccaaagcccatgttctttctgctacgccacgatgaccattgattgtgac

SEQ ID NO: 143356 - DNA, 1607 bp, Homo sapiens
taatctgattggttctgacgattattcaaacccagatagtccccgcccccttgccacggaggctaacgattggtcagtgtcttaccagacccgccctccacgccccagcctagcaggttcggtgggtcgcccaggtcgttaactcccagacccgttagaaccggtcaggagaggaatgtactgctcgatcctgattggcggcgggaagagggtttgaaaaatggcgggcctcacgctgactggttggggctgtaaacggtgggagtggttggctcgggaaggaaagccccgccagatttaaaaatacttagtcgggagactgggggttggtctcctggcttggcgacggcggcggctcggtttgctggcgctaaggtaacagaagaggtctgccttgcccttcctccgaccaccatttaggtcctgtctgtcccccgcgtcggctcagccctgcagcgttggctcctgggagctgtagtcgctctgctctgttgccctgcagggtctcccgtgcgccgcccagagaataataaatgaggagagcctggagtttgccctgcaaaaccgattgcccagctcctcccgctgtcgctgaggttgtcgtagaactcggggaagtcaaggcagggaacctcggaaagggcgcggggggccgggagggaaccgttcccgcgtcccgtagggtgttaaaaaacgttctgaaagtaagatgcttcccgccgagggagtttccctcagaaggctcctccttccttccctctttgtctcgggtgacaaatactgggaggtaaacaagggcaccctccgggtcccgaaggggcggaggcggcgccttctcccccggccccgccccctcctaccgggtccggaattccaagccccgagtgtctcggcccccacgccgcaccctgcagcggtgcgccgggagctcggagccggcggctgcctgtctttggctggcctggccttcgcctgggcattcactgtctcgtcctactagtgtgatagtttttaaaaattgagaatcgcataaaagcaatgcatgctccctatcccactcccaattgcgtatattctccaaacggcatacagccacgttacaggctcctccaagcttgggttaagaacctccgtgttagtatagggagagcgcgccaaagctaccttaccttactgcttaccagcgtcacaagctgcttttcccaaggtagaggactttaattgacatcctggtgtgctatttctgtggtatttagttttgagggattccccccattattggaatataggttgcgtgactgtttcaagaaatttaaatattttgtcttaatttttcagtaagttcgttggcacatgttaagactatgctctttggtttgtatatggttgtcataatagtatttgaaaaccagcagttgtttatctaggtttactaataaaaaagatcttaaaaaaaatgtattttcctaggaaatggataatggttgtccaacattgtgaatgtacttaatgccagtgaattgtacacttaggaatgggtaaaatggtaacttttatgttatgtatgttttaccacaaaaaaataaagtggcagtttttcaaacaga

SEQ ID NO: 143357 - DNA, 1553 bp, Homo sapiens
taatctgattggttctgacgattattcaaacccagatagtccccgcccccttgccacggaggctaacgattggtcagtgtcttaccagacccgccctccacgccccagcctagcaggttcggtgggtcgcccaggtcgttaactcccagacccgttagaaccggtcaggagaggaatgtactgctcgatcctgattggcggcgggaagagggtttgaaaaatggcgggcctcacgctgactggttggggctgtaaacggtgggagtggttggctcgggaaggaaagccccgccagatttaaaaatacttagtcgggagactgggggttggtctcctggcttggcgacggcggcggctcggtttgctggcgctaaggtaacagaagaggtctgccttgcccttcctccgaccaccatttaggtcctgtctgtcccccgcgtcggctcagccctgcagcgttggctcctgggagctgtagtcgctctgctctgttgccctgcagggtctcccgtgcgccgcccagagaataataaatgaggagagcctggagtttgccctgcaaaaccgattgcccagctcctcccgctgtcgctgaggttgtcgtagaactcggggaagtcaaggcagggaacctcggaaagggcgcggggggccgggagggaaccgttcccgcgtcccgtagggtgttaacctccttccttccctctttgtctcgggtgacaaatactgggaggtaaacaagggcaccctccgggtcccgaaggggcggaggcggcgccttctcccccggccccgccccctcctaccgggtccggaattccaagccccgagtgtctcggcccccacgccgcaccctgcagcggtgcgccgggagctcggagccggcggctgcctgtctttggctggcctggccttcgcctgggcattcactgtctcgtcctactagtgtgatagtttttaaaaattgagaatcgcataaaagcaatgcatgctccctatcccactcccaattgcgtatattctccaaacggcatacagccacgttacaggctcctccaagcttgggttaagaacctccgtgttagtatagggagagcgcgccaaagctaccttaccttactgcttaccagcgtcacaagctgcttttcccaaggtagaggactttaattgacatcctggtgtgctatttctgtggtatttagttttgagggattccccccattattggaatataggttgcgtgactgtttcaagaaatttaaatattttgtcttaatttttcagtaagttcgttggcacatgttaagactatgctctttggtttgtatatggttgtcataatagtatttgaaaaccagcagttgtttatctaggtttactaataaaaaagatcttaaaaaaaatgtattttcctaggaaatggataatggttgtccaacattgtgaatgtacttaatgccagtgaattgtacacttaggaatgggtaaaatggtaacttttatgttatgtatgttttaccacaaaaaaataaagtggcagtttttcaaacaga

SEQ ID NO: 143358 - DNA, 889 bp, Homo sapiens
actgaatgttacttttaaaaattagtatattaggtgctataaatagcacttcaaagcaaagcttagaggaaacgttttcaatgttgaaagatatatcctgtgttctagaaaaaaatgactaccatgagaatccattgtaacttcttatgtaaacacctgccctgtgtaacacattgtgcctgtgccttgatgatacaaaagcaaataaggaattaggaacttgccctccagtttaaatatgaacaaataattataatacaaattacactactattgaacgcataaagattattaacagtgtcatggaaagagctgttgactttgttgtggggctggcagagaagtctaccataagaagaaaatttacatttaaatattaaatatttaaaaatattgtttctagcatatatcatagccagagtaaagactgagtatatttaaaattgattaaatcacctcatctgttttttttcctccccacgtagattttgtgtttttttattaacttttaattttgataatagttttaaatttccagaaaaattgcaagagaaaaaccaggaactcctatatatcttttacctaattcaccagttgtttacattttgtcctatttgcctcatttttgtcctgctccatgcacacgtgatgttttttccctggaccatttgaaaatgtttgagatatagtgcccatttgcctctaaatatgtacatctgctaagcaaaaggatactatcttataaaactacagaactaatcaaactcaggaaatttaacacttatttgtacaatgctcttatctaatacacagtccatattcacattttgtccgttgtcccaacagtatactttttttccccagtccaggatcatggattataatatat

SEQ ID NO: 143359 - DNA, 328 bp, Homo sapiens
cgtctttctcctcagtagtatgaatatttttcatctgaggaggtgcacttaaaatttccttcttgaaaagtcatttcaatattttagacgtttagaaacatttatatgtatgtcagaatcctttctccgaagtgtttctgctaatcctggcttctttgtttcccctggccttgactttatgacattactttcttggagagtgaagtttttagtgtttgaaatctccagtttgagatagaggtcaggaatcatgctgaacccagatgttactgaaggaacaaagtctgagcagttttgggactaagcctactttgtacaactgattatt

SEQ ID NO: 143360 - DNA, 231 bp, Homo sapiens
atgtgcttgttgggtaaagacagagtagctcactaagcttagaaaagaaagataagagaaaggctattcattgtctagtacctttgcatttctgattagcctgcatataagtggatggcattttttttgtaggcaccgagactggaactttccatattatttttcaatcttattacctctactagaaagacagtggataagggagattacttaaaccattttttgtgatca

SEQ ID NO: 143361 - DNA, 198 bp, Homo sapiens
cgagactaaactcccaagtccatgtgtttctcactttactgctctgcctagaacatgaaaactggaactgggtgggaaaaaccttagaagtcatctaggccatgcattctttttttttttttttttttctgagacagggtctcactctgtcacccaggctggagtgcagtggtgtgatcacagtaggccacttatact

SEQ ID NO: 143362 - DNA, 510 bp, Homo sapiens
gattagcagcctggattcaccccatgtcagtgagtgggaacagataagcatagagactcaagatggaggtgaaggaaggggatggacccaaagggcacaggtgtgtgatctcaccaacccagcagggcagagggaagacagaatccaagatttggcagtggggaggtgagccactggtttgtgggggcctagtctgaaggtagggagggtttggggtggaggaaccgtctggaatctcccctccagccctccctcctcttcttttttctataaaagaattttaggatgggaataactaggccaagaaaacttctgggtaagccagcccaaacagagtagggaaacaaggagatctaagggtggaaaagccagaattttgagacaggtgttcggagggtagagaacaagaggaagggaagtgtttacgagaagaagaacttgggaattccaggtataaatgcctcctccttcagagagcagattttgagaaccaaatccaattcagctact

SEQ ID NO: 143363 - DNA, 221 bp, Homo sapiens
tgggtctagagttattctcacaatcacagaactaagacctcaagttaaagtgcttgaacatggcagggagcccaagaagggtggaataccaaaactgctatttcttgtccaatctaatgactgagaatagtggtatcattaacagaatggcaaggatttactttaacttacttgcccccgccacaccccagaaagtgctagtctatctaacaagtattatt

SEQ ID NO: 143364 - DNA, 250 bp, Homo sapiens
aaaaattgaaagtatagtttaaataaaccttttcccctgaactgtttgagaataagttgccagcatgcgggtccatcaccctgaaatagtttgtatttcctacaaagacacttatctataaaaccataatacaatcataaaagttaggcagtaaacactgatacattactatcatctaattcacagagccattcaagttgacagttgtttcaataatgtcctttatagcgaaaggattcaatccaggatt

SEQ ID NO: 143365 - DNA, 333 bp, Homo sapiens
ggatccctgcccaggatgtgctgttctctgtggttgaggaggaacggggccgagactgtgggaagatccagagtctaatgctcacggcacccggggcagcccctggtgaggtctgtgccaagctggagctcttcctgcggctgggcctgggcaagcaagccaaggcctgcacctctgagctgcccccggatttgctgcccgagccctcagccgggctgccctccagcctacaccgggacggtcctggagcagacgctgagccctctgtgggatgaactcctggtatttgagcagttgatcgtggatgggaggagggagcacctgcaggaggag

SEQ ID NO: 143366 - DNA, 389 bp, Homo sapiens
agttaggacggcgctgagtgcccaatcccttcaagcctgctcctctcctagttctctctgattcagtcaatggcagttccctcttccgatagctccagtgaaggcctcgggagccctcctgggctcttctgtcacacccttcacgtttgcttcatcagcacagtcttgggctttaccttgatgtcaaactgagaatcccactactcctctccacttcactgccccactccatccaagctgccatcctttctccatggattggttcaatagcctcaaaatggatctccttactctgcccccaaccttcccattcctcttgagtttattctcaacagggtaccgagagcgatcctgctgaagtgtgtatcagatcaagtcagtcctctgtt

SEQ ID NO: 143367 - DNA, 362 bp, Homo sapiens
cagtagcctcagactaacaatactaacactactactatcagtatatacaccaaaaacaagcatagttttgcatgtgctctcccctttcttccacactgtatctgtacagagcttgtaatcattacataccacttctctttcgactttcatttattcttaattgttgtaataaactatgtttaatattcatccccagtccttatgttgatgccttgttctctctaatcagtttgattttttaaacagattgtttaggaagggcttataggaataatatctacatttttgcaagtaacagtttctggcctttataattgaaaatcggtttgacttgacataaaatctttgtcacattttctttc

SEQ ID NO: 143368 - DNA, 722 bp, Homo sapiens
tagctctcacacgttttcctagaaaggggggtaagatggtcccaggcagcttctctcttctctaattccagtaaaatgagagatgatgacgtccctctccaatcaggctgtgatgacattttagtgcaaatgttacattgttttttttttttctcttaatactggccggccccagaatcgctgtgatgaaatgggttcatgccatgtagatttgacagcatgaacactaagtcatcatctgcaactgagtttttgactcatgacttttgatttcggaattaggctgttttcactttttattgacatgtaacatgcgtatagacaagtgtacatacagatcctgagtgtgtggccaatggatatccttcctcagtgcccagacccaggagcaggaccttcccagtacccacatcccctctgttagccagtatcctcccttctgagggtaaagttgtcctggcttctaaccctgtagatgagttttgtctctgttttcacttgatatagcatacagcatctccttttatgtctgacctctgttgctcaacactctgcttgtgagctccttccctgttgtgtgtttgggtgcccctggctctcgtgcagtggggcagtgccatgcatgatgagctgcagctgaattgcttgttctgcagttgacaggcctttgggcaggttcctgttgctcgctgctgtgagtgcagccgctgtgagtgcggccg

SEQ ID NO: 143369 - DNA, 479 bp, Homo sapiens
ttttcttctaagagttttatagcattatttctatggttttccattcattttgagctaaattttgtatatgatgtgaggtggtccaccttcatccctttacatatagataaccagttttccctgcaccagttgttgaagacactgtcctttctccactgaatcatcttggcacctgtgtaaaaaggaaatatttgaccatatgtatgagtttgtttcttccctctctgttctgttctatcagtctgtgtgttgtttttatccagtaccacactggcctggttgctgttgctttatagtaagttttgaaaatgggaggtttgttgggcgtggtggcgggcgcttgtagtcccagctactccggaggctgaggcagaagaatggcgtgaacccgggaggcggagcttgcagtgagccgggatcgcgccactgcactacagtctaggcgacagagcgagactccgtctcaaaaaaaaaaaaaa

SEQ ID NO: 143370 - DNA, 538 bp, Homo sapiens
gcggccgctgtgaatacccttgcacgtgttgttggtgcacaagtgtgtcactgccaaatccagcatcttgacttagccctctcttttcttctaagagttttatagcattatttctatggttttccattcattttgagctaaattttgtatatgatgtgaggtggtccaccttcatccctttacatatagataaccagttttccctgcaccagttgttgaagacactgtcctttctccactgaatcatcttggcacctgtgtaaaaaggaaatatttgaccatatgtatgagtttgtttcttccctctctgttctgttctatcagtctgtgtgttgtttttatccagtaccacactggcctggttgctgttgctttatagtaagttttgaaaatgggaggtttgttgggcacggtggctcacacctgtaatcccagcactttgggaggccaaggtggatggatcacctgaggtcaggagtttgagaccagcctggccaacatggtgaaaccccatctctactaaaaatacaaaaattag

SEQ ID NO: 143371 - DNA, 330 bp, Homo sapiens
aattgagctcatatgaataatatgtgtataggtgaagaaatgtgtatatgcatgaatggaggttagttgtgtgtgtgtttattggggggtgtagaaaaattgcaggcatttgaatatgtgcatgcagaatgtaccttgagtgttacatgagtgcttgagtgcatttgaatgatttgatgtatgcatgggcatgtttgaagaattttgctatgtatgtgcatggggtgttggtgcatgtgttttagcgagtagggattatatgtgagcggtgtgtgtatggatgagaatgtaataactacagtattaattttgtttataagtttggggtta

SEQ ID NO: 143372 - DNA, 355 bp, Homo sapiens
gccagcagccggcagccagcagcaccgtacgtgggtcccagctcttccacttaaccaaggtcagggacattgagccaaacattttgcctcaccgagtctcaggttccttatctgtcaaatgggaatatgaacctcaggctgacccaccccacaggtgtgttacccagagataacgaaggtaaatgtatccacataagcattaaaaagctataggaatgtatttactacaactgcagctgctgttaactacaaggcaaatacaagtcttcactggtacgtgtcagacacgtgcagagaactttacgcctggatctcatctaactgacacagaaaccctgtaaggtaggtacagcac

SEQ ID NO: 143373 - DNA, 1045 bp, Homo sapiens
  misc_feature (1045)..(1045): n is a, c, g, or t
taaaatggtggtaaatatataggctttaagtttagatagttctaaatattattaaaattaccaaattattgtttttaaaaagtattagtttcctaggacaaatagagatttttagataaggctggatttgtaatactttaagcaacaggtcacagtgcttaagtatttaatgccgatttggcaagcagctgatgttttatataatgctgtcgggtattttatatttgcgtgtattttctgatgcactggatccagcacttcatgtcacgtcatatatctgtttataatgtatacaaatgtattttcatatatatttgatgtttgatggctttgaaactttaatcttgaaataggttttaaatttttattaaaactatttaaataaaaaaaaaaaaaaaaaaaaaaaaaaaaaaaaaaaaaaaaaaaaaaaaagaaaaaagaatagcagaaaagcgcaggaggcagtcaaaaaataaaaaaacagagaggagggggggacagcactaataaaaaccacccctgaggaggctgcacaagtcgtcccctccatcacagtcttatttaacactgggccgcccccttgagtgactcaaataacaggctcagtcagccggcccacatgtaatcctcagacttcggtggggcgaaaaaccacctcattcagtatgtctgcgaaaagaagcccccactcgggggaggcaaatcaagcgcgccacgacgcactacaattcagttatctcccgggcgatgtagggactcccccccctatcgtcttcgtcgaggactacccacacagctttagtagatagttgtcccaccctatcacggtgtgtcaaagcaccaatcctgggggaacaacactgatctagtacactaaggtagtagttatcaatcgtactatgaacgatcatgagtcgcgatatcgtagctacgcaacgcgctcgacgcgtcgaaccagcacgcatcacttacgagcccgcgcagcaagattacctgacactagcaattcatgactgagtcgtgacaatgcaacacaacacttttn

SEQ ID NO: 143374 - DNA, 1356 bp, Homo sapiens
tgcagaattagcacattcacttactgccatttcctgcctatgaggagttaaatggtatttttttcttcaagaaatattccacagtagttgtttaacatgttagagacagattgaagaaagagttaaaatagtattcataaatgaatttaatctgtatcatagtctgaaagattgtttcaaggccaaggcccaatactcttctatattaaattatctcaaggtatgtttattttcaatccatgcttaagtttagctacagagtcagggataaagtaggataagtgaaggtatttaattattgttttcttttccagatcctcaacagaataattgctgacaaactctcttgcccagaaaatgtctactggaattatggagtacaaaaaaactacaaaagcaatgaaaaaaagaaggatgttttatttacatcctatttcaaaaccattgctttcttgctattgtatgtctctgcaggcccaatatcgcgcatcttcataagaagtttagaattgttccttatgtttccttctaacaaacactggtatattcacatgaaagtgtatattttattcacttccaaaacagttagctcataattcagaacattgaggtttgcaaaatgactgaaggaaactttacctaaacaatagttgccagttctgctgagaattatcacgggcccacaacggctgtgtgtttttccatacagatattctaatttttttattatgcagctaatttttttttagactcacgaataaaatagcaagtcagtctgtgcataagcatatgtttaaatctaccaggagaaatgtctggaatctttttggttattaaaattaaaattcaggataatgaaaggcatatgcaacttattatattctttatataacttatttcatctaatcctccaaatagctatataacatatttatccccaccttacatagatgttaaccaaagtctgtaaggttcgttcatttgtccacagttacccagaaaattgtttgtggagctcagcacaaggctgactgccagactccaaagtctatgttccttctactaccatacattgcctttgtttttcttttataaaagttgaaaaaatatcattctgcttttcctacttttccgaaaactatttatgatgataaatccagttttttgtgttaagtttcaagaagttggtgaaatggagacagccaatccaacccaggagacagtgtttgaaaacagggcttcagctacttgcatgatgtggattggggaaatggtctgtcctcctagccatgggatgtccctgctgtgttcaggaatctttccatctcttggattttaaaggaaagtatcctttct

SEQ ID NO: 143375 - DNA, 1336 bp, Homo sapiens
tgcagaattagcacattcacttactgccatttcctgcctatgaggagttaaatggtatttttttcttcaagaaatattccacagtagttgtttaacatgttagagacagattgaagaaagagttaaaatagtattcataaatgaatttaatctgtatcatagtctgaaagattgtttcaaggccaaggcccaatactcttctatattaaattatctcaaggtatgtttattttcaatccatgcttaagtttagctacagagtcagggataaagtaggataagtgaaggtatttaattattgttttcttttccagatcctcaacagaataattgctgacaaactctcttgcccagaaaatgtctactggaattatggagtacaaaaaaactacaaaagcaatgaaaaaaagaaggatgttttatttacatcctatttcaaaaccattgctttcttgctattgtatgtctctgcaggcccaatatcgcgcatcttcataagaagtttagaattgttccttatgtttccttctaacaaacactggtatattcacatgaaagtgtatattttattcacttccaaaacagttagctcataattcagaacattgaggtttgcaaaatgactgaaggaaactttacctaaacaatagttgccagttctgctgagaattatcacgggcccacaacggctgtgtgtttttccatacagatattctaatttttttattatgcagctaatttttttttagactcacgaataaaatagcaagtcagtctgtgcataagcatatgtttaaatctaccaggagaaatgtctggaatctttttggttattaaaattaaaattcaggataatgaaaggcatatgcaacttattatattctttatataacttatttcatctaatcctccaaatagctatataacatatttatccccaccttacatagatgttaaccaaagtctgtaaggttcgttcatttgtccacagttacccagaaaattgtttgtggagctcagcacaaggctgactgccagactccaaagtctatgttccttctactaccatacattgcctttgtttttcttttataaaagttgaaaaaatatcattctgcttttcctacttttccgaaaactatttatgatgataaatccagttttttgtaagtagctctttagcatttcaatgcatgtagcatcaggcatgtgcatttgtgcatgcctgtgaatgcctctgcatgtgtgtacatgcatacgtgtgtgggggtgcatgcctgtgcatgcctctgcgtgtgtgtgtgagtacatgcacatgggtgtgggggtgcatgcc

SEQ ID NO: 143376 - DNA, 189 bp, Homo sapiens
tctgtttttgacacctttactgctaaacgtcaataatctttgagattttaattttatcttctgtgtgtccagtcttacacagacaaaacaggcagttatagggagcctagagtgcctaacaattctgcctgcctttcttcccatcacagttctgaaatacacaaagcgacaaagttttaagcaaaaatt

SEQ ID NO: 143377 - DNA, 906 bp, Homo sapiens
gcatgaaaccttccagaagctgccctggcctgtagccttcaccacagaacttgggtctggggtagacacagggtctggggcacatagtttcagttaaacaaagcagttctctccttcgtgtaagcagaaattgagatctctttccagtgacctcagagggaagggcggaggagattgggtgctgcccaacctgtgccccacttgctgcctgaccacagacatttgtagggcctccctggacaggaacaagcatcctccagcagtttctgatgaggaatcctttcattttccagcagcttgcagaggaggccaggggaaaatatggtgaccacagaaggcctggatcatgagggttgggagtaaagctctcagatgaagttgtcaaagatggcaccatggccttcgttgttggagatgggatatgcctcagtgtgttactagatcctgattgttatttgggaactccgggatgtgatcattcctgaggtttcttccagctctcaaatcccaagaaagcatttgtgacagattaaagcaggacagcaaaaacatgccgcaccctggtcctacatcactaaaataaatcccaaagtactgagctgggatctggcctcagaaggcttctcaaagccctgtgctgtgccgctgccatgaattgtagctgatttatgagataaaacctaattaccagcgctggtttagaacatgcttttaacacattgattttcttagccacttgatgaggcttttagaataacccactctggctttctccttctaagcttctgagtagtccacgaatgcctgtaagaaacagaaacccccaaaacttcttggggctgtgcagaagtttgaagtttgcactcttcccgctgtgggggtgttgacttagaattttttaagaag

SEQ ID NO: 143378 - DNA, 316 bp, Homo sapiens
tcaagattgttccaaaaagtgcattcaggcatacatttcattaggaatttattaattactacggattcaaaaaattcagctatgtaactgtagcttcatattataagatctcaatttgcaaagaaatgaatctatcagagtaaacaaacttatttcatgtcttcatttttaggtatctggcaatcaaaaaccaatctagggccgagcgtggtggctcgtgcctgtaatcgcagcattttgggaggcagagctgaaggactgcttgatcccaggatgtcaaggctgtagtgagctgtgattgtgccactacatccta

SEQ ID NO: 143379 - DNA, 659 bp, Homo sapiens
gcgtggtcatggcatcctagtcagagctagcatgtcttggggcgaggcactggccttctctgagcctgttgccttctttgcaaaacaggaacaatggtaatcacctgttctgctacagcgcgtgcttttgtgatacaatagctcatgtattgagaaactagaagactgggttttgaggactagtgaactggatgtcacagttcacactgctttctcccagaaagcagtggccccccaaatagtggcaatgaaatgcacaattcacaaatacagccgagtgtggccaagtctcctcgtaagacgttcccagtgcccatcaactccaccttcctcttgttggttcacattagccagtgtttttaaagctaaataaggctgggcgtggtggctcatgcctgtaatcccagcacttggggaggccaagatgggcagatcatgaggtcaggagtttgagaccagcctggccaatatagtgaaaccctgtctctactaaaaatacaaaaattagccaggtgtggtggtacgcacctgtagtctcagctacttgggaggctgaggcagagaattgcttgaacttgggaggcggaggttgcagtgagctgagatcatgccactgcactccggcagtgctgtgctctgggtgacagagcgagactccg

SEQ ID NO: 143380 - DNA, 208 bp, Homo sapiens
ccttcaggtctttgctcacatatcacctgaccaccctgagtgagactgcaacacgcaccctgcctggctccagccccacctggcagcatttgcccacagtgccgacacctcacacatgccaggccagccacttagagatgctgttctctccccattagagcctatgttctcaaagggcaggattttgtctgtttattgctgaatctcc

SEQ ID NO: 143381 - DNA, 274 bp, Homo sapiens
ttctgtgcatatcctaggtccctcctctcccccggtcctcactcaaatcagtcacttatctgatgctgtccccccagctccacggtggtgcacactgctaacccccaactgtgcaagggggctttctccatcgcgccccaagcccctctgtccatgccccgagccattacctccagagaactcatgcacccgaccctctctgcggcagcccttgaacaatggcccaggagagttgccttcctatctggggggatggctcagatacatatgctct

SEQ ID NO: 143382 - DNA, 554 bp, Homo sapiens
aagggaaaggtgtttcataaaggtgtaaagggagaagtattagttcaggagctagaaattgcacagatatttagatcctaagttaaggaatataaactctgttcactgaatttgactgactaaaagaaaaaaaaagaagtatgaactcagcaactgcctactgtgtaataggacctttaactaaatcacatacaaattacatatttatgcttagtgaattgaaggggccagaaataaactttgcttgaagtggatgaattttttttataaacaaattccatggctgtttcaagtgcctaacaaatttgtattttgctccaagcagagtacttgccatgtggtagggtctaaaggctccggcacacactaggtagttgttgagtgtttgttgtgtgattgaatgcatgaaatgcagcttcttcttatgttacttagacaccatgtctcagtcatgctgtcctgcaatcctgcctagccttggtggtctagtgttaaaatagggaattaatctcttctgatccttagaaaagctctggtgattattgaaaaaaaaa

SEQ ID NO: 143383 - DNA, 489 bp, Homo sapiens
tatccaggtgggtcgaatataatcacaattgtcttcagaagagggaaacaagaggagtcaaacagagggcaaggcaatggtggaagcagagagacagagatagagaaggggtggagagggagattttaaaatgccacgcagctggctttgaaggtggaagaagggactgtgagccaaaagatgtttgtggccttgagaagttagaaaaggcataaaaacagcctagcgcagtggctcatgcctgtaatcccaacactttgggaggccgaggtgggtggatcacgaggtcaagagattgagaccagcctggccaacatggtgaaaccctgtctctactaaaaatacaaaaattagctgggcgtggtggcgtgtgcctgtagtcccagctactgaggcaggagaattgtttgaacctgggaggtggaggttgcagtgagccaagattgcgccactgcactccagcctggtgacagagcgagactccatctc

SEQ ID NO: 143384 - DNA, 853 bp, Homo sapiens
ttttttttttgagacagagtcttactctgttgcccaagctggagtacaatggcactatctcggctcactgcaaactccgcctctagggttcaagcgattctcctgtctcagcctcctgaaaggctgcgattacaggtgcccgccaccacaccccgctaatatttagtagagacagggtttcaccatgttggtcaggctggttttgaactcctgacctcaaggtgatccgcccaccttggcctcccaaagtgctgggattacaaggtgtgagccactgctcctggccttatggtgaagtcttgtatgtagaagatcaataaatgttcatcttcattgcttatattcatccggttctctgtatacaaaatgatcttctttttgcaggcatttttttgcttctcaagttttaacttcttacacattttaagactacttcaagattaatttgagtgtaaatgagcagtacttgttaggtaagtgtcttccattcaccgtcaagactgaatcattcttttcattatcaccacatattgcttattgtggaatttggaaacatccatttctcttcttcaggaagatcgtggagtttctccagtcaaggtcccactagagtgagttagggttgcagtaacctggagtgagcaatccctgattccaggtggtgatgtgggttgagtttcacattttactttatttgaagaatatgtgccaaagactcactaaaaataagaacaaactaggctttgttgcagctgagtggtctggcaaatttctgtatagaggaatcattgggcatgaaggatttgatactgggatagaatccaattgcccttggaatggaagtagaatatcc

SEQ ID NO: 143385 - DNA, 920 bp, Homo sapiens
  misc_feature (12)..(12): n is a, c, g, or t
gctgggggcggnggctcacgcctgtaatggctgcgcctttggaggtccaggcagaggcaggcagatcatgaggtcaggagatcgagaccatcctggctaacacggtgaaaccccgtctctactacaaatacaaaaaattagccgggcgtggagacaggcaccggtagtcccaggtactcgggaggctgagacaggattacaggtgcccgccaccacaccccgctaatatttagtagagacagggtttcaccatgttggtcaggctggttttgaactcctgacctcaaggtgatccgcccaccttggcctcccaaagtgctgggattacaaggtgtgagccactgctcctggccttatggtgaagtcttgtatgtagaagatcaataaatgttcatcttcattgcttatattcatccggttctctgtatacaaaatgatcttctttttgcaggcatttttttgcttctcaagttttaacttcttacacattttaagactacttcaagattaatttgagtgtaaatgagcagtacttgttaggtaagtgtcttccattcaccgtcaagactgaatcattcttttcattatcaccacatattgcttattgtggaatttggaaacatccatttctcttcttcaggaagatcgtggagtttctccagtcaaggtcccactagagtgagttagggttgcagtaacctggagtgagcaatccctgattccaggtggtgatgtgggttgagtttcacattttactttatttgaagaatatgtgccaaagactcactaaaaataagaacaaactaggctttgttgcagctgagtggtctggcaaatttctgtatagaggaatcattgggcatgaaggatttgatactgggatagaatccaattgcccttggaatggaagtagaatatcc

SEQ ID NO: 143386 - DNA, 866 bp, Homo sapiens
  misc_feature (12)..(12): n is a, c, g, or t
gctgggggcggnggctcacgcctgtaatggctgcgcctttggaggtccaggcagaggcaggcagatcatgaggtcaggagatcgagaccatcctggctaacacggtgaaaccccgtctctactacaaatacaaaaaattagccgggcgtggagacaggcaccggtagtcccaggtactcgggaggctgagacaggattacaggtgcccgccaccacagaactcctgacctcaaggtgatccgcccaccttggcctcccaaagtgctgggattacaaggtgtgagccactgctcctggccttatggtgaagtcttgtatgtagaagatcaataaatgttcatcttcattgcttatattcatccggttctctgtatacaaaatgatcttctttttgcaggcatttttttgcttctcaagttttaacttcttacacattttaagactacttcaagattaatttgagtgtaaatgagcagtacttgttaggtaagtgtcttccattcaccgtcaagactgaatcattcttttcattatcaccacatattgcttattgtggaatttggaaacatccatttctcttcttcaggaagatcgtggagtttctccagtcaaggtcccactagagtgagttagggttgcagtaacctggagtgagcaatccctgattccaggtggtgatgtgggttgagtttcacattttactttatttgaagaatatgtgccaaagactcactaaaaataagaacaaactaggctttgttgcagctgagtggtctggcaaatttctgtatagaggaatcattgggcatgaaggatttgatactgggatagaatccaattgcccttggaatggaagtagaatatcc

SEQ ID NO: 143387 - DNA, 425 bp, Homo sapiens
gaaaaatctaaagaatctacaaagtaagttgccaccttactgcaactaaaaagttgtagagcgtttagtgaggtgataggatacaaggtcaatatgtaaagacagtgtatttctatgtcctagccacaaacaattagaagttaaaatgaaagtatacctcacttcagctgattaagaacaagagtatgaattaaaattagactgcttggggccaggtgcggtggctcacacctgtaatcccactttgggaggccaaggtgggcagattacgaggtcaggagctcaagaccagactcaccaacatggtgaaaccccgtctttactaaagatgtaaaaaattagccaggcgtggtggcgtgcgcctgtaatcctagctacttgggaggctgaggcaggagaatcgcttgaactcaggaggcagaggt

SEQ ID NO: 143388 - DNA, 602 bp, Homo sapiens
ctaaactgtcctgtgagctgggacaaggcatttccctctgggcctccattgctcttctgtaaagtgaggagtggggctgcatcccctccaatcgtttctaacactttaatattccatgtctgagcaccctgggggagatgcagggagtgcatttctgaggaacgacctgctgagaacatctttggttcgtcatgtcttggcagcctcagactagcaccctccctaggccactgtcttgagatccatcccctgaaagtcaggagggactcggcttggtgccacatatctcacaatcactttgctagagctgacttcccagctgagtggaggggaaatccaacaaatattcccatccctttgaatttcttgtctgaacgtttatattccaaagcagtgaaagcctgctccacatggctgagactcagcccaggctggtagatttctgctccaacaggctggtatcacagcacaacagacagggctcaacaaagggcacccaggctcggcactgcctaagcctctgcctctctctcccccaacttggccatcgccagttgagaataccagtttgaatgggtcccctacaaagtaaacaattattc

SEQ ID NO: 143389 - DNA, 467 bp, Homo sapiens
gaacaagaaccggaaccttagtcacttttagtggaaaacaacagaaagcctacctgtatagtagctggaaactgattagcaatcattttaagatcagttattttgtgtctattatagaactaatattaaaaggacaattgctggtggatgctgtggaagggggaagaacgtaggtttggatgtctgggttcattacatggcctgctccttttatagagccagaggccctgggatactggtagaaatgtaggaagctagagctctgcataatttgtcaggtgatttaaggcaagttgggtggactcttgcttatagattggtctgatcaataatttgtccacctattaatatcttagaagtgttaataaggcattcgcctagttggtagttggggggattatctgtagattttcagtatggcaggagaggggaaaaaataggagaagaaagtggccaggcattagggg

SEQ ID NO: 143390 - DNA, 709 bp, Homo sapiens
ctttcatgtctatgaaataaactgggcaaactgaatgttttcccataacccttacattcatacggcttctcttctctgtgcatcctttcatgtatttgaaagaaagagaaattactaaatggttttccacattccttacatgcatagggtttctctcccgtgtgagtcctaccatgtgtttgaaggagtgaggcagatctgaaggctttcccacattgcttacactcgtaaggtttctctccagtgtgagttctttcatgatatcggaaggaactggaagaattaaaggctttaccacattggttgcatttatagggtttctctccagtgtgagttttttcatgtgtttgaagtgaactgggagaataaaaggctttcccacatatcttacatttatgagatatctctccagtgtgcattcccaagtggttttgaaagctggtaagataagataatactttcccacaatgtttacattcatagggttttttcctagagtgggttctttcatgtctgcgaacagaactgggacacttgaatgcttttccacattccttacattcatatggcttctcccccgtgtgagttctttcatgtatttgaaaggaatgggaagagctgaaggctttcccacactgtttacattcatatggcttctccccagtgtgagttcttttatgagcatgaaggcatgtggaactatggaatg

SEQ ID NO: 143391 - DNA, 234 bp, Homo sapiens
tgtggagtgagatcaatcccctctgcgaggcctctcctaggtgaagctcaagctggcttcaggtagggccctggaatattagccggacatggtggcgcacacctgtaatccaagctacttgggaggctgaggcaggagaatcacttgaacccaggaggctctaacccaggagtttccagtgagccgaggtcacactattgcactccagcctgggagacagaacgagactgtctc

SEQ ID NO: 143392 - DNA, 268 bp, Homo sapiens
gactaatactccacaaattcacttatatgaggagtctaggagtcaaattcctagagactgaaagaacggtggttgtcaggggctggggagaatggggagttcatatttaatggggacagagtttcagttttgccagatgagaataacctggaaatggatggtgtgatgtttgcacaatgtgaacgtactttactccactatacatttgaaagtgagtgcaatggaaaagtttatgtgatgagttttttaccacaattaaaaatataac

SEQ ID NO: 143393 - DNA, 632 bp, Homo sapiens
aatggcacaatctcggctcactgcagcctctgcctcccaggctcaagcgattctcctgtcttagcctcccaagtagctgggattacaggcacccgccaccatgcctggctaatttttatatttttattagagacagggtttcaccgtgttggccaggctggtctcgaactcctgacctcaggtgatctgcctgccttggtctcccaaagtgctgagattataggcgtgagccactgctcctggcctattgcctaataatattagctattattattgtatggaatatataaccctggaacttctcttttaggggctgttgtcattaagaaagtgagggtactgtttcaaatgtttaaatagagtttaaacattgtttctgagacttccctattttcgtttcccagtaactttatcagaagttgaatatcatttagaattctctcatctttttaaaagcttttctttatatctcatatgctgcatacgtagaacccagatttggtcttttttacacactaacattgtactggatacaaagttattgagaaatcagcagctttaagtgggtatgtaattaaaataaatttcttcccttcaaatttataccattgtggtagctgatactgcctgtt

SEQ ID NO: 143394 - DNA, 402 bp, Homo sapiens
ggaggaagggctggcatcgccttcctgagactagacagtgcacagcccctgggtgagatgagctcagagtcagcaggggcctggtgggcttgccacacctggctggtgggacagggcaggggcatcactcaaattcaaaagaagccacttgagggcagtaaaggaaatgccggcgtgcgctcaggcagggcacacgtggagcttgctagtgggaaccagggccactctctagaagctgagcaggctgggggcggtttccaaggcatccatgcattctgcctctgtgacctttctaagcgggcggtgggtctgtccctacccagggttagccaggcacggggcagggctccagtctccagtgccgttcttgtgcccatcagccaccagggcgcaggaggttgg

SEQ ID NO: 143395 - DNA, 206 bp, Homo sapiens
tattttcttctaactagtgggagagtatgaaaggaagtagaagttgtccaggtagcaaagagaaaaatctttaaatgcagaaagttcaaagagagagaaggcagtgaggtcacaagtgttgttataaacatggctacaatatgccccatgacctttctgtgagacatggtgacaaatgccagcattcttgtgggggtcagactgag

SEQ ID NO: 143396 - DNA, 260 bp, Homo sapiens
gattaagtggatctgtttcaaccacgtggttgtccctgtcagtggcctaggccacagagtgaggctgagtaactctagagcccttgccatgatctctgctctgtgcactttcctgtatttctacattctgccctacagtcaatccacacaaacgctgcatgaagtccaaccaagccctgagcctcccatgattaatctcttcccccaaacattctagcactttccatatttgccactgaaatatagtgcctcctggcccc

SEQ ID NO: 143397 - DNA, 515 bp, Homo sapiens
tcgctcgtgaaaaccggcctggcgtcttctggcccttgctcttgggtctgctgtttctctcacgggagaggctgctctgaggtccccgaagctgcaggctgggtgggacggtgggagcctttccctggtctttagtccggctgacatcctctctctggccgtcatagccagcgccatgggattggggaagccacagggacctcccagcacgcgccaaccctggacttcccccagagctcatctgggtggcaggtgctggccacgtggagtctgccctccacgtgccgtgggtgaagcttcacctggcgcagggaaggccatcagacttccagctcgtcacccatgtcctcaacccctaaccactgaagcgatgcctgtgttttaaccttagtaaccgtgccgcccagctcctagaagacacgcgactccacagcagttaggagacagcagatgcattcccagagctcctgagaaggagcggcttgtgtggggtgactctatctcaagccgtaggc

SEQ ID NO: 143398 - DNA, 471 bp, Homo sapiens
gcatatttcacaccacagagaagataaattcccaaacatattacggatataatgaaaaataaaaaagaaactacacaaacactgtaaggcaacatggatttgttcctctttaatcacaatgttactgtaaacctttctaaccacatttttcaaaatccagatggcagtaaaaaatcaccataatcgaccgcctaaaaggtaaaacatttccacctgactgacatgcatacacaaagtccatagtacaagcttataaactgggactagatgtctgcagcatactgcatgagtaaaaggctaatgtccctaccatataaaaaaattcttggctgggcatggtggctcatgtctgtaataccagcactttgggagactgaggctggaggatctcttgaggccaggagtttgacaccagcctgggcaacatagcaagtccctgtccctatgaaaaatgcaaaaattagctggggt

SEQ ID NO: 143399 - DNA, 395 bp, Homo sapiens
caaacatctatttcaagtctactgtccttcgaaagactgaccaacaagaaaccttaaaaagctgcaacttgtggagggtagctgggtttcagcccaattttaccagtgaagtgccgtatgaccttgggcaagtccctgtatttctgggtctccactacttctacaaattgggatcaggcgtcctattttccttgcatttaactgcatccaaacactgtgctaggattctcaaaactgcaaaggaagtccatcatctgtctcactgactctgagtcataaatatgttggaaagtattgtcccatttcccagaagaggaagctgaggctgaggcaggtggagggacttggcccaaatcctagagcaagtagctaatgaaggaattatgcttgggtcc

SEQ ID NO: 143400 - DNA, 299 bp, Homo sapiens
tgtttaggaattttaagtgttttgacccaggttagtattgggggtgtgggctatgtagaattagatattgaaatcacttagtcttgtttttaaactgcaaaccaaaagaagttcttcactgtagcaaattacagtcttgaaattcccccaaaatctttgctttgaattgggttttggaggttacattgagattgatgttatcaacatagattgttacctgacagtttggataaggggcccctttttctctaatttttgtggttagaaattaggttaaaaggtagtcttctgaaaagtca

SEQ ID NO: 143401 - DNA, 351 bp, Homo sapiens
aaactgtcaaaccaaaaaggaagtgagttgaaaagacattctctaccgagaatgcagcaagagttgtagatatcaagttactgagttgctgcttgagaactgaattataaataaatgtgttaggtagtggaattttgttttgttttccccaaaggagaaatattcgccacatggaaacaaaatttattcagcatattttcattctgtaattgcaccattgctattcttaattctttgtgtttctgatttaaagggaaaacacacacaaaaacagactgttgtgtaaaattgacaagaatgagtgtgaacctgacagtcagagacagaggttgttgtaaaattagcaatgga

SEQ ID NO: 143402 - DNA, 742 bp, Homo sapiens
atcacttgaacctgggaggcgagaggcagaggttgcagtaataagccaagattggaccacagcactccagccttagcaatagagagagacttcgtttcaaaaaaaaaaacctatgcaaatcccaattacacacgctgagtggcatgttcagctgagccacctgcccaaggcgggaccctctcttcctccgtctgcaggtcacatggagatggcagagcacctgcacgtgcacctggagaccctctcaagcctcgtctcctggcactgcctcctcctgacattggaggctgctgggagtaccagcctgtaaccctcgttgtgatggcacctgcctggtgctataattcagacatttgtctccccaacctcatgttgaaatttgaaccccaatgttggaggtgggacctgacagaaggtgcctaggacatgagagcttggtgctgtcctcgcggtcatgaatgcattcatgctttattccttctcacaagaactgattgttaaaaacgcttggcacctcctctgcccactctctcttgctccctctctcaccatatggtctgcatgcacctgctcccatcgccttctgccatgagtggacacttcctgaggcctcaccagaagcagatgctggcaccatgcttcttgtacagcctgcagaactgtgtgccaaataaacctcttttctttataaatcacccaacctcccaacacaaatcgtccaagacacctggtgtcccccaaa

SEQ ID NO: 143403 - DNA, 469 bp, Homo sapiens
cagtatatgtaagtaaacatcaaggtatttgttacctacatgttttacccatatcttaattatctccgaaattgtttgaagagtcttaaaatctctaagaaaagggcaaatagataagcagagtgacataggacaatacttatactagaaaatataaaaactttctagcagtcaaggtttctaggagatcattgtaggttacctaatctcataatcttatgtgaataagcatttcagttcctcaagagcaccaaaaggaagtctccttgagggtttttgtataactcatattgaactatataattttcagaatctttgccagaaattttacaaaaattagagtttttcttataaagttgtttcttatatagacagttgacaaaaacaagagcataatgaaaccagctcaattgtcccatagaactgatgtttacagtcttttaaaaataaacatataaattgaaactta

SEQ ID NO: 143404 - DNA, 677 bp, Homo sapiens
gcaactgatagaggatcttcttacatttgctttatttcatggtgctgcccaaattcatgctgtaccctcagcagcaaggagtgggaccattactcctggcgttcccagatggaacagacaccaagcctggctttgccactgaacacaatacaggactgataaaggaaatagaggctgcccatctctcagtgccacatatgagaaagggaagttgtcattttatatatccactgtcaagcatcttggtaaaacagaagaaagcaggctgggcctggtggctcatgcctataatcccagcactttgggaggccaaggagggcagatagcttgaccagcatgggcaacatggcaaaatcctgtctctacaaaaaaataaaaaaaaacaaaaaataaatgtagtcccaggtactgaggaagctgaggcaggaggaacacttgagcctgggaggtaaaggcttcagtgagccgtgataatgccactgcactccagcctagacaacagagtgagaccctgtctcaagaaaaagaaaaacaagagggaggcaatctactttatacccagagaattttacatgcaaggaatttgactatgaataagcctccattgcttaagagagacttcactatttgggattttaagaaagaaatacacaaacaagcaaatctcatcagcagag

SEQ ID NO: 143405 - DNA, 616 bp, Homo sapiens
ggcctccattgtcatgtgttgtttcccatgtgtgtcctgtcttcagatggcattttcctccttctttagggcaccagccacgttggattaggacccactcgaatgacctcattttaattgattatactgcaaaagcccttttccaaataatgtcacatacacagattccaagggtgaaagcttcagcatatctttctggaggatacaagtcaatccttaagaataggttaatgggccaggtgtggtggctcacacccgtaatcccagcactttgggaggccgagacaggcagatcacctaaggtcaggagtttgagaccagcctggccaacatggcaaaaccctgtctctattaaaaataaaaaattagctaggcatggtggcacacaccaataatctcagctacttgagaggctgaggcaagactcacttgaacctgggaggcggaggttgcagtgagctgagatcatgccactgcactccagcctgagcaacagagtgagactctctctggaaaaaaaaaaagaataagttcatgcataaacacaatatggtagattcatacaaggggattttttaagcaatcaaaagaaataagttatcaaatcataaaaaga

SEQ ID NO: 143406 - DNA, 195 bp, Homo sapiens
aaaacattttatgaagtgcagtggttcggggctctgactctgcagtcagacttgccagttctgccctacactggctgtgtgccttgggaaagttacttagcctctgtgtgactctatttttttcatctgtaaataagaataattaaaaataaggccgggcgcagtggctcatgcctataatcccagcattgtggg

SEQ ID NO: 143407 - DNA, 238 bp, Homo sapiens
tgtgtgtgtgtgtgtgtgtgtgtgtgtgttctctagctagcctgcagggacgggactcagttcctcagcagcccagtgcctggcacaacaggcattgaattagaagtgccagacattttcaaactttaaggtataatttgtttggacactttggctgggcattttgataaaacatccctagttaaaagatggcaaccaacaggcatcaaaccaaaaccaccctcaaagagcaaaatat

SEQ ID NO: 143408 - DNA, 427 bp, Homo sapiens
gaggaggtaggctgagatagatgtgacctttgctcttgcaaagctgatatcctaagggttggaccgatgctaaatatgcaaagaaacccaatacttgcagatggtgctgggtactaccaaggaaagaaatagggtatgtgacagagtacctggaaagggcactggccagcttttatgggcaagggacgtcaaagaaacctgtctggagatgagacaggccaggaaaatcagggcaggggccagagtagggcaaatgtggtgcctagagcctcatttttttttttagatggattctcgccctgttgcccaggctggagtgcaatggcaggatctcagcctactgcaacctctgcctcccaggttcaagcaattctcctgccccagcctcctgagcaatatggtgaaacccaatctctactaaaaatac

SEQ ID NO: 143409 - DNA, 114 bp, Homo sapiens
cttccaggcgaatcctgacctccccaaaccagaagtggacgagaagtaaagacagtgaagaagaaaaaagtgaaggaagaaaaactccaaaagtatactaagaatcaacgtgag

SEQ ID NO: 143410 - DNA, 833 bp, Homo sapiens
gagcatctttggattttagtatccacaggactcctggaaccaatctcctgtggatacagagggacaactgtacttcatcaattgacctagatccatctctattaatgtgttctctgatacttgatgcctttatttcccttatcttttttataattgttagtttttttttttaaagggtctgattctgtggtagcccaggttggaggaatgcagtggcatggtcatagatcactgtaacctgaaactcctgggatcaagggatcctcccatgccattctcgggagtagctgtgactacaggcaggtgctaccctgcctagctgtttactttttgtagagatggcggcttgctgtgttgcccaggctgatcttgaactactggcctcaacaatcctcctgccttagcctcctgtgtagctgggactacaggtatgtgccaccaccacgcctgcctaatttttgtaattgttgtagagacacggttttgccatgttgcccaggctggtctcaaactcctggactcaagtgatcctccctccttggcctcccaaagtgctgggattataggcgtgaggcactgtgcctgttctgtgcctgttttttcatcctgaaataggaataagtaatagaacattcctcctaagtttgttgtaaatgaattaatgtgcatagaacagggtctgtcatacttagtgcctaataagagtgtgtgtgtgtgtgtgtgtgtgtgtgtgtgtgtatatatatataaaaaaattatatatatttatttatatatatttatttattttcgatacagagtctagcctgggcaacaagggcaaaactcagtct

SEQ ID NO: 143411 - DNA, 186 bp, Homo sapiens
ctgtcctcctgagcccctgggaaccaatgacaacaccagtgtattctggttatttctggatgaaaatttaaagaaggtcttgcccagaaatccaacagctattctttttttttcttttttattttattgtaaattgactatttactattgtgtatatatttatggggtacaaagtgatgttatgat

SEQ ID NO: 143412 - DNA, 350 bp, Homo sapiens
gatcatgccactgcactccagcctgggcaacagagcaagactctgtctaaaaaaaaaaaaacaaaaaaaacaaaaaccgaaacaaaaaaagaaaatccatcaatggaattggaattcaaaggctacattttccccaaatttctaccctaaagggactgctgctgaccagtacaatgaggaaacaatttcatctctgaaaatttgtaatcacttgctggcattattgaagttataaccacagggtggtccaaaagaattcaagccacaaatttcatttaatttggtgccatattgatgacgtccctaggaagcaaaggaacaaatacaaatccattttgagaagttaccct

SEQ ID NO: 143413 - DNA, 398 bp, Homo sapiens
aaaactgtgcataagtgagtacgttttggaggaaacatcttgtctcaaaggtatccgtaactccaaaaatattaaaaatcggtcattttattgcatttattatttatatttttgagacggagtctcactctgtctcccaggctggagtgcagtggtatgatcttggctcactgcaacctccacctcctagattcaagcgattctcttgcctcagcctcccaagtagctgggattacaggtgcccaccaacatgcctggctaatttttgtatttttagtagagactgggtttcaccatgttggccatgctggtctcaaactcctgacctcaagtgatccgcccacctcagcctcccaaagtgctaggtttacaggtgtgagccatgatgccccaccaag

SEQ ID NO: 143414 - DNA, 390 bp, Homo sapiens
caggtagtcggaaacctagttatttttgctttgtctatagtctgctaaaattgtctcgttctgccttggttaaagcattctaatcaagagagtttggggcccctcagtaattgcttctcaaaccattcagaaatgtacctgtgatctctaatgaacagaggccaatcagagactggaccctctattgaacgtctggtcccagtgtcattttgtcagatggtcaagagcagggagacggcagacatacagaaacctggacaggactgaattgctgcttccctgaaaataacttacttgggtttattgatgtgaatgattaaacaaaaacactttgtcctattggattctagaatttcgatgcataatccacttagcttgtgaatgtagctt

SEQ ID NO: 143415 - DNA, 354 bp, Homo sapiens
agtattttgttaatgttaaaatattttatacttgcagacctggtatttcggatagatttgtttaaatctgtgatattattccaattaccttcacttcttttgttttactttttaaaatgtggttactacaaaatgcaaaagtaaatatgtggcttccatcatatttcatcacatttagtgtggaccctgaggatctaggggagttatgagccttaagttgagggtgacccaggtcaacgtgaattgctctgaaagagaagcaaagggcataaagagaacgtataaatggagagaggagctcagtctcacagggtgaggaaaggctttctttcttacacagtctggcacttcttc

SEQ ID NO: 143416 - DNA, 486 bp, Homo sapiens
agacctgctatttactccatggctgaacagccatggctctagaaaaataaaaggcaatagtaaaatggaaggtggaggagagggagaaatcaagaacaccacacacatttccggcttaagcacccagtggtgtcatttaacaaattaagaaacaccagaggaagtgtaggaatcatacattccgttctggatgtgttcggtttaaggggcatccaaatggaaacattcagtagcaattcgatagagtggtcctcagactcaggagagaggtaaaaactgaagacataaaaatgaatactcagcacacagatgaaaaatgaaatagaaagcgatgagaaagcccaaagaaattcaaacatttaataaatgagcacagaaagactcaaaaggtgactgagaggccaggcacggtggctcacgtctataatcccaacactttgggaggccaaggcagacagatcacctgaggccatggagtaaatggca

SEQ ID NO: 143417 - DNA, 228 bp, Homo sapiens
cttgggacatttagggtggtggcaaataactctgcagtgtaacagcgcttgaatacaatgatgacttgtaagggtatcaacattatgggaagacagtgttagaaattacagatttgtgaaagaattttttttgttttcattttctgagaaatagatatggggtgcacagtgatgttatgtatgaagtgtgggatgattgaattagctcattaacatattcatcacctt

SEQ ID NO: 143418 - DNA, 84 bp, Homo sapiens
atactcactgagctcttgctgtggcactccctatggtagcaatcgagggtatctacacttgattttcaaggaataataaataag

SEQ ID NO: 143419 - DNA, 469 bp, Homo sapiens
attttttttacttaacaaacaaccatggcattatgagttaaaattgcattatatcttttaagttttaatttgggaaggaataatattttaactgtaatatactcaagtacttatatacaatttttccttaatagtttaaatggcatttctcccaaccccatttcaattttcaatgaattacttctcgcacataatgaaaatagctcttggttttgggatacacgtgtattaatagcattagtatgctattgcagcatttaacaccgtatttgttgttgacttacctaaaccctgaccaagattaggtaatcactgctattttagttttatctggaatttttaaggaaccctagtaaaggttttattctgctgtctgtcatacatcttgtaagtatgacatacatattatctctttttgtttgatttgtatttttctacttaatcatagtttgtactactgaggtgtaag

SEQ ID NO: 143420 - DNA, 540 bp, Homo sapiens
ctcttcaagggacagtgagtaatgacacagatttaaagtcagccgaatagctggtatctggctcttagtcttagcgaggctttgactagttcttaaaagttgacattcttcctggacttgcagtctgagtgcatgaggctctccagggaataaaaattagcctgctgtctgaaatgtttatgaaaacagctaaatttagatgatcaaagatttggggaatccagggacccttgagattgaagactgtgatatctttaacaagtatctcgaacggcaaaggttttttcttcagaaattccccttcagaggcatttaaagttctagtgggaagccgttttaatttctctttaatgggtgggatggagcgaggtcttgtttaagtagaccacttgaacattttcttttcctctgttcattggctccaagctaacttttgaagagagtgttgctttagaccaaactggaattaattctaaaagagaaggcaggtctgtcgctcaagtttaacatgtggatgaatttgccatctcgaattaaaat

SEQ ID NO: 143421 - DNA, 344 bp, Homo sapiens
ttctggaccaaaagggttggaatgatgaaacgttccatttgatgaagcagcctcctgtggccaggtctggtgaatcaggacattctgattcccagtctcctgcactggagtctcagcagctggcaaggcaacagtcagcagacaggttgctttcctctgggaaggggatggagcaggcaccgccacaggcaccgctgcagcggctgtagctgctgttccaggagttgctgagatccagggggatggggcacttcaacggtgatttagggaccgtgggcagggctgagcagctggatcccgtctgagcctcctagtctgctgctcagcgtgcagctcccaggagg

SEQ ID NO: 143422 - DNA, 215 bp, Homo sapiens
gattcaaaaagaggggggattgtcattttctctcctttaagaccccaggctattgaacttgaggtggccatgtttggaggtggcccctgccccacatgactcctttggttgttggcagtgggcccagcctaatcattaggagaggggagccaatccatgcccttttagagccatgccaacaactgtgtgttctagctcagcatttcccagaatgg

SEQ ID NO: 143423 - DNA, 296 bp, Homo sapiens
cccgtaacacacccgcacttgcctagtttctcctcccacctggagtgtcacagatttcatctgccgtctttgtttttcaccccagcttcaggaacaacagctgattctttaagacaatgctcaatacattctagtcaaataaatggttttaagcgtccacaaggtgccaagcctatgattcccgcattctcttaccctcagcaacttcatgtctacagatgctgagtttctcagtgagtattaaaaacaaatgaaagattggtcgggcacagtggctcacgcctgtaattccagca

SEQ ID NO: 143424 - DNA, 909 bp, Homo sapiens
aactttgacagaattggagatagaattagatagccacataatagtaggagacttcaataccccacttaaaaaaaaatggagagaacaaccagcagaagatcaataaggaaataaagaaattaaacaacacggtagatcaattggacctaaaagatatatacaaagcaccccaccctaacaacagtagaatatacatttttttctagggcgcataaaatggtctccagataaaccatgtgttagaccacaaaacaagtcttaacaaattcaagaaaatggacatcacaatggattaaactggaaagcaatagcacaaagaatacggaaaaatctacaaatatgtagaaattaaacaacatactacttttgaccaataggtcaaagaagaagtcacaaagaaaattgggaaataccttgagacaaattagaatggaaacaatatttcaaaacttatgagatgcaacaaaagcagcactaagagaagtttatagctataaatgtgtacattaaaaaagaagatctcaaatcaacaacctaactttacatcttaggaaactagaaaaagatgaacaaactaaatccaaagctagcagaagataataaagattagagcagagagaaattagagaacagaaaaacagtaggagaaaatcaacaaaactaagagtagctttttgaaaggatcaataaaattgacaacccttagctgattaacttaaaaaaagagagaagactgaaataactaaatataaatgaaagaagagatggtacaattaatgccgaagagataaaaagagaatagtataagtgaatactatgaacaattgtacagcaacagattggataatctagaaggaatggatgaattcctagaaatatacaacccaccaaaattgaatcatgaagaaa

SEQ ID NO: 143425 - DNA, 407 bp, Homo sapiens
gttaatgatgtcgtctcttaaccaagaccagtctatacaaagaaactgtaaagagttgacagttgacactagacaaagtgcaaacttaaagagttatttataaactgtattaagtcagctggtgcctgaaagtgttcacgtaatggtaaaaattcagctatcaactctgaacaaagctggtctatcatattcagtcccattacagtaaatcatgtttcatcaaatttaaagttgcttcaaagtctcccaaaataaagcctgttctttgatgtgttcacttctctgcttagagtaactagaaatatacgtgatgagatggacttcaacccctggacatcagtgcttttccaaattcatatttccctcctatttttctagccacgactcccgtttctttccaacttccc

SEQ ID NO: 143426 - DNA, 103 bp, Homo sapiens
tttcaaatgtctcttaagtatttgaatggacatcacagtctggaagacagggacggttctggattggtgttataaaatcaacaggtatttgtctatagaaccg

SEQ ID NO: 143427 - DNA, 377 bp, Homo sapiens
atttgctgaaaccggcagaaccatatatgaaattcatatatacttaggaaagctgaacatacttgcttttatagaggtttctaatgaatgaatgaatggaattgaggaaagaagcttaaaatgcctcatgctttttaaattttaccaatgtgctgcagagagctttcattgggaatgaagtgtaagcctcacctgacacactaagaaccacgtgaatttccaagaaggggaaaggtattcttgcctgagaaagccccggctaatgtgtcttccatctggaaagtctttgcaaagccagttgggatgtgccaagttcagttatatttgggtgctcttccgagagaacttcgcaggggattgggtcagctctttctagg

SEQ ID NO: 143428 - DNA, 286 bp, Homo sapiens
gtgcatacagatgcagtcatacagtggatatacgcacacgcatcgtcgacccgagcgagtgcgcgcacacatgccctcacccgacatccacacacagccctctgtacataaacacacacattcacatgcacacacagcctgtcacacacttgagcatacacacagttcccagcacacatgcatgtgcacaaacatgtacatacacagtcctcagcacacacacaccgtgacatacacctgcacccaatagacagctgcatacacacagcacacatacactcacaca

SEQ ID NO: 143429 - DNA, 481 bp, Homo sapiens
cctaagaaggggtgaactggtccaggttggaaatggagcaggtggaaattcctgtactgatcagcagtgggatcatgcccgcgaagagccactgaactctagcctgggcaatatagtaagaccccatctctttaaaaaacaaaataggaaaaaaattaaaaagtcaattattaacaacagaaataatgtttaaaaaagaaacacagtacagtacagtacaatactatctgtgactatgtgcagaggcaaataatgtaaacaatgagtactgatttaaccaaaaggtaaaacattgggaaaatgggggcggtgaagcagaggggaggaaaagaaaggggatggctgtttaagaaaactaaatcatccaccttaataatggtctcgaataatgtatcaaaagataaacattttgagctgggcatggtggtatgtgcctgtagcgtagtctcagctacctgagaggcggaggcaggaagactgc

SEQ ID NO: 143430 - DNA, 240 bp, Homo sapiens
gcggccgcctactactactactactgctcgaattcaagcttctaacgatgtacggggacatgtgcatgacctagggacccaaaaaagttggtgctgtttgagagatcctttaaatggctctgaaagatggcagcgttccctttttcccctgtatcttattacattatccctaggagtaagttttatcttgtataaacacataacaataaaaagatgaatagatgtggaacccagagttgg

SEQ ID NO: 143431 - DNA, 645 bp, Homo sapiens
tatctattcatcttaaaccatttagtaatcaaaaataaatagggaaaaataaagctggatattcatacatagagaagtgtagattcttcaatggaaaacatgttttttaagtgtccaaggaatagttataaaatttctgagtattttaattaaataactaagatttaagtgttagactcatgagaataacttagtcaaaggcctaagcatgagagattaagtttgataaacattgaaaatgggctgaaaagcctgagtaagaaaattaattactttttcattttagaaattataggacaacaatttttcccaaccgtcaggggtgtatatatgtgcatgtgaaagtgcttatgttaatgagcttgttaataataagttatacaaaattattagttggcagcaaccagattttaaggaatattggccttcttgggcttccgaagaaaaccttggacgcttttggtaggaaaagttgggattcactctccataaatccggcgttgaaaaaatgaatcaacaggggtcatgattctagttttgaccaagctacatataacagtgtaggcatctgatgtatgatctatgtattaggttggaaaatttcccttacaactgacattgctgaatacaaattatatagaggtt

SEQ ID NO: 143432 - DNA, 1631 bp, Homo sapiens
gtgaccctggctattccctctagggcacctctataacgatctaggcctgggctactcccagctccagctgttcccgctggccgtggaggccttcctgcaggccctgcccctgtgctgggtgccaggagagcaggccacagtgctaagaaacctcgggatggcccacaatgccctcggcaactatcaggaagctcgggagtttcaccagaaggctgctgacctacacggctctgtggggcagcggtgggagcagggccggagctttggcagcctggcctttgcattgagccagctgggggaccacaaggctgccagagacaactacctgcatgccctgcaggctgcccgggactctggggacatgaagggacagtggcaggcctgtgagggtctgggggctgctgcagccaggctggggcagtatgaccaggccttgaagtactataaggaagcactggcccagtgtcagaaggagccagattctgtgcgagaacggctggtggccaagctggcagacaccgtgaggacgcgcttggcccaggtggggctggtccagactcacaccctgacttcggctccgggaagactccaggctccaggtggggccagccaggcggaggggaccccagcaaaggcaggaagcagcacagcaggtgtccagcacagatcttccagtgggtgggaagatgaagagtttgaggagggccaccagaagaaaaaagaggagaggtcggcaaacgttccggtgagggctgggccgggaagaccagagctgtgtttccttccaggcacagtgaatcattcgcaccatctagcttctagttgccccacgtttaccaagcacacgccctgcagagggacagtcctcggcaaagcctccatctatagtccaggacccagggcccatcttccatttgtaggtccaggccctcccagagcggagtaccctagcatcttggtacccaatggccctcaagccaataggtcatccaggtggcccagggaaagcctcagcaggagccgccagaggagacccatggagtcgggcatctgcactattgtgtgacctccccctgccagcctcagccctcatccctgaagcacctgtccaacacgcacacactagggggtcctggggaccaagcctcttcccagttgctcagccctgcagggatgtggaacacagtgcagccagtggactcctgaggaggctggccaagggctttgcaggctcggccctgagaggttctgtttgttcctccttgggatttttggactcagtaggtaaaagaaaaaaggaaaatggatggcaaattccctgtctttctgaatccaaatcttacgattgctaggggcctggcagttctaaaaactgacttcgtggtcaagtagctttggagtcactgactgtctccagacgtccatttttgcacatgagaaatgaggatataatactacagaagaggcatcttacccaaccaatgcaccttacttctctgtgaaacacaggggatgctgggcgcaggcctaggctgtggcctgtagcctgtaggacagctcctgccagcagccacaggaacagtgatgtgatgtaacatttcccaagtacttagctcatgccccaccctatt

SEQ ID NO: 143433 - DNA, 2113 bp, Homo sapiens
gtgaccctggctattccctctagggcacctctataacgatctaggcctgggctactcccagctccagctgttcccgctggccgtggaggccttcctgcaggccctgcccctgtgctgggtgccaggagagcaggccacagtgctaagaaacctcgggatggcccacaatgccctcggcaactatcaggaagctcgggagtttcaccagaaggctgctgacctacacggctctgtggggcagcggtgggagcagggccggagctttggcagcctggcctttgcattgagccagctgggggaccacaaggctgccagagacaactacctgcatgccctgcaggctgcccgggactctggggacatgaagggacagtggcaggcctgtgagggtctgggggctgctgcagccaggctggggcagtatgaccaggccttgaagtactataaggaagcactggcccagtgtcagaaggagccagattctgtgcgagaacggctggtggccaagctggcagacaccgtgaggacgcgcttggcccaggtggggctggtccagactcacaccctgacttcggctccgggaagactccaggctccaggtggggccagccaggcggaggggaccccagcaaaggcaggaagcagcacagcaggtgtccagcacagatcttccagtgggtgggaagatgaagagtttgaggagggccaccagaagaaaaaagaggagaggtcggcaaacgttccggtgagggctgggccgggaagaccagagcgtgagttgatgtagagtattcctggcggtgcctctccttactgcaaatatggcactcccaccgccagccgcctgcctccgcttcttatgcccatcccaccatcccgccttcctgttgtcatttctttgaggcctggcacaacctcgcgccaaccctgaccctggctgtacccagttcacaagtccccaacagccctcccatgatttctgcttgtctctcaaggccctggaccattttccctgaacccttctagaactccctcttccttcctgctctcatggctttcctaacttctagaactttgcatcttggaccccagggttttgctgaaagcctactctgtgcccaacacagcgctgggtgctgttggtaaaccccagctcactactcaatagcatctcccacaaagacttgcaactcagggagcagagttctttgctacttgttgagctgacctgaatttaccgatgtctccttttcagtgtgtttccttccaggcacagtgaatcattcgcaccatctagcttctagttgccccacgtttaccaagcacacgccctgcagagggacagtcctcggcaaagcctccatctatagtccaggacccagggcccatcttccatttgtaggtccaggccctcccagagcggagtaccctagcatcttggtacccaatggccctcaagccaataggtcatccaggtggcccagggaaagcctcagcaggagccgccagaggagacccatggagtcgggcatctgcactattgtgtgacctccccctgccagcctcagccctcatccctgaagcacctgtccaacacgcacacactagggggtcctggggaccaagcctcttcccagttgctcagccctgcagggatgtggaacacagtgcagccagtggactcctgaggaggctggccaagggctttgcaggctcggccctgagaggttctgtttgttcctccttgggatttttggactcagtaggtaaaagaaaaaaggaaaatggatggcaaattccctgtctttctgaatccaaatcttacgattgctaggggcctggcagttctaaaaactgacttcgtggtcaagtagctttggagtcactgactgtctccagacgtccatttttgcacatgagaaatgaggatataatactacagaagaggcatcttacccaaccaatgcaccttacttctctgtgaaacacaggggatgctgggcgcaggcctaggctgtggcctgtagcctgtaggacagctcctgccagcagccacaggaacagtgatgtgatgtaacatttcccaagtacttagctcatgccccaccctatt

SEQ ID NO: 143434 - DNA, 248 bp, Homo sapiens
tggggtgtgagtcccattgctgcctgggacactggcccagcctgctggagctggactgatccggtgatttttgcctttcttggtttatttcccatttggttttcccaggcttttagtagagcccacttgggcaatgccaacctatccacccatgcttaacggaggaatcagagatgattgaacagagaggaacaaagcaggagcattcctcccccaaccttgttctagagacaaagtgagtgctacat

SEQ ID NO: 143435 - DNA, 217 bp, Homo sapiens
gtagttggggagtgaagggatttgcttcagggcagccacgaatggatttttcatctccaatcccagccagcacattttgttctgacatttctttggcacctttgccaatgacgtgacggtgcctgtgcagctctttcccctgccttccaaattccttggagaactgtcatattccccactccccacttcctcctgccactgcaggcacctccaaaca

SEQ ID NO: 143436 - DNA, 498 bp, Homo sapiens
ggcctcttaattaccaaattttgcatttaccttcattgtatctgaactatgtgcaaaatttggcactgtaaggctatgactcgcctggtttttccctccctgggcttttctcttcatctactttcctctggtcatgcctaaatagtgctcatcctgctctcccacccagctatcttccatcccaactgttgaccactgcctctgggctcaagactctcaaattggtatgaccagccaaggcctctgctgagtgccagctgggagattcatttgctcactaggcagctcctcgtggaggtcccattggtacctcagtttcctctctcctgactaaagagacttttagtctctttcatgattaatccaatttatcacatctgaaatcttggattcattcaagaggcctctcattttttttttttttttttttttgggaaaaagaagtcccccccgggggcccagcggggagggcaggggccggggggatcctcaagagtc

SEQ ID NO: 143437 - DNA, 241 bp, Homo sapiens
ctggatgctcttagttcaattcattagtgatggcaaggtatataaagtaaaattgcttagagaaagaaaaaaatcaaatgggataatacttcaaaaaaatagagactgatcaccaaaagtctaatgaaggtttgtgaatcatgtttttcaaatggccatttgagtagcgtgactcatgcaatatcctccctccttggcctctttccacagtcagccaaaaattagtgatgaaaatcatatg

SEQ ID NO: 143438 - DNA, 503 bp, Homo sapiens
tgggaataatgctagtggtgtctctggaaagggagctgcctggggtgtgttgttggtaggagggcctggcagtggcaagacggcccctatgtactgaactcttatggccaagttcacctgcaagtttgcagagaggtttacatcgccaagctttggcctttcatttctgcaaagcccaggactctgatactttgtgtgttggagggtttattagaggtctagtagcccagatctgccgcagtggactactccaaggatatgaggacaagctaagggatccagcagtccaaagcctcttacagcctggggagtgcgagagaaacccagccgaagcatttaaaagttattagctaattgaagaggaagaagaagcaattagagctgtgtgtaaaaaccataccagccctgcttttctgattgacagaaggagccaatcactttgcattcccagtttacactttaataaaagagaaggctttagtctttctacttggaccatattg

SEQ ID NO: 143439 - DNA, 657 bp, Homo sapiens
gctggaactggcagccgccgggggccaagaggaggatccggagctgggagcgtgccccgggcccggcggaggaggcggctgcagttggagtggagtcttgggagcgctgctggcagcgacttctcagcgaagcaagtgtctgagactgagagtccctaacagcggcagcggcggccacggcggcggctggggccgagttacttgtggaaattgttgattacccggacgtcttaaaaccaagaaacctgtgaacaggttcattaagaatctgctgtcttgaaaaatgcatattatgaatgctttgaattaagaaggtgttaacagtggttgtcatttctgccacataagagactataatctgaaacagttcctggcagttgcccagatgcctgaaactggcacgatctagtactcttgagtgatcatccttcaacgagaaatacagacctcttacagcctggggagtgcgagagaaacccagccgaagcatttaaaagttattagctaattgaagaggaagaagaagcaattagagctgtgtgtaaaaaccataccagccctgcttttctgattgacagaaggagccaatcactttgcattcccagtttacactttaataaaagagaaggctttagtctttctacttggaccatattg

SEQ ID NO: 143440 - DNA, 1011 bp, Homo sapiens
gctggaactggcagccgccgggggccaagaggaggatccggagctgggagcgtgccccgggcccggcggaggaggcggctgcagttggagtggagtcttgggagcgctgctggcagcgacttctcagcgaagcaagtgtctgagactgagagtccctaacagcggcagcggcggccacggcggcggctggggccgagttacttgtggaaattgttgattacccggacgtcttaaaaccaagaaacctgtgaacaggttcattaagaatctgctgtcttgaaaaatgcatattatgaatgctttgaattaagaaggtgttaacagtggttgtcatttctgccacataagagactataatctgaaacagttcctggcagttgcccagatgcctgaaactggcacgatctagtactcttgagtgatcatccttcaacgagaaatacagagctacttacatactgtacctcataccgtataaatgtaatctctctgatgccatttaatgcagtggacctcttttcagaatctaattgtcagatgcagaattaacacttggaatctggagaagcattttgtacaaattgaaagattgggttttttctttagttttccacatgtattgtctcatctctgttcttgaaacatccacaatcacataaactccagttataaccatggagttatgtgactcattaaaatttaggaaaagtgttgctgagctgtggaatcaggcgtttctccctcagttcaacaactaatacatagactgctgatcaagaataaggaaccaaataaagtcatgcacgttctgttgacagaggaactctgtggctgttgaattttactgtaactagttactctgtcttcagagtcaacttaatatacaagttatgtcataatggatggaaagacctgtgttgatgtatccagactctagcaaatgaagataaaaaacccgttatgactaatccttgggaagagaaagtctgcaaaatggctcaaaccagttta

SEQ ID NO: 143441 - DNA, 459 bp, Homo sapiens
tggtcaggcttgggcccagctcgagcatctgtgtgggagtgcagcatgctccagccccgtgtgcgtggagctggaggaagccctgctgggggtctgacggagcaagtcccagctgtggaggatgactgccctcccgcctgcacagccagggctctgcccagttcccctgtatggtgtctgcactccagccccagcctgtggcaaccgtggttcaggctctgaagccattttgcaccgctgtccctgtctatcgccctccctcaccaggatgagcatgagcgcctgctaaaaagtacagggccagggactggcactgggaacgcactgccccgggtggcacagtgccttttttctgttggcgggggcagcctgatgggcagagacagagtgggggctgctcctccccatgcctgcagggcatgtggaagacccccaggaagagcggctgcctgcggcctc

SEQ ID NO: 143442 - DNA, 409 bp, Homo sapiens
taactgaaggactgacactcttgagatggctcaaagttgaatttataaaatgagttgagagctaacaacaggtttagaaaatgctttgctagaaaaaaaagatttagctagaaaacagaacaagtccgggcgtgatggctcacgcctgtaaacccagcactttgggaggccaaggcagcagatcacttgagcctaggagttcgagaccagcctggacaacatggtgaaactccttccctactaaaaatacaaaaaaaaaaaaaattagccaggcatgttggtgcacatctgtggttccagctactcaggaggctgagctgggaggatcacctgagcctgggaagttgaggctgcagtgagccgtgatcacgccaccacacagacaacagagcaagaccctgtctcagga

SEQ ID NO: 143443 - DNA, 489 bp, Homo sapiens
ttgggaggtgattaggtcatgagggtggagtcctcataaatgagattagtgccctcataaaagagggtcccagagaattcccttccctcttcccccaagtgaggacacagcaaaaagactgtcatctatgaaccagttagctaggccacaccagacattgaatctgatcaccagtctgatctcagactcccagcctccagaaccatgagaaagcaagttccattgtttataagcctccctatctatggtatttttgttacagcaacctgagtggactatgacacgtatcacagagaaaagacatactcagtcaacaattggttgtccatatggaaacatatgggacaactggttatccatatggaaaataaaataaggccaggcacagtggctcatgcctgtaattccagcattttgaaaggccaaggttgaaggattgcttgagcccaggaattcaacaccatcctgggcaacatagcaagactctgt

SEQ ID NO: 143444 - DNA, 364 bp, Homo sapiens
cacctcggggtcctgagctagctgggactacaggatggagtccacagagaagtgtgaagccatcatcacccactttaatggaaaatatattaagacaccccctggagtaccagccccatccgatcccttgctttgcaaatttgctgatggcgggccaaagaaacgacagaaccaaggaaaatttgtgcaaaatggacgggcttggccaaggaatgcagacatgggcgtcatggccttgacctatgaccccaccacagctcttcagaatgggttttacccagccccctataacatcacccccaacaggatgcttgctcagtctgcactctccccatacctttcctctcctgtgtcttcgtatcag

SEQ ID NO: 143445 - DNA, 862 bp, Homo sapiens
tgggtcagagtgtcagtgctgacaccaggacagtcccaggcaaactgggatcatggagctgacctttgcatgagagagacaaccagagccaagtgacataaatggggtttcgccatgttgaccaggctggtctccagctcctgacctcgagtgatctgcctgcctcggcctcccgaggtgctgggattgcagacggagactcgctcactcagtgctcaatgttgcccaggctggagtgcagtggcatgatctcggcttgctacaacctccacctcccagccgcctgccttggccgcccaaagtgctaagattacagcctctgtccagccgccaccccgtctaggaagtgaggagcgcctctgcccggccgcccattgtctgggatgtgaggagcgcctctgcccggctgccccgtctgggaggtgaggagcgcctctgcccggccgcccatcgtctgggaggtgaggagcgcctctgcccagccgccaccctatctaggaagtgaggagcgcctctgcccggctgccccgtctgggaagtgaggagcgtctctgcctggccaccgcccatctgggaagtgaggagtgcctctgcctggccgctgtgcaatcttccaagtgtgaagtgacagcctttctgcaggtgtatccaacagctgtgaagagacagcgaccatcgagaacgggccatgatgacgatggcggttttgtcgaaaagaaaagggggaaatgtgggggaaaagaaagagagatcagattgttactgtgtctgtgtagaaagaagtagacataggagactccattttctgtactaagaaaattcttctgccttgggatgctgttaatctataaccttaccccca

SEQ ID NO: 143446 - DNA, 734 bp, Homo sapiens
tgggtcagagtgtcagtgctgacaccaggacagtcccaggcaaactgggatcatggagctgacctttgcatgagagagacaaccagagccaagtgacataagctggagtgcagtggcatgatctcggcttgctacaacctccacctcccagccgcctgccttggccgcccaaagtgctaagattacagcctctgtccagccgccaccccgtctaggaagtgaggagcgcctctgcccggccgcccattgtctgggatgtgaggagcgcctctgcccggctgccccgtctgggaggtgaggagcgcctctgcccggccgcccatcgtctgggaggtgaggagcgcctctgcccagccgccaccctatctaggaagtgaggagcgcctctgcccggctgccccgtctgggaagtgaggagcgtctctgcctggccaccgcccatctgggaagtgaggagtgcctctgcctggccgctgtgcaatcttccaagtgtgaagtgacagcctttctgcaggtgtatccaacagctgtgaagagacagcgaccatcgagaacgggccatgatgacgatggcggttttgtcgaaaagaaaagggggaaatgtgggggaaaagaaagagagatcagattgttactgtgtctgtgtagaaagaagtagacataggagactccattttctgtactaagaaaattcttctgccttgggatgctgttaatctataaccttaccccca

SEQ ID NO: 143447 - DNA, 1004 bp, Homo sapiens
tgggtcagagtgtcagtgctgacaccaggacagtcccaggcaaactgggatcatggagctgacctttgcatgagagagacaaccagagccaagtgacataagctggactgtactgccgtgatctcagctcgctgcaacctccctgcctcgggctcccgtgattctcctgcctcggcctgccgagtgcctgggtttgcaggcatgtgccgccacgcctgactggtttttgtatttttggtggagatggggtttcgccatgttgaccaggctggtctccagctcctgacctcgagtgatctgcctgcctcggcctcccgaggtgctgggattgcagacggagactcgctcactcagtgctcaatgttgcccaggctggagtgcagtggcatgatctcggcttgctacaacctccacctcccagccgcctgccttggccgcccaaagtgctaagattacagcctctgtccagccgccaccccgtctaggaagtgaggagcgcctctgcccggccgcccattgtctgggatgtgaggagcgcctctgcccggctgccccgtctgggaggtgaggagcgcctctgcccggccgcccatcgtctgggaggtgaggagcgcctctgcccagccgccaccctatctaggaagtgaggagcgcctctgcccggctgccccgtctgggaagtgaggagcgtctctgcctggccaccgcccatctgggaagtgaggagtgcctctgcctggccgctgtgcaatcttccaagtgtgaagtgacagcctttctgcaggtgtatccaacagctgtgaagagacagcgaccatcgagaacgggccatgatgacgatggcggttttgtcgaaaagaaaagggggaaatgtgggggaaaagaaagagagatcagattgttactgtgtctgtgtagaaagaagtagacataggagactccattttctgtactaagaaaattcttctgccttgggatgctgttaatctataaccttaccccca

SEQ ID NO: 143448 - DNA, 408 bp, Homo sapiens
catgtggaaacctgccatttactccatggccacaaaacacaagctaaaatctttttttatctgttcacaaattctttaatgttcctcccttcaaaagggtgaccttaattctcctccctcgaatgcaggctggacttgatggcttgcttctaataatagaagacggcagaagtaatgttctatgatttccaagatgaggttataaagaagacagttaccacctgacatgctttgctctctttcttctcacttctctctctaggattgctccctttgggagacaccagccaccattccatgagggcactcttggagaggttcaaatggaaagaatctgaggtttccactaaaagccaatactatcttgccagccatgtgagtaaatggcagggtagcgagctcgagtgt

SEQ ID NO: 143449 - DNA, 170 bp, Homo sapiens
ccttctccccaagtcacccagctcacaggtggccgcaagctctgaactggaactgtttctaacacatctggctgcttcccctagagacagacatgcaaatagcttcatatcctcttgtagctgtaaccatttgcagacaccttattgtcttacagctttttaatttgcct

SEQ ID NO: 143450 - DNA, 174 bp, Homo sapiens
tttgagaccagcctgggcaatacagtgagaccctgtctctaaaaaataataataatttacacacacacacacacacacacgtaaatttcagacaagtcagtcacggagagtcaagaccaggagctacctaattagatgatggggaataagaaataggaaactgtgactagtctt

SEQ ID NO: 143451 - DNA, 209 bp, Homo sapiens
tgtcagattaaataatttgctcaacatactacagctggtaagtggaacccaagcttgatcccagtttatattctttccaacctatcatactgcctatcaaagaaagcattagtagcaggttctcttgacattgacgtgaatgctttttttttttttttgagacggagttgcactctgtcacccaggctggagtgcaatggcacgatctc

SEQ ID NO: 143452 - DNA, 441 bp, Homo sapiens
aatgggatttaaaggtaggaactatcttgagaaagctaagtgttacaaagtataattagtccaatccagtgtttcccaaacttacctaagcttaagaatttcctcagggcacttattaaaaatatagattctcaggcaccacccggacttactgaatcagctctccaggggaggggcctgggagcctagtgaggtaggtagggtgatgacacaccctgcattttctgagcctgtcctggtttcaggtaccctgcatgatgaattccagatgtctgtttatacttgtcagactgtgtctcaattttcagacaggagctatgggcactgtttatgtaggccatctcattcagaatcctctctcatatcgatgcaggtagaacatgcttataaaacacgagaggatgtgtagccacaaagttgcatagtgtcagtcagcgtaaa

SEQ ID NO: 143453 - DNA, 269 bp, Homo sapiens
atagcaatatcttctactgtcagtgctggccagaaggggacagagaactggcactgcctccatcagcacattcagtattgccgtggtacacggagtgtcctgtgggccctcccgagggtcgctgttagctggttggttttctgatgtaacacatagcacatagacgtgtttagcaggcccgattctctgagccttcagatcccttctgtcatggtctgtcatagcagttctggcatctctacttcatttaatgtgggccatcatttttt

SEQ ID NO: 143454 - DNA, 216 bp, Homo sapiens
ctggcctaggacagaccctagggggtaggctggggccctgtaccgaagcaaggggttttcaaggctgccacccggggctcatggcccttggcctctctgggagggaggagccccggccatccccaccctcgtggatgtaactggttttcttccctctctctccctcccctcctctctgcgtctttccctctctcctgtgtttgcctctctgtcctg

SEQ ID NO: 143455 - DNA, 190 bp, Homo sapiens
cattagctcggtacccagcagcatctaaggctcgtggccataaatccatagttcttcatcacatcccctcctttcgtccccatcatagctcccttggtttaggccccattaacttgtcattaggtctggaataactctagatgggcctcagcttcatccaagatgctgaattccccttccaaagtagcta

SEQ ID NO: 143456 - DNA, 746 bp, Homo sapiens
tttcagagtcaacgtgtagaaaatatgtttttgttttattattattcttttgcttggtttttgttttgttttctattatttttaaaattgtggtgtaatatatataacataaaattaatcatttaaacaatttttagggatgggcatggtggctcacacctgtagtcccagcactttgggaggccaaggagggcaggttgtttgagcctggtctcgaactcctggcctcaagggatctgcccgttttggactcttacagtgctgggattacaagcaagagccactgtgcccagcctaactttctttttctttttttctttttttgacagcctgggcaacagagtgagatcttgtcttaaaattttttttaagtgtacagttcattggcattaagtacattcacagtgctttgcaatcatcaccactatccatttccagaaatttttcatctcaaacagaaactctgtatccattaaacaataactcccagttctttccttctcccagcccctggtgacctgtattatctttgtaaagaatgcctatttgagccatttcaccatttagaattgggtttttgagggggatgggaattgttgagttggagttctttatttactttggatattaattacttatcagatatgttatttgcaatattttctctcattccatgtttgcattatagagtgtctgattagccggtcatgctgcgataaaaaaatacccaaatgggaattttaagg

SEQ ID NO: 143457 - DNA, 113 bp, Homo sapiens
tggaatttgtacattcacatcagggttgctctttgaaacatttctgtgggatgttgttggcttattccaagtttgctgctattacccaaaacattgtttgaactttgcttctg

SEQ ID NO: 143458 - DNA, 346 bp, Homo sapiens
ctaaagctgtcatgatggctgtgatcgatgactgctacacgctcagcccgggctgcactgccaccctgggcaacttcgccaaggccacctttgatgccatttctaagacctacagctacctgacccccgacctctggaaggagactgtattcaccaagtctccctatcaggagttcactgaccacctcgtcaagacccacaccagagtctccgtgcagcggactcaggctccagctgtggcacaaccgggagagatttattctaggtaatgcaaggctagttaacattcaaaacttaattaatgtgatctattatggaactttcccaacttgatcaagagcatctt

SEQ ID NO: 143459 - DNA, 437 bp, Homo sapiens
agtctccaaatgctcccttactgagtcaaagcgtttgccccgtaaattcatgtctatctagaacctgtgaatgtgatattgtttggaactagggcctttgcagatgtcactgagttaagacgacctcatgctggattggggaggccctaatcttgaaagatgtcctcttaagaaaagcgaaaagagacagacacacaagggttagaacgccacgtgaagatggaggccaagattggagtgatgtggccgcaagccaaggaatgtccttgaagttgggagaggcaggaaagaccctcccctagagcctttgggtgggggtgggcagccctgccaacacctggaattcagacttctggcctccagaactgtgagagtagaaacttccattgtttaagccacccactttatgatgtcacggcacagcagccaggggaaat

SEQ ID NO: 143460 - DNA, 551 bp, Homo sapiens
aaggctggcaggcaggagggctggggcgagcactggggggccatggagcgggcagaagagcccgtggtctatcagaagctgctgccctgggagccaagcttggagtcggaggaggaagtggaggaggaggagacatcagaggcgctggttctaaacccccggaggcaccaggactcttccaggaacaaggctggcgggctgcccggaacctgggtccgtgtagtggcagccctgctgctgctggctgttggctgctccctggctgtgaggcagctccagaatcagggcaggtcgacaggaagcttgggctctgtggcccctccacccggcggacactcccacggccctggcgtataccaccacggtgccatcatcagccctgcaggtgccatgtttggggcctcttccacgatagctcctcaggcaattccacggccctgacatcaggcccagcacagaccctggcccccggcctggggctgcccgcggctctgcccaccctgcacctgctgcatgcacgcttcggccgcctgccctggccacgcctgcta

SEQ ID NO: 143461 - DNA, 647 bp, Homo sapiens
aaggctggcaggcaggagggctggggcgagcactggggggccatggagcgggcagaagagcccgtggtctatcagaagctgctgccctgggagccaagcttggagtcggaggaggaagtggaggaggaggagacatcagaggcgctggttctaaacccccggaggcaccaggactcttccaggaacaaggctggcgggctgcccggaacctgggtccgtgtagtggcagccctgctgctgctggctgttggctgctccctggctgtgaggcagctccagaatcagggcaggtcgacaggaagcttgggctctgtggcccctccacccggcggacactcccacggccctggcgtataccaccacggtgccatcatcagccctgcaggccgagagctgcttgttgccgggggcaacgtcgtggatgctggagttggagctgcattgtgcctggcagtggtgcatcctcatgccacggggctaggtgccatgtttggggcctcttccacgatagctcctcaggcaattccacggccctgacatcaggcccagcacagaccctggcccccggcctggggctgcccgcggctctgcccaccctgcacctgctgcatgcacgcttcggccgcctgccctggccacgcctgcta

SEQ ID NO: 143462 - DNA, 547 bp, Homo sapiens
cttgaacaacgctatatttagcattggttaagtacagatattttgtttttagcctattgcagaattagctcaataattcataaaatgggtaattattcataccaatgctaaactcagtatttattacatcaaaatttttaatgtattggctaattttggtaaagctaagaccaccagtgtgaataaggatggatttttggttatttgccactgagattttttagcatagatcccagaattattttaggaaaaagaatatgctgtgctagcacatagtgggtgcctattaactggtagttactattattatgcccttggtactaattttcctaaattaactatatatcataaatatgctgagacagttaatctttgattttaattatgtccactgcatagatttggttaggaaaactatttctcatgactgctgttgcatttttattaagcagaatttgatgcaacagatttgagcatatgtggacttctactgaactaggtgtataatcaaacaagtgtgaaagaggaactcaagccgaagtaagag

SEQ ID NO: 143463 - DNA, 779 bp, Homo sapiens
gaggtctcttatgaatgtgagtgaagcccctaaggtgatgagagccttaccagcctctcttactttcccagaagctttcatttacttatttgttcagtcaaaagggtatttattaaatacattcgggccacaatgtctaggaatggcacagaaatcagaccagggtcccgcccattgggactcacagtccccacggggacatgagccttttcaagtgcaaggcagagaatgatttgagcccctgaaagactctttgattaggaagcatttgggataggaaggtgtcagttccggctttgaagacgtgggggcagggatcatcttggaacgttttgtttgaaggagggactttggactggtacattcgatttggaccatagtgggcaaagaaccaacgtattgagcactcactgtgtgacaggtgtcacaatatgtcaagtaatttttatcacaccctttgagatagtttctctaatcccagttttacagatggggattagagagattaaatgccctgcccaaggtcacacagccagtatgtagtaaagtggagtttccagttctggcctgtttgaccacaagcttgtcctctttactattataccactttgcattccagacagagggaacagagagaatggatgccctgggcagatgtgggcacatccaggagctttatttactcagggagcagggtacatgaacaggagtagtgaccaatacggttggaaaggcaatttggagcctcaaaagtcaggttgaagaatttgggcttcatt

SEQ ID NO: 143464 - DNA, 350 bp, Homo sapiens
aattcaactggcaatataaataatgaacctgggacacagctggaggaacaagggattggggggcaggagaagtgtattttagtcttggctctagcacttgttttatgttcctgagaaagtcccttaatctctcctggtctcaatttctggatctgaaaaataaacggattgagcaaagtactcaataaggtcccttccagttctaggatattaattgtatatctgggtttgtcatttatgtcacctaagcatgcctagattcaattgtcctagactcattaggtttaatgtctaatcttgctgctggttctactttgcctctttttgccagggaatgtttattgtgtagg

SEQ ID NO: 143465 - DNA, 380 bp, Homo sapiens
tttaattctctttcgtgtttgtaataatgctggtagattttggttaatttttttgggacaaggcaattttaaacagtccctagttgttaccatatgttttttgccttttaaagagtgaaactatcagccgggcgcggtggctcatgtctgtagtcccggcactttggtaggccggggcgggcagatcacagggtcgggagatcgagaccagcttggccagcatggtgaagccctgtctctactaaaaatacaaaaaattggctgggcatggtggcgggcgcctgtggtcttagctgcttggaggctgaggcaagagaatggtgtgaacccgggaggtggagcttgcagtgagccaatattgtgccactgcactcccacct

SEQ ID NO: 143466 - DNA, 209 bp, Homo sapiens
aaaggcgcttgttggcatctttgaagaagggactgggggagccctacttcagagccagtcagtggggagcagctacatccttcaaaaggaatagcaggtggtgtcccccagcctggctgacctgaaggtgtagtagagagcacaaggggtgcagtcctggaactggggcctaacgagaggtatttgtggttccccaacaaaagccctgt

SEQ ID NO: 143467 - DNA, 393 bp, Homo sapiens
tttaggagttcaagaagaagggggagatgtaatgaggtaatcaagaccaagtcaatgtgaaacagtctgaagtcccaaagctgggctatacttatgggccccaaggtgagtacagatggctcctaatctgaagattctccactgtgctattacatgtaatcccaaaccaaacttataagaatactggccttccctggcatttgagttttattctgcctctttaaaagggctactcagaataaatcagtctcctttgcagagtcaggagaagggaaaccagcctctctgtgcagtgttagcatgatgagctaagagttcagaaatgactgtaaatgaaaaatggtgataatgatagcagctatcatttactgaatgcttcccacgggccagctg

SEQ ID NO: 143468 - DNA, 394 bp, Homo sapiens
acttccacctcccaggttcaagccattctcctgcctcagcctcccgagtagctgggattacagtcatgcgccaccacgcccagcgaattttttgtatttagtagagacagggtttcaccatgttagtcaggctgacctcaggtgatccacccgcctcagcctcccaaagtgctaggagtacagtcgtgcaccaccatgcccagccagtcttttttttttttttaaccttatatagctgtagattccaacttccacaggcatgaaaaatacttatatatgtacatatatacagacatacctacctgactccaaatatggggatcaagtaaaacattaaccaacatttttagttcaaggtggcctgttaatccaggaaatagattacaattaaaat

SEQ ID NO: 143469 - DNA, 756 bp, Homo sapiens
ttccaaagggggtcaggccaggcacggtaactcatgcctataatccagcactttgggaggctgaggcgggtgcatcgcttgagctcaggaggttgagactaacctggctaacatggcaagacactgtctctacaaaaaatgcaaaaattaactgggcatggtgatgtgtccctgtagtctcaactacttgggaggctgaggtagaaggatcacctgagcctgggagatcatggcattgcaatctagcctgggcaacaagagtgagacctctgttctcccaaaatattaaaaaaaaaaaaaaaaaacccgaggtgttggtgtgggcccctgctctgtatcctcccacagtctaatctccaggaggctgggggtgggaaggatcgtttggaccctgggaaggttggaggtctaacagtggagcccttagggttggcacaatttgcatctcccagcttctggggcaacagatgtgagacccctttcttttaaaatataattgggtcccacttctatcttcatggccccattcttttaagaacacaagcgtacacttgctctttttggtaagacccctttaattttaccgtcccaaagacccaccaatctttatacccttatataactggttagaatttgcgcctgtgcttttaacggtttgtctcttagcctcagaaggtccaattatttccccgatgaatcgcacgcggtgtttacatcccaccgcgcgtgggaacgctctctaacagatacgggggg

SEQ ID NO: 143470 - DNA, 266 bp, Homo sapiens
cggcttgattctatgaaggcgtctatttgatggaacgtactggaacagttcatagccagcccagcaaaccttgtgtggagacagagcttgctttttctctttccttttcctgtttgcagtgagaatgaggcctttctctccccggccctttgctctccccacagttgtctcacgaggtcacttcctgctgacaggctcctttcagtgcaaggtttggatggaaacaatactccgttttctgggggactggtgaggctctgggcctc

SEQ ID NO: 143471 - DNA, 326 bp, Homo sapiens
aaccattgtcctaaaccaatatattctttcctatggttgatttccactacaatttccactgtggttgaaagttatttcttattattgcttctccttggtatgaaaatgcaaatacacagtatgcatatttattttagaaagtaagcttgagggcaggacccatgcctatttctattctgtttatcaagcaacagaaagggctgcacataaacgcatggacttaggaaggggaacaatacacatcagggcctgttgggttggtggtgggtgaggggagggagagcatcaggacaaatagctaatgcattaggtgatgggttgatagg

SEQ ID NO: 143472 - DNA, 347 bp, Homo sapiens
  misc_feature (201)..(201): n is a, c, g, or t
  misc_feature (302)..(302): n is a, c, g, or t
  misc_feature (320)..(320): n is a, c, g, or t
aaaaggatgagttataaaataaaaaatttattaaattggagttcatcaaaagacagtgtcttcaaaagtcatcattaagaaaatgagaaggcaagctctagactggtagaaaatgtttgcaaaatatatgtccaacaaagaacttatatctagaatatatgaaagaattcttacaactcagtaataagaaggcaacccaanttaaaaaatgggtaaaagatttgaacagacacttcactaaagaacatattcagatggcaaatacatacgtaaaaaattgctcaacatcattagttagaccnccagtggaaggcttggtncagtgggttcacggctgtaatcccagc

SEQ ID NO: 143473 - DNA, 340 bp, Homo sapiens
aaagccccgcgggcgagctcagcagcccggagcgaccgcggccccgccgcctcccccgcgagtcccggcgatgcggcccggcctgtgagcggccggcgaccctgggacgccccgccgcacaactacctcaacgccgtgccgcccccctcccgcccccagggaatctctggagattggttcaccttttgtggtcctgaccccttctgtcctcactgtaccttgaagtcctagagtccaataaaatcgctgcctcccagctgtttggatcacagagaggtttttgcactgccatagggcgcccccgtgaggcgcttcgccccccaccatgttccagcgcctc

SEQ ID NO: 143474 - DNA, 437 bp, Homo sapiens
gccggtgggggtggtggagggagagagagcatcaggaagaatagctaatggatgctgggcttaatacctaggtgatgggttgttatgtgcagcaaaccaccatggcacacatttacctatgtaacaaacctgcacatcctgtacatgtaccctggaacttaaaagttgaagaaaaaaataaaataatctgttccagattcttgtcccagaacaatcctgagcttcctactgtacaggatctatcttccaccctttgtagaataagaaaccatttgcctgctttgaatcatctgatctcttcgaagcaaatcctcaaacatcactggtggcagcttactgtcctcattatcaagctcaatgaggatgtaatccatctgggccaggggatgtgaacacagaatagccttgacacatctggagctgtagctatttcctat

SEQ ID NO: 143475 - DNA, 576 bp, Homo sapiens
tgtattccaggggttcatgcgtgaggtagctatgatcaactgcagtcgttctcatggatttttatcctttaaaaatggttatgggccgggtgtggtggctcatgcctgtaatcccagcactttgagaggctgaggcgggcagatcacctgaggtcaggagttcgagaccagcctggtcaacatggtgaaaccctgtctctattaaaaatacaaaaattagctcgggaggctgaggtaggagaatggatcacctgaggtcagttcaagactagcctggccaaaatggcgaaaccccatctacactaaaaatacaaaagttagtcgggcttggtggcaggcacctatagtcccagctactcgggagggtgaggcaggaggatcgcgtgaacccgggaggcggagcttgcagtgagccgagatcagggcactgcactccagcctgggagacagagcgagactccgtctcaaaaaaaaaaaaaaaaaaacaggagtgaaaagttgagatgaccatgtgaagccagccaacctgaacaaaatgtaacttttgaatgataaggcacgcagaacgcgcctaat

SEQ ID NO: 143476 - DNA, 422 bp, Homo sapiens
caacagcatatggttataaagtatttgaaaatcatactctttatttgtagcagaataattgacaccactgacttcaaaactcattgttttatatgtggatcactctgaaataacatttcattttctttcttcagaaaaatgatgttccaaagagaagttcagtttaaaaatttatatgaagagatttctgatgaagcaaaaacatacatatactacattaaaaaatataaaaagatatcctacatatacaagattaataaggtttcatgaaagtaacaggcctgaagaaactttgaaatctctgcaaactttcccgtcatttacggaaaacataaaacctgaatttactatctgcccctttcaactttattctatttttctaaagcatcctcaaaataaaaggtagacattttggagtgagg

SEQ ID NO: 143477 - DNA, 371 bp, Homo sapiens
cagcatgaaagtccctaacttggcattaacagcacaaaatggatagtaacccaggagagcatgctggatgacatgacccaaatcaaaagatgatgctttccttggaaagataaaatggaaaaaccagccaactaaccaataaaggattgcattttttctcaattctgagataaacaaaacaaagatataaataagcagataagctgattaataagatttacatccactcaacttatacctcaatttgtaacttcaacatttttttatacataagaaagtatgccttggtcgaagtactgacagctttggtttaaagtaacactggcagaatgaaaacactctccagatttttctcctgttgggacaaagat

SEQ ID NO: 143478 - DNA, 379 bp, Homo sapiens
tggtaaatattcctagtgataacctgaacatagccaagagtttctgccttaatcaggggaaaatacaggcttaagataggagctgggcaaaattgttagaccagttaatggatttgtttccctactttgcatctcattttgtggaagtgattttcagtgtcaattgtttgtttagacacagagtttggccctgttgcccaggctggaatggatcacagctcgttgcaacctccacctcctgggttcaagccatcctcccacctcagctacttgggaggctgaggcaggagaattgcttgaacccaggaggcagaggttgcagtgagccaagatctcaacgtcacactctagcctgggtgacagagtaagactctgtctc

SEQ ID NO: 143479 - DNA, 523 bp, Homo sapiens
acacataaatatcagacccatggcatttcaggctccgggtttgtgggagtagaggggcgggtttgtgatgatgaagcgcctcagctctgagaggatgcagcctgggcctctagaccagaaggcttcactaccctagaaccagagtggacatgcccacgtttcatgcacttcccaggagttgacagatcaagtaggccaagaattaatatggatatgaaaggtttgaaatacagttaacaggcttggtttgagagctgggaactttgcactcaggaattaaagaacatcctttccttccaagaacacagaaacatatgccaggccacagaaagatttccacaaatctcaaagaaccgttttcaaggaaccctcattctgtcaaggagccctcattctgtcaccatggagcgattgtattagataacaacacttggccagacatggcgacccacacctgtaatcccagcactttgggaggccgaggcaggaggatcgcttgagcccaggagttccagaccaacct

SEQ ID NO: 143480 - DNA, 239 bp, Homo sapiens
gcctaaggcatgtactggctgtcttccacttccaccatcttctactccccataataaaccagacggccctccttaatttcccaggtccacccagcgtcagagcacctcaccacggccttcaaggcccggcccacttcagccgcaagtgcgctacgtgcatgtgaaggagcatacacgttccatgctcccgctccaaccacctggcctcctttcaattcctcagacccagcacgcctgcc

SEQ ID NO: 143481 - DNA, 388 bp, Homo sapiens
atcccagaaaaggggacactcagctcagtttcctaacctacccacaatcaccagctgtctggtcttgtcagctgcaggctactgagtgggtaagaagcatggcgagtgtgttagagaaatgaatgaacttaaagcacttttttggtcttggattgctctggagaaaagtctgagagggcagcagtaaagttctaccaagaagtctgtaggatcatcttcagatttggactttggccacagccctttctccacaataaaaaaaaaagaagtcaagggctgggcatggtggctcacgcctataatcccagcactttgggaggccaaggcaggcaaatcacctgaggtcaggagttcaagaccagcccggccaacatgttgaagccctgtc

SEQ ID NO: 143482 - DNA, 297 bp, Homo sapiens
gagagatagggttaatttgtacaaaggagtcatggttgctcttagtttctaaagtcaatactaagatgtgttcaactatagttcaatttaccgtggagaattcctctaattgcccatgcactatggtatttaggacacactaggcttgtccgaaccagcaacatcactctcagttctcagttaagtccattaaagtcagttttcccaacccatgaaatacttggctggttctgaaaacccaagctgacatgctagtatgtgattaggggcctcaatccctcccagtgtggagggatc

SEQ ID NO: 143483 - DNA, 458 bp, Homo sapiens
ctgcgcttccaccggaaacctgtatactttgagtacgggaaaactctagcgctattcggacaaagaaaagtatatttatgtatatgagggggaacactcactgtatggtcatgtgctgagtcaagaactcctgatctgtagtgatctgcctgcttcggcctcccagagtgctgggattacaggcatgagccaccatgcccggcccaaagatgattttttaaatgctcaacaggacaaagcctaatggtagtcttttgttaaaaacaaaatttaatatcaatccattgacaggactctttgtgtactgagctatatagtaatttcaccttaatagaagttcttcataaccaccccatataaaaccatccattcttatctcttttttttttctccatactgcttatcacagctgacactttatactgactttgtttccccctctataccctttactccag

SEQ ID NO: 143484 - DNA, 341 bp, Homo sapiens
agtcatcgtcatagctgactcttgagggtgcaccctctgcctcccaggtccaagcagttctcctgcctcagctggctacaatattgcaaaggttttacagggaccaagtttcttctctttgagctagaattatatcagttccagggggtaattaacataggtgctctcctgctgatcagagctctttgattaatacagaatggaaaaaattagtacttaataaatgcagtctattatgtagacagaatccttcagaacttggagttcaaagggaaagaagtagaaaaattaggccagttgtattttctacaccattttatgaagtagtaacagatctagag

SEQ ID NO: 143485 - DNA, 567 bp, Homo sapiens
aaatgatttcttacatcttttatccttggtcactttaaatctttacaccttattgtaatcgatttacattagaagcagcatacttgatggtctcagtgaagtctgtgtggtggtgttcttttagtggagcctagcaaaaaaagaatttccttgatttcctgatctttgggattctagtcatatggaccacatttggaataagcacatagttgaatataaaatgacaaaatgaaacataaccatattcttaaagttctcattgaattgttctaccatagttgaagtgtttggtcagtatggccaagtgtttgtttgtttttgagacggagtttcgctcttgtcaccctggctggagtgcagtggcacgatctcggcttactgcaacctatgcctccctggttccagcgattctccttcctcagaccccggagtagctgagagtacaggcgcccctccaccacgcctggctaatttttctattttgtgtattttaagtagagacggggcttcacctgttagccaggatggtctcaatctcctgacctcgtgattctgcgcgctcggcct

SEQ ID NO: 143486 - DNA, 632 bp, Homo sapiens
ctggagagcatgactacttctgtccagggttcctccagaaaaaatttattaacagaatgatggttaacagttgctgtctgcttacactacaaatgtccaaagagtggggggctcccagcccttgggggaggcagacaggacgagccagcacttccaatcccaccaggacatggcagggggccggctctgcgccaagcccacaggactggaccaaggctcgtcccactcatcagagggacaggaccagcccacagtcctgtgcaccccgggccaagcctctcctcccccactgccacgttctcaggttaatgacaagcgaataaaagggaagatcctactcgctgacatccccaaccacacgcccacctctcagaactaacagctgccctggtcaaggctgacaggaagaagtgcatgttggggacatggcagacaccccaaaaatggccgggcaggcggacgaggcacccccaggagtgaccagatgccacccccagtgcgtgtccctcccagagctctgcagaggacgcctgtatggaagcaggtgctcaaagatgggcaacagaatcacagagagcaaaaggcgtctgcggagccgacagccccaaccaggagccaaacccagaccccag

SEQ ID NO: 143487 - DNA, 151 bp, Homo sapiens
cgctgctactgctaccactccagggctgcttcgcggagccactgtctttgggctttagctcccaccactccttcccagcaggcgtgggttcttagacttcagtggaccacctttaactggaaagcgtgcttccttcccaacagaacaagcg

SEQ ID NO: 143488 - DNA, 243 bp, Homo sapiens
aggaaggcaggagcagggcttgcttcaccaacacagcggagaggagagaaggcaggtggagaatgggccaaggcgattggaaaatcaagtgaactgaagttcaaggcagtcctaacgtggagaatataatactatttggacttgatctaggagacctcaagggaaatgggtgatttctaaagacaaggtttcccacattaccaccattcatagactcctacacaatttttgtaatattcaagt

SEQ ID NO: 143489 - DNA, 710 bp, Homo sapiens
taaacatttcacttttttttgtctttttgcctaagcacaaatttctgtaagtctaacaaaacaattgtagtaactcccttaaaattacactctcttgataccaatttgtccaatttggtatcctttttgtacactaaagtcttaaatctaaataaactctaaattgtaggagcataattcttttagttgaggtaataaagttctttatctccattgcctcaattttaattcctgtttggaaagttgagctcactttatttgccagggtatctggaatgcagtatttgcgtggtggtaggatcttgggaacaggggaattgcttctgattagttgtgtgactgaaaatactgatcacttctttggaaattgaagagggtgcactagatctttattgaaccgaatgtattcagtgtctcagtgctaacactcgtccaggccctcaagaagcagaagtggactggaatataccagcagttctcagtctccttagactcactttacactctgaaaaatgtgttcatactcaaagagctgtttttcacgttatgattatatttatcattaatttaccaaactagaagataaagtaaatacacctattaaaaataaaaaattacatataaatatttttataaaaacaacttttcccaagccaaaaatgattagtgataaaggtgacattgttttacattcttgcaaatctcttcaa

SEQ ID NO: 143490 - DNA, 137 bp, Homo sapiens
atggacgtgtaaataaatgatggtaattcagttttagttctgtaataaaggcatgtacaggctactgtgaaagagcagagaaagcttcacagatgattgacctggcaaccacatgtcagcagttattattatagttg

SEQ ID NO: 143491 - DNA, 335 bp, Homo sapiens
cttctcttctcactcagacccctctaatccaggccatcatggcatgggaggagacatgctgatcttgccttctccaagccatcctgcagactgctctagagttctctttctaagtgcaggtctgaacttgtcactgcctgcctaaacctctgagagttcctattatgcagaaattgatctgttattctgctgtgaacttttaattcactactaaatagcgtgagctaatacatataaagtgcctaactcaacatctaaggagatgctcaaaaaatgtcatttatgctattatcactgaaggctccttcaagccttgcaaagttgatatgtagatg

SEQ ID NO: 143492 - DNA, 398 bp, Homo sapiens
ttatctatccccagaaaggccggcttttccttgcaaccacctcacctcgaaggtcagttagtagtactgtgacctcatcctactcgacactaaaatgccaaggaaaacaaatatagctacaaatcagaggaaaagctggttgctctggggccagttcaaagcactcagcagtgcactaggccctgtggttaacactgtcacttttgaccctcatgaccgacgtgaagtgggagttagtaatgattagaaagaaaagggggtgggaaatgagaaaaattaaagcaaagccctgaacaatgacaaaatgtctctgcaatgcacctctgagagggataaggtaagcgaaagcaggccagtgctttagaactgcatttctgtcctacaagtgtaggtgatgt

SEQ ID NO: 143493 - DNA, 202 bp, Homo sapiens
atgtagcaagaccttgtctctacgaaaaaatattttttaaattagctgggtgtggcaatgtgcatctatagttctatctacttaggaggcaatgtgggaggattgcttaagctcaggaatttgaacgctgcagtgagctatgatcacactactgcattccagcctgggtgatggaggaggaggggaaggggaagggggaggg

SEQ ID NO: 143494 - DNA, 594 bp, Homo sapiens
aatatttcagtcctatgggtgaccacttaaaattccaaccaaaacaaacaaaactgcatatctataatttactgagtataactctacctttcagccatattagtttatatttagaagtggtccgaattatgttaatcttagtagtttgttgatataatgccactattacagattttctttatagattgtttaaaaaattttttcttattatcatgtgaaacaaaatgatgttattttagcagctgaactactatgtaaccatgactaaaaatttagtaggtgataggcaacggtgttggttaatttcttctgaataaaagacatgctatataatatttttacagtaatattctaatagtgtattactatatgatgccagaagatcagaatcaaatatcattaatgatgagcaactacttattttttatctaattttattaacgcgtttctgctgttaaagagtacttcaaatatatatgtaaagctcagaaaataatataaccccatgtatttcactcagattgaacaagtattgatattttgccatatttgcttcagattgctagaataaaatacagatgtaacctttttttt

SEQ ID NO: 143495 - DNA, 345 bp, Homo sapiens
gacaggtggcccacagggattgcagcctctgtgctggaacgtgttttatatctcgatcgggcgggtgagaggttcactcccactgaacctggcgtgccatagagctgccagcctgggtcaggggtagccaccaccatgccccatcctgagctgctatgaagcgtgcgtgcctggctccaaatcctcccgatctctcattcaggcttctgccatgtgttagagaagtgagtggctcagaaactggccaagagaggcaggaaggtggtgggaggtggtaacacgtgtcagccaaggctccacgccccctggcatgtgctccagttgtccccttggactcacttacaa

SEQ ID NO: 143496 - DNA, 286 bp, Homo sapiens
aatctgaggtataggagattctgagatatttattttttcccagagatgtttttatctgtcttttgtgccttgtgactttgataaggttggaaataacttgcgcggggattggtttgagaagtccattgtctcagagatctgcctcattcaaaccagttgatactctcttttacctagagtagtcctgttttcatatttgaatgatgggatggtggggggaagaaataccacggagtttgacaaattatagataggcgcagaggctaacactaaatcctattttgag

SEQ ID NO: 143497 - DNA, 443 bp, Homo sapiens
cccaacaccgtctgtggaaaaattgtcttccctgaaactgatctctggtgccaaaactaggttggggacagatgtagtaatatgtacataacaaaatatgtattaatcaattgtttgttactggtacggcttctggtcaagagtaggttaccagtaagtagttaaggtttgggaggactgaaagtgatgcgtgaattttcgaccacgtgagaggctggtgcccctaacttccacgttactcaagggtcaagtatataaagaacaatctagggccgggcgcagtggctaatgcctgtaatcccagcactttaggaggcggaagcgagtggatcacccgaggtcaggagttcgagaccagcctggccaacatggtgaaaccccatctctactaaaaatacaaaaattagccagaaatggtggcacacacctgtaatcccagctac

SEQ ID NO: 143498 - DNA, 393 bp, Homo sapiens
ccatttttcttactacatgctgggacagtgccagagtcctagaactcagagatggatgtggtgtttgtacccttgaatgattctttgaatgccaggctagtgatttggaccttgttgacaagtttttaaaaggggctgcatataatctcttgaagccagacattgaagcagaagctcccccgactcccgctgtgccttccctccttctttcccttatttgtggtaatgggatcactgttctcccaggtacccagtctcaagggtctttttgcagtgttcctgtggtcttctgtgtgacaaagaccatcagtggcaattttctgccctaatccctgccaacctcactcatcaccagcatggctgctggaccatccttactgggcactctctgtg

SEQ ID NO: 143499 - DNA, 471 bp, Homo sapiens
agctcggttccctcgaagcctgcagaaggccattcagactggtgggcacagagagggcaccaggtgggaatatgcaaggcacagcacgctggccacagtgcacaggttttaatatcttgctggaattacttgatgagctaaaatgaaaggagttttgaagacctccttatgttccactaggtccagggtaaatgtgcacatggcatcacatgctactctgagtaccagatgacgctgtcccctgagcctgacattcctgcagatgactgggagtgtgagatgagcatccaagaaagaagcacatgtctgctttaggtcagagtgctggctaatcagacacctaagggatctgcaaagaggaagtgcaggttcccaggagaggccactggaaagccaggctgtgaaggggcaatgacagcccagtccaccctatgtgacaaagaacttctgacacttgcatcttgttctcac

SEQ ID NO: 143500 - DNA, 423 bp, Homo sapiens
agctcggttccctcgaagcctgcagaaggccattcagactggtgggcacagagagggcaccaggtgggaatatgcaaggcacagcacgctggccacagtgcacaggttttaatatcttgctggaattacttgatgagctaaaatgaaaggagttttgaagacctccttatgttccactaggtccagggtaaatgtgcacatggcatcacatgctactctgagtaccagatgacgctgtcccctgagcctgacattcctgcagatgactgggagtgtgagatgagcatccaagaaagaagcacagaccaggctttagccacatgcaaagacggcgaatcacggacaggacaagggacaagcaagaaaaggaagcgacaggcgactcaagacgagacccacccagaagccagactatcatgcgcg

SEQ ID NO: 143501 - DNA, 403 bp, Homo sapiens
taccaccatgttgtttatctgttcaccagttgatggacatttgagttgcttccagtttggggctattattagtaatgctgccaataccttttgggcatataattttgtgagtacgtgttttcttttctttttttattttttgagatggagtctcactcttttgcccagctgggattgcaccactgtactccagcctgggcaacagagggagactctgtctcaaaaataaataataaataaaaacttcattctagtggatgtatcttgatacctcgttgtggtcctaatttgcatttctctaatgagtagtgatgctataaaattaaatacaattaagaatttaaaaacatgtaaaaagaacatgtatgcagtaaaaccatgtaagaaggaaagaatggttctc

SEQ ID NO: 143502 - DNA, 451 bp, Homo sapiens
aagaacgttcagaatagctttattcataacagcaaaaaactagaaacaacaaaatggtcagaaacagaagaatgggccagacgtcgtggctcactcctgtaatcccagcactttgggaggccaaggtggatggatcccttgaggtcagaagtttgaaacaagcctggccaacatggcaaaaccctgtctctacttaaaacagtacaaaaattagccatgcatggtggcaggcacctataatcccagctacttgggatattgaggcacgagaatcacttgaacccaggggggtagaggttgcggtgagccgagattgcgccactgcactctagcctgtgcaacagagtgagcctctgtctcaaaaaaaggaaaagaaatggaagaatggataaatcagttgtggtatgtgcgtataccacatgttgtggactgtttgtagttccccaaaatt

SEQ ID NO: 143503 - DNA, 561 bp, Homo sapiens
tttagcctccctcctggctcccctctctggcacctatgtctacttttcttctccatatctggcacctttccttccaggccttgatttccacttccctgttgtatttggagtaatttagctctttcttagttcttccaatcccttcctccccattgcccaccagccaatcaaaggatgtaaaaggagtaggagagtagttaataactctattctgttacatgcacttaggtatacttgttcagcaactgttgcccctaccatttgtaagtttcatgacactcacatgacctcatgaatgttttattcaccactgtacacccagcacccagcacggtgcctgacacatagtaggggttcaataaatattggcggaataaatgcatatcatggttctctaaggcaactcattttttaatttcaatttaaacatctgggtccctggatatgcaatcctgggtacccatatacccaggtagaaggtcaccatagactgtgaacacattgcctgaccttcttaatatccaaatacatgcattagcatccagaattctccaccacatt

SEQ ID NO: 143504 - DNA, 299 bp, Homo sapiens
ccgccttggtctcgcaaactgctgggattgcagggttgggccaccatgcctggcctgttctatttcattattgctattaatcttttattgtgtctaatttataaattaaaattacaggtaaaatcatagtatatatagggtttggtactattcgtggcttcagggggttttggaatgtatcccccttgtataagagggactactgtactatggatttagaagttggtcatcagtcttctcagagggtctgtaattaggatttcttagtttaagtatggctgtataaaccttttccaaag

SEQ ID NO: 143505 - DNA, 241 bp, Homo sapiens
ccttccttacttgcagccaccatgatggtgcaggctccagcccctccctggcatttcctgccatggacccggcccaaccatctccgcagggtgcactccttcgtcggtgtgaatatggtgtttagagaccccaatctggtcaccaggggtggtgcttgctcctgggatttcgttactgctagggctttggaagagacagagccaggaaataagtatttttttttaaccagtaaaaaaaaaa

SEQ ID NO: 143506 - DNA, 378 bp, Homo sapiens
gctggtggagtagagtagattttcatcgtgtccctacttccctgtgggatacacgcctgttggctggaatggtgggtggaatcactcatgttgtctaagatcttgttctctgtctcttttttgtccagcactgcgtggctgaattcacacaggtgaaaggtgtgctcgctattatgggctgaattgtgtccccctacccaaattcgtatgttgaagccctaacccccaatacctccaactgtgactgtacttggaaatggggcctttaaagaggtggttaaggttaaaatggatcattaaggtgggctgagtttggatgtatgtccccacccaagtctcatgttgaaatgtgatccattttaaccttaacccgagcgc

SEQ ID NO: 143507 - DNA, 426 bp, Homo sapiens
aggaagggaagaggagggtgggaccaggccataatggccctggatacccaattgaacagctgggggcttggccggcagccaacattgagccctgagggcagggggcagactctggcaccaggagtggaagcaagggacctggaggaaggcttgtacccaagggctaagttacatttttcccgagagaggaatgctacacgccaaaccctggctcttcctcacccccagcagcccaccctactccacctgtcttagaactgacattccctcgagggtctcacaactgggggggcaccaagtcagggacagtttctgcttggtagtctcaactgagaggagaggagctatttcctacccatacactccccacataactgacaacggcttccacaccccaccccatgcagcactggcgagggcatacgt

SEQ ID NO: 143508 - DNA, 394 bp, Homo sapiens
ttgagttgtaaaatgagaagagcactacctaccccatagaattgtgagattcaaattagattaaatgttgataacttaaaaataaaacatacaaggagtgctgagaaagtaggcacaaggttaacatatggctggggaaattttggataaccgttttgaagtctgtccatctatctatttggggtgtcatctatctgtatcaaggactattgaaatatacatggccaggcgcagtggctcacgcctgtaatcccagcactttgggaggcagaggcgggcagatcatgaggtcaggagatcgagacaatcctggctaacacagtgaaaccctgtctctactaaaaatacaaaaaattagccgggcgtggtggcgggcgcctgtagtcccagctac

SEQ ID NO: 143509 - DNA, 466 bp, Homo sapiens
cgggggattttattgctgatgaaagtggctctcagcaggaaaaggagctgaaaaggggacagagcaggaaggtaatcttcacctcgagtccagctgtccgcaatcagactcctctctgaagctatgctgccaggctgtccctcggaagtcaagccacttctctccaatgcacaaccatagtttccaacatccagctgcttctcctctgtgccggctgagcctgggatttttacaggcacaggatggagggcagggtgggctatgggtggttttggaaaaggcaacatttgagcaggaaaacagggatgtaagttctcactttgggccacagttccaggcttttaggcttaagggtggggcccttgccagagacccgccctcttctgtccagaatttccctgcctcctgtccctatcagtagtaatagtagtagtagtagcagcagcaacagaagtaatactaacta

SEQ ID NO: 143510 - DNA, 438 bp, Homo sapiens
gggaattactgtttcccatctgctactccatttactagcaatgaggtttctgtttccaaacagaaacagccttctctccccctagactaatttcataaattccatgagctttccacaaagtgggaaaccagtcattcgacagtagtaacatatttcaaattaggagctacctctcttttcaaagatattttcaatagagaccccgaatactgccaaaagagttgaaatgagacaacagaaaacgccaactctaaggctcagaaatttcctaacagactttattttcagtcaaaatctgtggcttcttttgatggggaaaaaatgtctttccccatgactggtaaacaatcccagatataaaactgtccaaagtaacataaaccgaagtctgcacagctccattaacaagcacggcccatgccagagtggatccacgca

SEQ ID NO: 143511 - DNA, 323 bp, Homo sapiens
ggaagtcagcgtgtggcctgcacgcacagagccgtttattaactgagtaggtgccataggcagggaccacgtggttcccagctggcaagggaggtcaaggaagtcccagctccctgatcctccagggacttcctgcccatcttgggagtagagttcattggggccaagagcaagaggctacaggctcatctcctggaagcagacgttatgcaaacagaagcttccctgttaatgggagtttgtccagtgtattctcccaagagcaggggccaccggctggatttctgttctctgtccatgtccctgaagatggcacctctaaa

SEQ ID NO: 143512 - DNA, 331 bp, Homo sapiens
ctttgttcaaggtgcctatttgctctgcacagtgactattatgaacacagaaaactgttcattgttaaatatggcatgctaagtggttttgctttctggcaaatctccaaaccataattattaagggactggagctgctgaggaattcttgggttacaagaggctttgatcctgttcctgccttctttccctgacatgaatttccacgggtgtggctgactttcattgtttttcactgctgtggtgctgctgtgaaggtgaaggattaaacagaacttcaaggtgacaagggattgggccccccagaactgctgagaggaggctctggcta

SEQ ID NO: 143513 - DNA, 546 bp, Homo sapiens
atcttcatgactacgtgattataattccttgagagccccatgtctatttgctaaaaaataaatatgtgctgctacactaacctaacaagcagtcatcttgtagttcctgcctgaaaatgtttgatcatggttgtcaactctatgcctgctataatttttgcctagcataatgtgaagagaaaagataaaaatccttctctcactgtgcattttcactgtcccctcccctcattcttagtgtatagaattccagaatgggccttgctttctgacattttcctgccccatgaccctaacagatctattcaacatgaccctgacggctgagatagatctaaacccagccccttcacagtggaacacttaagctgggtagtagttccatactgagacccctttcagtactttctcttcctccccttcttttttgttgtgtcttcccctaccaacatgagctcctttttagggagaagttgtatccttcactcttttcccccatcacctaggagttgctcaatatagtcattaaataaattttggcattct

SEQ ID NO: 143514 - DNA, 749 bp, Homo sapiens
aaatctttattaaaaagaaggagagagataagatggcagcccaaatgcagagtgaagaaatcattttttcctaaaagagagaaaacagaagcaggttttaatacagaagcaaagcaacagtgcggaggcagagcctgaggatgtcagaagtatacttatacatctgtttcctcaaagaaattgggagctcccagtggaatcccagcagaggcactcaagcagaggttttgaaattgcgaacagcgtttataactaatggaatagaatccccaaaaaccaacaagggtctgaacgaagggagccttaggaaagagagtgcacacatgctttctctgagatagaaggggagtgggagatgatgagggaaaacacgggaatattttgaatggaaaaaaggctgcacacaggagttgtttggcagtggagagaagattctcatcagctggccttgatcagtgcagtaaggcagaggcgaggtcaccgcccacagagggagctggcagcattcaggggctggcagagtgggaaggagctgaggaagacagaaaccagctgttggggcccatatattttggagttaaccagagactcagaagaggccgggcgcaatgactcatctctataatcctggctctttgggaggctgaggcaggaggattgcttgagcctaggagttcgagaccagcctgggcaacatggtgagaacctgtctctacaaaaagcaaaaagatacaaaagttagccgggtg

SEQ ID NO: 143515 - DNA, 268 bp, Homo sapiens
gaattctcggatcaggagcagctctgtgcttttctgggacaagcttctagagggagaggcagaccacatccacaaccctccctcctgtttgccctcaggctggggagtgtactcagtgattaggggcaatcgtagacactcagtaaaaggcagccaccttaaggaaaagtagccagattgttttacacaggagcccccacccctgctacttctcactgagcaaggcctcctgagagaagctgtggcggccggagaagctgtggcggcc

SEQ ID NO: 143516 - DNA, 267 bp, Homo sapiens
gcagtggcacccttagctcaggagggtgcgtcaggacccagttccatcctcacacggtggggaagcctgggctgtgctcccagaacaagaaacagacctgggtgatgagtgacaaatgtggacggttctctgcactgtgggtggaaatagaaacccttagtcagctgtggggttcagcaaagaatttccctggttaacggaaacttgactggctgtgggtgagggggaggttgggttctgagacgtctgggaggcctgggctcttcg

SEQ ID NO: 143517 - DNA, 264 bp, Homo sapiens
gctagcgaacacactggaaggcaaagagggagagtcccatgtccccacccctgcaagtggaagagctggagagtgggaggtggggaaattgtcagtagggttggagggtaggcccaagtgaggtcctccagttagagcctgagcagtcctttgagggaaccccagtggaggggtagggttggaaaatgtatcattcaagttatagagctgcttctggttgagcagggaatggggtgagttcgttaaggaagactgaagaagtcc

SEQ ID NO: 143518 - DNA, 860 bp, Homo sapiens
atgctcagttcatatgactgattttcactaagtgtaacaatcaacgagttcaccataaagcctttcccaacatcaggacagtaaagcaactactgaaaaccattcctgaatttgtgatcaatggactcaagtttagggagaggagcaccttggtctgcaacaatggtttgaatcccagtctctaattacttctttcccaaatactctggtcaccaaagggacaatatttggtgagatgcagccattctgttggttagcaggagttcagacgcaagacaatgtcatagtggtagaatacagtatcaacttcaacagcaagcccatctctggaagctcccagaccattgtgccaatcaagtggaggaggcactttcatttagagaggcttatgtgaaccttatatgagaaacttgccaacctgcctctttgattttttagccttactatttctaatacttaggtgctatcttttagagaccctgaaacagccaagacatgacacttagtacagaggaatccatagaggtgttggggatattaacctcactcttggcatgctgaacaaggaagatattgttaacaaggaagacatttacagtcatctcacttctgttattcagaatactgacatcttggatgatgcaattgtccaacgattgatttattatgcttctaaggatatgagagacaacaatatgctcagagaaatcagaatgctagctggtgaggttatggtgtctcttgctgcacatgatttcaactctgtgatgtatgaagtacaaagtaacttcaggatcttagagactaccagatgaattcgttgtgcttgccctggctgaattggcaaccagctatggtat

SEQ ID NO: 143519 - DNA, 609 bp, Homo sapiens
caagttgcttagacagaatgagattctctattcattcattcagtaaaatttaccaaacactgtattatcagtcaccaagctaagaatgcaggatacaaagctgcataagatataggtggatccttccctcataatgcttattctgagaagggtagataatgtaaacaaaaagctatgacagtgggatcagaactacaggagacatatgcacaaaatattacaggaagaataagttattccgatgggggtcaaaaaggcttcaccaaagagctgacatcttagttgccttaaatggaaaagaaaacaaaaaacggcacttcaagcaatacaagtatttatgcaaaagtataaggaatgaaaaatatgtttattgaagaataacagtagtctggttcacactacacaatgcaaagatgtgtgttacacaaggttataagctaaaaagagtaacttagtttacgtaaatcagttctgaataagagacagtaactcagccgggtgtggtggtgcacgcctgtagtcctagctattcaggagactgaagtgggaggactgcttgagcccaggagctcgaggctgcagcgagctatgattgtgccactgcactac

SEQ ID NO: 143520 - DNA, 196 bp, Homo sapiens
cctcagcctcccgagtagctgggattacaggcgcccgccaccatgaccagctaatttttgtatttttagtagagacggggtttcaccatgttggccgggctggtcttgaactcctgagctcaagtgattctcccaaagtgttgggattacaggtgcaagccaccatgcccagccaaattggagagttattatagac

SEQ ID NO: 143521 - DNA, 743 bp, Homo sapiens
ctcgtctctactaaataaataaataaatccagaggatcccacctccctgcagccctttcaaatggaggctgtttatttgcatacagcccaagttcctcctggtgggaggtggggttgctgttctttctcctcactccttgaggctgcctccagatcatagcttctttcctccctattcatttgaccagtaattgacagccaatagctataaagagcctaggggccaggcatgctggtaaggaccttgggtggatgacatcatttcagcctcagcacgactcaatgaaatattgttgttgctatccccattttaccacagagcctcagaggctcaggttaataacttgctacttcatatattgtctcaaatatatgaatggaaccaacaatatatgatgttcctacttcatatattgtctcaaaatttttaagaacagcttgtttgaatttgaattcagttaatgtcatacatcgcaactggatttaagatgaggtcattttcactgaggagttttccagaatctgtatgttgtcaattacatccttatggtatcattgaacttgtttccctgtcatctgtatttcctgtaactggtatttagatccaaaggtttaaacagattcaaatttgattttttttttggcaagaatacttcataggtggatgaaattgtacgctacatctagatacggctcgtattaactgtactagctaccctataactcgggggcgtacagctatt

SEQ ID NO: 143522 - DNA, 320 bp, Homo sapiens
cttgcctcagcctcccagtagctgggattataggcgtgcgctaccacatctggctaatttttgtatttttagtagagatggtttcaccatgttggccaggcttgtctcgaactcctgacctcagatgatccacctgcctcggcctcccaaagtgctgggattacaggcatgagccaccgtgcccagcctctacaaactttttattccattaacaaactatatgcctgggatttaagttttcttaatacttgatggagtcctatgtaattttgcagcttttaattttactaagaccattttagttctgattatagaagtaa

SEQ ID NO: 143523 - DNA, 367 bp, Homo sapiens
tgtagtccatactggtcagcctctcagcacagagatgccagaacattccagagtatgctgtgagactgcctagtgtctgtgtccagccattcagggaattaattagttcgcatggatgttaccatggtacgccgagaggccgaagaaacaggctgtctttgtacagactaggagcattttcattagcagagaaataagattgcagtgtgaaaacaaccacgagggcctctgtttacagagaaggatgccgagctgagcccagtctccgcatttggacaggggccttggttgtccaggagacaagtggtaataggtactagaacttccagaaaaacttggagaaaaaagtcaagttgcggccgggtgt

SEQ ID NO: 143524 - DNA, 404 bp, Homo sapiens
gccttgaggattcctggaaatgttattccagtgattggttttagatattaaaagtattgctaaaagttatccaggaaacatttgcagatttggagattgaaggggaaaaaagtagtaagaaaactagaaacactccattatagtgtttgggatgctggactttggacagttactgtggtacaaagcaagtgctacgtgtaaaagtcattgtagaacaagaaatgagcatcattgtctgatccgaatctgaggttagattaattttagagtgtctagcaggcacacatatctcattaagaagtagttgttatttaagaatacaataaaaattttatttcaaatttatgtgtgttacttttttcaaatggctactaaagtatttgaatatagatagacatttgggg

SEQ ID NO: 143525 - DNA, 314 bp, Homo sapiens
acctgtcccgtgggtacaaaaccactgtcctctggaagcctctggccttgctgcggcttcccttacaaatgatctttggtcttgggagtctagtcttaggcctccttcacgcccttgactgcagcatctccggcatctaggcctaccttgtcccctccagctggtggcagctcaggacactgcagagcctgacttgccaggagacctcgcaggtcctgggttcacagggctatttctaggctctggtggctccagccctgcctgcctaagagggtccctccacaatcagtgaggaagccagtctctggccccca

SEQ ID NO: 143526 - DNA, 492 bp, Homo sapiens
ggcccagagtgagggagttctggagcaagttccagcttatagtacaaataactcgacatttaggccatatgacctggcaaatcccatgatgccagagacattcctggtagacaaggatgctacagagtctctggcaagccctgattgcataagtcgtaacacagacctttaggtttctggagctcagtcagtctttccgcagcagataactagtcactatttagagagtagctcctcacatcagagcacatcaactatgtgaccagagctatccatcatgagctgggtattgtcagatccaccaaacccaaagaatagaccagcatagtaataactcatgttacattcaggatggtgcccaagccgttcctagggctcccacttccatgaaaaggtggcccatgtaacttacctccaagacaccagcacctttccctcagctcatggcttcgttggggttcaccactactatcaggtgacagaggaggaaaa

SEQ ID NO: 143527 - DNA, 698 bp, Homo sapiens
gtaatatctattctgtggagatggatgtacccaataaagttgggggacagagtcactggcccacaaatcccaggtaatcacattaagagatccagcctgctctgcctaatgttattactttctccctgtggaaaggagaaatatgacactccaggggactacattcattgtttactcagtcaatcaacatttattgagcacccacagtgtgcagagctagtatcagaccaggatttgaaaagtaaaaagttcttcccctgagggatctgcaagattaatgaagtctctgccctcagggagctgggaaactgctgggggaaaaagtcttcggtttcagggctctcccagtcagatggggaaaggagaaaaccacccagaaaagcaatgtaaagatactcacagcactacactctgaccaactgagctaaccggcagccctaaggactcttaaaagataagggaagtcatcctgcaaattaaggacttggcagctgtgggacctcagtgttaattaaaggtgttttgaaagcccaagttaaggatgttagagaagtgtgctttggaagaggcagagagacagagatggcagacagacacggggaatgtattctgaggttctctgcaaaggcagaaggagaagcagtaccagaatgcaaaggactggtaagcaaaaatactagaacataaaaagaaatcag

SEQ ID NO: 143528 - DNA, 166 bp, Homo sapiens
tgtgtgtgtgtgtgtgtgtgtgtgtgtgtttgcacctctgttgtttttccaggaaaggtagatctaacattgtgttttagtctttccgtatttttttcaagtaaatgacttcctaatactctaagaggaaacgcatgtgatagttttcttttctcttaagtataca

SEQ ID NO: 143529 - DNA, 505 bp, Homo sapiens
aagagccgtggcaagatgagggcgtttatagccctatcttatccatatggacaggtgctcctcatgcatccgtttataggctctccacaagggtcacattccattcccagagctatgaacatctgcttttctaggataggaatcttggtgatgtgaaacctccctgactgcacgtccattcataggctctctgcaggggaaagcacatcacgtgctgttggctcattctggcagtccaacctggcattgtctttacacaatcctgcatgcaattatgtatttacaataatcaggagcatttcatcttttattccatagcaatagtttcagggggtctccctacatcaacctctggttccctctggtgctgttttctgagcacactgtgaacttccttgctggtaagggtgcttgtgctgcctcccctatgggaatgcccttttcaacccagcagtcactcagcttgtcagggtccaggtcactccatgaggtcagctggcaaggc

SEQ ID NO: 143530 - DNA, 468 bp, Homo sapiens
aattctcttggccaagggtcacaaagatttgaagactaacatggctattctggccacatactcagccctgtgcatgtgtaacttctgcgggagacgtccctgtctaagggtcctgcaatctaacaggaatatatagagaatttatatcttcctggatatatggagaaatatagggaatttggctcactgaagtgcagaatccacatcttcttaaatggcccttggctagagaacggtggctgtctgtcttagcattccaggctgatataacaaaataccacaaactgggtgtcttataaataataaaaatttatttctcacaattctggaggctaaaattccaagatcaaggtgccagcagattcagtgtctagtgaaggtccactttatggttcatatacggcaccttctggctgtgttctcacatggcagaagacgtgaccaagctccctcagacctcttttaaaa

SEQ ID NO: 143531 - DNA, 182 bp, Homo sapiens
ctgcaagaatgggcacagaacttaggaagggctgtcactggtcctcacctgctcctggccacctggggtcatcttccttccacataactccctcagaaaacctcacctgtgtcagctgcactttcagtagtgcctcctcccgcatggactgctctaacttccactccgtacgtgctttgctg

SEQ ID NO: 143532 - DNA, 356 bp, Homo sapiens
cctctgtgttcctcacataagaaatttaacaccagcacttacccacacacactaaaaccaaataatttggatagcctcgttgtgattcacgtacatgtttcccaattgccggcaattttcactgtcaggctgactaaatgcagatcattaacttacagggtcatgtttttcaggccgttttggtattatgtaagaacattctcaaatctataatagcaagctctacccagtaatatttatagaagcgtatgtgtaattgttagtaggagaaatatctgaagacgattttattcgctctgtaaatatgtaggtcagggtcttaagaaaatgctcattgtaaacatttcttttttgga

SEQ ID NO: 143533 - DNA, 525 bp, Homo sapiens
cctcatcttcacgtagctgtgaacatgacatggcctttccttccacaccttgggtttcatatgtggaatgactggaatgatccatgagtgcaagctgggttctactgactccctgagatgccgtgccactctctcccagctctagatataggcgtatccacagacaggcctggctggcctgggaaggatgagggtaatcagggctgagagtgtccagctgctgatgggacacacggtggggaaagaagtgggtcccaccccagccagatgaatccaggtgcaggactgccccagcaggtgatgagaacttcctggggagcaatagctgagcttccagaaactctgtgcacactttgttcagacgtcatccaccatgaggatcgggagagtctcgaagttcacgtatggcattgccctgccttgctgagcaataacaacttgtttatttcttaggaaagtcagcctggtttcctttattcaagtggtaggtccctgcttagtatgtccacctgatatctgtcagga

SEQ ID NO: 143534 - DNA, 353 bp, Homo sapiens
cctgagtgacagagtgagaccttgtctcaaaaagaaaaacagaaaagaatcccagactggccccaccccagggcaccctggctgtgctctggctcatcaaagcccagttccctgcagtctggaggcctgcactgggcaaggggcaggggctgtgactgccattggagaggagaggatgactcagacaggggcaggagcaggggaggcgccgtcagctgccttagttcccaacagaagggcaggctggcactgagaagtggctcttagctcccgcctcctggcccttatcctgccctaccggccccctgcccactccatgccaccatgtgcccctcagctcaaccacatcccca

SEQ ID NO: 143535 - DNA, 282 bp, Homo sapiens
aaagttgtcctgaagaaatcagtgagtttaatgtcatcacattctcaagtgaattttgagaaggaaaacaaacattggagactgtctgaacaagagaacacattggcacagaggctgtgattagcacatgctgatcaggaatagcattctttccccaccggctcagtgtaaattttgccattcactttctttaccagctagtgccttgagagctaaatgtcatggacctgtgttaagtttgtaatgttaatttgcccccttctcataagtccacatcttttc

SEQ ID NO: 143536 - DNA, 270 bp, Homo sapiens
tctgctgcaagtgagagcactgagaatggagaagagggaacaaacggaaaccttgctcaggggagagacggcaggaatctggcaaccaagtcagcagtgatgtcatttaccaagtctgggggaagacgagaagcagctcacttctaggtctgttcaggttgaagtgtataaggaatcctccagcaggcagttagaaacataggtctggagcctaggagcaaaccccatggtggagatacagaggcagctcacagggaggagtgaacgtgg

SEQ ID NO: 143537 - DNA, 363 bp, Homo sapiens
agtctcggggctgctctccgtgggtctcccaccattggccgaattcctttggcttctcttgggttgggtcttgggtcttctcctgggatttgctcccttggtttggggagggaggcgcatcattttatggcctcctgagaacaggtgtttgggatgtgtccctttaaacagaattcccacgctcccttcactcgactgctggcatgttaacgccacctcacttgctgtcccctcccctcttctgtcctgtggacacgtgttattcttgccctgacaatttgagaatgagttgtagacttggtgcccctttactcccaaatgcttgaacgtgactttgctgccaacgaggacatgacgccgtac

SEQ ID NO: 143538 - DNA, 585 bp, Homo sapiens
ccttctttctctctgtagcctccctgtgcctgtctcctgctcccaccccagcacaacagagtctaggtctgttttccgctgctaagtgtgtgataatttattatgcagcaatagagcactaacacactcggccagtggcccaggcctcagtgtgcggcacactctacttagcacctccacatgtgtgagttctgtcttctcagccccactccggtccttgagggtgggaatcttcctcctttatctcctctgtatctcccaccccttggtcccaactacagggtaagggttcaaaaaagtgctcatttgaattcggcatagcactaagtcagtcagaactcttcagaggcaagtgacagaaagccatctctcatcactggcttcaggcacagcaggatatagggctgggtcaatgtaatcaggattcaacatctctcatggcatctgtatgggcagtagggcatagtggttaagaccatgggctctggaattgggttgctggataaaatacaggacacccagttaaatgcttcagtctttgtctttttgccgaagttccaacaaaaggcccgaagaggagtccca

SEQ ID NO: 143539 - DNA, 797 bp, Homo sapiens
gaaagtctctttgaagaggaacctctattttatttttacactcagaagcccgggcagctctgccgggagtgcagggaggcagctctcctgggggtgcagaacacattggatacaccggttattttaccaaggctttggctggaatgttacatttttgaatgtgaccaaactgctttgaggaattgaggctgactttataaagccaatagacatgggaaagactggcctcatgccttgcccacacggttctcttacaaggttcctcagcttgcggttttggtatcaggatgacaccaaaagcaatggcaacaaaagccaaaattgacaaatggaatctaattaaactaaagagcttctgcacagcaaaagaaactatcatcagagtgaacaggcaacctacagaatgggagaaaattcctgcaatctatccatctgacaacgggctaatatccagaatctacaaggaacttaaacaaatttacaagaaaaaagcaaacaaccccatcaaaaaataggtgaagaatatgaacagacacttctcaaaagaagacatacatgcagccaacaaacatatgaaaaaaagcttatcatcactggtcattagagaaatgcaaatcaaaaccacaatgagataccatctcatgccagttagaatgcagatcattaaaaagtcaggaaacaacaggtgctggagaaataggaacgcttttacactgttggtgggagtgtaaattagttctaccattgtggaagacagtgtggcgaggatctagaatcaaaaatgccttttgacccag

SEQ ID NO: 143540 - DNA, 335 bp, Homo sapiens
actgcaacgtgtcatcaagcatcacccaaaacatgccacacacatgagggctgtctgtgaccctctcgaatgctaatttagaaaaactgcccagctctccaatatgcctccatagtctgcttttaagaactatttttgttctctcctcccaccgtgcatggctgagtgtgaatagctgtttcctgggtcctcactgccaaggtaatggcactctatcccatctcatcactttcaagttcacctctactttgaccccaggacacagcgctcttcacacatactcactttgatccattattctccctctgctctagaaagacacttgaaatacttaa

SEQ ID NO: 143541 - DNA, 415 bp, Homo sapiens
tgcttgaccggcactctctggctcagtttacatatccacaaaatgcgtggatagatttgaagggttttaagcatccaaaggtgccatacgaacctgcagcaccaagttagcgcgaaggcatttcagactaaggacactttcttcggttccactgcactcatcccttcacaggcttcattttgcccctcaaaagctacaaccgaaacccctgtatttctagagtccgaaaggcatgaaagaaaacaagaaccagtctcgggatgtgactgcggctcagttcaactgctacctcctcatctaaaagccgcctgctctgaacgtggggcgccagtcccgagcctcttgcgtcaatcttgggggagtcaagaacccacccagaccctcttttccagctctcccaaggccctggactaga

SEQ ID NO: 143542 - DNA, 687 bp, Homo sapiens
ggcactctgtttgccactaggaataaaaagataaatgggacaaagtctttgccctcaagttacttatattctagagccaagaaagagatagatgaagaacacatcttatatattaggactgtgttgggggcaggagtaggcagagtaaccctttggatatgggaaatgaaaataaatcaaactcaaaacaagtttattatttgcttgaagctctggtaaaagataaagtgaaacctgcaaactgtaaaatgaagttgctgctacacatttctccagttttggatttcattcttggatggcctttaacttggatagaaggatacaagacagccatatatatatatatatacagctgttgctctttaagatatccacttcaccctgttgtggggtgggaggaggggggagggatagcattaggagatatacctaatgtaaatgtcgagttaatgggtgcagcacaccaacatggcacatgtatacatatgtaacaaacctgcaccttgtgcgcatgtaccctagaacttaaagtacaataaaaaaaaaaattaaagaaaagagatccacttcgctcagcacatgtgatttggctttggtctttggtgttaatttggatgcctaaagaactgactttccttgatgctcactccagcctttttaggactagattggatacatttacatgtt

SEQ ID NO: 143543 - DNA, 248 bp, Homo sapiens
acttatcacctcaaatggaaataaaaggtagacaaaggccaggaagagaaagcacagatgcaaatactcagtgcccagctccaggccccgccccatgcatgatgtgcttccccagtgcactcaatgggcaccatatgtatacactgacatttgacctaatacaatcatgtcagtcttttttgtttacctctcctccatgccagtagacagtacatcagaggaggggtgagaagatgtaagttggctct

SEQ ID NO: 143544 - DNA, 319 bp, Homo sapiens
ccgcttctggacaagcagggctcccgtggccagtgggagggagcagctggcccagctgtccacagccgctgggagtcagcctctgttctgtcttaagatcactatcatagagccttggcctcgtcctctgcgcttggccttggaagctctcctgggacctctccccaagcccaggacacctctctgtgttcctggctcagtctagtcaacagtgtgagtttctctcccagcctctggcctagcaaagctggcctctccagtgtgtgcctgtgtgcgcgcgcacacacacacacacacacacacatacacacaaacagaa

SEQ ID NO: 143545 - DNA, 339 bp, Homo sapiens
tgggattacaggcgcccgccaccatgtccggctaatttctctattttttttggtagagacagggtttcaccgtgttagccaggatggtctcgacctcctgaccttgtgatccacctgcctcggactcccaaagtgctgagattacaggcgtgagccactgagcccggcccatatttttagtcattattttagtcacactttcaacactatgcactttaccagtgaaaaattatttctaacatttcttttgctaattaacaagccctccagttcatgcccaatgatgtactttgaaaggaaaaaaaaaaaccaaattataaaaaaaatttccagtgttga

SEQ ID NO: 143546 - DNA, 301 bp, Homo sapiens
ggagtttgagaccagcctgggcgacatgtctcttaaaaaaaaaaaaaaactctcatgcctggtcccatcttacttttttaaaatgagaaaagattcagctgtgtctatttaaaggcttctctctctctctcctttgggaaggacatgctttgtgcagctaaaatggagaaagagtggctaagatccttaggatccagaatgtctggcaacaagccctagtggctatgctaaaaattaccaagaattttgtatttctttgtcatagacccaatttctcttctgtatgccattaggtagcagt

SEQ ID NO: 143547 - DNA, 278 bp, Homo sapiens
cttgcttaagaagaaaagaatcatctttattttgttttgttaaataccaccattaactgcagaagctatgattcattgctcgtgcagtaatatatgcccttttaaagtcattctggaactatggcattaacacctatgaagattttgcaatcatgtatgccctagatcactcgctgaatgtacattcatgtaaaaatatgtttagaacaagactgaacattttttgatattaaagtcacttttgattattcattctgatactaaatggacatttccac

SEQ ID NO: 143548 - DNA, 371 bp, Homo sapiens
cttccaggcaaaaccacccgggttagctgcttaatctaatccagggctctggtggggcggctcaccagcccaccgactctttttcacacttgatctgtaagttgcacacacgacagccttggaaattcagccctagaaacgcaggtagtttgagagctggacctgccgctcacctcactgtggtgccttccacccttcttgcacccttttggccccaggaaagatcagttgtgtgcctcccagtgatgcagcatccctgaacctattgtcagagcctccccttgttgaatcaagtcttctttaccttctttaacaagtggcaagaatgaatgaccactgtacactttcagaggaaagggagtgggcgggtg

SEQ ID NO: 143549 - DNA, 110 bp, Homo sapiens
atcttaaagtctccttgatattttttgaacttttagaaatctttgctagattatacttatttggctaggtgggcatatttaccttttcccaagccacctgtcaatttcct

SEQ ID NO: 143550 - DNA, 639 bp, Homo sapiens
tgcagtggttcacaactgtaataccaacactttaggaggccaaggtggaaggatcacttgagtccaggaatttgagaccagctgagacaacatagtgagaccccaactctacaaaaatagtaaaaaaatatcagccagccatggtgatgtgtgcctgtggtcccagctacttgggagctgaggtgggaggatcacctgagcacaggaggtagaggctgaggtgagccataatcatgcactgcactccagcctagatgatgaagtgagacctctgggtatgacaatacgcctgttcctacacccaattggaggtgacatatagctgggctgggaaatgactgggccagatgaagtggctcattcctgtcatcccagcactttgggaggctgaggtgggcggatcacctgaggtcaggagtttaagaccagcctggctaacacggtgaaaccctgtctctactaaaaatacaaaaaaattagccgggcacgatggcggacgcctgtaatcccagctacttgggaggctgaggcaagagaatcgcttgaacccgggagccggaggttgcagtgagtcaagactgtaccattgcacttcaacatggacaacaagaatgatactctgtctcaaaaaaaaaaaaa

SEQ ID NO: 143551 - DNA, 821 bp, Homo sapiens
ggaggatgagtggggttattcagataaaggggagaaggggatatgtgatctagccagagaaaccccatgtgcaaaggccaggggtgagagatcaagtagttagcctggctggggtgctaggtattctaggggagtgagagttggggttgagggtagtatgctatgtgaaatacggggctgaatgggaaggatcctctaggtcctgtcaaggaatgaggactttatttgagggcaattagaagtcatgcaaaaatattatgctgtgaagtgttatgatcaggcctgagttaataggaagactggtttgggaaggttaaagtctggagtcagagacaccagtgaaggtcaaggttgatgcagcaatgtaagtgagagataatcatggcctggaccaaggttgcagaaatgaacatggaaggggagaatgggttctggcggtgttcagcaggggtagacagtgggacttgcagattgtttagatggagagatgagggaaaagacaacatttaaagctgactagggtcatgggacttttgaggcttctagatacgatggtctagtgttctgccttctggaggggctgaccctgtattatcccagcatatctaggcctgagaaaaataacctacaagcctgccagaaatgtataggcagcattaatttttacaaagtgtaaatgtgtggtcattttctgtgacttcttttgtttactttttttgagacagggtcttactctgtcactcaggctatagtgcaatggtgcaatcatggcttactgcagcctcaaactcttgggcttaagtgatccttcccccttaact

SEQ ID NO: 143552 - DNA, 1078 bp, Homo sapiens
ctgtaaagcagagtggatgccacatgtgtgtgcatgtgtgtacacaaggggtactgtgtgtgcatgggcataggcacctctgtgtaaggggatacctctgtgtgtatatacatatgggtacctgtgtgtatgtgggtggggtttccatgcatgtgcctatgtacaacatgtgggtgcccgtgtgtgtgtgcagagaagtgtcagggatgtgtccagagaggctgtgtgcctccctcacatctgaaggttcagcctgggcccatccgcctggtgtactgctcatgcccagttctttagaaaacgctggtctgcaggtttgctcccccaagctgtcaggagaattggggggatcagaagacatctaaagtctcgctggtacccccaaatcccagcagtcctctagtaagatggtgatgtgtcctctcatggggtgtggcttcgaacccctgacgtgtggatgcttcattgtgcacctgtggcctctgaacagctggccacccagaagggtacatgtcctctgggccctgggtacagtgggtcggtgagctggatggccggcaaaggcactgagtgctggagggtctacagcagcctgctcggccactgggccaggcctgggcaggcaggggttggttcttcagccccagctgagtgctgcgcacatcctctgccccatgcacagcagggcagcctggggaggactgaaggtggctgaagcacccctgactgaggactgagcagggtccttctccctgcctaggggcccccagcctctatatcccagagagctgggtttatggcaggaacggcagtggtaacagctttcctatgtgagtttcatgaccaaaaacctaacagaaaagcttgaaggcagacagggtgtggtggctcacaacctgtaatcccagcactttgcgaagccaaggcgggcagatcgcttgagctcaggagttcgagaccagcctgggcaacatagtgaaactccatctctacaaaagatacacatattagccaggagtggcggcatgtgcctgtagtcccagctacgagaaagactgaggtgggaggatcacttgag

SEQ ID NO: 143553 - DNA, 541 bp, Homo sapiens
ttagacttatccaggccaaggtatgttgtttgacgaacaccgcaggtgatcctgatgtgcatccccgtctgagaactgttaactataaaagtttgactttggaaatgaagaaaaattaccttttagcctaatcatgaagactaggcgtcaaaccaaaacaagatgcatcagttactgtagcaacacattttttttaaaaaattgcttgttgtcacaatgaagggtgtgtatctgtttccagtatgcaattctaatgccaaatgtctgccttaaaaatagcaaaggagaccatcaggttaacataaaggaaaactgtagttgtgtgactcatgtgtctgtagattgtaattttataattacaatttttataagataaaaaactaccagttgtaaattcaaccaaaaaaaatttaaagctttgatttagctttttgctttaacttgggtagtaactgaaatataaaggaagaaaatctattaaaaccaatgaggttttatatttttttaaatcttgattcaataaatatcagctgaattaagt

SEQ ID NO: 143554 - DNA, 702 bp, Homo sapiens
catttcccttagctagccatgacctcaaacattaaaaacatgtacctcccttactttatagaagaaacatacacccagacaggccaagtagatttacccggtctccgagcttcttcatggcagagctgagcttaggctgaagtgtcttgatagccatcgaatgtgctagatgctgggatgtgctccttgtcctcggtgagagagcgggataagacttacctggtgtggagaggagctgcagtatggtaggaggagcaggattagctgctcagaacagggcacttctgcttagcagcatctgcagatgtcagcagcccatgaagaagggctcatcagcaaagtcttggctcccctgtccctgcccagcacatgcagggcaaggagagacaagacagagcttacagggcatgcttctgctttctctcgctgagggctggcctaagcaaaggggtcctgagcttgcaggctggcagcccaagccatgctcactgcctccaggaaatgagttttctatgcaagccctcctccccaaaaagttgtgatagcaatattaaaagtagcattattattggcctggcgtggtggctcacacctgtaatcctttgggaggccaaggcgggcagatcacctgaggtcagagttcaagatgagcctggccaacatggccaaaccccatttctactaaaaatacaaaaaaaaaaa

SEQ ID NO: 143555 - DNA, 593 bp, Homo sapiens
accaaacgccaacagtgtggcctggaacacccagtgtgaggacatgctctgcttctcgggaggaggcaacctcaacatcaaagccagcatcttccctgtgcactggcagaagctgcagggctttgtggtcggctacaatggctccaagatcttctgcctccacgtcttcatttctgccgtggaggtgccacaggtaactgggagcacctgtccactctcagcactggcaaggccagtaagaccagggaagccgggcccctggctggtgctttgaggagagagtagcaaggagagaagaatggcagctgtgatgtcgtgggaggcagtctgggcttggaacctgcagccctatctccactccttgcaacctgtgtgactgggggcaaggagctcaacctccctgtgcctcaatttcttcctggtcccccttctggtaaggattcagaggggtatacagtgttgtcagcagagtgtattttacagagagcccagtgtgggccaagtggagagagcagcaaagccgggagtccagcagggtgtgtgtgtgtgagcacatgtgtgatggtggtgatgtgtgtgtgagagagggggaa

SEQ ID NO: 143556 - DNA, 259 bp, Homo sapiens
ttttgatcctgagcaaggagaggcttgtttcaggaaagggctgttatcattcctgttttaaagttaaactataaactaaattgctcccaaagttagttcggcctacatctaggaataaacaaagacagcatggaggttagaagcaagatggagtcacctatgtcagattcctttcactgtcataatttttctatgccagatgtttctcactgtcataatttttgtgaaggcgctttcatgtactcaatagttctgtttc

SEQ ID NO: 143557 - DNA, 613 bp, Homo sapiens
tcttactcaagtcagcctcccagatttctgtctgcagcgcgactgtgtgagggtggtcaaagtctctttgttttcttcctttctgaatttggaccagcagagccacattcggaagaatgggttctttggttttgacttcagcgcatctgatctcgaggagtcctcggtgatcttcagcctcccaggaagagtcactgtttgcctttgtctctgtctcttgggtcctttgttgtgaagaggagaatcatgggatacgattctcctttcgtcttgttttgtgtcctgagaacttgcctttatggccagtttggcttccaaatgcctgggggaacagccaatggtcaggatgtagccccaagaatttacaggccgggcgcggtggctcacgcctttaatcccagcactttggaaggccgagacggatggatcacctgagatcaggagttcaagaccagcctggccaacacggtgaaaccccgtctctactaaaaatacaaaaattagccaggcgtggtggcgggtgcctgtaatcccagatacttgggagcctgaggcaggacaatcacttgaacccgggaggcagaggttgtagtgagtagagaatctcagccac

SEQ ID NO: 143558 - DNA, 640 bp, Homo sapiens
ccagattcatagaccccccccccaaaacttgtttcctcaatgtggaaaagtcacaggcactcatcaccagcccagcccatgagggcacccttggggcatataccctgcaaagccacaggtgccaagctgcccgaggccttgggagcccagccctcacacccctgtgtcctggatgtgggacagggtttcaaaaagggtgattttggagctgtaggattgaatgactggccttctgggtttggagtttcatggggccagtaagtcctatctgtgttttgtttttttttctggcaaaattcttccttttggctgggaatgcttacccaatgcctgtacaagcattgtaccttggaagtagttaacttgctttatatttcagaggctcatgggcctaagggactgtagccttgtgtcagatgagactttaggctttggacatttgtataaatgctggaatgatataagattttatgggactttagggaaggcatcattgtattttgcaatgtgagaaggacatgagatttggggagtgagggaaagaataataaaattcagctctgtgtccctaccaaaactcatgtggaattgtaattggaatctggcgcagagagtggatcctctagatcgacttcaggaa

SEQ ID NO: 143559 - DNA, 169 bp, Homo sapiens
ctcattttttcctgttcagcttatatttgagttttgtgtctctggaccaaaccaaatattttttactcccaggaaggtcttcaccaaccaggaataatgacaccaactggtgatgtaatccccactgaaaactcttttgatccctttccagccaatggaattcttcccc

SEQ ID NO: 143560 - DNA, 352 bp, Homo sapiens
aagtagggacccactgagttccctccaggattgtggagtttcttttacagccacatgtggataagaaactaagggccacagaccaaatgacaggtcggatggcaaccctggaaaagtcacacagctcagcctgttggaggaagaggagcagtagaacctgtgtggagcctgacagaacccaagatgccattcacgaaccgagaggtctttcaagatcacacacagttctacgacacagacatttcgtcttcttgccactcagtagcggggcccatccctctgtgcctccaaggtccgtgtgccatgtggaaaactcaggtgttctgtctctgccaggaccttcttcctgctg

SEQ ID NO: 143561 - DNA, 794 bp, Homo sapiens
tccgtgcccgcagcaaaagttctggaaaagaacctgttagaaaatccaagctgatgcaccgcctcaccaggcgtgcaatagggccacagtggcctgtcaggatgtggctcgggacccaggaaaaaagctccatcgaagcctgtgctgccttcgtggggagaagttccattctaacccactcgtgcatccgccggcaggttcttctcagttctcctctgattctaatcagaggattcgagtttctggattaacactgtgatacaatcttacccttttccataaaatatgtatccagtgaactaggggatctagttccgagggtctggagttgaagtcttctatacttccctcaccctcattaagccacatcttgagaggaattgtaataatctgatctgtggtctttgcgaacctgcaaagtgtgtgtaagacctcataaagccaaacattcaaggctttaaaggtgatttatagattagattttgattaaggctaccttttcagggatggctcagcataagatatgtaccagctttgaggaggcattacggaggaaaagcaaaaccttacgtccttgggaaaactgttctgaaactaatgactttacatttatccaaaagagaaattgtggggaagctgtttatttattctgtgtaatcattgcattcatatgttgttgtttcaaaggattaatttcccaatcagttttcccagtaacactgtttatgatttttgaacggcatgcaagtaatgaatgcatagagcataatgtatctctaacccaaatacatgtg

SEQ ID NO: 143562 - DNA, 547 bp, Homo sapiens
aggagttcccatcagttattaagttaccttatcagaggttgacacacggttacagcaatctcacgggtggaaggtgttaccagagaaaatacaaaagccaaactaatggcaaagaagaaaaatgagaacccatggctaagagatatacctgggcaatcagaggggaagagaagacagtgagagtcagatcttccatacacttttatttttgtgcatattgtgggaacagggtaagtagaacaggaatgggagggagacttctcaaactattcatctttctatatttttttgattataggaccacataaacgtatttaaaaactatatcaaaggaacaataaggaaaagatagtttttatataaatgactactatcctgtgattaaccctaaatttgaaaataactggggacatggcaagtcagttttttattatcctaagttgcagactcttgacccacattgcagtttgaagcaaaatcgatgcaaattattctgaaagtctcactgttaaatttagtaggcagaagagggaaaacttccctttgt

SEQ ID NO: 143563 - DNA, 328 bp, Homo sapiens
accacagggcctgttagggcaagctggggcctccttgtttaattcacgacaggaggaagagctgggtatagggactccactgtcaaaagccctgccaaccaatgacacaagccagcaaggcaacccccttggcacaaagagacagtgggcaaccacgggcctgcagaaggacttttcccctccgcactcctggcgagggtcaggtaccagatacctcacaggctgggaggcaggggcggcatcttttaaccccaagccttgggtattttttgctataagagacagctgcagggtccaatctgctgccttgacccctccaactcccaag

SEQ ID NO: 143564 - DNA, 197 bp, Homo sapiens
gctggcagagtgcatgggggtggtgagaccatgggccaccaggaccctgggcataggtgcctggcctctccttggctggaccaaggtgcacatatctggctgaccctcaggtacaagagtacaggcctcccgggctttttgcctgggagcagaaacatgctgcgcgtctaggtgaggccagcctgggctcatttcca

SEQ ID NO: 143565 - DNA, 450 bp, Homo sapiens
ttgcacattttccagtcattttttcttaattgagaatttttttaatattggagagacagtcttgctgtgttacacagactgatgttgaactcctggcctaagcagtccacctgcttcagcctcccaaaatcctgagaatacaggcatgcgccaccatgcccaaccttcagtcatcttagataccatgtaccttgggctttataagtataaaggttttgttccttacagatctcagtagtactgttaagctggtgtgcttttcaaacagtaatcaggaaagaacaacttgtgttagtattttctggcgtgcttagtgggttggtagtggtgatataggctggtagctgagcaacccagcctttctggccaaaaagtgttatgtaataatattgtttgagcaaagctgctaaatataagatcattgcattttctttcgtaggacttgattat

SEQ ID NO: 143566 - DNA, 269 bp, Homo sapiens
aagatgttctgtgggccctttctgtctaaaggaaccaggaactacttctgggtaataatttggtcatttaaattcagatctcagtcaccattttccaaaatgggatgggacccaaagccttctggcccgatgatgtcctggcaccagccccgccacctgccccagcgggtccagagcatctccctccacgtcccccatgtggatagggctgtgcgcccgtttactgggcacacgccgctctgcaccgctgtgatacgggccatatgtct

SEQ ID NO: 143567 - DNA, 677 bp, Homo sapiens
atgtagataactacctcagacatttcctaagactttcttagagtttgaaatctttagcactagactcactttggcttaaatacatgatttctaaaaggccactgcacaaatgtacaatgatcacacagaagagatattttcttgacagtttagtataaattagcatgtcagattgtatagagaaggaaacagaaactgcaccaaataaggttgatggagatgagaaaaatttagagtctcaggacaaggagggcaaaaactctagcagcaggaaaacaaagtgaatgatctggacagatggaagcatctaactgctttgttattgggaaaagaataaatataaagttgacgttctaaacaacaagaactagactggtatttcattgctctgtctccagttcctggcagggaacatggcacaaaataggctttcaataaatatttgttaaataaaaaaagggatgaatgagacatttaaaaaatatattttaactgtctctataattgctaaaatttcaaagagtaaagtaagtttcatttttgcatacttatgtaaaacaagagcatcacaaaacataggtgaatcatgttgtatcaggcatatgctgatgttcaaaaaccgtaaggtgacctgtaagacatttaaacctatgtagtaaacaaatgacttaagatgt

SEQ ID NO: 143568 - DNA, 277 bp, Homo sapiens
gaaccccctcaaggccttaaaaatcaccaacattttgccaatcttgtttcatttatcccctccagtttttttattttttgcatttagagggttgttggtttactttggagtattttaaagtaaatctcagacattctaacatttcacccttaaatagttcagtttgtaagagataattcttgacaatctctgccctaaaccatctttggggaacagttcctactcagtggaggacctctgtcccataggagcaaagctcattgagaacacaggagct

SEQ ID NO: 143569 - DNA, 192 bp, Homo sapiens
gagtatagaaactaaaaactgatttataagtcttatgaaaaagacaaaatataatataatattactagagtgatgtccccatttattcatgtgtttctgtgtatatgcgtatgtgaattctttttaaatttgtctacgtccctcatgtgcttcacttaaaaatagccttcaggaatggttactcttcctggg

SEQ ID NO: 143570 - DNA, 781 bp, Homo sapiens
agatgggcagtggagactggaatattgtgtccaagggtgttggcagctggagtttggcctcctaattatagatgtgaagagaattacggtctgcagagggcctggcagtcctggtgctgacctgccgaagggccagatcttggtggtgactgcaacttctctgagttccttgttggaagcccccttctctggctctgcagcctgccaggcttgtggtgagtcatcctgctgctgactcatttggaccttcctccctttccgtcaggtttccaaatctcaggcgtgggtggtttccaatgggctgtgtatttcctgagaccctgagcggaggcagacaatgcttatgtatctggagacaccctaaaacaccaagcttgcttgcgttggaagtcttccagaactggttacccatattttaaagcaaagcctctgatgcccgtcagtcccaggctgggacagtgggcacacagaacatactttgctgagctttccattcaaccaacttgatattttcaggaaaaaacatgctacagtgttatgtagcaagtcaatatgaacatgtctctaatgctcaaagacaagcaataattaagttgactggtttcccaggactgtgctttgtcgtaagacatagttaaaaaaaaaaaaattagtcacaggtataatcccagaaaggattaacaagggactagtaggttctaccctaagtaaggaacctagtataggacttgacccttttccttctctaggcacatagtggggtcacttgatgtttctctct

SEQ ID NO: 143571 - DNA, 355 bp, Homo sapiens
agtgatcctcccatcttggcctcccgaagtgctgggattacaggcatgagccactacgccagccccaaacataggttttggtgggagagaggtccggcaccttccaaggcagggagttgaaactacccccaaagtgggagaacactgggaagaaagaccaggggcatggggggcactttggttagagcccccagaggttctagagctgtgccatgcaaaacagtagctgccagccacatgtagctttttaaattatagctatgtacatttattttactttttttttttttttctttttttttgagatggagtctcgccctgtcgcccaggctggagagcagtggcgcaatctcgg

SEQ ID NO: 143572 - DNA, 359 bp, Homo sapiens
ttcagtaattaagatgaataaagttaaagttgtttattagaagagagtcaatatcacagattttgttaaagttgtttattagaatagagtcaatatcacagatcagttatgactgaggactctggagttggatgcctgcggtttgaattccagctccaccacttgaggacctcaggcaaggggttcaaactctccaagctttagcattttcatctacaaaatggagatcatgacaatcactatctcagagggttatcgcaaggttcacagacaataatgttatcccagacgtcaggaaaagtaatgggcccttaccttcatggatgcacactaggcaccaaggggcctgccggcctacc

SEQ ID NO: 143573 - DNA, 537 bp, Homo sapiens
gtcagaagtgccttttgccctccactatgattgtgagaccttccccagctacatggacgggacttacagtatcataagaaagatagacatttaaatcatctcaacaaggacaatggacatcatggaatcacacagcaggagaacctcgcctagtctaccgatcagatactccatgcagttgtcacctcctctatgaagcctctcctgccccttccaagtagaactgtccattccatctgtggcagagtctggctacatgttcatcaaaccctgtttcaaatatcctcctctgcatgtcattacactgtatctcccagcccccttgcatctacatgaggccgcatgaccacatgctgggtcacttctgggccaaaatggtattggagagtccatcttctccactctggctctctttccatgcaccagataggtgatttttagtgatctttagtggaagatgaaacaggtctgtatctctaaatgactttgtggagtggagcttcccttcccaagctgacccacaataaactctgatgt

SEQ ID NO: 143574 - DNA, 1091 bp, Homo sapiens
  misc_feature (608)..(608): n is a, c, g, or t
  misc_feature (611)..(611): n is a, c, g, or t
  misc_feature (613)..(613): n is a, c, g, or t
  misc_feature (616)..(616): n is a, c, g, or t
  misc_feature (622)..(622): n is a, c, g, or t
  misc_feature (646)..(646): n is a, c, g, or t
  misc_feature (670)..(670): n is a, c, g, or t
  misc_feature (718)..(718): n is a, c, g, or t
aaataacattccagctaattttaccaggagtggaaataaattaaatcatcagaaagatactcgtcaggcaacttttcttttcagaagaggcctgaaggtgcaggcccagttgaatacagaacaactgctagacgatgtagtagcaaagagaactcgtcaatggcggacttccaccacaaatggagggattttgactgtatctattgacaatcctggagcagtgcaatgcccagtaactcagaaaccacgattaactcgtactgctgtaccttcatttttaacaaagcgggagcaaagtgacgtcaagaaagttcctaaaggtgttcccctgcagtttgacataaacagtgtcggaaaacagacagggatgacgttgaatgagcggtttgggatcctgaaggaacaaagagccactctcacatacaacaaagggggaagccgctttgtcaccgtgggataggtcccatgtcaaaggaacttttgagtgatgactctgagaagttgaattgcttgaagagttcatcacggaaattcaagaaactttacttcaaaatattcacaaggctaaataactcttatttttatttttgaaggtttttttttttaanaananaancgtatnaaataatgccctgaaagaataatngggattatacctgtctgttcttanagatttcatggttggctcagacagaacaatcatctgtttgacttcttnggttcctcatgcagcagaaggaagacagaaagatagaaattgattatttttatgatagcggtattcaggatctcatcacctttgcccgtgttcacacttttgtccatggtaaaatccttggtcttcctacaccctgtcgtacgctcccttggttgatgtcacttgccctttcaatacgtggatgactatcagctagtgcgcgtgacctttctttcataaaagacgcgaacactgtttagattccacgtgtgagttgaaacataacggggaatacaagacgtgctaccacttagaagaggtaatatgcactgcaattctcagtctatgataatctaagcggcagtggcatgattatactttcaattgcagtaca

SEQ ID NO: 143575 - DNA, 322 bp, Homo sapiens
gggagtgggggtaagagatttagaggctttttatttcctaagtgttcagaaaagccacagggtctgcccacagtctcatccctgagagcaggtgaaggactgctgcctatcactgagcaggtgaaaaatgggaagtaaaagtcatggctcttaacattccaggggtcctgctgttgagaatgccttgctttgtttgacactatcagtcctccaagtggtctcacttgccgctaagtgctgatttgtagtcagtggcaaagcatgagggtaatacttttcttccttttgtgttacaccctttagaaggattttccccagttta

SEQ ID NO: 143576 - DNA, 617 bp, Homo sapiens
  misc_feature (593)..(594): n is a, c, g, or t
  misc_feature (598)..(599): n is a, c, g, or t
  misc_feature (604)..(604): n is a, c, g, or t
atgtagacattcacagaaggcttctgacacttggtcatactgaggcatactgaggttcatgctgaggcagattctctttttggtgtttagaactttacccacccaaagctgtgccatattcaggggctttactcctagagccagtgaagttgagagctatcttgtatgcctctccttactacatatcctaaagatctggagaattaagtttggacatcagagaagcatgtttttaaccaagaagcatgttattaaccaagcaccacccttatggtttgaaagagccaatgttcctctccaagtactgaatttaacacaagagaataatatggccaggaaaataagtttaaagtgtcttaacactgtagataaaaaaagttatgattcccagtctagaattaaagtgctctgaccatctaggggaatgacttttacaaagttggtaacctagggagtttgatttctttgtaaggcatagcccacctctgtgatttctagtatacctttgaacagtgtaaagttccttcttggaagaaaggaggcagctgtcatcacgtgccttgttcttgttgaacagctatggagctgctcannttcnntttcnttttctttccccg

SEQ ID NO: 143577 - DNA, 117 bp, Homo sapiens
ttcttctgcacatctccagatgtgttaacataccgtaagttattgatctggcagctagaaagggaggtgatggtaaaaccttagaggggtgtctgttgccttctaagtaatgggtct

SEQ ID NO: 143578 - DNA, 167 bp, Homo sapiens
atttttgtcccatcttctttccacaatatctcttgtctcatcccaaagtcaaatgaagaaagttgcacctacacttgcccttccccttcctgctcacaacttgaattcccctagcttgggcatcacctacacagtgtcaattgttagacgcacattctagtctataa

SEQ ID NO: 143579 - DNA, 413 bp, Homo sapiens
cccacccaaatggagttcattcctcccatctttatcccactattctatttcttgattaatgtaattatgactgggctgatattcagccattgggcaccacgttggcagcactgattgtaaaattacagaaacacttctgggagagttgataaaaggctgctgtcccaagacctccacatgcctcctttctgttcctcccactccagccagttccaggcctccccaggatgtagtcactgaaggattaatgctgggagcagcaggaccctccccagcaccctggccaaggtcttctgttgctcttacctagtcttggaaattctcaagtgtgaatcagaacaaccaggctctaatttgtacttgcactgaactttgggcaaatcccttagtttctctgagtcttagttttctca

SEQ ID NO: 143580 - DNA, 243 bp, Homo sapiens
ctacaagattagatcaggtaagcctatgtactgtaataccatataaattttggtcattaagtccatccaaataagggttgtaataataaatgaagaaaccctgagatggatacatttccttaactaaaaaagaaattacaaggatgagagaaaaagaataaaaatagacattaaccccgagaaataaaaatgacacatgtagatcaacatcataaaacatttgatttttaaaaatggtgatcc

SEQ ID NO: 143581 - DNA, 253 bp, Homo sapiens
caaatggctgagactgggtaaaaggtaagatcagtgataaagaggaggtccagaaaatgacaggtcagtgtatctgaaggatcttctctaaggatactgaaatcatccaagaatcatgatggaagtaatggtgaagaaagtaacagtaagctagtggcaaaatgttttcaaaaagccaaaaagaagccaggcatggtggcatgtgtctgtagtcccagctactcgggaggctgaggcaggaggatcctttgac

SEQ ID NO: 143582 - DNA, 488 bp, Homo sapiens
actaagagttaaatataaaacacatgcctactaacagtgcatatatagtgcaaaataatactactgaaaaataaaaaaattaaatgatttgatataataagcttatcataggcaagctttatggttcagtggcacttagtgcagagatgtatctttaggcatttggagcacccacttttctagattagggtttaggctgtactctacttgccatacagagaacttggggcagtggagatttcccagctccatgcctaggcatacctctgggtaactggtggttgcccattggaccccagctctcccctgccccccatacctggtgcttgtgccctgctattgggagacctgtaggtgggcctgcctggtctggacccacctgtcttggtctcctgctccagggctgggcagggagctcagacacctgtgcattctgcagatcagccccattgcttgaggcaacagagagcttctctgtaaacaaggat

SEQ ID NO: 143583 - DNA, 333 bp, Homo sapiens
ccctaccctctgccttcccttcccattccagtccattgcaccacctggccctgcccccagagtccctccaggacaatcttcggcaaaccagttgccacctctgctgcagcctcctcccctgtggctgcttctgctctgtcccaccaatcagcatacttccatctagtgaccctctttcaaaagttgggattcatgcctcttatggacggaatgtttgtgtgtgtctcccccaaattcctatgttgaaatgtaacccttgatgtgatggtattaggagatggggcctgtgagaggtgattaggttatgagggcagagcccttatggatgggatt

SEQ ID NO: 143584 - DNA, 235 bp, Homo sapiens
gcctcagcccagttgcccaggtagctgactcatctctccaaagacctccttggtccccttgctcctcagatcacacctttgtgcccctccacagcctgactgcattcattcagacctcagacctcacctgcctggtgttggggctgtcaacaaccagccccacccgtgtcccaccagcctgggtcgctccctgcgtcctccttgcctttgtcttgcgctatgcttgccccgccac

SEQ ID NO: 143585 - DNA, 399 bp, Homo sapiens
ctattaggtaagacacaacagctttataaactttgattttcctaaagatcttgatgagttgtctttaactttttattatgaaaaccttcatatattggccaggtgcagtggctcatgcctgtaatcccagcactttggaaggctgaggcaggcagatcacgaagtcagaagaatgagaccatagtggccaacatggtgaaaccccgtctctactaaaaatacaaaaaattagctgggcatcgtggcgggtgcctgtaatcccagctactcgggaggctgagccaggagaattgcttgaacctgtgaggtggaggttgtagagagccaaaattgtgtcactgcactccagcctgggtgacagagtgagacaacacctcaaaaaacaaaaaaaaaaaccaa

SEQ ID NO: 143586 - DNA, 314 bp, Homo sapiens
tgcctttcaaatcccctctcgaaaatgtgcttacagccatggacagtcggcccaggtgtggtagcagagttaattagcaatgtgcacattagacacatctcagaaggctgcatatctaatgcaaatgttccagtgcttaatgttcattcagacgtgtatagtgattgcagcattacagaggacaaagctaggtgctgtgagcttatgagcttggacagagctttcttgtggattcaggaaaaaactgaaaggggcagaatggtgaaatcttttactgattcctttggaattgattcttattgcattaaccggta

SEQ ID NO: 143587 - DNA, 289 bp, Homo sapiens
ccaaagagctgggattacaggtgtgagccactgcacccagccccagatttcttaatgttaaatctagttcatgtaaattagtgccattttattatctaacagcattattcgactattacatactagtaaatggtgatagagtaggatccctgggttagcttgcattaaaaaaagaaaaattctagaccccttcaactagaagaggggaaatatgatgatgaggggcattgacctcaaaatatttgagtatatacaggtgcattaagacttggactattattactaatgt

SEQ ID NO: 143588 - DNA, 315 bp, Homo sapiens
agtgtcctctctgctgcctacctctttgtcaagagtctcaacagtgccagctacctctatgaggtcatggagcggccccgccatgggaggttggcttggcatgggacacaggacaagaccactatggtgacatccttcaccaatggaggcctgttgcgtggctggctggtctaccagcatgatgactccgagaccacggaagatgatatcccatttgttgctacccgccagggcgagagcagtggtgacgtggcctgggaggaggtacggggtgtcttccgagtggccatcagccgtgaatgaccacgcccctgt

SEQ ID NO: 143589 - DNA, 512 bp, Homo sapiens
ggtctggggtgtggcctgcagaatggcctaatgagtacagtcttctggaaccgaaccaaaagtaacttttcatgtgccaagcttctcaagacgtttggaatctttttccatggggcgtcaggagttatatttagaaactaatacagtttcttttcttctgtctccctctctgtctctctctctctccatccctctctccctccctacccccgattttccattctttttaggaggcctattttaaaaacagagctgtgaggttaggagttctctagctgtgcttttccatctctgaatttgcagtaaaatccatttcccaagtatttattgactgcctagtatgtgactggttcttgggagggtgacattggagttcctgtcctgaaagacaggagacaggacacggagagcagtgaaatagatcatatgccttacatctggggttcctgttgtagaggggaaggcagcactcagcaaagacagcatgctggggttgggggtgacagtgggag

SEQ ID NO: 143590 - DNA, 146 bp, Homo sapiens
aggtggttgaaacattaacttcctctaggtctacacggtgctttgcacctgatttggcttgcacctcatgctattctattaatttatttgcatgttgcctcctcttctagactaggtttttgagaaagtgagagaaaaatcaagaa

SEQ ID NO: 143591 - DNA, 405 bp, Homo sapiens
cagatttcctgagaagcctcttatcacagccagcacagacatctgtgcctttcctcgcctgagatgtcaccagctcagggccactccctgccccagccagatcaatgggcctttcacggcttctgagggtggatcctaggagtgcccctgtgacgaatgctcagatgactgcctctctaggatttctgtttgtttctgcttcgcagtcttccctccacccagaagctcccgaatgtccaggaagaattgactaattctctccatgagtttcttgcccacaggacgaatggagccattgctgtaacaaccttattttccactaagtcagaataagagacctggacagaaagagagtaatggctgaggcacaaggagcgagtattttaaatcaggcttatgaatgtg

SEQ ID NO: 143592 - DNA, 274 bp, Homo sapiens
cacaaacaaaaccaagccattctgttgcttactgtaatgtgttatccaactcaccagggatgcaaaatcatttaagtgaacggttcttagcctttcgtgagtttgagaatctgatgaaaactaccaggaaaaggcctatatgtagctataaatgtgtgtatgtaattttaaatgcctaatcccccagccccaccctgcaaatcactaatccttaagttaagaatctcaactcaagaacagattatgggccaggtatggtggctcacccctgtaa

SEQ ID NO: 143593 - DNA, 137 bp, Homo sapiens
tcctaggagactaacaggagagcattaattttgatagagaaaaagatatgtagtattttgagtgttcctgatataactcattttaaaacgtttaacactttctttttagaccggaggatcctttaccccatgttaat

SEQ ID NO: 143594 - DNA, 252 bp, Homo sapiens
aacgattaatataactgaacacattgaaattgaatgatgaatttaataaagtgaggagtaaaaaagcaagtcacagaatagcatttatcataaccttcattgatatgtagtttaaaacatacaaaactaataagggtacctttttagggatatacacatgcatattcgaacttttaagatgaaagcaagggcatgatacacacaaaatttggagaaattgttatttctgaagtgtgaggcttcagagggatt

SEQ ID NO: 143595 - DNA, 756 bp, Homo sapiens
gaaatggctacatttgctttctcatttaacatttgctttctcataccttcccaataaaactcactagtttaaaaggatagttgtattcaaactatgcctttgtaaatggaaaaggttaaagtttatctattccacatgaccaaagcccttactcatttttttctctactagtttctgaagtttgtagtctgatatttgagatgtcttacagaatgtctagcattctgtttgaagttttattgtgttgtttagcgtgaattgaaaagcgcgttaaatgcctaattaggtgatgtggagcatatgaagttagaccatgtggtatatgaattaaagtaaaatgtatgaaaaattacttcatatacatgccatacatgcttattacatatttaatagactttagctcacttagcccagaaaaggaatttaaatatggaaaataatctgttacaatttttcaaacttgatacaactcaaagactttcaatagctagtgggtgtgttgtttctttgtgttctcatgtttaaactattgggatgaagctatattgttgctgataatcaaatcattttcagctggccaccagagtgaaaataatattcaagcgcacaattgaattttgcaacaatataaggaaatctaggatccaaagtaaatataattactttattactcccctagctgggcacagatttaacagttttgttacggagcagcagaactgtattaaaggttgtaaaaagttgaaatgcctcaga

SEQ ID NO: 143596 - DNA, 773 bp, Homo sapiens
gaagcctgagggagggacccagcctttatgagtagcacccttccctttccctggagtaacccctggctggtagtgctgatgtgagagcccagcgaggagggcggcatgtggtccccgacctgctgtggcggggggacgtcagcagcggcagcaggccggggagttagtccctaggcgggggcttgagagtttcttgctggttccaaggagtcggccttgtcctacctctcagatcacctttccagcagaccctgtgggcctgtgctctgtgaggtaaggagggttaccatgggaactgtgacttttgcgtcttcttactgagcttttcatattgtcaattccaaccccaaacatctgccttttgcatgtttagagtccttaggtaagcgtaagggagtgccagctgtggtgtgggatacagattactgtcttgcttcctccagctctccagcctcatcaacatcaatgtatctccaaacatgaggaactggagaagctagggagcttaataaacacgataaattaatcaaattataccagtgtgtcagaggggtggaacgtactgatggcgcacaagcaagattgttgtgtttgaaaccgaagacagaatattcaagatctgcttctcatctcatttcataccagttcttttcagatcatgggggagaagtgtgatcacagaggatcagaattactgggaggggatttaagcattctacacacccctcctctacccaggattataatatgcatgccagggcaggggaacgtca

SEQ ID NO: 143597 - DNA, 811 bp, Homo sapiens
cttgaactcccaacctcaggtgattcgccctcatcggcctcccaaagtgctgtgattacaggcacgagccaccgtgcctgacctgtttttcattgtttcaacaggacaaatacaagaaagacttgactggtatctcatcagattatacttttcctgtgatatcagttttgaacttataatttctttccagctccaagagtctctgattcactgattctaacatgacatactaggaaattctatcaaagcaggggctcctggaacaggtcccgttgaccatggaccacagatgttctcaaggagaaacccacatatggtgatagggtatatgactaaactgcctgtttgagatacacagctttcatgactaccaaatctggcatttgtgtttctcagtagcagatgtgaagaatgagttattacttaatgagcagcaaaatcttattggactccactgcagtgcacagtagctcactctaataagacgaaacaactgtaaaatagtttgtgtgagttcagttccgagtctacttctgacccagttggatggtattatttccccaacctagagatttcaggttactgtgacatccacgaaaagatccaaatgatatttagtagaagttcatatgatgaaatgagaattaaactaaatttggttaaatgttttgagttttacttttgtattagtccattttcatgctgccaataaggacatatctgagactgcgtaatttataaagaaaaagaggtttaatggactcacagttccatgtagctggggaggcctctcaatcatggtagaaggcaa

SEQ ID NO: 143598 - DNA, 749 bp, Homo sapiens
tcatcagttaaggcaggaactggccatctggatgtggcttccgaggcgatcgggcagcgtcagtcttcagccgctaagccgagaagatctgggaaggagtcagagagccttgggccagagttccagggctctgggagtggctgccagaggaagatactgagggtaagaagttgagcagccccctagaagtcacagatttggttttgtcactgaagaactaaatgtaagtaggtatatgtacacagcacaatgatagtatctgctcaaaactgtatttggtaatagccatattgctctcttgagcaaaaattttagccatgcctaacaacactaatttgccagaaacattctaaagatcgattaaatgtatcaaaacatttggagcctagttgatatatgtgattatgagtcaatttaaactattacagaataacaacactggtttttaacaatacaaataaagcaaaaatgtacacaacagcattttataaaccaaaatcaaagtggtggtctaatttggtgtggcctgtgttaaagcttcattcagaactccaaagagagaaagtatttggtatcattctaaaaaaccgggcactatatacttgagaggaataaaacctggaaagcaggcagataacaaacttatttattcaattatttatctaataaatgtctattaaataacttcttcgtgcttgggaaacatttaaatatcaaaccgatcaataagacacacaaaaactcctatc

SEQ ID NO: 143599 - DNA, 441 bp, Homo sapiens
gagttaaaatgaaacaaaggcttggtgttgccctgacggggctccatggctgggtgcgggttgttaataaaacttcgactgagatcctgaggcttttgctgcatgaggacatctaggtgcccaccctgggctgaggggccggccttgtacatgtagttagccattactttcgactggccgctgccgccagctaccccaggcatgggggagctctgtgggctgaatgtctgctgaccaaaagaagggctggggattttctcctgcccaaatggacctggtgatggtccagcagaagagggcaaggctgaccagttggtaggctggtgctgctgctggtgctgctgcatccgggcatgctgctgacgattagcagctatctgtttgagctgctgggcatgggatacttcctgccagcttggcaaggcccggcttgctccggag

SEQ ID NO: 143600 - DNA, 385 bp, Homo sapiens
tcctcggcctcccatagtgctagggttataggcaagagccactatacccagactggattagattttttcacatgacatccgtagagtgcctgtgtgtatgctctgtggatgtaaaatgaacaggcaagagtacagaagtagaatctctagccatgcagtcagacagatggctccaaaattagttacttggttatggagacgatcaagttacttgactttgagcctcagttatgtgccaaatgaggatactaatagtatctatctcaaatgcatatatgggtgttcactgtctctgggagacattttccaaagaaaccaagactaacttgttaagggaatagatttctctcactgatacaggatgtgctctagctggcccacgata

SEQ ID NO: 143601 - DNA, 581 bp, Homo sapiens
gtggcagcacaggttcctaaatctctgagcaaggggatgaggggggatcctgattgcttgtctttttctctctattctctcaccatctgcccaggaggcagaacctcacctggtcagttgcctgctaagacaaaaatatgaacatttttgcataaagtttaaagaaggcccagagtctcataacaaaacattcacagtgtctaggatatcatccataatgacttgacatctgagtaattctcatgtacttgccagggaaggcagccaacagatgccaaccccaagatgacacaaatgttggcgttatcagacaaagattttaaagcagctagtaagaccatgctataagaagtaaaagcaaacattcttgaaacaaacaggaatatagaaagtcccatcagagaaatagaagatacagaagagaaccaaataggaatattagaactaaaaaatacaaacactaaaaatttaaaacttactggatgggcttaatagaagaatagagatgacaaagaaagtcaatgaattgaaaacagatcactagaaattatctggtttaagcaacagagaggaaaaaagag

SEQ ID NO: 143602 - DNA, 332 bp, Homo sapiens
ggttcaagcaactctcctgtctcagcctcccaagtagctggtattacaggcgcccaccaccacgcccagctaatttttgtatttttagtagagaaggggttttgccgtgttggtcaggctggtctcgaactcctgacctcaggtgatccgcccgcctcagcctcccaaagtgctgggattaagtgctgggattacaggcgtgagccactgcgcccggtcagaaatacattttgaatggtagcttaactcatatgggttttattataataagctaatatagatgacgatggtgaccgttttttgcatattttatctactctttgtagcacttt

SEQ ID NO: 143603 - DNA, 412 bp, Homo sapiens
tcgtcggagtagttggggctgattggagtagctggggctggttggagtagatgaggctggttggagtagctgggtctggttggagtcactgggcagggtcatggaggagcatcaagcctcaaagcccctgtagattcagtgttctccctgaacactctgcccctgatattactagatctgtttttcctcctgacactgctgttgccccgatattaaacacaggtgtccatggtccctttccacagatttgacgtcgcaggggaaagggtgatttcaagcacggctgagccatatgcggatgccaggtgcacccccagaacctttccattctgcatgatagaccccctaagctgccggaagtcaggggctgcagaggtgagccaggaagacagaagcctgaattggggccatg

SEQ ID NO: 143604 - DNA, 417 bp, Homo sapiens
ggaacctggagactggggatgctttctcacactcactagtactagaagatggggaaggtgaaccaggctggaggtcgagttaacagggtaaagaggccagggccctagtttcgcatccgccgactggcagctcttcttacgtgttctttcacggaagcccctccttgggaagccccgcgccccacccaccaggagtcgtccctttttgggcggggctgaggcttccaggctgggtcctgagaaagtttggtggccggagactgtggggcgcttaggtaccgacctaacaacttctgcgcctgtttccagggacgagccacgcacggtgccccctgaacacctaacagtcccgggggcagccccacctctggctgggtggacagagacagcctgtgggcgtggcccagaactgaaagc

SEQ ID NO: 143605 - DNA, 440 bp, Homo sapiens
attacggacactagtgtcttggcaagtgcttgtgagatcgttttggtgaaattggaattatgccaatgggatctttccttatgaatggatgatggtaaaattgaagcatgtcactgaaaaaaaacaaaacaaagatgatggaaaataacaaaggttgaaaataacagagataccaaaaggcccatatactgtttatgggagagcagctttgtacagatactttagaaagttgtttggcagcaccagtgcgaaccctctgatctagttctaggaatatacccaacggaaatatatacatatattcactcaaagacatgcataaagtatttctaacaacagaattttaatagctgacactgggagctgccctaatgtccatcaatagtggaaaaaaaaacccaattttttaaaatgttcacacaatggtatactattaagaa

SEQ ID NO: 143606 - DNA, 365 bp, Homo sapiens
gagataatggaaccatgggggtggcttcccccatactgttcttgtggtagtaagtaagtctcaggagatctgatgattttataagcggaaacccctgtcacttggctctcacgcctcttgtttgccaccatgtgagaggtgcctttcaccctctgccacgattatgaggcctccctggccacatggaactgtgagtacattaaatccctttcttgtgtaagttgcccagtctcaggtatgtctttatcagcagcatgaaaacagcctagtacagatgccaacaaaacagagcactgtgtttggctggaaggccctttaaggaggtccaccttcttaaactaaagcaaagaaaaacaaccagagcc

SEQ ID NO: 143607 - DNA, 181 bp, Homo sapiens
ccctcagatccttccccttctcctcaaattccatcatgctaagattatctaaacttttaaatctgcattattatgagcatgttttctctttttctttgatcctagtagttgtttaaaaaataacttttaggctgggtgtggtggctcacacctgtaatcctagcactttgggaggccgagg

SEQ ID NO: 143608 - DNA, 443 bp, Homo sapiens
cccctgcttggtcacctgttggaccaacactaggtacaggaagtgcaggaagctcagtttacaaaaagtcatctggtgcttccagctgtatgtagcttcctctgaaagaaaaggaagcgtggggagtgtagaaagcagttagttcttcacctgaggctgcagttccaaaactgaatggaaactgtggtgtttgggaagtgtgtttgactaaagtttcctttcctcaatttctcaaaggaaactgtgactcttcccccaccatcttccaccccttcagtttccatacatacaagaaagaatgatgtcctggagcaacctctggagaacaactgtggggcctccccattacaaaacagcctcccctgtgtgcaatcagaattgctttcgtctgggcagaaccatacaacacacagctgggctgtgtggagagctgtggccgactg

SEQ ID NO: 143609 - DNA, 267 bp, Homo sapiens
tcaagcattttggggtgtgctgcggacaaacaatagaatgaatctttgtttctggagcctgggccatttctaacgaggaagatgattactcatttttggaagttgggttaactcttccagagtcttttgactctcgcttagatctgtaacgaaaagccgagaagagttcaccttggcatcccaaggtgtttgctttaaagccgggtgactctggttggctgtgtcatttcctctttaacacccctccacccaggtctttgccctaag

SEQ ID NO: 143610 - DNA, 332 bp, Homo sapiens
cttatccagcttgaaccggaaggcggagttgagtgagccaagactgcaccacagcactccagcctgggcacaagagcgaaactccgtctcaaaaaacaaaaaacaaaaaccttagaaaagcccctgccaccccagcacacgcacccagagcagacctggtttggaaatgaaacatcaaggggaaaggctggggctggtggctggaggaagaagtcagaggggctgtgacttggcgtgcctgcctgtggcccaggaccacgtctccaggggaagcacaccgccaggcccagcccctgccccatccccatctcctgcccttcccctagccccca

SEQ ID NO: 143611 - DNA, 156 bp, Homo sapiens
gaatatgtccaggcctctcgtatcctgtgggggcaacttggttcctaaatgccttccgtaagcacagggccacacagacgtagcaggcttaccccttcctcactggagtcaagagagtgctttgtgcctagaaaatgtttgtttttttggtggggc

SEQ ID NO: 143612 - DNA, 795 bp, Homo sapiens
aaataaataaataaataaataaataaataaataaagtccaaaccaagaaccttaaaaactttcactctactggaaagttatctgaagtcccctgtacaagttatctcccaatttaagtcttcttaagagatttctccctttcaacctatttagttttacccagttggagccagacagggagaaaatgtgggaggacgaaataaaagggagaaaacaaagggctcggcagaaggcaaagtggtgcagctgcctgcccccagtaaccaagggcagaccctatccatcttaccttctctaggttgtaggtgagctcatagtctgaattcacaaacagaatattttcaggcttgaggtctgtatgtgtcagcttgttatcatggaggactgtaggggagaaggccaggtcaggcttggtgcaggtggccagagctaactggtatcagctgaccccaggcctggttacctagggcaaagccagtgaggagacaggtccagaatcactagggctgctttctgctctacgtctaaatggaatgcctggtctaagaagctctgctctttctaatgtaagatacatatgtagctcaactgatgtaaaaaaaaaaaaagtttgctttgagttgtagtgtgtacacactttgacatgtgtctagctggcattatgttaactcaattctgtgaaactgtattattttgatgactccagaggaatgatatatttctttgaattccccaccttgccccttagctgaactacatactctgtgttcccatctcctttgctgtgaatgaaca

SEQ ID NO: 143613 - DNA, 304 bp, Homo sapiens
cttggccattcatgttccctgagtccacactgcagatgtctagaaacttcgcatttccactttttttcttacaaaaatgtcattcagaatcacatttccactttctggggtaactaatcacaccctctcctctctctgcaaagctccaacatgacttctttccctttttctttttctttctttgctttgagacagggtttcactgtcaccgaggctgtttagtgcagtggcttgatctctgctcgctgcaacctctgcctcctgggctcaagccatcctcccacctcagcctcctgaatagctt

SEQ ID NO: 143614 - DNA, 404 bp, Homo sapiens
ccagaattttcacaggcaatttgccagagaaagctcatcaagaaaacagtactgtaatttcaactttgaactctgaactatacattgtgtgaacttgtcaaatgctcatcccataaataacctcatgctctttctaaaaatcttgccaaatagaatgaatctgatttactggaaaaaaatgtttaaggccaagaaaaacacacacattgtgtacagagtgtcaataattctggaaatattagtttacctctattcatgttttcattttaaaagaatgcaatgttggcctggtgtggtggctcacgcctgtaatcccagcactttgggaggccaaggcaggcaaatcatgaggtcaggagtttgagatcagcctgaccaacatggtaaaacccccatctctacta

SEQ ID NO: 143615 - DNA, 118 bp, Homo sapiens
aaaggatgatgtaaatggcaatacgccattatagaaagaatctaggaaatgtgatgtatattcctttgcactggaaattttactggggaatacttaacaaaacttctggcttgcgatg

SEQ ID NO: 143616 - DNA, 330 bp, Homo sapiens
cttgggactagcctatcccgtgctccaccttcaaaccgcagctagtctgaacagccatgggcagtcgctgcatggctgggatgggcatcaagtcctggagctgccagccttatgatgagaagcaacccaggccgcccgcctggcattggggtttgagcagctgtctgcatttgacactggcaaagcatccctcctccccgagcatctggcccaaataagggagtggggactttgggacccacatatgttctgaggggagggcagcatccacaggggaggtgtgtgttcagccgagccattgacatggtcacatctggttctagttgttgg

SEQ ID NO: 143617 - DNA, 377 bp, Homo sapiens
gtcaccagaggtctcattccatccctggttttttcattactcctgagtgctgggagaattttagaaatgaagaaaaattagctcaaatgaaaagagctgggtgtggccgggtgtggtggctcacgcctgtaatcccagcattttgggatgccaaggtgggcggatcacctgaggtcgggagttcgagaccagcctgaccaacatggagaaaccctgtctctactaaaaatacaaaattagctgggtgaggtggcacatgcctgtaatcccagctacttgggaggctgaggtgggggaatcgcttgaacccgagaggcagagattgcggtgagccaagattgtgccattgcactccagcctgggcaataagagtgaaa

SEQ ID NO: 143618 - DNA, 450 bp, Homo sapiens
tggtacttaatgataaactgataggaaactgttgacaggcacttttgagaaagcaaagctctaggctagatattatcattcattcaaaattataaatcataaagtgaaacaacaaaattcagtcaagcagggttaaatttcctcctccacagattgtaacccttaatctccaggctacagtgattgcaatgcttgatgtagaaattctttttcattcactgtcaaaataaatggaattttctcgaaaacccatttaacccattgaccataagtttactggccacaacttgttataatagtttatcccacctctaacaaaacctctagattattctaacaatagaaaaaacaatgctagcttttgctccctcattagtttgtgcaagttacaaataacgatggtaacaaatttatatttaaaacatgctgggtgcggtggctcacgcctgt

SEQ ID NO: 143619 - DNA, 349 bp, Homo sapiens
ccacagccattccaatgccacccaacataaggaagagtgtaacaaaggggaagtcaggtaaaaagacggcaattttagctgactgtggtttagataacttacatttgcaaattcttcaaagatatgtgaccacatactggcaatgttctgtttcttgatctggatgctagttatatatgtgtgttcagtttgtgaaaaatcttaaactacacacttataatatttatgaattttctcattcatatattatataccaataaaactttttaaaaattaaccaagtgaacacattgctagggtccctcccagaccctcagattgggtcttgaaaattaagcttcaggctggg

SEQ ID NO: 143620 - DNA, 265 bp, Homo sapiens
aaaaaaaaaaaaaaaaaagccaaataatgaacttttggtaaatccagaagttgatacatttttattattaaaccaaaatcttggcaacgatataacattgctttgacttttccaactgtttttggaataaaaatcccacaaaagcaataacggacatgtgctagtcatgttgatggaaaccttaactagtgatactgcaggcaatatctagcaatggtgtttctattttagtatttttttcttttttttctaataacattcaagt

SEQ ID NO: 143621 - DNA, 163 bp, Homo sapiens
cccaatgccctctaggagctgccctcagccaataatgaatgggagctgacatataaatacccatgcttccttgcccttctggtggggcaacactgaggtgtattccacgtcatctcctagaaatccgtaagccccagttgcccacagcagtaacctgcacatg

SEQ ID NO: 143622 - DNA, 474 bp, Homo sapiens
acaggcatgagctactgcacctggcccatggaagaaaataatttttggttgttaatttttaacatgagataatgctaaatccactagttacattaaaattccttttgattcaaatatgcaggatataatcaaattactgttcccttgaaagagagtccatggttaatacaaaagacatatagttgatttatgtcaaggggtaacacaggtaatgctttgaatactcagcataaaacactttaatggaatattattgctccaaatataccataccaaaattaaaccaaaaatagaaggctacttaatcattgctgacagggagccaagtacagcaagttaaagtacattcctaccgctcatctagttctggctgaactcttcgggtcagtttgggtcattattagtttggaataattccaaatgactccctcgagttctactgttacattcagcggctttaggaattccagaaca

SEQ ID NO: 143623 - DNA, 202 bp, Homo sapiens
acacattcgagctcggtccccaatagagcaatgactcgaaagtaacccgagtccctgaatgactgggtggaagataccattcttggacaaatgtgaaagaaagaaaatcatacatttgggctttaacttattatatcatctgatctctctgttacagtagcaattatgcctaattcaccttctccttatccagtgtagttca

SEQ ID NO: 143624 - DNA, 411 bp, Homo sapiens
agtatccacgaaatctactgtgtaaattggcccacactaaagcatgtggaaaacattttttggctgaaactcgaaaccattcatgtggctttgagactgggaagcttgggctgccaacatcaatagaactttgtactacaaacccaaatggtcatttagacatgtgtacttctctgctcacaaatgcactgaggtcaaatattttttaatcttgggaattttttctctttatacagcctcatatttcatgcaggaaatgagactgagtacaacaaacacaaatcattgagactgacagagcatattgggttcaaaacccaagccttgactctaattgctctccaaaggcccctggctcaaggtaactgttgatttagttcagctgttttcaatcagcactgtaaggtctca

SEQ ID NO: 143625 - DNA, 496 bp, Homo sapiens
ttaattataagtggcaggttaatcataggcaaacagcttaatgagttttatcagagtctacccagacaacagtaaccataccagtcattttaacagggtgaacttaatataaagaactgttaaccagtgaggaattgaatatacagacaatggcaagaccatattcaaaaatagaactctgatcaacaacctctgcagtaaatggccaaaaatggtcagggcttggtcaatgatgaccagtttccctattttttcctctgctttcaactcaggaccaaccagaaaaaggcaactatgttctccaaaccaatcacataagatgccctcttctagttagtccacctccagctttcttatgctaacaacctgcaatcaggacatatctggagcctctccctttttttactgcaaaactttcccactcacatgcctgctgacagcctctaccaaatgcaagtaatggtgggtgactcaatccaattaacaagctctgaat

SEQ ID NO: 143626 - DNA, 510 bp, Homo sapiens
tacatgcagtgcttgtgtccaattcaaaatgtgtagttcagtcagtaaacggttcagtgcttcaattatttcctctagtaaatgggaataatctattcccagtatcatctcacaatgataacctatataacattaatccacttgagaagtgctctgaacttcttagagaaaaagggcatgcagacaaggaaaggagtgcactgaggtacatggtctaaaaccggagataaaatcataagagggtctgcatcaaattccaagagaattcacatctgcatttgtgctacttattttttgtgccctggagcaaactgcaagaataagtgatttagtgatatactttacaattcaatgtctaaaagttccaaatgtataagcagctgtgaaaaatttaggacgtgacactagagcattggttctctggctgacgttagaatcacctagcaaactcgaaaaggaaaaggccaagctgcgcctccagattttgattcaacagttattttcagcagc

SEQ ID NO: 143627 - DNA, 172 bp, Homo sapiens
agcatggctcataacctacaccaggcactgaggtagtcaggaggggtgtgagagatgtaagtggggaaggtttcgtggattcctaagtggctctgatcggctgggtgcaggtttttgcattcacctacatacactcacattttctgcatctttaaaaaatttcttcagacat

SEQ ID NO: 143628 - DNA, 385 bp, Homo sapiens
tcaattacctctccattcagtgagagaagtgggcatgcttttcaagatgaatttgaaggtgcttaacatttttcttcagttttaatgctcatccccccaaacctggatcagaattccctcttccagcaagcagagtccagttttgaagcttccttaatgagagctaccatttcttcttaagttggacagacacttgggggaaaaaattgctagtgatgatgaacaaggagcttcccattgggcattgttggtttttccttaaactctggtatatatttactctaggatatatcctttttatctgggtcacacacatcctattacagtagtgtggtgtcctgaccaatggcattcactcaggaactttttagaaatgtcaactgtc

SEQ ID NO: 143629 - DNA, 326 bp, Homo sapiens
gcaaacttgagaaattgcagattgccttcctgtgattcacccagaattccagatggaaattatttctcaaggtcagtgcaaagctccgtacaaaggtgtctcctatagagaacatgtggtgtgaggctggaccgagggtcaaggcttccattcctgtttgctccttgaccttggcagagttagcctgcctccgagagcttctctctagccgtaggggaatcacatagtttgtgcctttcctccccacacacccttcccaccatcccaccccaagacctgctcctattttctaggcttggtgagggcactaaggaagaaatatgcct

SEQ ID NO: 143630 - DNA, 147 bp, Homo sapiens
ctgatacttggaagttggattttagaagctatttgaaacattaaaaatattaaaataatggtaatacttttgagattaatattgaaactatctgaaaatgattgcttattgaagtaaatatttcttagctctggggtgtcaatacta

SEQ ID NO: 143631 - DNA, 545 bp, Homo sapiens
ccccctcctcctggaagcccgcctgggcctaatcaccctctgctcctgacccagcctccaagcccagtgcccagggccttttcctccctgggttcctgtcctcaccttcctgctgccatgtctaataagtcaccacgcttcagatgcaactgtgtaccctgcaccagctgcacactgcacccctctccacccagggccatggcccagctgggccacacaatctccgtggacccctgctctcagccctcggtcctgcagctgcagagcacacctggtcctgccactctccacgcagaccttccaggagaggtgtggcctccaaaaaagcccacaccctcacatgggtacacagcccccccgataccattggacccccctctggctgccatcctgctcactccctgcatgcccccaccccaggcacgctcggctcagggctcactcacacatgtggcactaatatgtgcacagggtcctctgagcatctgcgcgtgctgtgccccctgcctggaatgcccttcctcatccccagccggtgttcaaga

SEQ ID NO: 143632 - DNA, 458 bp, Homo sapiens
ccgcgcacctgtgattaaaacctccctcccttggcaacatcccccctcctccctgcacccatttaaaggcctgacttgggcgaccaatgccttcctccattcactctctcgcaacagcaaccgcagaacatgagcactacgacagacgcggagtgcgactttacaacttcctgtcttatctcagggaaaccagggccattctgggctggggtgaaaggttcttccggacagtggcccaatctttagccaggcaaaggtttggtaacctcaggacaaaatggccctgaatttccaagtagggggagaccgtaacaaaccatatccgccatgctgcctggttcatggggttgttattgtgccacgtgaggtttgcattcgtgcctggagccctactgcccaattctgatgtttctctagaggtaaaattaattcatggacccccacgtatatgagcagtc

SEQ ID NO: 143633 - DNA, 126 bp, Homo sapiens
taatgaaataaagtcattgggaggggatttgtttcataattttttggtcagtgctataatacatgcatgtatctgagtatctgaatggcctgggtttttgttagtgggttgttttttttttgtttt

SEQ ID NO: 143634 - DNA, 513 bp, Homo sapiens
ccttctattttctcctagaataacaactcttctggcttctctttccctatgtaggctgaaaccaataggtgatcaactcttctctctttgactgctatccttctaccatacccattcaatgtattcctgaaccaaggatcaatactgtaattcatcatctccattcctgagtgttagcaggaaaaacaaatcagagattctatacaggctgacaatattataaaatcattatcactaacctgagctgacttctcagaactgccctccaatccttttactttcccttggtcagctccatctcaaattcacttcaacataaactgtaagtcttcaccaaaccactctcctcaatgcctctaacctaattccaccactactcacctccctcagcagataatcttgcttttacctcaaaactgatttctctcaatttcctctctacaaacttatctgcatccactcttgtcatcttgggctcaatcaattcctttttcccttcaagtcacacaaagg

SEQ ID NO: 143635 - DNA, 198 bp, Homo sapiens
atctcactatggtcctcaagacttcctgaggcttcatttgttcttccaaaccaagtctaataggacaagctcgtccatctttctcccatgggtgatgctcaagcaggagtcttggtctggaatcattaattcctgcaggtgctactgacattagctttgtagaggctagtttttcagtggtctgaacacctgccatgg

SEQ ID NO: 143636 - DNA, 378 bp, Homo sapiens
gcttgggccaggagctgtccaccagaatcaatcgtaaccaccattataagaacagcttgtgtttccagagcacatcccagtttacaaagcatttcccatacatgggctctgattcctactcaacaacctcttactgaagagctcaaagagaaagaggttggaccacatcatccccaatggacaggtaatgaaactgagaatgaaacttcagagagattaggtggctttccaaggtcacgcagctggtaaatgtgagccagttctctgactcccaatagcagcctcttgcatggattcataccttcaggtctaaggccacggtggggacagaaactacttagctccatgtgcactcctctgccaggacagggaagtgtg

SEQ ID NO: 143637 - DNA, 1319 bp, Homo sapiens
ggcacgagggcggacgatgccaagtccagcagagcttgcgctcggggctagaagagagactgagtctcccttctcagtttcattaggtaatgggcgacatggctccgtctccacagcggggctttgctgagcttagcacgcagtctcccggcggggaggaggcgcgcagtgccgggcgccactccgtctccagtacgcgttaggcccgcgttcccaggtgcccgtctggccgctggactgttggcctttccggagcgagttttactttaggaagaagcccgggatcccggtagtttagcctgaagaaacgtggggcagatgctgggcagggcggggataccgcgccaacacccgctgcccagcggtcgccctcctatgcagcggcgaagggacgcccgctgtgtctccgccctgcccccaggcgccccagtggctggaggtggcattctccactggacgggcgcgcctcaatccgggggacttccacagtgctgttcccgaggactacgcgtctcaactctttgtcgggttccctccctcccactgccagtctgtcttcaccgccgcgcagacctggggccgcccttcacagaggaagggctccttgacctcagccaccgtgaccccctcctttgtgtcacattctcagagagttggagggattatgcgtcatcgtaaacagggggacagagcgccttccacctgcggcgcatccattaagttccagttaccctcgagaggattgttttttccacgaaacccagatgcaatgagagcctggcttgtaccatctctaagcatcgaggcttccccctcgtctgggtggtggccttcgggcagtggctccggaaaggccatcaaggcttccccgtcgtctggatggtggccttcgggcagtggactgtgtccatagctgaaaaccagacttgacagttctggattcaggctgttgtgggagcgggaaggtcaaacacccagaaggaactgatgaatgtgaatttccctctaagaactgctttgcctggccgggcgcggtggctcacgcttgtaattccagcactttgggaggctgaggtgggtggatgccgaggtgagtggatcacgaggtcaggagttcgagaccagcctgaccaacatagtgaaacccccgtctctactaaaaatacaaaaattagccgggcctggtggcgtgcgcctgtaatcccagctactcgggaggctgagacaggagaatcgcttgaatccgggaggcagaggttgcaggagctgagatcacgccattgcactccagcctgggcaacagagtgagactccatctc

SEQ ID NO: 143638 - DNA, 308 bp, Homo sapiens
gttatccatagctttcatcagattcattaaaggcagggtatttgagccagaaaacaattcagcacagtcagaggccaggtcaccagtccctgtaggtgtactgttcactctagcctctacttattccgtatgtctttcctgtaccaacatgtagatgtatggatggtgcaaaagagtatctgctttttaaaatcccagtagagttataaattcttagagtagaactcttagtttagaaacatctttcctgtatatcttcatcaaataattatatttctcctgtgattgtttcgtgtctgtaagttggt

SEQ ID NO: 143639 - DNA, 272 bp, Homo sapiens
gttacttcagactgggtaatcagagagcagactgctgagaaaatgacaaatgagcagaaatccaaaggacaggaagacaggcagcagaaaaccagagaaaaaaggttttcagacagagtcatagcacaaagttgtataataactatgttcaaaaaaatgaagaaggcccatctggctaaaatgtagtgaaaataagcacagtttaagatgaagttgatttggtaggcagggactcagtattttttttaatctaatttaattattcttcctta

SEQ ID NO: 143640 - DNA, 401 bp, Homo sapiens
caaaaccacagacctagctcgaatggaggggactatgtttgagaccacagataaaggtcatgccaaaagcaagtgatctgaagttagaagttctagtcctattcccaaaacttactatgatgaaaggagagtaagggagagagagtttaggtggaggcactccgtgtgagccgctagcacagcagtggcacacacaggaaatgcttccatccatgaatcctggcactgagtagatgatcctgaccaggtctccaccactagctgcaggaagcctcatccttcggcaagagcaatgagaaatggcctgaagggcactgaactttttcctcgcctaagtcccccaactttttctctattaactctgcctcagtggcataagctccaaataaatttcttcctct

SEQ ID NO: 143641 - DNA, 549 bp, Homo sapiens
aacttaatgcagactctttgccactgaaagcacccagaactaaagccaaaagaccctacgcaacatatattatagacaccttctgaaggggagaaaaatcacatccaaatgaaagcaaattcaaaaaataaggagagacggcttatctagatgagaagcaaccagaggaacaactctgaaactatgaaaaaagtgtgttaacaatgctccagaaggatcacactaactcttcagcgatggatcctaaccaaaattaaaatctttgaaatacaagataaagaattcagaatgttggttttaaagaagctcaatgagatccaagagaaagttgaaaacacacacacatcagaaaaacagtttgggatatgaaaggagatatcactaaaaataaacccaaacatcttttggaaatgaaaaattcattgaaagaattacaaaatatagttgaaagctttaatactagtctagagaaaggagaagaaagaatttcagagctggaagacaggtcttttgaattaacccagtcagatgaatttaaagaaaaaaaaa

SEQ ID NO: 143642 - DNA, 168 bp, Homo sapiens
aagccacccgtgtacaacctacacccataccccaaccacagactcacgcagacggacacacaccagcccgatacctcatacactattgcgttggggactgcgctttcaacacatcaattttggaggacacattcagaccatagcacaactccagcaaactaatgtaga

SEQ ID NO: 143643 - DNA, 345 bp, Homo sapiens
ggctatggaggcaacccacctgtgtgggaatccaggctccaccgcctactcaggcatgtcactgaactctcaactaagtctcagtttcctcagctgtgaaatgaaggtctggtaattaatacttatctttcagtggttgagcattaaatgagaccatgtgtgtaaaacgtagcacctggtacatagtaagctttccgtgtattgcaccaccaaaattttatggccaggatattaggaggcctctagattgaactggaaggggaaaatagctcttgttccaattgaatatttggctcactcactcaacaatcatttacttatttatgataattatatcgcacagaa

SEQ ID NO: 143644 - DNA, 655 bp, Homo sapiens
atgatggagaagacgaatctgtgccctcagggagcaccgcagacaaccccctgttgtggcttcactgccaagtgcagacgaaacatggggctggagtgtgacattagccagggaaagcttgttcctgatctgggtctccgtggaaacagtgaacgtgcatgtcaaagatgaggcaagatggtaatcccgatgagggaaaagtcatccacttagctggactagggaagagttgggagtggttgggaagggttggagtggtgggggcttcagttccttccctcctccattctttcgttcaacatttacttccttgccaggagcttctcttagaagctcacagttctgtggtagatgaagagtttcatatctggtctcaggagttcaacttagatattacaataagcagaactgaatcaggattcaaatctgagctaaagagctcagttagctatgtaacctagtagtattaatcatttggtatctgtgggcacattctttgttaggtgctaattaggctgaaaggcatgctctccaggaacttaaattataatcactgtaacagaaagtaagaatgttattttcccctaaaagagtcaggtgttaaggaaaacacactccgtggcagtgtaaccctttaactgcatctggaaactgt

SEQ ID NO: 143645 - DNA, 225 bp, Homo sapiens
cacacgcacttgtagtccatttgcaccttacttataaattctgtttgaatccaattcagtcgttttactaatatattttcaaatgaattggtaaaagctgcagtcttagatttttgcccttttacttgcaacctaagatgtaaaaactgaacttcgatcaagaaatgtaataacatttttaagagacttaatgggtgtgtttcatttttaatattggaatgcaaa

SEQ ID NO: 143646 - DNA, 359 bp, Homo sapiens
tccctgaaaaatcaagacgctgctaaaagagtcaaactctgaaagaaatcccaaagatacatcactgcttgacgcaaacatttttaagaagtcactgattataatgaacacagcctttaatggcagtttttcatctccttttcacaagaatgtgacagagtgtcattaaggttttagaaatgaatgctcctaaggaaaggaggatcactaggactacaatgatgctcagtatgtggccatgggattctctgttgggctctttttaggtttttaatcaggttggagaagggagttagagaggaaaggaataggaacagacaagagctttaggacacctgtacaccacagtattttacttt

SEQ ID NO: 143647 - DNA, 192 bp, Homo sapiens
tccaaggggagaaatactggattcacaacttaaagacttctggagtttgaagagtgccggaggtcgtttatcagttgagctaatagcaatcccaaaaccttgccattcagcccctgcttgaatgccttgagcaacaggcccctcaccatctcttgaaccattttatttttctttgagtaatccaagccttat

SEQ ID NO: 143648 - DNA, 317 bp, Homo sapiens
caaagttacctcatcagcaacaaggaggaaggaataccagaaaagctcttgtgggggctgaaattccatgtaaagagtgatttctctcttctaggttatctattgtggggtaacacctagagcagtatcttattcatgatttttatactcattaagggaaaaaaggaatctagccattcaaactacacatgtgtaacaacacatattatttacaaagcaacttaagttggttaagtctaatggcaggtgaattcattttagaagcaaccgagggaatgaattcaatttgaattttttcaaatgaagagaatgacata

SEQ ID NO: 143649 - DNA, 442 bp, Homo sapiens
caggttacaatacattactcatgatagccaagataatatatgtaaacttctaagtaaagagaaagcagatactattataaaggagaggactttcacagctgctcttaggaagtggagagaacgttctcaagagttgtataaagcttttagggttttttgtgcccagttttattggctgttttatccctagtttagagattctgcctaaaaagtgactcctaagttagtaaaggcctaagatcgaaatcctgttcataaatcatgctaggtaacgcagttcatatatgtgacaaaagtataaccatctttttctttaaaaaataattattcttaaaactgacaacacagatgcagctagatgcagctaatttgaaattcctgtctcctttttttcttttgattaaaaaaaaaatgcatttaccagtactgtcagaaaaaaaaa

SEQ ID NO: 143650 - DNA, 514 bp, Homo sapiens
cagatgcgaccgaatgcgatatcaggagagaaggctggttgtattataagcagattctcaccaagaaggggaaggctgaggaccgggatgacatgctgggctggatcagagcgatccgggagaacagcagggccgagggcgaggaccccggctgtgccaaccaagctctgatcagcaagaagcttaatgattatcgcaaagtgagccatagctctgggcccaaagctgattcctcccccaaaggctctcgcggcctggggggcctcaagtctgagttcctcaagcagagtgcggcacgtggcctcaggactcaggacctgcccgcagggagcaaggatgacagtgctgcagcccccaaaaccccgtggggcatcaacatcatcaagaaaaataagaaggccgctccgagggcgtttagggtcaggctggaggagtgccagccagccacggagaaccagcgcgtcccctaatacggctgcatgctatcgcattcggtctgtaacctctaggtcag

SEQ ID NO: 143651 - DNA, 355 bp, Homo sapiens
tctgcctcctgggttcaagtgattctcctgcctcagcctcctgagtagctgggattacaggtgcgtgtcaccatgcctggctaattttttttgtatttttagtagagacagggtttcgccattttggccaggctggtctcaaactcctgacctccggtgatccacttgccttgtcctcccaaagtgctgggattataggcatgagtcaccgcagctggctgaggtgcttcttattgcaatgccccatccagtaaattaatatttttgaggatcctggggtttgtcagttactctcattatttataacatggtgcaaatggagagtacttctcattccagccagttagattcactc

SEQ ID NO: 143652 - DNA, 768 bp, Homo sapiens
agacagttgccaacaccatcaacaagttgcaaaagacaaactcctaaggtagctctgccagatcacaatgtgctgctcttactgacatcttcctcttgtgcagggtgagttccaccagcctcttttgattttcatggggcaagctaaggttgatagggtaaaccacagtgcactcactgaccatcacacatcctgcagctccattacagtaagactttagttaatgtgtataaaactttaaatgcttaatcttcacttaatgcttttttcaggactttatgtatttgttattactgtgctatacagtataaagcatgttcacagtattccgtgttatgtgagtactgtatatgtatgtgtattgtgtgcatgtgtgtacttatgactgagaattaaactagtacagtcataggagtacataatgctgtaactgaaacacagtgtttattataaagaaatactgcatatgagtacttgtaagaaatttatattaaataagctatcttcaaacaaaaatacacataaaacaaggttatgtattgattggttggcaaaatgttctggccagagtcttcgtggatcctaacgctatatttctcctcagagcagtgttgcatttgtcagtaattcaatgatcaaggtaactttctagaacataactaccacaaataatgataattgactctacatttaagagtattaagccataagaatctaattgctatgatttttttctgaactgagttaacacaactattatgagtacac

SEQ ID NO: 143653 - DNA, 1063 bp, Homo sapiens
agaagtcaaattgatagaagcagtagaatggtggttgctaggggttggggagatggggaaatgagttgtttaatgagtgtagtttcagctttgcaaggtgaaaaagtcctggagattggttgcaggacaatatgcatatacttaatgctactgaactgtttccacttaaaaatgtttaagatggcacattttatgtgatgtgtatttttaccacaattaagattgtaggacaaatctgcattgcatggttgactctagcaccctgttgcatatagaagaagaaatctcattaatccagggttagggttttgctgggccagtgtagaataaggtaacaaggggtactattgagggtaggttcacgtgagtagttagttctgatggaggagatggatagggaaggaataagaggttaggaagaggtcttaaagagtaggcatactgggaaaatgccaaagacataggagattgtaatcagactaggaaacagaggcttgtgtgtattctgtggaagtgatacttatctacattcattatgaatggaaatctgttggatgggaagcttcttaatggttggttcaaatttttttgtacttcgtgttaatttagggaatgaggccaaatacctggaatgtgctcagtgaaattatcagttaaataatgtgtgtgtattgtcacatatctggaagtagcatcccctacagaaaatgcctttggcttgctcttcttttccctctgtgctcttattctaagccacacatttctgaggtgtttgctgagtagtggacagaattcatatggttcattcccatacccttcttgttgtctaagggggattgatattccactgagatttggggataaaattatagatattgacttcacccttgtagattctgatttcattgcttttgggtagaacctgggcatttctacttttaataagcccttcagatgattctgatatacaccaaagttgcatgactgctgtttgagagataccaatttgtctttctaaagttagaattgccttgctagatttccctttgctgtataacatcac

SEQ ID NO: 143654 - DNA, 990 bp, Homo sapiens
cagaaatttcccccatgcgttctcattaagagaattgagtaaagtcatgaacacccttgcaaacattattacagtattaacaataaagagcttcttaggaatctttcttataatgaccctcagtctggccaatgacatcatagcaacaaagtgaaatacattaagaacaattcctcaggtggggaccagagcaaactctggtttagaccccaagaaactcatccagtagaagggctgagggatcaaccctcaaagtaggtgctgttccaaatcaatgctctaggggtctggaagctcaggtgtggaagtgaggatcagatatggtaggtctggcctgcttttagtcttttttcaggtatgtgatagtatcttcattctacttggtgatctgtctaggttttagtagaaatttagactgtggctagcactacagtggaagggattctctctgctgggaacaaggcagagtcccaagcattgggctgaagttacaggcatagttcttgttttggttggaaacagaggtactgatcaagaaaccaaagtgaacagccagtcacatgcatagagttagggcagggatggtgggggatgtgggattagcttgatggacttagggatgtgctggttcactcagttaggatgcaccaagtatcacgattagtaaggatggggctggaaatatacctatgccaggctctgttctcattggctcagcagtggtccccagtgtgtagaacggaatcgcctggggatgcttgtcagcatgcacatccctgtgccctacccaggacctcctgagtcaatgtctttgcaggcagctgcgggtttaacaacctccccaagtgcttctgatgtagactaaaatttgagaaccattgaattagggagtaagtggatgaacctacaggtttgagatataagtatctgttcttaggctgacttgaagctaacattggacacagagcaattttagtgggacttagagga

SEQ ID NO: 143655 - DNA, 1097 bp, Homo sapiens
agcgggccgggctggctcggggagcggccagccgcctctgcgggggtgtgccgggagcgggtggagcagccaccaacctcacccactcaaagaagcagggatggccaggttccaacagcctgagtggctgccacctgatggctgatggagcagaggcgtgaggaaaagctgatggcactgctttgtagtgctgttctttgtctctcttcatctttttcagttaaagtctgttttatcagagactaggattgcaaaccctgcttttttttgctttccatttgcttggtaaatattcctccatccctttattttaaacctatgtgtgtctttgcgcatgagatgggtctcctgaatacaggacaccattgggtctttactctttatccaacttgccagtctgtgtcttttaactggggcatttagcccatttacatttaagtttagtattgttacatgtgaaatttatcctgtcatgatgttgctagtttttaatttttcccattagttaatgcagtttctttatagtgtcaatggtctttacaatttggtatgttttgtagtggctggtactggttgttcctttccacgtttagtgcttacttcaggagctcttgtaacgcaagaatgtggatttatttctggtaagggtaaataagtggatttatttctcaatgctgtattctatgtcctttaccccaagaatcattactttttaaaatgcaattcaaattagcataaaacatttacagcctaggaaaaggcttgtggcattagaatacttatttataggattattttgtgtttttttgagatacggtctttgtcatcgaggcagaagtgcagtggtttgatcataattcaccacagccctgaactctgagtccaagccatccttttgccttaatctcccaactagttggatctacaagcataaggcatcatgcctggctaatttttttacatgtttttttttttttttgtcgagattatggtatcactatgttgctctggctgatctcaaattcctgacctcaagtgatctttctgccacagcctcctaaagtgctaggattacatgcatgatgcaccatgcctag

SEQ ID NO: 143656 - DNA, 439 bp, Homo sapiens
tcccaggcaattaaataccaaggacttcctgaggacactaagtgtccaggccacagagttggtccttgaggtgggtgtgaccaccctcacccctgggtatccaggaatgtgcccgacgccccaatcgccgtctccgggcattaagagcttcctccccatttccagcagtttccttcagtcacccctgagcagaatcactgggtcagaggctggcctccttgatagatggtgtttttttttttctttttttcctgagatggagtttcactctgtgtggcccaggctggagtgcagtggtgcggtctcagctcactgcaacctccgcctcccaggttcaagtgattctcctgcctcagcctcccaagtagctgggaccacaggtgcgcgccaccatacccagctaatttttatattttttaggagagatggagtttcgcca

SEQ ID NO: 143657 - DNA, 234 bp, Homo sapiens
ttgttccttttctcgatagagctattaatttttctctataaatgaatcagggcaatggactaaaggtctcgaaatactaatagctgaagtgacaagcctggcaaggagaagttacacacagacctctgagccttaacagaatctgaaaatccctgcatagtaagtgatacctatcacaactttcctaagattacagatgctcaggaggctactttcaagaaaacaggcacctaa

SEQ ID NO: 143658 - DNA, 208 bp, Homo sapiens
agtaagatacagttttgtaattcacaagtataattaaaatctgagattaaatcttcattggaattagtgcattaaaaaaattaaaagactgtataagattggaagttgatatattacattattcctgggtgacttaaaatttatcctctatcattatgtactcctatttttatagtctaaatttatttctccatgtcattactgcctt

SEQ ID NO: 143659 - DNA, 101 bp, Homo sapiens
gctggtcgagggtctcgtctcaatgtggatggctgctgaaggttggggggctgtggcagtttcttaaataaagacagcaatgaattgattgattcattgat

SEQ ID NO: 143660 - DNA, 231 bp, Homo sapiens
ctctccatgttgcggaagtctggaggaagcagggagtatgtgcggaccacacagcttagggagagctaggaccacagccctggccctcccaacttccaggccaagctgtttcccaagactctcaagacaacaggaccccatcctccacatgggaaagggacacagcaacacccccactcccaaaaaagtctcatgagccgggcgcagtggctgacacctgtcatcctagca

SEQ ID NO: 143661 - DNA, 451 bp, Homo sapiens
aattactgatacaattagtataaattaataatagtaaaaattaattattactgaattacacagaatcatctcacaaaccttcagcacaacaagacgtgacagagatcagctctcaagaccacaggattcaaagggaaggggttggagagttggaatggggaaaaactgaaataatggctgaaaagaatagaaaaaaacaaagctcatcaaagttaattaatctcaaataccagccatcaattacagtattagtcagtggagtaggacaagatagggaagcttaatcaagaagaaggaagagtttccaaggaataggttctgggttcatggagacttcaaagaaaagagtaaaaagagggttactgccatgttcgtgcaacatgacctgaagctcaggaaatctcactgggcaggtaagagagtgctttcctttcaaggggacccaaaaaaa

SEQ ID NO: 143662 - DNA, 121 bp, Homo sapiens
ctcttatcatgtaacatctgttataacacctcaaaaacaagagtgattttcctgctgtgaggagtgctgtgctggatggaaagcataaataacccgggactaagtggttcagctgactttt

SEQ ID NO: 143663 - DNA, 818 bp, Homo sapiens
tgagtaacaactctgtacgagtcaagatctctggtgaaaggtgccatagggaggcatagagacaaactgatatggggaaaagtgagagacaaacagatggaaaaatgaaagggaaagagaggcatgagaggaactggatgatgttttacacaggcaacagaaggagaaaacaagagtcaaagacagaataggagagacaccaatctaaattcaaagagtttagttcaacagatttaacacagtctaattcagcaggattctctgagatgtccacccagtgtgcacaattctttccaggatagcactaaagaaatcccctaaaggcccacaacagcaagtgttctattactcctctaagttttccacctgctcacctaatttactcaacagattctaactggctaaaactgataccttaacaagaagcaaaactcaagggagacttcagataaaggagagccaacattgtcacacaagacaagtgcatagaaggtgttgtgaaaggaagaaaacccaggtgtgaaaagagccatgatttgaaatctttcttcttttcctttttgaattagatttgtctgtctgtaggagaccagttcatttccttgtctctccatctggaagtatggctgctgctaccatgttggtcttcagggcattatattcttcggtatgtacttgtacctttatgaggatacctactgattaaaaacttacgctggaggaacagcaagcaggctggtacacccggaaggaatggacaaggggcagactctgtccatgtcacttgtgtgctgggactcgtcagaggtggtaccacc

SEQ ID NO: 143664 - DNA, 333 bp, Homo sapiens
agtagaaaattacctgctcttgatgcaaaaatccacacgccctcaggagcaaagggggaaccttttggactaggaagagaagccgctcgcggtggcgtcattacaccagcacagagaagagccgggcagaggagcccgaccctgccgatcgggcaggaggacagcagaacgaaagcccgccaccaacttgcaaaggactggagttttaggtcttaaatcttttacataatctggcgaaagttatataggagtcccctcctaggagaaagggccttctccccatactccacccctaaagcctgatagggctcaaagaccctgacctaaagctgc

SEQ ID NO: 143665 - DNA, 244 bp, Homo sapiens
caccgaggagggaggatagcttgagattcctaagggagggtattatccattcatgaaagtccatccccatgacacaacacctcccagtaagccccacttccaacattggggatcaaattttaacgtgagatttggaaggggcaatcattcaaaccatagcaagagttaaatttccttttaaagaaaatcactgatatgattccatttcgccatagataaaaactagtatttcagcctaccattg

SEQ ID NO: 143666 - DNA, 461 bp, Homo sapiens
tggggggtataattcgtatactgtacaatgttctcatgtgtcaaagttggtttagttttggcaagtgcgcaccccttatgtaacacacaccacgtccaggtatagacccatgccaggcccccggaaatcgctctatgctctgtccagtcaatttcctccatcacaaccaaccactgtcaacgattttttccaccatagattagtttcacctgttgaagaacttcatccatgtagaattatacggaatgtgcgtctgtctgtgggctggctccttttctcagcctgatatagtctgatggtcatctgagctgcagtctggtactgctgtgcattacctttctttgctaaggagcttccctttggatggatgaaccacaatttgtttagccattctcctgttgataggcacttagttgttctcagtttttgtctactatgaataaagctactataaacatttt

SEQ ID NO: 143667 - DNA, 223 bp, Homo sapiens
taggtctaaaccttcaactgaacacatttcaaacgtgtatggaactcattgataaaaactgcattgattattttccccaaaaagactaagaacaatccagagaacaaacaaataatagaagaataacctgtctgttcttaagccaggttactcagtatcagaaactaattcaaaatacagtaatttctgcatgtctgagtctgacagctgtttcattattgta

SEQ ID NO: 143668 - DNA, 329 bp, Homo sapiens
gccccgtgagcatatgtgaatgaatagggcgtccagcttggagttcagtaggtggcgtttgtctgtcctttgccactttgcctaggagcaggtgattcatgaaaggcagtcctagggaagcctcagattccctccggccattcctggttgccaaatagttcctctaagagcaggtagccaggttaaaggaatccctggtgcatcccttccagccatgctgtggtatccatgagttcatggcaaggtctttggcaaacgaatgatactctacataaaactggctccagtgttctgatttctgtgtgtttgggagtaggtggggcagaacc

SEQ ID NO: 143669 - DNA, 691 bp, Homo sapiens
ataatgcccacctacacacacatacttctgttcacccatgaaagaaggactcaaattttggtgaagtttctaaaccaaatttctaggttcatcagaacactgaattttaactttatatctttggatcattttctaattcttacttcaataacagggatttggaactacagaattaacttcaagatggaaatgttttcttctttaaaaactctcctgctaggggtaggaggagtcactgactattgtagttgtgcttcacagtccccagagagtagatcctacccagttccgatgcagaaccttagaagccggctaagatggcttcccgtatttcccaggaaaaaactcactaagtcttgttccaaattctagaagtaaagaggctcacttcattcccagaaaagtcctgcattttaagactgacaggtggccgggcgcggtggctcacgcctataatcccagcactttgagatcacaaggtcaagagataaagaccatcctggccaacatggtgaaaccccgtctctactaaaattacaaaaattagctgggtgtggtggcatgcacctttagtcccagctgcttaggaggctgaagcaggagaaccacttgaacctgggaggcggaggttgcagtgagccgagatcgcgccactgcactccagcctggcgacagagtgagactccgcctc

SEQ ID NO: 143670 - DNA, 915 bp, Homo sapiens
gcacacacttcagcacttcaggcggctactggttcacatgcctcttcctttatcccttgggtgatattacctaatgtcagtgttcctggcttttgtataccccgagcaagatgtggtttgggcactgtggtgagcggagcttacttgtgtacctaccaagtgcccagggagggtggaggccacagtgctctctctgacctttaacaacagttaacaccagttcttagggaaaggagagtttcttacccaaaagactggttcctgcttgtgcagctgcagagggactggagcggcagcctgcaagtcccagtgaagcatgctgccttctttgtggtcctcagtcttcgagtctgaagagagggaagaaggggtataggggctcactccagtttcatagctagtgaaagttttctgggccaggtcttgggtttttttgttgtgggaagagtttataacaccagctacttgcttggtaaaagttggtcttggaacatggcaaggcattgtggcaagcagcactgccgctgaacgcgctgctcctggggctttggaataattcccctggatccgtaacttgggggtgttcatgtcattctggggaacagtggagggagtgcgcggcagcacctgggggcaccagtgaagagtggccagccaccaacctctagaacctaactggggtcgaatcctggccccttccgctctccagtgtctcgtctcctcgtcaactcggttgcgaggtctgggggcctacggaggtcctactcgtctgtccgggttctgagggagggcccgggcctgggggccggctggggggccttgggccccccctcgtttcgggccctttggccggggccctacccgggggggcggggcccaatgctctgggggttgctcgtttgctattatctcgtc

SEQ ID NO: 143671 - DNA, 401 bp, Homo sapiens
agacggagagtgataccggcacgaggttgtacctcgaaagaagagctataaatgactggactagaacagcttcactggttgagatgatgaagatgtgaaggctggaactgccaggagccatggctgctaccattagcagttctagcctgaggccaaagctagcacagaaggcagatccatgagaaatataaagaaatgagcctctaatgtaaatatagttaacctgctggatcaagctgtttcctaagctagttgcctctggccttcttagttaagtaaatacatagattatcttttatgcttcacccagtttgagtgggattttctgttagttgcaaatgaaagcatttttaaagaatccaaaaccccatgataagacatagataaaaccaggttctccc

SEQ ID NO: 143672 - DNA, 285 bp, Homo sapiens
tgccactggctgcttcttagggcctccaggtagattagtttacctacagaactctgtctatggtcttagaataagaggacctggaagagttagaggcttgttgggggccatggcaggcctttgctgcagttcttggaggtttcttggccactcctgacagtgggagcagctcttcggatttccccatctaccctatttgcgaaggatgcctgctagaccagcatggtaagccatggggcatggagagagcccaagggtgtagaagatcttgtctggacaatctag

SEQ ID NO: 143673 - DNA, 184 bp, Homo sapiens
ggatttgctggtgcagtacaactaggcttaatagggacatgggtaattggtatattcttcctgttgtgatattgtgttacaataatctattcacctaaagtctcttcttatctaaatcctgatttgctctttatttgacatacttcagagtaaatatgacctataaaacttaagtttttcctga

SEQ ID NO: 143674 - DNA, 437 bp, Homo sapiens
agacataatgagggccggaactacaggagttggaattatgtgcaaagacaaatgctttctctcaaagcaatcccctctccctgctgaaagactcccctagggagtcttccaccaccaactctagacacactacagtttgtcagcccagaaattacatgatatcctaggtttccagaatgacacgtaaacataaaatcctaggtgtggtctgacaggaacagcactatcacccaccaccccagatcaagatacttctttgaaggtagcataaaaaccttaaacatttttggcagatacatcagcgtaagtcacgtgctagtaacacacccaggtcctttcacataggtgctatggggtagttagttcatttttggatccaaatgcaagatgcaggattctattccattttagctgttaattttaattaaagatcttaa

SEQ ID NO: 143675 - DNA, 730 bp, Homo sapiens
gtagttttctgctagacaaaaatctacaaagcattttcagactaaagtcctagtggctttccagagtctaaaaatatttttttttctagtagtagcattttctttcacttcagttcttcaatttttttttcaatgttttactaagatgattaagagtacatagatcaataatgtatgtttttctttttctttctttttttggggggagacacagtcctgcactgttgcctaggcttgggtatagtggtgcgatctctgctcactgcaacctctgcctctcgcgttcaagagattctcgtgcctcagcctcccaagtagctgagattacaggcatgtgccaccacgcccagctaatttttgtgcttttagtagagatggggtttcaccatgttggccaggcttgtcttgaactcctggcctcaagtgatctccctgccttgttctcccaaagtgctgggattacaggcgtgagccacttgcgcccagcgttttttcaagtactatggtagaattttcaatctgaaagaaatcttagggatcttctgatccaacaacacagttacttttcaggtgaaggacttctcagtagaattttctgtagtgatagaaatgttttatatctgaaaatgtgtttctatgtgttcagtacagtatacttcatagatggctcacatttcaagatcttgaagtatggtttccaaatctctgtgtgacagtgggacttattttc

SEQ ID NO: 143676 - DNA, 129 bp, Homo sapiens
ttacttcctttgttgattctttggcatatattaaattcttctgaagttgcttttttaccctaataagtgaccgatagctgctaatgctccagtgacaatatttcccatgggaaaccaaaacaccatcaa

SEQ ID NO: 143677 - DNA, 312 bp, Homo sapiens
gattactatattatctacctccttcccccacccgcttattaaaaaagtttacatttaggcatttgtattactggagtctgaagcctcaggatacagattactttttcagctggaagaatgttatatttatttctcagtaggagaaattagttgtctttgtgcttgcagatgggaaaaaaaagagtttgatttgtgaagcatgttgaactgaccagatctgtggtggccaactccaggggataaatttcctgtatatggagaatacctggagcattgctgggccctgacctattatatagtcacacacggtaa

SEQ ID NO: 143678 - DNA, 473 bp, Homo sapiens
gcatatttacatttgagtctgtgaaatctacagataatcagcctcgtttttcctttttcagtaatatctcccacggctttccatcacccacagaaaagtgagatgagggacgatgtttgcttcatgcatgatttgaagaaaggacagctgctttagtacaaaaaccaagtaattgaaataagggaccagtcctgtccatattggtccttctaattttcagttgaatattacctgaaatataaaggcatacctaccgcaaaatgaatctagaggaaatgttagtgtgttttcaggaaaggttgtagctctcatattaaaaattgtaagcttagaatatttaggatgatcactgatgaagggaaatcaggtttatcctgcttggaggatcacctgagcccaagaggttgaggctacagtgagccatgattgcaccattgcactccagcctgggtgacagagcaagaccctatctc

SEQ ID NO: 143679 - DNA, 367 bp, Homo sapiens
gattagatgagggctacctacattatggagggcaatctgctttattcaaggcctacaaatttcaatattagtctcatccaaaaaatactctcagcagaaatatccagaataatgtttggccaaatgcctgagcactgtggcccaggcatgttgctacataaaattatcacaaaagatgaggacttgtcctcagggacgccaaggatggggtttaagatagataatggcgatggaacatgaacactgtctcggaggccaagaactatgaaggaaaagtccactggattctgcatctgagattcgctggaccacatttctcttcctactaagtgtaaaatactggttaagagcaagcatgggctttggg

SEQ ID NO: 143680 - DNA, 1088 bp, Homo sapiens
ggaggcgatctagaggatcccttttattctattttattgaactatgaatactttatgctaaagaagatcatgttccaattcctcttgctttgtaatcttttccatacatcaaagaacaatcctgtttttcaagctttttggcttttcctacaattcattctcagagatgacctttagaatagactcaccaggctcttatttccaaagcctgtagggattatgactaaatctgcatttaaatttaacctcagtgaactgcccactgaggggggccactcaatccagctggcttgaacaatctcttgatgaccagagactggggggtcactccagctgctctccccgaccccagggacatcaccatggcccactgagcattcctggggccccaggcctgcctcatcttccttccaattgtctcctttctaactttctttggggaaggtggcacctaatttgaatgccctagaggttgattgtttacctgccggctttacccagggacttgcagcttccaggtagggtaggaggaattttttgttggaggcatttgctggatgccttctccattgtttcagtggtatttcctcttaacaaatgcaaacgtaacagctcacacaatagaacttcagttttcaatcacaccaagtccaaaatcagcactcttgttcagagagtggcttccagggacttcagtttttctataaatggcttctcagttctccttcaggtttccaaggtcaatctgctcattagcagaaagggagagaggatggagaaggcacactggctttttggccacctcacctgtggcaagtgatgcaacaattctgccccactggtgacaatgtgtcatgaaggccccatttgtgcaaatggctggcaggtctcatctgcctggacagttgtctctgtcatctttcctctgctctggtcctgacaggcatctaggcaactctgttgcatcctaaggctttgctttcccatcttacctgtccatttgtccagctgtctactcacgtcctgagggccaaaacctagtcacctggccacagctagctaacaggaaagtggagaaatgaactctc

SEQ ID NO: 143681 - DNA, 580 bp, Homo sapiens
aaatgtgtagtttattgtacatcagcactaccttaataaggttgttttttttaaaaaaaaaaaaaaaaccttcagctgctccctactgttcatcaaataacagtctgatattcaaattcccccagtatctggccctaactgccctatatagccttaatcaatcatgattctcctctacaatcccaatgctctagtataaccgagccagtcactaaagctgccctcctcctactgttccctatgtttcatattcctttttctgaggctctacctgtagacatcttcaagacccaacccaactgtcatgaagccttctccatgaaggctatccatataaccagaataagaagtggtctttgcctccttgaacttttgtttgtaccacttttatgtttcttatccaaaaaatggccttaagttgtaattatctgtatagtcatcttccccactaggataaaggattgctgaatgatacaatttgttgtatacttctgtaacacccctcctcttcattatctggcatgtacatcgatattaaaaatattcattaaatgaatgaatagctgattgactcagatga

SEQ ID NO: 143682 - DNA, 894 bp, Homo sapiens
tttcttcttcggcagcacttcctcaccgtctactgcaggcagatggacttatctgttatctgcattgcctggcaagcaggtcggctgcacaagcacctttgtttagttcccttaaatgcatcccaagcacccacaaagccttgctggccacctggtagactgcttaatcaatgaactaaacgaactcgacctcagagcccctgtgcagcctgcgacagctcctcccaccttccagaggccaagcagctctctcatcctcttcctctacagcaactatcttcatcccccatcaaaatgacttcatgaagccatcccctcccagttctcagggccagtccagcaagctgaagcccaaggaagggatggaaactgccccagagtcttaccccagcagagtacttgaaagcaagcatccagcagtacacaggctgccccaggacccccgacactggggttatcccagcattccactggcagcagctgccctgaacacggtgcacagggacagcgaacgggtttccccctggctcccattctaggtgattactagtgtgccgcccaacctggcatggcaagaaaacacaccatgatagactagtgatgtcttggctgggagtggcaggactggaaggcatgccactgggccgccatccccacaggccttgcagggactccaaagcagtgccgcccaaggggattctccacgatgatggaaatgtgctatgtcagcactgcccgattcagccaccaggagacacgtggttcctcaccacttcagatttggctaacgtatctgaggaactgaatttttatttaattttaaattttaagttaaaatagtccctgggggctgggcacggtggctctcgcctgtaatcccagcactttgggaag

SEQ ID NO: 143683 - DNA, 344 bp, Homo sapiens
tgtgttaaataacccagggtacatggtaactgcaatttgcttctagtggggtggtagtgggagtggggtgtagtttgtgagatggagagaaagtgagaaaagaaaaccttagttcttagacactgcaacctaggtagatcttaattttaccattattggaagtctctttgtcttctggccttgtctgcttggatttcatgcccattcttctttccattccaccccatgccaggggaagcacatctcgtctcctccctcttaccccaaatccaccctacaagcctctcccgaatgagctccatgggctcaccttaagccaggacagtgtggtgtgtagagaccca

SEQ ID NO: 143684 - DNA, 576 bp, Homo sapiens
ttattttttcttgagacagggtctaactctgctgcctagggtggagtacagtggtatgaacacagcttactgcagcctcgacctcctgggctcaggtgatcctcccaagtagctgggactacaggcatgtgccaccacacctggctaatttttaaattttttgtagagatgaggtcttgctatgttgaccaggctggtcgggaactcttggcctcaagcagtcttcctgccttggcctctcaggcgtgagccaccatgcctcgcactggcctgtattaaattctttgaatcatcctaaattccttcttaccttaaggttttcatacatcgtcttaccttcacttagataactctcaccctatccccacctcccagactgacttgttaaggtatctcatgtgagaaacctgcagtattttcaaccctcactccttgttgctttgtgcaatggtatatgttttcacagaatattttattttactttcatattcttagaaatatatacctatgtattgtttatgtaatacgtatcttcttcagaatggaggttatttgaagaacccctatgtgttttgc

SEQ ID NO: 143685 - DNA, 209 bp, Homo sapiens
tgacctgtgtagctaaaatataatgagcaaaatagaaacatttgaaatgaaatagtagagaaatgtattcattagcggcaaaattaatcaatatgggtataattttgattaaaatataaaaccagaattctactcttcaaaaaggcctggctcatgccccacgtggtggctcatacctgtagtcccagctacttaggaggctgaggtgg

SEQ ID NO: 143686 - DNA, 362 bp, Homo sapiens
caaaaaggtcatttaaatagggaaccataatttcacagaaaacaatgagtaaacatttgattgaaacttgatttttaaaagaagcaggccaggtgtggtggttcacgcctgtaatgccaagcactttgggaaactgaggtgaaaggattacttgagttcaagaccagcctggacaacatggccaaaccccgtctctacaaaaaacacaaaaattagccaggtgtggtggtgcacacctgttgtcccagctactggggaggctgagccgggaggattgtttgagccagggaggtagatgctatattgagctgtgattgtgtcactgcactccagcctaggtgatagagcgagaccctgtctca

SEQ ID NO: 143687 - DNA, 1393 bp, Homo sapiens
tgctgttatatttgtagtacttagtatttactttaatccatggcatatagttggtgcttaatacatacttatatcatgaaagccagaactctgcttcagtgtgggaattggaagcccctttcttcctgttgcagcctctaatgccattccccctctaccctgtagttgggaccaagatgaagggtaagtttgtgattatctttggttagcagggtggggatatgggctactacttgtttcttcctttccttggtatgttctctggaacaatgagtactaaagtatgtctaccaaaacacagttttcttttattcattaaacaaatatttgagtacctgcaattgttaaggcagtgttacctgtatctccttgagttatatttctgcagtgaaagcttgagaaatcaagtgacaagcatgcaatcactcattaaaatgtagtggccatctctcagtttctgtttctcagctgagttctgcagggtgccacaaaaatgaaaaaaaaaacactgtcttgcctctgaaagaacttgtgatctggagggtgagagggtaatgcacttgcttcctctctgcttggcttctaaatgttgaagtgctcagaaacttggagttctgtccttttttcttttctctccactgaccctaggtgtagttgccatatatgtgagatgactttcaaatttacatctctggattcatatctagcatctgacatcttcatttgaatattgaataggtatttccaaaatgacatatccaaaacatgattgtcaccctctcaacctgggcctcctctagccttccccacctcagtaattattatcaccatttactccattgcttatgtccagaaggttagagccatccatgattcatttcattccttcccatattgagtccctcagcaaatcctgttggttcaatctccatatccataatttcctgcatggataattgcagttgcctcctgttgcttttcttgcctccttttaggccttctgtaatttattaagtatgcaacagccagaattaacttttcaaaagtataggtcaggtaatgtcattaccctgcttagaaccttccagtgttaatcagtaaaatccaatgacttggtcaggtgtggtgactcatacctgtaatcccagcactttgggagactgaggcaggatcacttgaggccaggagttcaaaaccagcctggccaacatggcaaaaccctgtctctactaaaaatacaaaaatcagctgggcatggtggcaggtgcctgtagtcccagctactcgggaggctgaggcaggagaatagctggaactcaggaggcggagactgcagtgagccgagatcacaccactgcactccagcctaggtgacagagcaagactccatctt

SEQ ID NO: 143688 - DNA, 372 bp, Homo sapiens
tggtgataatcgatgtgttcgtatttgaatatgcaccagaaagtaagggaatggaaatattttgtatttaaataggtttatttattttattttattttattttttgcgatggagtttcgctcttgttgcccaggctggagtgcaacggcgtgatctcagctctctgcaccctctgcctcacgggttcaagcagttctccctgtctctactaaaaatacaaaaatcagctgggcatggtggcaggtgcctgtagtcccagctactcgggaggctgaggcaggagaatagctggaactcaggaggcggagactgcagtgagccgagatcacaccactgcactccagcctaggtgacagagcaagactccatctt

SEQ ID NO: 143689 - DNA, 285 bp, Homo sapiens
ctactcacgttccctttggatctctgagctcacttccaccaccgagtcttgtccacagtggccaataccctcagattattcacacctcctggaggtgcctttctcatcctccctgtggccatggaaggtcagcaggtgtctagtcatttggtttctgttggcactgcacgtgacaatgtcaccctctgtgttcactcaaaagacacatgataagcaccttctatatgcaggacaggacctagactctatcctcaaatagctgaggtaagaaagaggtaacagcag

SEQ ID NO: 143690 - DNA, 248 bp, Homo sapiens
tttcgatctgtgaacaccagaatatttctaaactcattgctgaagggtctggcagggatcagggttcctgaaactagagtcaatggttccttatttaaaaagccaatgttaccttggacacaagaattagatgaaatcctttctgctaatgaatttattttgttgtagatacttgcttttccccagggtatatatttatgtgactatatggtaatcagtattatccctaaaaattaaaacacaacact

SEQ ID NO: 143691 - DNA, 603 bp, Homo sapiens
agtaattaaatgctgaaacctttcagaaatagccataattttgtattacatacaagtaagccattttaaggagtttcatgaaagacgtttggcacttcacccattatttcttgctgatggtaatttgactatctttttcaagtagctttttgcattgactaggataatttacaaatgaaaattactttctcatcattgaacagcatgataggtatttgtgccgcattttttatcttttaaatgaaaaatatttattaggtaaatggaactgaaatactacctagttacttcttttagtagaatacttctgaggcaagaaactaaaatctagttgtcatattttccaaatgttatttatcagagtaacacgaaatgacttcccaaacacacttgaaaacagtaagtagattcacttggcacacataatctaaaggagatttattttctgtttactagaagttattgaatcttaaatattacccctcatgccctctccccctgcttttttaaaaaataagcgtgggggggaatcagctaaaatacagcatagaaaatgcaggtttacccccctcccccgccagcctgctttgttaacatcttgta

SEQ ID NO: 143692 - DNA, 778 bp, Homo sapiens
tggagatgaacacactcttccgcttctggtccttcttcctccgagatcacttcaacaaagagatgtatgaggagtcaagcagctggctctggaggacgccaaagaaggctacagatatggtttggagtgcctttttcgatactacagttatggcctggaaaagaagttccggctggacatattcaaggattttcaggaggaaacggtgaaggactatgaagctggccaactgtatgggctggagaagttctgggccttcttgaaatattccaaagccaaaaatttggacattgaccccaaactgcaagaatacctcggcaaattccgacgtcttgaagacttccgagtagatccccccatgggtgaggagggcaaccacaagcgacactcagtggtagcaggaggtggcggcggtgagggcaggaagcggtgcccctcccagtcttccagcaggcctgctgccatgatcagccaaccccctacaccacccaccggccagcctgtccgggaagatgccaaatggacaagccagcactcgaacacacagactttgggaaagtgaaaagctccttagccctggggcttgaggggggaaaggggtagggtgggtaagagtccatgggggtgcccagtcccaggaaaggggacaatgaagggacaggcctggagttactaggacaggcctttgtgctgagtagcaatgtatacaccatttgggctatcagaggtacccctgggcaggagcctctacatccccttccccctcctctctccatga

SEQ ID NO: 143693 - DNA, 735 bp, Homo sapiens
cttttacattataatgtaaagttaacaatacttaaatattatgatatatcatatgatatgttcatgataagggattaaaagggaaaaaacagacatttactttatatacatatatacatattcataacaaaatcaagatgaagtactcatgacaattgcaattctcatttgtataactggtcacgtgatttttaactggtctttataactgccttattcagttccagattacctttgcccacagcactcacctcagcttgttgtatattctctggtggggtgacccaaagaccattagtggaccttcctgaattgggcattgtcgttttccattgagtttaatcacagagcatggtattactaagagacatcctaagagctctcctatattccagaaatactcttcttccttatatctattttggaggagcaatccagtttccccatagtagtcaggatcagtcagtccagtcagcatagtaacttccttctttgcctgttgattcagaggcttgagggacccaaggtggctggttggcagtcttaacttccagttcagtggaatcactatgtttcctggtagacacatttctgcctttggaactgagacctctaggccagcagagcataaggtcacaggggcaagaaacaaaaattttgctagtgggtcactggagtgagtggtggcactccagtttccaccccatgaatcctcactataaaattaaaagcacc

SEQ ID NO: 143694 - DNA, 507 bp, Homo sapiens
ggggcagagcgggagacagaagaaagcctaatttacacagatctgtaaagttttaccttagcaggagggtcaacaggctggttagttttatcggggaaaaaagccttctcaaaaaggtggattcagctaagattttaaaggcagagggtaaggtgagtcaggagaaggctattttctgcaacttgaaccaacatctagactcaaggcagaactgagtggttggcatggtcagaagtcaaatgtaattcagagactgcaatacaagataccccctagatctggcaactgcatttgtcattaaacatcgagcacagagagttcttagaatcccccaaagcaggggccaagtaggaatatgtgtgaggcaagtgagacccaatgtaggcaacagagagggtcaaatacaaggctggagctattgaggttaaccaagtggtgacacagagtacacacatcccatgaagcctgatctgatttttcaaaagaaacgacatgtaatgaaactcc

SEQ ID NO: 143695 - DNA, 295 bp, Homo sapiens
gagacctcatcaggatggaaatcacaattttaaggcagatacatgtttttggaagatcaaccttatgcaatattgagttcatgaaaatgaggaggtctaaaagtagggtgaccaaccatcctggtttgacaaagactgatagatatttcctggggtgcaggaccttcagtgctaagactggggaagtttcagaaaatgcactgatagtggaaatctaaagtatactcagaaatatgttgatcgtcttatctaaaagatggtgacagattgtggtagctagtctccaaagacggtt

SEQ ID NO: 143696 - DNA, 211 bp, Homo sapiens
gacataagaaaggtaaaagagtaatataatgaacacccatgtttccacccccacctccccaagaaataacacattaaccataggcctggggtggtggttcatgccagtaatcccagcactttgggaggcagaggcgggcggatcacttgaggtcaggagtttgagaccagcccggccaacatggtgaaaccccatctctaactaaaaatac

SEQ ID NO: 143697 - DNA, 770 bp, Homo sapiens
gcacttgagatacttcagatcaaatgcaccatctcttttctttagatgtcaagaaattataacttgaccctagagtttcacatttcttaataaccaaggaggtaacaataagcatcaaataattttgtatgaatatcttataaaaactaaaattgttttgcaattgggcttacagtaatttatttttcttttaaaataacaatctaaagatcataatttgagattgtctttagaccatttgagattgtcattagataattggtaataattctgacagctattcttttttgcggactttggaccaagtatattattgaaaaaaaaaaagtacttagcatctactttgtaaaccttaggataagatattgagtaaaatatacaaatccataccctcatgggttgggatgcttttttgttttaatgggattagataataaaataaatacataacatatacgggacattggctggtgataagtgttctggaaaaaaaaggaggaaaataaggaatattgggggcaggggaaagttgcagttttcaataggggatcaggtgacatttggctgggcaccatggtgcacacttataatcccagcactttgggaggctgaggcgggcagatctcttgagctcaggagttcaagaccagcctgggcaacatggtgaaaccctacgcctacaaaaaatacaaaaaatttagctgggtgtggtggcgcacacctgtagtgccagctacttgggaggtaaggtgggaggattgcttgagccc

SEQ ID NO: 143698 - DNA, 263 bp, Homo sapiens
ccactgcactccatcctgggtgacagcaagactttgcctctaaagaagacaaacaaacaaaaaaatgataactctccagtcagacttataaaaagagaaaaaagatgtaaatcaccagtatcaggaatgaaggagtagacatcaatatagatcttacagattaagataatattttgaataactttatgccaagaaattatacaatttagatgaaatggagaaatattttgagaaacgcaaactgctgaagatcacacaagaag

SEQ ID NO: 143699 - DNA, 289 bp, Homo sapiens
tgctggaattacaagcatgagtcacagcgcctggcctcagcccacttttatgtattagcacaatagattctaaactgattccctaattctatttagtcagcacctaatttttttccttaaaatcatttattttactatctccctttcccctttaaaaacctaaaaaacatttcttaatccccaaacctccttaatctattcccaatttgcctttatacaactttactactgaatcaaaccctttgttcaggtgaggccttttgccttactactgactcctcattccacc

SEQ ID NO: 143700 - DNA, 748 bp, Homo sapiens
agcctgtgtgacagagcgagactccgtctcaaaaacaaacaaacaaacaaaaagataaaggtctgttgctcaggctggagtgctgtggcacaatctcggctcactgcagccttgaactcctgggctcaaacaatcctcccacctcagtctccgaagtagctggcaccaccggtgtgctccaccacacccagctaagttttaaatatttttgtagagacaaggtctcactgtgttacccaggttgggcttgaattcctgacctcaagtgatcctcctgccttggcctctaaaagtgctgggattacaggtgtgagccactgcacctagcccagaatttctatttatttatatatatttttaaaaagaatctcactctgttttccaggctggagtgctgtggcaagatcaaggctctctgtagccttgaactcctgggctgaaacagtcctcccacctcagtctccagagaggctgggaccacaggtgtgtgctgccacacccagctaatttttaaaattgttttgtagagacacgatctcactatgttgtccaggctggtcttgaactcctgggctcaatcctcccaaagtgctgggattataggcgtgagccactgtgcctggccccacccagaatttttaaaacatgaaaaagcttatgttttgggccaatctctaaaatatattaagtgaaaaaaagcaacctgcaaatagtgtaaatgatatgccaacattcctgttaaatattt

SEQ ID NO: 143701 - DNA, 339 bp, Homo sapiens
ggcaggagggtgagataggctgtggggcatgacagtgagtgagggcactgggagcaggatacaaggaagatgtaggaaaaagaagtaagagtttgcccaatgcccccctcatgccagtgtgcctggcctatgcctccaacctggagagtggggtggggcaggaatcagggaggcttcctggaaggggaggtgctggaactgggccttgggagtggagtgaatttccacaagtggggagaggtggagaaacagcctggacaagaccctgcaggtaggagggggagcttgaggctgccagttagggagctggggctgatgattcgaaagtgagcctgaatg

SEQ ID NO: 143702 - DNA, 807 bp, Homo sapiens
caaagtgcttagtttgataataatttaatgtggatctaaccccttttctctcatttggaaaatttccaaacaggtcacattttaaaggcaacaaatttgagcagaaagaatgagttatgtatgttgggggaggagaaaagtagaaatacttttaattgtgtaatctagaggagcactgccatagaaaattattatgaactaatagctgagtttttaaatgggacatttaataggaataagaatagcattttcagttaaaataagtaagatcaaatcttagactgtctgggtgagttgaacagacagtctaagtttaaccagatagttaagtttaatccagtaagcaacatttctatggtagttaggtattgcagttctcaataaaacattttggggattcagttttttctcacaaacagatactgagccattctttaaaatgtcttgacaagatagacttatctttctatagttgggatttatgtggaaaagtagaatatctacatcttttactcactttacagtctgagcaactaagattattattattattattattattatttttaggcggagactcattttgtcacccaggctggagtacagtggcgcgatctcggctcactgcagcctctgcctcccgtgttcaagtgattatcctgcctcagcctccctagtagctgggactacaggcgtgcatcaccatgaccggctaatcttcgtgtgtttaacagagagagggttttgctatgttggccaggctggtcttgaactcctgtgatctgctcacctcagcctcccaaagtg

SEQ ID NO: 143703 - DNA, 364 bp, Homo sapiens
ataaagcccagagttctcacacaaaataaatctcctggaaaaaaattaaaacaaaagcaaatagtagctttgagaaattatattgttttgaaaaacaggccaggtgaaaaaaatggcaggctgtttaagtgtaggccagaatacttagcaagaaagtgtgagcaaacaacacagacgtgagatgtaaaatgattaaattttgacttctttctcaggatcatacaaaaatgtctggcatgcatagtggccagaagttcgatgctgttcttaaattgactgaatgctttgatgcacaagtctactactaattttggttataatctttctagatatatgtggaagttgagagaaaagctgtgaataa

SEQ ID NO: 143704 - DNA, 485 bp, Homo sapiens
caacatctgagctgaggtgtaaagatcaagaaggagcccacatcgtgattgggtcacctttgaggaggtgacatctgagctgaagtgtgagggttaagaaggggtccgcattgtggaaatccatggcaatagagtttttaagacagagggaacagccaagtataaagattctcaggtgggaatgaattgtgcatggtcaaggaacagaaagaaggccagtcactagagattatcaactaggagaagagaaacatgaaatgagatcagaaaggaaggcaaaggccagatcatatatacaaatgggtttataatgtacctcaatagttttcctgaatagttataaatcaacccctttccttcaacttaacattccatgtttcacacattacagtaatcatttttaatttactgagacagctatttaaatcatgctatgaggcagatgtgtctagatgaataagtcatctagtatgtgaacatattag

SEQ ID NO: 143705 - DNA, 237 bp, Homo sapiens
cctcctgagtagctgggattacaggcatgtgccatcacgcccggctaattttttgtatttttagtagagacggggtttcatcatgttggtcaggctggtctcaaactcccaacctcgtgatctgcctgcctcggcctctcaacatgctgggattacaggtgtgagccaccacgcccagccctgataaatgacatcttgactgcaatgtgcaccttcctgaagatgctagataccaag

SEQ ID NO: 143706 - DNA, 538 bp, Homo sapiens
ttactgaaagaaaacaaacgaccattctagaacaacagggaaaagcccattcatggctttgataaatacctgaggtaaatttttgatgtaacttaagattgaagaagaggagatttgagaggataaccacataaactgtccagtgatggaggaaatgattctgcaactgaggtgataaaacttcatcatgcaacttgaattgataaagttttatcaatttcccagtaggcagagatccaaaaaacaagaaacactacaatcaccgatgttacagatgacatatatgtagctaaggcaaagacaactcctctgtgtcaacttcacaatcaagacaaacagccttctcaatgaaattttaagcagaattaaagctaactttttgttttctctgaacaatttggttttggtttcctatttgtttttcagaatgaaactgttaatttttgtatataaaaaggaagacaaatcttagtaaaagtatatttttttaattttatgtaagaaaatctattttcagtgcaataaaattaattgtatg

SEQ ID NO: 143707 - DNA, 384 bp, Homo sapiens
gtgaaaatagcctgcctctgaagaccagcttcatttcttcccctctgggtgttaatgaaagagcctttaactttgccaggcctcagttactaatttctaaaacaactgctgctactattactacggatcttactgctactatgaccaccaccaccaccacatcagttactgagaactgaactagatgccaagaaaaatggtaaacacttcatatacatcatctttttaaacacaaaatgtactattaatccagctttacatataagaaaactgaggctcaaagaggctaagtaatttgtatgtgaacatgctttacactatgtaaaacatcttattagtagatatcactattattaagaacctatcagccggagaggaagaatt

SEQ ID NO: 143708 - DNA, 660 bp, Homo sapiens
gaggagggggcttactatgcaagcgcttggaggccaacgagcactgaaaatgaggagagagttcaaaaatcaagttagatcctgggatacgccaacaaatccagacactacagttctttcggagaaacctggggacgaaaagtaaggctttgacctcagaaaatgaacatacaggaaaaataatgtgtcctaatgtgtcctaatgaaatttctctagtattcacatgttataaaatgttaggaagaaagaagatgtgtcctcctacaagccataaatcagaattctaataatctaaagctaattagaaaaatattacatgttaaatattaaatattagaatagaaaaatgtatgagggaaaaaaattgagacacagctgaatttttcaggctgttccagcactaaaaaaaaaatacaggagaagaatgtcacatattttcctcttcctccccctccagattccataatatcaaattcataacttttcatttgcgcatgccttattttccattccttgtttgtcactaatcctgttagtaaaaggattcccccacctatgttcataattaagttttggtctaaaaagaactacaaacagaagcacagttccctagatttctaatttttttttattttatcacagccagttaacttattaca

SEQ ID NO: 143709 - DNA, 156 bp, Homo sapiens
caaaaacatattttaacaaagaagaaaaaagacttctttccatcaaagctcaatagagatttctgtctattgaagatcatggtgaaatatttcattttccactagaatagtttaaaattattcatttgctttattccatgttataaaaactcagaa

SEQ ID NO: 143710 - DNA, 427 bp, Homo sapiens
cagctagtgttctcaattctttcagcagagctcagctgatggacaaaaatagagaggagttctattgcttaaacactatttggacatgaagaggtctttctacgtgacacttggaatttaattgcaaaataaaaaaaaatgaagaaacactttattcacccaggacaatccagtgttatgactaaggcattttcactgtgcgctcgctaaccattcacagctcacacaggaacaaaaatcatgggtagatgtggcacactgggctcatctcaatagctaccaggatcacatacctagaggcataggaaacaactattttcattccctggaactctcaccattgggaaattaagcactgctcatatctggcttataccctcatgactgtatctgtgttcctctagtctctcctgtatggtatgtcttt

SEQ ID NO: 143711 - DNA, 3697 bp, Homo sapiens
gggcggggcggggcgctttgctctggactctggggcggctaggctcgcggactccgcggcggcagactccgacctcgcagtctccccaggtccgcccagcagccgcgcttcagccagaatactgggatcttcagtggcaggaggagtaatcagaagacggagatgaattttaacactattttggaggagattcttattaagaggtcacagcagaaaaagaagacatcgcccttaaactacaaagagagactttttgtacttacaaagtccatgctaacctactatgagggtcgagcagagaagaaatacagaaaggggtttattgatgtttcaaaaatcaagtgtgtggaaatagtgaagaatgatgatggtgtcattccctgtcaaaataagtatccatttcaggttgttcatgatgctaacacactttacatttttgcacctagtccacaaagcagggacctgtgggtgaagaagttaaaagaagaaataaagaacaacaataatattatgattaaatatcatcctaaattctggacagatggaagttatcagtgttgtagacaaactgaaaaattagcacccggatgtgaaaaatacaatctttttgagagcagtataagaaaagcactacctccagcaccagaaacaaagaagcgaaggcctcccccaccaattccactagaagaagaagataatagtgaagaaatcgttgtagccatgtatgatttccaagcagcagaaggacatgatctcagattagagagaggccaagagtatctcattttagaaaagaatgatgtgcattggtggagagcaagagataaatatgggaatgaaggatatatcccaagtaattacgtaacgggaaagaaatcaaacaacttagatcaatatgaatggtattgcagaaatatgaatagaagcaaggcagagcaactcctccgcagtgaagataaagaaggtggttttatggtaagggattccagtcaaccaggcttgtacacagtctccctttataccaagtttggaggagaaggttcatcgggttttaggcattatcatataaaggaaacaacaacatctccaaagaagtattacctagctgaaaaacatgcttttggctccattcctgagattattgaatatcataagcacaatgcagcaggacttgtcaccaggcttcggtacccagttagtgtgaaagggaagaatgcacccaccactgcaggattcagctatgagaaatgggagattaacccttcagaactgacctttatgagggaattgggaagtggactgtttggagtggtgaggcttggcaaatggcgagcccagtacaaagtcgcaatcaaagctattcgggaaggtgcaatgtgcgaggaggactttatagaagaagctaaagtgatgatgaagctgacacacccgaagttagtgcagctttatggtgtgtgcacccagcagaaaccaatatacattgttactgagttcatggaaaggggctgccttctgaatttcctccgacagagacaaggtcatttcagtagagacgtactgctgagcatgtgtcaggatgtgtgtgaagggatggagtatctggagagaaacagcttcatccacagagatctggctgccagaaattgtctagtaagtgaggcgggagttgtaaaagtatctgattttggaatggccaggtattttctggatgatcagtacacaagttcttctggtgctaagtttcctgtgaagtggtgtccacctgaagtgtttaattacagccgcttcagcagcaaatcagatgtctggtcatttggtgttttaatgtgggaagtattcacggaaggcagaatgccttttgaaaaatacaccaattatgaagtggtaaccatggttactcgaggccaccgactctaccagccgaagttggcgtccaactatgtgtatgaggtgatgctgagatgttggcaggagaaaccagagggaaggccttctttcgaagatctgctgcgcacaatagatgaactagttgaatgtgaagaaacttttggaagataagtgatgtgtgaccagtggctcccagattcccaagcacaaggaaggatgggcattttgtggcttttaatttattgagcacttggacatgtagatcattttacttatacagtggaaacacataaataatttgcttctagaccagcctctgtctagacttgcttctagacagaatctcccagagtgtggaaatgttgccttagaaatggtgattaaaatcactcatttctattcattcctcaggcacttgagtgacagttgtttaccaggcactgtgtgtagccccagggtttggccattcaggggtgcacacatgggaccatgttagctgatgccagttgaaggccagggtatttgggaaggggaagggtattagagtcatgaccaagcaacccttctttttccctttgacttctacagaaatctgggcctgagacattgtctacaattgggttctagatacatcaggaacccatcttggataaataaatacctatcttttgttttgaaaacatctcagttttcaagactgctcttagtattacatgaacaatatttgtatgctgtatatattgtaaatatatataatatataaagttatatatttatgagaaacacgaattgtcttttaattgaaacttttaatcctgtagtataggagttcaccttcttaggactagagactgtgccttatagctgttaattcatttccccctgaacatcaaatatgcctgaagagaagaaagtctagattcttctatgagtaacgccccctcctcactcaggtaaatgtgtctggggatgcctgtccagcttaaccacgtgcatttggcctatgtaatcctgcccatggtggccgcagctaatcagaatcagatggaaaattaaaccgggtaatctacttctaagccttaagaatattccctgggacacagacactataattggaagtgctgagctctggggcagaaggatcaggtgaccttcgcaacaaagtttgcccccacctcacataggacccggaagcagcctgagctgtggcggaggatccaggaagctacggagagaagcagccagcatggtgttccgtgcctcccggacgtttttcaggaggcctggttggacttgggttcctggatggtgggattgttgtacagcctctcaggagaccctgctgtcaagactgtgtgtgtggatttcccacccttagaagctctactaagacatcaacggaattagggccttcctttttgccttgtgagcgccaaggaaaagaaactatctcggtcacgtgagcgccagcgaaaagaaactgtatcagtcatccagagaccgtttattgcccaacacgttattcttgctgttggtggggtaactagccgaggaagacacagcgccttcccttcaggagttgcgtctcctctgcaggccacgatggtctgctctggagcattgggtgaacacacaggctggctgctctgggcagcgccttcactctgaccctggagaaccatttcatttcatcctggtcagtctagagtctgtgcaccaggcagtccatccactgaaggctgtgtttattcttttcctgtgcccctcataatggaagaaagtaaactgcttatcccgagccttaaaaaaa

SEQ ID NO: 143712 - DNA, 3643 bp, Homo sapiens
gggcggggcggggcgctttgctctggactctggggcggctaggctcgcggactccgcggcggcagactccgacctcgcagtctccccaggtccgcccagcagccgcgcttcagccagaatactgggatcttcagtggcaggaggagtaatcagaagacggagatgaattttaacactattttggaggagattcttattaagaggtcacagcagaaaaagaagacatcgcccttaaactacaaagagagactttttgtacttacaaagtccatgctaacctactatgagggtcgagcagagaagaaatacagaaaggggtttattgatgtttcaaaaatcaagtgtgtggaaatagtgaagaatgatgatggtgtcattccctgtcaaaataagtatccatttcaggttgttcatgatgctaacacactttacatttttgcacctagtccacaaagcagggacctgtgggtgaagaagttaaaagaagaaataaagaacaacaataatattatgattaaatatcatcctaaattctggacagatggaagttatcagtgttgtagacaaactgaaaaattagcacccggatgtgaaaaatacaatctttttgagagcagtataagaaaagcactacctccagcaccagaaacaaagaagcgaaggcctcccccaccaattccactagaagaagaagataatagtgaagaaatcgttgtagccatgtatgatttccaagcagcagaaggacatgatctcagattagagagaggccaagagtatctcattttagaaaagaatgatgtgcattggtggagagcaagagataaatatgggaatgaaggatatatcccaagtaattacgtaacgggaaagaaatcaaacaacttagatcaatatgaatggtattgcagaaatatgaatagaagcaaggcagagcaactcctccgcagtgaagataaagaaggtggttttatggtaagggattccagtcaaccaggcttgtacacagtctccctttataccaagtttggaggagaaggttcatcgggttttaggcattatcatataaaggaaacaacaacatctccaaagaagtattacctagctgaaaaacatgcttttggctccattcctgagattattgaatatcataagcacaatgcagcaggacttgtcaccaggcttcggtacccagttagtgtgaaagggaagaatgcacccaccactgcaggattcagctatgagaaatgggagattaacccttcagaactgacctttatgagggaattgggaagtggactgtttggagtggtgaggcttggcaaatggcgagcccagtacaaagtcgcaatcaaagctattcgggaaggtgcaatgtgcgaggaggactttatagaagaagctaaagtgatgatgaagctgacacacccgaagttagtgcagctttatggtgtgtgcacccagcagaaaccaatatacattgttactgagttcatggaaaggggctgccttctgaatttcctccgacagagacaaggtcatttcagtagagacgtactgctgagcatgtgtcaggatgtgtgtgaagggatggagtatctggagagaaacagcttcatccacagagatctggctgccagaaattgtctagtaagtgaggcgggagttgtaaaagtatctgattttggaatggccaggtattttctggatgatcagtacacaagttcttctggtgctaagtttcctgtgaagtggtgtccacctgaagtgtttaattacagccgcttcagcagcaaatcagatgtctggtcatttggtgttttaatgtgggaagtattcacggaaggcagaatgccttttgaaaaatacaccaattatgaagtggtaaccatggttactcgaggccaccgactctaccagccgaagttggcgtccaactatgtgtatgaggtgatgctgagatgttggcaggagaaaccagagggaaggccttctttcgaagatctgctgcgcacaatagatgaactagttgaatgtgaagaaacttttggaagataagtgatgtgtgaccagtggctcccagattcccaagcacaaggaaggatgggcattttgtggcttttaatttattgagcacttggacatgtagatcattttacttatacagtggaaacacataaataatttgcttctagaccagcctctgtctagacttgcttctagacagaatctcccagagtgtggaaatgttgccttagaaatggtgattaaaatcactcatttctattcattcctcaggcacttgagtgacagttgtttaccaggcactgtgtgtagccccagggtttggccattcaggggtgcacacatgggaccatgttagctgatgccagttgaaggccagggtatttgggaaggggaagggtattagagtcatgaccaagcaacccttctttttccctttgacttctacagaaatctgggcctgagacattgtctacaattgggttctagatacatcaggaacccatcttggataaataaatacctatcttttgttttgaaaacatctcagttttcaagactgctcttagtattacatgaacaatatttgtatgctgtatatattgtaaatatatataatatataaagttatatatttatgagaaacacgaattgtcttttaattgaaacttttaatcctgtagtataggagttcaccttcttaggactagagactgtgccttatagctgttaattcatttccccctgaacatcaaatatgcctgaagagaagaaagtctagattcttctatgagtaacgccccctcctcactcaggtaaatgtgtctggggatgcctgtccagcttaaccacgtgcatttggcctatgtaatcctgcccatggtggccgcagctaatcagaatcagatggaaaattaaaccgggtaatctacttctaagccttaagaatattccctgggacacagacactataattggaagtgctgagctctgggccggaagcagcctgagctgtggcggaggatccaggaagctacggagagaagcagccagcatggtgttccgtgcctcccggacgtttttcaggaggcctggttggacttgggttcctggatggtgggattgttgtacagcctctcaggagaccctgctgtcaagactgtgtgtgtggatttcccacccttagaagctctactaagacatcaacggaattagggccttcctttttgccttgtgagcgccaaggaaaagaaactatctcggtcacgtgagcgccagcgaaaagaaactgtatcagtcatccagagaccgtttattgcccaacacgttattcttgctgttggtggggtaactagccgaggaagacacagcgccttcccttcaggagttgcgtctcctctgcaggccacgatggtctgctctggagcattgggtgaacacacaggctggctgctctgggcagcgccttcactctgaccctggagaaccatttcatttcatcctggtcagtctagagtctgtgcaccaggcagtccatccactgaaggctgtgtttattcttttcctgtgcccctcataatggaagaaagtaaactgcttatcccgagccttaaaaaaa

SEQ ID NO: 143713 - DNA, 2329 bp, Homo sapiens
aagaaaagaaaaaaaaaagacaattggtaaagattatgtaataatgccttattgcaaatacaactttctgacctgcctattcatttttttcaaatacacaatggaaatacttccataggggtaaaaacaacttattaaagggtgtttccactctctgcaaatgttgactaggttacactaaatttaatataaatagaacttacattttcctacttaaatgatagaatttttaaactaatataccatcataatgttgttttccaggctgccagaaattgtctagtaagtgaggcgggagttgtaaaagtatctgattttggaatggccaggtattttctggatgatcagtacacaagttcttctggtgctaagtttcctgtgaagtggtgtccacctgaagtgtttaattacagccgcttcagcagcaaatcagatgtctggtcatttggtgttttaatgtgggaagtattcacggaaggcagaatgccttttgaaaaatacaccaattatgaagtggtaaccatggttactcgaggccaccgactctaccagccgaagttggcgtccaactatgtgtatgaggtgatgctgagatgttggcaggagaaaccagagggaaggccttctttcgaagatctgctgcgcacaatagatgaactagttgaatgtgaagaaacttttggaagataagtgatgtgtgaccagtggctcccagattcccaagcacaaggaaggatgggcattttgtggcttttaatttattgagcacttggacatgtagatcattttacttatacagtggaaacacataaataatttgcttctagaccagcctctgtctagacttgcttctagacagaatctcccagagtgtggaaatgttgccttagaaatggtgattaaaatcactcatttctattcattcctcaggcacttgagtgacagttgtttaccaggcactgtgtgtagccccagggtttggccattcaggggtgcacacatgggaccatgttagctgatgccagttgaaggccagggtatttgggaaggggaagggtattagagtcatgaccaagcaacccttctttttccctttgacttctacagaaatctgggcctgagacattgtctacaattgggttctagatacatcaggaacccatcttggataaataaatacctatcttttgttttgaaaacatctcagttttcaagactgctcttagtattacatgaacaatatttgtatgctgtatatattgtaaatatatataatatataaagttatatatttatgagaaacacgaattgtcttttaattgaaacttttaatcctgtagtataggagttcaccttcttaggactagagactgtgccttatagctgttaattcatttccccctgaacatcaaatatgcctgaagagaagaaagtctagattcttctatgagtaacgccccctcctcactcaggtaaatgtgtctggggatgcctgtccagcttaaccacgtgcatttggcctatgtaatcctgcccatggtggccgcagctaatcagaatcagatggaaaattaaaccgggtaatctacttctaagccttaagaatattccctgggacacagacactataattggaagtgctgagctctggggcagaaggatcaggtgaccttcgcaacaaagtttgcccccacctcacataggacccggaagcagcctgagctgtggcggaggatccaggaagctacggagagaagcagccagcatggtgttccgtgcctcccggacgtttttcaggaggcctggttggacttgggttcctggatggtgggattgttgtacagcctctcaggagaccctgctgtcaagactgtgtgtgtggatttcccacccttagaagctctactaagacatcaacggaattagggccttcctttttgccttgtgagcgccaaggaaaagaaactatctcggtcacgtgagcgccagcgaaaagaaactgtatcagtcatccagagaccgtttattgcccaacacgttattcttgctgttggtggggtaactagccgaggaagacacagcgccttcccttcaggagttgcgtctcctctgcaggccacgatggtctgctctggagcattgggtgaacacacaggctggctgctctgggcagcgccttcactctgaccctggagaaccatttcatttcatcctggtcagtctagagtctgtgcaccaggcagtccatccactgaaggctgtgtttattcttttcctgtgcccctcataatggaagaaagtaaactgcttatcccgagccttaaaaaaa

SEQ ID NO: 143714 - DNA, 1607 bp, Homo sapiens
ggacatgtagatcattttatttatgtgtttccactgtataagtaaaatgatctacatgtccaagtgctcaataaattaaaagccacataaataatttgcttctagaccagcctctgtctagacttgcttctagacagaatctcccagagtgtggaaatgttgccttagaaatggtgattaaaatcactcatttctattcattcctcaggcacttgagtgacagttgtttaccaggcactgtgtgtagccccagggtttggccattcaggggtgcacacatgggaccatgttagctgatgccagttgaaggccagggtatttgggaaggggaagggtattagagtcatgaccaagcaacccttctttttccctttgacttctacagaaatctgggcctgagacattgtctacaattgggttctagatacatcaggaacccatcttggataaataaatacctatcttttgttttgaaaacatctcagttttcaagactgctcttagtattacatgaacaatatttgtatgctgtatatattgtaaatatatataatatataaagttatatatttatgagaaacacgaattgtcttttaattgaaacttttaatcctgtagtataggagttcaccttcttaggactagagactgtgccttatagctgttaattcatttccccctgaacatcaaatatgcctgaagagaagaaagtctagattcttctatgagtaacgccccctcctcactcaggtaaatgtgtctggggatgcctgtccagcttaaccacgtgcatttggcctatgtaatcctgcccatggtggccgcagctaatcagaatcagatggaaaattaaaccgggtaatctacttctaagccttaagaatattccctgggacacagacactataattggaagtgctgagctctggggcagaaggatcaggtgaccttcgcaacaaagtttgcccccacctcacataggacccggaagcagcctgagctgtggcggaggatccaggaagctacggagagaagcagccagcatggtgttccgtgcctcccggacgtttttcaggaggcctggttggacttgggttcctggatggtgggattgttgtacagcctctcaggagaccctgctgtcaagactgtgtgtgtggatttcccacccttagaagctctactaagacatcaacggaattagggccttcctttttgccttgtgagcgccaaggaaaagaaactatctcggtcacgtgagcgccagcgaaaagaaactgtatcagtcatccagagaccgtttattgcccaacacgttattcttgctgttggtggggtaactagccgaggaagacacagcgccttcccttcaggagttgcgtctcctctgcaggccacgatggtctgctctggagcattgggtgaacacacaggctggctgctctgggcagcgccttcactctgaccctggagaaccatttcatttcatcctggtcagtctagagtctgtgcaccaggcagtccatccactgaaggctgtgtttattcttttcctgtgcccctcataatggaagaaagtaaactgcttatcccgagccttaaaaaaa

SEQ ID NO: 143715 - DNA, 478 bp, Homo sapiens
gcattatcatataaaggaaacaacaacatctccaaagaagtattacctagctgaaaaacatgcttttggctccattcctgagattattgaatatcataagcacaatgcagcaggtaagtgagctgtgaaaacctacttcaaatataaggtagtgattaaaatgatcagatactgtgattaattccttgagcagttttattttatagttagttcattgtagaatgtggttgattttaaattactgcatattaaaggaatgatatatacaaagaaaatttagaaataatatcaagttttataaaaagctctgtcttgaccttaggacatgagttattccagtggtatatagtaaatgttcacattacatttatacactgttggtggcagtgtaaattagttccgccattgtggaagacagtgtgatgattcctcaaagacctaaagacagaaacaccattcaagccagcaatcccattac

SEQ ID NO: 143716 - DNA, 2820 bp, Homo sapiens
agagtagcagtcttctgcacaggatgttgtccattcaccttggaactgccatccacaaacctagcaactcttggtaggataaagaaggtggttttatggtaagggattccagtcaaccaggcttgtacacagtctccctttataccaagtttggaggagaaggttcatcgggttttaggcattatcatataaaggaaacaacaacatctccaaagaagtattacctagctgaaaaacatgcttttggctccattcctgagattattgaatatcataagcacaatgcagcaggacttgtcaccaggcttcggtacccagttagtgtgaaagggaagaatgcacccaccactgcaggattcagctatgagaaatgggagattaacccttcagaactgacctttatgagggaattgggaagtggactgtttggagtggtgaggcttggcaaatggcgagcccagtacaaagtcgcaatcaaagctattcgggaaggtgcaatgtgcgaggaggactttatagaagaagctaaagtgatgatgaagctgacacacccgaagttagtgcagctttatggtgtgtgcacccagcagaaaccaatatacattgttactgagttcatggaaaggggctgccttctgaatttcctccgacagagacaaggtcatttcagtagagacgtactgctgagcatgtgtcaggatgtgtgtgaagggatggagtatctggagagaaacagcttcatccacagagatctggctgccagaaattgtctagtaagtgaggcgggagttgtaaaagtatctgattttggaatggccaggtattttctggatgatcagtacacaagttcttctggtgctaagtttcctgtgaagtggtgtccacctgaagtgtttaattacagccgcttcagcagcaaatcagatgtctggtcatttggtgttttaatgtgggaagtattcacggaaggcagaatgccttttgaaaaatacaccaattatgaagtggtaaccatggttactcgaggccaccgactctaccagccgaagttggcgtccaactatgtgtatgaggtgatgctgagatgttggcaggagaaaccagagggaaggccttctttcgaagatctgctgcgcacaatagatgaactagttgaatgtgaagaaacttttggaagataagtgatgtgtgaccagtggctcccagattcccaagcacaaggaaggatgggcattttgtggcttttaatttattgagcacttggacatgtagatcattttacttatacagtggaaacacataaataatttgcttctagaccagcctctgtctagacttgcttctagacagaatctcccagagtgtggaaatgttgccttagaaatggtgattaaaatcactcatttctattcattcctcaggcacttgagtgacagttgtttaccaggcactgtgtgtagccccagggtttggccattcaggggtgcacacatgggaccatgttagctgatgccagttgaaggccagggtatttgggaaggggaagggtattagagtcatgaccaagcaacccttctttttccctttgacttctacagaaatctgggcctgagacattgtctacaattgggttctagatacatcaggaacccatcttggataaataaatacctatcttttgttttgaaaacatctcagttttcaagactgctcttagtattacatgaacaatatttgtatgctgtatatattgtaaatatatataatatataaagttatatatttatgagaaacacgaattgtcttttaattgaaacttttaatcctgtagtataggagttcaccttcttaggactagagactgtgccttatagctgttaattcatttccccctgaacatcaaatatgcctgaagagaagaaagtctagattcttctatgagtaacgccccctcctcactcaggtaaatgtgtctggggatgcctgtccagcttaaccacgtgcatttggcctatgtaatcctgcccatggtggccgcagctaatcagaatcagatggaaaattaaaccgggtaatctacttctaagccttaagaatattccctgggacacagacactataattggaagtgctgagctctggggcagaaggatcaggtgaccttcgcaacaaagtttgcccccacctcacataggacccggaagcagcctgagctgtggcggaggatccaggaagctacggagagaagcagccagcatggtgttccgtgcctcccggacgtttttcaggaggcctggttggacttgggttcctggatggtgggattgttgtacagcctctcaggagaccctgctgtcaagactgtgtgtgtggatttcccacccttagaagctctactaagacatcaacggaattagggccttcctttttgccttgtgagcgccaaggaaaagaaactatctcggtcacgtgagcgccagcgaaaagaaactgtatcagtcatccagagaccgtttattgcccaacacgttattcttgctgttggtggggtaactagccgaggaagacacagcgccttcccttcaggagttgcgtctcctctgcaggccacgatggtctgctctggagcattgggtgaacacacaggctggctgctctgggcagcgccttcactctgaccctggagaaccatttcatttcatcctggtcagtctagagtctgtgcaccaggcagtccatccactgaaggctgtgtttattcttttcctgtgcccctcataatggaagaaagtaaactgcttatcccgagccttaaaaaaa

SEQ ID NO: 143717 - DNA, 1514 bp, Homo sapiens
gggcggggcggggcgctttgctctggactctggggcggctaggctcgcggactccgcggcggcagactccgacctcgcagtctccccaggtccgcccagcagccgcgcttcagccagaatactgggatcttcagtggcaggaggagtaatcagaagacggagatgaattttaacactattttggaggagattcttattaagaggtcacagcagaaaaagaagacatcgcccttaaactacaaagagagactttttgtacttacaaagtccatgctaacctactatgagggtcgagcagagaagaaatacagaaaggggtttattgatgtttcaaaaatcaagtgtgtggaaatagtgaagaatgatgatggtgtcattccctgtcaaaataagtatccatttcaggttgttcatgatgctaacacactttacatttttgcacctagtccacaaagcagggacctgtgggtgaagaagttaaaagaaggtataagaaaagcactacctccagcaccagaaacaaagaagcgaaggcctcccccaccaattccactagaagaagaagataatagtgaagaaatcgttgtagccatgtatgatttccaagcagcagaaggacatgatctcagattagagagaggccaagagtatctcattttagaaaagaatgatgtattaatagccaatttttgttcttaacaatctttcaccattatttttaaagttggtaaatttaacttgccctgtaattttaaacgaaagatctttattcaatctaatgatttacttagttaatatctccaagcaagtttccatgttttaatttttcgatctccataagaatcccatgagatagctactcacagtggattctcttaccatcattcttgtacagatgagaaaattagcttcagggaagtcaaaaggctcgcctactgtgataaatagggaaattggggttggccttgactttctaactagagcccaagttcttttccacctcacacactataaaaagaaactataagagaaatcctttggatttttaaaaaatctctcaaatcactgggaaaacatggaggttcatgttaacttctcaaaatgctagaaaaagaaatccgttaccagttctaaattatgatggagacaatttttcccttctcacctgttctcactctctcctccattcttcttttccttctgtttttcttctctacctgttctttacagatgctttcagctatcagtagcactctgtcccctgaaaataatcagctgaaaatgtctgttttcagcatatcggtagcactgtctgtcccctgaaaataattcttttaccaagaagagtgtaattttcatttgggactttctcccatattttagttttagctttctagtgataaagcatggacacatttcttttagaaagcagaaaaactttaaaaaaatttttttttcctttgagacaggtctcactttgtcttccaggctggagtgcagtggcgcaatcttgg

SEQ ID NO: 143718 - DNA, 290 bp, Homo sapiens
gctgtgttcgtgtgtgatagtgagtgatggtgtgtgcctgggactatggccacaggtatctgtaggacattgtgagtctttcttgactacacagcattgcgtactgtgtgtgcttcctcttatgtgattgtgtggctcgcatgcagctgcccccacaagctggcttccagtgaggcccctcctgccactgagtcagtggcaggcaatcctgggtgaggagccaggatcccaggacccaggagctcaggactgagctcttgtccctccctaccctgaagccccaggcaggc

SEQ ID NO: 143719 - DNA, 157 bp, Homo sapiens
tgctgggattacaggcgtgagccactgcgcccagcctgtggtgtttgttttttttaatgcctgattcaacttttgatctcattcttaggtctatttaaccttgtgcactactcttaaggcatttaatatgctgttatttagacattttccattgggt

SEQ ID NO: 143720 - DNA, 366 bp, Homo sapiens
agagtaaatgagaaatataaaagattatttgaggctccaaaacacatcttaaagggatttgagaatttaagagtaaatggaaagacaggtaagcagttttctaaaagggcaaggtttttccagaattataacaaattttcagattaaatgtgcatcaggtcaggtatgttaaataaacgcacatttagaaccattacaatgaaactgaaaaggatgagagataaagcaaaaagacttaaaagctaccagacggaaagatggatcagtagcagagcactaacaatagagtgagaacagatttcaacaaacgattctgaaagacagtcaagtaaaacgaccaccaatttaatactttttattcactaa

SEQ ID NO: 143721 - DNA, 510 bp, Homo sapiens
caaaaatcaaaaccataacaaccacactgttggaccacagctcaagcacaaccagcttctgagtgacttttggttaaagaataaaattaaggcagaaatttaaaaaaattatttgaaactaataacagacacaacataccagaatcttcaggacacaactaaagaaggatgaagaggaaagtttatagtgctgtacacctacctcaagaagttagaaagatctcaaattaagactctaattattgcacctagaggaaccagaaaaacaagagaaaacaaatcccaaagccagcagaaaaaaagaaattacaaaaattagagcagaactgaacaaaactgaggcatgaaaatccatacaaaagatcagcaaaaccaaaagttgattcttcagaagattaaacaagtttgatagcctggtgcctagatttataaagaaaaaaataaagaagacccaaatacacccaatcagaaatgacaaaggtggcatcataactgaccccagagaaatac

SEQ ID NO: 143722 - DNA, 386 bp, Homo sapiens
cattgaatatttttattatggtcatttctcaatatttaaacatttccattatgcatttctttatagcccatgagtgtttattaagaagtgtttaaagtttttcaaacaaatggttgttttggggttagcttaattctactctgttcagaaggcatgttctatatgatatagattcttttatttttgttgagatttgatttgtgtgtaaaacatggttgtttcatagaaggtccaagtgtgcttgagaataatgtgtattctttttttcttgggtgtattgtattagatcaaattgactaattttattgatcaacttttctgtttttttatttgcttacttatcggttatcaaggaaggtatattgaactctcctagtatgcttgta

SEQ ID NO: 143723 - DNA, 154 bp, Homo sapiens
agcctgtaaaagcacacccaagggtggaactcaagttatctaaatccaaggtcagaatgtattctcccatgtagctctctacttcctttaatgtggtacgttagcacagtgatcctaatgtcagtgcctgtggaggtcacctataatagtataa

SEQ ID NO: 143724 - DNA, 423 bp, Homo sapiens
ctgcactccagcctgggtgacagagcgagaccctgtctcttaataataatgtttatacaaacataagtacataccatgcattttctttaaaaaaactgggtttatacacattctcttctgcttaatagtaattatatgctacaaaactgtactatttttcagcatggaaaaaatatactccagattgaactggagaagaaaggtttactctacctgatggtttttgttgatcgtttacttctgcaatcaggcagtagaaaaggggattgtccccaaagccatctctgagtaaatctgaaatatcaattcatatataggatgtcagaaagtttatagcagagagaaggagatggtggataggaagcactaggaatttctctctccacctggatagcaattgtattggcggaaactgaagtgaat

SEQ ID NO: 143725 - DNA, 252 bp, Homo sapiens
gctcggttcccgactacagtcggccggcgggaatacaagcctgagactagcaggggtttaacaacgacaacacgtggtaaatctctgctgtttcaaatgtctccttctccagcaagctagcccaggcatgctctcatggtgacctcaaaagagcaagaaagcaaacagaaatgtgcaaggcatcttgaggccctggctcagaactgacgtgacagcccttctaccactttctgttgtccaaagaagattcca

SEQ ID NO: 143726 - DNA, 291 bp, Homo sapiens
tggtcctgtagtcccagctactctgaaggctgaggcaggagaattgcttgagcccaggagttccaagctggagggggctatgatagcgcttatgttgggtctgtgccactgcatgcctgggcaacatagcgagaccctgtctctaaaataaaaaaatgttcaaatgcctagtccagggtgacagagctgggattgaaagccaggtctgcctatctccagatagttcagtggctcctcaaattagatttgcctggagaatttggataaaaccggattctaaagtcccaccct

SEQ ID NO: 143727 - DNA, 133 bp, Homo sapiens
gacataaagtgccagagagtgacagaaggtcttgcagcagtgattggcccaagggttggatctggccaccagctttttttttaaatagagatgggatctcactatgttgcccaggctggtcttgaactcctga

SEQ ID NO: 143728 - DNA, 420 bp, Homo sapiens
ctcggctcaggcagtcattaattcctcattttagttattttatgtcttctatctggtttgtttgtttttctagtcttggccccgtctctcctacccaataatccttcctctatactgctgctgaagtaattcttctccaaccttgcttaactaattcagcaatttcccattaccttcaggatacagttcaaactccttaacacagtttacaaaactcttcatcatcttacatctacatttcccatttctcctgctgcatacctgcataccacaatgtttgcttctatggtatgcttacctgcaaaatatacttacctccacagttcatagacaaggaaatatatacaaaggtatatgttcctttttctggagcatactcatgtctttccttagcttggtcaattccaatagattcttcag

SEQ ID NO: 143729 - DNA, 304 bp, Homo sapiens
ggcatgatgtagacacaagaagagtgtctcagcaaggctgaccctccttcttcgtgtctgcatgttccttttcccatagtcttctgaacacaaatctcttaccaaaccattttcactggcccctctggaaatcaagtttcattgtgaacaaatatccctatgtccatagtgtcttaacagagtgtatctttgcccgcacatttttagtttagttgaaatctgacccttctccagggacattcctttccttttagccctgtaggctgctcactcacaaatgtttcttatgtcacagggtcacgat

SEQ ID NO: 143730 - DNA, 244 bp, Homo sapiens
  misc_feature (214)..(214): n is a, c, g, or t
gaggagagaagaggcgtgggtctgtagagggattgtggccagaggagaggaaaggtgcggggctggaaagggagcatggccaggggagaggagaggcaaggggctggcggggaagcatggccaggggaggggagaggagaggcacggggctggtggggaagcgtggccaggggagaggagaggcgcggggctggagagggagcatggccagtgnttccccgccagccccatgccgccgggtacc

SEQ ID NO: 143731 - DNA, 263 bp, Homo sapiens
gaggagagaagaggcgtgggtctgtagagggattgtggccagaggagaggaaaggtgcggggctggaaagggagcatggccaggggagaggagaggcaaggggctggcggggaagcatggccaggggaggggagaggagaggcacggggctggtggggaagcgtggccaggggagaggagaggcgcggggctggagagggagcatggccaggggacaggagaggtgtggggctggcagggaagcgtagccaggggagaagaga

SEQ ID NO: 143732 - DNA, 228 bp, Homo sapiens
ggaggggaggggatgaggtctcctcccgcagatcagagtatctagttgtctggcatttaaccttctctttactcccccctcccctaaatttccctttaaaacactcctctaaaacatctggacttcacacattcctggtcccctaggtgtctgtctggcccctggcctgatcctgtagtccctaaagtcctcttctaaaacaggacctagctctctcatcccttcccc

SEQ ID NO: 143733 - DNA, 415 bp, Homo sapiens
ggcaacaatgaactcacaggacctctgtctatctatcaggattattttaaaaacttgacattaaagggatatttctgttttcttgagtttagttaatattgtgggatgattgggatcatgccgtttccatcacgattcagttttgacattaggtgccctaattagtctatgtgtctgatttttttctatccctagctaaaaagtatagttcacaagagctggaatcacaatccctgcagctttccacaggaggacaggaatgcctcacatataaagagcttccaaagtcctggcctctgagctttgagaaagaagactgactctccaagaagatcacttctagaaccagtgcagaataattacaactacagggactgtgctgatgtaggggaaaggggaggtagacagagaagag

SEQ ID NO: 143734 - DNA, 289 bp, Homo sapiens
aaattctagttgagctgcacaaaaacatgtgtgatagtagggagacaggctggaaaagtagcctggagccagattctaaataaaggctttgaatcacatttaacagcctgggcttcccattatagacaacagaaggccctcgagattcttaagcagaagagtaccatgatgagacttgtgatttaggaaaggatccattatggccgggcacagtggctcacacctgaattcccagcactttgaaaggctgaagcggacagatcacttgaggtcaggagtttgaaaccac

SEQ ID NO: 143735 - DNA, 428 bp, Homo sapiens
tgctagatgaaaaaagtctgtcatgattgggtaatgaatttgactctaagttcactgatacatacaggagataatggactgacacaatgaatatgaaattttggctaaattattgaaggcatatttgtctgaatagagagtagggtgggaatctcagaattatagggttaaaaatgtcttgttccaactcctcttgccattttagtaaagaatacacactgaaaatgcaggtatgactttttttttttatactagagaactgatagggacatggtcaaacacaattgttactgttggctaatttatgtagaatcaattctgtttccaatcagttttcatttctaaaaagactaaagtgaagagcaaacataacgacccttcccattttgcttggttagcaatagtaggctgtttggctttattttcca

SEQ ID NO: 143736 - DNA, 439 bp, Homo sapiens
aaaaacaaaggatgaacattggaaatgttctaaaaataccactgaattgtatactttaaaatgattcattttgctatataaattttacctcaataacaaaaaaagataaaatcaccagtatatgtctatattatttccaagagaatataatatttatgtgacaaagagataatatagcaaatctatgcaacaaaattctaaggttgttcaactcaaacattataacaataaaaagtcatatattcatgattaatacatgagatctgcttcaaaagaatatagaggagtccaggcgcggtggctcatgcctataatctcaacactctgggaggccaaggcaggcggatcacttgaggtttgggactagcctggccaacatggtgaaaccccatctctactaaaaatacaaaaattagccaggcgtgttggtgcacacctg

SEQ ID NO: 143737 - DNA, 477 bp, Homo sapiens
gtacccgggaagagggagtcacacgggggacggggacgcgcgggagtgcaagggcatgagcggggcgcgctgcgaccgccggctcccaggtacaggggattcttctgcctcagccgcccgagtagttgggataacaggcacccaccaccacacccagctaattggggtattgggggttagaggcgtttcgccatgttggccaggctggtctcgaactcctggcctcaagtgatccattgtgcttggtctgttacttttttaaagcttttatgattctaaggaaaatttctctctaattgttctgacgcgtttttcttttagttaagttggtatctttttgttaattgccatttgcttccttttctctgaattttcataccttttccagtttcttttatttttttttttggccttttttgcttagtgattgcttagagttaacattacaagcaagctatcatcacatattgaaaaaat

SEQ ID NO: 143738 - DNA, 269 bp, Homo sapiens
attttaagccaaaggtgatgtttatagagaaagttttggtctcaataaaacaaagatttttctaacaacaaggctgtcccaaaccacagtgggctactcaggtgagggtaggcatgagtggtcttgagctcccatccctgcagtggctccagcagaggctttatgcctgcctgttagggactgacagtgcagggagcacatggggaatcagtgttgatgtgctactatagcgccacctcactctgctcaggcaaccatttcacaagagc

SEQ ID NO: 143739 - DNA, 296 bp, Homo sapiens
tattttttaaagacttcaaaaatatggtttcataaaggcctctacataggccccagtgcactggtgtgcttgtgcacacacactcaactcagcagtgtggcacagccacgtgactgcgcagtgggtactgcctccaggctcagttgctcttctagagtccacaaaggcttagcctaagcttccaccctccacagagccagaagttcaccctctcctgaagttcaaattcaccacattgtaccccttgtggcagttctcacatcacactgaattgcagttactggtctacatgactg

SEQ ID NO: 143740 - DNA, 265 bp, Homo sapiens
tgagcattgcatttctcaaacttcagctgataaataaaactcatatatttgtcatgaataaaaatgtatatttgtattcaaatattaatgaatgtataagaaattataacactgggtaagtgaagacctgatttttggcaaagtttaaaggtaagaactctgggggagttctacgctagtctggtggagtaagtgcttaagatgaaccttcccacagataacagctaaaaagctacaaaatacctacatgcatacatacatacat

SEQ ID NO: 143741 - DNA, 608 bp, Homo sapiens
acaggggtgggctcaggaatcctagggctgtgtgcacaccgagaaaggctgtgtgcaccacagctgggccatgtgttggagacaccatgtacgcaatcccctgctttcagtacggacagagccctgcagcaggggagtggcagaactcgcacttacgcagagggccagaggcccgtggggttacaaggaagtggaggggtagagatctgggcttgcgcctccctctccgtgggtccctctccccttccaacaggacggacctcccaactaggcaagctgttcattcaaccaaactatgtctgttgaggggcagtgcctcagtgtccccatcggtaaaatggagagagtaacagtatctaactgggttgtacggatcactgataaaacctgcatagcatagcccctggcaagaggaaacacactaatcacacgagtggccgctgcacggtcactactgtgactaactgcctggtcctggcgactcggagatccctgcactcctaagccttccaatctgtgacatcccgggctcccggctggccggccagtccttagtctctctgcatcgtaaagcaccacccgccccagggtgcatgggtttacccagc

SEQ ID NO: 143742 - DNA, 285 bp, Homo sapiens
ggggaaagtagtcaagtaagtgaagtattacataaatatggaagaaaagttttgaagaagtcattttattgtggaagtttcaataatctacctcgggtcaagttttttatataaaaggccagatagtaaatatatacatatttaaacttaaacacttttaccactaaaagcttatgtcaaattatagttttgcctatttacatctgacattgtctgaagaacagagccaaatataaaaataggaagaaatacctatgatgtgaaagtcttggaacgtgtcttagt

SEQ ID NO: 143743 - DNA, 460 bp, Homo sapiens
gtacacatcctactcatattcacttaataatacctgaatgttttttgttttttgtttttgtctctaccatgtggtcacaaataacccaaggagactctgactgctttctaagaatcaacttgttggtgatgtcaggcaacccagggaccacacaaaaccaaatactatgccaatcagaacctaaaggctcagagtctcttttttccctcactggtttgagagtctgagaggaaactagaggaaacagtctgtgtgttctcaaattgaacccaggtgagtcttcagagcccagtgttcaaagaggatgtgtaaagctgacctctgggtcaacctctgctgtgcaatagctttggctgcttggcccctgagtgagaaagagaaaggtcaaggaaactaagtgatctaaggaattgacacgggttaagtaaggactaaagccatacattttcttattgaaact

SEQ ID NO: 143744 - DNA, 334 bp, Homo sapiens
tgcaaccattcatgtttaggtcctgggtccaaacaagtataggcacatgaatttgcctcatggtttgtaaaacctcaccatttagggtactccagttgtaactcagcctttggctacatttcttaaagttctgaagccacctccctacagttctaattttaagaaaatctgcactcatcgactctgaacttcacatcatctaggaaagaaaacaaacaaacaaaaaactccaccagcatatgctgccagcatgagttacagatgcctgctgtttcagcttctggataaagaggtaactgcagttcagtgacatagagctacaaaaaaaaaaaaa

SEQ ID NO: 143745 - DNA, 859 bp, Homo sapiens
ccctgttcctgaagtttcccagaaatagatggagaggtaaggccagctaggctggagcgccagcatcagtagtaggggcaggagctcacgctaaacccggttggtgtgtcctggagaagcacaggtgtcatctccagggacctttctcgaccaactaatttatggaaatgagacatttgtaattgattttaattccctcttagggactgtgaaattaaaatggattaaattttgtccatcaggagcctcagggatttaatgtccaattctaaaacctgaacaggcccttttgttttgcaatttgtggaccaatccctggcttcattttatttggctttgctttcacttccccattttctgttattttttttttttttgtgctgttatgtacatctcttaaagctggtcaaatcatattttgggatggaatggcctgataagttaataaattatattaaactgccaaaaaaggaatgtgttttcgattcttctggcttcttcctggttacaccaaaagcatgggggagaaaaggaagggaagtcatcgagacacaggttgtcagggagattggggccaaggtctcaagccccttgtgctgggcaggtgtcttcttttcattgttccctgtggtccttcagacatgggtggctcttcaggcatgtccacaaccccaggagccatggcctcagtggccggtgcaactggccggagccacagtggctccgggtgtcggggctgtccttttgtccctttgatcttacgcagggtgagggagccaatcacgagaggctcacccctgacgtcacccagtccccagggccagtgagggccctgcgttccatggggccccctggaggg

SEQ ID NO: 143746 - DNA, 104 bp, Homo sapiens
  misc_feature (71)..(71): n is a, c, g, or t
ggttgaaggcgatcttgagtggggccccagcaattcggttgagccttctccctccactcgcttccgccggnccgggcccctcccgcccagcccctcgggcctcc

SEQ ID NO: 143747 - DNA, 411 bp, Homo sapiens
acgactatagtagtaggcattggtctgaacacaagggatgcagtgatgaaaatgctgaatagaatcctgtattcatagacctcgtagtttagcgtagctcatttagcacaaaccaaatctcagttccctggatcctagtttaggaaatcctattctaaggatatctgtcttaaatcagtaaatatagtccaagatagtaactgggtatagtaattttctataatgtatgtaatacatgtttgttttttggcataaatacatttggctgtttaaagactggctacatattgatgagaggaataatgttatactttgaaaattttttaaatagtagtagtagggaaagatacagtacaaatgggtgctaagttacttttgttcttgaacattcctttctgtgttgatcaagaa

SEQ ID NO: 143748 - DNA, 307 bp, Homo sapiens
caggctagaatgtcaggggctggagggagatgagtctgggaagacgggctgagaacaccttgaagcgttttgaatgccaagtatctacttttccaggtagaatagcaggtccgcattacaatctttcgaattgtatgttgacgtgactcgttagagttgtggtttttattttggaataatgtcatgtttcagacaagttgcaagaagagtacaaagaattcctttgtactcttcacagcgattagcaaattgtaaacaccccactgcgttcacccctaaccgcatttcttgccaaacctccctccct

SEQ ID NO: 143749 - DNA, 525 bp, Homo sapiens
agaaaggaggccacgaccaggcatggtggctcacgcctgtaatcccagcaatttgggaggccgaggtgggcgaatcacttgaggtcaggagttcgagaccagcctgagcatcgtggtgaaactctgtctctactaaaaatacaaaaattagccaggtgtggtggcgggcacctgtaatcccagctactcaggacgctgaggcaggagaatcatttgaatccaggaggtggaggctgcagtgagcagagatcaagccactgcactctaacccgggcgacaaagtgagattctgtctcaaaaaacaaagacaggtgtactgtggagttgctgagagcaactggtggcggggacacaggccctgcccttgagtacttcttgaactctcagctcactgccctccttcctggttctgggaaaatggaagcgcctgtcccagtacctgctcttggtccatgcgctctgctcccctgcctttgccgaggtgactgtccatgctgccacctggaccctggccctgctccagcg

SEQ ID NO: 143750 - DNA, 416 bp, Homo sapiens
atgaggaacgtcactcagccttaaaaaggaagggaattccagccaggcacaggggctcacacctgtaatcccagctactcaggacgctgaggcaggagaatcatttgaatccaggaggtggaggctgcagtgagcagagatcaagccactgcactctaacccgggcgacaaagtgagattctgtctcaaaaaacaaagacaggtgtactgtggagttgctgagagcaactggtggcggggacacaggccctgcccttgagtacttcttgaactctcagctcactgccctccttcctggttctgggaaaatggaagcgcctgtcccagtacctgctcttggtccatgcgctctgctcccctgcctttgccgaggtgactgtccatgctgccacctggaccctggccctgctccagcg

SEQ ID NO: 143751 - DNA, 179 bp, Homo sapiens
ctttaagcccaagttaagggacattttgaaggtggaacttagggcatatgtaggccataaggtgcccatgagattacaagggtgatttaacttgatttttcaatcatgccttgtgtgtggagtaaatgatgtaataagaatctagaacctgctcagttttctttacattataaaaatgt

SEQ ID NO: 143752 - DNA, 223 bp, Homo sapiens
attttttgcgagctcgctactacccagcagtacattagactatcaatcacagttcccttcatacttagaatatatacagtacagttatggatgtaaatctataggccttcagaacagtgattaacgtgaatcagagctctgcaaaaaaattactcatgaattaaatcggcttttgcgttctatgaaaagactcaaaatgtaaaattctacatgaatcattcat

SEQ ID NO: 143753 - DNA, 148 bp, Homo sapiens
gggttcttactatgtgccaggcattgttttacatatattattctcaagtgttttgagagcagagagaaaagtaaaaatgattataattacctatactgctgggagaaggtgggggaaggaaagaaaaagcttgccctgaagagatgac

SEQ ID NO: 143754 - DNA, 517 bp, Homo sapiens
ctaaacccctgtacagtctaccccctacctgcctctcagagctgaggtgtactcttctccatccctatagtactaggctcatatcaccactcccttggtagccccatcactggacttcctacccttcacccctccactgacctaccaccatctctattctggtccctggaatgcagtccaggggatctttctaaaacacaagtctgattatgtcagtcctctacttaaaaattttccgtggctttccactgtccctaaaataaagtctaaacttcttaacatggttaacatgattctctccaagtttcatcttcaacacatccccttctgcacgccacactccagcaatacttcttgctgttcctccaatgtaggtgctgtcttctctctctggttgtttccagtgcttgaaacagatcttctgacttttcttctggctaagtccttccacatctttagatctcaacttatgtcacctcccctggaaagacattcctcaacccccagtaagggttaa

SEQ ID NO: 143755 - DNA, 972 bp, Homo sapiens
ttcagtctcacacagatatacagttggaatacaaggaagtattttaatagctttttcaggtaattttgggatatattttgattctacaaaggcagatggcagtttcttaaaagttaattgtggtgtggatctgaaagcattatcagtgaacatttttcaaatgctattacattaaagtgcactggttgattttgtactttgaatgattttttttactaatgcatgattttgtgatatcaggcattgctcatcttgaaaatatttattcgctgagttaagcaaatattccaagtgttgatgcattttattgtatactaccatgaaatcattttgttagtgtcttcaccaatctcatcaggaaagtattgcagtattgggaagctgtcaagctcacagtgaaaaatatgttttacaaaattccatctcccccccaaaagctcatcttatcattgatgacaaatgttgtcagttgctttctttgaagtgatagattcactttcctcatttttaggaaagtgtttactatataactgtatatgatgaactatagtttgtcagtcattatttcaaataaaaatgatgttccaagaaaaaagtgtcaagttcagcctgaaactcagacactcaaggaaatgcttttctttgcagaagtgctttaagtgtatttcccattttgtcccacagaataataaaatgacatctacatagatgtccataattaatacaattaataacatactgtttcatttagaacattttaaagtccaactggctttttaaaagccctgaaagttcatgacggtgaaaaatacaagagttttgaatgtagtttggtgccactgctttggttcatgccaaggtgcaagttgttttacccatctttgcttttacacctttagtacaagtgtgaacatggtagaaaaggaaaataacatcttagtattattataaaaacagtttaacccagcagac

SEQ ID NO: 143756 - DNA, 951 bp, Homo sapiens
agcggactgttacggtctggaattatgggacgctggtcacaccgcgtttctgaagctttcgattcctcttcggctctgctctctgcagccgccctgccttccctctgcgcgtctgagccgagtccccggcgcccaggggcggggcggcggggtggggacactcatggaccccccagcgaggacctgctgggtgcgactacatggtcacccgaaggaccctgagagaggggcagctgtagggggtccttgaagagggtctgactgcggggtttgtgagcgtcagcgcgggggaggcttgggcctggaaagatgggggagatctggccgatagagacgtgagtgccccagaaaggggggccgaggtggtggaggcgggcgcgcggctagctggggtccaggacaggaggggcgggaggcagccgggaaggcctcaggcagggccagcgagcagcacctcctgcagcctgccaagtgcaggtacgaggccacccctgccctcacctatgtgtgacgcgtcgaggtaacctttctgagcgttgacttgtccacatatgccagtggggcaatctctgagggtgatgaacatgtgtaacatatgggaagctgtatagtggccttcccagcgtggctgcttcataaacttagtccctttccctcctggaggaaggaagtcaacccagaggcttctcactaatgggcactttcctagcacaggtaagcgtcaaatggaatcaaacagaagaggcatctcagagttcaacagaacaggtgcctggcctagctggcctccgtttgggggatgaataagaatccccttacaggccaggtgcggtgggtggctcacgcctgtaatcccaacattttgggaggccgaggcggagggatcacgagctcagaagtttgagaccagcctaaacaacatggtgaaaccccgtctctgctaaacataca

SEQ ID NO: 143757 - DNA, 155 bp, Homo sapiens
ctccaggagtgaccaggggacacccaccacagtaaccagccacagaggccattgggtaggttggctctcctgtccctcctggctgcatcctgatggccccacagcatcctggggagtcccgaccttcaggaacacacaatgagcttgaagctcag

SEQ ID NO: 143758 - DNA, 502 bp, Homo sapiens
tcttccattttctcaacccctgccccatcacacacacacacacacacacacacacggctggagaagagacagtaaggctttgactaatgctttgtatctgattcgagagatggcactactgttattcatgataaagctgttaccaaggagaaactctagctggggaaacctggtcctaagggaagagcattccagatggaaacgagcaatgtcaagggcggaagactaagatcttttcgaaaaactggttttgagaacctaagaaaacaacagattgaacaacgtataacccctacacgaggctggctgataacacttccctcacacacacatcacacacagacatcaatggtcgtagaatatgacacgtgagggaaaagactaatgctttgtatctgattcgagagatggcactactgttattcatgataaagctgttaccaaggagaaactctagctggggaacactggtcctaagggaagagcattccagatggaaacg

SEQ ID NO: 143759 - DNA, 211 bp, Homo sapiens
ataattggtgtcttagagatgggagtgggattgggagtgggttgaagggttagctgagatttcacatcttggtaaacctcatcataaatcggtaaataatatgaacacttatcactgacccataaaatacagacagaggctcttcttgagttggaaggagccattttggaaattcaaaccagatgcttattctgtctactgtataaatatt

SEQ ID NO: 143760 - DNA, 237 bp, Homo sapiens
ggagttccagaccagattgggcaacatagggagcctcagtctctacaaataatttttaaaaaggctgggcacaggccaggcacggtggctcatgcctgtaatcccagctgagggggtcggatcatgaggtcagcagatcgagaccatcttggctaacacggtgaaaccccgtctctactaaaaatacaaaaaattagccaggcgtggtggcgggcacctgtagtcccagctacttgg

SEQ ID NO: 143761 - DNA, 257 bp, Homo sapiens
cataaacctaactaaatttgctaaaacaacaaaaactttctaatttttactagttttgttttttaaaaagtttgtttccttttaagtgcataacactttaaaatgagctcagctgtattagcagataaacatgttgattcatttggtccagagctactgaatgaagcttgcaggagcacagtttgttctttatgccgcccaggggcagaatgtttctcttcctctcctccttattgagagaaggggactggaataag

SEQ ID NO: 143762 - DNA, 541 bp, Homo sapiens
cccattatacagattaaaaactgagagactcaacccgaagatttccaattctggatggatctagtgatctcactattgcagacgtgctgttcccaggcccagtttgcctggaggtctcaaagactatgaacatgattttgtaagcgtttgttctctctgcagaattctagcacagcaaaatgatttcagtggtccctgaggttagttctttatagtcttttaaccagacatggttcttgttatggacatgggagcagagatgctcggaggatgggtgtggtgacttatttcttcacaatcctgccctgcacactctcaggactaagtgtaatgtagcccagttatagaaacacacagagctgcaaagtcactttttctttgctcagatgcattgtcaccttgttttagtctcaagcaaacatgtagtatgttggggcttgcgtgcaagggaacaaggacctgactgcagtcatgctgaaatgcaggctggcaacagacatgcatgtacatacacacacccagaaacacagacacatacaca

SEQ ID NO: 143763 - DNA, 223 bp, Homo sapiens
cggcactctactgcttcttgagacatgggaaagtggcttttgcctggaagaacacgagtggttgcagttttctaacaaatgcttgataagtaacattctcttgagtaacctaatggtaataagttgaaaagagagaattaggccgggcacgatggctcgcacctgtaatcccagcactttgggaggccgaggtgggcggatcacctgaggtcgggagttcgag

SEQ ID NO: 143764 - DNA, 239 bp, Homo sapiens
ttaacctcataccaattcattaaatagagggtgtttttgaaaaagctcatgtgaggataggctatatagtatttttggattacatggagaccttttactttggtccctactgatccttgtgatttttaacaatgcatacttcgaaatttcagtggatgtttttctttatcattgtatgaataaggttttgaagtacaatgttttgtgcccctttatttaagagagtcagaggtagatga

SEQ ID NO: 143765 - DNA, 414 bp, Homo sapiens
aaagagagctcagactctcaaacacttccataagcccaaatcctgctttccatttctctacaagctcttttttggaggggagagctctaggcctcttgcatttggccaggtgttcagggggcatgctgcagcttggaatccagcagtcattcgtatccaggcatcgcatcccctcgtaagacctgttctcaggtggcaatgccccaggcatgggccgcctgcaatcagagctagtgagttcatttctgatcactgtgtaattatcccattaccaacacacgctgaaaatcaagaataaccggagaaaggcaagactcccttctttgttcctcctgttacacacgactaaaatccggactatagtcgtcaccaccagacttgtttgcccctcaacacctgctagcagttgaatca

SEQ ID NO: 143766 - DNA, 977 bp, Homo sapiens
ttctttagaccaggtagtcgctgcccagccggtcaggacgtgggacgcaaggggcaatcctgcccggttcgcaggtccgaggcgggcgcggtggcccttcgggccccgccccgcctcgggacgaagatacaggtccaagggtgcgacattgttaaccaggattccatgcacaaaagtcggggagggatagcagtagcattaacgaggaataaaaagtcaggaagacagaacaaatgggaggacgtgagtggagccccaagagtgatgggacgctaaactcgcagacaacagcggtggcaacagaacggcatgcgaggcgtcgccagagagggccggacgacacagaggtcacacacaaatactcaccaaagtgacagggacgcaaccaagaggcatgcgcagaccatggccgacaataaagatgagacccacgaacaaagcggtgctccatgagacgcgaccctgacgcggccgacagcagtcgcctcagagcggcagaaacccacactagtaacaagaacattagacggggacagaagaggcaggacacaagcaacggaggacatacactgggaactagtgagcgggagaaggatagcggacgcaggacagacatcaacgaagcaactgttgcagctggggagacacacacgagcagcagaggagaagaaggcgagagaccacagctaccccatggtagggaccaacaagcaacgggggccagcacgtggacaccaaaggcagcagtcccaccagtgaccaggttgcggaaccaggcagggatgcactaaccgcaggctgcacgatagaggctaaggggaccacgtagaacacacgccaatgtagtgccgacaaacaactacgggagacaaacagactgaagacaaatacgtggatcagacgggggaccatccattaacaagcggcgacacacccgtgacgagtggggtaatcacgcaatcgatcgcaaacggaca

SEQ ID NO: 143767 - DNA, 413 bp, Homo sapiens
atcagctaatcagaggtgatcctccaccagaaatgtgaatgcttgagggaaaaattgaaatgaacataaatccttagaactatatttttgagagaggtaaaaaattatggttatatgagtatttccaaagatagcaattaagttgcaaaaatcatattgaaaatgatgatattcaaacaagtacttaacccttacatgttttggtctccatggctatagtggcagaacttgtaccccattgttgtattgatgatgtcatctgacgtgtaacaggcattggaagagttgtccttatgggtttagtgtttattcagctcagtgtggagaaaaaaatgtttttttaggaaactgtgcttattttctttcctctcacaattggataataaaaccaagttttacaattcagagaagaa

SEQ ID NO: 143768 - DNA, 162 bp, Homo sapiens
ccagctccatggtgaagcaggcagctgtttgctaatagggcggcagagagaagggaggtagagcgggaaattaatttagggtgatgcccaggagctttgttacacaactgcgctggcgtgctgcccctacagaaatagggaaagccttggggtgggtgtggg

SEQ ID NO: 143769 - DNA, 422 bp, Homo sapiens
atttgattaagtcctccacacccctgtactgtttttcacagcttcttaagcctctatcagcttcccctgtgtcactctttgctatcacaggcttgttgctgtctcttaatgctcttgaaggtatgagttgtctgtttttatttgttctccttgttggatttatgacttttggaggagtatgagtgggaagattcaagatcagaaaggcatcattaattgtcctccaaaccccttctcccataggaacagtaatcttttttttcccccattgatatatcttgctcctggatcaaggtctaaagcatagtaagaactcaacaagtttactgaatgtcatgcatctggggtcctcaggggttggggtggctattctgaataagaagagcctgctgccacctagtagctcttcctcaagtttgacc

SEQ ID NO: 143770 - DNA, 135 bp, Homo sapiens
cataaagcagatggtagtgcttaacataagagtgttgtagccgcagcctagaaacaaagcaacatgttttagtttggctgtaattgatgtgatttatcttatgccggaacaggtgcccacgtggtatgatctgag

SEQ ID NO: 143771 - DNA, 1005 bp, Homo sapiens
agcggaataactgttgtgtaaatcatcagcagtgtctactaagataccatctgtaaccataggcttctatgttttataatataaggctgtcttttaaataaatcagattccctgttaaagatctgttctagattccctagggggttgacctcatatagtatcttctttttctttggttacaaacttttaaacttgtctgaggttataaggtgaattcaactgtccactgtcaatgtagatatttttaatggatttagggatttaaattacatgattcagaaccactttgaggaagtctagggaatatcagttgtttctgtataatttctgaaagcttcactgttttctaggtgtgcacttaattcatgtgatgaagggaacagtatttacatgagtggtttggttaatttttcccctcctaagcttagctttgtgtatcgtgcgtgcttccagtgtttttgtggctgctttacataagtcttttagaagtattttctatttttgaagtaaatgtggatcaaaaccaccccaagacaggattgaaaaaaagacagtttttcgcaagaaagtaaataattttatttagcttgggactttaaatgatatgtcttaaatgtaaacatttctatactgcattttggccatcttttgatactagttttcagatgcatattgttatttcatttattattggaaaagtagtaactttaaacaaatttttattgaaaatgctgacagaggccgagtgtagtagctcacacctgtaatgtcagcactttgggaggccgaggcgggcggatcacgagctcaggagatcaagaccatcctggctaacacggtgaaaccccgtctgtactaaaaatacaaaaaaattagccgggcatggtggcaggtccctgtagtcccagctactcaggaggctgaggcaggagcatggcatgaatctgggaggcggagcttgcagtgagccaagatcgcgctactgcactccagcctgggcaacag

SEQ ID NO: 143772 - DNA, 431 bp, Homo sapiens
gctgagattacaggcgtgcgccatcacaactggctaatttttgtatttttagtagagacagggtttcgccatgttggccaggctggtctcaaactcctgacctcaggtgatccacccgcctcggcctcctaaagtgctgggattacaggcgtgagccacctcacccagcaatattcacagtttcttgagattaagatgtggacatctttgagaagctagtattctgcctaccacaaagactaaaaaggaatagtcaaagagaaaggaaagtccctctgtaaccgagagagtgatatttcagaggttaagtgaagactttcaagagttaaaatgagaacgaaagatacactgttggcaggagtcattggcaatctttgccaaaaaagtttcagcagggtgggatgggcaaaaggtaaattacagtggattga

SEQ ID NO: 143773 - DNA, 264 bp, Homo sapiens
caggggagagggcgatgaagtgcagagtctatgtgacttgcttcggatgtcttatctatcaggtggtctggctggcaccgtcacgggcagagctaggttgtaagttgaggcaatctcaatttgcctcctggtaggagagagttctggaggttcctggtttgctttaaggttcggtctctgtaacttctaagtaaacatgtagttagataagcttgctgtgtagggagtgtctggtggagagaaggtaaagtttataattgcatt

SEQ ID NO: 143774 - DNA, 248 bp, Homo sapiens
taacattccagatggtgatgtaaagactgatattgtatataattggtagagacattaaaagttatataacccaggtggttatactatcaaattctagtaatcatctgatcatttattttgtttcacgattcacatgtttacataagcacttatcatgatgaataacgataagaaacatattctattgtattgggtgtccatttatgcaaattcttgagaatccttaaattaagggcacaaataatgat

SEQ ID NO: 143775 - DNA, 350 bp, Homo sapiens
acaggaagtggcaacaaatggtacagagggatcctgtgtgcccttcaccccacttccccagtgttaatattttatgtaggtatagtatgacatcaaaaccaggaaattgacaatgctacagtcttattcagatatcatttgtgttatatgtactcatttgtgtgtgtgcacatgtgtatgtagtcctgtgcagatttgtataatgaccaccataatcaagaaaacctttgaggctgggcgctatggctcatgcctgtaatctcagcactttgggaggctgaggcaggaggatcgcttgagcctaggagcttgaaaccagcctgggcaacataatgagacctcatcgctat

SEQ ID NO: 143776 - DNA, 138 bp, Homo sapiens
caggggaatggcagaaagctttcgtgcagtttcctagtcacgtttttaacttgcctcctttcaataaactgaaaaaaatctgccctcagcgaagaaacgctgcattttctgttatccttaccaaccggaatagtcttt

SEQ ID NO: 143777 - DNA, 306 bp, Homo sapiens
ctcattctagtcccaaccctcttaactatgataaaaactctaaaccatcaacaccacccccatcttgacttgtgtcaccttaggtagaatctgagcccttcaccttggggaatatgtgagtagtaaactttattttatatctgtaattcctatgttttattcatcctagcattcataaatttctgaggatgctggatgttcatataaataggtttattagctttagatagactaatgatgctttattcaaatgtgtggttatttcagatcaaagaaaaggaagcattgtgcttgacacagggctaa

SEQ ID NO: 143778 - DNA, 516 bp, Homo sapiens
tcttgcacaaactcatgagatgggtaagtatgataagtatcaccatttttcaaaggaaaaatatgaacagaaagtcatttgcccaagattcacaattatgaggtagtaggggcaggattagtttcatgtatactgaaatccagaacttaagtaaaaggccccatgaatctgaactggtgttagtggaattacaacctaaaagagattgaaaaggggggaaagtagcataaaagatgaggttacaaatagcataagatggcaaagtatgtgctcaaaactcttccagctgggtacagtcgctcacacctataaacccagcattttggggggttgaggtgggaggattgcttgagtccaggagtttgagaccaccctgggaaatacggcaagaccctgactgtacgaaaaaaattttttagttagctgggtgtggtggcatgtgcctgtggtcccagctacttgggaggctgaggcgggaggattgcttgagcccagaaggtcgaggctacagtgagc

SEQ ID NO: 143779 - DNA, 747 bp, Homo sapiens
cttttaaatgaccagatcgcatgagaaatcactcgttacctcaaggacagtaccaagaggatggtactaaattcctgagaaatccacccccatgatctgatcacctcgtaccaggccccgccttcagcattggggattatgtttcaacatgagatttggatggggacaacatccaaactatatcaccttgcatagtaggtagggttttaaaaagcagtttggcacagtaagaaaagtacagattttttttgcatcagacagacctgagttaaaatcccagcttcactgctaacatgctaggtaaatgtgggcaagttaattaacatttctaagcctttgtttcctcactggtaaaacaagtatttggaaatatcattgtgaagattagaaataatacatgaaaagatcctaggatgctgtctgtcatacagtagtagtagtaagaagttattcttgccaaagattgttgagaatggcagaattatctcagttctaagagctatagtttctaattatttgagcctagactcagattcatttggagcagctaactgctcaccaagagcttattttccatcttaccaatgaggttatgtgccctgtgtttttaaaatcagtctacttaaccaagagaacagaaatgacatgagaattaagtaatctcactttctctgttatttaggatttattcctactcaaaacctgagagttgctatgaattcaccattaaagcacttattaatatac

SEQ ID NO: 143780 - DNA, 237 bp, Homo sapiens
catgggttttcaaactggagtccttggatttcagatattatgtaagccctggaattgcggcatttggggggttagctattccttaacttttaccacatgctcaaaggagtctacgaatgaatgggctaaattgagaattattttaaattataaggcgcccatctccattgatcagaatggaggctgagatagttccttttgtatgaggtataccactagtgcctatttgctgcagga

SEQ ID NO: 143781 - DNA, 577 bp, Homo sapiens
gcggggcggtgtccgggttggggatgctttgtgttgtctcgcgttgggtaacaggcctgagcttttggcggagagctgtggaagtgtgcggtttttgtttttgttttcctttatttttattttggggccttaggggtgagttaggacggaaaggagggtgtcttttcgagggttgtcccatcctgtgacagccgagaaaaggcgaaaggagagtggcgaggaaagaggaggagacgtctcctgagggagggcgcttgtggagtctctgtggaaggaagaacactgtagggggagtgccccctgggcgagggagggtcgcgggacgcggcggagggggctcacacgggcgtctgcggacctgaggcggcgacaggaaggggcttgcgctctggggctgtcgcttcggaacacttctccttcagtccattgctgcgctcgccctggctgctgaataaatggtttcggagtgaaaagcatctcactgaagaacttgtctgtgtctgtgactgacgggcggtggaacaccaaagggagggtgtcgcctgattgggactggaaaaattggaattcagggcgc

SEQ ID NO: 143782 - DNA, 458 bp, Homo sapiens
cctttccaatttagatgctatttatttctttctcttgactaattgctgtgtctaggacttctattactgggttgaatggaagtggtttggggatccttgtcttttttcagatcttagaggaaaaacattcaacttttcacccttgagtatgatgtcagctgtgggcttgttgtatatggcctttattgtgttgagggtgttgaggtacattccttctgtatttaatttgttgagagtttttttttttaatcatgaagggatgtcaaactttgccagtgctttttctgcaccaattgaaatgatcatagtttttgtccttcattctgttgatatgatgtatcgcattgatttgcacatgttgaaccatcctttcatcccagggataagtcctaattggccatgatgaatttttttttttaatgtattgttgaattttgtttgcttgtattttggtcgac

SEQ ID NO: 143783 - DNA, 592 bp, Homo sapiens
cacgctgtggatgcaagagtcaatcagatgagtgtggtctctatccttgtggagttaacaggctgaaaccttaaacttggtaagagagacaacattttaagtagctgctgtccatgtgttctgaattggaaacaagccaaagaaattcaagttggaaaaacatcaaaaaatacctgaattctctctatgatataaagttaatatcactttattttaactttgtaataagacattttctggccttatataactctggaataataaaatagctttagtaaatatccattgagtatccttctgtacagggaccatgtgttacagtaggtacagaggtgagggagtaagacaccctctctatgatgggagtttacagccagagtgcaaggcaagccgacagacatccatgatacaaggcagaatacccatgctctagaggaaggtttcacagagctgtgggactaaaaagtagaagagatcatgttcctgttgtaaagatcagggaagatttcacagaggagctgccatttgtggtgggccttgaaggatggataagtgctcaaaagacccagatgggaagggcagagggaccctg

SEQ ID NO: 143784 - DNA, 346 bp, Homo sapiens
attgctaaaagactaggaagttatacatcaaagtatgagcactagttgttccttaatttgaggattatttataattttcattttccccacattttccacaatgagcaagaattagtttcgtaaatagagactataaagcaaaactcctgaacattatttaaaaaaggcaataaatgcaaaaaaccctcaaaacatgctacatgtcattgaatacacacaatatacacacatacactgtcatatacgaagtaaaaggaaactggtgactgttgatccatgagcattggcttttgaagcccttgaatacatgtgtaggcaagaagctgtactttactcttcgaacatc

SEQ ID NO: 143785 - DNA, 739 bp, Homo sapiens
tagagatagaatgaaagaaagcaaattagcaaaaatttagcactagtttaatttagatggagagtatacgattgtcatgctattattaccaactcatttttttctaagtacagaaattttcaagaccaaaaattagggtaaaaaatgaacttagaaaaaaaaagtatttctactaaattatatacccacatatttacattatattatagtatttttatgtatcttttctgaaataaatgaaaaaatactttaatgcaatcacagttctacagctttttaaatgttctgtgtataacattttccttaattggcagtagggtaagatttatgtaggtaagtgcttccttttggggtttactatttggttgttagttcaagagtttcctgttctgtaggtacaatgaaattcaattaataaatggctcaatttggggacaggtgtagacactttgtgtgtcattaaatttagagacactaatgccagcaatttgggaggccgaggcaggcagatcacctgaggtcaggagttcaagaccagcctggccaacatggtgaaactccgtttctactaaagatacaaaaaattagctggccatggtggtggacgcctgtaatcgcagctaccctgggggctgaggcaggagaatctcttgaacccaggaggcacaggttgcagtgagccaagatggcgccattgcactccagcatgggcaacaagagcaaaactccatctcaaaag

SEQ ID NO: 143786 - DNA, 240 bp, Homo sapiens
cccaaagagctaggattacaggtgtgagccatcacccccagccaaaagttctttaaatttatcttcatttttctcattgtgcggcagtgctctaaacttcacagcctggcccccttaaaggatggcagcccttcggtgaagccctttaactccgctgcaggccgcagtcctgtgtgctctctgcctgactcccctctagcctgtgttgacatgggggtgcactcaggatgcccactggtg

SEQ ID NO: 143787 - DNA, 308 bp, Homo sapiens
caggtttgatttcaagttggagcatgtgtcatttctacatgcttctgagacacttacctcccggacacccctgctttcttcctcttccgtctgtcccagcctgtgtattcaaatgaaacttttagagataaacatagagaaagcatgatttccattttccatctccgtgttctcagagctgctgtttcctttccctatgtgcaggggagttattagcttgttatgattggtaatgccctacccgctactctctttcccaatatagatttccttttacttcctccttcccatcacctatggcttttctt

SEQ ID NO: 143788 - DNA, 687 bp, Homo sapiens
cttcattaagaggtaggatctttatcccttttccttgaattagggccttgtgactgtttgactaatagaacacaatgaaagtcccactgtgcccatttctggcttgggctttaagaagctagcagcttctatttcctatctcttaggatcattgctcttggaacccagctaccatgccacaaggaaacctaagcagccagtgcaaaacccctcatgggcacctgcacatagctctagttgaacttctagttgatagccagctcccacttgccagccatatgagtgagtcatcctgaaagcaggtcctccagccctccctcagctgagctgcccttgatgacattgtgtggagcacagattaatgattcctgttgatccctgcccaaattttagatttgtaaggaaaataaatgattactgttttttaagccactaagttttgaggtgtcttttttttttttttctttttggagacagagtctcactctgttgcccaggctggagtgcagtggtgtgatctcagcccactgcaacctccgcctcctgggttcaagtgattctcctgcctcagcctcccaagtagctgggattacaggcacctgccaccacgcctggctaatttttgtatttcagtagagatggggtttcaccatgttggtcaggctggtcccgaattcctgacctcaa

SEQ ID NO: 143789 - DNA, 390 bp, Homo sapiens
aaaccagagagaagcctctgaagaatagtgagtgaagagaaaggcaggcctgggtcagaatcctagtttagcatttttgtgaaagaatagaagaggaggccattcaaaaaaatacagggacattgagaagggaagtgtcctagatataggacatccagatgggagtagtcagccttgtcagatgctctagggattataaggaaaaagagttttgtagagagacagaagaagctagattgaatactattgagtggtagagacatttgaaaatgaaaagcttgaggtaagttatttggtcagtgagtttttcttgaagtcgaggataggaagctgttgctggagggaaatatgagatgtttattttaaatgttggagagattatgttctttt

SEQ ID NO: 143790 - DNA, 815 bp, Homo sapiens
gagttcaagaccagcctggacaacatggtgaaaccccgtttctactaaaagtataaaaattagctgggcttggtggtgtgcgcctgtagtcccagctactcgggaggctgaggcgggaggatcacttgaacctgggaggtggaggttgcagtgagctgagatcgtgccactgcactccagactggatgacagagcgagactccttctcagaaacaaacaaacaaacaaacaacaaactgagccaaggcagaagcagggactgaaagagaaaaagggaggagagagagaggaagcgggaagcacgggcacagagagactcggagagagggaggagagagagaggaagcgaggttcagagagactcagagggagaaagagaatcagcaaaacacacagagacttaaaggagagaggcagagggaaaggaaggagagcaaaaggcagggacggaacagagaaaagccagatgaagacagcacagagagatgggaagagacacagaagaaaggcagagaggtccggacgcagtggctcacacctgtaatcccagcactttgggaggctgaggcaggcggatcacctgagatcaggagttcgagatcatcctgggcaacacagtgaaaccctgtctctactaaaaatacaaaattagccaggcgtggtggtgcatgcctgtaatcccaggtactcgggaggctgaggcaggaggattgcttgaacctggcaggcagaggatgtggtgagccaagatcgcaccatttcactcagcctgggcaacaggagtaaatctctgtctcaccaaaaaaaaaaaaaaa

SEQ ID NO: 143791 - DNA, 763 bp, Homo sapiens
gtcctttatctgcaatttggaagcccaaaaaactctgaagccaaaaggattttcctgtatttgctgcccagactcttctgtgtgaagagtggataaatgtggaatcaattaatgaatgggaagaggagtgaggagttgaacaggtgaacaggagagtgaagctatttaaattatatatttttttggtttgtttgtttaattgtttgtttctttgttgagatggagtcttgctctgtcacccaggctggagtgcagtggcacgatctcggctcactgcaaccttcgcctcccgggttcaagtgattctcctgcctcagcctcccgagtagctgggattataggcgcccaccatcatgcccagctaatttttgtatttttagtagagacggggtttcaccatgttggccaggctggtctcgaattcctgatctcaggtgatccgcccaccccggcctcccaaagtgctgggattacaggcgtgagccaccacgcccagcctatttatattttttaataataatttttattgataaattttaaaaattagggggaaaaggtgtgaatagccatacccttattagcgtttcattgttttgtaacaatacacatttaccaagtagcaggagtctgagcatggcttgactgggtcctctgcttatggtctcaaaaggctacaatcgagctgtcatcagggactgcagtctcacctgggttcagatggggaaggactcacttccaagttcactcatgttaatggcagaat

SEQ ID NO: 143792 - DNA, 134 bp, Homo sapiens
acgtttaaatgatgtaaaaatacattaatcaataaatcatctcctgtctgtgaaatggggtagtaacctaagtggactgtgtgagtcctctgcagtactaacctatgtaaagtgcctgagtgaatggaacagaa

SEQ ID NO: 143793 - DNA, 479 bp, Homo sapiens
cgtgtcagagttgacttcacagtgtctgcgtcattgtatacctgctacggtgcaggctcagccatctgcaacttccattgtccccctggaacccggagggaaagagcccctccctccattgggcatccgtatatgaaccatgcagacctctcctccctgtcatagacaaggcactgaagcccctagaagaaatggccaccagtagtaaggggctgactcaagcatctaccacatgctggcgctttgcatcactgaccctcttcaaccttcccaaactgtgtgacatggtgacatcaccccaaccaccctgactcacaaggacacaagctcctggaagggacctgaccgcgggcagtggagtttggatttgaacccaagttggtggctccagaggctgggctcttctcatcataaggccctgtgaccctcccaggggatgttccccactcagcccctttcctttggggacagccacactg

SEQ ID NO: 143794 - DNA, 544 bp, Homo sapiens
cttggtcttcttttcattttcaagactttgacagttttgaggaggactagtcaggtattttgtagaatttccctccaatgtaggttaatctgttgttttcacatgattaaactgagggtatgggtttgagagaaaaaaaaactggcagtgaagggcctttctcatcgcatctaacaagggtgtatgctacaaacatcacttatcactggtgatgtgttcttgttttttagtatcactaaatgcacattgtttttaattttaaaatgaggctgggcgcagtggttcacgctgtaatcctagcactttgggaaggcagcgcaggcagatcgcttgagctcaggagttcaagaccagcctgggcaacatggcaaaaccccatctctaccgaaagtacaaaaattagcagggggtattaggacacaactgtatccccagctactaaagaggctgaggtgggatgatcccttgagtctgggaggtcaaggctgcagtaagccgtgatcgttaccactgcactcacaccagtgtgggtaacacagttgga

SEQ ID NO: 143795 - DNA, 816 bp, Homo sapiens
acaggtgtgagccaccacacccggtcgagggtttcaactcttttccagtcaataacattagaagaaaatgacattctgggaggaaaataatccattaacattgttcatgcaagtgttttaaattccactgccctaattttaaatactgccattgttcaaaaaaagttcactgtgcagtggtgcgatctcggctcactgcaacctctacctcccgggttcaagtgattctcctgcctcagccttccacgtcaccatgcccagctaattttttgtatttttagtagatacagggtttcactgggttagccaagatggtctccatctcctgaccctgggatctgcctgccttggcctcccaaagtgttgggattacaggcgtgagccaccgtccctggcccactgaacttttaaaattggtatataatgtacctctattaaaagcatctctatgtgtgggtcaaaggaaaatctagtaaagggccatgtgaacagccatcagtaactgaagagaggtgttgctgagtggcactgagttgtggggccagaacacaggttttgaagtcattgggagcaagatgaaaaaaatcctgttattttcctatggaagagaatgtattgggtactcagctgatttgaaacagtaaaatgctgtggaaggctggaggagtagctgctatctactaagaatgaaaggaaaaagtaagttttaagtgttcaggaggagttagtgagccttaggaaaagacatgtaaaacacaagaacatgtttaagagagaaattgtggacacctttccctttaaaattatgtttccatt

SEQ ID NO: 143796 - DNA, 371 bp, Homo sapiens
tggatgaggcctctgcgatatcgacaaacttgacctgagtgtgtactcatgggtgtcaccagctccggacaccttcccaaaacacccgccgtctggtctacaccaggagacggcatcccgtctgctttagtttcctatcaagacgtgtttgcctccagaactcggatacagctctagccccactggcctggagggaatgtcagggacaaggacacacacagtccacagatcgccagatctgaccacgccgagcactgtccccagaccacgtctgattgaggagaatgtccggggtggctgtggaaggacagggttggagtgcggtggcacaggtggccacagcgccaggcctctgaagccacagagctttg

SEQ ID NO: 143797 - DNA, 357 bp, Homo sapiens
aaacaatgttttaaagaggaaaggggtgctaatattctccccttacaaagtgagggacgtaagagtcatgcattctgtcagcatggctcaattatacagacagaaataggagtcagagaaggcaattagctcaagttgtttcagggtaaaagtgtatgagaataagacttccagttaaataaagtggcttgaacacacatatctagttctgttaccactcaaaactcttctaaaatgacagaaaagggagttttaaaaaggtttaaaacagtggttctcaaggtggggtgcaaaagtccagcagcgtcagcatcacctgagccctcgttatgaatgcacactcccgagcccactgaa

SEQ ID NO: 143798 - DNA, 313 bp, Homo sapiens
ggaaattcatagcccttagagatggggcatctgtgaagggtaagtagaggaaagggcttcatgagaaccccttcctgtgcaggaattgagaacagagttccagggatttccaccctggcaccccttgcctggtctcttctgaccctaatcatgcaggtctgaggtttgctgttcccagattactgggccctgaatccagcttaggaagctatttgtggctgagaggaatagagcagttgtgttctgagcccttggccactctgccccttattctgacctgaccctgggtcccaggcctcatcctttctagaag

SEQ ID NO: 143799 - DNA, 298 bp, Homo sapiens
ccttctctaattggtggcagctcttgactatgtcttcctgtgagaggagcaagttcctgggccaaatggggtcagagcatagccaccctcccattctgcctttctctctccctcttcacctcccttccttcctctctttctttcacaaatatttcctgggcccctgtgacaatgtcagacactgctagatactgtggattcagcgacccatgtcttagcttgcgcagagatgctgcccactctgtgaagcctgtcctgacccccaccctagcccctcccgcagtgggcagtctcctcc

SEQ ID NO: 143800 - DNA, 425 bp, Homo sapiens
atagcagcatccctggcttctgccctcttgatactggtagtacttcccagttgtgacaactaaaaatgtctccagatattgccacatgtgtcctggagggcaatatcaacccccattgagagtgatcccattccggtgttgcctgtggggagaaggaaggagccccatcctctaggctgtccactgtgagcgctttacctttcatgatcctcacttgtgaccagttgaagaaaggagactgtatctgaaatgctaatttggacttcccttcaacctagtcgaaaacattttaatttttataaaaacaccaaaactgtgaaagcatgcagcatgtgaaactatcctagccattaatagctggagttgggaaacagaagtaccctgaaatgttgtgttaacagtatctatgttggtctgcgcgagtg

SEQ ID NO: 143801 - DNA, 308 bp, Homo sapiens
cgttcgtggaagggatcaagctgactcagaagcgtgagctgcattgagggaaaactatggccagagtaaggcctcactgagagaggtgacgttggtgatgctggagctcagtctctgacggggacgacggacgcagccacatatagaagtgagggaggggcggttaggtactagaagctgtgttctagaagctggacgtctgactgtattgtggtcgatgtcactctgtctatccatgatcacagcaggtaggatggagcttagacttcaggaagaacttcccagtggggaagctgggggggagagag

SEQ ID NO: 143802 - DNA, 111 bp, Homo sapiens
actcaagagcccaggttccccatctctgctgtggggcagtcatttggcatgttgtgatggggtctggacagctctgtccccaactttgggtcacatatgagacctatggga

SEQ ID NO: 143803 - DNA, 147 bp, Homo sapiens
gatatttctgtgaccaaatgtgagaggagtttccccacacaccagctagctgtcccctaattcgattcagttcaattcaattcaggtgctatctacctggagacagccttggaccccacaggttgagggctaaatccccccacaaga

SEQ ID NO: 143804 - DNA, 326 bp, Homo sapiens
acctctgaccctcactgggctcttactactcacttggctgaagccactaactcccctgccctggggtccagtcagtgtgggagaaaaagccctggagactttttgcctgttctggttggctcagccaggagctttggctacaggaatggtaaccccctccccgctaatattatacccactgttcttatgggccgaagccaggattattctggagccttttgctgtgcagagtgtgtcttccgtgtgggtcagccataaaacaatatcatttctccctctgaaggctcctcaaggaggcggggtgcacaaatgtagattataaagct

SEQ ID NO: 143805 - DNA, 656 bp, Homo sapiens
ttgttgttattgtctgttttatttgtattttggggttttttgctttttcccccagggaatgaaaatgccttctccatatgaaccagacatatcctggggctggggctgagtgtcctttgttgtttgctctaattataactaatgaacagttcagctctggtaattgtaggcttgctggacccagtgcctgccttctaactgaatcttgactctgctccattatgtattttccatgatcctgatttctgtcaatctaatttttaaatttcattctaaggcaaacctgctcatgttcttcgctgaaatcaacctcccctttctggaatggacatatggaaaattggaggcaaaatataataatggtggtgactcagactgctttaaggcctgagagaccggccaggtactgtggctcacgtctgtaatcccaacattttgggaggctgaggtgggtggattgcttgagcccaggagtttgagaccagcctgggcaacataatgaaaactcatctctacaaaaagttactgggctcagtggtgtgcacctgtagtcccagctactcaggaggctggggtgggaccatcgcttgggcccaggaggtaaaggctgaagtgagctgtgattgcgccactgcactccagcctgggcaacagag

SEQ ID NO: 143806 - DNA, 701 bp, Homo sapiens
atgaccaggggacggatacctcccccagcctttcagaaccacaccatgaatttggagacgtaactggtgtcttatcagcttggctgctgtaacaaaatgccacaaactgggtggcttaaacaacaaacatttatttcttagagtcctggaggttggaagtccgagatgagggtgccagcaggatcgagttcttagagtgggccctcttcctgggtgatagacagccatctttttgctatgtcctcatgttgtggaaagagagcaagctagctccatcacccagttatgcctctgcaaggccccacctgcaaataccatcatactgagggggcctggctcatggcgtcccacttttccctcctcttgctgccttctacatcctggatgtgagtgaggtgtctggagatctttgagctgagatgctgcccaggcctgcaagtgcagctatgcagcctgtatccctgcctctttctaaaaacaaggaagaagatccctccttctgctgggattaccatgaacctgttcctgttcaacctgcccctgacccagattgctgggacttaggaatttagacctctgagagtactgccgggaacatgatggtcatcccttctctcagctgaggaaactaagactctcgtggttcgataactttcccaagagctactgaaaaattagaagcacagatagtagcaaaccca

SEQ ID NO: 143807 - DNA, 146 bp, Homo sapiens
gaactaaacccatagactgtttccccttctgttgctaaccaggagaagaaaagtggtatgtttataaaagtctctgttatcccattaacaggccccactttttcctaatctgaaacttcacctgccactcaaacataaaaacaagt

SEQ ID NO: 143808 - DNA, 104 bp, Homo sapiens
aaaaccatatttggttatgtaattctatatgaaaacatctaaatactttcaaatagaacttgaagctcttcaccatctggccatttccatccttttcttctgtt

SEQ ID NO: 143809 - DNA, 440 bp, Homo sapiens
aaatgtgacacagagacatgaagtgagcatacattgttggaaaaatggtgccaatagacttgctcaacacaggattgttacaaaccttcaatttgtaaaaaaggcagcatctgggaaacataaggaagtgaagcacagtaaaaacatatgcatgtataaagcttagtgagttttagtatatagagaattgtaaaactattatcactatttaattccaaaaagattttatcacccccgaaaagaaacctatacccgtgggctatcacttcccttattttctttttctttttctttttttttttttaaattatactttaagttctgggatacgtgtgcagaatgtgcagttttgttacataggtatacacatgccatggtggtttgctgcactaatcaacacgtcacctacattaggtatttctccaatgttatccttcccc

SEQ ID NO: 143810 - DNA, 253 bp, Homo sapiens
acatggggaattctctcagataaggaggagaaggaggcatctacaaaactcagtgaagccaaggtgagggccactgttgcagggaccctgtgggaaatgctgctctttccttgtcactagggtaggctcttctgcgctggcccagctctttctgtcacttgctcccacctacatgaccctctccacaatgggcagcctgctcacctttctttcccatcaactcattcttctgacttgttccaagtcctcctga

SEQ ID NO: 143811 - DNA, 388 bp, Homo sapiens
tgatagaggctaatgttcacggtattggaaaatgataagaaaacagcagccggagagaatgtgagaaagccagtgaaggtgctgctttagcagagtccaaatgtcaagagttatcccctactaaccctgaaattgttctgggatagggtctaaagaatgaaatccaaagaacaacagagaagaacaccagagaatacttggagagaggaaacaaattgctctaaccaatggagttttaaatggtctagtttaaaataggttgaatttacctaggtgttatgagaacttaagaacttacataagtggcattcattggtatggtcaaagaggttaggtaaggcttctttgaggaagtcacaccagaatggtaacacctcgtgccgcctcg

SEQ ID NO: 143812 - DNA, 236 bp, Homo sapiens
ccattttatatttaaatggatttttcctattaaatattaccatagccttgtttttccaaataggatacatattcaaacatacaacaatgcagtacaaagaaaagagtttttaaaaactcactaactgttaagattttttgcagacctcttctttagatctttttttaaattacatattttgtgctgcggtctatttgccggttgttttattttttccctcagtgatatatcaaatg

SEQ ID NO: 143813 - DNA, 294 bp, Homo sapiens
ttcatttcattcacttccagccacccactcagggctagctgaatctcaggagcccctctcctttgcccctcaccagagtctagtctcccagctctgccttctgggataggctttcttctctgatcagatcaacttctaaataaatattaaattatgtctgatgtgtttccctattcctttcaaatctaagtaaatcagttcatccctttgttggaaatcccctagccctgctgaggcctccccactgatgtctcacattcttgacagtgacaagatttttctctagatattaga

SEQ ID NO: 143814 - DNA, 363 bp, Homo sapiens
attgactgaaaaagaaagagacacatttataagaacataaaatagttaaatgtgaattcaaagcatttactaaagtttatttcttagccttagtactcaatgttctaagaaaacattgagaaaagaaaagaaaagaaaagaaaaaagaaaggaaaagaaaattgtgtgggcttgttcatacatgccatctccaagacagtatctatagcacggcaattaagagcatggggtctagggcagacaccctcagtttaaattccagcttcactatgtccacctctgactttaatcatgtcgctttatccatgtatgtcctggctcctctctcattaaaataaggagaacagtatctatactacaggg

SEQ ID NO: 143815 - DNA, 440 bp, Homo sapiens
cctccctggctcgggtgggcagccgtttttgaggatagagtgtggttgaatttccctatgtaacatacatgagttctgcagttgccctctgttagggtttcaagaaggttaatctattagggcttaccagttttcacaatattcttaagcctgtgatttctgatgatattttaaaataaatgactgtagtttgagggttaaggtttggagccggccaggcgcagtgactggcccacgcctgtaatccgaacacttcgggaggccgagttaggaggatcgcttgaggctaggactttgagaccagcctggacaacatagcgagacccgtctctacaaaacagaatttttaaaaaacttagccaggtgtggtggctcatgtctgcaatcccaacagtttgggaagccaaagcgggtggatcacaaggtcaggagttcgagac

SEQ ID NO: 143816 - DNA, 320 bp, Homo sapiens
atggtttattctttttcccaaatacttatgtgcagctttgggaatcattttcttccatattaagcttcccagtatttctgaaattatggcagattctgattcttggaagcaaccagaaccctctgagctgcacctctattgaatcatctctgtttacaatgactctcactcaagttattaaggatgtgatctctgctatttttttcattagaaaacccacacattacataataattgttagggtttttgttagtctgtcttaaaaaaatacatttaaaaaatgtacccagtgttgtcagagaatatcttcatttcaatat

SEQ ID NO: 143817 - DNA, 427 bp, Homo sapiens
aggttgtgtgggaactgagcatgctggcattgctggccactgcccctgaaggaaaacacctcttccacaccacttttctgtatctcctctacttctttctctagcatggatgtggcatttgggcctgttgtgaagactaagccagccatctgaaaaagctctagccaccccatgctggacatgtattacagtgctcaatatgttcaatttcctgaacataaagactgatctttgccaacagccaatcctaaggccttttaatttctgtacatgctgtacttgagggattttatctctcttcttatggctttgatatcctccttggtacaagtgagtctcacacctttatctccagccccaacatctcatctgagtttctgatcaatatttccaactgctcctagatatgttttcctagacattcaac

SEQ ID NO: 143818 - DNA, 382 bp, Homo sapiens
cagcactttgggaggtggaggtgggcggatcatcaggtcaggagatcaagaccatcctggccaacatggtgaaaccccgtccctactaaaaatacaaaaatagccgggcgtggcagcgcatgcctgtagtcctagctactcgggaggctgaggcaggagaattgcttgaacccgggaggcggaggttgcagttagccgagattgcaccactgcactccagcctgggtgacagagtgagactccctctcaaaaaaaagaaaagaataaaataggtgagagttctttcctttgggattcagagcccagtgagagagagatacatgctaagagatcaagaccttattggagcatagaggaggaagttcttaactttgtctggaat

SEQ ID NO: 143819 - DNA, 311 bp, Homo sapiens
tcagttatggtctgaattatggactgaccctgggctagcctccctctgcctttcctcattcagagaaacttacatgcacccccaaggaagtgggggtacatcctagtggcctggattcccaaggaagaaagcaggaccaagaagcactggaattagaagcagggcctcccagggtggcagaattctaaggaagtaggagtctcccaagggaacagaattctaaggatgtgggtgggcctcctaggaggacagaattctaagtggatggaactccccagggtcaaaatatgaaggggccagggcctaagggg

SEQ ID NO: 143820 - DNA, 760 bp, Homo sapiens
gcgcgaagtaccatagcatccccacagccatgtcttgttaagtcatcatctcttatctggattactgcatcagccttccaactggttttccaattggttttcaaatctagcctcactcaaacctatccccaactacatgaatcttctcatctctgaatacttccctcagacttcactctacttacagatatggaatattttctttcacctctaggtctttcaacatttctctctggcttgtacacttcctttcccctgattaataatacctactgcagatctccgcttacatgtcacctcctctgggatgtattcccaggctcttcaaggtctgcaataggtcactcccacagcacactggaaagcccttaatacactgtaatgtacagtcaagcatcacttaacaacaggggcacatgttctgtgaaatgcattcttaagcaatttcatcattgtgtgaacctcatagaatgtacttacacaaatctaaaggctgggtgtagtgattcacacctgtaatcccagcactttgggaggcagaggcagggagatcacttggacctgggaggcagaggttgcagtgagccaaggtctcaccactgcactccagcctaggcgatgaagtgagactccatctctcaaaaaaaaaagtacttacagaaatctagatggtatcgcctactacacccctgagctatatggtatgacttattgctcttaggctataaatctgtatggcatattatgtaccgaatactgt

SEQ ID NO: 143821 - DNA, 692 bp, Homo sapiens
gcgcgaagtaccatagcatccccacagccatgtcttgttaagtcatcatctcttatctggattactgcatcagccttccaactggttttccaattggttttcaaatctagcctcactcaaacctatccccaactacatgaatcttctcatctctgaatacttccctcagacttcactctacttacagatatggaatattttctttcacctctaggtctttcaacatttctctctggcttgtacacttcctttcccctgattaataatacctactgcagatctccgcttacatgtcacctcctctgggatgtattcccaggctcttcaaggtctgcaataggtcactcccacagcacactggaaagcccttaatacactgtaatgtacagtcaagcatcacttaacaacaggggcacatgttctgtgaaatgcattcttaagcaatttcatcattgtgtgaacctcatagaatgtacttacacaaatctaaaggctgggtgtagtgattcacacctgtaatcccagcactttgggaggcagaggcagggagatcacttgggtcaggaattcaagaccagcctggccaaaatggtgaaaccccatctttaccaaaaatacaaaaattagctgggcatggtggtgtatgcttgtaatcccagctatttgagaggctgaggtggcaggatcacttg

SEQ ID NO: 143822 - DNA, 232 bp, Homo sapiens
atccatcaaaaccaccctctcaatcttaaatttgagaaaattgaggctcagaaagtggcacccctaaaaccatatatgcagaggtgggaataatagcatcccattgagtatcttctataatctgctgtttgaacatttaatttctttgtttattaaggtgtcaagtagctgaaattttacctttgaggattattcagctgcgcgctttcagcaataagggtaaagatagcat

SEQ ID NO: 143823 - DNA, 227 bp, Homo sapiens
gctcaggggaggcagtaccttccagtccaagtccaagtttgccttagacagaacctgggaacaacatcgtggagaagggttgctagtgatacccaaacaaaagatggataagagagaggtatccagtagggcacttctgaaatttcaatgtgcacacattacctgggcaattttgtgaaaacagagatcctgatatgctaggtctgggtgggacctgatatttctgc

SEQ ID NO: 143824 - DNA, 337 bp, Homo sapiens
gacatttatgatgccatgaattcgacaagtgactaagtcacagtgttcagtgtagtaaatggaacctgtgaacatgtctgcagctatgtggcctggacagagaagtctgtcccaagggagaatttgttgtctattttgacctagatggaatgggtttgaaatattaccagacagctgtgtccttgatgattctttgcattgggagtgaccaggaggtttataatagcctagccttggttatcttaccaggtgttttgttgttgtcttgcattgtgggatatgatattccaggagcatttaatgaatttttgtttggtactccatgcttgctattaag

SEQ ID NO: 143825 - DNA, 266 bp, Homo sapiens
tgtttgacatacagctgctgggagaggtggtctttcttgctgagggatagctaactttaaggacacacagccactggccatctttatcgtcatggggagaaggatgagcggtagtaggagagagaggccaacactcagaaagcagcagagccaagagctgtaggaagcaggaggcaggaaacagagaaggacaaacaccagatggtaggacttgagccccacccaggactcaacttcccaagcacatgtgccaacaaatgccctgg

SEQ ID NO: 143826 - DNA, 318 bp, Homo sapiens
cagcaaatgatgttgtttgctgttattactggaaaaaccaaggaaaacatccttgcctctctcttctcctgcagaataatggtagaaaaataaaccattatcaagcaaggcgacaaagcaggttagtggatctatgatggagctgtgaggagcttgacgtcatcagctttgggcaactcttattgagagggtaagcaaaggaaacagagatgaatgagaaagtcacctctgcttataatcattcataaaacactagggatcctctaacactgacatctggagtatccaatttctttatcccttagaagatcaaatgtg

SEQ ID NO: 143827 - DNA, 270 bp, Homo sapiens
tcagggaagtcatgttgatgacagcaaatgtttaaatcatatgtcatgttaaactgccttgtatacttcctgtgctggcaaaagtgaaaacaaaggcaagctctccattcctacacacatgttccaaatgcaggctatagttctatcagggattttgcatctcaatgtgaacacaaaggaaatttctctaatttttgtatttttggtagagatggggtttcaccatgttagccaggatggtcttgatctcctgacctcgtgatctgccca

SEQ ID NO: 143828 - DNA, 544 bp, Homo sapiens
gccatcttccagtaattcaccaaaatgacgaacacaaagggaaagaggagaggcacccgatatatgttctccaggccttttagaaaacatggagttgttcctttggccacgtatatgcaaatctataagaaaggtgatattgtagacatcaagggaatgggtactgttcgaaaaggaatgccccgcaagtgttaccatggcaaaactggaggagtctacagtgttacccagcatgctgttggcattgttgtaaacaaacaaggacaagattcttgccaagagaattaacgtgcgtattgagcacattaagcactctaagagccgagatagcttcctgaaacgcatgaaggaaaatgatcagaaaaagaaggaagccaaagagaaaggtacctgggttcaactaaagcaccagcctgctccacccagagaagcacactttgtgagaaccaatgggaaggagcctgagctgctggaacctactccctatgaattcatgccataataggtgtttaaaaaaaataataataaaggacctctgggctgt

SEQ ID NO: 143829 - DNA, 207 bp, Homo sapiens
aacctagtactgaagtaagcacagttcaggatatgactgaaagtcaattagtgattactaaaaagattatcaagcagctaagttgtagctatattatacctaaatagagtttagaccagctgtattaataaatcattaattttttgtttgagatacagtcttgctgttgcccaagcgggagttcatgatcacagctcatcgtaacct

SEQ ID NO: 143830 - DNA, 767 bp, Homo sapiens
tcaatctcaaattttattagacaatcatgaaagggtgtgctgttttgtttaaaagtttatatgtttagttattggtcattggatttaaagaaatcttaagatttctttaaattgaagaaaagttaggtaaaatgattaacactaaaatgatgattaatgatgattaattgtttaactagtcccattttcccagttgcagaatcactacatactattctgaatgtaatgtttgattaaagagatgagtcaaactctcttgtttagtggtgtagttagagcaatcactattgactgcttatcacttctaggcagtcctacccatgaagaagaactgagagctcctcaattcagagcttccagtgggttttgtggacactaccttttcctttattcaaagccatttctaatataaatgcttatcatttattgtttacttatttatttactagacctcatgaattggattggtcataatccttcattcacaacacatcatcatcctcttagatgtaggaactttctttatatagtttgtgggttttctaatgtacttattatatagtttgtttctaatgtacttattatatagttggttttctaatgtacttattcttaattctataatcaacaacccccaaagcactatctaatccaagagctagaatattctaccaaaaatactttttcctaagcacttctcccaatcccacatccctgccatttctccaaaaataaccaatacctgaattttatatctatttcctcct

SEQ ID NO: 143831 - DNA, 723 bp, Homo sapiens
ctcctcatggtagtgtcctgatgacagtttctcatttcctctggctggcacctttggtttctattcattacttcttctcctcctagctttctgttcctcctcctctcctttgttaaaatcctggattttcaatcagctgagagtctcctgggggtaggaatggtggtgtcagcgcagagtgattcatctagctgataattagagctctggaaaacccagaactcatttttgtcagagtcagggcttccggaatccctaggctttttgttttgtcagagagtggagcttgctgggctggggccttctttatgcctgtcttttggtcacccacctcattgaagcccttcaactgagatgagtatgagtgctcgctgggtcttgcaaaaagctgtttctataactccgagtcctcacagtgatcccccaagcgttatccctgtttggacagaaggggaagattgggcaatttgcacatagtcacccagcttgtaagtgatgcagcagggattcaaagccaagttttttggaatccatcagacttgatttgaatcctagccctgccattattagctgtgtgtgtttgggcacattaatttccttctctgagcactggcttcctcagctgtaaacagcctcctacctaatactgtctcaagtgctccatgcagagtgtggcacaacggtgggagctgtcctgattactcttgttagtcagccctatca

SEQ ID NO: 143832 - DNA, 248 bp, Homo sapiens
cttaagagttgccagactaatggcttaaagggccttttctgattctgaaactagatgattccaatttctaagagtttgaccatgcttatttgagaaaagctgtatcacctctaggagaagaagctgttgctggttactttaggactaagagctaaaactcagcacaacagcattccccagacatgagaccccaaatctactctgcccctcttctccaagctttccttccaggtgggagcagcctgcat

SEQ ID NO: 143833 - DNA, 278 bp, Homo sapiens
ataacgggggaaggctatgcatgtgtaaggcaggggatatatgtgaactctgtaccttccgctcaattttgctgtgaacctaaaaaacaaaatctatttctttaaaaaatcttacttcacatgataggatgcaatgagaggacgcaatagtatcacttctgtgatgttcctgccaaagatgcataatctggatctaatcatgataaaacaccagacaaactaaaatggcaggtcatcctacagaatagctagcttggaactttcaaatgtgctaaggg

SEQ ID NO: 143834 - DNA, 418 bp, Homo sapiens
aacaaaagaaccaccaccaaccccggcttttgattgcggacccagcgaagtgacttcaaaggcaccacaaaactaacaagcgctccagggctgctcatcacctggtgcagcccagagtctcacccgcaggaaacaaactcttctttccttctgtccccacattcaacactcaacacagaatgctctgctcaccaaaacgggtggggatttcggcatcagaaaatcccatggcgccagggctcgccctggagactgccccacttgtgacctgtgctcctgaccaccgggtcaggatgctgatcctagcttgtgacctgtgctcctgaccacccggctaagctggggttcccacggtgccctccttgagtttgatcatttgctaggacggctcacagaactctgggaacaccgtctactg

SEQ ID NO: 143835 - DNA, 492 bp, Homo sapiens
acagaaaaagtagcataagaatgtgttcagaataagcactacaaatcagtgtctctcaaataaacgaagagatctttaagtcattcatagtaagagaaatgcacattgaattctcactgtgatgtcaaccactcattttgtggtatcccaacaagcaagataatcagacgttacatattttctatcagaagtatgcagcaccacatgtgaagtggtcctccaaaaaacaaaacaaaataaaacctaaaacccaaatctgattatgcctctagaatataaatacaagtttacacagtagacaggggatagaagaactgttaaaagacaccacccggatgcaatcagcaaaacctaaatggtgggatcctctccagaacaaataaactggtttcttccacatgcaacaaaatttagaaagaaaattaaagagaggcagatggtaaatctgaagactgaaagagattcaagaaacacataaaaatgacagataat

SEQ ID NO: 143836 - DNA, 195 bp, Homo sapiens
attagtacctcagtggtagtattgatatcagtattggaaagagacatgaagaaatatgtcagaaaccagtaacaacttaacatctcctttatctcaagagttctattcctagcacaaagatgcaaaatgttcaccattgtcatttccactatgaaaaatctgcctataatccctgcatgcggggggcgctgaagg

SEQ ID NO: 143837 - DNA, 327 bp, Homo sapiens
gtctgtttctgcggcatctctgcctggaaaagtcactttgcagagacaagctcagggggccaccaagggttgctcccttactcacatctctgggaagaataaaaatgacaaaaatgttaacaaggcagggaataaggcaggaaggtgagacactttccaacactgagtatatcaaaagaaggggaagaatggttttatgaatgagttcaggcaaatgtggaatatcatatataagttgcttcagaatgtgtaaagtgaaaaaaatcttgcccgagtcattttatgagattagtacaaccttgatgtcaaaatcagaaaaagtatagg

SEQ ID NO: 143838 - DNA, 333 bp, Homo sapiens
tgcctgtttctctctgccatccaaatcccacacacatctaggggtgaatcggtgaatctgcactgatgagtgactcgtcttgtgaatcctttctaggatctcagtatttcatcctatcccgagggaaggctctaaagagctcaaggaagacctcacgatgtctatgtgtgagaagaaacctttcaccccttcactatcacaccccatcatccaagcacacactcctctttcatcccataaaccccagtcgacagagacttgacagtcaaggacgttgtcaggaacgtactgtctaaagggtgtctcggcactcggttatattcctgagcgacg

SEQ ID NO: 143839 - DNA, 278 bp, Homo sapiens
tgcctgtttctctctgccatccaaatcccacacacatctaggggtgaatcggtgaatctgcactgatgagtgactcgtcttgtgaatcctttctaggatctcagtatttcatcctatcccgagggaaggctctaaagagctcaaggaagacctcacgatgtctatgtgtgagaagaaacctttcaccccttcactatcacaccccatcatccaagcacacactcctctttcatcccataaaccccagtcagtgtcacctggagtaataaggatggggc

SEQ ID NO: 143840 - DNA, 489 bp, Homo sapiens
caagctccgcctcctgggttcactccattctcctgtctctgcctcccgggtagctgggactacaggcgcccgccaccacgcctggctaattttttgtacttttagtagagatggggtttcaccatgttagccaggatggtctcgaactcctgacctcgtggtctgcccgcctcggcctcccaaagtgctgggattacaggcgtgagccaccgcgcccggtcttactggctctttctactcagcatgtaactatgcttgtctctcctataataaaatacctttctcagtcttgtgtcttcctcttattatcattaccttacttacttttagaagtaaagtcctcggtttttctattcttctttttttaacctacagaaatctaccttttctcattattcctctgaaataaacctgcctaggttatcactgtctacaagctttcccttgtaggaaagctcctccctgtagtatctcaccatgctgatcact

SEQ ID NO: 143841 - DNA, 371 bp, Homo sapiens
gcagttgtggttttggcacttgtgcgtgaaaatgcactttcctcagaactcaaaatatccacccaaccatggcctgcaccacatgggcatcagggtcacaaggaagcctgtctgtcttgatgtccccaaggtagtaaggaaaggcagagagcaggggtgagcaccgagggcatggtctctggtgtcagactcaggtttccatctggcccttacaccctgggcaagttagacgatcccaggcggcaaatggggacgccacccctactgacgtggctgctgtgcagatgagtaaggtcatgaatacacttacaggacacttcctggacaggaggtgatgacctcctggccccctgccagaaccacaaatatcg

SEQ ID NO: 143842 - DNA, 311 bp, Homo sapiens
gtgcaggtacagggaaccagaacaagggaggtatttatcaggaggggctggctagagtcagaaagagcctttcctccaacagacaatgctagctccaatctctctttgccatactctatagtacccctccaatttatttgaataatcaacagatcctatctagaaatctaaagattttaggagaacaatttttttcttttttgagacagtttctctgtatcgcaaggctggaatgcagtggcacgatctcagctcactgtaacctccacctcctgggttcaagtgattctcgtgcctcagcctcccgagta

SEQ ID NO: 143843 - DNA, 989 bp, Homo sapiens
  misc_feature (989)..(989): n is a, c, g, or t
gcagacttctgccaggctcagcacagcattttcgctgacaagtgagcttggaggttctatgtgccataattaacattgccttgaagactcctggacaccgagactggcctcagaaatagttggctttttttttttttaattgcaagcatatttcttttaatgactccagtaaaattaagcatcaagtaaacaagtggaaagtgacctacacttttaacttgtctcactagtgcctaaatgtagtaaaggctgcttaagttttgtatgtagttggattttttggagtccgaaggtatccatctgcagaaattgaggcccaaattgaatttggattcaagtggattctaaatactttgcttatcttgaagagagaagcttcataaggaataaacaagttgaatagagaaaacactgattgataataggcattttagtggtctttttaatgttttctgctgtgaaacatttcaagatttattgatttttttttttcactttccccatcacactcacacgcacgctcacactttttatttgccataatgaaccgtccagcccctgtggagatctcctatgagaacatgcgttttctgataactcacaaccctaccaatgctactctcaacaagttcacagaggatgggcatttgatgatggagttccaccccctaatcagattgttcatgattggttaaacctgattaaaacccaattttcgtgaaagccggtgctggtgtgcctgcttgtgttgccggatgggagaggccccgttctgctgccttgcttgtgaatggggatgaagtcaaattcgtcgttttagcaaacaaggggggctcattccaacgggttttggggaagcgctagagggaacgtcagaacagcgtgggtgcacagaggaaagggcgtgtcgcagaccgtccgagatgatcgcgagtgcccctctggacgactatttgagaggcagctctcgttcggctgatatgttattn

SEQ ID NO: 143844 - DNA, 139 bp, Homo sapiens
aaggtcccaccccatgttacaagctgttgtacagtccatacatgagaccttgagagcctgaatcaggatggtgacagtgaggaaaaaaaaggaagggttagataggagagagatttcaaaggaaacaaaatcggtagaa

SEQ ID NO: 143845 - DNA, 454 bp, Homo sapiens
tgcagaccccagattcatagaccccccccccaaaacttgtttcctcaatgtggaaaagtcacaggcactcatcaccagcccagcccatgagggcacccttggggcatataccctgcaaagccacaggtgccaagctgcccgaggccttgggagcccagccctcacacccctgtgtcctggatgtgggacagggtttcaaaaagggtgattttggagctgtaggattgaatgactggccttctgggtttggagtttcatggggccagtaagtcctatctgtgttttgtttttttttctggcaaaattcttccttttggctgggaatgcttacccaatgcctgtacaagcattgtaccttggaagtagttaacttgctttatatttcagaggctcatgggcctaagggactgtagccttgtgtcagatgagactttaggctttggacatttgtata

SEQ ID NO: 143846 - DNA, 403 bp, Homo sapiens
aagaagaagaagaaaaagaagctgaaaagtgtgtgcaagttgcagaagagagcacagcactgatggattaaaagtcaggggaggctgagttacgtaaattcagcttgctctggtgctggtctagcagccaaatcaccaatcaaccaaacatgctcaattttagtggctatctaataggcacaagagagaacatgattatcactaaagaaaaagcccctgttcaagacagctattcccaaaagactgtgcactcctaaatagtccctttagaaaaaaacactgacaaggacattaactttcaaagttcaacagatgaagaacccctcactttctatctcctttgttccctcctgtacaacattcctgaggcaaagaactgtgatgtcagtgtagctgacctagg

SEQ ID NO: 143847 - DNA, 600 bp, Homo sapiens
gtaacactggactatctgacatttccctaaactccctttctttctcttcctcctaccatatacatcatcttgctactcccttctccagaaattctgaatgtcctccagccttcaactgatgcccattcttcaaggatcactaaaacgccacctccttccaaaaaccgacctggactcttcccaaagtaactcttcctcctcctgcagaaatgaccacacacggtatgtgcacgtgggtacaaactgctcatcaaatgatcaaatgagtggctgagacagaccaaccgctcagcaccccaagcctcagtattctcctctgtaactgggatgaataatggcacctgcctcgtggcacgtggggtggccctgacgatcaaatcactactcacagaacgttctgcaaatgcatggaacacggcaaacaccctgccaaatgagaacatgcgtttccactctcctgctggggcggtagtgagcaacaggtgtgcactttgctttgattttaaatgtatttctctgtctctcaccttgtcactggattttaaatgcatttctctacctctcaccttgtcattgaactctgcaggctgtggaagttcg

SEQ ID NO: 143848 - DNA, 189 bp, Homo sapiens
aagtatattctcatatttatagatatattaaaacagcttctggattcaattcttagagtgaacaaagctttattttaagcaagaaaagagaagaaacatgcagccatagattaggattggaaattatacagtgacattttagtttagtggagacttttgggacatttttcttcatactcttgacaccca

SEQ ID NO: 143849 - DNA, 726 bp, Homo sapiens
agcgacccagatctaagaatcaaggtttttagagaaatggctgattctaacactaagcaggaaatatacaagatgcagcccgaagcatcttttggtgtctgccagagattaaagaaatcctcaaaaatcccagtcatggggtatgttgaaaaaacccaggagccaactgaaagagttcccaatggacaaagctgagataatttgagcaacaaaataaatacaaggctattgattataaaccaaagtataaaataaataaccatactgatataaatacatggttgaatacataaataaatggggaagaatagaaaagtagaaaaatatcttttgcaaaatatggaaccagcccaaaagtccatcaatcaatgagtggatagagccaacatggtatatatatacaccatggaatactactcaaccataaaaaggaacgaaataatgacattcacagcaacctggatggaattggagaccattattctaagtgaagtaactcaagaatggaaaaccaaatatcttacattctcactcatatgtaggagctaagctatgaggacacaaaagcataagaatgatacattgaacttttgggacttgggggaaagagttgggggtggcaagggataaaagactacacattggatacagtgtacactgctcaggtgatggtgcaccaaaatctcagaaatcaccactaaagaacttactcgtataaccaaacac

SEQ ID NO: 143850 - DNA, 236 bp, Homo sapiens
ctggaagctgctctgggtgagtcattaagtgagtggtaagtgaatgtgaaggcctgtgacattactggacattactgtagactttataaacactgtacacttaggctgctttaaatatatatttaaaaagtttttggggcaggcatggtggctcatgcctgaaatcccagcactttggatggctaaggtgggaggatctttgagaccaggagttcaagaccatcctgagcaacata

SEQ ID NO: 143851 - DNA, 288 bp, Homo sapiens
taacagtcaaaagttcttattccatataatatactaacaattaatgaaatgataggtgacaaaaagctgattcacaaaacataatgaagagtatgtgaagtacacaattcttatttatctttcccataatttactgtgtgaagctcagcccagtgaagtttttggcttgaaggcaatccatttggcaacgagaaacatgcaccatacttaatttcagtttacttttatcagctgtgtgaaatatttacaaagtatgagaaaagtgcttctaatcttacacaaataaaa

SEQ ID NO: 143852 - DNA, 350 bp, Homo sapiens
aacattggtcatttcaacactggttctgagggtggggaatctaggagtaacttagatagttggctctagctcagaatctctcattagagagcagttaacctgtcagcaggggccagagccatctgaaagcttgaccagggctggaggatctgctcccaagttgtgtcagtcctgtggctgttggcaggaggcctcagtttctcatcatggctcgagtgtcatcattacatgacagctggcttccatggagcaaatgatctaacacagagcaaggtgcaagcaggaagccacagtaccctttattacccactctctaaagctgcacaccattagtagtgagtcactagatc

SEQ ID NO: 143853 - DNA, 657 bp, Homo sapiens
tcttacacctcagtagtactgggtgtgtgttgccaagcttgtttgccttcaagacctgcagagcaagcctgcaggccgcccccttgccttgtggctagtatggaatgcctgggccgcagagcagctctgtttggatgttttaggaaggatggtaggtgggcttctattggttgctttgaaggtgggtggaaccttgttttgattgagagcctgtttgccagagcaaattataatttttgtgatctttttctgaagtctgacatattcagggaacagttgtgaattatgattgcaacaataacaccttaaaattgatttttttaaaaatgaaaggttatgtcacatcagtttttacttagtctcttgccttcaaaaggaagcagactcatcttccttttagagcttatggaaaattctttggcaattaaaaaaagtatgcattgacttttgtgttagaaattgaagtttaggtattttgtttatttttgtatctgttttagaatcggatagcattttttgcatatgtgtatgttgtcatgtgacttggaattctattctcttaaatggagtaaaaagagtagttggtgctgagaaggcagtcattgacaaggcctcatttcgtacccactgcttgatagccagacactagtttcttct

SEQ ID NO: 143854 - DNA, 632 bp, Homo sapiens
gaggaaaagtttggcaaatttgaagagctgaaagtagtttggtgtagctgaagcacagaatgatggagttgtatgtttgagtgggtgggaacaagttttgtacatggcgatcaaaggagaggagtgaggggcaagaggcttaggggcagaacaagaggccagaaaaataggaaccaaatcataaagagcctcttacggctagctaaggagtatgcatttatcctgtaggcaatgggaatccgttgaagaattttaagcaatgggttgacgtgctcaaatttgtattttagatcactgaatgagtggaagatgtattggaagaaggttaaaattggatggagggagccatttttagtctaaagcaagaatgtcagtgtcctgtttaatgtcactgaaatggtgccaaatgtaaggaaggaaggattagcttgttaatcatttatgttttaagagtgtacacttctgacgtataaactcagtgataatgaagtaatttcttagccaggtgtggtggctcacacctgtaatcccagcactttgggaggccaaggcaggaggatctcttgagcccaggagtttgcgaccagcctgggcaacaaagggagactccatctctacaaaaaatacaaaaa

SEQ ID NO: 143855 - DNA, 157 bp, Homo sapiens
ataggaatacttccttctagatatcagggcttgtctcagggcttactgtggacaccccggcttggataaggagaaaggaagaaagagagaggaaaaagggatgaagaagaaacaaaaccaatcaggagtcacttgttcccagcaactgcctctctag

SEQ ID NO: 143856 - DNA, 463 bp, Homo sapiens
ctcagatttccaggccaggtcactcattccttcctctcatctccctcttcctccatctaccttcctccattcaccttcctccattcctaatttcttttccctggtcttgctataatctccagctctaaaaatcagagctctcaatgaaaacaatggaagaataagacattctttcggtcttctgtttgcctcactggtgtatccttcatctcctgcccctgtgagttgataccccagtgcacggagccaagggcttttcccctctgagctctgggagggaagggaatggagctctgggtttgagatgtcatggcctgtgatagtcagtttggttcctgccactagcaagtcccctgaagctcccaacccagcctgatgttagcccagaagctcctgctctggccaaagactcctatccttgagggctctcagccactgctccaacacacttgcccccttcctg

SEQ ID NO: 143857 - DNA, 197 bp, Homo sapiens
caaaccactagacctccctataaatgcataagcactatgttccacctccatcatttcccaatattcccctgttgccagaaagctcttcacagccctgtaggacactggccttagattctacgttcagaaagcaatgtagacatcctgttctgcagcagtggagtataataacaaagctgaagcagggtatacagaag

SEQ ID NO: 143858 - DNA, 224 bp, Homo sapiens
aagagggcaaacattagctggataaagggaaccaggatgccagtgccagttccacaaccaccatattgttcttcacaacagctttgggcagaggtgaggcaaaggagagaatgattgcaaggctggctttggagacaggtgtgggtttgtgtccctgccttccaaaacctccctggatgactccaggaagattactacacctcaagatctcagttcgctcacac

SEQ ID NO: 143859 - DNA, 207 bp, Homo sapiens
ctcattttgctgttttatgtatatttgttttgagagacgggagattgttttgtagaaaagaatggtatttgagaccgggcacggtggctcacgcctgtaatcccagcactttgggaggccaagacgggcggatcacgagatcaggggagaccagcctggccaacatggtgaaaccccgtctctactaaagatacaaatattagccag

SEQ ID NO: 143860 - DNA, 547 bp, Homo sapiens
ataccccactgccggtcttgttgaagctgtcttgtttctcaatcaccacactccctctgcggtggcgacagagaagccaggaggcccagggttaataggggcccccctcctctttcttcctccagtgatgtctggccgactttctccccactggggattagtccttctcctcacagtgggatgaaaggttcaacagcctgtttctcgggaggcgcttctggaaaactggctgtattaattctctattgctgccctaagaaattaccacaaactcagtggcttaaaacaacacaaattactatctgacaatgtctggagttcagaaatccaggatcgatcttagtggactgaaatcaaagggtgagtggtctgcgttccttctgaaagccctggggagaatacttctcttgaccattcaaagttgtgaaaggattccgttccttgaggtagaggacccaggcccccgttttcctgctggctacaaactgagggccattcccagtcactagaggctgccgatcagaactgccttcctccatcctcagtg

SEQ ID NO: 143861 - DNA, 354 bp, Homo sapiens
  misc_feature (16)..(16): n is a, c, g, or t
ggatttgctggtgcantacaactaggcttaatagggaagcattttctgcctggttgcgaggtggctgccacacctccaagcatcatatctgagttcacagtgggaagaagggagaaggataaagaacaatggcctggtctttgtgacaggagttcaacctttatcttatggccagtggggacctgttgaagggtctgaggtaggacagagatgataacaaggatggctaacatatattgagcaactaactctgcaccagagaatattctaagtgcacacttatacatatcacctcaactaatccatagagcaacctagatacagaaactatcattatccctagttacaaataaa

SEQ ID NO: 143862 - DNA, 553 bp, Homo sapiens
acaggtagagttgatatgttacacaaacggctttaataaaaagtttaatttccattgcagggatggaaagcatagctagagactcatccaggtatcaggcaattaagagtttggataatgagaattatccaaaggaaaaatgaacatacaaaagatgtcccaaaggagaatggaagagtaagggactgatcagtccctacagggtaaatcaaataggaggtttcaaagacaaggggctttgaaaaatagtagataggatacactgacataaaaaagcaagccagaaaacaagagaagttggagaattccattttcaatgtatgggatgttttggtgatgaagggacaaccatttggaagagaaatggtgatcctctgcacagataggacagtaaaattggcagagtggaggaaacccctacaaaaaagaggggataaataaaaccttaaagataaccactacttagtggagtcaggaagaggaagaaaggttagttttaaaaaaaaaaagagagggacagcatgcgcatccaagacttaagggctgtaccaag

SEQ ID NO: 143863 - DNA, 233 bp, Homo sapiens
ctgtgctgcactttttatttcactggcatggttgtttgtgtatgacccagatgagcatcagcatttgctgtgaaaggatggctaggaaccaaggatgttgaagacagtctgaagttgtcactgcttatgtttcgtctctgcaactggctggttggttggtccatcagccggtcaacttgtattcttgcttcattctttcattgttttcatggtcatggatgttcccaatttct

SEQ ID NO: 143864 - DNA, 553 bp, Homo sapiens
ttatatcttaacaacaccaggccaaatttttcttattgatgatacatatacatagtgaagtagatttttaaaattgtatttgaatatgtcattctgaaccatactatgacaaaataatcacttcccaccccactgaagaaatgagaagcctttttctggcttgtctagatcatttaataagtttgtagatgcactcaaagttcagaaagaaagctaacataaaggggcaatgaaattaaccatgtcaagtttaatatgtgaattaattctttattactagcacttagaaggcatggatacctacaaagaaaaaaaattgttaggtcaaaaataggacatactgtttcttataagaccggaggagtgtagaaagcctctcctgcttatgcaagatctgcaggcttccttcctcttttcctcccaaattccatgatcttgcctaatgaagattaacttaactacctaattaactttcacaggatttttgtggggtagataatagttcttgtttttagtagtccagatgaaaagaataagctgggcctctgacatt

SEQ ID NO: 143865 - DNA, 314 bp, Homo sapiens
cagtgatttaccagggcctattggttctactgttgactcttgcaactgtctttttctttttgttaccacggctgcaaagctaggtcagactttgttgcctggagagatactatggtggttttgctgtgaggggtctctgcttctaactggcaggtggatgtttcctaggcatctgaaatactactttgcatatgatgtctcctcagccccagctcctgaagaacagtcctactcaacccttgcaggttccccttgagcttaaacagtgatgtccaattcttgcccccgatattcagattctcgtacacgactta

SEQ ID NO: 143866 - DNA, 390 bp, Homo sapiens
caaataaactcatttcccagtcttcctgcaaatcttagggtactgatattgagcattcctaatccaaaaatcctaaatccgaaatggtccaaaatccaaaacgttttgagtgctgacacgatgctcaaaggtcatgcttaaaagaaatgctcattggagcatttcaggttcctggattagagatgctcaagcagtaaactgtgaatatttcaacactcaaaatctgaaacacttctgttcccaagcattttggataagggatactgaacctgtatctgaattatctagtatctgtcctatcaatgaacccacattagaaaaagaagaaagaggaaagaaccaagcactttatacatttattcaatttatttgaaaataatgataaccacc

SEQ ID NO: 143867 - DNA, 256 bp, Homo sapiens
gatcttggacaactgaccctgtcacttggtatctcaatttcctcacatgtgaaatgggaattagaaaattcaaccaagaaaggaggaaacaaaaattcaaggaggtaatgcacaaggaaatgcctagaagagtacccaattcatgaaaaaccttcgagatgcagaattctgttttaagttagttcatggattgaaagaaaactgcctttagttcccagtgcctgttgggttcccgttccaccacccaaacttggtt

SEQ ID NO: 143868 - DNA, 543 bp, Homo sapiens
tgagactattttgtggttcaatttctactttcatttgggccaaaaaaggcctggggtgacaaatcatctctgagtcggatgtatggctatgataccactataatagtgtgattttttttccatttcatatctacctcccaaagatattcctgtagattcagtcttacacacttaatttgacttggaattgtcttaaggatgcttttgaattgtatttctagtgccaccaatgaatttcatttacttcaataatctagagttaatgttttaatctcactgtaatgttaatgaaatagctaccatgttttatgcagatgcttgttttatttaaccaatcaaatcagagtcaccttaatgtttatcttttatttttttactgagtagaaaaagaattatttaaaaataaatgtgagcacaggttgtcatactttgaatatcaagatgaaaataatgaagcctgcatatgaattaggcataagctttttgtcttttatccactaaaaagcactataaatcctcctatcatatttctgtgactaccta

SEQ ID NO: 143869 - DNA, 441 bp, Homo sapiens
gaaaagctagtcttttcaacaagtagtactgggacaagtggatattcggattaaaaaaaataaatttagatcattacctcagaccacacacgaagtttagctcaaaatggaccatagacataatgtaccaggtaaaactataaatcttctacaataaaagataggagaaagttctcatgttcttggtgtgggcaaagagttcttagacataaccataacagctagggccatgagaaaaatgataaatttaacctcattaaaattaaaaacttttgtacttcaaaagacactattaagaaaataaaaagacaagtcacaagctggacaaaaaattgcatattatatatctggtaaaggtcttctatccagaatagaaaaaaaaaactcttacaactcgattataaaaaaaaacccaattaaaaagagacagaaaacactcac

SEQ ID NO: 143870 - DNA, 750 bp, Homo sapiens
agcataacttctctttgaggtgactttgaactttctggctctgctgtctgcagcagatctcctgtgtggctgcctgttggaagcttcctctggagttctctaatcatggtactcacaatctctaaaatgagctgtctacactcattaagaatgttgaaattgcagacttgtctcgggctttggtaatcccataactgtttcctgccctgatcagaattagctaggtgcaaagggaagcagattttgcccctttggcagaaagtctgattctttctgattcttctctccttcccttggctctttagaaactataagtggaaccttttttctgggaaccaaatgctagaaggcaggtttttttttttttttttgattgacaaacatataaagaaaaaacatactttgaacagataaactggtttaagttgttctccatgggaggcagtggagaaggtttgtgacagaccctgtgagccttcatttatggctgccacggattacacacatagacaccatctaaggaaagtggggttgcctgggagaggattgcctcagccttcttccaaggagcacactcctgggcatgttgtttcagttgtaaatgacatctcacaattcacaaatcctttgccagctgtaagaactctatacagctgttggactgtagctttattttcattatgtcttggtatttctgtgggagggcagaggaggatgagcagattactcattttaacagaactggaagct

SEQ ID NO: 143871 - DNA, 109 bp, Homo sapiens
agacactattgtgggaggaagcttctaaaatggctcccaatgacctcagcttcctggtctatatgccttatgtgaatccactccccttagatgtgggtagacacctata

SEQ ID NO: 143872 - DNA, 163 bp, Homo sapiens
gcctattttgttaatcagaatgtactttatttacttcttttctttggcctattgaatccaaatcgttaccatggtctgtggattcttcttctacaatatcctttggctctttcccttcttatttattcccacagctatcacaatagttaagttcctgcaaatg

SEQ ID NO: 143873 - DNA, 498 bp, Homo sapiens
  misc_feature (2)..(2): n is a, c, g, or t
  misc_feature (469)..(469): n is a, c, g, or t
  misc_feature (498)..(498): n is a, c, g, or t
angcgggaccccagcaagccggtgctgagggagctgcctctctgatggacttgctggcacctggctttgagaactggactggccctgtgtgaggatgtggctggaccttccgcttgattcaagcgcttgcttctgtgatgggagctgagctgagaggtgagagcaagtgtggcttctcattaatgtggatcctcactgaagctcaccagctgcccagcctggggtggagggttgaggggctcccagagggagggaccccagcaagccggtgctgagggagctgcctctctgatggacttgctggcacctggctttgagaactggactgccctgtgtgaggatgtggctggaccttccctgggttgtttgcacagtgcagggcttgtttctggtcaagagctggctgggtgcatgggctgcatgggctgcacatgcttgcctcttggccttctcctcctcctctgcctgnggtagctgttgcttcagtcactctggctn

SEQ ID NO: 143874 - DNA, 484 bp, Homo sapiens
gaagtcagcatatgtttccttaaacagctaacggtcatcttttcagctttatggatcttacagttgccatggcaccaactcagccctgccgagttgaagcagctgtagacgatgctttaaagaacaggacacgtgcggtggctcacacctgtaatcccagcactttgggaggccaaaacgggaggattccctgaggccaagagtttgaaaccagcctcccaaagttttaggattacaggtgtgagccgctgcgccaagccccaatgtcttaatttttttcttcttttttttgtctccttttggagatagggtctcgccctgtcgcccaggttggagtgccgtgttgcgcccttcggtttcacccaaaacctatgcttcctgggtcacaaggcgatctccttgcctcaggctcccaagtagcttggacctacagatacgtgccaaccaatggcccaagaataatttaatggggatcctcatagag

SEQ ID NO: 143875 - DNA, 282 bp, Homo sapiens
ccatccacctgagaaataacatatacatgtaagcttaattcaaatattcaggttttgtgatcctcaaacgtgaatgatcagaatcacctagggagctttttgaaaaaattaaatcccccctctacatcagtttctacagggaagtctgggaattcatgtcttaaaaaaaaaaaaaaaccctcataggctgggcatggtggctcacacctgtaatcccagcactttgggaggctgaggcaggcagatcacctgaggtcaggagtttgagaccagcctggccaa

SEQ ID NO: 143876 - DNA, 414 bp, Homo sapiens
gggttgggccctttaggagagcatttgtgtccctgccctggagtctcctcttcctgctgtgtgcccttgctcggggttgttccaggaagcctctggtgtggggggctctgttgccaccagctgatttcctgccccaggtgcgtgggtgggggaggagagggttgaagattacctggagaaatcgcccgctttgcttccgtttcacccctcttctagggaggacagcagagtgcacagaggttctcttctaatcctctcacccccaacctggtcctccacaaccaggctagagcgtatctatgtatctggggaagccagggcttggggaggagtggactgacccgtgttctgtgaaggtcaaggagggcccacttcgatgaggatgagtttggcagggagcgtggtcctgctcgc

SEQ ID NO: 143877 - DNA, 665 bp, Homo sapiens
atagcttatttatgttcatgataccgtagggtacaactgtcattagattagttaggatgtcagagagattccagacacatctgttttgcatttgattgtagatcttccaggtcattgtaaatataatatagtcattgtaaatataatatagtcattgttctgatgcttgttactctttgatttgatctggaaaaggtaagattcttgagtctttcagtcttcatgaatttaagagtatcacattatagcttggtggagtccttgtcaactcagttgggcgagacggatagcattctgccctgtgagagcttattagttcctggctgtccagatgtgccagcttatggctattttgtactctgcagcagagagtgtcttctctgttatatatcttaggttgtggcagtgaattcctaaaaatgcactggggagatgaatgcaggctgataattatggacggtccatagcattcctgcaaagcgatatttgaataatgggcagtggatggcagctacaaggtaaaataaggtgccccaacgtagaagacctgtcatcacattgcatgactgggatggatctatccttggcttatcttgtgtgctctgagtcaaaaagagcaaagtaggacatagggacccttagcaccttcggggtgtcctgctgtg

SEQ ID NO: 143878 - DNA, 240 bp, Homo sapiens
aaagagatcttttcagcatttcctatttcccagggaaggaggagagagtgatcaagaagagctacattcacaagagaataaggtcagcctcccctttgagactggccacttaggatgaaaaatcctgctggatgaaaaacattagaggaaaagctgctacgaaatgctcctagggcaagggccaggagatgggaatagtgggtttagccagtggtgaggcatggtaggaagctgatttgg

SEQ ID NO: 143879 - DNA, 274 bp, Homo sapiens
cattttcacttttctgtccaatttcagagtgcatgtgtttgtgagtatttcactagatcagtgacagctctttatttgcataattatatgctctggtctgaagagaaaactaacccccaaatttcatgggtcaccaaactgcaacaatcaatgttttatcacgtatgctaagcaaaatctaagaagctatatgaagtttcttggggagtttttactcctcagaaaattaaagagttttctctcctgaatagattcaaaatctttccaagttctt

SEQ ID NO: 143880 - DNA, 384 bp, Homo sapiens
caaagtcctgggtaagtagaggccctggagacccgtccgcatcctctggcagtggccttggaaccaccgaagggattcagccgaagggccgcgttcccggcaggcgtctttattgtgttgattacgtagatggcgtagatgacgtagatgacgttcagcaccacaaacgaagagccgaggcacagagtggggccttggattcatgagatggggatggagcagaaatgagaattcggagtccatgaaacccccacaaagactcctgcacggcccgactcggacactttgcaatctgctggttgagggggatggtgtgaactcagggaacagcctgagatcgcgccgctgcactccagcctgggcaacagagcaagaccctgtttc

SEQ ID NO: 143881 - DNA, 478 bp, Homo sapiens
gggtatcaccgtattagccaggatggtctcgatctcctgaccttgtgatctgcccgccttggcctcccaaagtgctgggattacaggcgtgagccactgtgcctggccccagatttcttattgtattgtgcagttcaacctccaggccagtaggtgaagcttatggataaagttcagctgcagctgactcaaatggatatatacttgattcttgtttactgggagaagttctgctgacttgggcaatgggctgatctgtgaaatgcacagtggtctgagctccctgcttagttctggagtgggggccaagatgggtgggctagactaagcaagctctcctacagttctcccaatggcaggcagaagcattagctctgaggcagggtctggtgggcagctgccaagtgcctggagatgtgcctaggcatagagtctggaaacctccactgtcccaagttctctgcacaggaagtggggg

SEQ ID NO: 143882 - DNA, 441 bp, Homo sapiens
gtgtcatgatcagaaaaagttatttaacatcgacttttactgctttaataacattttcttttctgtagcttactttattgtaagaatacggtatataacatataaaacatacaaaatatatgttgatcaactgtcaggcttccagacgacagtgggctattcgtcacattttgggagagttgaaagttacacaaggatctttgatgcagtctgtgtccctgacaaccgagccctcccttgttgtttgaggatcaactggatattgttagcgtcttttaaattttctatttacccagtcacctgtaatctcttgtcttgcttaccatttttatttctagtgtttagcatagagcccagcacatagcaataacatagtaaattgaaaaataaatgattgaatcttgtcataaggtaaaatcagttccttcatcttcactatag

SEQ ID NO: 143883 - DNA, 188 bp, Homo sapiens
acacgatgcacacacagacacacggaaagacatccacacagacaccaggcaaaacacagagacacacagacacgcacatgcgcacacaccctttgccgcatctctgccttcctgccttgcctcatgccggcagcgcatcagagcccctggtcctacccttccacgctggcctgtcgtgtcctcccttg

SEQ ID NO: 143884 - DNA, 361 bp, Homo sapiens
  misc_feature (11)..(11): n is a, c, g, or t
tagaggatctntacctaaatggctgtacagacataatagtaacaacacaggcacccagtagtaaccaaaatttggcatcatacttcgtgaggaaattgcaattgactagtatggcatggcccaccagttgaaaaccatggtcttaaaatatttttctaggtgctcattttgtagcctgagtcctgtcatttctgttctcctagagcttcttgttctgtgttttatttttcaaattctctattatcttcatgattctacattgtttccgtgtcccacggtaggcagaattttacttaggttccccagcctcttgtaaaagttccccgggtctattttcccagctgtgaaaaatcaattccag

SEQ ID NO: 143885 - DNA, 406 bp, Homo sapiens
gtcccctgaccagcagcattagcaacacctgggagtttgttagaaatggaaattctcaagtgtctcctggaaaaagctactgaatcagagtagtttggtgggaccaaagaatctgtattttagcaagcagcatagatactttctatgggccagggacagtggcccaggcctgtaatcccagcacttagggaggcctaggtgggtggtgggagttctaggtgggcagatcccaggagttcctgggtgatgtggggaaacctgtgtctacagaaaattagtcccaactactcaggaggctgaagtgggaggatcgcggagcccggcgaggttgaggctgcagtgagccaagatcatgccactgcactccagcctgtgtgacagtgtgagaccctgtctcaaaaaaaaa

SEQ ID NO: 143886 - DNA, 361 bp, Homo sapiens
atgcaaaggaagccctgtggtaaagagagagttagtatgaataaacatggaaacaagtccaaaaaagctggagtaagaagtgtcttggtggaaatggataaaagtgggaattaaaaggtgtgcaggggccagatcttttaaatgctctggttcaaccttacctttagaaacattctgttatacccattgagcaaaataaagcatcctttcttctttgtttcttgaaaacatgacttctactttgaatgacatttggttgtttctgtaatttaccttcattggctctattaatttaactcaaattaaaaccccatctctactaaaaatacaaaaaattagctgggcgtggtggcaggcgcct

SEQ ID NO: 143887 - DNA, 481 bp, Homo sapiens
ggaaagaaaactaatctggaaataaagagatccatgacctcaagcctaacctcttgaaacctagattatttttatcttcaagaagtcctgttgcccaccctgcttatcttataattttgtttgagagtcaaaagagagaagagaagtgtgagccctgaattgctgtagaaagtgagaacttactatgaagggggttgtataaagtctcattagaggcagccttgctagtcttacttaacctttgcagtactaaagttgatgttctctgaactctctcttaggctctctcctcacattgggcagtcctcccaggcaatctcattttctcccataggtttcattagcatctgcatctgaatgaccaccacatatttctccagctcaggcttctctctgagcactgccttctagacctcttctcttggatgactcacagacacctcatactcaacatgttctaaactcacctctttgccccaaa

SEQ ID NO: 143888 - DNA, 801 bp, Homo sapiens
ctttgggggtgtggaagctgtttccttgtaggaggtttattctcgtctatctgactctgagctgcccaaagtgaagtctttgcctctgttcactaagacccccaagcccagagcacagtgagcccaaggggacagcgtgtctgcacctgttccaggcgactgccaactggcaagctaaaaccgggagttgctgacactggcactgctgccagcccccaccggcattgtggtgcgtgatccatcctgtcctcagggccatgggggccatcggggaggcggggtctctgcatggaagtggggtgtagctgggctctgctcagtccccgaggctgtgctcggagcgtgctagctgtcggccacaagaaccgagcccaccctctccagtcctgcgtctgcctcaggcccggcccgggcgctgtggtctgagtctccggtcccacgtctgcctcaggcccggccccgggcgctgtggcttcaagtctccttgggctgacctgatgcccctgggtctctgggttcactcccaagatgcatccccctggggtccctgtggcttctcagaagaagcgtcggcggcggggggatgatcatctgaaggggcctcccttgcacttgcctggccgtcgggtggaatgctgggtgggaagtggctccaccttgggatgcttgttggtgccggtgacccccggacgctccagcatgcagccccaggctatggcatctgctcctgctcagctccgggagcatttcccgtctcctcatcgtttctcctgtccttccctgagtgcctcaaattcctgt

SEQ ID NO: 143889 - DNA, 407 bp, Homo sapiens
ggggattaaatgtaccatatcaatatctagtatagtatttgacatatattgtgtaccaaataagtgtagcttgtatttagagcttcttattgaaaacatgtaattatcccatgtctacctctttgggtactcttgcagtcaaaacctttgagctattttgccccattcttttcttccttcccagtgtttactggggccacattttatccattttgggttttggaattgttctctagggtcttttctagttataacgtttcatgagtctatggaaatgtcaacccaagtcatcttttccttttagtttctattgcctcttgtccagttcctcaatacctcaccttagaaatgatttgtaatgaaggtaatagttgctaacatttgttgaagaaattattatagtccaa

SEQ ID NO: 143890 - DNA, 925 bp, Homo sapiens
gggggtaggtggggagagataggagggcccagggactcatgggacacctttcccacagcctcctcgattgctgtgagcagaggccactcggagttaggggcatgggcaatagcaagctggcggcagagtccagcccagcatatgacttgccctgaatggaagctgctgaaacgggtgcctttgggtggtggtcggcttgcctctgaggccaccacggcaccagcagaatacgtatttcttctccttggctgcactggtttgtcgatctagttcagttcaactcagtggatgttctctgaatgcttactgggtgccaggaccacagagagatgttagtcactgcccagttcttagagccccaacacagataccctcatcccagggcccccagacacacccctccgctggactcacaactgtctggagtttctgtctgatggatggtgtgctttcatatgccactggcttccttggacatagatcagacaaaagccccgggatctgtttggtagcaggagaaatgaaggaagatgaaaaagcaggcagggaagggggtagtaaaggactgagagaggagggaggtggctggagaaggaaaaggaacattgctcgatgctcccatctggtggcggcctcaggaacccacgggaacctggaaggaggctctttgtgagacctgggcaaaggatggggcagctcgtcgatgatttttttgtgtttccaggcttcctgtgtgatcctggccctccggccgctagagagaggattgggaaaccccactgtcagctctgcatctgcccccactaccctcctctgccctattctgtccctgcccctccaagctgaagaaggtccttgtggggcgtcctcatttcttcctcaaatataaggaggaagataccaattaaaagctcatagtatcaac

SEQ ID NO: 143891 - DNA, 254 bp, Homo sapiens
gataattgaaacatgagggctgtttctaccttactgttctcataatagtgagggagttctcatgagatctgctggttttataaggggcttctctgttcacttggtgctcattctctctcctgctaccttgtgaagaggtgccttcttccataattgtaaatttcctcaggcctctccagccatgctgggttgtgagtgaattaaatctctttcctttataaattactcagtttggggtatgtctttattagcag

SEQ ID NO: 143892 - DNA, 295 bp, Homo sapiens
aatatttctcacctgaaccactgcaccgtctctcaggtgtctcccttcttctctacatctcagatccccttctccataatggccagcacaatcccactgaaactccatttggttgcttacttctccattaaagggtaaaccctttaatcgctgttcctctctttctcactcaaccacaaattctcacatgccatatagaacccagcctctgagaatctggccccagccatctcttcctctaaaccctacagtcccttcttggaatgtctctcttgttttcaccggctagcacgtt

SEQ ID NO: 143893 - DNA, 473 bp, Homo sapiens
ttcatcctcctctgtcctaaagcgtacttctttggaaaagtagagcagtttatgttagtgtacactagagatggtaaactatgccttgtgggtcaaatcgggcctgctgcctgtgtttgtatggcctgtgagcaaagaaaggtttttacatatttaaatggttggaaaaaatatttaaagaatgctatttttggacacaaaaaattgtatgaaattaaaatttcaatgtctgtatctttttattgggacacagccaccgccattcctttagcttttgtatgcaacagctgcagagttgactatttgagacacgttgtatggtccccccaaactggaactgtttccattctggccttctacagaaagtatttggaccctggcctagataaatcctggctggtggttatgttatgtgaaatgtgcacactgtaaaatataggcctgtatgattaaaatttttgatttcagctact

SEQ ID NO: 143894 - DNA, 477 bp, Homo sapiens
caccccttccgggggacaggcaaacctagtgcgcaacggcatccctgtgacgtaatagtaacggagacgttcggagcccaggacatgtcgggaatgaggagatacgaggtggcgctggaggcggaggaggagatctactggggctgtttctactttttcccctggcttcgcatgtggcggagggagcggaggtgaggaggctgcgataccgcggacccgccccgggcatggacgggactcagtctctgaggacccatcggggggaatccggtagctcccgccccgcctcatgccagtgtcgggtcgccccacagctcggcgcaccccggggagcagaagctggagcctctgcgaggcctgatgagctgtctgtccagcggcctgggtcctactccccagcgctcgggtcgtggcttcccccgccgcagccccaccgccgctgcccagccagccagtgcattaaagatttaaaccgaa

SEQ ID NO: 143895 - DNA, 345 bp, Homo sapiens
ggagccgcttttagaggcggggcggagccttcctcgacggcgaggcaccgcggggcggagtctgtagggtcagctcctccccgccccgccccgccccgcccggctctgccctctctctgcaggatctactggggctgtttctactttttcccctggcttcgcatgtggcggagggagcggagctcggcgcaccccggggagcagaagctggagcctctgcgaggcctgatgagctgtctgtccagcggcctgggtcctactccccagcgctcgggtcgtggcttcccccgccgcagccccaccgccgctgcccagccagccagtgcattaaagatttaaaccgaa

SEQ ID NO: 143896 - DNA, 755 bp, Homo sapiens
caccccttccgggggacaggcaaacctagtgcgcaacggcatccctgtgacgtaatagtaacggtccgtttccggggtggagccaggagggcgggagtttaggctgcgctgacccctctcagccccccctccaggtgaccccagcccctgaaaatcctcacccagggccccaaatctcccagccccatgaccgccaaacctctcgccctggccccctaaatgccccaggccccggagatgaccggcctcctcaccccttaacttccagtgcctcccaaatctccaagcccaccctgtcccgtggtggcaactgaggcttctcgggggcatcagcctcagattacctgagaactgggcagcctcgtcctgagaatgacggagaaggggacctggggctagggaatccctgattcaatcatgccgctccccaggagacgttcggagcccaggacatgtcgggaatgaggagatacgaggtggcgctggaggcggaggaggagatctactggggctgtttctactttttcccctggcttcgcatgtggcggagggagcggagctcggcgcaccccggggagcagaagctggagcctctgcgaggcctgatgagctgtctgtccagcggcctgggtcctactccccagcgctcgggtcgtggcttcccccgccgcagccccaccgccgctgcccagccagccagtgcattaaagatttaaaccgaaaaagaatggaaatcctcccaaggggtgaaccga

SEQ ID NO: 143897 - DNA, 425 bp, Homo sapiens
caccccttccgggggacaggcaaacctagtgcgcaacggcatccctgtgacgtaatagtaacggtccgtttccggggtggagccaggagggcgggagtttaggctgcgctgacccctctcagccccccctccaggagacgttcggagcccaggacatgtcgggaatgaggagatacgaggtggcgctggaggcggaggaggagatctactggggctgtttctactttttcccctggcttcgcatgtggcggagggagcggagctcggcgcaccccggggagcagaagctggagcctctgcgaggcctgatgagctgtctgtccagcggcctgggtcctactccccagcgctcgggtcgtggcttcccccgccgcagccccaccgccgctgcccagccagccagtgcattaaagatttaaaccgaa

SEQ ID NO: 143898 - DNA, 1210 bp, Homo sapiens
caccccttccgggggacaggcaaacctagtgcgcaacggcatccctgtgacgtaatagtaacggtccgtttccggggtggagccaggagggcgggagtttaggctgcgctgacccctctcagccccccctccaggtgaccccagcccctgaaaatcctcacccagggccccaaatctcccagccccatgaccgccaaacctctcgccctggccccctaaatgccccaggccccggagatgaccggcctcctcaccccttaacttccagtgcctcccaaatctccaagcccaccctgtcccgtggtggcaactgaggcttctcgggggcatcagcctcagattacctgagaactgggcagcctcgtcctgagaatgacggagaaggggacctggggctagggaatccctgattcaatcatgccgctccccaggagacgttcggagcccaggacatgtcgggaatgaggagatacgaggtggcgctggaggcggaggaggagatctactggggctgtttctactttttcccctggcttcgcatgtggcggagggagcggaggtgaggaggctgcgataccgcggacccgccccgggcatggacgggactcagtctctgaggacccatcggggggaatccggtagctcccgccccgcctcatgccagtgtcgggtcgccccacagctcggcgcaccccggggagcagaagctggagcctctgcgaggcctgatgagctgtctgtccagcggcctgggtcctactccccagcgctcgggtcgtggcttcccccgccgcagccccaccgccgctgcccagccagccagtgcattaaagatttaaaccgaagcccaccgtactgacctcctgactctgccgccgctgtcgccattcgagccgagcgcccctccccacacgggctctgttccgtactgacagggcgtccctccctggaagggtgcccttccacgtcaaagcccctcatcagtgtcaggcctcctgttactatcaatggctgtctcccccaatcccaacccccaaaaacccatactgtgagtcgcctatatgaagagaactaaataatcctgcctgttactcccttcctcggagcgaggactttgccagctgtctgaagaatcttctctgctgggagtatatctaaaaacattttaagcagaggtgtaggatgcaggctgtaaatggtaagaggggga

SEQ ID NO: 143899 - DNA, 790 bp, Homo sapiens
caccccttccgggggacaggcaaacctagtgcgcaacggcatccctgtgacgtaatagtaacggtccgtttccggggtggagccaggagggcgggagtttaggctgcgctgacccctctcagccccccctccaggagacgttcggagcccaggacatgtcgggaatgaggagatacgaggtggcgctggaggcggaggaggagatctactggggctgtttctactttttcccctggcttcgcatgtggcggagggagcggagctcggcgcaccccggggagcagaagctggagcctctgcgaggcctgatgagctgtctgtccagcggcctgggtcctactccccagcgctcgggtcgtggcttcccccgccgcagccccaccgccgctgcccagccagccagtgcattaaagatttaaaccgaagcccaccgtactgacctcctgactctgccgccgctgtcgccattcgagccgagcgcccctccccacacgggctctgttccgtactgacagggcgtccctccctggaagggtgcccttccacgtcaaagcccctcatcagtgtcaggcctcctgttactatcaatggctgtctcccccaatcccaacccccaaaaacccatactgtgagtcgcctatatgaagagaactaaataatcctgcctgttactcccttcctcggagcgaggactttgccagctgtctgaagaatcttctctgctgggagtatatctaaaaacattttaagcagaggtgtaggatgcaggctgtaaatggtaagaggggga

SEQ ID NO: 143900 - DNA, 722 bp, Homo sapiens
caccccttccgggggacaggcaaacctagtgcgcaacggcatccctgtgacgtaatagtaacggtccgtttccggggtggagccaggagggcgggagtttaggctgcgctgacccctctcagccccccctccaggtgaccccagcccctgaaaatcctcacccagggccccaaatctcccagccccatgaccgccaaacctctcgccctggccccctaaatgccccaggccccggagatgaccggcctcctcaccccttaacttccagtgcctcccaaatctccaagcccaccctgtcccgtggtggcaactgaggcttctcgggggcatcagcctcagattacctgagaactgggcagcctcgtcctgagaatgacggagaaggggacctggggctagggaatccctgattcaatcatgccgctccccaggagacgttcggagcccaggacatgtcgggaatgaggagatacgaggtggcgctggaggcggaggaggagatctactggggctgtttctactttttcccctggcttcgcatgtggcggagggagcggagctcggcgcaccccggggagcagaagctggagcctctgcgaggcctgatgagctgtctgtccagcggcctgggtcctactccccagcgctcgggtcgtggcttcccccgccgcagccccaccgccgctgcccagccagccagtgcattaaagatttaaaccgaa

SEQ ID NO: 143901 - DNA, 1087 bp, Homo sapiens
caccccttccgggggacaggcaaacctagtgcgcaacggcatccctgtgacgtaatagtaacggtccgtttccggggtggagccaggagggcgggagtttaggctgcgctgacccctctcagccccccctccaggtgaccccagcccctgaaaatcctcacccagggccccaaatctcccagccccatgaccgccaaacctctcgccctggccccctaaatgccccaggccccggagatgaccggcctcctcaccccttaacttccagtgcctcccaaatctccaagcccaccctgtcccgtggtggcaactgaggcttctcgggggcatcagcctcagattacctgagaactgggcagcctcgtcctgagaatgacggagaaggggacctggggctagggaatccctgattcaatcatgccgctccccaggagacgttcggagcccaggacatgtcgggaatgaggagatacgaggtggcgctggaggcggaggaggagatctactggggctgtttctactttttcccctggcttcgcatgtggcggagggagcggagctcggcgcaccccggggagcagaagctggagcctctgcgaggcctgatgagctgtctgtccagcggcctgggtcctactccccagcgctcgggtcgtggcttcccccgccgcagccccaccgccgctgcccagccagccagtgcattaaagatttaaaccgaagcccaccgtactgacctcctgactctgccgccgctgtcgccattcgagccgagcgcccctccccacacgggctctgttccgtactgacagggcgtccctccctggaagggtgcccttccacgtcaaagcccctcatcagtgtcaggcctcctgttactatcaatggctgtctcccccaatcccaacccccaaaaacccatactgtgagtcgcctatatgaagagaactaaataatcctgcctgttactcccttcctcggagcgaggactttgccagctgtctgaagaatcttctctgctgggagtatatctaaaaacattttaagcagaggtgtaggatgcaggctgtaaatggtaagaggggga

SEQ ID NO: 143902 - DNA, 131 bp, Homo sapiens
attccagggatgcaactgagaagtttatttttaatgcacttacttgaagtaagagttattttaaaacattttagcaaaggaaatgaattctgacaggttttgcactgaagacattcacatgtgaggaaaac

SEQ ID NO: 143903 - DNA, 559 bp, Homo sapiens
tgaatttcctcaccattcacattactctctaggcaattctagtttgtctttattcttatggagttactgtttctctgtaacttctgtgggtcaatcattttatctgcggggcaactctttcagctctgactttctaagaggatgctaataacaacatcttacatgttacatgtgttgagagtgtactgtggaccaggctctgagatacacatcttacatccatcatctttgatcttcacaacaaccctacagaatgtgggtatcatcagtctcagttttcagaaaatagtccagacaggccaaagataagcccctttttcagggccatagggtcagcatttaggaagcaggatttgaatccaggtctctttgactctaaaactcacacttattccactgcagcatgttgcttttgatgttaaaatgctttcttttttatgaatggggactcagtttttttttttccactacatgaaaatttttgctgaatggttgtataaatgtatgcatgggaaaaagattggaatgaaatattacaaaattctaaacagtggttata

SEQ ID NO: 143904 - DNA, 114 bp, Homo sapiens
agtgtgggccttaaaactcaccatcatgcacgtgcatgcctgggcagacagtcttaggcccaaccagacctgggttcgtatcccagctccaccacctgttaacaccaaatctca

SEQ ID NO: 143905 - DNA, 281 bp, Homo sapiens
ctgtgaatctagttaggtttctaagcatcagtagcacagtgtatgacagcacatgtgccagcagacctcacctgtgcagagggttctatggagaggcgaagtcgttagcctgctgtggcttctctggggaagattcagactggcagacagttgctccagtgccctcatccttgatctgcttactccctgtgatgaacacatgtattttgtgagatgtctgccacatgggtgggaaacgtgtattttcaccatcgtgaaaaaaatatggctgtattcaatag

SEQ ID NO: 143906 - DNA, 189 bp, Homo sapiens
caggatgcaaaacaaacataggcaaatgagctatatttctatttagttgtaaataactatgaaaacattttaaaaattccatttataatagcatcaaagaataagttattcaggcataaatgtaaccatggtggtatacacaaaactttgctgaaaaaaaataaagagagtggaaataactggaaagac

SEQ ID NO: 143907 - DNA, 233 bp, Homo sapiens
atattgtactattacagatttttctaatgaagtagtttgaaatcaaggctttagtggaaggtaatcttttcagtttctgacccagatttctttttcaagcaaaactcctctgaaagcctctttgctatagaggtgatgaaggcacttgctagcctaagcagaaacataaagtaaaaaattttgtagtagggaatttttgttggtaagaaatcagtatcatcttgtaacacaaa

SEQ ID NO: 143908 - DNA, 181 bp, Homo sapiens
cttccagggctcctggctggctattaaagtgacaattcttcaaaatatctctcctaaaatgacctgaacttacctttccaaattaacaacccactaactatgcttaacatatgtttttagtcaccctaactcttgggattaaacacccccatactttcccttgttcaccccactccatgca

SEQ ID NO: 143909 - DNA, 116 bp, Homo sapiens
gccaaagtcataagcattactggaggttcttataaacaagaacaacaactgtacattagggacagatagaagacagttctggaatggaatcctgtggtgatatcccaaatactgta

SEQ ID NO: 143910 - DNA, 381 bp, Homo sapiens
acagctgacatctcctggtgctatccccaaaccaccactcttaactcttaaataatctttgctggcaaggctatgctgaacctccttaggcactctctaatttgatgtcctaggtcctcccaattcttagtcctttaatacctgtttttctccttctcttattccgtttagtttttcaattcatacaaaactgtatccaggccatcaccaataattttaaatgaaaaatgtttcttctaacaaccccacaatatcaccccttaccacaaaatcttctttcagcttaatctctcctactctaggttcccatgccaccccaatcccactggaagcagccctgagaaacatcgcccattgtctctccataacaccccccaaaaa

SEQ ID NO: 143911 - DNA, 299 bp, Homo sapiens
taccagctgtgttgggtcggaaggttggtaccagccgtgttgggttggaggtgggggatagggcacagacagcctacagagttagcctgcctagagtcacacaggagcactgtgagaggagcaagctcgagagtgaaggtaggtgtggatctgcagaatattagagctgccaaatccccggggagtgtgaggttcgtctaggatagcaccactgcttggcagcagcttaaggagaaaagaagaatcgatcattgaggataatatcaggtaagttcaggaaccactcagcaaaaacctga

SEQ ID NO: 143912 - DNA, 159 bp, Homo sapiens
catggcctgctcctccttctggtgccctggatgcccaaccttctctaaactcccactgttaagttcatgcagtgctttgacccttgacagttggcctgggcctctgcaagtctcaaaagttagtaggaagtacacaccccatgttcttgatgtcttttt

SEQ ID NO: 143913 - DNA, 532 bp, Homo sapiens
taagatcctgaaataatgaaacaacatcttcagaagtttgcaggaaagttgtagtgacccaagtattttatctttttgtaacaatagggagatactatgagaaaatacagtctcagaaaatatactttccatttacttattctgaatagattacttgtgatatgttccagagcacgatgggagagagtaaaaatttagaactcggaattagggaagttgtagaaaataggctttgaaacttgttaaagttattgaaataagtcaaaaaactaaattttacaaaagtaaatgttaggctctttgaaaaacaatttccattttgaagagattagtgagttgctttatttctctatatttattaataaaacatggaacgggagaatgatggcggaggaattgtgaaatttctttcataaaaagcaagaaaaaatttttaatcattctttctatagatacttataccatatattcattttttcgagaaacttttttttactgtctgataaaatgagagattatatgtggttattgg

SEQ ID NO: 143914 - DNA, 141 bp, Homo sapiens
aatgctttcaaagcaagaacattacgcatgtgtaatatccagaagtgaaaacagacccatttgacattgctctgcaagtttctgccctaaattagacagtgaatcagaaggttacgtctgcgggtgggttgcagagagaaa

SEQ ID NO: 143915 - DNA, 385 bp, Homo sapiens
gctttattttttattattcctgcctcttctttcagattccttctctaatcctcattcctcaccaagtactccaagtcctgatattcaccactgccttctttccatgattgcctgccctgagttctgcattagaggcccataccctgctccattaatctcaattttccctttcagggaatcacaggttattacagatcttgccatagagttccattgataaagctgagtgaagatcatcttcaaagttaatgaaaaccagataatgcatagaattgtctcaattatcaaactctgccacctatatgtgtccttaaacattgattcttacccctaattttctgttaggagtacttgtagtatgcaaaaggaataaatatttaaagat

SEQ ID NO: 143916 - DNA, 421 bp, Homo sapiens
ttttaaaggaggtggggtgttgctgagaaagagtcggggaacccgaggattaaaaaaatatctaagagatgtctcaaaccagttacatactgaccttattcggatcctgattaaaacaaactacagtaagttattatttaataaaacagacaatttatgacaactggagaaatgcatactatacaaaattaagaatgtatttttaagtgtaatatcacactttttaaaaagaaatgcttatgttttagaaatgtgtactgaaatatttacagaagaaatgctctgatgtttgagttccttcaaaataatctagggaatgcaaggtgggaggtaaaagaagattgcttatatgcgtgccatgtactgataagtgctatggagagatgttgggtacatcaggcctcattatgctcgtctctct

SEQ ID NO: 143917 - DNA, 417 bp, Homo sapiens
ttttaaaggaggtggggtgttgctgagaaagagtcggggaacccgaggattaaaaaaatatctaagagatgtctcaaaccagttacatactgaccttattcggatcctgattaaaacaaactacagcccttcagattcttggcttagatgtcagttcctcaggagaagactttcctgaactctcaatctatattagaaaacagcaacaataaaaacgactagaggaaaagccacagaaatgattctttgtctgccaagatgaaagaagtctcaactataaccaaaacctcagtcatatgctttctagactattaataaaaagctttcagagtcagaagaacaattctaagaattacccaacagatcttaaattagtatcacaaaatgagtttcccccttatcaaataattcttttaa

SEQ ID NO: 143918 - DNA, 781 bp, Homo sapiens
ccactctttgtgtaggcatttgtcatatacttaagaaaacgctaaaaagaatggaaattgtatgacaataacttaagtctttctccaaagtgcatgcagtcttttgcgatacctcattcagccgagtatttgtactcttcctcattcagtataaggaagctttcagtttgcttagaaggcaacattggaatgttagagttcatcagaaacatagaattttaaactgtgagttccactgaatacattttaatgtctgtaggaagaatcaaaacacctatttaaagatggcaatatataataatcattttaaaagtatttgattcaacctaattttccagaaatgaaaaaaaaaaaatcagctctaaaaccaaagctgatttcagaaaatttgaaaatgtaaatcagccctatccataatatagtttctctaaaactttatcttagtcattttaaaataatataactattaaaaaatgtaactgctatcttaatgttctgaaataatttaaaacattttaaaatatgaatactgtagtataaaagaaagaaatggtgggaacgaaaagcagagaaagaaatgccaattccagtccaaagttttatttgccaagttttcttagaatgaattttaccagtttatgaattattgtaaacagaatgtgtcatggaaatactgaaagatttttccctagagtggccttattgactgctggtgtgatgccactgtaatgtaataaattattaaattgtttcaatgtgttgtttttgtcttaaaatttta

SEQ ID NO: 143919 - DNA, 428 bp, Homo sapiens
cattgtaggggtcagatgctgatttcagtatgagaataaatagcttgtacattcttggagtatttacttaccctgtatgtttacatcctaaatgtgtggagggtgctctggtgtaaagatgccctctgtgcctgtgctcatttaggccctgctgtggagggtgctgtggtgtaaagatgccctctgcctgtgctcggttaggccctgggctgtggagggtgctctggtgtaaagatgccttctgcctgtgctcggttaggccctgggcttcgttgtccttccgtgcagcgggcactgcctttggcgatggtatgtgcagctgctgacatggctcatgtaccttgctcctgtggacagtgatggctgtggtctgtcacgcccttggcttgggggcagtgtagtcaggagaagggaaacgaggaaatggt

SEQ ID NO: 143920 - DNA, 370 bp, Homo sapiens
cggggtcaaaggagcagggctgcaggacccaggcccaggtgaatcctccctgcccagctgctgtgaaaaccgactttcattagccttgctgcctctaattcctagtgggctttcttagtggtagactgagtggacatccagtgagacaaccaccccatggttcttaggcccgtccctccctcccttggggccattctcctgctgtgcggccctgagccccctcctctgccctctgacgctcctggggagctgcatggacggtgagggtggagttccttctctctctcgggagcatggagcctgggcaggggacaccaagcaaggtttcttggtgtccccaagaaatgcttggctcactagggagctcgag

SEQ ID NO: 143921 - DNA, 397 bp, Homo sapiens
gtcctcggcgcgttcccgccgccccccggtcccgacgcggggctcggggatgcccgccagcatgttcagcatcgacaacatcctagccgcccggccgcgctgcaaggactcggtgttgccggtggcgcacagcgcggcggctcccgtcgtcttcccggccctgcacggggactcgctctacggcgccagcggcggcgcctcctcggactatggcgccttctacccgcgccccgtggcccccggcggcgcgggcctcccggccgcggtcagcggctcccgcctcggctacaacaactacttctacgggcagctgcacgtgcaggcggcgcccgtgggcccggcctgctgcggggccgtgccgccgctgggcgcccagcagtgctcctgcgtcccgacg

SEQ ID NO: 143922 - DNA, 805 bp, Homo sapiens
taaagctggaggaattagtatgtcagtaaaaatttattccccatataggaggcagtcaacatttgaagcttcaacacagtgttatgtataaataagccccttaatcaacaaatttgctaaacaatttgtttagtgcccaagtgatccaagactaataaaagtactgtagatttagtcacccctttctgcagattaagtatgcttaataaccagtcattaagcactctagccacagcttgtttagcatattgatgtgtatatttcttctgcttttctcattgtttctttctttttgcatttttatattgcttggataattccttttttccttcttctattcctaatgttttcagtggtttctttttaagatttcttatttgaaagttttgttaataaataccttgagctcttagacttagaagtattttattcgtcttttttaaaaatctcctatattgaattcttacttataatcagagttaatgaatataattttagtgttcagaaatgactctgaaaatgagaaatttcatcttaataaataaaatgattttaaaaatctaaaaactaatttttcaaatagacttgaaaatagaacattttttagaggtttgtcaacattgtaagtaatttcatgtctagaccccttccttagctttgtattgaccttgcatctattcattgattaattattgcatctcctgtagtggtggccaaataaagtctgtgaattatttttattatttcaaaacacctaaccaaatgtgatttacttcaaaatgatcaaataaagtaactgactcaa

SEQ ID NO: 143923 - DNA, 589 bp, Homo sapiens
cctacccaaggtacaaaatgtggccgtgagccctgggcattgagagctatagtacattttctggcattggtctcaagcccttcatcgggctctggggcctctccagctggcagtaactgttgtcttaaaggagatgaggctgagggcatttggaagaggggcagctgttgaaggcattcttgtatcaagggaggtaggagggccctctgatgccaaaggcagccttctcaggctattgctttcttccaggaagccccacccaccccactgcctgctgcctggacaatactcagatcacagccttaccagtctttacaggagagaggcagggaattgggttcagatgaggatgtagaaaggtgggatccagcgatgccccaggcctgagcccccaggagaggaggctgcaggaagagggggcaggcaaagtctgtgtgcaggaggctcccttgccattcccaggagggcaagccgcagcctgggtggctagggagtttgagagcaggaagatctgaggatgtacatccctgcaatttgctttaaaattgaccagctggaagtgggagattcaggagaccaccccccccca

SEQ ID NO: 143924 - DNA, 243 bp, Homo sapiens
cctgctcaacagtgtgagactgtctcaaacaaagtgttttaaaagtatgtggcaacttccctgctctctgttgcttccactctattttctaccctcatgatgtgaaacaggctcctctttcatcttctgctgtgatcataagctccctgaggcctcaccagaaattgagctgatgttggcaccacacttcctatacagcctgaagaatcagaagccaaatggaacctcttttccttataaatt

SEQ ID NO: 143925 - DNA, 278 bp, Homo sapiens
ggcaatgcagagcgggaactgaaaagctaacaacattcttggatggtgtcctctgactcagaaccctgagagaaaaagctggtatcttcccaggtataccttctgttcagagagcatgagatgaatggacaaaatccacaggcgatcataacaacatccttattcctttcctactcattcattctcaggaatataatcacaattaagaaacctcagttgattgctgattgcccttttccccaaataaacacacagacgcacagacacacacatacaca

SEQ ID NO: 143926 - DNA, 320 bp, Homo sapiens
caaaaaaaaaaaaaaagagagaaaagaaaagaaaaaagcgtttgaggaagaatagatactgctagttgtggctggtgtgaggtctgccttctacggacagcacaaaatgcagagtctctactaaaaatacaaaaccccgtctctactaaaaatacagaaattagctgggcgtggtggtgggcaactgtagtcccagctacttaggaggctgaggcaggagaattgctggaacgtgggaggtggaggttgcagtgagcctagattgcaccattgcatgccagcctgggcgacagagtgaaactccatctcaaaaaaaggaa

SEQ ID NO: 143927 - DNA, 187 bp, Homo sapiens
agtagggggaagaaagtgtatgtcctttactggagccataattgctgaaagcgagagagacaaggaagaaggggtagggaagaagaggggaaagggaagaggaatggaggtggacagactaaaccaggacatgccaaaaacatttttgtggaaatatcaccttgaagagcctttgagactctgcagg

SEQ ID NO: 143928 - DNA, 204 bp, Homo sapiens
gggagggggaggcctgcgtgccgagagaccagcgtaagcaacaacacagaggcagaaatgacatggtttgtgtggggaactgaaagccatttttgaatgctgattactttggctttaatcagtggtcacctagaaaaagctttgtaatcataacacaatgagtaattcttgataaaagttcagatacaaaaggagcactgtaaa

SEQ ID NO: 143929 - DNA, 594 bp, Homo sapiens
agggctctgtatgccaagtgtcagtatcatcagtaggtcaaagacctggaagggctagcatctttcacttggcagctgtgcttggagggtgcagagtgggcaaggaggcgtaaaggaaaaaatacatgaccaggggatcagaaaacttgaagtcaggacccagctccctcaccagcaaagtgttggcaaatctttcagcttctcctcaaggttcctgatctgaaaaatgacggttgtttgggggctcgaaaagacaacacatgtgaaagagtctttaatcaactgtaaaagaccaaataagtcaagtctgatttttggtaagaatgctgaccctgagtctagaagtcctttgtgacactctataaataagaccctatcgaccattttggggggtacaaacagactaacccactgcccaaggaacatgacattcaggatcaaatctttggcaaccctttatgccaattcagcagctaccaaagtcatggaggaaagatggttcccaagagctacatgctcgaatatttatcaaactaaagctaagagagtgcagaggtgggatgatcgtccgatcacacaaggggaaaagtgcac

SEQ ID NO: 143930 - DNA, 157 bp, Homo sapiens
gagcaaggaacaaacaagaagaaaatcaaggggaaagcaagaaaaaaacgaaagccaatggagtatgaagaagactacgtgcaagtaagtcctgtaggtagacattgattagaggcaaaagtcagagagggcatgactatggtatgattagtgggat

SEQ ID NO: 143931 - DNA, 204 bp, Homo sapiens
ctgttttcctgtctataataatgaaagccataagacagggagtaatattttccatatgcttagagaaaataattgtcaaccaagaattgtatatcttgtgaagaatgggggcaaaattagacactttaaaacagacaaacactcaatgttgtaaccatcaaaccttccctactagtggaaattcagatcaatttcctgaaggct

SEQ ID NO: 143932 - DNA, 330 bp, Homo sapiens
ggccagcacggtggaggccccagcgccccggcacctgcccttccagggctcagctgggtactgcgcagcagccggccaggcccagaggaccccccccaacccctgcaccaacaccccttgcaggaaaggcaattcccaggcctcgcttccaggacataaagctcagtagctggacctggtcactcaggccgagcaaggcaggcagcgcacacagtgactggagacagcaggggctgcccacggtacctctacacccctcggcgggcaaccctggccagcacaggctccctggggcaggcggaaacagagccagcaaggaaaagccacatg

SEQ ID NO: 143933 - DNA, 300 bp, Homo sapiens
tatcttctcctcatagtactgtgagcttttgaaggtagactaagtcatcgcttgatcctgggagcctactgcatagttcttcttcaataaatgtttgaactaattaaattaattaattcaatgtaggtctaccaaggtgcaggggaagaagtgcaaaatctagaaagcatatgtaagttacatttatgagtgaataagttgcaagctccaagtatcaatcttagaaacaagtgcatgagtttattataaagacaaagatataataacacccaaggtccaaatgtactactgaggtgtaag

SEQ ID NO: 143934 - DNA, 644 bp, Homo sapiens
cggctcagagtcactcgacatccactgatcccagctcctgtcctgggcctgctgctgctgctgctgctctctgtcctgctgcttggcccgtccccacctcccacctggccccacctccagctctgctacctccagccccctccagtgtgagaggctctacttgcccctcagagcagtgtctagctcaataaatcccctggccctctctccactgggatccccattgttagtccactgttgcgcaggcttaccctagatagagtacaggggatccacatccctgtatttttatgtgaagtctcctagttttttaatgctgacatttcttaacaatagcaaaactcccccagtaatggattaagcactaaggattattccctcacaaaacaagcctggcgagggcagctgtgggcacacagctaagtctcggttgccttggggtcagggcctcagtgattctcctgtcccctccctcatgctcaggagttggcagttgtagcttcctacatcacatctgcgggaaacggaaatttcttccttcctttttataaagagaggcagtagcctcagtgtgcagtgggtagattcaaatcatattcataataaaagagaagcagttgcctgcccagagccacaaaaagact

SEQ ID NO: 143935 - DNA, 132 bp, Homo sapiens
gtttagattttagagaagtgaatgcaagcatgagtaccgaggagaggcaggtggggtggtgattaagaggccgttcatgttatcttcaggaatgcacggtgcagagtggtgtgcacaggagcctgactgcag

SEQ ID NO: 143936 - DNA, 172 bp, Homo sapiens
ttttttgagtccatgaggcagtgtatggtggaacctaccctaatccagcccacctgagggtaaataggcactcaagagaagtcactgcatgttatttcaaagatttgattactgaagtctaatctgtagagacccaggcttactgcaacagaaagtccataagtaataaatt

SEQ ID NO: 143937 - DNA, 538 bp, Homo sapiens
caccatgttggccagaatcgtctcaaactcatgacctcatgatccgcctgcctcggcctcccaaagtgctgagatttcagacgtgagccaccgtgctcggcaacttgctggctcttaacttctattttagtctgcctaaaactgtagcagagctgatcctgggcagctgttctctggtccagatctgttaagcgggggtggggtggtagagcaccagactaacatgccagtatcttggtaaaatctcagccctttaacaaagggccatgcagcataagatcatttcatttgcatgtggctgaataagtgatggaaggaaatgatagtccagttccacatagagtgtgttggcacataaacagtttgatagccttgttatatattggaggtgctgatatatttttgtatatttcttagtgttactgtagttctgaagctattggaataagacccaattgaataaggttgaaaccaggagattttgtttgatcttacttagtatgagttaaaataaaaacttagaatttctctatgttct

SEQ ID NO: 143938 - DNA, 408 bp, Homo sapiens
gaaaacagaaaccatgctaagggatttctaacacgaagggtttaatacagaaaataggtgctttcaaaacaactggcaaggctatatagtgtgagcaaaagtaaagtgggctaactccccatctaattcccacagtcattgtcaagagtcaggaagctactactgccatctataggttaggaaactgcaaaaatctgctgccaatactgcagctgctctgcagccctgagacagctggccagtgggggaaggcagaagccactgcaaaaagtcacctcaaaaatctaagcccatgcacacccccaacatacactatggcctgaggaagaaaggttccacctcccttccacttgccacatttcccaagacacatgtcatagggcaaatgacacacagaagcctgctgcc

SEQ ID NO: 143939 - DNA, 252 bp, Homo sapiens
ggaacaccttgtcaagtaacctggcacgtggggctgagcccagcactcttgcccagctgcagaggcctagggacctcacttctttccggctttgtctttggtttttcctttaaggcttctcctggggctgcccgtgcagaaggggtcctgatctccctgcctggccgcccttggcaatctgtgcagagagctctgagaaggcctgggacccctccctcctacctccctgccttctgtgagcacctgtcatct

SEQ ID NO: 143940 - DNA, 160 bp, Homo sapiens
tggaaatggcaatgataggcatttataatctccatatttagatatttccctcacagtgctagtttctgagcttattagaacctaatgttaaatgacgagttaatgggtgcagcacaccaacatggcacatgtatacatatgtaacaaacctgcacgttgt

SEQ ID NO: 143941 - DNA, 377 bp, Homo sapiens
cgttcactctcccgatttctgacctttcaaacacccttgtaactaagtccttgtattatattccatctgtttgaaatttatggtatgacctctggtttcttgattgtgtgataatgtaagcgatttctttcttcaatgacttctttcttttttacaattgtgatatatacttttatttctcattgataaatggttacaaatcatactcctaggtttatatagcactaacacttaaacacattgtaaagcttctggaaggcttataataccttgtgtcttccagctttatctcccagactggatctcatttttttctttctacttttcttcccttttttttcataaaaattgtatatatttaaagtgtacaacatgat

SEQ ID NO: 143942 - DNA, 272 bp, Homo sapiens
atacatttaaataccaagaacctaaaataagtacaaaggcatttactgggaagagtctttctttcactctcctccagtcctcttgtccccctccccagagcactagtttttttgttttttcagagaaactctttgtgagtacaagcatgcatgtatcaatgtagatatccacctagaccatgtcaacacaacacaatggtagtgtactgtacacactcttctgcaccttctttttttttcacttagtataatatatcttggagttcatttct

SEQ ID NO: 143943 - DNA, 387 bp, Homo sapiens
ctctttacccccaccccggataagaaacatctgggctgatctctagtgtacaccagaaatttggggggacctgcctgatatctagccactaaagatgaatgtttgtttacaaaacacacaacagcacctgcaaaaatctggccttatatccttggtaaatcttcattgtttcaaattactctagtgagccacaaaataaaacaaactgcttaatccagccagagttgtaactaagcagctgtgctttattgatagaaattggagagtaagagttacaaatcacatatttaatattataaaggcatctacactgtatttgataaatatagacagcctgaagaagtaaagagctaccctataccctgccaagcatacaacgtcaaaaca

SEQ ID NO: 143944 - DNA, 186 bp, Homo sapiens
ttagctatacctgactatatttattttagcagttgctctagcaattacagtatgcatcgtgccagccatgtgagagctacccttggatgactgtagttctggtccatgtattaactgtgacttcctgcgagaccttgtattagtcagagtcctgcagagaaacagaaccaacaggatgtgtatata

SEQ ID NO: 143945 - DNA, 499 bp, Homo sapiens
actgtgaaactgagtttctagaaccttcttttggtttatcattgtttttagggtactgtccttcagtggcccatccaaatgcaaagagattcaccagagctatccaggcttggtgatgctgggccccaaaattggccttagctctgtgagacactttttaaccaccttcccgctcagccacttggcctctcagtcctgcttttagaaattggcatatgcttctaggcacagtgactcacacctgtaacctcagcactttgggaggctgaggcgggtggatcacttgaggtcaggagctcgagaccagcctggccaacatggtggctgtctctactaaaaatacaaaaaattagccgggtgcggtagtgcatgcctataatcccagctgcttgggaggctgaggcaggagggtcacttgaacccggtaggcagagattacagtgagccgagatcgtgccactgcattccagcctgggcaacagagtgagaccctgtctca

SEQ ID NO: 143946 - DNA, 592 bp, Homo sapiens
cttgagaacaagtactgtcctgtcggtttcatggccttcttccatttgtggttcttgcgaagtgggaatttaaatgacatcttatcaagatggataaaccctagtttcccagtgctggaatatagaaaatggatggacaagtaaatcccactcagcacccatagtccaggcatggggacctcaacacacctgagcaccagacatcacctttcattctggacctaccatgaaagacttctgaatccaggaagagaaactgactgggcaacatgttattcagatggggtcttcttatgttgcccaggttggtctcaaattgctaggctcaagtgattccacccacctctgcctcccacagtgctgggattacgggcatgagccagcgcatctggccaccttattttcaattactggctcaatgtaatggctccatctcaggaacagccaatgaaaaagatgcacaggacaagaaacagcaccttgccctgtcactcaggatggagttcagtggtcctatcatggctcattatagcctcaaactcccaggctcaagcaatcctaccatgtcagccttcccagtagctgggactac

SEQ ID NO: 143947 - DNA, 230 bp, Homo sapiens
ggggaggtggaggttgcagtgagctgagatcgtagcactgcactccagcctgggcaacagagcgagactcaatctcaaaaaacagacaaaggatataaaccccacccaactgccatctgccatgtccctgattttgtccaaagtcacacccacagtatagggaaggttttggagggggtgatcgctgcagagggaggtcaggcacccctgctggttcttgtcccggcaac

SEQ ID NO: 143948 - DNA, 676 bp, Homo sapiens
tctttaaaggattgacagatgatttatctcatatgtagacaatgattctcagcagttaactagcgcaacttgataatgtcaattgcttgagaaaatcagataattgcttgagaaaattaggacattgcttgaggaagttaggtagttaaataaattactttttttaaagaatagtttaatattttggcaagtagactttaaaataggttggtaatattttaaaggctacttttaaagaagtagcaatataacatgtttaattatgaaaaataatgttggaaacaattcaattttctatcagatcattcacaaatacagaaataccatctcaataattagaagaagtagcagcaatttctgtcatttttatgcaagttactcttagtccatttatttggttttaaatagtgtttttaaaatttgttttcaaacagggctaatcataaataatagaacatattttacaatagttgaaggtaacaaaaagtaagtgccatttaaaaaattgtattagattgtttaaaaatgttgtgggtacatagtatgtgttgtgggtacatcgtatgtgttgtgggtacatagtatgtggggtccatgagatgttttgatacaggcatgcaatgtgaaataagcacatcatggggaatggggtatccctcccctcaagcatttatcc

SEQ ID NO: 143949 - DNA, 653 bp, Homo sapiens
tctgtgagtaccttcctaacaatacactcacctctgagcctccactgctgtttacaaataccctatcatgtgagttcattttctatccaaagcgtgcacaactaatgccttcctctgtgtgcacacttatggggtgggggggctctctgaatacactcccagtaaaccagggttcacacctctcctgccgctctgcctcagactctgccttcgctctatgtatttaaagtgcctggcactagtgggagctcaacagatgtcaattcttttccccacttttagctgaataactatgtgaatctgtgtctcggtgtccttctgcccctctgtctgttgtacgagaccggttggagtgtgttcctcagtaccgaacgggctatttgtaagatgccccgtgggttctatctcccttccgactctctcctctcctgtaaaacgttacaggttcccccatatggcatatccctccctcacgcgatgtatccactccggtctcccacagtactgcatgtccataaactgtttccccatgcaccctggttaccgcgtcccttctcggtgcttccctgtctctcccattttttttccaacatgaaagcgtctggatttgtagtccaattacagtgtatgtgcgcctatctgagcctctctct

SEQ ID NO: 143950 - DNA, 430 bp, Homo sapiens
gactctcctgtcctgggtactctttaggtagtggctgttctgaagtggctttggaaaccctggaatgaaactgtcatgtccaatgctgagatttgtataaactgtcattttaactgtgattattattccttaggatttgagaaataaaatctgaggagggagcaggacctgcctcagggcctcctctccaagttgagtgacccatcttcccaggtctccttttgttctgtcttgagcctctctcctgaggtcctgaaagaagagaatgtgctgttgtagggggcctggaaatgtcccatggaccatctcgtgactcagtaagatgatgtgtgtcctctggggacagaaggaggtcctgcacagagtgttcctgcccgttgatgccctccccagatcctaacgcgaagtctgacacatagtagcctcccgg

SEQ ID NO: 143951 - DNA, 795 bp, Homo sapiens
tagcaccacaagcagactcagaatcaaaggaaacattccaagagttgaaaaagacaattcattcaactaaataaatggaatggttccaagactggaaaaataccagtggtgcggaaacaaaagctataaatactgctcctggaaagagaacactcaagactgtcatagacatggcaggaaaaatgttgaaaaaccagaaaattggagatgctgcagctgctttgcaagggacagtcttggccactggaaataggggaggtgagagcaagagataaggggaaagggtcaggagttagagccataggagaggagaaatgttttcctctcacaaccgaggctggcatcaggaaaggtggtcctacagttgtcatgacatcatgagttggaacacagaaatgacaaggaacttgcaatcctttccttcaatgcacaaaatgcccaggatagttggcccaccagaaaagtctttctggaatctcaagagtctgtatagtaaacaacactggtgcagtttccctttcctgttgagaaaaagcctaaaagtggttggacatggtggctcacacctgtaatctcaacactttgggaggcagagatgagcaaattgtttaagcctaggagttcaagactaccctgggcaacataatgaaaccttatttctataaaaaatcaaaaaataagccagccaggtgtggtggtgcatgcctgtagtcccagctactccggagtctgagaggtaggaagattgcttgaggccaagaggtcaaggctgcagtgagccatgatcatggtact

SEQ ID NO: 143952 - DNA, 278 bp, Homo sapiens
agggtaaatagtagtaggtgcttaaatgtttggtatcatcacagccttactattcttatctcttaggtgagagactttgcctgtttcatcactcataaaattaggagtaagaataaactacctcataagatagctctgaggattaagctcaacttgggtcttatctggatataaagcctggccagcatctcttaactttagagagccctaaatcaggaccaggaaatagctcattcatttatgccttatcatctccactgcacttaactcctagtcta

SEQ ID NO: 143953 - DNA, 369 bp, Homo sapiens
ttttgaatggaaaccatgagtgtagcagttcttctttatgacttgctacataatcatgcaggaaaatgcctgtcacgggattggatcctaggagattagccccattgctaattaaaagccccattaaaagaggggaagttcttttaggtatctacagcttcctaagatttgaatggtttacaaagcagaatgttggctgggcatggtggctcatgcctgtatcccagcactttgggaggccaaggcagacagatcagaaggtcaggagtttgataccagcctgaccaacatggtgaaacctcgtctatactaaaaatacaaaaattatccgggcatggtggcatgcgcctgtaatcccagctactaggg

SEQ ID NO: 143954 - DNA, 319 bp, Homo sapiens
agtgcccagggctaagtaggatgtgaaaatggacagatggacatccatccaagggtctggaattcaccccctctaaatcatgttgggagctttctttaataaagcatttagcaattctcgatgaagctgggtggggctctatctgctggaggtaattactctaatgagcttccctcaagagtggcctgccccagccaggcctcagctcctccctgccttgcctgacatgggtgccacacacacacacacacacacacacacacacacacacttacacacacttcaatttgctctccacctcttctgccaaacctgcctg

SEQ ID NO: 143955 - DNA, 218 bp, Homo sapiens
agggttcaaatttggttggaaagaaaaaatcggccagtggggtggctcatgccctgtaatctcaacactatggaaagctgaggtaggaggatttcttgagcctaggagtttggaaccagcctaggcaacatagcacactctggcccccatttatacatatatatataaaactagctgggcttagtggtgtgcaccagcaactcaggaggccaaggtgg

SEQ ID NO: 143956 - DNA, 467 bp, Homo sapiens
aggcctcaggtgaatctggaaataaagaatctaataaatgccattagcggttttcattgtctgagaaacaatttataggcaaagtctgaatgatataatatagcttaagagcaaaatgtaaatgttaagacactgacaacataaaagtaaaatatcactatcaaaaactgggaaagcagggaaagaagtaaaaaaagtcataatttctttatcttatataaaagagggtcaaaagatactatccaaagttcagaaattaagaaacagaagcttacaatattatctacaacaataaagtcatcaatagaagtaacaaaaataactttttaaaaaacaagaaaggagggaaacaggttaacatacgtgtggcaaattcctcacttttaacaaggtaggacaaccaccaagaatgctaaaaccagaaaatgtttaaaatgttatttctggccaagcgcagtggctcacgc

SEQ ID NO: 143957 - DNA, 98 bp, Homo sapiens
ggctccagccgcggcctgcctgccgggacctgggggcgggggagaggagagccggcccctgactcacccggccgcccgaggctccaggctggcttggg

SEQ ID NO: 143958 - DNA, 380 bp, Homo sapiens
tctttctcaaaaaaaaaaaaaaaaaaaaaaaagaatgccattatcaggggatttgtcatggagaaagtggctgaggaccctgggcagatcactgtgcatcttcataggtgatttggggtaatccccttagtctggcttgcttcacagggtgtgaagcttaataagacttgtggcagaagagatgaggagagtgagagaggaggggaagagaaagtgaaaagaagggaagaggagccagatgcattacagtggaactagttctccaggatgggtaaaatctgattaggaaaaaagaggggaaaaaaatgagcaatcaggcaattcaaggaaaagttgattcaaaatgaaactgcagctgggcgcggtggctcatgcctgta

SEQ ID NO: 143959 - DNA, 810 bp, Homo sapiens
agacaactgcagccagagaaaatgacagttctagggtgcgaccgtgggagtgagaggttagggtggaggtgaccaggtggacagtaggacacagaactgagaggtacacaaggatcttctgtgtggatattgaaatcagtgtgagataaatacagtgctggagagactgagaatgaactcaaagtcctcaaggatcgagatgagaagtgacctggggtcagcaggtaccttcaagaaggaggcggtcggctgggcacggtggctcacgcctgtaatcccagcactttggaggccgaggcgggcagatcacctgaagtaggagttcgagaccagcctggccaacatggtgaaaccccatctctactaaaaatacaaaaattagccaggcgtggtggcgggtgcctgtaatcccagctactcaggaggctgaggcaggagaattgcttgaacccaggaggcagaggttgcagtgagccaagattgcgccactgcactccagcctgggggacaagagtgagacttggtctcagaaaaaaaaaaaagaaggacagggtcagtggtatagtttgatgagattcgaagggagattcaacccagtggttgtttaggaaggaaagagcaaatggtttggaatcagcaatcagtactgaagaggttattgaccccaccctagggctgaggtatgagggcaggagggagaacagctaccacttgaacacccgagctcaggtgatccacccaccttagcctcccaggtagctgggaccacagtctggaaaggggatgttaacagcttcactaggacacttt

SEQ ID NO: 143960 - DNA, 465 bp, Homo sapiens
gtcacgactattattattaccaggctcaatctaaaaggctggtctggggcttccagcttttctgattccaaaaccagtgctaaggcccaggaaagggtgcctggcagggcccccagcacatcctccacaccagcaggctgggtcagggcagcctaacctaggttctcagctcggctgtccttgccttctgactcctgcctctctgcctgggactgcctgttccccgtgacctctgaattcctttttcttgtggaaactccttcatgccagacacttccctctgagagccctaaaacacctcttttcaaagaagcccatgggttttcctggaaaaaccccgaaatccaagacctggatccccaggctcaccggcagaaaccctggtcatcctggtcaccctgggctgtggccgcctgaagattgagcagcagatcctgcccctcagctgcccactgcagggctgtg

SEQ ID NO: 143961 - DNA, 245 bp, Homo sapiens
ccgagatcatgccactgcactccagcctgggggacagagcgagactccatctcaaaaaaaaaaaaaactctctttaaatcacacattcgagtgtgccctttgtttctcatcaaagccaagactgatttgagatgatttcttaaggtcaggttaatgtcttaatccagttgtgctgctataacaaaataccacagagtgagtaacttataaacaacaaaaatttattgctcacagttatggaggat

SEQ ID NO: 143962 - DNA, 296 bp, Homo sapiens
tttttaatcatagttgctgttacatgaagtctctgaatttctagtgtggagactaaagtaactcaatcttagatgctaatctgctgtattgacttctaaataatcccagttctgggaatgcctctaagatttctacttccctgtacttaccataaatcctgcccttaagtcaaaacaatcttgatattattgtaaacacatacttactataaatcctgcccttaggcaaattccctgtgatctataagccctggggtttggggtggggtaatggcaggtaggcaaattcaccaagt

SEQ ID NO: 143963 - DNA, 364 bp, Homo sapiens
tgggctgactctagagcatcccagtatctcggaccgttccacgaataccttcaaggtcgctcccccctggcccccatttttccatcaggaagcggaggcacagagtgagaaagagctgcccaaggctcccaggcagttcacggagccactgggagttacactcaacccgtccaaccccacgtccctgttctcagccaccacaataaaccaccaaggttccacagccacaggagctcagcccggagtccccaccgggtctcccaaggcagggagatggggctggaggccatgccaggtgcacggtgcccagagctgcttaggaagcctcgcggtgcgggctgggcaccaggcagtgtctgtagga

SEQ ID NO: 143964 - DNA, 113 bp, Homo sapiens
gcttgtcatcactgtctcctcccttcccctcgcagtttatatttagctgggcacacgccgtgtggatgcccgttttcttcctcctaggggagaatcctcagctacagggttgt

SEQ ID NO: 143965 - DNA, 274 bp, Homo sapiens
ctttaggattgagtttttcaggaagggaagaggaagagctaccctctgtttcttgacttgaactgagcttggttgttagaagtaagggaagtgtggaatccagtaactgctgatatgtggaggcctgacctcctaatgtctactctcaagacttcctacgagagaagtttttttgttttgttttgttttgttttgtttttgaattatggtcttgctctgtcacccagactggagtgcagtggctccatcacagctcactgtagcctcaacctcc

SEQ ID NO: 143966 - DNA, 422 bp, Homo sapiens
cagtgaacaggcacatcctgcgtggcacgtgaaagaattcggaacagcgggaaaaattaaaccacggaagcaaatttcaagtcaacagaaacaagaactttctaagaatgagagcagttcaacaatgaaaagggttgctttactgactgctggactgctcatacaagaacattctacagcagggagctgggctgaacttctataaacattcctcactccccaaatcctttccatccctgaatgtggatagtgagagggtagacatcacgagatacggcatcattcgaatctacccagtgccccagtctcaagtagcaagttttatctaaatgtattcagttcctgggtttaattaatcagtttgaacagaatacttgtactgactgagcaaagttcaagaaggcagaataggaacattacat

SEQ ID NO: 143967 - DNA, 783 bp, Homo sapiens
cctataaagcaggaggatcactcaggttggggcctgtagaatcttttatatcttgttcaccaacctgctgccattgtgtgaggagcttctggtggtcaatgcagaatctataagtgtaaacaagcattaacatcaaaactacaacttccagggacaccagaacctgccttgtttagaatgttaaatatatcttttccaaaaaattgataatatttgattatctaatcaaaatattataactatacattaaaccttacatagaaagatgttaaaattctgttaaactttcttgaattttgtttaaatgatcttaaaattctacactttggaatactgacttccattctttaaaatctgtgcttttctaggcagtctatcctaaatgtttgtatttaaataaagtcttttagattctaatctttctgatgactttaggttgacgtaactatagtcacaatcttgtgaaagaaatctcaaaaacatattcctcttttggctttctcataaacggtttggccacagagtcaaggagagaacattggagtgtctgagagcgtgggtcttgactaattttaatcagcgttcctgggcacagaggacataccctccatttcattcctgatgtaatatttgatgtagttcatgttactataatcttgttactgtgatccaccaaaatatgaggttaaaagacctttcaatcttttaggaagaaaaagtgttatattttcctcatctttttgggtttcgtggtcagaaacatgcactggcagacaggatttt

SEQ ID NO: 143968 - DNA, 1020 bp, Homo sapiens
gaaacaacccataaactgatggatagttaaataaagtgtggtatatccatacagtagaatattatttgacaataaaaaggaatgaagtactacatatagaatgatacatgctacaacatggatgaatcttaaaaacatgctaagtaaaagaagccaatgacaaaaggccttatactgtatgattctgtttataaaaaatgtttagaatatgcacctccctggagacagaaagtcaattaatggttgcccagggctgggggaattgtggatatgtgtgggtagttggggaatggggagtgactactaatgtcacagagttcctttttggggcagtggcaatgttctggaattaattctggagttgtgcaactgtgaatatgttaaaagccattgaattctacacttcagatggatgaattgtgtgatatatgaattgtatctcaataaatctgtttaaaaaagtattacatatttcatttggtctcagggcactgaattgtcttttaattcaaaattgtactggctaggagaacccatattttcaataagaataccagcctaataatggtaataacttatttgcatagtgtgccattgtttacccagagttttcacatgctttatgtaatttgatccccactggacctcaccatgcagatgaaattgacacaaagaaaaagtgacttctcttaagcttacacaaccaagaaatggtagagcaagtatttaatctcaggctttctggttgttagtcactgccttcttgtcagaacaatgtcagaacattgcaaagaaaaaataatatctttcagactcttaattatgctttaaccctttcagttcttgaatgtgactagaaaagtcattcaccttctctgtcttgctttccttacctgaaaaatggagataataatgcttcctaactaaaagtcatttacctttttgtctcggtttctttatccagaagaacaagccaggaatatttcctatctcttgggcatataataaggactaactaat

SEQ ID NO: 143969 - DNA, 320 bp, Homo sapiens
ctccccataccaagtccacggtgagagaacggtgcctgggacacacgcacacaacacttacatgccacacgtgcacacgcacctacccacacgtaggctggcacccccatataagcagcccatacacacacacacacacacacacacacacacacacttacatgcctatgcagttagccacacgctatgcacacaaaggcatatacccttatatatgcaacccccacacacctatccatgcacacacatgtgcttacatgctcacccatgcacacacacctgccacatgcacacacacacaggaatgtaccctcatagat

SEQ ID NO: 143970 - DNA, 253 bp, Homo sapiens
gaagctgccagactcttagactcccatactgttttgaattatcagctaggtgttttgcaaatattgtctcccagcctgtgtctccttatcatttcatttttttaagtgtcttctgaacaccacaggttttaattttgattaagtacagtttaccaagtttttcttctgtggctcttgcttttacattgtctttaagaactctgcctaacccaagattataaggatttttctcctctgttttttggtagaagtt

SEQ ID NO: 143971 - DNA, 920 bp, Homo sapiens
aatctctctcttgtccctcttccttgcctgggaatctttattgcctccagggtgggaaaagctgactcttgctttgtcatccgttctctcacgtctcctgttttggtataaactttgtacccagactctttaggactctggcttttgaggctggaaggggtaggttcttaccactaactggtatttctttcaaaaccacttctctagtttaagttctgaaagtctatttagaaactcaaaagccaagaattatcttcttttgcctgctctatcaccccttccctgagtaagcctgtgctcggttgctgcctataggttgtaaaatacaggaagtggggtgtggggtttttaattgtaatgaaaatccatatcgctaccagattctgactttaactgctccctaactaccacaaattactaagcatgttctaagtgcaaggtgttttgtgagaagctgtcaggagaatataaagattaaaaatgtggagtacagatcacatttttgtagcaattttgtcccctacatatcccatttgatgttgaccatgtctctgtgggcgagcaggttaggtagaaccctcagtgtgagcctgcgaggtgagttttatgttcttagcactttccagatgagaaaactagctgagagagagagagtgttcagctcatcaagtggtggagctatgggtggaattttcaagtaaacccagaacttccaactccatatatccacttccctccactatccctgaaagattctcaatgagcctccaggccattgggcaaaccaagtagagcccagggcagaaaggaggggacattgaattggacctcataggatggtggcagtaggattgggagaaaagtattccaggcagagagaacctggaagtggacttgtatcagccttctctacccaccac

SEQ ID NO: 143972 - DNA, 169 bp, Homo sapiens
caaagttctaacagcatcatagaactttctcaggtttattctctggatagaagaggacacatagaaaacctgaaatactgcccccttcccacacacaaagttccatctatcagagggtgggtgtggtgaggaaaattctaattttactgtctgtttattagatgagttg

SEQ ID NO: 143973 - DNA, 259 bp, Homo sapiens
agaattaaagaaaaattctgtggggcttccccacatctttaatatgctactgtcactgtgagtcactgtggtagggaaatgatgtgtagggttctccaactcatatgatcagggaatcccatctgcaaggaacctctctctgtgggtttgtttcatggacatagttgaggaatttatgttgttgtagatcaatgaaatttatgctgatttctgtaccccttctgaccccacccgaaacattcctgacctttcgcttttg

SEQ ID NO: 143974 - DNA, 171 bp, Homo sapiens
ttaaagagacccctggcagggatgaaactggactttgaatctaactgctaagcagagcctgctccactgccaccattttgcctccaaatggggatggtctcacagcccatgtgcctcaaatagaagtatcacattactaatgtcttcctcttctcatctcatgtaactctg

SEQ ID NO: 143975 - DNA, 247 bp, Homo sapiens
actaggcaaagttgattttattaaattttacatgctaagatttaagggcttcagtaaatctcagatatctgtgtaaattaattttttaaaaactatgttaagctatttatcttttttagtaatgcaaggaaagaatttttaaatttttttgagaaggagtttcactcttgtcgcccaggctggagtgcaatggtgcgatctcggttcactgcaaactccacctcccaggttcaagcgattctcctgc

SEQ ID NO: 143976 - DNA, 787 bp, Homo sapiens
aattttaaagccatttctagctgttctctatctttaaaaatttattgaataatttaggaagatggagttggttgccaggaaaaataaggacagtagtactctggagacccctgtatgggcattgaggaacatagtcaagaaagttgttaatagtcttgtttataatattaagaagttggaaacaaccaaagtgtccattaacaagggaatggataaataaattgtggtatactcatctagcgggctactgtacagctggtgggaatatattagtattaactgtagccacatgcattaaaatgtttgttaatacagtatatgtagttacacttggcccttgaacaacacaagtttgaactgtgatggttcacttatacacaaatgtgcatttaaaaaatacagtatttgggggatgcaaaacctgagtatatggagggccaacttttggtgtatgtggtcttcacagcgccaactgtgggacttgagtatgcacagattttggtatacatggggatcctggaaccaattatcctcatataccaaggatcagctagctgtatatataatatatacagtcacgcactcaataacagtatttcagttagcagcggaccacatatatggtgatggtctggtaatattataataccctgtttttactatgctttttctatgtttagatacacaaataccgttgttacagttgcctacagtcttcagtatagtgacatactgtacaggtttggagcttaggagcaaaaggctgtaccatatagcctaagtatat

SEQ ID NO: 143977 - DNA, 311 bp, Homo sapiens
cagcggcccccccccaacatgtgacaagccaaataatggcttccaccgatttccaaaatctccatagcagatgtgccgcctccactgagaagcactgcgtttgcatgttccaattctgtgcaatgtttctagcctgtcataaatggaagcacgtgcaagacaaatccctaaaaacatcctccactcactggcgtccctgccatcttgggaaggagagtgaagaaggtgcctgggccttgcctgtgaccagccggctctccctggctccatctgggatatggtcatcccaaatcactctactgcatgtttcc

SEQ ID NO: 143978 - DNA, 666 bp, Homo sapiens
ataaaactgtgtccaagtttcttacttgtattaaacagagtgtttttctagatattgttaaccaagataaggaatccctaaagagaggcaggcttgatttagagctgtctgagggcttccaaaagagctgttcagtgaataagaaggaatccaaccatggagcatcagagtctaagttggatgtataggtttgtgtgtcttcagtattgtcttgtattttaagacagaattagatgtgcccatcagaaatgagtgtatggcatgaaaaagttgcagatggtaggccgcagtgaactccaattgtttggaaggcttaacttgaaccttcctaggctagagaattttaaatgactgagatgtttctaatgtgcctagagcttcttttctaatgagcccagggagggctagaatctctatcagagttagtctgggatgtaaaggggatcaggatgtgccaccccaatatatgccactttagcctatggattattttgagcagttaaaaaattagaaatagcaggcctggtgcagtggctcatgcctgtaatcttagcactttgggagaccgaggcaggtggatcacctgaagtcaagagttcgagaccagcctggccaacatggtgaaaccccatctctactaaaaaaaaaaaaaaaaaaaaaatacaa

SEQ ID NO: 143979 - DNA, 450 bp, Homo sapiens
taacaaatttgttctcaagaagttttttttccctaaataacaaaaaatataagtgtatatgtatatctatataggacctttataataatatcaataataggtccttcacatttccacagtgaaggataaaactgagttgatcaggatttgaaatacccatctttaaggatgaactagaaaagcctccctgaggaaatgaatttgaatgtgtttcaaagggagggcaaggtgacttgacaggtggtgaaaagaaagagaaattgcaagcaaggaaaatgccctgtgcaaaagctgcccctgtggtttctcaagaagcagagtcgcaaagtgatcccacaactgagaaagatattagttaagcacaaacaaaagggagagaagctacacattatgtgacactcagcctcagttttctcatctgttataggagaaggctggattaagtgattt

SEQ ID NO: 143980 - DNA, 984 bp, Homo sapiens
gcctcctggttgtgtgccttcacacccgcctacagccccacctcaccatcaagcgctgagccaatgcgggtgtggctggccctgagttcctgagtcagctccttgccagggccagagctggtaacagcggggcagcagggtgggtagcctctaccagccagggcagtccctgaggggccagcaggggggctgactgcctagtggctcaacctcctgaacccacccactcccagcgatgctacccagaaccccaacggcatgaatcctgcacagtgccgggcagtgccagactccaaagggctcgctgtggggacagccccgccatggccacagactctgtcctcacctttgattgtcaggatgacagcccccaccaccatgatgagcgtctgcagggcgtccgtgtagattacagcagccaggccccctgccagtggaagcaaggttgctggagggggccctggccccagggaggagggacacggggaggaacttctggggctcctgctggggccacttcctgggctgctccctcgggcctgtagggggaggtggccttctgacccctttacacgtcccctgggtggacctccctgctgcaggcaccatacctgcgatggtgtacagggctgtgatgccgagcgtgaggatggtggagaggtagaagttccagcccaggcagatgtgcacaaacagagcccccgcgtacaggtccagctgcggagggagagagccttgtgtggggctgttattcccagggctccagcaagccactccctgggtgacctcgggcaaggccctctctgggcctcggtggcctgtggataaggaggggagacccccactcgcctgcctgcctgcatcacggggccattgtgaggttgggggaagacctggccgtggagctacaagcttgtgcggatgtcaggggacattactgttgctaataaagtccaaagtggccaatgcctttcccaaaagcag

SEQ ID NO: 143981 - DNA, 875 bp, Homo sapiens
ggagctcagggcaggtacctgaactctgagagggcttcacagaggagatgaccgaaacgtaagtcctaaatgacaaatatagatgctccagctggaccagagagtggaaggcacgccaggcagaaggcgcagctgagttcaagggcctggagcatcctgtctcagagcgttattttggtctgatgtccacacgaagcctccagtctgtggtggtgcccagatgccgggggacggcagaggcacttcagatcacggtgggccacatcctgggagacgctggcagcccctatctcacaggacttatctctagtgtcctgcgggccaggcgccctgactcctatctgcagcgcttccgcagcctgcagcagagcttcctgtgctgcgcctttgtcatcgccctggggggcggctgcttcctgctgactgcgctgtacctggagagagacgagacccgggcctggcagcctgtcacagggaccccagacagcaatgatgtggacagcaacgacctggagagacaaggcctgctttcgggcgctggcgcctctacagaggagccctgaggtccctgcctgcactcgtcctgcctgcaagcctcccgttggtccccacagcagcagtgcctcggttcctctttggctgtcctcggggactccggctgaggcacatctgccacttttgaattcccggctggagagctggcaggaccctgtggctgggctgggaatggagctgtcagcactctgcgtgggaggcctgggcctgtgcctgcatcccgctcaaggctgccccagcctggggtctccagcctggctgctgctgggccctgaataaagagaggccagtacaaagcccatggattttgggcctgtaga

SEQ ID NO: 143982 - DNA, 1880 bp, Homo sapiens
cagtctcaggccaagagctgcaggctggcatggctggggggatgtcagcggagtgccctgagcctgggccaggaggtctgcagggccagtccccagggccaggcaggcagtgtccccctcccatcacgcccacctcctggagcctgcccccgtggagggcctacgtggctgccgccgtcctctgctacatcaacctcctgaattacatgaactggttcatcattgcaggagtgctgctggatatacaggaggttttccagatcagtgacaaccatgctggtttgcttcagactgtcttcgttagctgcctgctgctgtctgcacctgtgtttggctacctgggcgaccgacatagccgcaaggctaccatgagcttcggtatcttgctgtggtcaggagctggcctctctagctccttcatctccccccggtattcttggctcttcttcctgtcccggggcatcgtgggcactggctcggccagctactccaccatcgcgcccaccgtcctgggcgacctcttcgtgagggaccagcgcacccgcgtgctggctgtcttctacatctttatccccgttggaagtggtctgggctacgtgctggggtcggctgtgacgatgctgactgggaactggcgctgggccctccgagtcatgccctgcctggaggccgtggccttgatcctgcttatcctgctggttccagacccaccccggggagctgccgagacacagggggagggggccgtgggaggcttcaggagcagctggtgtgaggacgtcagatacctggggaaaaactggagtttcgtgtggtcgaccctcggagtgaccgccatggcctttgtgactggagccctggggttctgggcccccaagtttctgctcgaggcacgcgtggttcacgggctgcagcctccctgcttccaggagccgtgcagcaaccccgacagcctgatttttggggcactgaccatcatgaccggcgtcattggggtcatcttgggggcagaagcttcgaggaggtacaagaaagtcattccaggagctgagcccctcatctgcgcctccagcctgcttgccacagccccctgcctctacctggctctcgtcctggccccgaccaccctgctggcctcctatgtgttcctgggccttggggagctgcttctgtcctgcaactgggcagtggttgccgacatcctgctgtctgtggtggtgcccagatgccgggggacggcagaggcacttcagatcacggtgggccacatcctgggagacgctggcagcccctatctcacaggacttatctctagtgtcctgcgggccaggcgccctgactcctatctgcagcgcttccgcagcctgcagcagagcttcctgtgctgcgcctttgtcatcgccctggggggcggctgcttcctgctgactgcgctgtacctggagagagacgagacccgggcctggcagcctgtcacagggaccccagacagcaatgatgtggacagcaacgacctggagagacaaggcctgctttcgggcgctggcgcctctacagaggagccctgaggtccctgcctgcactcgtcctgcctgcaagcctcccgttggtccccacagcagcagtgcctcggttcctctttggctgtcctcggggactccggctgaggcacatctgccacttttgaattcccggctggagagctggcaggaccctgtggctgggctgggaatggagctgtcagcactctgcgtgggaggcctgggcctgtgcctgcatcccgctcaaggctgccccagcctggggtctccagcctggctgctgctgggccctgaataaagagaggccagtacaaagcccatggattttgggcctgtaga

SEQ ID NO: 143983 - DNA, 1743 bp, Homo sapiens
cagtctcaggccaagagctgcaggctggcatggctggggggatgtcagcggagtgccctgagcctgggccaggaggtctgcagggccagtccccagggccaggcaggcagtgtccccctcccatcacgcccacctcctggagcctgcccccgtggagggcctacgtggctgccgccgtcctctgctacatcaacctcctgaattacatgaactggttcatcattgcaggagtgctgctggatatacaggaggttttccagatcagtgacaaccatgctggtttgcttcagactgtattcttggctcttcttcctgtcccggggcatcgtgggcactggctcggccagctactccaccatcgcgcccaccgtcctgggcgacctcttcgtgagggaccagcgcacccgcgtgctggctgtcttctacatctttatccccgttggaagtggtctgggctacgtgctggggtcggctgtgacgatgctgactgggaactggcgctgggccctccgagtcatgccctgcctggaggccgtggccttgatcctgcttatcctgctggttccagacccaccccggggagctgccgagacacagggggagggggccgtgggaggcttcaggagcagctggtgtgaggacgtcagatacctggggaaaaactggagtttcgtgtggtcgaccctcggagtgaccgccatggcctttgtgactggagccctggggttctgggcccccaagtttctgctcgaggcacgcgtggttcacgggctgcagcctccctgcttccaggagccgtgcagcaaccccgacagcctgatttttggggcactgaccatcatgaccggcgtcattggggtcatcttgggggcagaagcttcgaggaggtacaagaaagtcattccaggagctgagcccctcatctgcgcctccagcctgcttgccacagccccctgcctctacctggctctcgtcctggccccgaccaccctgctggcctcctatgtgttcctgggccttggggagctgcttctgtcctgcaactgggcagtggttgccgacatcctgctgtctgtggtggtgcccagatgccgggggacggcagaggcacttcagatcacggtgggccacatcctgggagacgctggcagcccctatctcacaggacttatctctagtgtcctgcgggccaggcgccctgactcctatctgcagcgcttccgcagcctgcagcagagcttcctgtgctgcgcctttgtcatcgccctggggggcggctgcttcctgctgactgcgctgtacctggagagagacgagacccgggcctggcagcctgtcacagggaccccagacagcaatgatgtggacagcaacgacctggagagacaaggcctgctttcgggcgctggcgcctctacagaggagccctgaggtccctgcctgcactcgtcctgcctgcaagcctcccgttggtccccacagcagcagtgcctcggttcctctttggctgtcctcggggactccggctgaggcacatctgccacttttgaattcccggctggagagctggcaggaccctgtggctgggctgggaatggagctgtcagcactctgcgtgggaggcctgggcctgtgcctgcatcccgctcaaggctgccccagcctggggtctccagcctggctgctgctgggccctgaataaagagaggccagtacaaagcccatggattttgggcctgtaga

SEQ ID NO: 143984 - DNA, 354 bp, Homo sapiens
actgtgtctgcagtcgtggggccctgagcccgaccgcaggggttgctggtatgggggctgctgcagagagggagcggggcccagggctgacaggtgggtgccttggtcgcccctggggtcacctcgttctcccctgtggtcacccctggctgaggggtgttcctgggctgcccaccactggcctctggagtctagaaagaagaagcaaaagacacacagtgcgtccacctggctcctcccctccacccctgtccacgttggacccaccttcctccgtcccctggaccattctcccttccaccatggctgcacccaactgtgacccccacacccccatgtaccatccactcagac

SEQ ID NO: 143985 - DNA, 454 bp, Homo sapiens
ggacgttggattttattctggggaatgaggtgcctctggatgtttttaggtgatggagcaatatgccctcatttcaggggttctgccctggctgctgtgtggagagtgccctggaagaagggtgctgtgcacatggtggggagacctgtgggaagtgcttacggggtctccatgggaaatgataggcagggcagtgttgcccagtcttttaattgccccccccccgccccggccctgaaccattttagacattttcttcctatttactccccctgagatcttttaaaaaaatgaggtcaaattcacataacataaaatttaccattttgaacagatcagtggcatttagtgcattcacagtgctgtgcagccaccacctctgtctagttctaaaacatttccatcgctccaaaataaaaccctgtacccaccaaacagccactccccatccccc

SEQ ID NO: 143986 - DNA, 359 bp, Homo sapiens
gcagagtggttctggggagctgaagcggatgtgggttgtggggttcacaggggcactcctggagagcagagggctgggggaggcctggggtcctgcccaactcagccatggcagggtgtgacctaggggaggggcctcctcacctgcagacttcagtcttcacctgggcagtgaatatgggtgctgagaaaagcccagagtggccaatgcagaggatgtttattgagcacctactgtgtgcctgactatgccggtcccatgactaagtgccagttgtccacaccacggtggccacctccttcctccttctccctcttctgttgctgctttccccccttcaccttttcctccccccacct

SEQ ID NO: 143987 - DNA, 239 bp, Homo sapiens
cttctttcaaagatttccaaccagttacactgttttctgctctccattcattccccttcagaggtacctggtatcacaaggtcccatgtctttccagggttttgcaaagtgaatccactgactccttgttgttcttacccctcccatacctatctttgctctacagatatttagctttcacctatctctgatataagtcagttaccactcatccatctgctttctaacttacaaaactg

SEQ ID NO: 143988 - DNA, 876 bp, Homo sapiens
aagtgtcctggaggggagtgcaggatggccgactagatgcaacaaggtggcacagctcctaccgagggacaagacaactggtataatccaaacagatcttctgagagaaggtaccgagagtgaacagagggaaagacacagaagctaggctggagggacagaaagctgggaaccctacatgaggctgcagcatacccggactcgttcctggcccacaatagccccaggagaatgggtgagttgaactggcaaggagcaacctgttctcatcatgggtctctggaaccccggcaggaggagatgcctcaaccaccacagacactcgagttggcagcgagagctgcttagagaagtggtaggggcagcaagccagctcatgtggagcctagagggtttggtgcaagagtgtctgtagtggagcatggccaagaatagccatccccctaggctcaacgtgcttccataggagactttagccctaggggtcctgaactctgcagggttgtcttgcccatcagacagggccagaccaacatgagcaccccttggtcagctgccctcttccagcctggccacgcctccttgcagggcaacctcaggtgccctgggggcatgtaccatagcttctacactggcagacagtgccttaccagggaagagcttgagtagggcagcccctgtgaccatgcactatctcacagtctccctccccatactgcagcttcctctgggcccacagcagctccccacattgctttgctggtggtgtctgcacaggcgggttttgctttccttgccacaacagcacacctgagtacagtgttccccctgccaaccaggtttcagatggacactttgcatccagagtgagacagc

SEQ ID NO: 143989 - DNA, 742 bp, Homo sapiens
atgctttctccttgaagaaaatttttctatttcattattctattacattaacttatattgagtcctccatcattgaagtcctaccacatttatgtttagtacattataaaagtaactacttgacaaaataactcgagagtcacaaaattaaagcattacgagaatgggtttcgtagttctgcagactttgccataaaaatcagtattgccactttcttgatgtgtgattgcagatgaattgcttaacttctctctgtcccaatttcttcaacagaaaattggggtagtaattgtacatgctttgtggctttttgacaagacctaggcatacttcctgtcacataatgggagcttattaaccattcaccaccagaatattactaagggaccttggacgtcggcatgtctatgttactatcagcatgaccttgaaaaagttacttatttttgagaatcaacatcgttaattctaaattgaagataaaattatatatttttttatttggctcataaaagttttgttagaattagttcattgaaccccaccattattatcattgccctgtatattatttttaattataataatttgttaaatctgttgcgttaaagtagggcacaagatggaaaaagatgaagtctttatatataaattttcacatgccattctctcaaacacaggtttgaaaaataagtaacaggtgcttagtaaagtattagtgatcaggaaataatagaccaa

SEQ ID NO: 143990 - DNA, 277 bp, Homo sapiens
tgagatggagtttcgctcttgttgcccaggctggagcgtagtgatgcaatgtcggctcatcgcaacctccacctccccggatcaagcaattctcctgcctcagcctcctgagtagctgggattacaggcatgcgtcaccatgccctgtaacacagtttttaacaaaattatcttaaatcccttttgtttatgattctgaggttgttaaacttatggaagatttgtagtttgatttaaaaggactatcagctaagagtcagaaattcagctgaatttt

SEQ ID NO: 143991 - DNA, 433 bp, Homo sapiens
cattactaatttttccctctttactagagcatttcctgtgagcatacaaccctgctttagagaattcatcttagaaaatcctccgtccccacatacatgtccccctcttactccatttctgcttcccatcccaacaaaacttcttgaaagtgctgattagcccctcattctctcagccattctgttgggctttcatcctcactggtctacgggaatgactgttaagattacctgaaccagcggggcgtggtggctcatgcctataatcgcagcactttaggaggccgaagtgggcgaatcccctgaggtcaggagtttgagaccagcctggccaacatggcataacctcctctctactaaaaatacaaaaattaactgggtgtagtggtgggcgcctgtaatcccagtaactcaggaggctgaggcaggagaa

SEQ ID NO: 143992 - DNA, 115 bp, Homo sapiens
tgctgggatttcaggcatgagccaccgagcctggctagccttgtagtgttttcctctttcatgtgtacatcttaattaatattcagcagaagcctgaactcagtgttgcctaaag

SEQ ID NO: 143993 - DNA, 270 bp, Homo sapiens
atatgtgttcgatggttgatggaatattattggcttgtgttaggtcttggagggtatgaaaatagagaagatagaatccctgccctgtctgggaaggagacagacagataataatagacaccatacaatttgtcagactttgcaatgcttgtaagtacagcttctctaaaggagaacaaaaggaaggttgaacttctgagcaccttagtgataaaacagacctacattagcttcttctctgattcattaattttactggtaagaaataat

SEQ ID NO: 143994 - DNA, 415 bp, Homo sapiens
ggctgccacctcctcctcctccattaccttttgataggtctgattaccttcattttacagatgactctgggtcactcttcatcttttgtagaaatacctctgtagcaaatgtcatggggacattctcatctttggtagcagggagctcactgcctcctaggtatgttgttccattttggaatagcttcatgtgaatcttagcatgtgccaaggtggatgtggagtctttgcatcagaatcctgaactgctcatcctgaaaaaatgatgcgatcagcctgcttcccacagcgtatgctcagggtgacttcttgtgacatggagatggttggcagtgagctttctcttgtgacttcacacagggacaagtctgtggcattttaaggactagtgagagttcaggatggaggtgaagga

SEQ ID NO: 143995 - DNA, 216 bp, Homo sapiens
cactcctcactacttcctcagttaccatcctggtctagacttaggtcacagaacagctctgattggtgttgaatggcaggaatgccaaggctgccttttcctgggcctaagggatgtctggaggcctcaagcctccccaagtctcacagtcagattccacgacttcagattcatctttatgctgttagaattgccatctctatttaatcctcttca

SEQ ID NO: 143996 - DNA, 192 bp, Homo sapiens
ttctgacctaaggccctcatcaagtcacaaacgcctcccaagttaatttcctgccaccagtttctccttactgcagttcatcctccactctgctgccagaatcatcagaactaaagccgtgcgtggtgtttgcctgcttaaaaacatctcttggctctctgttgtctacaggaagaaatccaaactccttaa

SEQ ID NO: 143997 - DNA, 339 bp, Homo sapiens
tttgaggttaggattttcaggtcatctgggagaacttaaattcttccttctgctattacaattcttctcactcagttgcctgcctcttttttttttttaatttacttgtgactgagttgaagcccagcattttactttccttaatgatctgactttcataagttgataagtcatgaaatcattatcttacattatatgagatatgagataaatcataaatcatatgaaattgataactcatatgaaaaccaaccccaccatatgttcactgtctacttgtgtccatcttcgtcccacgcaccccacaaggaccttccccgccatgtgcctcaaacatca

SEQ ID NO: 143998 - DNA, 549 bp, Homo sapiens
gccattccacaatagcagttaaggttccttagagcaatcttagtgcactaaggaaccttactgcttctttgttatgtaatgcaacagtctaaagacatatttattttttgctaagatttagtgcaacagaaacagttatgcagacggattttgctgttttaaactttagcatctttcctcagcatatagatcaaaagaaatatgtagaacttggatatgtatgtcttgttaatgaaaacaacatgtgcaacagaaaagccttctcaaagtctcaagtgtgggcaaacaacagcaggagagtctagaacactgcaggacaccagaaaaactcatttccaacaaagaatagtaaatagttttcacaaatgagacttgttcatgtggtgatggcttttaaaagtctggttccatcaaagcatagccatggaagaagctgtgtaatttttcattacaggagaattctacttgaagcccaggaggcgggggttgcagtgagccgagattgcgccactgcactccagcctggcgtcagagcgagactccatctca

SEQ ID NO: 143999 - DNA, 387 bp, Homo sapiens
gccattccacaatagcagttaaggttccttagagcaatcttagtgcactaaggaaccttactgcttctttgttatgtaatgcaacagtctaaagacatatttattttttgctaagatttagtgcaacagaaacagttatgcagacggattttgctgttttaaactttagcatctttcctcagcatatagatcaaaagaaatatgtagaacttggatatgtatgtcttgttaatgaaaacaacatgtgcaacagaaaagccttctcaaagtctcaagtgtgggcaaacaacagcaggagaatggtgtgaacccaggaggcgggggttgcagtgagccgagattgcgccactgcactccagcctggcgtcagagcgagactccatctca

SEQ ID NO: 144000 - DNA, 293 bp, Homo sapiens
aatcaataaacaaagtagttataaggaaagcctccaggccacttcattcagatcagagccactttagctgctcagggacaagctgacaactctcccttccatgaagggtaccatgaggacaaccaaaaagcaggctcaggctgtacatggttggccatgccaggctctaccaaatctctgcggagtctagtctacaaagcagctgagcagcaggagaggtccacgcccaactcatgagtaaagagggcacacactccaggcctgggacaaagggccgagtggtctcaggcagc

SEQ ID NO: 144001 - DNA, 645 bp, Homo sapiens
gaaatgatttgatatctgagacttaaagtattccacacttacaaaaaaaaaagtgtgggggacatgaagacagaaaagaaacaatgttgataattgttgaagctagatgatggatacatgagggttcattatgctgttctctacttgcactataaatgtttgaaatttttaataataaaaaagctttttaagtaaaattatacttctatattaaaatatcagaataaaagggttttgtggtgattaaaattgtgtttttcatatttgggaggaaggaaggaatactgagcaacttttgaatttgttagatcaatttgtaggtagtgtataaaagctaaccattaaaagattagaaatataatctgtatcttcaaaattattatggggggaaaattaatatagaaaagtttgtcaaccaacaaaaggctaggaaagaagggtaaaaaagaaataagaaaagataataaatagaaaaccaaaatggtatggtagagtgaaatccaaatttgtcaacattataataaattttactaaattaacattaaaagacattttcacatgacaaggagcacataaaccaactacatgcactttataagaaatacagcataacaaaatcacaaagaaatgatgaaaataaaagaa

SEQ ID NO: 144002 - DNA, 557 bp, Homo sapiens
acaccatggaaagaaaaaaggcacagagtctgactttatcttttggccctgagcctagggccatcctgccctattgtaataggaaaggacagtctcaacagcagagtcaccagcactccctcagcttcacagcaatgcagtaaagcccccggtggcctgttccctggggcgcattgtcacatacactggcagaagctttgaaatgagaagtgctacatttaaaacattaaaaatttaaatatttcagttacgaccatgtaacgagagagacttaaggttccaagaggcagaatcatgatgtttttaactgtgcttactagacttaaatgtgttcctagataaggcggcctcagcacttccatcaggtttccagctatgcctgggaggactcccgctcccatcaccttctggcagagttgaagaatcctttcccaaatatctaaagaaattgggtaaatatcagcaaagcaaggttcttctcgtggggaggtgagtagaccgacggtgcccgtttgcacaatgtgctccgtgctccagctcagtgcccagcgccactc

SEQ ID NO: 144003 - DNA, 443 bp, Homo sapiens
gccttctccctctccctagtggctcacattctccaagcaccaacagctgatgtccccatgagcagatactggtcttatccccaggggctcctcctccaaacactgtttgatgtttactgtcctgacacagttttgtatagattccttatccaaaagaaaataggctggacgcagtggctcatgcctgcaatcccagcactttgggaggctgaggtgggtggatcacaaggtcaggagttcgagaccagcctggccaacatggtgaaaccccgtgtctactaaaaatacaaaacttagctgagggtggtggcaggcacctgtaatcccggctactcaggaggctgaggcaggagaattgcttgaacctgggaggcagaggttgcaatgagccgagattgcgccagtgcactccagcctggcagcaaaactccgtctcaagaaaa

SEQ ID NO: 144004 - DNA, 539 bp, Homo sapiens
tgtctacgtattgtctatgattgcttttgcaatacaacagcagaattgagtagtggtgacacagtgcgaagcctgatatatttactatctggcctttcaaagaaaaagtctgcaaatccctgatctagaggaggaaggacatgtcaattgacaactactggtgtgtggttgaaaaaggcccttttagcaaacagaggagaaaggacttcagtttgtccagggagggcagggaaggctgctaggaggtggtaacttttgagctgagtcttgaagcatgaatttgtcaggtagacagtgaaacagcatgtgcaaaggcacggaggcaggagagagcttgggacgttccaggcttgggataagtgcaggcagggttaaacccaggacaagtgggagctgagccctcagaggtcatcaggggcccaaacttggcaaatcttgaaaaccttggaaaccaggccaagatcataaattctctgctgagggtcacggggagccatggaggagtttaaagcagggaagtggcagtgtctaatttggct

SEQ ID NO: 144005 - DNA, 471 bp, Homo sapiens
aaaaaaaaaaaaaaagaaaggcatgaatcatttgttactgcttcaaagacaagcagtgtttatttctctaagtgatcactatctcttatctcatcacaagatacagaaaaaccatgtgctagaaaaccagagataaaaactgcccttgtgttgcttaagtctaacactgaatgtgactgccctgacttctgggtcctatgactgcaaggcttcaacttagactccatttatcaatttttaaagacctttcagtctcatttgtttccgaaattaaaggaaaaaacaacaacaacaaataacgttttcttctgtcaggatacaccaaccctccatgacccatttgagtgctttcctgaagtttcaggtgagtcaataaacacactaaggacaaaggaacacaccagcaagtgtacgtatttccttgtcatgctcctgtcacaccgcaggccacaggctgcagtctccatgctc

SEQ ID NO: 144006 - DNA, 133 bp, Homo sapiens
gcttaagtggtaaaatattacaaagatagttgaatcctctaccctagcacatttcttacccttgtgtctgcaggaagccattatgaatttgtggtttatcatttcaagctactgcatgtgaacttggcattat

SEQ ID NO: 144007 - DNA, 384 bp, Homo sapiens
agtaacaggaagatcacaggagcttgaggtggagggacaaggaggttgcacctaacctgtttctgaaaggaagaaggtcggggtgtggagagtggttggtctgagctcagcatgggcaccagacccagcatcctgctcttgagaccaagcccccattgactgtcagcaaggagcttgaggctggatggcctctgggtggaaggcagcccaactgcaggccacccctcagatggatcagaagcatcttctgcttcttcaagaatgagaacaaggaaatggtgggctgttgggggtgctcagtggagaagccagcagctgtccattagtggggtggagtcagtgtggagtgtgttaaggacaggggcacccctggtgtggtggtaa

SEQ ID NO: 144008 - DNA, 323 bp, Homo sapiens
cttcctaccccttttgactgggaaggaagagggcaggtgcagaaagggtcagggagtagggagacagggaaagtggatgaccacctcactccctccttgttcttcaaaaccaagttcacacttgagcatggcacaggccttcctgccatgcctggctcaccttcctaaccccatgctttgcacatgctgggtcctctgcctggatgcagaaggctggggaattctccttcaatgttcggctcccactgcgcctgcgcctccggtgaagtcttccccaggacccccacgcagagtccagtgccacctccctctagcccccgtct

SEQ ID NO: 144009 - DNA, 141 bp, Homo sapiens
tgtccctaagctctttgtgttgcatgtaactcaaacagtggctgacttgggacagttcacaggctttctctggtatgctggtattaaggggtttggtacccaattatactcataggagtgagactggtttgtcttacatct

SEQ ID NO: 144010 - DNA, 318 bp, Homo sapiens
ggaagggtgtgagtaagaacatactatagtttattttcaagataaagatgctgtcatcttgccaagactcagatccaagtatctcaacaattcccctagacaaaatcatctcccctcccccaaaccttcagctcatgctgagcccagtactgcggcaagaggcgttttagaactcctttcaggcatcgacacctcctttgaacaagagacttggtagtcatcccgtgtacatttggccaaaacttccttggccacgagactctaggtgatgtgtgaagctgggcagtctgtggtgtggagagcagcagggaaagcaca

SEQ ID NO: 144011 - DNA, 401 bp, Homo sapiens
gtgctcttcatagagaggtagaatctctgaggacaaagactcatgtgggacatgccagctttgagatgtcaagtggactgtggattacacatggctgagcctcagaagaggggttggggctgcaggttcagaggcgaggcggttgctgaaactacaggagtggctgaaattgcccagcagatgtacagagggggagaaccagggctccttcaacagtctcagctgtttccttccacctgcaaagctgggagccttccaactaggaagtgccaaggtcagcgcaagcttgcaggcctggggacttgggaaatgcgtctggctgcacccgggacctggctgaagggctgggccatggagtctccagcggttaggcaaccacagctgactagaccagtgatgcc

SEQ ID NO: 144012 - DNA, 606 bp, Homo sapiens
aggggcttcaagccaggaccccggcctgagggagcctccgggcaggaggaagaggcccaggaagccatcgctccgctccttcccagctgtttatgtggtactcagggtactcggccaagggcacggcgaccccgcaacaccccaggcgtggggcaaagacagcggggttgcggggctcctgtctgcccggggcgtcgagagttcctgccgccccctcccgcctcatgcacggaaagcgccgagccacggcgtgcggcgccggccgagcgtgaaccggagtcggggttcggctaccccgagcggctctgtgggccgcggatcgcttcccctggggcggccacgcagggttgcgggccatggcctggggcgcccgtccggaccccgccgctgcgcgggacgccgctcccagcctcgaccaagggcgcccgggggcggcggcggcggcggcggcggtgactgcccggggcggcggcgcggcgcgggggcggccaggaggcgaggaggccgggccgcggccgagggcccagggcgcgcttccggcgggcgtcgcgcgcgccgcggtaaatgggaggctcggccgacaggggcgggggccgcgcagccggg

SEQ ID NO: 144013 - DNA, 208 bp, Homo sapiens
tctgactacaatccttcctgatacatggaccacatatatttgtgacacctccatggtaagatcagagaggaggctcagtgtatagctagagaatgagcttggaggtagatggagaggggggtatgatgtgggtggaaacaagggccactggaggcattaatccttgaggcaacaagctccacaagggcagcagctgggcccttctcct

SEQ ID NO: 144014 - DNA, 772 bp, Homo sapiens
agcgggtgggctggttatcaggttcgtcaatattttattttactaaatactccctgctcttttgggagttggcaaacaacagcctgcaagccaaatctggcccatcaccctgcttttgtaaataaagttttattggaacaaggccatgttcactcattctcatatccatggctgcttttgcaacaggttgagtagttgcaacagagaccttacggctggcaaagcctgaaattttctaccaaaaaatttacagaaaaagtttgctgacctctactctagaagatcagttgataaaatacaacaacgttttcatgcccatcattatttttcctatttcaatgaatagcatggaaaccaaggtgaagtaattgaactgaagggatttctgaatgaaggattcatgtgttcatatgtttagacaaaattactcattagactagtttttagggagtaatttgctgctgttaaactacctcttcatatgaataattttttaaaagagcagacacatatatacttaaataggaaataattttgaatttaataacttcatgttcatttttaaaattgtggcaaaatatgcacaatataaaatttgccattttagccacttttaagcattaagttcattggcattaagtatatttgcattgttatgcaaacatcaccaccatctgtttctagagctttttcattctgctatattgaaacccattaaacaataactctccatcctcccgttcccccactgtcctacattctgtctttatga

SEQ ID NO: 144015 - DNA, 367 bp, Homo sapiens
tgtaaataaagctttactggaacacagctacatccatttgtttacatgttgtctgtaactgttttcatgctaccacagcataattaagttgttgcaacagagaatatatggccctcaaactttacagtattcaccatctgtccttttacagagaaagctagtcagccctgctctagatcagcagttctcatagttacgttctcagaccagcagctttgcaaccactgcacatttccaggcttcaccgtagacctattcaatgaggaattctgggtgtagggcccagcattctgtgttaataagctcctcgggtgattctgaaaattaaagtttgaaaagcaccatctagatttctggcctggtggct

SEQ ID NO: 144016 - DNA, 316 bp, Homo sapiens
tatccactctcgctactgtatcctagggaagagactgaactttgaagaagacggtgccctgtgaggagccaaggcagctctgggtaagcgtctggtctttgccagcttacctgcgcagggaacctctatcctcatatcttactggtggagtggcaggctggaggctcctctgattggtgagatttggaggtgaggtaagctttcagatgctccctgaacatcacttgtagaatgtgcagagagtcttatgggaatggctgggaaggcaagctcactgggagatgagcagcccagcctgtaggatacagtagggaga

SEQ ID NO: 144017 - DNA, 299 bp, Homo sapiens
aatgataaaaatgaatggctgaggagatatacaatacttgtttgtttttcactaattagagctagattttgattatttatttagagacagcagtctctctctgtcacccaggctggagtgcagtggtgtgatcataactcattgtaacctcgaattcctagggtcaagcaatcctttttcctcatccctctcaagtagctggaactacaggtgtgtgccaccatgcctagctagtttttaaattttttgtagagacagggtctcgctatgttgcccaggctggtgtcaaactctgggtc

SEQ ID NO: 144018 - DNA, 633 bp, Homo sapiens
tcgcgtgtacggcccgacgtctgggatatcagtgaacaaggcgctcgagaaaatcggagtcgctaacaagttcccagctgatgctgatgctactggcctggaacaccacattaagaaccattcataggtagtattttttttaaaacatcgttgtgttgtgcttaacattgattgataaaggaatgtgcttttaacatctccttaaaaggtcccttagatttcctctagataaaagaattagtaatttcatctgcaacacatacaattttttttaattttataaaatttagttaaatgtttgttttacactgactatggaaacagcactattttagatacagaaagaaatcaataaacatagcctgtgttcacaattcactcatccttttgttataaaaagacttgaaattagggttatgttttaacatgaaaacaaaatttagccttagcttttatccatcttaactttagaaattatatttatgcattgtttatagatcattgtcattcgttgttgcttaagtgttcatctgattttatatttatgatgttaaaaatagactgctgaccaataaataataaaatatttacactccattctatttccctgtattcacatcctattaatgaaaa

SEQ ID NO: 144019 - DNA, 368 bp, Homo sapiens
agaaggagggaaaagggcaggagggaggtagggattgataaacccagtgtgatgaaatcaaacattaagggaatccaggtgaaaggaatataggacttctttgtattattctgtagcttttctatatatctaaaattactccaaaatcaaaattacacaaatataaacaagaatttgaagatatctatgtgacatggtttggatttttgtccctgctcaaatctcatgtcaaactataatccccagtgttggaggaggggcctggtgggaggtgactggatcatgggggtgggcttcgcccttgctgttcttatgatagtgagtgagttgtcacgagatctggttgtttaaaagtgtgtaacacctcc

SEQ ID NO: 144020 - DNA, 252 bp, Homo sapiens
cagcagtagattcagggtatgcatttttgcaggagcactaataagtgacgatgggtcattatcagggcatcacagcagggggcacgtgttgtcagtctcttctgttgttggtgatgttaactttcatctcctaagatagtttctatcagatttttccacctgtaaatgtgcctttttcctgtggtggagatagctttgagtctgtatgaatatccagtttcccaacaaactgttatctaatgatagcatcct

SEQ ID NO: 144021 - DNA, 380 bp, Homo sapiens
agcccccattgcgtcccgccagtccacactctaacccccacttagactttaatctttcccagaccaatcacagaattcccaggggccccctcaccttcatgttgggaacccttagtagagtggtacaccccgtcatcaggtccacccctgccttctccccacataggtacattttgcagtgagggcctggctgtgggggtcccctggccttgaatgcagtcactggtgtctgcgccctatccacctccctcaacgcaccgattcccaggcccaaggctcagggcctctaggctctccaaggcattctcagggtgtgggccaccacagtcctggagggtgaccccagaacctaggccaggcgggaggccagggggcttggc

SEQ ID NO: 144022 - DNA, 315 bp, Homo sapiens
agtgactacaccatagtcaacagtggtttgggctccttgcccctgaggtagaacaactctggaccaggtgctatttgagccaatttctcttacggaaatttttgcaggaaaaaatgtaatgcctgtaataacagattagactagttcacgcataggaccctagaatgttacagaggatggagcttagagattattcagtcaaaaaccttcattttgtctttgagtaaattagaatgctctgagggaaagtgagagctaccttagatcagtatcagaatcttctacaaaaaattagctgggcacggtggcacgcac

SEQ ID NO: 144023 - DNA, 112 bp, Homo sapiens
ttctccaggccccacgtttgcactcacgcatccatattttggcaaagtttggaccagagtacaaaggcagtttgtcatattcttctttacactaaactatttatttatttat

SEQ ID NO: 144024 - DNA, 373 bp, Homo sapiens
aaaaattatctcagaattctttatcaaagctaatcagtcatcaagtatttcacagcaattatctatgcccaaccactgttagattcacgagtttaagaggtcatcgttgcttacttcataattgggaaggtaagatcatggagcctcctccctagaaaggaaccaaaagggaaatcatcactgcaaatggtaaaaatcatattgtttttatcagactgtagaaaagtctaattgcagcaattgttaaattactgttcagaaatcattacaaacaagtgtgaggtggtgtggtaggaagagaaagagggacagtgtggaactgtgggaatatccctagtctgggagttgacagacatgcattttaagcacctct

SEQ ID NO: 144025 - DNA, 453 bp, Homo sapiens
agtaccagccttacccttactgtatgttcaatgttctgggtttgactctagcacccttttggctttctgtttcttgttgtttgctttcttttcctgtaggaagaagaagacagagctcttaccagggggaggcagagatggcacagcaagagacatgcccccagaatgccaccaatgccccaggacaggcccacccatgggaccaggttatcaggggccctgtggggatggggtggaatctgaagggtgagccttcatccccaggctgggagtgggtgagacgagactggggcctgtatgtctgagtgccccccaaacccagcagtcatgttgcgaggaaacgaaatcacgttacttcttccagctgatgttccacttgtttcttctgttgtttctgtggggagagtcaaataaggtgatggagggtggccccctcaactctattccccagac

SEQ ID NO: 144026 - DNA, 593 bp, Homo sapiens
gcttgtgactagctcttgatggaaggaggtggcttctagctgggctgtgccaccccaggctgtggagttccaggtgaacctggtcctgacaggagtcagggccttgggtctcaggtaaggttgtggcgtggacttgctgaatcctatcactgtccctgttgagcagccatactgggccgtgtggcccacggtggtctatggttcagatgggtggtcctgagagcagggtctacacagcatctgactcactatgtggcctgggcaagtccctgggcatctctgtgcctcagcttcccagctgtacaatgaggtggggtaagattagatcagtattttttctttcttcttcttttttatttcttaggagacggggtctcggccaggcacagtagctcacgcctgtaatcccagcactttgggatgctggggtgggaagatcacttgaggtcaggtgtccgagaccagcccggccaacatggtgaaacctcacttctactaaaaatacaaaaaattagctgggtgtggtggtgcatgcctgaagtcccagctactcgggaggctaaggcatgagaattgcttgaactcaggaggcg

SEQ ID NO: 144027 - DNA, 423 bp, Homo sapiens
tgacaacgtgtgtaactgctgctccacaggacagacatttgtcttctgacaataaagaaagaaacatatacctagagagccaggtattccttgagaaaggtgttcatactcatcaccttttagaaatccccctccaagtttctgacaatccatctatctctaaactagaaacatttgtgggtttggagcctgcagcctgcctggccttacctctgactactcagctcccttgaagaggatcagccagcctactcctgagagtactgccaaataccacaccctgggtctgtgtatccaaaggtacaggaagtggtctgtccaatgcctgggtgattgcatcattccaacaagcttcaatgtacaaagtttgagtcactctccactctccacatagctcttcaacccaaatctccttccagccta

SEQ ID NO: 144028 - DNA, 331 bp, Homo sapiens
ggggcttccggcaagctgctccccagtcagtcccatgaggctgctggcctggttcccatggccccacttgctttctggggctccaggtctcctagacaggctccaggaaaagcatttccctcttcgttgcttcttgggattccccgtgggtgcttgttggttctcgagagagatggcgatcagtcaggagttgtgggtgagaagcagtcatggcatctccaggacagggttgagttggggtcagggggtgagggcctaaggatgtgactccctgtctcagtttcttgaggcccaggactcaaagtccccacctcaggggactcttagacca

SEQ ID NO: 144029 - DNA, 603 bp, Homo sapiens
ggtcacgaatggaataatatattacctgttcttatgttgaaaagttatcaaaaataaactttcagcagcaaccacaatttacataaattcgaatacaaattaagacaaaaaattggggtaggctcatcctccattctcactttgtttatagtgagacctgtgatagtcacatttgaaattaatcttaaagtctttagttagagatagtttcctacctttaatcattgttactaaactgtttaaaaactgggagggaaaattgaaaagtctgccacactggacatttctttgtttcaaaaattgagtgttttataggcgtctgggtactctgggaggattccaagctgcttgtcatgttgatactctcaaacctgtacttgagtcagggagacagccataactacatacaataaaagcataaagggggaattagaactaggggagagtattgacaggtgggactcacctaattcaaggctaccagtaggtatttgtatgctgtgtacctttctagtctttttagtaacagggttaagaggtagaaaacaacctctaagtaaagagattgagattaatttgaaatgtaaagagagcagcagtttt

SEQ ID NO: 144030 - DNA, 510 bp, Homo sapiens
ccactcctcttcagaaagctatccttatgaaatgggagtgcacttacagaatggtgaacaccttgcttttgggtgaaatacatgctatttcttgacatcacctaggtaccttctgcaccagcctgggtagatcaatatttctttttgcgtgacacgctgatattgctgctagatagctttcctttggaagcaaaattcccaggcagtgccctagagctggagcaacattagcaacgtaaactttctctgcgatgacaagcagagaggcctgcctccatcaaccgacatgcactgtgacagctcccagcggcaggtagattaatctgaataatgtcagaatgacttttctcctcccttgtaaagaggttcagtgttgcgggctgccaaggagcagacacattttattttaaatttaaggatttttaaaaatggaggacactttacctctgaattaaatgctcagttcctgagttattgctggacatgaagaggaggcagcagccatcccat

SEQ ID NO: 144031 - DNA, 498 bp, Homo sapiens
ggcattgatatggtttgtctgcgtctcatctaaatctcatcttgaattgtaattcccacatgtctagggagagactggtgggaggagactggatcatgggggtgaatgctccgtgatagtgagttctcatgagatctgatggttttataagggactcttccctcttcgctcctaacacttctctagcctgccgccatataagacatgtctcttctcgttctgccatgattgtaagtttcctgaggcctccccagccatgcggaactgtaagtcaattaaacctctttcctttataaagcacccagtctcaggtatttctttatagcagtgacaaaatgcaccaacacagatatgttgctgataaatggaactacagaaagggacaagatcaactggagttaagaagagaatttaaggtggcttatgcctggcaaagcactgtgtttatacatcttttgtgagattatactgccacgcagaacgcgcctaatggggatc

SEQ ID NO: 144032 - DNA, 3543 bp, Homo sapiens
  misc_feature (10)..(10): n is a, c, g, or t
  misc_feature (26)..(26): n is a, c, g, or t
  misc_feature (88)..(88): n is a, c, g, or t
  misc_feature (92)..(92): n is a, c, g, or t
  misc_feature (111)..(111): n is a, c, g, or t
  misc_feature (132)..(133): n is a, c, g, or t
  misc_feature (178)..(178): n is a, c, g, or t
  misc_feature (197)..(197): n is a, c, g, or t
  misc_feature (255)..(255): n is a, c, g, or t
  misc_feature (343)..(343): n is a, c, g, or t
  misc_feature (382)..(382): n is a, c, g, or t
  misc_feature (541)..(541): n is a, c, g, or t
  misc_feature (579)..(579): n is a, c, g, or t
  misc_feature (883)..(883): n is a, c, g, or t
  misc_feature (1149)..(1149): n is a, c, g, or t
  misc_feature (1220)..(1220): n is a, c, g, or t
  misc_feature (1274)..(1274): n is a, c, g, or t
  misc_feature (1451)..(1451): n is a, c, g, or t
  misc_feature (1462)..(1462): n is a, c, g, or t
  misc_feature (2206)..(2206): n is a, c, g, or t
  misc_feature (2294)..(2294): n is a, c, g, or t
  misc_feature (2307)..(2307): n is a, c, g, or t
  misc_feature (2425)..(2425): n is a, c, g, or t
  misc_feature (2817)..(2817): n is a, c, g, or t
  misc_feature (2819)..(2820): n is a, c, g, or t
  misc_feature (2907)..(2907): n is a, c, g, or t
  misc_feature (2927)..(2927): n is a, c, g, or t
  misc_feature (2934)..(2934): n is a, c, g, or t
  misc_feature (2938)..(2938): n is a, c, g, or t
  misc_feature (2990)..(2990): n is a, c, g, or t
  misc_feature (2992)..(2994): n is a, c, g, or t
  misc_feature (3005)..(3005): n is a, c, g, or t
  misc_feature (3145)..(3145): n is a, c, g, or t
  misc_feature (3184)..(3184): n is a, c, g, or t
  misc_feature (3190)..(3190): n is a, c, g, or t
  misc_feature (3229)..(3229): n is a, c, g, or t
  misc_feature (3270)..(3270): n is a, c, g, or t
  misc_feature (3273)..(3273): n is a, c, g, or t
  misc_feature (3286)..(3286): n is a, c, g, or t
  misc_feature (3298)..(3298): n is a, c, g, or t
gggccgcacnggaccagggatgagantgggtgcccgggactcgcctatactgcctgggggtgcagcccgcactcctcactatagtcanatcnactatgcgtgctttccagnggcctgggagaggactccatnnggagggatgcttaccttgtgggctttggaatataagccctttcancttctccgctggtcctcancacgttggcaaggcaggtattgtgaccctgttttctcaggtgaggacatggaggctgngaggggtctagagactggcctggctagtaggaggctgagtcaggatttgaaccagcagatcatctgaccccggagccagtcgtgggcngcacagcgggagctgcaaccgaggctcttgactcctgcntcgtcattccctgaggtccacaggacaaccagttggggacctggggccccatcctgatgccctggggagaggtgctaggccccttttgggtctatgggctacttttgggccagtggagctgggtaaagaccatctcaaaccctgtgccaggggaggtcngactccaagagcgccacctttgggcttccagctgtgtnggctggaccaagaaggctcagagaattagggggttcgtatttgatccttttccttccaagactgggattaccagataaaacacagggcatccagttacatttgaatttcaggtaacaatttttttaagtgtaagtatgtagccaatattgcatgagaaatactcatgctaaaaagttattcgtcgtttatctgaaatgcaagttcaaatttaaccgagtaccctgtatttttatttgctaaatctagaaaccctctccaagaggctccttggcccactcacagggagagcccgatctccctctngacaggggaggccccctttctcaggccagaaaagatcttgtagtaaactactcaagaggctgaggcaggaggatcgcttgagcccaggaattcaagacctgcctgggcaacagagcaagaccctgtctctagggaagatatcctaccgtagcctccctcggggactcccattcctcccacctcagggccagtcaagggaacaggcctctgctctgggcagaagtgccggcagccgctctctgaaaagctaggtgttgcctcagggnctcccggtgtcctgtggaaaatgcctggccacggtttccatggttcccaggctccaaccctgcagttctcngccctcattcaggaggggcctcggcagggtggggggtgccgtctttcccttgcnggagccccaaggactctgccggctccctcgctttggcagcagcactgcccaccctgtctctggaggttcccccgcctcaatccacccagctaccccgaaaggcacaatcataggcctttctcgtcttttaagggtttttacttccatggggaactatgtgttggatgagaaaagtanccggggaaggngacagaggttcagaaagctctgcgagtcctggacgctggtctgccttcttggctcaccctggaaggtggacgctggccccacacatcccctcttaaagacgcaggccgatagccagcagatcctggggcttgctggccccaagtgagttgtcagggtttcagaggacaccagtcatggcaaccccagctccatggctgccacacaggcctgggcttcccaggactgcctccttcttgttcgcttatgtagatgaaaaatgaggtaacggcactcccctgccccaccctcctcccagaagtgcccagggtgtaaacgcaatagcttgtgtgaagtccactggaacccaggctcaccaagtcagtcttaaccaacacaggccccagcacccgcagagcagacactgcgatgacaacggacgacacagaagtgcccgctatgactctagcaccgggccacgccgctctggaaactcaaacgctgagcgctgagacctcttctagggcctcaaccccagccggccccattccagaagcagagaccaggggagccaagagaatttcccctgcaagagagaccaggagtttcacaaaaacatctcccaacttcatggtgctgatcgccacctccgtggagacatcagccgccagtggcagccccgagggagctggaatgaccacagttcagaccatcacaggcagtgatcccagggaagccatctttgacaccctttgcaccgatgacanctctgaagaggcaaagacactcacaatggacatattgacattggctcacacctccacagaagctaagggcctgtcctcagagagcagngcctcttccgacngcccccatccagtcatcaccccgtcacgggcctcagagagcagcgcctcttccgacggcccccatccagtcatcaccccgtcacgggcctcagagagcagcgcctcttccgacggccnccatccagtcatcaccccgtcacgggcctcagagagcagcgcctcttccgacggcccccatccagtcatcaccccgtcacgggcctcagagagcagcgcctcttccgacggcccccatccagtcatcaccccgtcacgggcctcagagagcagcgcctcttccgacggcccccatccagtcatcaccccctcatggtccccgggatctgacgtcactctcctcgctgaagccctggtgactgtcacaaacatcgaggttattaattgcagcatcacagaaatagaaacaacgacttccagcatccctggggcctcagacacagatctcatccccacggaaggggtgaaggcctcgtccacctccgatccaccagctctgcctgactccactnanncaaaaccacacatcactgaggtcacagcctctgccgagaccctgtccacagccggcaccacagagtcagctgcacctgatgccacgnttgggaccccactccccacnaacagcnccanagaaagagaagtgacagcacccggggccacgaccctcagtggagctctggcnannnggaatcccctngaagaaacctcagccctctctgttgagacaccaagttacgtcaaagtctcaggagcagctccggtctccatagaggctgggtcagcagtgggcaaaacaacttcctttgctgggagctctgcttcctcctacagcccctnggaagccgccctcaagaacttcaccccttcagagacacngaccanggacatcgcaaccaaggggcccttccccaccagcagggnccctcttccttctgtccctccgactacaaccaacagcagcnganggacgaacagcancttagccaagancacaacctcagcgaagaccacgatgaagccccttctctattaagaatacaaaaattagctgggtgtggtggcacacacctgtagtcccagctacttgggaggctgaggcaggagaattacttgagcctgggaggcggaggttgcagtgagccaagatcacaccactgcactccagcctgggcaacagagcaagtgtctaaataaaaagaaagaaagaaagaaaggaaggaaggaaggaaggaagg

SEQ ID NO: 144033 - DNA, 487 bp, Homo sapiens
caaactaagaattggactagaatttagaatgtatgctcattggccttttagctatttatagctggagtcccacagataccaaatgtcatgaatggaaatccacatgcccatcattgacaatctaaacagaacttgtttgattaagaataaaggaggaggaaaacaacaaaggaaactatatttcagaatatgggaacgtgattactatcccaagaatataaaaaagtatttttatactatctgacataatcaaaagaatatgaattacatgaaacaagagccagaaggtacaaggatgaattaagaagcttgttaggcgagttaaagacatttcaagaaattgaaaatataggagtattagagtctttattgaaatcagtgaaggaattgacaatgtctgtcatcgaattagagtttaaatatcagatgctgtctcagaactcataagaaaaatcaatgataaagagatgatagctctaaaatggta

SEQ ID NO: 144034 - DNA, 692 bp, Homo sapiens
attgagctgttctgtaaggcaagtgtcaagaatttaggaagttccatttaatttagcctttgtgaaaaaattctactttttgtatgaattgtgtgccccacccccactcccaaatattagctccacaaaggcagaatttttatctcttctatttgttggtgtgttctgagtgtcctccacagtgtctggctcaaagctgcttaaagatgcttcctttatggaaagaatgaactgtaataatttatatcacccccccatatagaagacataaccttctcttatacccccaaattcacaaaaatagatatgaaaggattttctttaaaagtactaagaacttgaataatttatgtagtcttctgtgttatattggaatagcctccttgttgttaatacagacactttttttaaaaaaaagataaataacttttcagtttgtacctgttacgtttaaactttatttttaaactgcttttataacctgagcaattgtttttattttgggagagaccttttccaagtagaaaaccattttaagatttaccagcgcagcactaattacttcaatttctgtagtatatttctgcaaattacaaagttcaaattatggctcttgtaaacagggtttcctggtgaccatggaacctgtactttcatttctcccgcctggaaagctttcttaaagtgctagt

SEQ ID NO: 144035 - DNA, 483 bp, Homo sapiens
aatggcaaaaaactttccaaatccattaatggcttattcaaaacagcacataattcagaacctttgccatttcccagctgacaaaaatgccctattaataaaaatatcagaaaccacacatgtatagtttcactttgacttttgaattaatgtctgatctcctgagttttaaattaacaagatttccctgcataacctatacaacttcgtcattcacaactaaatcaagcagctgggttggcttaatcagtttggtttggcagggacgcgtttgtgtagagttttcaccaaatggcatggattttcttccctacagaacagggttgtgcgtgtgacaggcttgtgcttggtgtttctgaagcctcctcattgaagccacctgtgcattatggtgccaactggtgggtgatcctgtgggtctgctgggtgaggtggaggtgtgtagcagcttctgaatgaggtacagagttacttttagggagg

SEQ ID NO: 144036 - DNA, 287 bp, Homo sapiens
atgatttgcccgagcagacattattcacgtggcaatggttatcacactagcaatgacattctacctaagtttctgaccaagttacagtttcataactttatacatcacctcttgcattattgtccggtgtccccagctccccacagtttccttctgctttctcctaaaatcacagtgaactctacttccttttctcattcaccatattcttgtaagtcccttgttagtaatttcccttttcaagtagttgattcatttattttacgcgatgccagctgtgtagttgt

SEQ ID NO: 144037 - DNA, 715 bp, Homo sapiens
ggggcccagtggggacaggcagtgaggggcactagggagaggggggcccagctgtgcgggaccgggggatgccctgggtgtcacgtgtcaagatggcctggcctggtgtcccccaggagccctcccctcccagctcagcagagcgggggccacgcctcactgcagtgggagggggtggaagtcacaggacccagcaggttcagcctcctggtgggggccggcaagttggggcctctctctctgtgaccctgggtgccttctctcctgcccacgggctgagcctcgggtggtggctggaggagggaccagcaagtcccacctccccacacagaaggcactccgccagtcccctcatccacggtcagaaatgtggaagattttgttctgggcagaaattgcccaaaatactcatctgtggtataggggtcggggtgggggccagggctacaccagacagcacccccaaggcagcttggataggtgtcacccaggtcaagaggggcttggcctcatttggacacagtctttggagaaagaaaagagcagccagggtggggggcgtgggtcgcagtgagctgggccagggaccttgaggacaataggaacagagtaggcatgcagtgtccccagactccgatggccaccggggccgggggagagactggagcccaaagtccccccctaggcagccaaagggaagtgaaaggggagcccc

SEQ ID NO: 144038 - DNA, 367 bp, Homo sapiens
taaaagggaaaaaagtactgttacaatggagaaatattgtgaacagcatcttaactgagtgatcaaacctaatattaccttttgtctgtgatgtagtacgtaaagaacacatcactcattagaatccctgccaaaaatatttaacctgaagctaatcaagaggaaatcaccacagaagtcctaattgagatacattctgcaaaactacaggcctatactgggggaaaaatgtcacagaaggtagggagaaaggctagggggactattccaaattgaaggagactgaagaactatgacatctagctatggaatcggggtggggacaggacaaattataaaggacattattgaggtcaactgaggagat

SEQ ID NO: 144039 - DNA, 221 bp, Homo sapiens
ggggttttgccatgttggccaggctgctctcgaactcctgacctcaggtgatccaccagccttggcctcccaaagtgctgggattacaggtgtgagccaccgcacctgaccgggtctcttactttttacttaattcccctttcgcttcagcatgctgttctacccaccccacatatgggtaaattataacagggctaagagcttcagtagcatttctgaga

SEQ ID NO: 144040 - DNA, 693 bp, Homo sapiens
agggctcctgggtaacccacattggttcttggcaaatagtgagaaattcttctcactttggaaaactgggagcacccaaccaagctccaggtgtcctgtccatttccaccacttcccttccaggagtttccttgcattcccacttgtggggtgtaatcctgcccatggtggaaacgtcacacctcctttcccctcctcagcctggcccttccccagcagccaggactctactctcactatggagacgtcctcctttcctgagctctctgcttctgtgcccacatccccggcgccatggctttttcaccttctgaagccatgattgcccttaactctttttcttttctttctttctttttttttttttttttgagacggaatcttgctctgtctcccaggctggagtgcagtggcgtgatctcggctcactgcaacctctacctcctggtttcaagcgatcctcttgcctcagcctcccaaggaactggaattacaggtgcccgccaccatgcccggctaatttttgcatttttagtagaaacggggttttgccatgttggacaggctggtctcaaagtcctgacctcaagtgatctgcctgccttggcctcccaaagtgctgggatgacaggcatgagcccccgcgcccggctacctgaacctcttttgacaagtgctgatatgaaggcccca

SEQ ID NO: 144041 - DNA, 415 bp, Homo sapiens
acagttaaccacagtgtctcacagggtcctggagagatagctcttggcaccctctgccactgttcaaataccagtgtatgtcattgagagaccatggctttgaccagcaaaagttcaacttttctctgtggtatacctcagtttttcttctttaaccacaaatgtacttgtgcttttaggtaggtcctttggaagtagcacttacggtttgcagagtagcatttttggtttaccagccgttatcttccatattcttatggagagttttagttgctgttgtgctcacatttgctcatggccttggaaggatgtcgcatggaagtctcccagatggatctctgaccacttgtcaaatgcagagaaggtttgccgcaggatctcttccacatgttcgttattctgtagggtttgttat

SEQ ID NO: 144042 - DNA, 364 bp, Homo sapiens
ccacaagtccaaaaacagccagttgtctgctgccagccagaactttggggagaaacacagcttaatctctctccaatccaaagaatatggagctagtaaattcaactatcagttgaatttgcttgcacctcagagccccagtaacaccaggaacacagtgggtggctttcaggaacctgaaaaactggaccctgttgagccacatcagcaggacacagtggtgctcaaggtggcagcagagaagccaggcagagctttatcagaccccagggaaaaaaaggctgggatggagaacagaccccagatctacccactaatgcctcagatgtctggcccagtgactgctgccagggccacaggctca

SEQ ID NO: 144043 - DNA, 365 bp, Homo sapiens
ctgtggtgtgtggaatagattggaagaggagcaagactgaaggcagggagaccgggtgctacaatgatccacgtaaggaagagatcatggtggggcacggtgactcatgcctgtaatctcagcactttgggaggctgaggtggttggatcactctaagtcaggagtttgagaccagcttggccaacatggtgaaactccatctccactaaaaatataaaaatgaatcggagtggtggcgcacaccagtaatccagctactcgggtggctgaggcacaagaatcggttgaaactgggagatggaggttgcggagaggcgagatcgtgccactgcactccagcctgggtgacagagtgagactgtct

SEQ ID NO: 144044 - DNA, 854 bp, Homo sapiens
gataaatcaaaagataattgttcttgaattgggaagctttttaaaaaatcacattcaatctaagaaaaatgattataaatgtgctagttaaaaaaatgtttagcgtgcttctcagggcttttcatctagatcaggaaaattaggattatccgtgtcacttgggcattagagtgaagtttccctgcttttcatctagatcaggaaaattaggattatccgtgtcacttgggcattagaatgaagttttcctgagaactgcagtcaggtttttggcatggctggccttctgttggtcatatgttaggcatggaatggaagatggctcgatgtttgctgcggctgtccatgcccctctacgccatccacaagcctctgaccgagttatccgtgcatgcatttgagcgtttcttgcaggagaggccggggccaaaggaacgcttcagttgcgctgggctgtgccaaggggcctcagcaggagcaacccttgggggccagagcccaggctcttccagcaacaggaaggacctttcttccctctgcagcacctgtcgaacaaaacatgctggactccctcattcattcccggcagagaagcactcccctcaccccccacagagccctgctatgccgggcactcagaccagccagaggtgggggagcctgtgagtaaagtggagaattggaggtgtggtgccaccctgaccacagcacctttcttctccctgaggccacctcctcaaatactcttcttggccacagatgagggcccagctgtggttggcagatcttttgggagataactggatgtgtgggggtgggagagttgccatgggtcccagtctcagggcggccgc

SEQ ID NO: 144045 - DNA, 721 bp, Homo sapiens
catagttctttatagcagtgtttgaacagactaatacaatttctcaaccttttctctggaagttctctgtcgggcacaacgtcatcaacattttttgcccaagctatttgtctagcactaggaatggactcagagaaatcctctcatcagtaagttttcatcttagtagtaacattctgccagcaaagtgtagaagatggattcaaacctgagtcatgctttctttagctgcagagtgataaaagcagaaaatccttaaagaggcatgttcactgccattgacagcaactttttttcaagctgtgttattagagtaaggcctgtgtgaattagtgaagaattatgggactttgaaataaatttcatagtttatatactttccaggatatagttataacaggatatcagattgagactctttttgcctcaatttccactgatttctaaatgatggtgattgggataccaagggagtatcagacaggtggccctgcatatgtcagatgcatactttacaagggagaggaaggaaacctgctcctatctcttgggcctttcagcaggattaaaggtacaaaaagtagtcagagagaggactgggaaaaattgatgaaaatatttatttggtcaactgtaagttccatcctgccctttcaggaggggtttggagagtgcatttgctcttagtgctgagcctaatgagggtgctcccccaaagccc

SEQ ID NO: 144046 - DNA, 361 bp, Homo sapiens
taaggacaggaaccatttctgttactctgtctttgacctgaagcttatctaggacaggagatgtaagtagaagctactaaatgctcctgctgctgaaaccagcagagcctgcctggccctggacaaagcctccaggagctgtcagtaactgatatcctacagggtatgggcttagcaagtcagcaccaccgtcggctccccaaactcttcccacttttccatggctgcaccccagaactccaagtatcctctttccttattaacaacttttatggtattattcttattattaaagtaatacattcttattgtagaaaacttggaaaatataaaccaagaagaaatcatcggtaactgccaa

SEQ ID NO: 144047 - DNA, 324 bp, Homo sapiens
ctcacagttctagaggtcattaagtctaaaacaggtcttacaggcctgtttggcatttgcagcagcctggatggagtagattacaaagctacaatcaaagcctgcattccttcagaaggctctagagaagaatctgttctttgtctattccagctcctagaagctgcttatattcctttgcacttggccacatcatcaagatttctgctttcagcatcacatccctttcctggactaattgattccctctgataaggactcttgtgattaccagagcccactcagataatccaggacatcagtagcacaggcaaccgaaaagag

SEQ ID NO: 144048 - DNA, 335 bp, Homo sapiens
attcccttcacctgaaagtacacatgccatgcaagtcttaaacatcaattaaaaacaaagcaccgagttttgtgcagtggcggtatcacagccaatgaggtttacgtgaggtacaattattgttattcgtaagataaaacaaaacaaagtacctatgagctttggcatcttgcaactccttcaaatgtgtcaccatacaaacataaaaatagtggaggctgggcgcagtggctcatgcctgaaatccctgccaggacactggagtgcagtggtgcaatcttggctcactgcaacctccgcctcccaggttcaagcgctcctgcctcggcctccca

SEQ ID NO: 144049 - DNA, 309 bp, Homo sapiens
ataaactttgtgttcattgaaccactattctctgccaattcctgccaaacagaatagtacctttcccaggcttatttgtgtatacatgtgtatgcatgcttgcacgtagcacttattgcacttggtggtcagttcaccccgtggcaaaatgccacactctgaaatcctcattactggataactttgaaatttggactcacatatgggacgaatttccagtccctaatacatgtcctaggagccaaacttcatatgattctcctctgggggagagtcagagagaggatagatagttctgcctataaatag

SEQ ID NO: 144050 - DNA, 322 bp, Homo sapiens
tgtccattgtttttcgagttcttttgttggcctcttacagttttctaatcttcctcgtcatttgactaatatttctccattcctgatgttgttaaatgaccttacctactcctctccttttgggatgcctctaatctgctgaggacttcaaaaccagaaattttaatatcacaagaatgcacctgattggtatatgcccacaatcaaaacccaggcatatgaacaatgccctttacaaaggcttattgatgtaacataattttaatctctgctatttttgtgtcatatataatgtcaaaaattgggcaagtagagggtctgc

SEQ ID NO: 144051 - DNA, 227 bp, Homo sapiens
aatagggatttagggttaaatggatacagagtttcaattctgcaagatgaaaactgttctgaagatgggcggtggtgatggctggacaacaatgtaagtgtacccaattctactgaaactgtacactcgaaaagtttgaagatggcaaatgttatgtgtatatttttaacacatttttctgctttttttttttttttgagggtggagtcttgctctgtagcccaagg

SEQ ID NO: 144052 - DNA, 353 bp, Homo sapiens
tggtgggtgaaccctggcggactgttccacgtccaacctgctctagcttctaatgggcgagtgagcccatctgctgcagcacactgcccattctctgggccctgtccactgaggcggacgagaggtggctgccctacccctcctggctatgtgagctgtccagtgtggaaacgatcactccccacctgcagacaccatcccttggaagggccatctttccactcctcagggacaagaaagccaaagagatagaaagcagcccccagggaacttcgctatagccatcgcaacctggtatgaagaaattaccccgcttgagggcttataatttacaatgcacactacatgtgaag

SEQ ID NO: 144053 - DNA, 432 bp, Homo sapiens
ctacaggcacacaccaccatgcctggctaattttttagttttttgtaaagttggggtcttgctgtgttgcccaggctggtctcaaactcctggcctcaagcaatcctcctgcctcagcttcccaaagtgctgggattacaggcatgagccaccacacctggctcatgtataatattctaaatgtagaagcaaagacctctcttttgagctttctcgttcagaatctagaaaacaaggatttacatgacactttcctgggacttaagcatgtttccaggtgtgggcatagggaggattatccttcccttcccagatggtacctgagatggagggcctgaaggccatcccttccttcaggattcttgtgtggtctcagcctactagtggactgtgaaatcagtaagtgtgtcatatttttctttaatggaacag

SEQ ID NO: 144054 - DNA, 390 bp, Homo sapiens
tgagacagggtcttactctgtcacccgggctggagtgcagtcgtagaatcagatcactacagcctttaactgctgggctcaagcaatcctcctgcctcaccctcctgagtagctagaactacaggtgtgaaccaccttgccctgctgttatatgccagtttcttataaaatactataaatatcagcaaatgtgcaacaaatgtttaatagggaggccaccttagttttcctttctgttgtatgtagtaggagcaaactgcctttctgttgtatgtagtatcagagcaggtctcttctaatattaacctgaacaaaatccatcctatttcaggatgcagttgtctatctaaacataagtagagataaatgaaggatttttttaaattttat

SEQ ID NO: 144055 - DNA, 400 bp, Homo sapiens
taaaaaatgcatcactgatggactatataacatcatggcattaaaatggtaactctcttatttccaacttcaaggtcatgtgaagtatttatgctaaacaaggaggaccatcaaaatctgatggatgacataaatgggaaaaagaaagaacaaggagcaactgatggcatattacttcactaatgccacacatcataaaaactagttctgacacttgtatatggactctgctataaatttacaaatattacaaatgtctaagtctaaatgtgctgatattaaatccaagtctaatggatatcaattataaactcaaaaccatggtttgtcaaaattagggtaatgacttatcacgcaccaaaaacaaaaatgtaacatttcaactacctccacaagactt

SEQ ID NO: 144056 - DNA, 350 bp, Homo sapiens
gacatgttcatgtttatagcagcattatttctaatagcaaaagctggggacaaaaaaataaatttgttttagtatattagtactaaataatactaacagcactaaaataagcgaagtctacaaatatcaacatggatcaacaactaaacaaaatatatgattgaggaaaataatcataaaggagcactatatagaaatgtcaaaatgaggcaaaaataaactacgcattactaaagagcaaatgatcaaaatacataggttttgtttataaatacaaagatattatattaaaagtataaaaagtcaaagaaatattaatgttagatttaaaatagcatgtatttcttagg

SEQ ID NO: 144057 - DNA, 938 bp, Homo sapiens
tgagcagagccctattgggtggtctggcggtgggagccccttagagcatggccaagaagggctcagacacagctgcagcgaggagcagacataggtgcagaggtttcttttacaggacagtcagaggcaggaaggtgaggagaaggggagagctcggaaactcggcactaacccctgcagagcccttgtgattggccttagtttccctaggtgtaaattggggtgacggccagacaagatgtgactgtcccctctggtgccagccccttggagctgtgtgaaaagtccagctcagagaagcatgtcctttccgtctgccttgtgatttccaaagaagggggcaagacagaggcctggcagcggccagcataagagaaaaagtcctgccctgcaaaatatgctttctccgggttcttttggagtcctgctatttctccacttcgtgggtaccgtcctcctaccaggacagctcctggtgcttcctccgcctgggtgtgttttcattgtctgctcaccagcctgactcccacatgagactataaggcccttgagggcaggggctgtatcttgtctgccactgggttcccagggtgctgcacagcactggtcctgagaaggcactcaatacatactcagtggatgaatgaatgaatgaatgaatgaatgaataagtgagcgagagtgagtgaattaatgagtggcatgagctggatcctgcccttaacttgctccgcatccttaggcatcctccccgactctggacttctggttccttagctgtcagctgagggtgctgggccccatgccccaagagagcaggcctgcatctcatcccagctctctcggttattgggtggcctggaccaagtccctgccctgacgctgtaaactgggcggcccccctgacgctgtaaactgaccctgacgctgtaaactga

SEQ ID NO: 144058 - DNA, 829 bp, Homo sapiens
tattttccaaattgcacacttccataaaaattttcctaggaagcaccaaagctttcaactgcccagaaacaccccgatctgggagaaaaggtggcttgagctgcacctcaaagatgggctctatctcagccgggttgcaagtgcacagggctccccgcgggacggagacagggagttgggaggaaacgcaacgcgcctcccaggcaacagactccgagctccggttcggaaacgctccgaggcagaagcaagggcttctaagggctccgcttcccagccttgggtccctactactaccttccccctagactcggtgagcccaggctgatggaccgtgcagtccagtttgagccagcccagcagccctcaatcgggcgggcagggaagaaggcctcctactgccgggaagaggccagcgcgctccaagttccccgcaaattccgcccttcccgcctggcacggttcccttgcaccgctgtgctccgctcccaggcttctgcccgccaagaatgcttgccccgggggcgcgctcgctggtcaggaacctgtcggcagcccccgggaacccctgaggatgcggaggtgggcccgagagctgcggcttcgatgccggggtgggagctaggcaggccgcgcgccgccgcagtcctgtcgcagcgcgtgccctggtccctccggaccgaaaaggccgaagccgtcccccgcgaccgaccccgcgcaactggctcgggtctgcacctagatggctgtgggccccacagggatggccgggcgggcccgttcggccgctacctcagggtcgccagtccccgcgcgcggccgcaagctt

SEQ ID NO: 144059 - DNA, 897 bp, Homo sapiens
aaagagcggtcggtgcacctcggcctgcctgcgagtgtggcacatcttttactcactcggactcagagaaacccaacgtttgccccaagcgggctgctcctccagtgggggcctctgctccccaaagccctcatttctacctgggccccaccaagaacagggaaccaggaggcctgggcatctgtgcaccacagcccagccctctccagacggagccccgagggggcccgaaggcatcgaactgccctggcctggcccctgcagagacagccttgggcctcaccaggagcactgcccccgggacgcctcaaacgtcagctctgaccccctcaaacacacaaggtgctcttagggggaaatggggcagtcatgcctgacgggactcctgacctggtggcaccagatccagtctgaagggacgaggatggaggacggaggttcatatccacagggagagaggggccctgggaggagggggccgccatgttgcagcaggatagtaatgatgacactgaagatgtttcactgtttgatgcggaagaggagacgactaatagaccaagaaaagccaaaatcagacatccagtagcatcgtttttccacttattctttcgagtcagtgcaatcatcgtctatcttctctgtgagttgctcagcagcagctttattacctgtatggtgacaattatcttgttgttgtcgtgtgacttttgggcagtgaagaatgtcacaggtagactaatggttggcctacgttggtggaatcacattgatgaagatggaaagagccattgggtgtttgaatctagaaaggagtcctctcaagagaataaaactgtgtcagaggctgaatcaagaatcttttggttgggacttattggctgtccagtccttgtg

SEQ ID NO: 144060 - DNA, 521 bp, Homo sapiens
aaagagcggtcggtgcacctcggcctgcctgcgagtgtggcacatcttttactcactcggactcagagaaacccaacgtttgccccaagcgggctgctcctccagtgggggcctctgctccccaaagccctcatttctacctgggccccaccaagaacagggaaccaggaggcctgggcatctgtgcaccacagcccagccctctccagacggagccccgagggggcccgaaggcatcgaactgccctggcctggcccctgcagagacagccttgggcctcaccaggagcactgcccccgggacgcctcaaacgtcagctctgaccccctcaaacacacaaggtgctcttagggggaaatggggcagtcatgcctgacgggactcctgacctggtggcaccagatccagtctgaagggacgaggatggaggacggaggttcatatccacagggagagaggggccctgggaggagggggccgcgtggggaggggagcgccacgttgggaggaggcggccgct

SEQ ID NO: 144061 - DNA, 379 bp, Homo sapiens
tgtcacccagctgagaaggcattgttattaagcaggtagttttacacctgggaagcaagtgtaccaagctattcagtctgtgtgctgggtgagaaaatgttgttgaatgaatcaggtcagtctgtgtgcttattgacaacttttcaaacatttcacacccttagaagagtctgtatcacttacctcccctgatacctatgcttgcaaatgtgtgtgcagtttcagagggttccaatgtgatggcccattggtcccctcctgggattctcatggacaagtaagattcggttccccgttcgggtgggtctgtgcgtctgttcctgggcgcatgctcacagaagcagcacgtgtcccagccgtgggctggcatcccagcgct

SEQ ID NO: 144062 - DNA, 249 bp, Homo sapiens
aaccagcaagggaatcaatatgctaaaaaacgttggtgatagaacagaacattaactttgagattttaggaaagaacattcccaagaggtgacaagattccagtttgctacgtgtatggtggctgaagtaaaagaagaaagctaagggacctgtgatgcttacctgcaggacagatccccaccacaccaccatccctcacagtcactggtatcttaaaaagagttcaaatcaatttccttttttttttt

SEQ ID NO: 144063 - DNA, 371 bp, Homo sapiens
cgtagcgcggtgactctaaggatcccgggttatcgctgccacatagagagtacagttttatatacctaataattcccttaaatattgtatttagcttggaactcaagcactccgctttctccttaattgtatttctcaagaaggaaatgttataattaccaaagcagagttactatgaacatctagacaaactaaaggaagcattttgaattgtaagtacccaagatatttctattactagaaattattgaaaacgatgacaataaccatttctattgttcatatacttttctttaatcctgtcgatcacatcctattataaaaaccacccccctctatagatgggagccactccaggaagacaagaagtc

SEQ ID NO: 144064 - DNA, 443 bp, Homo sapiens
ggcatgtgctaccactcttcagctaattttgtatttttagtagagacggggtttctccgtgttggtcaggctggtctcagactcccaacctcaggtgatctgcctgcttggcctcccaaagtgctgggattacaggcatgaaccaccacgcccagcctgacaactgcctcttatagaaggtggaggaagcatatgggctatatgggcctaattctaaacaacaaagaatgaggggaaaacccaggtcaacagtgagagtattatgtaacagttttctttacaaataataaaacagaaaccaaaagcaatctaggtagatctaggtagaacattttctaggtagatcattctagaacaataaacaatatcccacacttttggcccaaactcttaaatctcctgtatgtacctcaacagcatttgcctatcaataagaatgaaat

SEQ ID NO: 144065 - DNA, 352 bp, Homo sapiens
agcactttgggaggctgaggcgggcagatcacctgaggtcaggagatggagaccagcctggccaacatggtgaaacgccatctctactaaaaaatcaaaaaaattagccgagtgtggtggcacatgcctgtaatcccagctactcaggaggctgaggcaggagaatcgcttaaacctgtgaggcggaggctgcagtgagctgagatggtgcccttgcactccagcctgggcaacaagagcaaaaccccacctcaaaaacaaaaagtgatgctgcacctgctccacactgagcccaagggtgcaaagtgcccccctctgatgacccctaaccatgatccgcctcacccccagc

SEQ ID NO: 144066 - DNA, 620 bp, Homo sapiens
agagggtcagccctgcgaggggtgagccctgacagagaaagggaggggtgcctgtgagtgcccttggagtggctgagatcagggagaagcgcctggagcaagcagctgggagctatggtgggctgcagccaggtggcacagtcagatggcttctgcctgcatcggatgggctgatggacgcccaacagaggcatgagttcaaagcccccagagggctgcaatgagcaaagttgacattgtagagacccgtgggactcacaacctgccctcttcagcagataaaccacaaggaaacgagaggcctggcatgcaggggactcggcacagttccaaagcagcgtcccggggcatgtgggagaaacgcctagctccaggcccaccccgcctgcttgcgggcccagcatcgctttcacagggcttccaggggatccccaaccgctcagcattgagaaccggtcgctgctctagattaagaggctcaaaggacatatcggatagtatggactttggatccgaattaccaaatcggaacaaaacacacaactttaaatcagacaagcagaaatctcaacactggatattccttgatacttagtaaatttggtttgtgtattattgca

SEQ ID NO: 144067 - DNA, 329 bp, Homo sapiens
ctgcactcaagcaggcaatagagcaaaacattgtctccaataataataataataataagattagccaagcgaaaaaaatttttaaaaaggccagacatggtggcttatgcctgtaattccaacactttgggaggccgaggcaggtggatcacttgaggtcaggagtttgagaccagcctggcccaacgtggtgaaaccccatctctactaaaaatacaaaaattagccaggtgtggtggcgggtgcctgtaatcccagttactcaggaggctgaggcaggagaatcgcttgaacctgggaggtggaaggttgcagtgagctgagatcgt

SEQ ID NO: 144068 - DNA, 422 bp, Homo sapiens
tttccccaccaacgtcaaaggttgagggacagaggacatatccctgtgggcaacgaactgggccccacactcctgatcagctcagccattgccaggttcttgggcctaaggttgatccaaatcggggcaaagaattaggtcctctcaaagcggagtaggaaagaacaagacgttcatggggccttcctgtaattcggcttccatgttgaagtccaaagtcccaaggccagcatgcaggcagctcactgcgtccgccctccacaattccaccagcccccagcccactcaatacacctgaggcctatggagcgtgtgccaggcctcaccaggcccctcggactttcccaatgctgtgttctgcccagaaagctcctccctgctttctcctcctggcctgagcggacccattcttggatcagcag

SEQ ID NO: 144069 - DNA, 695 bp, Homo sapiens
gaggtgatctgtgaaaatggttcgctattcacttgacccggagaaccccacgaaatcatgcaaatcaagaggttccaatcttcgtgttcactttaagaacactcgtgaaactgctcaggccatcaagggtatgcatatacgaaaagccacgaagtatctgaaagatgtcactttacagaaacagtgtgtaccattccgacgttacaatggtggagttggcaggtgtgcgcaggccaagcaatggggctggacacaaggtcggtggcccaaaaagagtgctgaatttttgctgcacatgcttaaaaacgcagagagtaatgctgaacttaagggtttagatgtagattctctggtcattgagcatatccaagtgaacaaagcacctaagatgcgccgccggacctacagagctcatggtcggattaacccatacatgagctctccctgccacattgagatgatccttacggaaaaggaacagattgttcctaaaccagaagaggaggttgcccagaagaaaaaagttgaggagctcaagcttgggaaaatggtgtgcattccttgtatcgtcattccagttctgctctggatctacaaaaaattcctggagccatatatataccctctggtttcccccttcgttagtcgtatatggcctaagaaagcaatacaagaatccaatgatacaaacaaag

SEQ ID NO: 144070 - DNA, 701 bp, Homo sapiens
gaatatttgttgaatgaatgaataaaatgtttagtgaactatacgtgtctttcagtggttgaagcatttacaatttttatacttcattatttttatttagtagagttagcaaaaagagtggctagaagtcagaggacttgttcacatattaccaaagaatgtctatgttacatgaccaatttatgcatctagactacatgtgaatgtgtgttgactgatttgctacttttgcattttttcatattcagggttttcataattcacggacatagtgagtgaagctatgctgcttttactaggaactatttcctttgggattttgctggtgtattcaactagagggaacttcaagtggaatctaggacacctgattgccttgaacaattaaggcaattgaaggtgctggagagtaaggttaatcaatgcatgctttagaagtctgtattcacaaagggaagtcaagtgttccattcaacaaatactgagtttctgttacatgtcaggcatgtattatgcatggcagtactaagataaacaatatcttatggtctataagatttttttagctaactggagagataacacattgaaaatctcttaccttaccttcttctttgagaaattatgctttagcttttatggttccccatgccctgtgtgataggcagaattgtaaaatgaccacctgtgacctatgccat

SEQ ID NO: 144071 - DNA, 370 bp, Homo sapiens
ttccctagttgctcaaccatcagtgctgggatgagttctcaaagttgggggcacatctcctttagcaagataccctgatatctgccgtttgtcctgcatcactgtgacaatgtcacttctctcactgtgcacaactcaagagacccctggtgtagcccaggccccccagctgctgtgctttccctggggtggggactgacacgccttcctctgttcttctgcatctgggatcttagtgcttacagagtcagggatcaggggattgcccaagatttctttaccatctgcttcagcaaatggctctcctggaaaggtcggcaggtgagcctgatttctgaattttcactcagattcaccagtttcattgttt

SEQ ID NO: 144072 - DNA, 433 bp, Homo sapiens
agggagaaaaggggctgttacttccaaagaaagataatttggcaactaaatccatcatgtaagtacccagtttcccacagagtagagcaggtagagaaggaatctggaatgctgaactttgttgatgtccgagctcccaggaaggcataaaaggagaataataatagaagaggacgagtcagggatagcattctcagcagggtgggaaacatgctaatgagaggaagactgtaaagaaaaagcaaagcgccagcgggggcgcagtggctcacacctgtaatcctagcactttaggaggtggaggtggacagatcacttgaggtcaggagttcaagaccagcttgaccaacatggcgaaaccccatctctactaaaaattcaaaaattagccgggcatagtagtgcatgcccgtagtcccagctacctgggagg

SEQ ID NO: 144073 - DNA, 572 bp, Homo sapiens
ctaagggtattgtggagccgaggaaaaggtttcactcatccgccaccatttactgaacacctcgtatgtgccagcgttgcatcagtactgggaatacagcagtgtacttgccaaagtccctatccttgtggggctaagcaagaccaacccgaaacaggttaataagcaaggagccggttagagggggaggagctaggcagcgaattcaaatcaggtgacagactgggcacttctttagatgcatgcggctgtggggagggcctctgagctgatcccagtttggcaaggtgaggcagtcatgtgggatgggaggagaaggaacagccctccaggtggagggaaccacagtgcaaaggtctgaagggaggacagagcttggtgaggtgcagggacaagcctcacggaggcctgtgtggcttggcagagcgagggagcagggaggagatgagtccgggggctgcggggcaggcagggccctttcactgggagccttgtggactgtctgtgaaggagtttggaatttcagcaggaacagcctggtcagattcagggtgttagcaggtgacccagga

SEQ ID NO: 144074 - DNA, 386 bp, Homo sapiens
tttaattggagaattctacataagcctgtattttttaactttttttgttctcattataattgacataaatatatttattgaggcaatttgttcagataagaactcgggatgcttcataagtcatgatgttttttaatatataaatgtggcgaacaaacatgacagtgcttgctgtgtagcagatgctccatgataagccataaatattcctgctagagttagtttgtaagttcaagtcggagagggaaaatatcaatagtgaagaaataagattgattcttcccgtggagataacaattgttttcatgctgcgaagctaaatattgctgaacctaaagagaaactctgtttcttttatttcctaattatctttagttttgtttgtc

SEQ ID NO: 144075 - DNA, 369 bp, Homo sapiens
catttcccatttggacattataatatctagtaattgtatcacaactgaagcttggagtacagtcaatgtctgaagtgacttaaacacgcaaaaattgtagctttatattccattacgtatgccttattttttagatattttgtttcacacctaaaataaatgattttccttacttaagacgtaagtagttgaaaaatatatttattcagtacatcttccaaagcagtgtcattaccatgtattgaacaccgtgataccaagtgagatcagagcatgtatcctgcgtgcccatctacccaccagaaagcataaacagcaatgcatgatcagcacacttccttagcatattagtccatgagatatacagat

SEQ ID NO: 144076 - DNA, 283 bp, Homo sapiens
cccagagcccacctgtgataaggccacagcccatgccatgtgtgtgtcctgaggcatgagcgtggacacatgagaatctcaatcccacatgcttgggggagcaggcacagtccttattcattctgcaaatagtcactaagcagcctctgtgtgccaggcactggcgacacagcccctgccccctgaagctcacagtctaatagtggagacatgcctgccatcagatcattgcagcctcagctcacagctgccagacacctatgtgtggagggcagcagggaca

SEQ ID NO: 144077 - DNA, 300 bp, Homo sapiens
gtctcactctgtcgcctagcctggagtgcagtagcattgttatagcttacttccatcacaccatccagctaaatcttctgctttaatggtgtttattctaatagaattttacttgttcttctgaatttgacttacataccctaatttccacttatgcttctcctttctttgcctcctaaaagtgagtagcatgattttagcttataattagttgatttgtactgttctcagctaattttgatgttatgatcagccaggcatggtggttcacacctgtagtcctagcactttgggaggcca

SEQ ID NO: 144078 - DNA, 372 bp, Homo sapiens
gtggctggcatgcagatgacatcacacctgtaatttcaactgctttgggcggccctggctgtgtgatgtgatcaccctgctgccaggatgttcaaaaacagcatggacaagagagcaaaattccatctctacacacaagtaaacattagctgtgcgtagtggcaacaagcctgctgtcctagctacttgggagactgcagtgagctatgatcctactactgccctccagcctgtgcaacagagctatgaccccatgttaatctgttgtgtggtctttctacctaggcatatgtacatgtcttcatgcatatgtatatgtattttttgttgttttcacaaaatcgtagcatattatacacactgttcctctgt

SEQ ID NO: 144079 - DNA, 167 bp, Homo sapiens
ctcactccccatgtcacactgttgtcatcatgcctcctctctgtaatgcccttgctgatcacaatcctgtctctcaacaccctgatcagcatcatctccatgaaatgtgaattgaaaagttccaacaatctcactccttctccacaggttcatggcacctgtctaca

SEQ ID NO: 144080 - DNA, 557 bp, Homo sapiens
ggctcaagtgattccacccacctctgcctcccacagtgctgggattacgggcatgagccagcgcatctggccaccttattttcaattactggctcaatgtaatggctccatctcaggaacagccaatgaaagagatgcacaggacaagaaacaggaccttgccctgtcactcaggatggagttcagtggtcctatcatggctcattatagcctcaaactcccaggctcaagcaatcctaccatgtcagccttcccagtagctgggactacaggctggagtacagtggcacaacctctgctcactgcagcctccacctgccaggctcaagcaatgctcctgcctcagcctcccgagtagctgggattacaggaagtgagctcacaatgactcaagctgccacatagtgttgattgtgaaatgccagttgaagcatatgtcctgcgagcttgggggtgctacaagttgaccactgcagcagtaaagatgactctgaagaatggcgtgggatggatcctttcaaatgcacttgagcagcagtctccaaccacagggccac

SEQ ID NO: 144081 - DNA, 400 bp, Homo sapiens
ttgttcctcctctgtggctgctctcacatcctctagtgctcttttgtggatgcttcaggacctctggttctccctcatgggtgttcccacatcctcgggtgctcccacatcttctaatgctcctttgtgggtgctctcagtagctattctccatcagcccctgtgtctttcgtggggcagatgttgttcgtgaactttcaggagctcctctgtgctcaattctgagatcatgagagccaggatggggggtgcggggaatgctgtcccccgctctgctgaaaccaccttgtccaatgggggttgccccatatcgatgtgggaactgggcagtcatttccccctgctttccccctgagctctctcaggggtccccttcagggagagatgaagctacaagctg

SEQ ID NO: 144082 - DNA, 332 bp, Homo sapiens
gccaggaatactgccccaggctcccaggcctgtccttccagctgtccttccaggcatgaaatctctttaaagccacagggctctcaagagaccccaggttccggtccaacccacccgttgtcagatgccactaaatggagagaggctaagggactcctaaggcgatgtaagctgtctgcatggccagtcctttctttactaaggaaggtactgaggcaccaggcaccagttgcttggggttacagctgcacacgcacagactctcccctggagagctgccctatcacagggaggacggtgggcagtgggaatatgaagtgatttcgtgcagc

SEQ ID NO: 144083 - DNA, 784 bp, Homo sapiens
gagcccctggggccagcccatgggaccaagaggaggaaagaccccaggatttggggatctgaagtcagaatgtggctccaggggcatgatttgccccagggccatcccagatggggaaggaagcagcaggttgccgggaggcaggccagggggctcctctcgcaggccaggctgggcactggagggtatttttagctccagtttctgcaggagtcatgcggttcttttgtgcctcagtgtcccgggtcagctgggtcaccagctgggtgtgggaaaacccaggcggggttcacatcctctcccctgcttcctgggagaaggatattggtagatagaagggacttgggttgctgctggacccctagccaggcccccctctctatgtcctggcctcctggaacccagcccaggcaggctttgggatgacgcaggctcccctgtaacctcgggggtggggtggggggatgcggtctcctcattagggagttctctctctctctttttctctccggatgtgcttcctgttgaaagtatgagtatgctgtgatgttgcattttaaacaaatcactgacctctcagtcctccccttggcctgggagaaatgaggcttgcgcctttcagtgccacttctgaggggcacggtcatgagtcttggcccttcctttgtgcttattggtccaaagggaaggtatttagtgttggtgcttgtggattagcgggtggaggcttgaagttgctggagtgaggtggccagcccttctacgagttatcctcattcctgtc

SEQ ID NO: 144084 - DNA, 189 bp, Homo sapiens
aagcaatatgtcacaatccctactgtggacaggtcccagggagaagagagtcacacaacctcagcaatgggcccacatatatgttacagtgacttctgcgagtcagcagaagaatcatatcacctgtatgctaaattcagcagtaagtcactctctcttctaagggcaaggcccaggcaggagaggaga

SEQ ID NO: 144085 - DNA, 190 bp, Homo sapiens
cccaagactcgacatccaccacgtcgaggctgggtactcttaagtctccgagcaccaagccgcgccgcctaaggctttcctgttgtggggcgcgcgcggcgtcgccatggagatctccgaggggccagggaggtcgcgcagcagaaggggaagcgaagggtccccggacgcgcaggcccttcctatcggg

SEQ ID NO: 144086 - DNA, 370 bp, Homo sapiens
tcaggttcccttacagccactgtgttttgacgattgcccattagaaaaaaagactatgctttctgtaggttttaaaggaatggtggtgaaataaggagcattccctgagcagatcttgcctgcgggcacacctctgagcattggaccaggcgagaagagcccatgtgttggctgctttgggatcccagcactgccaatggcaggtgggctgtggcccagggagagaacctagccttttgcattctcttgccccatttgaaaatggagacgatagtggcgccccgctcagtgttattttgaggatttgaatgtatctcagatgtagtacctggaaaaatataagtgctcagtaaatacggttgccagataa

SEQ ID NO: 144087 - DNA, 352 bp, Homo sapiens
aggcacccagactgtaaccccacggcattggtaatgcactggccttgaggcccagggaatcacaggaaagccagccggtcacttgtggttgggctgggtccttcctgtgctttacacacaaaagattcctgatgcccagctcaggaggtgggagctgggagcagcagtgaaagaagaaaggcatggaaatgggaaccctccacgttgagtcatgggaacactggaatcctccctctttctcagagctacaatgctgcagagcattcttcctcaaaaataaaaaggccagaagagaatggggtggattttctgttttcatagcattggggtggaaaatccacccaactgtatg

SEQ ID NO: 144088 - DNA, 407 bp, Homo sapiens
aaacattcttcatgttcctggccacttttatttcagccacttcagtttggggttcattgggaatatggaaacagttttccattcacttgctctttaaggggagaaatggcagcttatttgggggaaaaaaagtgtggaggtagagcagcctgcactggtgtggcattttatgagcaagatgggatccgaaagcaggggtgatgcataggaatggcgcatacttcgtgtgtgtaagggaggtcagaagaggggaccaagtgctttccacttctcagagtaacataatcctccacagtgctccagttaggtataatgcttttgtttggaggcaataaacattagaaaggaaatttatgccaacatttcaatctccactattagtatggcatcatttggagcacttcact

SEQ ID NO: 144089 - DNA, 427 bp, Homo sapiens
tgcctttgaagtattcccccatactgtgacaaatgattaaatagttattcataatgcagcatgacacggatataaggggggaagaagagagaggtctctagggcaggttgggaggatgaagaaaagctttctggaggtcacaatgctattgctgcatcttgagaatatcttgggatgggcccgtgagggagggtaaagagagagattgggggcacatggtttctcagatggtacatgatacagagggtagccatgcttgggacactcagtgagccccgagtcaccgagtgtgggtgggcagagtgtgaggggctgggtgacatagatggctctggatctgtcagcagtttggttggggcttgttggtcttcgaggagatgggctgtgaaactgtggggcagtgagatctgtgtggtggacagactca

SEQ ID NO: 144090 - DNA, 252 bp, Homo sapiens
ttctgtgtgcactgaggcctccacggccgggctgtgctcctcgctgctcccaggaaacagagtgcttctcccctcccggcctccagggaggctgtgggactctgtgcctgagccctggagaggccgcaagaccgaggtggggaggacttagagacggcctctcagggtctgctcccaccaccccatcaacgtccaccagctgggccgggctgtgctgtccaacaacagcacctgcggccacggcagcccctg

SEQ ID NO: 144091 - DNA, 438 bp, Homo sapiens
gctgtggagggtgggtaggggagtgggccgggccagcacactgagactggcagctgctccaaccccatccctccttagagatgccacctcccccaccacccacccctaatttgtgccttgcctccccaccctggagtagtccctccgggtaccaacactgccttggcagagcccactccctaccctaacctgcccaccctccctatcccccagcattaggttgatactgtggggaagtgctgggggctgggaggtagccgaggaatggggcagttcccgggggcatcgaaaccaagtattattatgaattgtaattgtatttgcactgtttttttcctctgattgcatcagcatatatacaatatacctatataacaaaattcagtgtcaagctttcttatgcaagggatttcccccaccccacctcctcaaaaaaga

SEQ ID NO: 144092 - DNA, 485 bp, Homo sapiens
ggcctcccaaagtgctgggattacaggcgtgagccaccactcccggccaacaatacattctttaataataagtaataaacatttttaaatacatttaatactcttaataatactaaaattaatttaaataataattttactattttaataatatctcaaatattttcaacatgtcgtcaatatgtatatagcctagcatttggtgggagaaggtgtattttgtgtacgtgttagagttgggaaaatagagaacaatgtatggttgtactatattgtaaatatggttgtaatcatcaattgactatcacaattctttcaattacagaatagtttgtgaacatggcatacaaataaaaagtagtactactaagtataaaattccaaacatcttggggctacctgttaaaattcaccctgtactcttgaaagcaaacgtgcatctaaataaactaaaataaagattttactacactggacttggatcg

SEQ ID NO: 144093 - DNA, 395 bp, Homo sapiens
tatgacgagaggatccggcatgaggttgttcctagaaatctgtaagcctgcacagtccagtaaaactttctgtgatgacagaaaagtcatgtgctgaccagtatagcaaccactagccacaagtggctattgagtacttgaaatgtggctaatgtgactaaggaaatcaattttatttttttcttgagagacagagtcttgccctgttacccaagctggagtgatcatggctcactgcagcctcaaccccctgggcccaagcgatcttcctgcttcagcctcccaagtagttgggaccacaagcatgtgctaccatgcctggctaattttttattcttcttcttctttttttttgagacggagtctcactctgttgcccaggctggactgctgtg

SEQ ID NO: 144094 - DNA, 706 bp, Homo sapiens
gtcatgggccacatcgtatgtaattttgaaaacattacaacatgcaaagacttcgaatgccgtatgtggttctggttgcagcatctaagaaagatatatatattttttaaatctgagaaaattttggagtggtaaaataaaatactttccagtcttagaatattaggatttaggaacataatcttcaaggtgaaattaggtaaaaggggccgggcatggtggctcatgcctgtaattctagcactttgggaagccagggtaggtggatcactgagatcaggagttaaagaccagcctggccaacacagtgaaaccccatctctactaaaaatacaaaaaaattagccaggtgcggtggcacacgccagtaatcttgctactagggaggctgaggcaggagaattgcttgaacctgggaggtggaggttgcagtgagctgagattgtgctactccactccagcctgggcaacagagtgagacttcatctcaaaaaaaaaagaaagaaagaaagaaagaaattaggtaaaaggaaaagttcttccttatgtagtagtaagtaaatttttaaaattttatacaagccgggtgtggtggtgcaagcctgtagtcccagctactcagaagcctgagacaggaggatcgtttgagctcaggagttcaagaccagcctgggcaacatagcaagacgcacatctcttaaaaaaa

SEQ ID NO: 144095 - DNA, 364 bp, Homo sapiens
cctctgtgggcagaaggaatgaaaggaacatttactgatgcttctccacgagtaaaatgtcatcagaaggtggaggtgaggccgggcgtggtggctcatgcttgtaatcccagcactttgggaagccaaggtgggtggatcacttgaggtcaggagttcgagaccagcctggttaacgtagcaaaaccccatctctactaaaaatacaaaaattagctgagcacggtggcgctagcctgtagtcccagctactcaggaggctgaggcaggagaattgcttgaacccaggaggcagaggttgtagtgagccgctgtcacaccactggactccggcctgggcaacagagtgagatgctatcttaaa

SEQ ID NO: 144096 - DNA, 404 bp, Homo sapiens
ccatagatcttggaccgtgctgtcctctgagagaaagggcagctgagtccgccttactgcgtgtctaagggccagggcccctcaccgcccagcaaaacctgctcctcacgaccaggaagatggtgttcctggtctcactttgaagtctttttgtgagacatcatcctgatgataattctgggggtgggctcgggcaagttccccgtggatggagaccgcttggctctttctttcccccttacaagaacctggaatgctttttattgccaaggctgggccaggtccgcttttctcgtctgcaatggcctctgagctgaagcctggcccggattcgcccctcctcttgcatctctggcctgtgagtcctctcctccctctagccctgcagctcagcctgccctgcc

SEQ ID NO: 144097 - DNA, 377 bp, Homo sapiens
actatttctgatcctacttactcttaaatacatttacaaatttaaattttttgctcagaaagcactcctaagatccacagatcctggagtccatgcttggctatctgctaacagcattctgacattcattcattcttttattcactcatccagcagatatttattgaccaccactggtccacagctgagcctcacaactgaaactgtatttttcttcttctccctctatatgactgtatctcccaaaccaactctatttaccaattattcatctacttttcccatgagatagctgctgtatcaccacccaggatctatacaaatccaattaaaagcaaacaaacattaggttttagtaatctgtgctgcctcatcat

SEQ ID NO: 144098 - DNA, 275 bp, Homo sapiens
aggcctcctttgtttgtttgctttttgcctttgttcataatcaaagatgagctctgctgccataacaacttcgttatttctgggtcagaacatctggcttctatgacttattcaaccagtgtctgttgaatttctcagctaaatgtggaagaatctatttccagatgtggaagataaaagtgcaaagggggcttggggcccctgagaaataggggtcacccaactggggcttaggggttagggtggttttttttttttttttttttgagatgggg

SEQ ID NO: 144099 - DNA, 260 bp, Homo sapiens
tagaagtctggagctacagtggaactcaggtttcgtgcatctttggcctgcttatcctctctatccaagaagaggggtgtggatggagaacgcctgcccaggagggacaaagcttcagcccctccagtcagtgcctcttctcctttctcccctctcccctctcccatctcccctctcaccttggccagattttaactgtgcaagggagggtggagtcacttgttcttccgtgtgccaccctcctgtgtctttgctctgtc

SEQ ID NO: 144100 - DNA, 791 bp, Homo sapiens
aaaggctgtagaggtgaatccagctgtggtgagaaatggatgaggtggaggtaggcaggtgattccctgcaagggagaaagaatggggctcagatgttggatttaacagagaatgggagatttgaggcagtgtggcccagtggtcagagtgcaagctttggagtcaggacggcaatcaaatcccagattcactgcatcctaactgtgtaaccttgaattctcctctgggaaacagaaatgatcttgataatagctatgcagtagggttgctgggaagatttgataagatgatggaggtaaagcattgcatccagtggctggcacagacccccaaatcttccccttttctctttaattgattttgtggtttgaggctcttaaatggcaagaaatcatttgcatgaataaagagccattcttccaagcacttccctcctagttttctgggagagccactggaagccaggattcagagttccatcctgcaaaagctgagctgagctagccaggaaggaggaggagctgactgtggcccaagggctgggaagcaaggcagaaggggagaatccagccctaattcccacgctgctggtgccagtgaggctgactgtgggaaaaccttgtcaggggtcacactttgggatctctaggagcaaggtgctctgtgaatgcttatctcagattctctccacccctggccctttcagtgcccccagcccaactccggggagagtatgagtgactgacaggccctgctgcagctgcagcctcctcactgtgggtacagatgt

SEQ ID NO: 144101 - DNA, 185 bp, Homo sapiens
ccgggcgcggaaaatcgagttcggtttcgcgcggtcatccctggcagcctggtgctctgtgaatgcttatctcagattctctccacccctggccctttcagtgcccccagcccaactccggggagagtatgagtgactgacaggccctgctgcagctgcagcctcctcactgtgggtacagatgt

SEQ ID NO: 144102 - DNA, 484 bp, Homo sapiens
attcccctttccctgagtcattcatttcttctttcctaaaccactcccattattatactaataggttgaaatattattctttttataaaatgaaacaaaattctcctgagattttacattctcctccagctacttcccatttttctgttcctctgctcttctttctatcaaaactcctgaaagagttctctatactgtattcactgtcttcactttctcactcctcattcttccctcaactcacagtcattcatctttgagtctccattacaaaggcaatgctttgctcatgttaagttttagttgccaagtgtgcatccaagcacagtaagtggtcttgaggcttggagaagagtgcagggctggaaatatgaatatgggactctttgatatattgatgttatggcagaaactactaggtacttaccaaatattctttttcctcttcccccttagaacttcacatttaggcagggagcagtgg

SEQ ID NO: 144103 - DNA, 718 bp, Homo sapiens
gatgtcctataagttttaatatgtgatattttcattatcatttaagttttagttcttgaaaagtttccattaaagatttgtttcatggccaggcgtggtggcatgcctgtaatcccagcactttgggaggccgaggcaggcggatcacctgaggtcgggagttcgagaccagcctgaccaacatggagaaaccccgtctctactaaaaatacaaaattagctgggcatggtggcacatgcctgtaatcccagctactagggaggctgaggcaggggaatcgcttgaacctgggaggcagaggttgtggtgagccgagattgcgccattgcgctccagcctgggcaacaagagtgaaactccgtctcagaaaaaaaaaaaaaaaaaagattcgtttcacccagttattagaaagtatgttttcaggccgggcgcggtggctcacgcttataatcccagcactttgggaggccgaggcaggcggatcacgaggtcaggagatcgagaccacgatgaaaccctgtctctactaaaaatacaaaaaattagccgggtgtggtgtcgggcgcctgtagtcccagctactcggagaggctgaggcaggagaatggcgtgaacccgagaggcggagcttgcagtgagccgagatcgcgccactgaactccaacctgggcgacagagactctgtcccaaaaaaaaaaaaaaaaaaaaaaaaaaagt

SEQ ID NO: 144104 - DNA, 393 bp, Homo sapiens
gtttcaggatttgacttgcaaacttgtgctttttccctgataccgcccaccatctgaaatgctcttcttcctaccctccctcacctccagtataacttctgtccaggctgagaaaattcaagttcagatgtcagttcttccaggatgttttccttgatttacatcccatcaaatatgtcatgttttgtgattaacttccatcatagtactgatcataattactctgtaatataataacttaattagctttttataggttgtttgctacaggaaggcagaggctgtttcataatatccttagcacctaacagggatcatacctcagaggctcttaaatgtgtgttaaatgaacgagttccttccaaatactaaactgagttatcaaaaaaaaaa

SEQ ID NO: 144105 - DNA, 693 bp, Homo sapiens
cctagagaaaccctgggcctccaccctgttgcagactgaggcactgccttggggctcggatgcagagccagtaagacttaatgaaaagcaggctggatctggtctctaaaaaatggccgtggatttttggaaaatgtatgaaaggaaggaagtgaagactgtagaggaagtgtttcctgttaatgatgtggagaacaaagtgcttggtgaatccctggtgtgcagctcacactgagcagttctggtctgtgaaatgccacactcgtggcaaacctagagcaagaatctgagaaagcagttaagtggcaagtgagctttgttttgggtaagtataatagttcatttggggaaaataaattctgtgctatgacagggatggtgaattctgggtgcttgttcatgaaacagaaaaaggatgggctcgtggatggattaaacctgagaacctgcaacgccaccctgatttatccaaaagggctgtagagaactgcttgtttctttgaagattcagtcgatgatacaaaattatacaatattctggagttgtggttgcagctaaagatacatacagtatagcctgaaaaggtccaaagaaaaggaggtaaaacactctatctttgagcagcctctcagcttcagcactgctgacatttggaaccagatatttttggttgtgtagggctgtcctgtgcg

SEQ ID NO: 144106 - DNA, 525 bp, Homo sapiens
atggcggcgatcccttagtcacctgcttagtgaacatcttcagtgtgtatatggcggcagtcccttaaccacatacttagggaacgtcttcagtgtgtacatggcagtggtgccttagccacatacttagggaatgtcttcaatgtgtacatggcagtggtttcttagccacatgcctagggaacgtcttcagtgttgtcttttagttgcattcttagggagcgtcttcagtgtgtacacggcagcagtcccttggccgcattcttagggaaccttttcagttcatacacagtggcggtcccttggcaacattcttctgagtgtcagtgtctgtctgtgtccttttcaccctgtaagctgcttttgtttcttcactgggtgtctctgactctcatgtggaatcccatttctctgtcaccgcctgtcccaggcacagtgagagacgcagccagcctgctcctctctgcacgtggccgtctcagacattctccagccaccgtcctgaccgaattcattccttccctg

SEQ ID NO: 144107 - DNA, 779 bp, Homo sapiens
tctttctcccttcatttctatccatgtaatttggggctctaatttgatacatgtatgtttataattgctacttcatgatgaattgactatttatcaatatataatgtccctctttgtttttggatgaaagtctattttgtctgatattaatatagctacccttactttcttttggttactatttgcatagagtagcttttccatcttttcactttcaattcattgtgtttttggatctttggatctgaattgtctcatagacagcaaatttttttaatccattttgtcaatacctgccttttgaaatggaaagtttaatccatctaccttttatgtaattgaatgtagggaaggaaggacttactaataaggaaatacttacttctgacattttgctattgttttctttatgccttttttgtctctcatttcccccattattatcttcttttatttgtaattttgtgtagtaaaccattttgatacccttctcattttcttttatgtatattctttagatttttttgttaccatagaaaatataattaacatctaagtgatatataatttagttttaatttaatttatagcaacttaacttcaatagcatgtaaaaattctgctcctgtacagctcaactgctgcccatttatgttgttgttgtcatcacaaattagatttgtatacattgtatgcccactaatacatatttataattattctatgcacttgtctgttaaatcatgtaagaaattaaaagtggaattgaaaacctaaaa

SEQ ID NO: 144108 - DNA, 472 bp, Homo sapiens
tccgctgagttctgtccgcagaaaccgttctctggaacagtgcagattgcagattacgtttactacctccgccatgtcccgcccttcagatgtttgaagatgactcttagattccagtcccccaccagttcaaattagtcattggtgattagtcacattactttaatgactcattgagctaaaactatgaggtaaaaccattagctaaagcttttcagagaggtaaaaggcagacatcttaccgatttaatgagactcccagcattctgggctcgacacatggagcttagatgctagcggtgggagtagaaaggaagggaccattataagccatgtcaggatgcaaatgtttttaaaaacaccttggtgtcatactggatgtgctgctgtaggagttagggaacagtgaaaacacagctgagggtgagtgtaagttttgagatgaggagagtaattgataaaagtaggggag

SEQ ID NO: 144109 - DNA, 359 bp, Homo sapiens
ccagtgtgctaagcttccagtcttttacttgatcctttataacacagtgatgtttgagctgtagtcagattccaaatcaagtatcaagaattacagaatgtactcttctgttttttaatactcttagttatttcttgaacttaaaagcaaatatatacatagatatgtgattaaacaagtatagtaaaaagttaattgtaaggtttgggtagtagacatctaagtgctcactctaggccaggcatggtggctcacacctgtaatcccagcactttgagggtccaaggcgggtgggttacttgaggccagaagttcgagatcagcctggccagcatgctgaaaccctgtctctactaaaa

SEQ ID NO: 144110 - DNA, 528 bp, Homo sapiens
actgtcgcgcgttttagatcagcaaacggctgttacgcccatttaaagttgcccaactggtggcctacggcaatcgatgttgagggacctgaggcactgtcacatccggaaaggacttctggatcatcagaggaggattagattaggtagaattcagtctgtacatctgtccttaaattactgaagggtgattgtcgctaagagcattggctccgagatcagacccctggatctgtagctgagcccttcctcttactagttgtgtgaccttgagcaagttacttttcttttctatgcctcactttcctcatttgtacaacgagtacctaactcatagggttgtggcgacacctaaatgcatattacaagtaacatgcttggaactttgctagacacataataagtgctcaagaaatgttaaccattgtgaggccggccacgatggctcaagtctctaatcccagcactttgagaggctgagccgggcggatcacctgaggtcaggagttccagaccagcctgaccaac

SEQ ID NO: 144111 - DNA, 404 bp, Homo sapiens
gaaaacgatctgctccccatgaggttacagcaagggttagagaagaccttcacataaaacaccaggtgggcgcagcaggggtttggtaaatattagctactttcactacttagtgtcttctttgacagctactgacctaagagtataaatccggttcagagaagtttagaagcacgatgagaagacaagcatgctaaggcacccacctagcagagaagcaggaaaaactggggaaacttcagaggagggggacagaggttctcaacccacagggaaagcccactcctttccctaggaaaatcacacagccacgtgccacatacagtaaaaaagacagaaggatcacaggtggcgttgctttgatcatcttcattacacaaataaatgaaacattttggttaaaa

SEQ ID NO: 144112 - DNA, 273 bp, Homo sapiens
caataagcagaagtcttttgggatgtatttttaaacaggaggttttgaaaactccaaatttagattcataaaaagaggtagtgcaagtgtgaagcatgtggtcattttggcatactcagtgtataacttctctctttacctatataaggataaaataaagcttcagaaatgtgcaaagcagaaatcttccagttctgtttatccactttcagtcaggtagtaaaatatcctaatgttctatgaagaaatcttcaaaatgtactactgaaagag

SEQ ID NO: 144113 - DNA, 414 bp, Homo sapiens
agtgcaagccacaaggcaaattggtagatcggattacaccaaaattaaggatttctgtgaacaagtgacatcgcagttgaactgaagagatgatgacagtttgggaagagattatgaggtctaaaagtgacaaaggggatgaatatctagaatatacaaagaactctggatagtaccccaaaagaaaaatgggtgtcatattcagacaatttacaataactcaaggctgtataaggctgtaaggctattacacagctattagcctagagaatttagagagcttgagaatgccaatgctggcagaggtgtgggaataagattttcctgctgctcgtggaagcacaggttggagaatgatctggcattagctaatcaaattaagtgtctattcggggcataggtctcttagaaatt

SEQ ID NO: 144114 - DNA, 291 bp, Homo sapiens
cagccattgggcaataggcagttccaggtacaatctgagagaagggaatcacatgaagttactgctacatttttctggtggggaaagtttcaaaaccctcaatgacagcacgaggaagcagagtccaggcaaaggatcagtcttgtttggtggaggaaacggagactgctgctcagggctgctaaaatgtgtgtggcagggtatcagaaaggatggagttgcagagaaggagccccagaaatcttatagaggttgctgcaggtccttggccaaatcccaaactatgaatgt

SEQ ID NO: 144115 - DNA, 406 bp, Homo sapiens
ctctactcccatttcgcaccccagcctgtatgggtgtcaccttccctgtgccccatggcacctgggcatccctctaccaaaacactcatcacctttggtttgtattctttttgctcatattcatctcccattcaactgtgagctccttacttaagggtatgggctgtgtctcttatctctaaattcttatacagtggattacgaatgctcaaaatatttttgcagaatgaaggtaagaatatgacatggaacctaagcccagtccccaagtcactgcatactccaggctctcacagcatctgtgctttagtacttatagtgctcatgctactgtcagctactcacaatagactgtgagggcctcgtggacctacatggcctagtgcaaagtaattgcgtaatctgt

SEQ ID NO: 144116 - DNA, 183 bp, Homo sapiens
gggcagggcagggaggggaaggaagaaaagtagaatacagaaatagagggaaggagaggtgaaaaataaagacagggcaaactttttagtttttaaaatcttatacacctaaatcatgtgctgtaattctaaggagaacaaaaggtatagcacaaatcattgctctaaagcttgactcagtag

SEQ ID NO: 144117 - DNA, 172 bp, Homo sapiens
ggaggcggaggttgcagtgagccaacatcgcgtcactgcactctagcctgggtgacaagagcaaaattccgtcttgaaaaaataaaagcatattttaaaaagaatctaagcttttatatagctacaatccctatgcttccctctagccagtatttttgatctgtctgaggtg

SEQ ID NO: 144118 - DNA, 305 bp, Homo sapiens
tcattctttctgaatgcaaagggcagcaatttcacactgtcagggcaaaatgcacatgcatacagctcagctcccagcgggatacctttgcttctcagaaatggcgaagaaagccagcaaaatggcctttttctccttttgttttaatttaactatttagagtgaggtccttaatgtaacacccatcaatgattatggagccactgttctgaaagaactcgcagggccggcagatctgtgtgagttgtggtgtgtgctttgcttaaagcaactttaaaattatatgaaacaatgcattcttgttg

SEQ ID NO: 144119 - DNA, 494 bp, Homo sapiens
cagcgtaaatgtagtgagtcaaggtacgtggcatgaagggtgtgcaggcctgggtttgaatcttgcctctggcagtagctggtgtgtccgtgagacaaatctgttaacttctctgagccttgagtgccttgtctacaaaatggggatgatactaggggacttgtggagttgctgagaagatgaatgatttgtaaatatgtacaaaatgctgagcaaaaggccagaggggagaacacacacatctctatgttcccttaagatacaaagcagggtacacttgttcaccaaaccccaggctcaataaacagttatgtcaggacaaggaggaagaggccaggatgctatgggtgagcagagaggggttggaggcattcagttacctgagtctggggagatggcagagggtggcgggagcacactccatcaccactggggagaactggagagacaacaccagataaccccaaagcccagaggctgcagaacaaacatca

SEQ ID NO: 144120 - DNA, 296 bp, Homo sapiens
ctgctgtcaaaggctttggaacagcagctacaattgtacaccagaggtggaacctctgcggctggcggcccgggaacatcagaagattgattttcatcttccctggaaaaatggacatctccttcattgtttggagattttgaacgagtgagaacagcagctggttgtggacttctttcttgattaacctctaagttggatactggagggggtggtatattttctgtggctgaatccgaatcctgtggtatggagaatgtctttggcttccggcatgttttcggtttcgctgcaag

SEQ ID NO: 144121 - DNA, 305 bp, Homo sapiens
tataattttgtgtgtgtgcatgaaaagtaaaggggaacaggatgttggtgaacagtgataatgttcccacgttgaaacaggataatgtcccgcactgaaagaatgagatatttatattgatgacttcacagatggagcacttgtgagagatgaagcagaggccaaaatcttcaatgcataagggtactccaaggaggtcacaaaaatcaaggactgagaagaagaagactccaggattgctaacaacgttgacatccatcttttccttggttggctctagctaagggaatgacctcagcctaata

SEQ ID NO: 144122 - DNA, 465 bp, Homo sapiens
tccaagtttacattttccttgaacttcaataaattactgaatttattgaattcagctaagtgcccactaccagtgtttgggttggatgggaagaagatactaggagaaaaaagaaacctccttgttgtgggaaagcttggtatcattctcaaagatgctaggatggaaagacttcttgccttattctacatggacaagcttaatcttctaatttcttgtgtggctaagcaataaggtcttagtctctgatggcaaggaagccttgatccaacattagatctatgtatttatcatttctggtctatatatggcttgttgtgcagcagtttctcaatcaggtgaatttttaaaaacctgctccaatttcttgaataaggatatgagaggagacacagtaagtgaaagcacttgaaaacttcatcttgttattatagttaacaacaccattaccacagggtatcctta

SEQ ID NO: 144123 - DNA, 348 bp, Homo sapiens
ctttaaacatacacctcaggaccagaacacaggaaagttccattgacttggtcacacagagcttccctgtgcttcgaatattgacctaggaccagttcctataacatcttgccagacgtctgaggtgcaaggcagcaactgttggaaaattaattattgcattgccaggctttatactaaaatttttactaaaatttgaaaggcctaatacacaaatacatggagagaatggataaacgatacatctacatacaccttcaaacactttgaggtaaagtcgttaggaaataccaaatattcaacatggtggaggggggtgtctaagtatatgcaaagatttctccctag

SEQ ID NO: 144124 - DNA, 481 bp, Homo sapiens
atcagacggataatatctagaacaaaagaactcagttgaaaaaacaagaacaaagaatgaattccctgtagactaagctctcttcctgcacaggtaaggatctctctacctcctctctgatcctcaccaacaatggggaaccaacctgtattcaacagagggaaattgctgaataattcataagacaggagggttcccagctcaactcaaccttggatgaattgtctctatggccctactaagatgaagaaaaatatttccttgtgcagtaaatgtggttcatgaaaaggattcattaagtaagatgctatttaaacatatacatttttctgactagcactgcactttttagggaaggtgatgcttaatagaggagagatgctttaatctctccttatactaactttctaaattaaaaaaacacacagtgctgccactagcatcttaaggaagataggtggatgcatcgatacacacttct

SEQ ID NO: 144125 - DNA, 369 bp, Homo sapiens
gtgcagtatagcgtgatgtgataaaagcctcagtcttgctgctgcttatcaattaaagcattcggctcaggggaatatggtggactatgtctgcctgtccctaaaacaaaagtgtatgaagtctgttgatttaaatttttaaccttaaacaataaaccttgaaccagtaagtgtttaacccaggcccaaaccccaaatctcctaagctaagaggacaggggcattcccgaactattactcatatttcaaaggtgaatcagaaaggttacatgtgtctaacctaggaaaatagaggttaagggaaacaaagctcttatgttcacagctaaaattataccaccttgaagcagaacactggttatctcacgt

SEQ ID NO: 144126 - DNA, 501 bp, Homo sapiens
ctttaaggcgttgtttgtggtactggctgggaatttgggactactaaagtgtctcttaattgctcttaagcatcagtttaaaaataacttttttcttagatatgaacataaataggccttttcctttttactggaaccatatgggacaacctttggttgtattagtcgctggtttaatgatctgatgctgaaaaggttgacttattttttctttcaattgatgacctgcacaactgtaggtaggccagtttatttcttgttctttgtaaaactaaaggctttgctctctgacttcttgctgaagtagcacatacccccttcagttaaatcaggggtactcaaaacaccatctggggaaaagccttggcatgcctgttaaaaaccttgctggtggcctctttaagaggaatacaaagcctgatggcctgccattgctgatcatttagggtaattattaagatgcctttaacaaaattcatcgaaaaattaactgacttgaac

SEQ ID NO: 144127 - DNA, 306 bp, Homo sapiens
cagggctgctcgataggcagtgtgcctggagtagccagaagaaattagaaattaaatttcttcttggtgttacctctgaatgtattctgaatatgccatatctcatctggatccaagaggtagctgatgggatttagccttggttttggaacatagtttttgtgaaaatgaagctaattggcctatggagagagtaaatctgtagtcgtcaaaaccatgttgagtttttttgagatagggtcttgctctgtctcccaggctggagtgcagtggctctgtcatggctcactgcagccttgaccttct

SEQ ID NO: 144128 - DNA, 322 bp, Homo sapiens
atgagaggaggatgattctggagggatggacggctgagttagaattaataaggtaaagcttcccgagggcaactgcaaggtatgctgcttaagtgaaatgcagctgcagcctgtgctcagcggcttggttcagatgaagacaaactgtggcttttagcaaagggtacacagagggaggtggaggcaggttttgtctttttagagcagcggtccttaaccaaaggtgagactcaaatgtgggagggtacttttattgtgataatgcttaggggaagagggcagtcatcagaagaatggggtgggattaaccaagcgtgggcat

SEQ ID NO: 144129 - DNA, 952 bp, Homo sapiens
tgagacggagcctcgctctgtcacctaggctggagtgcagtggcgcaatcttgactcactgcaatctccgcctcctgggttcaagcgattctcctgcctcagcctcctgagtagctgggattacaggctcgcaccaccatgcctggctaatttttgtattttggttgagaccgggtctctcactatgttgcccaagctggtcttcaatgcctgacctcgtgatccaccttccttggcttcccaaagtgctgggatcacaggcgtgagccaccgtgcccggccgtgtaagtgcttttcaaatgccagtttttgcagatggtagtagtggatacagtttttatttatggaaccttctgtggagtgtcaggactgcactggaggattacatggagtggatgtgtttctctttggttttttggagacaggttctcaccctgttgtccaggctggagcatggtagcatgatcatagttcactgtaattaactttgaactcctgggctcaagcaatcttcctgcctcagcctcccaagtagctgggactacaggtgcatgtcgtcatgcccggctaattttgttttgtttcattttctgtagtgacaggatctcactatgttgcccaggctggtctagaactcctggcctcagatgatcctcctgccttagcctttcaaggttttgagattacaggcacgagccatgccacctggctaacatgtttcttatattagatcaatcatttattttggctactaaagctaatgtgaattttcaatttattctttatatctgatatgaattgcattagctaatgttgaaaatcagtcatttgcactgaagaacctattgtatgcagggtatgagggggtggtagcggttgtacctactctcaagaaatggaatgaaatataataaaatgaacttactagacaacaatatcaattagtccactt

SEQ ID NO: 144130 - DNA, 416 bp, Homo sapiens
tgtacatgtagtgactccctgaaacctcatggcaaccaaactaggtaggcattattattgtccccttttacagaagaggtaactgaggcacaaaatgattaagtcacttgtccatgggatttagcttttgagtgatagagtcaaggtgtgaacttaagcagtctggctcaaattctgcaaagccaaatagtggaaagaaagagaataaagcaaatacactaggaacagatgacaccttccttcaaaaggagagaaggaagataggagactctccaggcaggaaagactgacagctgctgtgcaggcagaattaggaatttggtacctagtgccctctgggtagcagccgaccaatgtcaggcaacaccagtaaatgacatcctggtgttggtgtttatacagcatggctgggccag

SEQ ID NO: 144131 - DNA, 729 bp, Homo sapiens
atggaacattgcaggctgcagattgtagactgatttgttgttggtcatatagaactgggtcctgtctcagactatactaagctcagctagaactaaacaaaagttattttgattgcttttttacagtataacccagataagtatcacttgtaatcattggcagaaggaaataacattactaagaagcaaaaattaaatgatttcccacctgtctgaagaaggggagaaaggtagtcaataacaaaaatcaattatctgctttacagcagaattaaaaccttattttgaatttttggaggtatttatttacacttgttctaaaagtttgtgacttgacctcttctggaattcttagcaactaggcatagagctattccaggatcagtgctcttgggaccagatagaaagaagcatttggaagggtgctatggctgggctcagtagctcatgcctgtaatcccagcactttgggaggctgaggtgggcagatcacttgaggtcaggagtttgagaccagcctggccaacgtggtgaaacttcatttctactaaaaatacaaaaaaattagccaggcctggtagcaggcgcctgtaatcccagctactcggcaggctgaggcaggagaatcacttgaacccaggaggcagaggctgcagtgggctgagatcacaccactgcactccagcctgggcaacagagcaaaactccgtctcaaaaaaaaaaaaagaa

SEQ ID NO: 144132 - DNA, 249 bp, Homo sapiens
tgaaggcaggacagccacccgccaggtctctggaaaactccccaggacagggatgttcaggccatgtgatgctatactaagctgttttacgtgaggaataggtgctttttaagaatctgtctagaaggctatgggcacagatctgtgttcaaagattttctgggcacttatgttttgtgagacatcagagacaactttctaagcctcagttttgtcacgtgtaaaatgggcatgaacgcccttcgcaga

SEQ ID NO: 144133 - DNA, 636 bp, Homo sapiens
cccaacaacagtctgtttaacctcttcccctaatgctgaactattgttgctttaagcatacattttctgtgtgtgtttcagatgtagtttccttaggaaagattctctatgctgtgcaacaattccccatgtgtctcttacatttctgcacatcttgtgtcagcgtttgttctagaccgtcttcataaggatgtttgtatagctaatagcattggaagatagggctaatatagtagaagacagatttatttgctgattaggattataacgataatatctccagaccaggcacagtggctcatgcctgtaatcccaccaatttgtgaggctgaggcaggcagatgacctgaggttgggagtttgagaccagcctggccaatatggtgaaaccgccgtctctactacaaacacttaaaaaattagctgggtgtggtggtgggtgcctgtaatcccagctacttgggagacaggtgggagaattgcttgaacccaagaggcaggggttgcaatgagctaagatcattccactgcactccaacattggtgtgacagagcaagactctacctcaaaaaaacaaaaaacaaaaaaagaagaagaaaaagaaaaagaaaaagaaaggattataatgacaatgt

SEQ ID NO: 144134 - DNA, 327 bp, Homo sapiens
tgctctagccaaaccccactgaccaaaccccggtgagttaccagctagcagtttcctcccctgggaccgaaaagcccaaggacctgcccagatcaacacagcaggagctgagatccatgcaggcctgttggcgctgtcctaatgctgctcctgacatgactccaggacctccattctgcccccacttgcagcctcatagcctggcatcaaaagctgcttaagaggccgggcgcggtggctcacgcctacaatcccggcactttgggaggccgaggcaggcagatcgcttgaggtcaggagtttgagaccagcctggccaacatggta

SEQ ID NO: 144135 - DNA, 154 bp, Homo sapiens
tctcattcctctcttactatgtcccaaatcccttcacaggctaaaagaaactcttcagaattaatcctattcataaagaacaccacttactgagtattgcattttcttcttcaaattcttcagcatacattgggaatacaccctatggaccatt

SEQ ID NO: 144136 - DNA, 857 bp, Homo sapiens
atgtgattgacgtcatccaggggctcaaagcaattgctttgtaggaaaggaagagattagctctggatccgccgacctctcttggcaggcctatcctttgagctcctttgcattggcagaacatgtatgtgtgctttctctgatcctgggaaaactaggactagacacaaaatacacagggaacttgctaatacctgttagagaggtggatttattcctttgaggtgggcgggaaaagggaaggtgatctcataccattctagtgtttcttagtcattggcaacctcctggtgagggctcacctcccatacccaacccctgtggcaaatgaaagagtctcccagacaagccgccaaaggaattcactgcttcacacagcacccacgctggctgtccacttccttggacattcttcccagggacttacctaaatcttttcagggacaatttcagtctaacaaactgacgtatgttaaatacttaaaatgtgcatggcattgtgctgagcaccattaggggaacacagcggtaaacttgggaaaccagtgccctgcttctgggttgcacttacaaggcatgagcaactgtaaactcctgcatgtgatgagcattcggtgaaatcattccactttttttctgtctccattattaccaatgtggtccaggctgccatcatctcttcttgcctagactactgcttcctctggtcttcccactttctctcttgcacctttacaattcattctctacccagcagcaagttatcttttcaaaatacactacaagcaagtcagatcatatcactcccctgcttgcaaccctccaattgattcatatactatatagcaattagtatg

SEQ ID NO: 144137 - DNA, 444 bp, Homo sapiens
atcaaatactgacatgccaggcacagtggctcacgcctgttattccagcactttgggaggccgatgcaggctgatcacctgaagtcaagagtttgagaccagcgggaacacagcggtaaacttgggaaaccagtgccctgcttctgggttgcacttacaaggcatgagcaactgtaaactcctgcatgtgatgagcattcggtgaaatcattccactttttttctgtctccattattaccaatgtggtccaggctgccatcatctcttcttgcctagactactgcttcctctggtcttcccactttctctcttgcacctttacaattcattctctacccagcagcaagttatcttttcaaaatacactacaagcaagtcagatcatatcactcccctgcttgcaaccctccaattgattcatatactatatagcaattagtatg

SEQ ID NO: 144138 - DNA, 922 bp, Homo sapiens
ttttgagacagggtctcacttgtacccaggctggagcgcagtggcatgcacgatcttgactcactgcagccttgacctcctgggctcaatccatcctcccaccttagtcccccaagtaagagggactacaggtgcttaccaccatgcccggctaattttttgtagagatagggtttcatcatgctccccaggctgggctcaaactcttgagctcaggcaatccgcccgcctcaagcctcccaaagtgctaggattataggcgtgagccactgtgcccagccagtaatatccttagtttgatgtatttggcttataagttcggtactgaatggggctttgaaggatggcctgtttctcactaagcatgtaaaatgtttagccctgtcatctgctgtccactcagcagcgagagggattctttaaaaatactaagtcaaatgggttcagaattctccagtggcttctcatctcattgcttaattgcctgtacagatctggctctttgttgccccgcctgtgatctcttctcccaccactgtccctcactttctctgttctgttcagtggacctcctgtattacatagtatgcactcacactcgtcactatttttttctgtgcttgccttcctctgttacatgtattcatctcctgcctctgatatgcaagttccttgagggcaggaactttgttttgtttactgctgtattactaactcttagaacaattatgacacatagtaggcgctcaaatatttttgaatgaatacattaaatttggtaagttgatatttattacagaggatatcctttaaatccagatatttctaataataaaagctaatagttattgagcatttgccatgtgccaagaacaaaggtgacaacattgttatgttcaattttcttatgaggaaattgggc

SEQ ID NO: 144139 - DNA, 217 bp, Homo sapiens
cagcgctgtacccgaggcagtggtggggtgacttgagtgttggcagagggcgaggtgaccaggggtgagtgcacctggctaagggtgggcgacttcaagtgccccatgcccggtgaccccacccgcttccgccggctctgtcacctgctatctcaggccctgcctcgactgaactaactgctttctgccgcccgccgtgccccgccccgccaagctg

SEQ ID NO: 144140 - DNA, 351 bp, Homo sapiens
aaaaataaggattcattgttgctgttgccattatccacattttatagataaggtgggaaacacctggagagattaagtgaccacccaagattgcccaagaagttaaatgcagaggcctgctacatgatgctgtcaggacttgactgaaaggcgcaagttcagtgtctcaggtcaagttgccaggaaacagaccctgagactctgagatttccatacaggaggtttttattgggaagtgctctgggcacaatacacagtaggagagagggaaacgggattgcacagggggagagactgaactgtggggcatgcacaacagcggcctcaacagggaggagcttggaagctggg

SEQ ID NO: 144141 - DNA, 610 bp, Homo sapiens
ccgtctttttccatgtgccttcacatggtctctactctgtgcctgtttgtgtcctcatctcttataaggatgccagtcacattggattagggcctacccataagacctcattttacttttaatatacaggacctgtctcgaaatacagtcatattttaaggcacatgggttaagacttcagcataacttcaatctatgaattttgtgagagacataattagcccgtaacaccttcttaatgtggacagttattggaagccagatgaaatttatgaaaaatttgtactgaaaatatttcaaaagtaacattttaataattttcaggtctatatagttaaccttgagctacctactttaagatgttgctaaatagggcatgctttattaaatagatattttatttgtgattactgcattgtttactttttacacacttaacagattttaaatcaaatcgataagcatattgcatctcctttatgggtaaatcatgtgccccagagaccccaaaatcttgatgacattctgtgaagttatacaaatatatctaaagaaacatatctgttcttgttctgatttcaattctaaataaaaatccaatttcaaaatc

SEQ ID NO: 144142 - DNA, 318 bp, Homo sapiens
agttaaatgggtgcactggatgctataatctctaggtttcactctgacactaagaatttgtgattttttcttctgattcctggtccaagggttccttctctcctggagatggagacaccatgaccactctcatggatcttttcttcttggaagaaggggtgaatatagagaatgacaaagaaaaagtgagatgacagtgatcagtgttatgaagaacatggcttgggtagggctggttccttgtattgagtggtcaagaatcaagaaggtgaatctgcagtcccatctgttcaaggtgcagcagaaagaagtgaagcc

SEQ ID NO: 144143 - DNA, 316 bp, Homo sapiens
tgaagacgagatcagaagactgtgtatgcagttcagcatttagaagttggggtgatgagcaaaagacacttgagaaggcatatccagacatataggcaacctaattaatggtggctgtgtgtgtggtttaactttccttttaagagttagatggaaggaatcttaagctacatttagtctgtctcattttgtgaattagatttttaaaaaaggtcatgtggacagactagtggaatagaactaaggtatagacctaagagcatattgaaacagtgtatggtaaacttggcatctcagagcactggggtaaaggtgg

SEQ ID NO: 144144 - DNA, 332 bp, Homo sapiens
tgccttcccaacaagttataagcccttgagggcacacagctcgtacttgcctaaatgaagtgcttgcacataatatatgttcaataagtgagccttgaatggaagaacagagaggggaagggccagtccgggcaagattttaaaggaagagtagaaatctatctcagagatggcttatagacttttctatctcctagcagaaacaaagtccagttacaaaaaagtatacatttttcaattaaggctaaaattcctaaactggctacacattagggagcaaatttcttctctttatcagggatgggcaaaatgtgtcatctatggtcataata

SEQ ID NO: 144145 - DNA, 617 bp, Homo sapiens
tgctcactccttgcacaaaatatccactggattcctggtaactactgaaaaaaatctaaactccctattggaaaccaagatccttcacaagctgatcttaacctacctcttgcttcaccaatcactcgtgcactaaatgctcaggcaggttgattatcccactctccctaagtatgctaaagcttctcaaagctctgtattcctgtactgaatcccgaaattaccttctccttttgagctcagcaaattccttttgatgctatatgacccagctcacatatttactcctttataaagcctttttgttgccctaggcaaagttagttattttgttataaaggaggcacataaagtatttgttgaatggatgttcaatgtatagaggagtaaaagtgatcatctttgtatatccaataccaacttcagtggtcaaggcagcataaatgggtactgcaagaaggaatgaagcctcatcatatcataaattccttcagagcactggttttgacagatactacttcatcgcaaatatctcacagttacttgccctcttaataataatcgtgcatgttgccgggcgcagtggcttgcgcctttaatctcaacactttgggagg

SEQ ID NO: 144146 - DNA, 114 bp, Homo sapiens
cgatagctcaacctctttgatgtccagaccaaatgtggcccactttcctttgggcatcggtgcctttcagcctgtttacctggaggcggtggttctctgcaacatctgcctatc

SEQ ID NO: 144147 - DNA, 293 bp, Homo sapiens
caaaatgctgagattacaggcatgagccaccgtgcctgacctctaacttttcattatggaaattttccatatgcacaaaaatcagggagagaattacaccatgaacccccatgcacccatcatcccactgcaagaacttgtcaacatttcgccaatctcattccagttcccacttttcttttccttcttgctattttaggatattttaaagcaaattccagacatttcatttcacccacatccataacacaccagggtgcattcttgatgtaaggattttgttttgttttata

SEQ ID NO: 144148 - DNA, 181 bp, Homo sapiens
cacgctccaaaaattttgatgccatcctcacaagattatactcataaagaaaagagctgagaaagaacattcccaaaactatacccacctgggaatctgcctctcgtcttttgtatgggtttgtactgttactttggtagcatgatgtggtgggtatagttttgggaatgttctttctcag

SEQ ID NO: 144149 - DNA, 202 bp, Homo sapiens
tttacattgatttgagatgcagtatgctatagtgaaatgaacaccagactgggagttaaggatcccgggttccagttgttgtaaccataactatttgtctaactttaagaatatcactgggactctgttccaagatggccgaataggaacagctccattctgcagctcccagcatgaccgacgcagaagacaggtgatttct

SEQ ID NO: 144150 - DNA, 254 bp, Homo sapiens
ccacattattcataccacagttttgccatattttcttttcagtttttagggtatcacgttcctttttttaagtcagaggtatcaatatatatatcctgttgtaatcttttttaagtcctataaatagattgctcttgtgttactggatatatgtaaacaattacagactaaactgatcgtgtgcatatataatgcaaaaaagtacacgtgaagatattcttatacaaggtagctcctgaattcaagtcaaccac

SEQ ID NO: 144151 - DNA, 203 bp, Homo sapiens
ccctgcccgctggccatgtatacagcaccctgacctctgtgggcagcttctgtcacaacagtgttgggcttttgtgagagaagtaagggataatagcaaaaagcgttaagaacccaaggaagatgtcattcaaaagagggggttcctataacagtcaaactcatggaaacagaaagtagagtgccaggtgccagggtctgggg

SEQ ID NO: 144152 - DNA, 469 bp, Homo sapiens
gatgcggattcttataaaagtttggggaggtattctctataaaggcaggggttgcagaatgagagactccctgaatcactcatgcccttgaggccagctttgaccaagacacttgaagatactcttagtccctgggttccttcatgtcagaactagcaaatccccaaatcccaggatggagctgggggagctggggcaggagggctttgccgacagaaccatatctccagcatgccctagcaacaagcatccattccaatctctcagatatccagaactcgagactgcagccccacttagtacccactgatgagaccagcgagacccttagtagtcaataggcttagtgtttcctcgagatttggggcaactggaaggaacctcagattatcagtccaatttcattttacagaggagatggcagatggcggatcatgaagtcaagagatcgagaccatcctggccaaca

SEQ ID NO: 144153 - DNA, 1157 bp, Homo sapiens
actccagcctgggtgacagagggagacttcgtctcaaaagaagaagaagaagaaggcaatctcaaaagccagtgtacatgttaggcagcagctctcatgttggtgaatttcagttttgtgccctaagtctgtaagaaaggtctatgtgtaccttttggtcttggaacttggtagttttgtcatggaaaaaacactttatctgctgctgtcctctgtcagagtacccaggcactccttctagattctctctagactgagatcctgagttattttcctgaagccctttgttcctcaacttctgtagtcatctattcttgagccttgaccttggttatttgttctggtgttctgtgattctgttaattttttctgtcatctcttttgttagggccctcctcctttctagggtcccgatgacaccttcgtgattctcagtgctaccctagtcacagcctatcaaaggtagaaaaactatagtttttcttcagtgtttattcaattctttctactctcactccccttttgtattttccttctgactcatgcctgccaagctgttttggcctctgacaacagttgttctctcatcaattatggtgctccaagtattcatcacttcatgcctgctgatgtctgttcacaaatattcagattttttttacgtgtccagcctgcttcctcttgttttaagtgtcagtgtctttctgtcattccttttttctctgtcttacatccctgtgtatcacatccattcagatcttttacttccctcatctctgcaccccagtaattctttgtcataatttcttagaagtatagtcaagaggagactttcagagagctgttaattttatccctttatttaacagataaggacattgtaatccagggggagaaagtgacttacccaatgttgtaaaattcatttaggtgtaggtcttgagtcccagaatatagtctctccatttccttaaacctttcctgtcattcctgtcttcaaggacccgttggtaaacacctccatgagcttcctgtagactccagaaattagtggtggtagtgtgctagtgtggaagggggaaggggagaaggtgttatacaacccagtctatgacatcttttcctaaatctttttacctgtggttataatttgttta

SEQ ID NO: 144154 - DNA, 436 bp, Homo sapiens
agggcgagaccctcaaataataaataaataaataaatagttaaaccaactttgcactcctgggataaattccacttggttgtggtgtataacactttttatatgttgcaaattttgatttgctaatgttttgttgaggatttttttgtgctggtactcataaatggtatttgtctgtagttttcttgtgatatctttggttttcgtataaataatactggcctcccagaataaggacgtcttctctcttctcctatactttgaaaaagtttgtgaagaaatggtattaatttgtctttaaatgtctgacagaatatgccagtgaaggcagagtgtggtggctcacacctctaatcccagcactttgggaggccgaggcgggcagattgcttgagcccaggagttcaagaccagcctgggcaatatcatgagacccc

SEQ ID NO: 144155 - DNA, 821 bp, Homo sapiens
agcgggagtgaggtcagagatcccactttcactcagttttcttgttttttgtaactaggagtcaaattattcacattactttcatgcagttttgtttagcttaattgtatactgaaagcctggcacacataattaatcaatgtattgctagtgactgttgaacaacccgtatctgttggaaatgttattgtaaaatgccagatgcaaagggaaggaggacagaagcagctgagaaagaaaaccatgccatttttcctcagatgagcgttatcaaagtggtcatgtgtattgagagaaatcaatttggctttacagatttgtcctcacttctggaaaatccaaaatatatctcctattgttcttttgcctgccaggctgacacaccaacaagagctacctcctatatttttgactgcaccttatacacatttaaaaagtgcattgttttgcaggccacacaggagtactgggcacaactggtatgattatataatccaatgcttcaatttcaccccagcactcagtccttattcttataccctctccctaatttgtatgagaaatatgtgaagggaaaatggcagtccaattttttttttccaataatggcctttcattttcagtttccttagacttcatggacttttcagtaactttgtttcaggaatgcgtgaaaattgatttaagatttttaaaatttatttcagtatactttgccatgaggaattgatattcagacattagcaatctagtatctttttgagcacccctgtcaatgacagagttacattgtctgtcatttgactgcctttactgagtgc

SEQ ID NO: 144156 - DNA, 746 bp, Homo sapiens
cacccaggccggactgcagcggcgctatctcggctcactgcaaactctgcctcccaggttcacgccatcctcctgcctcagctactcaggagcctgaggcaggaaaattgcttgaaactgggaggcagaggttgcagtgagccaagatcacgccactgtactccagcctgggcgacagagcaagactccatctcaaaaaaaagaaagtaacatttttgtttcttagaaaaggagcataacaatttagcctttgaaaccgagtagcttagtcaatcttaggctaaaatatccaggcacagacagaggtgagaggtggcaaatgaactatttgagatcttaattggaccagaaatagaaggcagattacagttttacctctcatttactaaaaacaaaaataacagaatggaattagatagcatttttttcaggttgaaacaaggccactaaaacattagtaggcaaatagaaatttggaaaactctgggaagagtatccttgaagatttcactgcatatacttgaaagcaaagtaggagagtgggagattgcaagcttttcaggtggtctttagaaattctagtcatcctttttttaaatataaataaatctccattttaatacattaatgtctaaagtataccgaaaaaaaagtttttttttgttttattcctttattctttgtaaagaatttccaccatcaataggtatagtgaaattttatctcttagaaaaggagcataaaaa

SEQ ID NO: 144157 - DNA, 277 bp, Homo sapiens
gggacttcagcccatgtgtcatctccttagaggcctatagtgaccatctaaggcaatcctgtctatctcatgctcttttttcctttttcacaataccttcttcatttgctgcatagcatttgtattaacatttatttatttattcctcggtctgtctccctacactgtaaatccccttactagaccataagctccaagtgggtataatatagcatctagtaaagtgctaaacacagtaaatgctcaataaataattttcaaaaaaataattcattcc

SEQ ID NO: 144158 - DNA, 1105 bp, Homo sapiens
ggtacaggttctgtaagttacctatttttttggactttataagttatcagcaagcttcttgttagtaaaggcatgataatgaaacttgaattcatctacaaaattggatgtgcccatcaaggggcctctaaaccaatttaagcccaaagttaactaattacaatttctactggttttagtaaaactagcatagtcaaccaagtaaacaaagtccattgttaatcttatttgagttagctaacattacattctagtaatgggtacacctaaatatatcatgacttgagtttcattacattcagacataaactacaaattcctaatgtgcaaactattgttgacatttttcttaatcactgatgtaccataccagaatttccatgttttgtttgtacattaatcagaattgagttgtaatactgtatgtgccttcatccaagaaaaattttacataagcatttctagtgcaaaaaattctgttatcctggattattgtacgtttgctatatcaaacagtattgtggatgtagacttgaataaaggggtggggactgggattaaatatattcaagtaaatctttaaaacaaaagctatctgcaaatttgatcaccatcataataaggtctgttgacctttttagaagttttaaaatatgagtccttttgagctttcatgtaaatcttaaatggaccaaatggactgagtgatttgaaagctaaagtgaatgtcactagtaaggctgtatacaaataaaatactaatgtaatctattaaagtgatgatgaatggctaaaagggcaagttcttaactttttaactggaaacgtaatgatcttggcaagctgttaatgtctgtcccatcttaatttttttttgtgtttgaactgttggtaatgttaattgcattctctcattttaaaatgtattggtttttctaaaagtattcaatatctaagttcaaatagataatattttaatgagaaaataccaatattgtaaatttcagtatgtaaatacgttgtgcttcatattctgtaatttctacctctattctcagaccactctgagcaaaataaaagtagttcagtgctttacgattgtaca

SEQ ID NO: 144159 - DNA, 201 bp, Homo sapiens
ctccccttatccagattatgtcctgcaggcacatattctgccagtgttggacttgccaggccttccattaaaattaattattggctgggcgcagtggctcatgcctgtaatcccaacacttgggaggccaaggtggctggatcccctgaggtcaggagtttgagaccagcctggccaacgtggtgaaaccccatctctact

SEQ ID NO: 144160 - DNA, 312 bp, Homo sapiens
gtaactagtgctgccatgaatataagagtgcagatacgtcttcaacatggtgatttcacttccttttggtatatacccagtagtgggaatgctagctcatatgtttcatttttaatgtcttgagaaacatccagattgggttttttaagttctgggataagcgtgcagaacgtgcaggtttgttacataggtatacatgtgccatggtggtttgctgcacctattaaccctgtcatctaggttttaagccctgcatgcactaggtatttgtcctaatactctcccttcccttgccccccaaatccccaagag

SEQ ID NO: 144161 - DNA, 270 bp, Homo sapiens
tatgattcctgctaggcccttacctgaacgactccttcctggggcactctgtttccaccctgccatcgtcatggcgttgggcattcactccatgcttggcgcagagactgcagaccctcacatggctttataaaaagggggctctagggtgattcccaccctacagatgaggaaacaaagacacaggggtgaggtgcttgtcccatgtgacaaaatcaggagcaaaagagcccatattcggccaggcgcggtggctcacgcctgtaatcc

SEQ ID NO: 144162 - DNA, 756 bp, Homo sapiens
aacgtattttaatactttaacttttagaaatatagttttagaaagtatatttagaaatatagtctcaaaaggttataaggattacattatataattatatttttattaactgtataaaacattttttcagccaactgacttactaattaatggtttaagtcttttcagctaccgtatgaggtggttctggccttgtactgcaaagaaagaagtattgctctttcagtaatcagattgccatacatgtagagtagatttggatacttgcattaatactatgttcttaggaattcagaagctaagaaaacgttgcattcctatgtgaatgttttctgccacccctttgagttggaacacacgtagaagtgcgtttctaattctttagctgatggtcttttagcttgcttatagaattctttaagtgacatgaataatgaggtcttacagcaggtgatgacagtaaatataactataaagttttatgccaaaggggatcattgagatgcaacatcatctagtcttctagttttgtagatgagaaaatagttcagttgagtgaggtaaatgatgtacttaataccacaattacgtagaaggagggagggagaaaatgtcatacaagcgtttttcacaaaatcatgaaaagattcaggttatcaagtttcttgttaaactagacttctctcctctactcctttttagatacactatcagtcaatagccagtcaccagtattcctgctagtctcttcctact

SEQ ID NO: 144163 - DNA, 204 bp, Homo sapiens
catctaaaatctaagaggacctacacacaatgctgatgtgactaaaaaataaaataaaacctaagaggatcactaacacacacagctctaccttttgagaaaaatctatgaagttatatcatgtgcattttttccaagacagtatacattgctctaagttaaaaataagcatttgcctgagatttagaaaataaaacggaaatg

SEQ ID NO: 144164 - DNA, 382 bp, Homo sapiens
cctgtggcctggtgtcggggcagggcggggctgcgtcccagcatcagaagggtgggcagggctggtggctgtgctgttggctggcgggcaaactggagggaagaacttcccttgtcctagggtctggctgtcactcagctttctctcctctagtctcactatgggcttttgccaaacgtcatgtcgatatagtcccttcaacaatctgttgaaaaagcccccccttgagagaactgctcaagcttctcactggtttcctcacaagggtcattccagtttccggagcagtggactggggaggggacagggctgctcaggcgatgatgtaggtgacggagccagttttggtgttcaacagttgtcatgttcttggtccgtattg

SEQ ID NO: 144165 - DNA, 229 bp, Homo sapiens
ggtctcaaacttgtaaataggcaaaacaggccaggaggagactgtgcagaaccagccggggcctgccgtgtctaaagctggcagccactcttcagtgtagcccatcatggcccattatgttagaagacgaacgcatctaacagcttctcgggagagtgaggaaatccagcatttcctgtgaaatctccccatcattaaatgttcatatcgagtccaacattttctgaaa

SEQ ID NO: 144166 - DNA, 108 bp, Homo sapiens
aatgaatgtctcaggagcaagatcttttacaatctcagtacaagagccaaactgctcctgtttcagggacagaagtcattgaaggctctattgacctaaatagaaaag

SEQ ID NO: 144167 - DNA, 825 bp, Homo sapiens
agcgggacgggagctctgctcaggcttcaacatggcgggccgtttcggttgacttcgcctgtggaaaccgaattccccctccatggtttccccaggatatgagttgggggcctcacctcgcctataagggtcaggcgagctttctggatgctcgagggacctttcggcctgcgcagccggagcagcttgtcccaatgccctgccatttctgtgagggcccacgaggcctggaggagcctcggagcccccgcaggccctcgcgtcactgcctcaagagggtgctcggagccctgctcgggagctggtccccaacgaggtgtggaaccccttcttgctggaactccacggagagactgtcctgctaggacctgcttccagaagagttgatcccagccgtgaaagtgcatgatgccttcagcgaagcaggcaggaaaggctcaagtgatcctcctgtatcaccctgggtatcaaggccattcagtggaaaagaacagtctcttcagcaagtggatgaagttagatctcttcctcacatcatacagaaaaatcaacctcaaatggaagaaatatctaaatgaagccgaacacttgataaaaagttcatcagcgtaaataagaagaatcccctccattacatacaaaagaaaaaataactggagagatcatctctgctctaagcgtgtttttaaagtctctgcagtcttggaccaagctcgttttattccctactctacgagaatctcaagagcaccaggattctgtttggagttgccatggacacagagttcttaatccagtactggcttattctcaatacgaggtaaa

SEQ ID NO: 144168 - DNA, 808 bp, Homo sapiens
agcgggacgggagctctgctcaggcttcaacatggcgggccgtttcggttgacttcgcctgtggaaaccgaattccccctccatggtttccccaggatatgagttgggggcctcacctcgcctataagggtcaggcgagctttctggatgctcgagggacctttcggcctgcgcagccggagcagcttgtcccaatgccctgccatttctgtgagggcccacgaggcctggaggagcctcggagcccccgcaggccctcgcgtcactgcctcaagagggtgctcggagccctgctcgggagctggtccccaacgaggtgtggaaccccttcttgctggaactccacggagagactgtcctgctaggacctgcttccagaagagttgatcccagccgtgaaagtgcatgatgccttcagcgaagcaggcaggaaaggctcaagtgatcctcctgtatcaccctggaagccgaacacttgataaaaagttcatcagcgtaaataagaagaatcccctccattacatacaaaagaaaaaataactggagagatcatctctgctctaaggtgattatcctgtggtctttggttttggtacgttctccccgaccccatgcccttttccctcatctttaatgagtatctgtatgtgtggcagaacagcgtgtttttaaagtctctgcagtcttggaccaagctcgttttattccctactctacgagaatctcaagagcaccaggattctgtttggagttgccatggacacagagttcttaatccagtactggcttattctcaatacgaggtaaa

SEQ ID NO: 144169 - DNA, 404 bp, Homo sapiens
tgaaaagagctgagaccaagggaaaccataatggggccagagcatgcaagaccattgcaagaagcatcaagggcttggagctttatccagaagacaggagcagccattgagagggcatgctccagcttttgttttagcagaatctctttgcatgtgatgtggaaaatgaattggagaggggaaccaggaaacctgttaggaggctacttctgtaatccatgaaatggcaatattctgcttttatgtccctgagaagaaagcataggtaaggaccactgaatacacatttggtagaaaaagaatattccccggctaaggattgggaagataaaacaatcaggaccacccacccattacttcattttcctttatgtatccgatcaagtaccctttctaaaagaagg

SEQ ID NO: 144170 - DNA, 886 bp, Homo sapiens
gttccttctacatctttaattcgagtgatcacacactcctccttcgcacagtgctgtgatgggccaaggccaagaccatggcaaagccatgatcttcatctggccagaaaatagaaccaaaggagttcttagcatgtcttgtcatcatcagacacagctgtagagtagattcactgtaacaaactttcattatgactttgccccactaggggacaaattcttgcagattttgctttcccgttagccacatgacctcatccattcccatgatagtgtttatcacttatataaccccttctatattagccaaggatatcctaccatgaatcctcactgaagcaaataccttccacagtgaccttgaagcagctttccccctgcagcaatggttaggaaagtatcgtttctgtcttgcccacacttgcagaccaccttctgggagatatgcaagaggtctgcctccaactttcccacttcttctccattccattgctcaccctcctcagataacatttctagtgtccttgtcatttcaagcccagatcttaattttaatctgatgtcactggggggaaaacatgcttaggagctagaaaaaagaagatcaagcaagtcctgagaataaagcctttagaaatggccctgggcgtgacctggcccaggttatgtcctattcctcccagaagagaaaggccacccctggtgaagtggcagggaaagcagtgtgactcggggtagctttgaaggccaaggaatgaatgtctggctctctcttgatctttcaagcttacagtctgtcccctaatacacaagccaaccagggactgtgctgccattgcatgaagtcctcggtgtgtgcacctgagtagactgcatttcactgaaa

SEQ ID NO: 144171 - DNA, 726 bp, Homo sapiens
tagctgatgagcacatttcttattccttactgtagctcttctattcagaggtgtttggtcctgaagtgatcattttctttctacagtcagtgacttttcctatttctcccttaagagtcctcattgctttatccttgattttaggtctgtataaacttagctggacaataaatttatcaggtgtacagctcatttagtgattctgttctgaactacagcaatactttcatattcttcctacttatttgtgaatatttatcctttattatgtcatttattaacctattttctttctctgcagtcaacttagaaatcttttataaaatatttgaaatattttacagaaagaagcaggatagaatcactaaatcttttggagattctggtatttcttttctcctacttttataatcaagtggttgttgacgttttatgaatttgcgtaggttactataacagacatctctggatcatgcacattatgatcagcctttcttctttatctgcataaataattaacttagttgagagaaatatctcctcgaaatatagaggccaccagcttaacatatctcaacctatttctattttaaaaaatatttgtgtgcatatagatgtaaaaaaaccctgaagaaatatagtctgtgttgctgtcagtacatgcaatgtagagttcatatagaattctcttagcccctgagagtattgaaagtgttaatgttgggg

SEQ ID NO: 144172 - DNA, 682 bp, Homo sapiens
ttgaaatgaaaggtataaactctcggccaaaaatagagcatataaagagaataaaatagagatttcagagctaagaaacacagtaacagagataaaacctcattggatgggttcaatagtagaatggaaatgagagaaaaaacgatcaactttgaagattattcaatggatattatccaatctgaacatagaaaagagattggaaaattatctaattctcagcgacctgtgcgacaataattaaagatctaagatttatgtcattagagtctcagaaagagaggaaaaaagtatagcgcagaaaaaatacttgaaaaaataatggctgaaaaattaccaaatttggtgaaagacgtaaacctacaggttcaaaaacctcagcaaactctaaacaggataaacacaaataaatcattgcccagacttaccataatcaaactgctgaaagctaaagttaaagaaatcttgtgagtagccagagaataatggcacattacttacaagagaacattgtgaatgactacagagtgctcatcagaaactatggaggtgagaagataatggaatagcatttttaaagtgctaaaagaaaaaagaattatctcctgggtcttggcacccaaaattctatgtctactgaaaacatccttcagacttggaggtcaaataaatattctcatca

SEQ ID NO: 144173 - DNA, 510 bp, Homo sapiens
ctacacccttaacctgctttctaaaatcactgagaactgtccctttctctcagtaagtcttttcttattccaattccactttaatttccaccagcttcatcttccagcatgcaatgggtctggggctttgatccataagtcaatcatcggagaagtttagcctagaagaacgaagagcagtaggctctgcagtgtgcaaaattgttggcttgcaaaatacttatgttttcacatcattacagaatcaattcccgccctcataaaaagacctgaacaagagaccaaaaaatccctgcacgggacaacagatccacagccaaaaaggccaagataaaacacagttgggtccagactgtgcacaacactctgccctctactttaaaaggccaaagggggattgtcaaaccttcaaggtcgcccaaaatacagacactgagaataaggataaatatggcctaaaataggaatgaacagattccactgaagtaagactaaataaggaagaaaaaa

SEQ ID NO: 144174 - DNA, 322 bp, Homo sapiens
tatattagtgaacttgtccctgcagatttcaacatgcatcaaggctgaggggagagaataaatataatttttcttctgaattagtatttgagtcccgaggtatctcacagatgaaccattacctttatttgagctcgggaaagaaaactctccatttatgggcacatatcccagtgagctaactaataaagtgatcatctttagactgccacaagcacttttggcaaagcagccaaaataattctttaccacagagggggtgaaagaggagtatttcaaagaatctatgcacttaggacataatatttacaaaaagtgctat

SEQ ID NO: 144175 - DNA, 146 bp, Homo sapiens
ggaggccccaggcccggtcacaggagtcactgtccctcctgcaggggctgggctccccagtggccagaccaggccagagccttggggttgtgcttttggctgggacctagagcccccagcatcctagacctgttcctcctggaagc

SEQ ID NO: 144176 - DNA, 257 bp, Homo sapiens
gctcctttcttcctctatcctaaccccaatctccaggttgccttcaggaggtcttcgccggctttaggtactccttactcgcactcaggagtcccagcctgagtcctctgctgcctctgtttccctgttgactctgggtggagagagagagagcaggaagcttgcactaaatacatgagcacctggtagtgcatcccttctggatccaaccagaggagacaagctcccgcctaccctctctatatcacatttgccca

SEQ ID NO: 144177 - DNA, 276 bp, Homo sapiens
atcctaaaggtagtgatgcttagctcctggtgtacagcttctaaagatgaaaaccaatagctagtgtgtagcatacttcctgacagtcatggaattcttctcttctgggctcccaaggcctggacaagaagttgaaccatgccacagactgactcaaataatgcttttagaattctgatatattcttccaaagcaagttgtaatcacacaagtattactattcttgtatccaacatcccccaaagatgttaatcactcaaactactgggtagggca

SEQ ID NO: 144178 - DNA, 185 bp, Homo sapiens
ttgatgcgtgtttcacgaccacgtagaacactgcagcccccggaatccctcctgtgtgcccctcctgtcaaagcagctgctaggagaagctagcatctaataccatagattagttatgtctgtttttttaactttatgtaatgcataaggaaattacacagagtatatgtcgtcttcagtcaggc

SEQ ID NO: 144179 - DNA, 435 bp, Homo sapiens
ctcccactgagggacgttaggttatcattcgtacttttataaatctaaaaattgccttgtatacatttttgtacacttacactttagaatctttaaaaaaaattgggtacctttctgttgtgaagttttgcttttagtggctttgttagagtgctgtgaaaaactagatggagaatagggaacatgtctctgaaagtctgtgccatatagggctggaacttgagcagtatgagataaatactggcttattttcagatttttctctgctcaagggttggcctactaaagttgtttttatgtggtgtttggtgcattttctttttctttttcttttttgttttttttttgagacagggtctcactctgtcacccaggctgtagtgcagtggcatgatcatggctcactgcagcctcgacctcctggactcaagtgat

SEQ ID NO: 144180 - DNA, 664 bp, Homo sapiens
ctactaatgtccgttaccctaagttttggtgaagattagttttttctatcatttacatctgccttagatactttatatttttaggaagtcgagtaatacagctaaattacgaccatcaaaatccttatcctgtgatgttagagtcaaggataagatgtcatcagaaatgctgagggaagtgattgtcctcctaagtcattaaaaagcctagtgctctagagcctcagaagctgatgttgatatagaattaggtacttccatgctttccaggtaagttgtaaacctcttatctgtgtttgcttcctttaatcaggccagtaatatcttccctttgttctagttttttattccccactgtggtttccaggtgagagagtgactgtattcatcataactggacttaaactgattccatatataactagattaaagaaaagcattttataacaggattttggtatgccatatttcagcattatattgtttcttattgtaaatagccaaatttgaaatgtggcttatgtttcaatcacaagagaaataaacaaaactattaaatagcagtgaaactgaatgctctgggaaataacttttggggaagtaagagatatggcttactatttacaaaatccctgcccccatatacatgtcacttgttagggta

SEQ ID NO: 144181 - DNA, 267 bp, Homo sapiens
ggactcaatgacataatcggctttgcttttcactcagttgcttagggcttataaaaataaaacacaaatacccacagctgttctaggcaatcactcagctctttggaaagaaaatacagatacagagacaggtggttctgctctaagcacaacattcaaaattaagagtggagagactgcagctgtgtttccaggagaaaactagcaaactccaagactttctatgctaaatacagttgcatatggacacccaggatcaagggagtg

SEQ ID NO: 144182 - DNA, 535 bp, Homo sapiens
gcccattcacacctgtttccctctgcccagaacagacctaaataccaaaaggaaaggtggtattcctacagacagtgctagcatcttggcggacaaatgcttagtgtcattttggccccatgaggttgtggccacccaccactgcttggcccgtcccttaccatcctcaaattgtgcttgagtagactgtagccccttttgggaccttgactccaagaaagcagatagacagatagagaatggagcaaactggaagataggggataatgggacagcctcaggcaaagaccagggactgctgaatctcctggcagggtggggattctagcaaaggaggaggaagcagaggatggaggtaggctgcagtagtaatatcaggccaggaggtgttagaagtgcaaattcttgctttcagccttctcagttaaatatcatctctatttaattcactacatgaaagcaagtcacaggcattaatagcagtgatattaacaataaatccaggatcagacacaattctaagacatttgagtct

SEQ ID NO: 144183 - DNA, 714 bp, Homo sapiens
tgggtgacagagctagtctctatctaaaataaacaaataattttgtagcctcttttactaggagttctggaattagggaagagaggaaaggtacaaccctcctcccgaactccaggggaggagaatctcattgcacagatgtcctctgttcactcgattctcctggagcatttctaaggcacacagagctgctaccatcatagccattactgaccaagtactctgggtgaaattcctttattaactgaataaacttgttctgaagtgctgaccggacactctggggacagggggaggtttcggctgtatccttgctggcagatgacccccacacttggggggtaaggagagccatggcagaattcaacccacggtcccctaggagtacacaggagaccaccctaccctcacctgagggatgtgtgtgtgcaagggttgggtcagggcagactcttcagaagaggggaggtttgtgcggcaggcactttgattctgcacagcttacagtccagagagccgaagaacaagaggaactagattcccattctcagtctgttgatttccacaccacatttggagtctgatcaactccacagctgtgttgcagccgctaacgctgcctctgctctgtttgcctctagattcttcttatctgttaaataaagtgaggctgatggagatgtaatttagggcaggggtggattgcaagtgtct

SEQ ID NO: 144184 - DNA, 250 bp, Homo sapiens
tgaaactctcttaactgcttctaaaaaatatgctggtgtcgccacttgaggagttttcagtctagggcattttctatggacttcccagtgtgaagatgaggacagtgttctcttccaaacacccgccccacgctcccgcgaggctcatcttcccgccccagtgtttgatgacttggccatccgcgcttacgttattttgaccatgtatatgttattgagagttgtacaatatagtgtactggggctactt

SEQ ID NO: 144185 - DNA, 340 bp, Homo sapiens
ctcatcacttccgaggcctcttctgaccatcttacctggctgtgaccctccactgctcaaattcccccaacggggctccatcttccaaaaataagatgcacgttcctgtacttcatgttcaagcctgttgatgaccaaacctgatacactttccagcttcacaggctatggctccccctctgccacaccaaactcatcacagttacccaccccctgccacacacacacaacctcagttattaaacacgtgtaagtcttctgacggccgctccctgagccaatccggatgtagctgacacctctgcagagctggtagactatgacaaagagaagccctcct

SEQ ID NO: 144186 - DNA, 786 bp, Homo sapiens
tagagtggttttcattgtttcttctgcttggagtcattgagattcttggatatatctgaaaacttgatttacgtattttttttctggtttactagctgtttacagtgaaagtgcaatgcccatggcagatgtcttagtctgtttgggctgctataacaaaatgccatgaactgattggtttataaacaacacaaatgtatttctacagttctgaaggctgggaagttcacaatcaaagtgctagcagatttggtgtctggtgaggtctgctttctaattcatagatggtgccttctcactgtgtccttacatagtggaaggcatgaggcaactctccgggacttcttttataaggacactagttccattcatgagggcagagccttcatgatttaatctacctaccaaagacccactttctaataccataacatggatgatgaggtttcaacatattaatttgggggaaacatgaacattcagatgataacagcaggtaatatttcatgtgtggaatcagaagtcttattttgttattattggtagaagatggctttttcacttataagtcataaacatgttattaattatgtcttccaaaattttcagattttgttgtcaaatttgagaaaacttctctcattttttcttgacttaaccacatactttcagtgcccgacaccaaaggacctgttcatataccatgaccacctctggccctgcatctttgtgtcatgattctagatgagtcagtactcagggtgatagaagtattgctagaagcca

SEQ ID NO: 144187 - DNA, 220 bp, Homo sapiens
tttataaatagaatgcacatgatgtgacaccccatttttcaattaactaatctcattttaaaaattttcctgtttcctcacctccttattttttctctattttcttccacagaaaaagatttagaagctaccacaaagtctcaaacatggtaaatgatctggttagtttaaatatatcatgactggccaggcgcggtggctcacgcctgtaatcccagca

SEQ ID NO: 144188 - DNA, 533 bp, Homo sapiens
cggtcatctcggcctttctgcctctttggcacccaaccctcaggcacctcagttgttgggaaaacccactgtgtgctttgaccgaggcgggagaaaaattctgtcaatgaatgggaaattctctcaaatgttttgagatattgcttacacgcaccgacgtgcacaaatattaagcatatagcttgaacttttacacgtgcacacggccaagtgatcacatcaccagatgaatggaaaatttccagcataccacaaggctccttcctgcccctttaagatcaccaccccctggtaagctaactgctattctgacttctctcacatggaaaattcctgcctgcttttcacgtttacacaagtggtatcatagaacagaatatgtcctctggtaacagtctgtcttctttcactcaacagcatgcctaacactcaaactttaaaaggtatatattaaaataacacctcagttcacttataatgggctcccgttatatgccgggcttagaacagtccttgtctttaatcctcacagc

SEQ ID NO: 144189 - DNA, 364 bp, Homo sapiens
aagtttaaaagtagaaggtaacgaattgaacgtactggcatgttgattctttgaaaagaaatttagaattcgtatctaacaacccctcctcttgcatttccttacagctctttcttttcaaactttttaacatgtctttgcttagctgttctgcttgattttccaaaagaagaagcttctcaggataaggtggaagatagttaagggaggttttagtaagtgccatttttataagcctctgcaccaacccacagatgcatggtgtgacacagcacctgacaagaaaaagtacacccattacagctgtgagggaagtaagaattgaggctaatattctttccatttacccaaccacttttctagc

SEQ ID NO: 144190 - DNA, 391 bp, Homo sapiens
taagccttccctggatacagtggtattgaccgcgtatgcatcatgctctttgtacctgactactgtgttgcaagacgtagtttctataattatttcctttttgtttttccccaaattctttttgaaatggtcagcctaactcagctggaccttaaggacaaggaaaggaactggttcattcttaggcgaaaatgaaatagggactttgggggcagggtttggtgttggccccaggaatctcagtgggaaaactccaaggaggaagaacagctcatgctaaaggcgtcctcgtgcctcttcaccggggagtctccttcctgagctcttgcctgctcaatggtggattctgggtttggaaaaattaaagggaatggttcctcctcttagcagg

SEQ ID NO: 144191 - DNA, 407 bp, Homo sapiens
tttcttctagctttggggtttgtttgttcttgtttctttcactcctctaggtgtgatgacagattcttaatttgagatctttctaactttttgatgtaggcatttagcaatataaactttcctcttaacactatttttgctgcatcccatagactttggtatgctgtgtctctgttttcatttacttcaaaatttttttaaatttctgccttaatttcattgtttatccaaaagtcatttaggagcaagttgtttaatttccatataatcaagtggttttgagagatctgcttgaaattagtttctatttttattccactgtggtctaggaatatggttggtatgattttgattgttttaaatttattgagactcactttatggccaagcatgtggtcaatcctaga

SEQ ID NO: 144192 - DNA, 249 bp, Homo sapiens
ctagatgttcttcacccatctctgaaatttgtagagtctaaactattgtatactggaagtcttatggaatagtctttttaaaataacatttgctttgtggacaaagagtaaataatgattaaataagcaggagggagtagggtagagagagaaggcatggcacatgactggcaacccaaaggcttcatgttggtggtttcattctccaggcttgccaacttctactccttcaatgcagacctcaacttc

SEQ ID NO: 144193 - DNA, 275 bp, Homo sapiens
taaaggaaatataggagaatattttcatgaccttggatagaaatcatgttcttaaagggggtgaggggggaagagacacaaattataaaggaaaagattcataaattcatctatactgaaatgaagaatttccacatcgaaagaaaccatagagaaaatgaaaaagtaagccagagtggaggtggaagaagatatttgtaacacacataaccaacaaaagttgagattcctgggtaaacaaagaactccaataaatcaataaaaaataataggca

SEQ ID NO: 144194 - DNA, 221 bp, Homo sapiens
tatccctacattctcacaacagccttcttacctcgggtgagagtcatgagcaccttaccaggcagggagcttccccaggatagtgtggtggagtcaggactcactccatcctgcactttacccacaggacacctggagggtcccccagccctgcttgcttttgtgaacgtcgtgtgagtacaccgaggtgttgcagctttccttccctctagctcaggagg

SEQ ID NO: 144195 - DNA, 123 bp, Homo sapiens
ctacaggaatggtcagggctatagaaatatttcaggagttatcaagaggtagattgtagtttaatgagaaaacaattaacatttactgagcatctgttaaatggcagacactctggtgtttgt

SEQ ID NO: 144196 - DNA, 641 bp, Homo sapiens
gattaacccaagaaaatgtaaaccttgtctaccccaaaaagcttttcacaagcccaaagaccatttagctatgaattcatatttaaggttttatcgttgtaacctccaacctttacccaaagtatccattaagtaaaacttcggagggaggatggctcattcagcaacctccttttacagatgaagggactggggaacaatagcagagagacttttccagccacagaataaatcagtagagagctaggtttaaacacatttagctctgtaatgcccaattatctctggagtcaggaagcgatttaggtttgaaaacgctacaggcagatgtttctgtgggttgagtgcattaaccaatataacacatgagctaccaacacaaatatatttgttctgtgccaggaggtggccaggcactttatgagcgctataattttaccaccccggccccaattcaacaagctaaggattagcccagtgtttcagatgaggaagaggttaacttgttcagggccacagaattagacgtgacatagctgggattcaaactggggactatcgattctaaagggggaaacaggatagagaacgggctagaagatagaggacgggctacaatggactgggcagtcatgaaccta

SEQ ID NO: 144197 - DNA, 230 bp, Homo sapiens
gggaagtaccagaagaaatgtaatcttcctctgaacttcagctgccatgtgggaagctgacctggacattgtccctgttcatagggtcgggcatagctgaagcacggcagataagcaaagccaaacttcaaagatgacatcaggaacctttagatcaagatgtacatcaagttagaaaaatcttattttgcagatacgcaggcagaattatgatcttttaatttttaaag

SEQ ID NO: 144198 - DNA, 736 bp, Homo sapiens
taactgatcttcaataaactagttaaattaacagactctccatctccttagtaaagtgtgctaatcatggccatcacatgcatactcccagctattaaactgttctctaggacagtggatctcgatttacatgtgcatcagaattacctcgagattttctgattctgtgagtctggagtggggcctgagaacttgacatttctgataagttctcaggactttgatgctgctggtctggggacatacttggggaactactgatctaggacaccatagcctttggtttttatcagcagagctgaatgttaataggaagcaattgtatttgttcttacactgattatgtgtattgtatttctgattgtcattgtgtaatttaactaaatactacattcatctatgagaatttagttgaaaaaatatttgtttctatgaaaactaaatcaaatactttgtaacaacttaatgtaggtattcattaaaataaagctaccaagtgagattggtagggccactgttaaatatcagaataaatatctatctatctatctagatatatctatatatctatatctaaagcaattatacactcaagttgctttaaaaagagactttaatttattgttttactttaaataaattaagtctataaattgtaaatgatgtgttaatgctggaatgagttaaaactttggtggactgttgagaaggcatgattgatttttgaaatgtgaaa

SEQ ID NO: 144199 - DNA, 301 bp, Homo sapiens
tgctgggattacaggtgttagccactgcacccagctgaaatgttttaattttaactcattttatacacatgcatacaaacacacatctatgtgtgcgtgtgtgtgtgtgtgtatgtgtgcatatatatacacatatatatatattttttttttagatggagtctcgctttgtcacacaggctggagtgcaatggtgtgatctcagctcaatgcaacctctgcctcccgggttcaagtgattctcccgccttagccttccgagtagctgggattacaggtgtgcgccatcacactcggctaa

SEQ ID NO: 144200 - DNA, 1419 bp, Homo sapiens
gtggcgcgatcttagcactctgccttccgggttcaagtgattctcctgcctcagcctcccaagtggatgggactacaggcacgcgccaccacacccagctaatttttgtatttttagtgaagatggggtttgaccatgttggccaggctggtcttgaaccagcctggacctcacgatccacccacctcggcctccaaaagtgctgggattacaggtgtgagctaccacacccaacaacaaggcagttttaatgattaaatgagatagtacatgtataatgtgcaatgtagtgcctggtatgtcctcagtacagttttgctattgttattattattgttgtttattttcagggattattttgaggtcacaatgaagatccttgccattgactaaaggatatgaaaacaggagacattaatattattattaagttgggttttttgttctatctcattatgagaatagaaaattattaagaatagctaagaatcactatttccattacttaggcaggctataaggtaaagttagggctgtactaaggagtaggataagagaattttgcattcaagtggaaaaggtagggagaagccccacctttctattgcctcgctcaagaaatgttgagctgggagtacttttgggtgcttatgaatgagcaaagggattcagcttattttggcagggaggtggctaggaaatatgaggagaggtgttggtctaggtgtgattcagtttttctccagcctagagagcttggggtagcagcccctgctttacagaggaggcagcaaaggctgggtgactattgaggttgcaccagcactgacctagacccaggtccccccatttcagctctctggaggagaagccaatgtgcaaggttaggcaaccaggaaatctgaggggatgaatttcctttctcatccaccagcctgggcactgggagtgtctttgcccttaaaaggccttgttttgtcttatctgactgctgcctgcctcttgcttttcctgggttaagcagagctgtctacacatcagcctcttagcctgcccagctgttgatgggaactggctgcggagaagtctgtctgtgcaacgtcccatcactgtgtacaaactcgggcctcactttttttctgggacagctgtttgccctgtgttacagaatgcatgtgaggactagatatttaaacatatgatgcctggccacagagaaggtatttgtaattggattctcctggaccagcccagcctctgaagttctagaattaggtgcctcctttgcccaaaggctatcagctattggaggggagggtggcagtatgtccctcactgggtagctgtgaacactaactgacttcaccagtgtaaagtgcctggcacagggcctggcacagaggaagccagagtcaatgt

SEQ ID NO: 144201 - DNA, 426 bp, Homo sapiens
gcttgaacctgggaggtggaggttgcagtgagccaagatcacgccagtgcactccagcctgggcgacagagtgaaactccatctcaaaaaaataataataataaataatgcttgagaagaactacaatttaagtgttgtaactcaatgtaagaataaaaataaaagttgtcataaaaaaaatttctgaggccaggcgtgagaggatctcttgaccccaggggtttgaggccagcctgggaaacacagatattacatattacaagtaataaaaaaaaaattaggcatagtggcgcatacctgtggtcccacatacttgggagactgaggcagaaggatcacctgagcccaggaggttaagactgcagtgagctgtgatggagccaccgtactccagcctgggtgacagagtgagactctgtctgggg

SEQ ID NO: 144202 - DNA, 469 bp, Homo sapiens
cctgcctcagcctcccgagtagctgggactacaggtgcgcgccaccacacctggctactttttgtactttttttaaaaatagaaatggggtttcaccatgttggccaggctggtctcgaaatcctaacctcaggtgatccacctgcccgccttggcctcccaaagtgctgggattacaggcatgagccaccacacctggccattttagagtattaaatctttctctccatcaatcaaaatagtagtagcttttaaagctgcctactttaatggtcagtattattttatttaccagaactttttcataatcaagaattcaaagctctctaaaataagggctagcaagttaatatacatttattgaacctgcgaggcggttgaacctgtgaggcggaggctgcagtgagcgtagatcacacactgcactcctgcactccagcctgggtgacagagcaagattccatctcaa

SEQ ID NO: 144203 - DNA, 403 bp, Homo sapiens
tcaaaggctctctgcttttgcacctcctaacagtaacgccatccttctctgtggactatggtttccccagttctctttctggcaaacatctattcgcacatgaagatctagatcaagtgtgacttcctctgtgaaagcctccctcagatccttctctctgtccttcccattctagtcactgacctgatactacgtcaaattgtatgcaattacttgttggaagacagctaccctgatgaaactgggcactctcccagggcggggactagggcttattagtcaccttttagatacagtacctaccttagttcctggaacagggtaatttattgaatatgtatttcagagatggatggagaaatcgtttgtttatttattcatgcatgcattcattcagttagtt

SEQ ID NO: 144204 - DNA, 489 bp, Homo sapiens
atgattccgagtttggagcctgcatgctcagtggatggtcctatcctttactgagtttggggaaactggaaagggagcatgtttggaagacagtggggaatcaagagttctgtcttagctgggatttaggaaaggggatggatataaatttttgtcaatcgacagtgggtggagtttagggtccattgggaagacaggctttgggctggagaaatgagggtttggattcaagatgggggaggtgaaggaagaaggatctggcttaggattatgagcactacgtttaaggacaagccctgacttacccgtgaggtactcagttgtgtcctcatccttctgtggaaaattgggaaaagagcaatgtctgaaggtgatggttgatttcagtacagggatcatcagagtgtccttatggagccaagcagggccaagaaggtgtcaggtggggaaagaccttccatgcaagatgaacagggtggcaactcaact

SEQ ID NO: 144205 - DNA, 184 bp, Homo sapiens
aagcactacaggtgactcgaacctacacccaggattgagaacaactgcatttaatttatgttgactaaatgagtgactgaatgagcaatgaggcatattttgttatcagaacacaataaaaattaaaaacaaaaagcactcatctgaacaatttcctttttttttttttttttttttttttttt

SEQ ID NO: 144206 - DNA, 303 bp, Homo sapiens
gttgtgatggactcctgtgatggtcattctaaagaagcagctgtcaattatcttcagccaaatttactatgtaataatgtgagatttcaagaggagaaaaatctggataaacaacaacaacaataaaaacaactgtacaagcccacactgtggaggatactcagaacctatctgtgggctgaatgaagcgcatggctgccagtttatgatctttgccatatcgccaacaaaacaaaacaaaaacgcaccaaattcctactgcttgtttgctgtgagctatgaaaccatctaaccacatttgtt

SEQ ID NO: 144207 - DNA, 208 bp, Homo sapiens
tataggtagattgctgtagtaagtctttccgtgtataaatagcagagggaggaaatgttcctgccaccatccattcttatgtccaaagggccatctttccgaagggaagaacctctttcaggagtatcaagttgcatggaggaacacccaagatccataagaactccatcaaaagttcctggctgcactccagctttcattaataagg

SEQ ID NO: 144208 - DNA, 262 bp, Homo sapiens
ccgtgatagaggatcccatcgcgtgctgagcatgtttgggattcgcgtgagcatgagcctggctccctcatgtgattcttatgatggccttagattggcagggcaaggactattatgctcattttatatactcaaagaaattaattaggctcagagaagttaaatgacataccccaagtgactcagctgatacatgatggaaatgtattttaagttgggcctttaactcctttgctgcctataaccgaagcacaatcttcca

SEQ ID NO: 144209 - DNA, 199 bp, Homo sapiens
gtggaatgaacccctgcgttagagcacctgcactgaatccctgggtatacttctcttaaaactgcaggtttttggttatataatgttataccaagggaattttttaaaagagaatgttttaaaaaggtatttcaagacaataaggagctacttgtttgtaagagttctacagaaaccaaaaattatgcgaattcatact

SEQ ID NO: 144210 - DNA, 324 bp, Homo sapiens
ctccacctccttctcataagcatttatttaattgtatttagagtccacccagataaactaggcaaattgtaccatctgaaaatcctacacttaatcacatctgcaaatacctttaatttgggggctggggtggcatataaggtattatttataggttccagggattaggatgtggatatctttgggggccatttttcagcctaccatagggagttatttgtggattttatttttttaatgtaaatctagtcccttttaactaagcaaccaatctgtacttcttaaaaagcaccagtcatattcactgtggacaaaagcttatga

SEQ ID NO: 144211 - DNA, 685 bp, Homo sapiens
tgctctcctgggatcacatggtctgtcggttgagtgtttcacatgtacgggcaccccaagtgctggagaggaagaagcccagtctctgccctctagtacttgggatgataactgctgccagggagtatgatcaccacctggtgtcagagctggttgcaagaggcttgaaggctctcaaacttccaagggcttactttctaacagaaagagtggattgtgaacactaacacttattctactatgcagaatgcaataagtggcttaagagagttgaacctgcttctcagaatgttcataggggggtcatttgctggaaggatcaggctggtcttcatacaggaggcaagtctggagctctgaaaaatagcctagggagtggggaggatggtaccctcagaggaaaacctggggagatcaaaggaagtgacccaagggacatgtccccgacaagaataggacctttcttgcagcggagaatagacaataacaacttgtaaaattgctgtttctgtctaagagcctgctaatatcctagagaggattttgcatatgttatctctaatccttaaaaccactcttcaaggtaggcacaacccccactttacagatgaagaaatgaggttaggacaggatttgcccaaagacacaaagccagttgatgggggaatcagaagtcagacccaca

SEQ ID NO: 144212 - DNA, 284 bp, Homo sapiens
tagtgcacacctgtaatcccaggaccaagcagaggggtggaatggggaccattataacaccactgttcagcaacgaagctgctgccttgtaaaacaggctgaatgaatgcaggggctgcagtagaggggagtcctgtgttgaggaagtaggaggagattagatggcaccagagatcccttccaaattgcagcatgtatagttctaaaaataaagtgctgctggtatgatctcccttctttatcagtgggttgatacacttcaactcccaaccccaccccaacct

SEQ ID NO: 144213 - DNA, 403 bp, Homo sapiens
gctgttctttgagaaccacctattacccacagcaccttctcagagcatctgttcccattactacagctggctgtgggacaagacaaagaggcatccatcgctctggccacatgctgcctcacactgagtccaccagattctctttcttaggaagctggaattgggatccgctcagtgaatgctagcactgaaattgtggggatttgtcgagtaggagttgaggcaaccaaactcaagtttgagccacgtgagtggatgaatgagccaattctgctggtccacgaagaggaagaaggatggataacaagctgagagagaggcagagaagggagatgaagtggccacagagacagatagtgaaagtccctgctttctttctagtttcttgggatacagggtttgg

SEQ ID NO: 144214 - DNA, 436 bp, Homo sapiens
acacaaattaagctcttgcatctgatctttctggtaatcttgaagttcagagttagttttagatgtccaattactcaaaaactctgccccaaagcaacagggagggtgtagactgtgttttaaagcacgaatcttgtataattcactgagccagtttgtcagacttgaattgtattatttttacttgaaaacacatagtaccatgccaagaggaaaatgtacccaatcctagaagtacaagctagtgaaatttatctatctatttaagtcatgaaagttccacttactcgtctactatgaagtttaaaaaaaagttctactaccaagcagaactgagaagagtcaattgacgatgccctaatatccatttcaggtggagctaatttatcagttatttcctgtggcttctctggagctcttataaaagttctccatt

SEQ ID NO: 144215 - DNA, 733 bp, Homo sapiens
gaaagaaaacaaggtcctctccttgatcctctcatgacggtgacatggacacttgggaaacacaggatttcacattcagtgatggaggttaagatctgagggggagacctggacattttttttgcactgactctggcggttgaagccagtgatttagttctggagtacagactaatcagctgaccatttgctctcactcctctgaggtttggatgcctaagaagagaggatttgagtcaataaatgactatggggtccttggaacccagtaagccctcacttctggtagaggagaggatgggcctgtggctgcagacagacctcatgtgaccccgatctcccctttgtgtttgtgtgactgtggctcagtgactgtgccttcctgtgcctcagttttctctcaatcaaatgagctaaatggcaaatggactgtggcttttcatgctatctgtgaataaatgttaaagtattcacagtcaactgacttaatgcttggcacagtggaggtgttcacacaaacagcatttattattaatttgcttccatgagaaagcacctttgcgtcagatccctgtggacaaacggctacctggtgcatcttctctcttctgtttctgcttctggggatattagactttctatggagtgtcctaggcctcctaaggcagttggctgatggcctacaaagcttgtctttctgtcctctccactctgagtgtcaggtgaagaaagc

SEQ ID NO: 144216 - DNA, 503 bp, Homo sapiens
cctcgttatgaaagtgtcaaccttttgagagatcagattaatggttgtctgcatggtatggtacgagtagtgcagtgcttgactgcgcccttaacacacacacacacacacacacacacacacacaggctcacacacgtgctcacacatacatgctcacacacaatatcacacatcctttcagcactgagaatggttaatagtaggtgtgaagactcacccacagaaaactgagaaatagtgtgtgactatttctgtgactaacacactttttatatcatcttcctcttcaataccatccttaccccagatgtccaggatcttcaagttacttaggacccagcatacatgttgctaaacttctaccacttctgtaagtcatttaattcaagcccattcactcaatgcccagaactggagtgacaacgggtgggatgagaagtcatcaccttcttcatcaccatctttgtgatcttcatcatttcatgaacacttactctgtag

SEQ ID NO: 144217 - DNA, 507 bp, Homo sapiens
ccacttccatttaaaaactggctcttcaagttctcaaaacctcttatcagactgaaactcagccaaggttaaaactgccaagtatctctctactttcctgaccccactgctcaaggactcctatttagcacactgtattatcgaacagcttttgcagagtctttgtgtggaagctgtgtgtgtgtgagataatcttttttttagcatcttttttttttctcctcaccgtaagtatgaccacagtcttcaaaaaacaaacaaacaaaaaagaagcgctgtcttcagacatgttaagaaacatgtgcttttaaaaaatgtgtacgctttatattaacttttacatacaatatgagtagaatatcacaaaggtctactgaattaaaatcaagatattaatatataccttaagtcacaattattggataggtgacatacttcataaggacaactgtttggttcacgttgcttatgtttgtgttttaaaatcataacaataaacttttgttt

SEQ ID NO: 144218 - DNA, 352 bp, Homo sapiens
tagtgacgggaggatttatcttcttggatcatcacaaatctgtaaaaaggagactgagccatattccttgcaattccaggtccagctcagaaagatgtctcagtgagaggattggagggtgtttgatttctggctcagttctcacctaaatccagccagttttatatagcaaatgctgtgtcctgtgtgtcaaagtgataccaggcattcaaagcacagattaaaaaaaaaatcctcctaattattaatagtgtcattaatacttactgagtgctaccatgcccaggtgctgagctaagtgctcttctctgggccaggccctgggctgggcatcccagagagatcatctcaa

SEQ ID NO: 144219 - DNA, 515 bp, Homo sapiens
tgcagatgccaaaatcttgagcttcatgttcagacataaaagcaccatgttccaaaggcttaatggctccatttctccctatggaaactgaaattggcaacattctccatcagccttgtcttgagcatgttgctggaaactgaaactggcaacattttccatcagccttgtcttgagcatgttgttggggtgggtacaaatgaatccgtgtgtgtgcacctggactccattgatggaaacatgcgtgagtatgaaagagccatccttgtgatgaattctctctggcccaacttccatttgataaaagcactctagtgtatcaaatcctgacagtggaatagatagagcagcaaattgaaaatacaattatgattttatcctaacaaaccgagtggtccccaaatagcagcaagaaatagaatgtggcaaagcaattacaagggctgcctgtggtatcatcgtaagtataattactttcagaaatccatcatttattttttcattgtcattttatc

SEQ ID NO: 144220 - DNA, 133 bp, Homo sapiens
tgctagcagatgtgtcttctaggaaacaagtgggggaccagctggacccttgtgcacaagcaaacctacaaaaattggtcccaaaaagtccatgagatcatgctgaaggaagaactactcttggaggcactct

SEQ ID NO: 144221 - DNA, 200 bp, Homo sapiens
gctcgaaccagaagtttctaaaagcattcttttgttaactgttctcaaattaataaagccaggagttaacacatcacttttgattttataagatgaatagttctgaaaaccttatttttccccatccctcctattttctacctcttgtggtttatatttagctttattaaatagtgctgttcagttcctgaatgactcgg

SEQ ID NO: 144222 - DNA, 435 bp, Homo sapiens
cacacacagatcaatccccatggcccaacactcctccagggagaaagaaaatgggagaagggtcaggaattggcagctgggagccgcatcagggttcctctccccagggcaccagcagggaagggtcccccttgaccacagctccagccaggtttctaaatcttgcttgtttgccgaagcagccaggcacctcccttccagcccagagtgaagggctatacaaactctggcctttctctgccatctcctccctggaggtgagcactgagccctccaaagacacacaaccagaagggacacaggccagcgggagcacacaccatccctcaccggagcctgagtgccagagccccagcagcgcccgggggaaaggcaggggtatgaggacaaaaccctaaccagctgctggaaggcaagggcctggcaatgcccttc

SEQ ID NO: 144223 - DNA, 410 bp, Homo sapiens
tggttctctctgcaaagtggtctggctgaatataatcaatgttattcctctgctttgttgaatgagcttcgagtaatgatgtgcagatgccaaatgtgacatgtctggggacaaggtagtttaattctagtctcatttgcagagatgacttgctatcattaggggctttgtctccaagaagccagctgacagaaagagaaagccagccactgctcggcaatgaggcaaatgcatgctataaaaatgctggagcattcacttagctatagactccaagtaggagcatttgagaactgagttaaatcattgtggtctttctttagttttttcttaaatgacagttatgagtctgtctctcagtttgtaccatttgatgtagggggtttggaaggttgtatcagtaaagcaga

SEQ ID NO: 144224 - DNA, 932 bp, Homo sapiens
ctccaaagagatttgtgtcatccacaagatgtctctactgtatcatcatgtcaccatctttctggaccagtacactcagcttttctgttcttgacctttttaacctatctcttattaatttcatcctttcagggtctgtctttcttttaatatttctgaatcaaagatgaatgttttcagctacaagaaacaaatgttaaccttgggtgaaaaatgcagatttctttttctcaccacgaaagacttgaggcaaggggctgctggggtccactcagcaactcaattatgtctgagtgccatctcccaagtttccttagagttttctcagactttttccatcacagtcacaagatatttgtctcaaatccagaaatctcatttctatttaaggcagagagaaggaagaagggagaagcagcagggcagcttcatctgtttctttcatcctaagtgctaaatctttcccagaaaaaaacctagcagattcctgctaatgactcactgcttcctgaaatggcagctaagaaagagcatgagtaaggaaatatttcacatctatggccctaaagtagagagagactaagaggaaggggttgggaatgggcttcgggttggctaaatataatatttcttatgttcctcaattataccctcataggatctcattgttcctaacccattttcctctttcctctttcattgctcctttttcctttttttctatccttatttcgctggttcttcttgtctctcctggcattttttcttgtttatcggtattgaagcttgacatctggattgagggaataattaggagggtcagttgcaattttgggtgagttccattatataaggaagaattatacgtgtgaatggtatacagttaaaaggattgcgcaagatatatgtgggtgaatagtagttaagatgga

SEQ ID NO: 144225 - DNA, 363 bp, Homo sapiens
cttttcaaaaaccaacaaaatcactgccaatgagctgcagtgacaatttcacagactaaccttcagaatagtacataaactgtctctaaacgacttgcagccaggctcatctcttcactgtctcctaaaggaagcatgcggtcttaccactgaacctccgctcagatcactctcctgacttctcccttttcccagccacccctctgggtcttactcattgttgtttcacatccacaccaagtctcgtgaatcactccctaggttctgctgtttactctcacctctacatttccgtattgttagagtttgttacactcacatgacatttcatatatgtgctcatgtacacaaacatgtgtacac

SEQ ID NO: 144226 - DNA, 344 bp, Homo sapiens
agttctttcctatctttgtgtgaggtggacgatgtcactagcctcacgtggcagaacggggtcagaagctcagagtttaagtaatatggcctggaattagaacccaggagtattgctccttcttgtaaactctgatgcctgggtttttacatggtgtctatctgtaatggcttataacagagttgctcctccagaagttttagcctcgttcctgcttgataggcagggcctcccattgggcctgacccaggatacatgcttggttgcagaaagtcagctttgcaggttatactctcagcattttggccacagtcaaccgtgcagaaggcttcctacctagatgg

SEQ ID NO: 144227 - DNA, 165 bp, Homo sapiens
tatctatgttacttaattgtctcatcggttttgcaaaattaacatatggcccctttgcagacactgttccctctagtcctctcatctataaccgagcacctgaaataaccttaaaaagcctctcctggctcgccaatcttccaacatatccacatgctcccctgt

SEQ ID NO: 144228 - DNA, 396 bp, Homo sapiens
acttcctaacttttaattttatatccctatagcacctagcacagtatcttatacaaaagagatgatcaagaaataggtgttggattgaccaaatgaatccacctgctagcactgcatcaagaaagacatgttagccaagtacacctaaattagtttactgactctttagcctaaaaccctttgatggctttccattacccaccttcagataacattcaagaatcttctaattatttagctcctacctacatttatagcttcatctctcatcaagaattttgcaagtatttggggcataaagtaataataaagttgatttttgagaggaaaatcttaagaatcacacagaatgggataagaatggagatatggtggctcaggcctgtaatcccaaca

SEQ ID NO: 144229 - DNA, 260 bp, Homo sapiens
  misc_feature (49)..(49): n is a, c, g, or t
gtccgtcagttctggtccccactcatgtcattgaatcacccactgcacntccagctgggtacagagcaagaccctgtcagagtggaggggtacagggacggggtaagacagtgggggaccaggaactagttcctggtcccccacatttaaattaaataagcaatcatctggccagagccctaggagcggctgcatgtgtcctcagtcatccacagatcagggctgggcagaaagtgagctagggcaacctctccagctca

SEQ ID NO: 144230 - DNA, 374 bp, Homo sapiens
agtgccccagaggctgagtgacagacaaaacaatttctctagcttctcctgagctgtccatgagttcagttgccatgaagaacggtggtaaagtcagcactaagcactgaactggcatttttgcttccactgtgctcatgccctctctaccacgtcctagacactgagcctgcccaaggggtgtatgtggatgtatgggtttgtaaatgaactatagttcccctgttcaaaaacaacaaaaagtgctatatctcccttacccctcagaatagagagctcacttatcataggtctcaatttcctcaggcctcataaacacattcaacagcacatttccaaagaggaccttaatatctcatcctctgataggcatc

SEQ ID NO: 144231 - DNA, 172 bp, Homo sapiens
tttcctggattcagaataaacacttgagggcacacgtttttatttgctttctttacatctaccctcttttctttctggtgagtattggtgctacgtattacagacctggtttatttggagacgaaataattgcacgcagaggaagctttgtgagtgtgagtcctaccaacag

SEQ ID NO: 144232 - DNA, 501 bp, Homo sapiens
aactggcacatccaggacccaaatctgggcccgtttggctccaaagcctctgctcactctgctgtaccatgcacccattctaaaggcgaagaggctgaggctcagaggaaggcatagatacattcaggacctatggctatgagtgaggatccaaaattcaaacccacggctcacaggtgccaaagcctgctggcccaacttgaccctgctgctccctgagagactcctgtcagccacaaatgtcaggactctgaagagacaccttagctcacctgaattgcaggtgggcaggcgggcacctccctctgactctccagacccatctccaggccagtccctggcctccgtcttgggccccgctctgaccccacaggtgggctttccccgaggctggccggtcaccctgtgcaagtcagctccccagcccaggttcctaagggccatgccctctcgcccacctactctccaggtgacctcagagaagcagaccccttctctgaa

SEQ ID NO: 144233 - DNA, 351 bp, Homo sapiens
ctggagtgcagtggctcgatctcggctcactgcaacctttgcctcccgggttcaagctattctcctgcctcagcctccacagtagctgggactacaggctcatgctgccacgcccggctgactttttgtattttagtagagacgaggtttcaccatgttacccaggctagacttcaactcctgagctcaggcaatccaccctccttggcctcccaaagtgctgggattacaggtgtgagccactgcacccagcccaccactttaattttttacactctacccttttggtcaaaatttgctcaatctgcaagcttaaaatgtgtcatgacaaacacatgcaagcacatactc

SEQ ID NO: 144234 - DNA, 188 bp, Homo sapiens
aatagggtccctcatcttcagagctttctaagacagctgaagtagaattaatgtcattctagcctcctgactttccttacttgtttatttaaaaaaaaatgagaaagaagactttgaagaggtcatcaaaagccatagacacttgcaatagactcttggcctcacgaaaagtaaaacctaccctttgt

SEQ ID NO: 144235 - DNA, 302 bp, Homo sapiens
ccagcctggtgggcactgggcagcaaatgctacacaccctctcctcccacccactgattcctgctggtggcttgcactgtttaaactcaaccaagagccagaaaacaagggaactcattgacataattcagaaggtcggtgtcctgctatacagagcagggtagagaaaggtagaagatggttctagaggggcaagtggcatttgcagcatgctgccttgagacatacatgggaaaaaccatagccacaaaataaagctgtgatacaaaagatgtcacaagatgacagtgagtggtatagac

SEQ ID NO: 144236 - DNA, 386 bp, Homo sapiens
aagaggacatcacttcctctgtcgtacgagggatttatgtgagcagggccaccacacgtggtcatatatactgtccacagagggatgcctggccggggagtgactggggctgacattagcccagcacgcgtccctgggccatgcccaggaggttgcagcccacagacgcctatttccggtttgcacagaggggttgtatggactgttggggcttgtaggcaagaccaagaaagaatcaaggcattgcaatcccgcggtgagccaggtgtggtggctcacgcctgtaatctcagcactctgggaagtcaaggcaggtggatcacttgagcccaagagttctagaccagcctgggcaacatagtgggatgatgtctccacaaaaaaaa

SEQ ID NO: 144237 - DNA, 284 bp, Homo sapiens
agctgtattagttcattctcacactgctataaagaaatgccagagctttaattggcttatggttctgcaagctgtacaggaagcatggctggggaggcctcaggaaacttatgatcttggcggaaggggaagcaggcacatcttatatggtcagagcaggaggaagagggagagtgaggaggtgccacagacttttcaacaaccagatatcatgagaactcatgggacagcaatagggggatggtgcttaaccattagaaaccccctccctgacccagtcactt

SEQ ID NO: 144238 - DNA, 4375 bp, Homo sapiens
  misc_feature (994)..(994): n is a, c, g, or t
  misc_feature (2155)..(2155): n is a, c, g, or t
  misc_feature (3166)..(3166): n is a, c, g, or t
  misc_feature (4256)..(4256): n is a, c, g, or t
gggagttgatcccagagacctgggttctagtccccggcatgcttgctaactagccgtgtgatcctgggcaaactgcttctgtctctgggcctcagtttccacatctggaaaatgatagacttggaccagctcatctctgaggtctctctgggccctgacattctgtggttgtatatgtttcttttgttccctttgtcttttttaaggagctgatgattattgagatattttatcttccttatcctcatagtagcgtcggtagagtgatggaccacggatgagtttcttctgtctcataggtggtgacactgaaaggggactgcctcacctggactacgtgtgtgctcagtgtgctggaactcactgcctggacaaagctgccctagattttgccattcctggagctcacaggcctggagtgagcggctgcctgccgcggggctgggtcgggacaggagcgctgggttccagggtggacgaactcctgttggatttgcctcttcggacctccagttccttgcttagtggtggggggagaatcttccctgttagcccatttcccacttcagggtagcaagaaatggaagtcgtttctgggcctgggcaggagatggggccacagccacagcagtcagttgatttgaacacgccctcccccctgcaggggagggccttcacgccctctaagcaggtaatgagggggcgggctgccgtattaagcaccctggctacgctggggagaagctctgcaccttgtttgacacacagaactgtcgcggctccttcctattgttagaagccttaattactattgttccaattcctccctccagcgatcgtcattaggaagagcgttcttgtttcttcctccttccccccatccccctgaacacgtcttcagggctgttccctggcgctgcctgcctctcacccggctctaccctgttcactgtgcccttctacccagggcagcccctgacagcccacctccctnatcccctggccctggcctgcgctcccacctgctacctctttaggaaacaaacacatacccttcccacccccatccccaagtctccccattaaaactcatggctcaaagccagggatgctttaccttgtgtgtggattcaagaacctgtcctacccgcttctctggtggttgtgagaatccaaaccaagagaagggtggtgccttaaactggaaagtactgcacacatttagggggtgtccgtgcaccagcgccgcaggccatagctggctgggggaaggcttgggctaccctgctgctctgccattgactccctgggaggatctttgacttcagcttctcctcggtaaggtgggaatcaaatcttaatcaaacttgcctggccaacctgggagccttgtcagtgggctgcaatgggatggtgatcctgaaagtactctgaggcctaggaagggttctgctgattggaatcaggatcgccagcttatttttcttttcatgacttcctgttgttctctgtatctatttccatcccatctctcagccttcctagagggccctaaagctgtgcaatgatttgttccctggggaatttctccaccaggcagccccaagtcatgttgctggctcctgcagttgcctgctgaggcaccccagcgtctgacacctggggaaccccacttgtgggctgtctgggaagtgtgggggtgggaggggcccctcatttccctccagctgccatttgctgctctctccaggctccgtggtgggcccggcacagcctgtatcggagtggagaacgtaggttggtccagagcacgttccaccgggacctctccgtctggagcctgtatcagagtggagaacgtaggttggtccagagcacgttccaccgggacctctctgtctggcttgctcaggctcatttcttctgtctggggacttacggggatgagcatgaaaacctgtgcatcctggaatcacagggacacggctccatgttcccagcggttgatccattatccctggtcgccctgcttccttctcagtcgctctggcctctgctccctcctggagtcctgggctgggaagtaacctcagtccatgctcagagccaccccatccccaccccacccccaccccagccctggggccctctgggngctggggagtctgtgctgtgattggcaggagttggacagatttgcttgcttgggctatctgcctgtggggctctcagctggatcatcctgcgactactgactaagcagccagatggcttttgctgggaccttccagatgtgggagtaggttttggaggtgctcattcgtgcccacatggccctgggtccacatctcttttgctcccccgagatgtccaagctcacactgggcactcgctggtcagagtggttggggttctggaggcggggcttgggaggatatggggagcttctccagcatcaagcctcccttttaccaggattttcgtaccgtctcaaagcacccaaagctcttctcaaacacatctcgtcagtggggaggcttatacagagagggagatggggtgcctggtgtccaggtcccactgggcacagggcctgcagggctgaggtggaacccactggaacccggagtggccctaatgggcctggaagcccgtttgtcacaggtgtggtccggaggtggttctggcttccagattcagccatgtggatcccctaaggggtcacctgctgcctttctctgcttcccaaaaacgtccacgtgggcttttttctctgcaggcaccctagggaggtggaacctccttggccaaggccctcatctctagccttcagacacagatccccaaggcccctgctttggagggctctgagggctccctgggtcctggtgaaggtccaggccaggccaccaccccaagggcccactgtcctgggggaagctgagcctcctgagtaggcccctgaactgcagttggaggaagggctggagaggagatgagaagtggcagactggctgagagactgctcagagggcagcctgttgcccggctgtttaatttactggagttatttttcctcatcgttccctttctttggtgttcccttggcagagatggagtaaaagataaaagtaggacctgggaatggggaggaggagaggaaaancgcaaaggggaaaggaaggagaaggcaccaggaaggctagctactctagcactgggggctgagcccgcttggctgggtgcctcgggccgcctcccttcctctctgcagtgattaagacatcaccagctgcctgtgttcttagccccgctggctctccgctgccaataacaaatgcatctggctggaatctgggtcattaaaaaaaacaacctgatatttctctttttcctttaccccccggcaatccatcctctggaatatagctggagccccccaaagagaggtcagaggtcgcagaaaaccatggtggacatgtcagctgtcagggccactcaggcagccagccagccactcttgctggatgtctgttttctgttgtgtctgagttgttgtgaagtgaaggccccaaatacagagcgatgtgccagagacaagggcttacaggtggcccttcccacccgtgggcggccgggggaggccggacggtgtagtggctgtgatgggggctgtgtgtgtaagctcggagttggacagccttgggtgtcagtcactgttgcctgtgtgatctagcaagaatgttcgacctctctagactcagttttgtttctttttgtgaacaatgacagtgacatgcaacctgccctgtgcggttgttgagtgggatgcacagggactgtcctagcacaacactcaaggaagggtggccactgccttagtttgtcaccatcattatcctatctctgttgagtggcacctcctgcgggagctgtgtttgctcagccgcagtaccgacccccatctcccggtgtgggtcgggcacctgtccaaggcggaccttctgtgaggatggagggagggcgccttcacctcctgcctcaggagccaagagtcagccagacaggcagctctctcaaatggagatcctttgaagactataaagatttgtttgtacatctttctctgggatttgagaatatagatgagtagagaaaaatggagggaaggtggaagggatgacttaaaaagggaatgatagggaggggaacatcacacaccctggggcctgtcggggggtgaggagctagggganggatagcattaggagaaatacctaatgtagatgatgggtgtagcaaaccaccatggcacatgtataccaatgtaacaaacctgcacattctgcacatgtgtcccagaacttaaactatt

SEQ ID NO: 144239 - DNA, 586 bp, Homo sapiens
gagaggcctcatagtgcccacagaaagctagacttgaaagtatgaatttaaagtcccagggccaggtgcggtggctcacacctgtaatcccagcactttgggaggtcaaggcaggcaaattacctgaggtcaggagttcaagcccagcctggccaacatggcaaaacgccatctctactaaaaatacaaaaattagccgggcgtggtggtgcacgtctgtaatcctagctactcaggaggctgatgcagaagaatcacttaaacctgggaggcagagattgcactgagccaagatcatgccactgcactccaacctgggtgagagtgagactccatctccaaataaatatattaattaatttacagtcccaggtatagctcacgcaatgctattagatcatggggaaggtatactgcctcagttttcctcaataggggatggaggtggggaatgaggttaccccaatacaatgttgaacaaatgccaggagcatgttgctgactgatccaagggcaagccttggaggaggcaattaagatgcagcccagtggataagagaccaaagtagatgctccattcttgcta

SEQ ID NO: 144240 - DNA, 462 bp, Homo sapiens
tctggctgactcagtgtccgtgcatcctcaccagtatttgatgttgtcactgtttattttagcccttctgacaggtatgtgatggtctctcattgtggctgtccttaccatttcccgatgtggaacacctttgtgtgtgcttgtcatgtatgtgtcccctctttggtgacctgtctgtgcatgttgcttgcctgttttctaattggagtctttgttgagttttgagagttctttatatattctagatactagtcctctgtcagctatgtggtttgtgaatattttctcctagtctgtagattgtctcttcatcctcttaagagggctttgcagagcaaaagtttttaatcttcgtaaagtctaattgtcaaatttctctttcatagatcgtgcttttagtgttaagtctaagaactcttttcgtcaagattttcttttgtgtttttctaaaagtttttatag

SEQ ID NO: 144241 - DNA, 395 bp, Homo sapiens
agtccaaagtctcatttgagatgaggcaagtccatttttcctataagcctgtaaaataaaaagaagttagttacttccaagatacagtaggagtacaggcattaggtaagtgctcctattacaaaagggggaaattggccaaaactgacaaaattgctctatgtaagactgaaaccaagtaggacaattattacatcttaaagtttcaaaataatcttctttgactgcatgtctcacatccagggcacactcatgcaagggatgtgataccagggccttgggcaactctgatcctgcagctctgcagggtacagccttggcaactgcactcatgggctggtgatgagtgcctgtggctttaccaggtccacggtgcaagctgtgagtggatctac

SEQ ID NO: 144242 - DNA, 405 bp, Homo sapiens
tttgtattttcgtagtgacatggtatgccatgttggccaggctggtctcgaactcctgacctcaagtgatctgcctgccttggcctcccagagtgctgggattacaggcgtgagccaccgcagctggcctcaccaattagacttttaaatgcagaacattttcctctaaacacattgatatttgaaaaatgaatatagctaaatattgtatgggaggcagtcattacggaaccaaacagttcccactgtagaaactagaaaacctggggacacggaggatattaggcacttctcaaaggccaggccatgggagaaggctgaaaagaaggagtggttgagaattaggataagtagtccagaggttgcctgcccaagtggggctccccgccctcctcccactctagc

SEQ ID NO: 144243 - DNA, 121 bp, Homo sapiens
ccattttgaaataccacagcacggaaaccacttttcctctctaagacactcctcaccctccctgaccgtatacatagaattttgaagagagatgaatgtctcggcacaacacataaaaatg

SEQ ID NO: 144244 - DNA, 364 bp, Homo sapiens
atagtgttgaggttgaaaagccttgtgttagcgtctaggagagaagctgtgggtagagtgaagaatggtcctgtatgggaagttgagagacttacagtccgagtaaccttactgaaatcatttcatgttgccaagtctcaatttctgcctttatagtagccccaggctacctctaaggtcctgtccaacttcagcatttccaccacctgccctctgggtagagtggtttaacaggaatccatgcagagaacaagagcagaggggacacaggggctgcaactccccactccagggacactatctcctgtttccaaggcctggagccagttgtgtgtcagaggctgaaatgctgattgaaaccaaa

SEQ ID NO: 144245 - DNA, 293 bp, Homo sapiens
tgtggccgtcatgtcggaagtgcctttcacctcctgccatgatactgaggcctccccagccacgtggaactctaagtccaattaaacctctttttcttcccagtctcgggtatgtagttatcagcagcatgaaaacggactggggtatgagctttccatgaactaaacacagtctacaatatgcatgtttatttaagcttggatttttaaacaaagcattatgaagaaaaagtctcaaaggaaatacaccaaaacaattaacagtggttattacaggttgaaaagattatggg

SEQ ID NO: 144246 - DNA, 303 bp, Homo sapiens
ggtggcctcgacgagggtggaggcatcagcgagggaagagggggagcccccggcatggctggtggacacagcatgggctggtggactagatgtggcatgtgagagacagataggtggcaagaaggacccctgctgtcagctgccccttcaccaggctgtgggaccaggacacagctcaggacaccagcctcttcctacctcccctcacctctggactctcccctcctcctccctctccttgtcttctgtcctgtcccctggcctctcttccctcacccccttctccccctcctcctctcctgt

SEQ ID NO: 144247 - DNA, 443 bp, Homo sapiens
gtctcaaactcccagcttcaagaaatcctccctgccgcagcctctgtagctgctgggatgagaggcatagccactgcacccagctatccctgccccctcctgccttttttttttatttttatttttttccagagatggggtttctctatgttgcccaggctggtctggaattcttaagctcaagcaatctgtgcccctcggcctcccaaagtgtgatcacgaggtcaggagattgagaccatcctggctaacaaggtgaaaccctgtctctactaaaaatacaaaaattagccgagcgtgatggcgggcgcctctagtcccagctcctcgggaggctaaggcaggagaatggcatgaacctgggaggcggagcttgcagtgagccgagatcacatcacactgcactccagcctgggcgacagagcgagactccttctcattaa

SEQ ID NO: 144248 - DNA, 692 bp, Homo sapiens
agtaaaagatagcataatagcaggatatagaatttcataaatttaacctttatcaaacttgtttgctcaatttttgtttatacattcataagttactaaccaagaaaatagaattttggctgggtgtggtgactcacacctataataccaggattttgggaggccaagacagcaggatcgcttcagcccagcagttcaagaccagcctgggaaacaaaggagaccccgtatctacaaaaaaaatcaagttagctgggtgtgccagtgcacacctgtgtcccagctacttgggaggctgaagcaggaggattgcttgagcctgggaggttgaggctacaatgaactataattgtgtcactgcattcaagcctgagtgacagagtgaaaccctgtttcaaaagaaaaaaaaaatagaatggaatttttttaagtcaaagaactgtcattgcacaccttttgtttccataaagattctttgctttatacaactgctatttttttcttgccttggaaccatctgttctttatggtaggaaccaacattttttttaaatgagaaaaacagttggatgttagcagaggggctatatatacttcagttacagattgaggtattttgaaagataccaggaaaactcgtaaaggatttagaattgaggtctaaaatagattttttaaaaaggcatatgggg

SEQ ID NO: 144249 - DNA, 361 bp, Homo sapiens
gcaggaggggtacttagcatgcgtctgtgaggtccccagcccaggagggggtcctggcctccagggacccactgtcagattggaaagacgagtatattggtccatgttctccagtgagaagaatgctagatgtcagccacaatagccgtacacacataagcgagcccaggacgagcccagcacggtgctaaatgcttccatctgctgtctcaggagatcttcccaggaccctgtgggagaggaatatcatcacagctagaaagatgaggaagctggggctaaggagcccggccaaggccatgtgcccaggagtgggccagggcgggcagctggctgcagagcccatttctagatgtcctgc

SEQ ID NO: 144250 - DNA, 351 bp, Homo sapiens
tatttcatttatattgtctttgaaggggactgtgcatttgttcatttagaaatatttatttcaaggtgtgattcattctaagtaaattttcctcagagacatctggaagttctccctcaaattgttagatatttccaaatgcttttggtagtaaattaattttttacagattgctaagtagtacttaatatttttctttaggaaacagatgtgtctcatgagagaattttgaagttacttcaatttaatcaaattttaggtattacagtagctgttaacattttagagattcttatatataaggaaagcactgtaaaatacacatatgtctttaaccatctgcagtaagaa

SEQ ID NO: 144251 - DNA, 580 bp, Homo sapiens
tttttggaaatggagtctcactctgtcccccaggctggagtgcagtggcgcgatcttggctcactgcaagctccgcctcctgggttcacgccattctcctgcctcagcctcctgagtagctgggactacaggcgcccgccaccacggctggctaatttttttgtatttttagtagagacagggtttcaccatgtgttagccaggatggtctccatctcctgacctcgtgatccacccgccttggcctcccaaagtgctgggattacaggcgtaaaccaccgtgcccagccgtaaagatttttacatgtaatttcagaggattcaggactcctggaagtttatcctgtattttttggtgtggaagtgaaaaattatgaggggtgatttctcccaccgccaatatttattcatagtggaagagtatcctttggctttgtgagcagattaaatgagttaatacgaataaagtgtttagaacagaaaatagcactccataagtgttagctactaagtgttattatctgacagagggttactgtatactgtttaatatcctgccaaataaagttttctgagttgt

SEQ ID NO: 144252 - DNA, 399 bp, Homo sapiens
ttgaatgaatattgatgtgacccattaaattcactttaagcctactaacgggttgtacctgatgtttaaaccacagtgcaaagctttgctacttaaagtatggaccaacagcatcagcatcacctgggatcttgtcagaaatgcacaacaacagtgtttgaataatttctaaactctatagtactcttatccaatctttgcctacatattgctaatgatggggaactcagtacttgtataggcaagcttaatccatatgttcatgattcatggttagaaaactcttgggctacaatgaattgccattttttgctgtgtagatggctttcagcagatggtttcagagctacttcttggagttacatagatgatacttatagaaagagttgaaagcattta

SEQ ID NO: 144253 - DNA, 573 bp, Homo sapiens
tctgtagctggcaagctggagtgtcagaagagccaatggtgtaagttccagtctgaaaacccgggctcaacaaccaggaagagccaatgcttcagtttgagtccaaaggcgggaaaaggctgacatctcagctcaagcagtcaggcaggaggaggtccctcttactcacaagtaggtcggtgtttttgttctattcaggccttcagttgattggatgaggatgcctacattggggagggcaatctgctctactcagtccactaattcaaatgctcatctcatccagaaacaccctcatagtcacacccagaatcatttttgaccagatatctggggacactgtgacccagtgaggtttacccataaaatgaacaatcacagagaccaacagacaggctttcttggcttgtttaccccttctatgtcctcatatccttggcttgcccagatcatattgtcagcacgcttccctttccatgaggtattctcccctgggctcaggaatgttaaacattgctgtcagaaaccagaagctagcagggaggtaagaaacagattttccctcaaagcctc

SEQ ID NO: 144254 - DNA, 496 bp, Homo sapiens
tgctgcatgtagatgagtagatggaattgatgatgactttgaggaaaattttaagtaagccaagtgccttctcagtgcctgacactatgccaagcaccacagcacatccaagagtttaagagtcattaagtcaacataataatggagcatctctatgtgtcaggtgctattaacaatgctgaagccacgcacagtggttcatgcctataatcccaacattttgggaagccaaggcaggaggactgcttgaggtcaggagtccaagaccagcactggcaacatagcaagactccgtctctacaaaaatttttttttaaattagctgggtgtgacggcacacacctgtagtcctagctacttgagagactgaagctggagaatcacttgagcccaggagttctgggctgtagtgcgctatgccgatcgggtgtccgcactaagttcggcatcaatatggtgacctccctatattgcccaggctggtcttgaactccta

SEQ ID NO: 144255 - DNA, 306 bp, Homo sapiens
ctttctgaaagataagctacgactagcttgaatttctaggtgaattggactttgaattctttgatcatttctttgcagagagtaatccaggttaatgaatgacaatgtaactgaatacactttacacggtatccttattacagagaaaaaaatataaaaatacttccttgtgtataaactgaactctggccttcacatctttgcactaacaataacactttctgacttcatgcagaatatttttaaaatctcagtattgtttttaaatgccatatgtcttattttccttctcccacatgcataatt

SEQ ID NO: 144256 - DNA, 292 bp, Homo sapiens
gaagtgtgaaagatgacttccaagtatgtgacttgtatgactggacggcctatggttgtatttacattagaaaaatgtaggacaactagtagaggattgttcaaatttaaaatgtacagtcatataattggatgctacttaagcaggaaaagctgtgtagataatgaacgatgggccgggcacagtggctcacatcagtaatcccagcactttgaggggccgaggcaggcggatcacgaggtcaggagatagagaccatcctggctaacacggtgaaaccccatctctatta

SEQ ID NO: 144257 - DNA, 250 bp, Homo sapiens
tactgggatgatgaagagcccacagactttattgaaagaaaaatttacaaaggatgtcgcatctctacaaataggataaaggttgttatttgtaaaagactaaaagttattttaaatcaccctttaaagtgccaagtggcagaattaagaccagtgattgaattgagtacaagaaggtacatttcaactcaacctttagaaagttcaagtttctataagagatgtgaaaaatgatatgacctggcattca

SEQ ID NO: 144258 - DNA, 171 bp, Homo sapiens
tgtgtgtgtttgtgtcttcgtttttaacaaagtttaaaaagtaaaatttaaaaaaattaacaattttaaaaacagaaaaaagcttacagaataaagatagacaagtatatctctacagctgtaaagtgtgtttgtgtttcaagctaagtattattacaaaagagtcaaaaa

SEQ ID NO: 144259 - DNA, 399 bp, Homo sapiens
ctaactagcaggttcatcaaatgattgtctgtattagctcaacagacacgtgtgtgaatgtcaaatacacgtctatttatagtgtcaaagcattgcctggagtgaactcactgctacttaaacaaaatgctcactgcggataagggcaatccctgctctcagatgtggaagacagaacaaggaaggccatggagctgtgggacatgacctccatagtcacacagagacctccacagccacatgggacgtgacctccatagtcacacaaagacctccacagccacacagatgagacctccatagtcacacagcgacctccacagccacatgggacgtgacctccatagtcacacaaagacctccacagccacgtgacgagacctctccgggtcacacacg

SEQ ID NO: 144260 - DNA, 542 bp, Homo sapiens
tagaaaacccattgtctcagcccaaaatctccttaagctgataagcaacttcagcaaagtctcaggatacaaagtcaatgtacaaaaattcacaagcattcttatacaccaataacagacaaacagagagccaaatcatgagtgaactcccattcacaattgcttcattcacaatttgattcctggaataaaatacctaggaatccaacttacaaaggacatgaaggatctcttcaaggagaactacaactcactgctacttaaacaaaatgctcactgcggataagggcaatccctgctctcagatgtggaagacagaacaaggaaggccatggagctgtgggacatgacctccatagtcacacagagacctccacagccacatgggacgtgacctccatagtcacacaaagacctccacagccacacagatgagacctccatagtcacacagcgacctccacagccacatgggacgtgacctccatagtcacacaaagacctccacagccacgtgacgagacctctccgggtcacacacg

SEQ ID NO: 144261 - DNA, 783 bp, Homo sapiens
gacattttcattatttctggatggcaccgaagtactttttctttttttttaaacttctcttccagaagtaagatttttaccttttctttaatcgtaattagggactagttatgattgttactttacctcttggagtggaataattaaacagtagccattttccttttattaacagggtattatgagttaggtttcccccagtacccatgaacattcccagcatctcatcttccagaataacggagtggacgtaataatgtaatcaactatgttaataaattggcattgtttttctccaaggagaagatgctcgttattggaaatgtaaagcttctcaagaaagccttagagtcacagctacaagactccatgggttagtggagttagtggtttccttattgcaactccctaattgacactgatgttactgctctaataaaaaaagcagggcaaacatagcacctaccaaacgtggtatccttttgcatccatatactcttccctttatattcaagggttcagccaataaacatttactaggcatccattgtgtaccaaacaaagtaattagtgcccaaggattaaaaaaagagaatgtcatggtgccaaaacaatactagtgtgtgttaagtgctgtaacagaagagtacatataaaggagagacctgaggtttcacagagcaagcggcattggttttgaatgagtaggagttggggtgaggttaaaaaagcgagactacagtaagtggagggacagatagcctaactttaagcagagggaac

SEQ ID NO: 144262 - DNA, 1201 bp, Homo sapiens
cccacgcgtcgccagtgatgccactgagatggcacctgtcaaaagagcagtggttccatttctagattgtggttcttcagataaattctgccattttcatttcacttcctgaaagtcagggtcggctgggaaaagttgttaaacaatatgctaaatgtgaaatgtcaaccctcactctaaactttccctgttcacagcatcagatgaagacttcattgggttttagagtggctttcaagaagggagtttgaaagttgttgtatactcaatgattgtctgcccatgtcctgcctgaaataccatgattgtttacggaaagtatctttaataaagctggatacagtttgaaaaacaaaaaaaaaaaaaaacaacaacaaaaaaaaaaaaaaaaaacaaaaaaaaaaaaaaaaaaaaaacaaaaaaaacaaacaaacaagaaaagaagaaagaagcacacgagaaaaaacacaacacaatgcgcagggcgagcgcggcaacgaagagccacaacacaagccaggaacggaacagtcgccgcacaggacacacagatcgccgcacacgcaagccaaggtaacaaacacggaaagagcagaaacgaggagacacgcaacacaacagcgcaacacaaccacccccgagcaccagacggcgagaccccagacacgcaggcgacaccgaagacaaccgagacacacgcggcacaacaacccaacagaaacgcagacaccaaaccagcgaccaccacagaaagaaaacaacagaaaacaacagaaagaacgaaaagagaacaaatacaagcaaagacacaagaacaacagaagagaccaacattgtaccgagcgagtaatagacacagaaacagaacgagaaatgaaacgacagaaaacacgacaacacacaaaagcgagaagcacagaggaagcgaggaagcgaagaaagggagagaagaagaagacagaaataaggacaaagaggacgacgacagaagtaagacagaaagaaacgaacgtcacaaagacaaagcagcacgagcagcatcaggatacacaggagagcgaagcaacaggaggacaggcatacacagtcagatcagccactgaagacatgaaaaaagagcagcgggcgtcgggcgcaatccgaccgggcgcgaaggcgccagcaagcaggagaaagcagaaaaagaggcaaaagaaaacag

SEQ ID NO: 144263 - DNA, 312 bp, Homo sapiens
gccctcgttgctcccagattctctctgcatccagacagaatattcaggtcaattaaagacctaaatatacaaaacataatgttgaaagctgtagaaaaaaatatggcaatagctttataaagaattaattaaaagaccgggcacggtagctcacacctgtaatcccagcactttgggaggctgaggtgggtggatcacttgaggtcaggagttaaagaccagcctggtcaacatggtgaaaccccgtctgtattaaaaatacaaaaattagccaggcatggtggcacatgcctgtaatctcagctactcagg

SEQ ID NO: 144264 - DNA, 818 bp, Homo sapiens
ggcagaagagtcccgtcacagcatggacacacccagctcggtccatgctccaacgtgtcctggcccctcgggcacagtgtctcttgtcacctgtgttcagacacagcgtcaggtcgccttgtgggaaggcagcgtctctgggctgtcacctgttttcagacacagcgtcaggtcgccttgcaggaaggcagcgtctctgggctgtcacctgtgttcagacacagcgtcaggtcgccttgcgggaaggcagcgtctctgggctgtcacctgttttcagacacagcgtcaggtcatccctgagccgcacacttgcacatgggctgctgctcccctgggtggaccctccttgcccatggggaccctctgtggggccctgagctgggcctggcttctccctgagaagtgcctgccaccatctgaatcggcctgcgtccacaaagcccaaaagaacaggaggccacagtggttgcccaggaagctcagggtcagcagtgcctcggcccctgagctccgctgaccagactgcctcctggtgcagcggccacacacccacacaccctctcttcaacccacaggaggccgggtccagggagaaagctgggctctaattacatgtcctggaaagaaatcccagtttaatttagactaaaacaagaagccgtggttggaaagctcccccggagagccacctgcctgagccaggatgtgtttctctgatgtccccaagggccatggagggtagcaccagactggagccacaacaggggtggggacgcccagggctttggggttctgggggccctgacttgtcaccctgc

SEQ ID NO: 144265 - DNA, 206 bp, Homo sapiens
ttctctggacctccggtaaaaggcattccagttaacctaaagagaaaaactacattgtcagaatcttaactatatgttgcaaaattatattctgtatgatgccagcttaggtgggtagttcctacagtacaggaagcttaacaatctctaggattaaaagataaaagaatgcctcaggctcatttatctttagtacttcatggttt

SEQ ID NO: 144266 - DNA, 438 bp, Homo sapiens
aggcagatatggagttctacgtaaagggagaaaagttccatctggttgctactgaatctgtcattatgtcactgtgtgcagtgttcaacttccagagacatggtctatacttgacttggcttgccaggtgctcatgccttcagcaggagttggtaggcaccttgatttaggtcccactgagactatatgtaatataagaggtattgttcctgaagaacaagagcaggatgctattgcaagaaaaaggaggaatggatgctggacaggtataaacaacaagtagatgtctcaatcactgcacaagtgagcatcctctgtgtgcttatagtaatttgataacagatgcagaagagaatactgttacgaatcagtcatgatccaagccaaattcaaacataataagaaaaaaataaagaggaaaaaaatcggtagtgacta

SEQ ID NO: 144267 - DNA, 493 bp, Homo sapiens
atatgtctaagttaagagactcctcccactagtaagtggcaagactgggattcacaaccgggtctgaagggctgcaggactgaccccgcctgaccacctgtgtaatcaggaagggcttcccgtagaggtgaggcttgagctgggttcccagggatgcataggattccgtcagtgagcagagggccttccaggcctgagcaaggtataagccaatgtgtgttcaagacacacaagccccacgtggagtttctccctccccttggcatcacagggaggacgaaagggagctggaaagcctcacctacagtgttaactgatggaatttcacgccgggtccctgtaccttgcagctacctctggccccatccatggtcccaggctcacgatgggtgagaatcatccccttagccactgtctcccacacgtcacttaaaagccatctttaaagccattcataccttttcttaagtaaattgattttttggtttactcc

SEQ ID NO: 144268 - DNA, 836 bp, Homo sapiens
tacttgaagccagaagtttgaaaccagcctgaacaacgtagcaagaccccatctctacaaaaaattttttttaattagccaggtgtggtggcacatgcctgcagttccagctactcaggaagcttactggagttccagctactcaaggttggaggatcccttgcgcccaggagttcaagtctcccatgagctatgatcacaccaactgcactccagcctgaacaacaaaacaacactgtctctaaagataaaaattttcaaatttaaaaaggtaaaagaaagaaattcattcccatgtcttaggactttactagaaatttagcttaataaaaatcctaaattaaaaaaaaaaagctttggaggagacagaggtagccaggcaaaaagaaaaaaaaaaaaacaaaccgctttggttccccaaattcttttcgaacactcccttttttattaccccgaacatggaattacactggggaactcccgggcggtcaactactactttgttttaaccacttagggcccaggttgcagtagaggtggctcaggtcctgttaaatccccgagcacttgggcccaggcggggtgtaacacctgggaggcgcacggagttccaacacaagcgtgccaagcaagggtgaaacccccaattctcttatgtaacacattacaacaaattacgcgggggtatgggaggggggggccggtaaaaccccagctaactgcgagaggggcagacgaagaattccttgcacccacgcgagttggctgggaacaaaatgtgcctgacactacgccggtataaaagatgacaatctggtccacaaaaaacgcaaaga

SEQ ID NO: 144269 - DNA, 499 bp, Homo sapiens
gtcgtccatcctgtgcagagaagacggggctgtgagcagcaaatgaaccaaggggaagacccagccctgtcgacaggtgtgtctcagccaggtacacacacctgcctgagcgtggggaacgtgacaaaatggctggggatgaagaccatgcctgctgctagccccaaagccccttgatgccggaggctgctaggtgccgacagcttggggttccagggcgccgcctgccacctccctcggctcagccagaccagcacagagtggtcaagcgcccaggcccttccaaggctggcgagcaggctgggctgccctgacgtggggtggtccatgacatgactacaggcccctctgacctctgacaaggatgggcagagcttctccacggacccaggccagaccacagtgccaccgaggtctcctgctacacagcaaagcatcgcctctcccacgggcaaagccctgctctcttaacagtgacttgctgtcaatggaccccccg

SEQ ID NO: 144270 - DNA, 409 bp, Homo sapiens
gcttaccctaagtacacttttcacgaccgagaagaagttgttaaagccaacattcgtgatcccttgcaaatcattaaaataatacgtgaaaatgaacatcttggatttctttatatgatccctgcagtgccaagatcatccattgaatatgatacatataatctaaaagttgtaagttatgagaacatcaataaaaatgactactatactattagccaaagggcagtaacacacatttataatgaagacattgaatttatcgaaattgatcgatgggaacaggaatatctgtatcacagagaactcactaagattcccatattttcactgttccggaaatggaaggcttttagtgtatggaggaagaatgtccgctccaagaaaatcactggatgtcaaaaatctctac

SEQ ID NO: 144271 - DNA, 772 bp, Homo sapiens
tagggaattagctcatgtgattatggaggctgagaagtcccaggacatgccatctgcaagctggagaccctgggatgtccgtagcgtggctctctccaagtgtgaaagcctcagaaccagggaagccaatagtgtaattctgtctggggccaaaggcctgagaacatgtgaggctgctggtgcaagtcctggagttctaatgtccaaggtcagaagagtgtctcaagctccaggagagcgagagagagaaaagaaatcgccttttctttttcttttctttcttttttttgatggagtctcactctggagactcagagctggagtgcagtgactgatctcggctcactgcaacctctgcctcctgggttcaaatgattctcctgcctcagcctcctgaatagcgaggattacatgcacgcgccatcacgtccggctaatttttgtatttttagtagagatggggtttcatcatgttgatcaggctggtctcgaactcctgacctcgtgatccgtccacttcgcctcccaaagtgctgggattacaggcatgagtcaccgcacccggcccttttctctgtcttctttgttctgagaccccagctgattggatggtgccttcctgcattgatctcccccactcaatccacagactcacattccaatctcctccagaaacaccctcatggacacacccagaagtgatgcttcaccagttctataggtattccttaatccagtcaaattgacacctaaaattaagcatcacaagtcc

SEQ ID NO: 144272 - DNA, 321 bp, Homo sapiens
ccgcttccttgcctctcccagggaaagacttttagagcttaaccgaagatgggcccttttgcttcagaatgatttattccgcgttcctctgcttcacccgcctgcggcttagggtgtggggcgctaggctgctcatgtgaagcgcttacgggtgagccctagcctctccgatgcaaaatgtgggctgggggctgggaattgctatttgcgccactgcggcacacacccacaaagcaaaaaccgtggggaagaggggctaggacaaaagaaaaagaattaaagctcagcaacaaacaaaataaaaatttttaaagtgtcctt

SEQ ID NO: 144273 - DNA, 245 bp, Homo sapiens
ctggtctgcatgatgagcacacgcacacacagcacatgtgcacacacagcacatgcacacacacatgcagacacagcacatacagcacatgtgcacacagcatgtgtgcacacacacagcacatgcacacacagcacatacacagcacatgtgcgcacacagcacatgcgcatgctcacacagcatgtgcgcacaaacagcacatacatagcacatacacacatgcagcacatgcacacacacac

SEQ ID NO: 144274 - DNA, 262 bp, Homo sapiens
tgttagtgggtttcccacttaaatcttctctgtatcagtgtttttcaaatattaaggcgcacaggaatcatcgagggatcttgttagcttggagatgctgattaagtaggtctgtggtggggcctgcgattccacattcctttattttttatttttattttttttttgagatggagtctcgctctgtcgccaggctagagtgagttggcacgatctcggctcactgcagcctctgcctcccgggttcaagtgattctcctgc

SEQ ID NO: 144275 - DNA, 442 bp, Homo sapiens
taatacccctccttcttgaaccaccggttggccactatactctatgcttcatcctagttcgagttaggccaacctgcacctgcctttcctgcgtaccctgttctccttgcccctgcctcccttaatacccttccccaaaccctcctcactactgaacaatgtgccatttgaaccctgctcaagttagcttcaacctgatttccctgattttataagcatcagctattttggtaacttcaaaatcttcccttttagagaagatggcctgggttttccagatatacttttgtacagtttgaatgcttaatatggaaatgtattattttgatttttttttattttttattttttttttttttttttttttttttttgggaaaaaggattcaactttgggcccccaagggggaggcaagggccccccccccggccccccgaccccc

SEQ ID NO: 144276 - DNA, 351 bp, Homo sapiens
agaaatgaacgcagccaataagcacagaaatatgttcaccctccctggaaatcaaaaacatggattaagccaaactatttttttctatcacatttaaaaatgttttaaataacagaatctattattggaaggatatcaggaatgcaacaattccacatatctctggagggaacacagattggttttggaatttcccataaaatgcctcctctctccccttctccaatttttttgtatatatggcttaaggtgtaaatcccatagcattaaatttgaaacatcagttcacaatggtaaggacatgggttccaaagccaggctacctaactcttcacttattagctatagtgt

SEQ ID NO: 144277 - DNA, 716 bp, Homo sapiens
cttgctgctactaactctttgggtccacgctgcctttgtgagctttaacactcaccacgaaggtctgcagcttcactcctgaagccagcgagaccacgaacccacactgaaggaaggaaactcggaacacatccgaacatcagaaggaacaaactcgacacgttgcctttaagaactgtgacactcaccgcgagggtcggcgtctccattcttgaagtcagtgagaccaagaacccaccaaccaattccggacacaatctcagcactgtgggagactgaggtctttcctgagcacacagaagatcaagaccacactcactgacttctcatagtcaagcaattttggccaattaaatgtcagttggaaactcctgtgtcagcttctctgtggcggtgagaagtccctgtgtgacatcccaactctcccctcacctgcgttggcaaccaagaaagccttgtgttggaggtggggccacaagtttaaagctaagttaccacctcgagggcacattcctggagagcttcccaggcccacagtggcacgtgtatgagtgacagatccacttctttattacctttttgaagaacaggaacctttgtctggaaattccacaagtatgccttttgcaagattaaaagtgccacaaagaacaaaaatgagcccaggaccagatgcatgttaaaagccatcagacacgttaagtttcatctccatt

SEQ ID NO: 144278 - DNA, 185 bp, Homo sapiens
taatttctctctcccagccaagctccccaacaaacctcactcatcaagatgagcctaattccctggctatagacatccaacagcaatatccagaggttaatctcatgcaaatatgtggacaatggtgggctgagcccataaccaactgagttgacccaggtgctgaatatggggtggataacatg

SEQ ID NO: 144279 - DNA, 200 bp, Homo sapiens
tcggccgctgcgggctctgctcagaaggggtggtgagctgcgcactacttttcagaatggaatctgctgccccaagagagcacttaagtcttaggcgtgtttataccctttcacccatttgcttttaagaactatttcaagcagctaaccagagacacggacaaagattgaaggcacggagatgtttgtggcagccttca

SEQ ID NO: 144280 - DNA, 383 bp, Homo sapiens
attggggcttagagaaataagagagaagagaaaaggaaatgaaaggaaatcttcaaagaggttttcaccttctcagaggaggaaaagaaagctatacaaaatagaattggagggctagtctccttgggacatactcaagtctgaatgctaattttacagagatattgccttctttctttgaaattttctttattttaaaattatgatataacctagtaaattgaagacccagaacatgttaaaacattttagcttgatacattataaaccaagtggcaaatgagttttaacttgcatgtcagggataattgattatttgtagctaaatgaagcactgtgccaagaatctttctgagtccagttctgtgactaagggcacctcg

SEQ ID NO: 144281 - DNA, 777 bp, Homo sapiens
acatgttgcttatccatttgttagctgatggacatttgggttgtttccatttgctggctgttgtgcataatgctgctgtggttatctgtgtacatgtttttctgtggatagatgtcttcagttctatcggataatacctaggataggcattgctaggtcatatggcaattctacatttaaccttttgagaaactgccagactgttttccaaaggagcttcacattttacttgcaccatcattgcattgccagcaattcccatattctgggaataattgttattgtctgtctttttgataatagccatcctagtcagtatgaagtgttatctctttgtggtttttgatttacattgtcctcacggccaatgatgttgggtatctttgcacaggcttattggcaaattgtatatctttgaagaaacgtcagatcctttgctcatttaaaaaatcaggttatagccgagcgcagtggctcacacctgtaatcccagcactttaggagtcttaggcaggcagatcacgaggtcaggagtttgagaccagcctggccaatatggtgaaacccccatctctactaaaaatgaagtatccaactgttattgttgaattgtctgtttctctcctgagttttatcattttttgcttttgtattttggggcttcatgtattgttaagcacatataactttttattttgtcttattgctggctgacccatttatcattataaaatgttcttctttgtcacctcacatccattaggaaggctactatca

SEQ ID NO: 144282 - DNA, 159 bp, Homo sapiens
cccaaagttaaaagcatgaggtcgattaaaacccatgcccagaggattctgaggaaatgggtgtggctggttcctgagtgagtaaggaccacagtatggggaagacattcttgggggaacgtgaggtggcattctgaatgtactatagcctccaaagcc

SEQ ID NO: 144283 - DNA, 378 bp, Homo sapiens
gataataacaaagtgtacgccagggatatttgcacaatagactcattttgtctttagcaaatatttatgaagtgtctattatgtaccaggaacttttctagtttttgaggacaccacagggaataagaaagttgtggtccatttacctacgaagttcatattgttgatggagaaacagatagaagataaatacattaaaaaagaaatccaatagtgagaagttctgtgaaagcaccaaaataatgtgatggagaatgactgggtggtgggggcaaggtttggtagctggttatggaaaacagctccgaagaaatagcatctgagctgagacctgcctgagatgaagccagctgatgggaaaatatagagatctcaggc

SEQ ID NO: 144284 - DNA, 374 bp, Homo sapiens
aggggtatggaatatttcaatacttttaacattgcctcagtgtaacccatgaagatgagccttgcctgtgaggctgtgggctaatagccaaataccttccttccatattgacattttttttgcttccaggctcacctcgaggtacttcctttcacctctttctcgggcagtgttctaggatagtgattccagctttttctctgttatacattattttctccactgccttagacaacagcgggtaatagttttgaatccattaagatgttgctttcaatttgaaatattttgtgtatacatgtatctaaaaaatgacccaatgtatgactcatctgaccgatgttcaagatcaataacggcttatatttcaacat

SEQ ID NO: 144285 - DNA, 724 bp, Homo sapiens
ggccaagtgtgggggcgtagtcaggcgtgggggcgggccggcgccggcgccgcggtcggcggcagcgctctcctaagctctcgcggctgcgcttcggtcccggacccgggccacccacggggtagtgggtgctcctcggccccggacattgcaagccccagaaggcaagactaactcggtgttgctcctcccggcgctgacttcgaggcccggctatggacggcgagagcgaggtggatttttctagcaacagcataacccctttgtggcggaggcggtcgattcctcagccccaccagcttctgggccggagcaagccgaggccccagtcctaccagagccccaacgggttactaattacggatttcccggtggaggacggagggacgctctccgcagcgcagattcccgcccaggtgcccaccgcctcggacagcaggacggtacataggagccccctgcttctgggcgcccagcggagagcggtggccaatggtgggacggcatccccggagtacagggctgcctctcctcgacttcgacggccaagtcacccaagctccccaaagcggtgcctggcggctccccgaaatccccagcaaatggcgcggtgaccttgcctgcgccgccgccgccgccggttctgcgccccccgcggactcctaacgcgcccgccccctgcacccccgaggaggaccttactgggttgactgccagcccggtg

SEQ ID NO: 144286 - DNA, 379 bp, Homo sapiens
catgtcctgaaaaattaattctttaagaaaataccatgctgtgggcctatacatgcaagagtcatttccttaaagcactgatgttcagtcttgtcaaatatgtcacaaccaggtgctgataactcctgtcagtagaaaaaaacaattttttctaaaggatcttccaggctggacatgaagtttttggattatctgactccaattttccttcaagactgtagctagaaaaatcattcttatccagagaactcatcctcacagaaaggtccttcaatacccaatgccaattccttgcaataccatctgaaccttgaataaaaacaatataaagcagaagcagaaagtacttcaagtccatgattcctcagagagacaaggg

SEQ ID NO: 144287 - DNA, 144 bp, Homo sapiens
caaacaaattggcatggttggtcacctactttcagatatccaggctcctatcttccctgttttgttttactgctatgtggggaggaatgaatctacacagaaaattggctacatatactgggtagaatgagaggactaaaaaga

SEQ ID NO: 144288 - DNA, 760 bp, Homo sapiens
tcctcccacctcagtctcccaaagtgctggggttacaagcttgagccaccacacccagccaatagcaagaccttagagaagtgagaagaagaaagtatctctgagacaactgtatctggaatcaaaatgactgtctccttcccttcgtgatgacagaacccctatcaaaacagtgtcgaaagatggcagattaccatttttaaaactactaaaactttgacaaagcaaaattaagacttaaaatgtatcttcatgggaagaaacagacacccatacatatctaccaaaacacatacacacaaaccccaggcgttgagaaatacatcttttccgtatgacacagagcttatcaagtgctgtcagcaatgctatggcagacttcatcaaaacccagtcagaaaagcacaggaacttacacacttaggtacttcatgactagggaggagatgggctgtcacctcagtaacttcagatcacctgggaatgaggtgaggggcatggagggagtggctgctagagatgtcaacactcaaaatctatacttgtaatcagtgaagagtctgtggaaccagaatggtgctaacattcaccttattttcccagcttaattttgactgcagagcattaggtttctatataattctgcagtttgaaggcagtgtgtatataaattctgcagtttgaaggcagtgtgctaccacttcctgttggagctctggggctaaataagaggtatgggcggaagtatgtagtcgggtac

SEQ ID NO: 144289 - DNA, 778 bp, Homo sapiens
atcctgcatggagattttaggtttctgaataatcatttcaggagtcttcactttagtacctttcatctttccttccagcccaccagtagcaatctcaggcaggctgacatccccagagaccccaggaacagtcacttcacctgtaggcagtgtcacatcaatcccagtttcctctccctttgcacctgatacagagaacttggggactttcatcttgggcacattcagtttgctcccaggcccctgaacatcaatgtcaggggcctgaacttccacactggggccagtgatgctacccccaatttggggagcagaggcatccaccccaatgtgcccctgtggcttggcacctttcaggcctaggtcaccctcaagtgatggcccagtgatttgggggcccttcagcttcccctcaaggccctcaatattggcagagggcacactgacttccagctgaggggcttggatagtcaagcctggcttgccgcccttgtgccccacagagacttcaggtgcagaaaccctcagccctgcctttggtgtctggccctcacgccctgttgagacaccaaatttcggcactttcatggtgggaaatttaattttgccatgatcaccactctccagagatgggccctgtacctctactgccctacccccaagagaagatgaaatgtccactgctggaacttggacccctcctctgccacccaagtccaagccctttgcattgacattgacacctgagcctcccacctttatcccaggcatggtgacc

SEQ ID NO: 144290 - DNA, 663 bp, Homo sapiens
atcctgcatggagattttaggtttctgaataatcatttcaggagtcttcactttagtacctttcatctttccttccagcccaccagtagcaatctcaggcaggctgacatccccagagaccccaggaacagtcacttcacctgtaggcagtgtcacatcaatcccagtttcctctccctttgcacctgatacagagaacttggggactttcatcttgggcacattcagtttgctcccaggcccctgaacatcaatgtcaggggcctgaacttccacactggggccagtgatgctacccccaatttggggagcagaggcatccaccccaatgtgcccctgtggcttggcacctttcaggcctaggtcaccctcaagtgatggcccagtgatttgggggcccttcagcttcccctcaaggccctcaatattggcagagggcacactgacttccagctgaggggcttggatagtcaagcctggcttgccgcccttgtgccccacagagacttcaggtgcagaaaccctcagccctgcctttggtgtctggccctcacgccctgttgagacaccaaatttcggcactttcatggtgggaaatttaattttgccatgatcaccacctcttacaaggcgtcccgggttgggatactctataatcgcgga

SEQ ID NO: 144291 - DNA, 452 bp, Homo sapiens
ggcttctggtagaggcaagatagagaattacaaggttagagccggtatcacagttttgtgtttgacattacctacttttaaaatggattttagaattttgtttttatataggctgtagtctgaagttgtatttcaaatacttgtcaaagccttattcaggaataatggaatcattccttttttttctgtcagatataaaacttgttttaaaatgtttccattgttttctcctaaatccagacagaaaaagttaatttcattctcctgagttgagtgagtggcagagagtgagtttgcctcttagaagcctgagattagaagtaggcttgagaggccgggcatggtggctcatgcctgtagtcccagcactttgggaggccaaggcaggcggatcaactgaggtcaggagttcgagaccagcctggccaacatggtgaaacctcgtctctact

SEQ ID NO: 144292 - DNA, 185 bp, Homo sapiens
agcctagtggactaggagtaggtaaaatgaagggatgtgacattgcttttcacagctcactctgggtggctgtgaagaaagaattgtggtatgtcacagattggaggcaggcagggcccgcagttatacttggtaatacctgctaacatgtggtaataagtggcctgagagtaacagcacatttg

SEQ ID NO: 144293 - DNA, 761 bp, Homo sapiens
tacttgtttctgtgacaggcagtctctaattcttgctaccctgaatttctctggttgatatatctgatgctgcccatatagtctcattccatttgtctgcttgagcagctgactcgtcagtttcttctggtttaaatttaaatctgtattgttcctttccaattaagatcaccacctagagtaactgctgactacatggagattatagaaaaaagtggtgcttttaactgtaaggttttctgaccccatttctagaaatacacttcatcaataagtagaactttcctttattgtctataaatggcagtacaacatactggttaagagcacagactctgaactagacttgaaatagctggtcttgaactcctgatctcaggtgatccacccaccttggccccccaaagtgctgggattacaggcataagccacggcgcccagccaatatttctaccttttggggttgcttcctcatcatggaattaatacttgcttatggaggctgtttcctctttataaacagtacccctcacttgtagctccattctgaaaaattctgacagataattcagcagactaaacgatcaaatcaccctggcacgttcccctcagctgggctctgcagggcagctaagattgggcactgatgttcctggcttcagtcctacccgggttatgcagctacggcttcatacatacaccagttgcactaacttgggatgaaaattaagttaaaaccagtagaaaatttcatcctatgt

SEQ ID NO: 144294 - DNA, 311 bp, Homo sapiens
ttttctcatttcagtttcttcatctataaaatgaggattataataatggtacccacttcctggggttttatgaattattaatgttacatggaaagtacttacaataatgcgttgtacaaagtagaagctatatgttgttattgtattgctatttatctacttaaataactcttactgtagtatgtattgctcaaggacagagattgtgttgctcatctttgtgttatcccacttagcatagtttctaagcaaatagtatagttctttcatatatgcttatcaagtaaatgaatttgactctacctcctaat

SEQ ID NO: 144295 - DNA, 539 bp, Homo sapiens
ttctgtccactcacttccccgtgtctcccagtgttcttcctcggagctgtccgctgctgggaagaggagtcctcctgggcctgtgctggtgtccctgcagccttcctgtccccagatgtgctggcccagagacaggagccatgtgcctggcactgcacctgcccctcacttcccatctgggaaaaccagccctctctgctggcctttcactcagcagagtctccacctggctactgtgagcacatccctggagcaccccacataggacaggaggggccacaggcctgcggcagccacacaatcataaaggctgaagcttgctgagctgtgctgacaaaagctggggtgtggatcctctttactggctgtgcctgctgccgttcctcttcaacaatctccttcgtatcacgagctcttctcacctggaccacttcccccatctgctctcaagcccgcatcctggcacagcctctacgccttgtgctatggctgcattcaagaagtctcaggaagccagggacagagccgagggcctgact

SEQ ID NO: 144296 - DNA, 565 bp, Homo sapiens
gtgggctggacttatttattcaattttaatgagtagaccacagaagcagctatgggaactcacttccaaggttatgttataaaagaagagtgacttccatcttaagatgtctttatctgtccttcttgaatcacttgccttggtgaatgccaacttccatggcatgaggtgtcactgtgcagagacccacccacctgccaaggaaacaaggcctgtaagaagcatgtgaataagcttggaggaagatacctccatacctacatttgagtcttcagataaaactatagttccagatgacatctttgctgcaacctcataagagatcttgaccagagacactcagctaagcctcattctgcttcccgacctacagaatctgtgagatagaaaatgtttgcgttattaaattgcaagttttacagtgatccgttacaaagtaatagaaaacttacatagttagttaaaagaatgagaatagttgagagttgagctcatttaagaaaaggtggtagagaaagggaagtcaaaccctgatgctcaacagtggctaaaggttagaaccaaa

SEQ ID NO: 144297 - DNA, 440 bp, Homo sapiens
ccaagttagggctccctccttgccctgaccctgaggcttcctttgcactgggggtaaatatgaaagagattcactcctcctcctgtccatcgtctgccttctgggaaaatcccagaatggcagggtggtgctcaggctgggtcaggacttagtatgggggagatgggtctcacctatgataggttctgagtctagccaggaccactctgggctgacgtgtggcgctcagctggacagggccccgccctagcctttggaaagggacagggcaaagctgacaggcctcactcttgatctcaaggacagggactccctcctctccctctgggagagccctcgccctgtggcccactctgcctgccccctctgacctctccacccttcccactctgccttgtgaaaggcaggacatccccaaagcttgctgtatttggagcctg

SEQ ID NO: 144298 - DNA, 1620 bp, Homo sapiens
cccaccaggtgtaacaccaccctgtgccgtggacatcgcatcttaggaatgaggaagcaaatttggaaaagtaaatgacctacatcagacagcatggtcacgaagtgcggttaaattcccacatgcaactccaagccccaagcaccctccactccaccagcatctggcttcaggagcccctcagctcccaccgaaggccacacgccgggtggatctgttctctgcacagccatagcaactctcggatacagctcccagccagggctctgaggctgaagccctataatgtgtggcacagcatggctttgccactgggtgcccaggtggacaagtccagaggaccaagcaaagcgtctcaggctcagaaacatcgggcccacatctgctgccaaggaagtgaatttaactcccaaactgaggttgcaggcggaaatgtccagcgagctcaaacagctacacataaaacagggaagcgtgaaggctgccaggtgacgggggagccagccaacaacggacaactaaaaaattaaacaaaaatcaacgtgcaggccaaaccaaaccagtctgcagcctgtgtgaagctgaaaccctacggcagagtttctgaacactggcaggctcctgacatttggggccagctcgttcttgcatgggggccgtcctctgcaccataggacccttagcagcagtgtccctgatttctacacattaaagcccaaaagcatcccctcccccctccagttgcaacaactagaaatgtcttcaaacattgtcaaatggaccctggcggcaaaatcaccctcagtggagaaccactggctccagcccagggagtggagagtgtgcgctaccttgccaagcaccttggaaagtgtgctgatttgaatcattcaatgttcaaatgattaaccatccccattaaagagagtcctaacagtggaaaaaaaaaaaaaaaaaaaaaaaaaaaaaaaaaaaaaaaaaaaaaagaaaaaaaaagaaaaagagaagaaaagaggaagaagaagaagagagaaagagaagaaagagagaaaaagagaagagaagagagaagaaagaaaagaaaacaaaaaagcaagaaaacagaacaggaggggaggaacaagacacaacacagccgacagaggaacgagagagacaacgcacagaacagccgcaacaaaaaaagaaaagcggacgaagaaaaaacaaacaaaagacaagagcaacgaagaaaggaaagagggcgcgggcggggcgcgcagacaagcgaagcgggggagcacagagaagaaaggagaagaagagagaacgaaaaagagacggggaaggaagaagaagaagaacggagggagggagaggaggaaagaaacaaaagagggggacaggagaggcggagacggggatagaaatgacgaaactaatgaatattagaaaatagtaaataatataattaagggagaggtcgtaagaagtatagcgtatagaaaagaaaagagatagcaagaaaaagtgtgtgagtgagttgatcaataaaagtgaataaatcacagaagtagagggtaaagaaataaaaatagtaaaaataaataagagaagaagaaaaggaggtaaaaagaaatt

SEQ ID NO: 144299 - DNA, 282 bp, Homo sapiens
gggtggacggggtcactacgctgtcctcacaacagaggccctgcccacaaaggagtggaggaagctcatcctgggccactgccaagacatactgtgaagtgggaaaaaggaaggagttggacaatgggcgcagtgtgctctgattcaagtgagaagtgcagatgtttgtgactgccgaggggcgtgtacgtgcagacgacccctgcaaatgcacagccggcctgtggctggagaaccgaggactggggtggggccggggccacgaggctgcctttgtgtact

SEQ ID NO: 144300 - DNA, 528 bp, Homo sapiens
gaacatctcccctcctgctgtgtgcgctctactgctacagtgtgcacaggtccaattagaatgccagtggaagggctggccatctgcctgagggagtgggagccctggagctcctgaattgggagggtcttcatctttctccggcttcaaccttaagtctgctctccaaatgacttgataacaccataggaaccaaagattgtaaagcaaagtctctccatgtcttgctctgccccctctgcagattttcctgcattcatttccccttggcaccctttcccctgtcttggtgccagaggtgtgacctgacctgtcttaaggccaatcattctatctggccactggatcctatccccttgggtccacccaaatgacactttctttcctctctctcaactactgcaggctgtctggctccactgtctcttcctcaggtgcatttaacttgtttttatttcttccatctttaaaagaaaaccatctaccctccttccttaccagggccaatgcctgtcacagctaagttaa

SEQ ID NO: 144301 - DNA, 258 bp, Homo sapiens
ctcagttcagaaaatgtactaattaaagacagctttttacctttattactgtataaattcagtataactaggccccatgaaatgggcataagataaagaggaataaatattggaaagacatttaaaatattttagtgaacagggtagaggggtagaaatattttaaagtgcattgacttagtatctttttttgtgttgtttatattgtacactctaatttgcaagattttatgttcatatctactttgcttatagtga

SEQ ID NO: 144302 - DNA, 244 bp, Homo sapiens
ttcaagcctgcagtaagccatgatcacaacactgaactcaggcctgggagatagagacactgtctctaaaaaacaaaaatttcaaaaaagggtttttttgtttgtttgttttaattttataaaagaggcttgggactccagcctttgagtccttgggaacccagaaggacctgagagttggaaatccacagcattgaagagacggataaaggaatgatgagaaaaaggtgtctcttagcaggca

SEQ ID NO: 144303 - DNA, 422 bp, Homo sapiens
atatgtgtgatcacttcaacaagtgccaaaaagcatttgataaaattcaacacccattcctaccttcctaatgggcagtggaggtggggagctaaacatagaagagctaaaaatagaaagtaactctcattatttgcaaacgatatcatcatttaattgaaagacttaagataatcaatgacaatctattagaaccaataagggagttcagcaatgtggccagatacaagatctgcatgcagaaatcagtagctttcctatcttctggaaagaaggagtttgaaaatgtgattttaaaaggagtgggtgggcgcggtggctcatgcctgtaatcccaacactttgggaggctgaggtgggcgaatcatgaggtcaggagttcgagaccagcctgaccaacatggtgaaaccccatctctact

SEQ ID NO: 144304 - DNA, 340 bp, Homo sapiens
ggggagtgtcctggaaccaatccctcacagatactgagaaatgactgtacgtttatcttctaaggtatcaactctggaatctgataagggagaataaaaacaagtcttgactgagtgtagatggcttaaatagcagtcaggaattcaaactcccacaccagcccccaaattactgctttatggcaggggagatgggacttgactaaaatgtaggaatttggcaggggaaggatcatcagcagagtcaaggacatgggaaaaccacactcatggaatcaaatgtttagtgaatagggttcacgcagggcagcaaaagtggcctgggcagcctttcatcact

SEQ ID NO: 144305 - DNA, 263 bp, Homo sapiens
ctaagttgctattaaatatcttagggtgaggagctcctggtcagcagttaatgtggtccagccaccatagaagcttctggtgcagcagagatgttgagatgggaagaactcagagacaaccctgggcacatccctgggccacccacacaatctgagatacagaccatcatgctgccctgcccagcgggcccctgtgccgtacattcggctccatagcaagttttgcccagctctccttgtgtgctgaggcctgtgtggcagag

SEQ ID NO: 144306 - DNA, 324 bp, Homo sapiens
aatgccacatccaagttcacagatcacttgaattctatccaaggacccaaggttgagaattcctggaagtcaggagctttcttttgtcccttttgttttactcctgacgagaaaatgctctctgcacctaggtatagacccaaacaaactgaaagcagggatgcaaaaagatacttatataccaatgttcacagcagcactattctcaaagccaaaacgcagaagcaactgaaatgcaaacggacaaactgaatggacgaacacacacacacacagacacacacacacacacacacacacgtattattagtcaacctttaaaca

SEQ ID NO: 144307 - DNA, 281 bp, Homo sapiens
attgggggcaaggtttttgagtcattaataaatattaagtaaaaacaattttgaattgaaaaatgtgttatggaagtaataatttttacaaaacaaggcattcaatgcaatcaatcttattgcccactataattgcgcataatatatcattaagtaaatgaaaatttgtcttaatgcatatgaccctactcatgtcaactatttggaacatgacatgtctgttctcttctcaagaatttttggaaattccatttctgcagtttccttccattactcttaac

SEQ ID NO: 144308 - DNA, 345 bp, Homo sapiens
tgcgaagctaaactgttaagaaacatggatttttgaaacagatgtacttcttcctggcatcaccagttttttaaaaatgtgctgctcttccaaaagaacctttttatcagccacaggatgcctgcctctagtcacatttttttcccagtgggttatgccaagctattccttctctattgctcattcactcatgaaaacagggccattcagtgtgagatccttgtcaacattagaggaggtgggggctttggatagggaacttctctctaccgagtacttagtccatccacatccttgctccctttctcgcatggcatcatcccctcaattgcactcactttctct

SEQ ID NO: 144309 - DNA, 331 bp, Homo sapiens
acactcatcagaatgaggttctaggccaggcacaatggctcacacttatcatctcagcactttgaaatgccgagctggcaggaggaggaagaggatcgcttgagctcaggagtttgagaccagcctggacaacataatgagaccccatctctactaaaaattaaaaacaaaacaaaaaacaaattagctgggtgtgatggtgcgtgcttgtagtcccagctactcaggaagtaaaggtaggagaatctcttgagcctgagactggggctgcaatgagctatgattatgccactgcacactagcctgggtgacagagcaagaccctgtgtca

SEQ ID NO: 144310 - DNA, 179 bp, Homo sapiens
ccatccaatcttaacttccttaagccctatcaacaccattaggatatttgacttcagatatcctaagtttaattgaattcagtctggagcagatggcctgtgggcctcagatcatataaagatacactggttctttcctgagaatagaaatcccttgccagccaccttcccccctttcg

SEQ ID NO: 144311 - DNA, 182 bp, Homo sapiens
tgccaaatctgagtacctttcagtactatctcctctgccaaatccctagtccaagctgccatgatctcacagttagacttttgcaatggcctcgtaactgattctgttttcctccacttttgcctctctaggcctgtccttcacacagcagccagagtggtatttctaaagcaaaaatcagg

SEQ ID NO: 144312 - DNA, 473 bp, Homo sapiens
aaatttaaccttccatattccagttttatcagttgattccataatgtcctttgtggcactttgttactctcgtacatcatcccatccaggatcaggtatttcatttagccctcatgtgtcttcagtcacatttaatctggaacagttcctcagcttttgtcttttttttttttttttgaccttgatgtttttgaggaatagtctttgttttaaaatagagtatttctcatattgtcctttttttttttttttttgagacagagcctcgcactgtcactcgggctggagtgcaatggtgtgatctcggctcactgcaacctccacttcctgaggcaggagaatcacttgaacccgggaggcagaggttgcagtgagctgagatcgtgccactgcgctccagcctgggcaacagagcgagactccgtctcaaaaaaaaaagtgttgatatttctgaaatgagcagtttaaaaatg

SEQ ID NO: 144313 - DNA, 158 bp, Homo sapiens
ggatttgctggtgcagtacaactaggcttaatagggattcttataagttctacagaatacacaagaaaaaaacctcttagagctaacaaagtcaaaaagttgctggaaaaatacctgtatagaagaagtagtttgtatttctgcacaaaaaaacaatc

SEQ ID NO: 144314 - DNA, 390 bp, Homo sapiens
tcttggagaatgttccatatgctgatgaatagaatgtatattctgcgattgttgggtagaatgttctgtaaatatctgttaagtctatttgtggtagggcatagtttaaattcattgtttctggtttgaagtacttctgtcagcttcagcccattcctggtgttggctcttcccatccccctgccctgcccaggccttcaggatggtttggctcttggtgttcttgtttttagtgcctcctctgcaaccctgtctggaaacctttgcacagaccagttctcaaccccagctcctctgagagacccctgggctcctggggcctctctgttctttggccatgctcccgccccttcctcagatggattgcccccagaaatgtaggtgccacct

SEQ ID NO: 144315 - DNA, 610 bp, Homo sapiens
tcaagttcggtacttggcacataataggtgctcaggaaatatctgttgcctgaatggttggtgagtcatttaacaaacagcagagatcttctacctcttagtgtcttagcaattagcagagtgtcttacccctagtaggggggtgtttaaggcctctaaaccgtgctcagtctttccaagtgcaaaacctatttttactgtactttaaaggaatattgggttccaactctgcacacgtaggttcatctacaattaggggacaaattgtaggttttttcttgtcttccgaccagttcttgcttccagtcttgagtccggaagcacatttataaaataaaatagttgggtgggataacttctaagattctttcaaatcagagccctatatcactctgctaaggctaccataacaaaatactctagactgggtggcttaaacaaaagaaatttattttctcagagtcctggaggccgggaggtccaagatcaagaagtcggcaaattcgattcctgggagagctctttccagcttgcagatgccgccttctcactgtgtcctcacgtgccctctcctcagtgtgctctggacccaccagcaccattcgctttc

SEQ ID NO: 144316 - DNA, 476 bp, Homo sapiens
tttttgtatttttagtagagatggggtttcactgtgttggcaaggctggtctcaaacttctgacctcaagtaatccaccctcctcagccttccagagtgctggtattacagacataagccaccaagcctggctcagtttttttatttttcgtagagacagggtttcacagtgttggccaggctggtctcaaactcctgagcccaagtgatcttcacacctcagactcctaagtagcttggacaaccatgcctggctaagtttttgtatttttggtagagatggggtttcaccatgtttcaccaaactcctgagctcaagagatctatctgcctcagcctcccagagtgctgggatgacaggcatgaggcaccagacccagcatctgcatggggtttggtcagggctgggtctagggacccagggctgggtcaggaaggggagcccattccagcccagctcccactgttgcagcgtg

SEQ ID NO: 144317 - DNA, 734 bp, Homo sapiens
atgaccagtgatgatcggcagggaatcacagctcctctgagggagttagcagccgggccactcacagcctctccagacacaaggcctccaggcacagctcctgggtatgggcgtgggcatgggccaccctgggggcctcactggcagagtcatagatgctgctgctcccagagcagactccagtgcagccccttggggaccctttgcgtgggaggagtcgggcaacggcagcccagcgcctcgaggtcagcacctgtgtggccggctggagaggggcggaatcaccccggggccttcagagtcgatcagtccatcaggctgggctctgtccccgggcagggagtggcccattggtggttcctactgtcacgaagcccatgggcagagaaagtaaagcaatccttaacaaataagtaactaggaactcaaagatcttcccaataaaagcccatcagctatgtcatgaccttaaaatttgaccttgaaagaagagtttgggggctgggcatggtggctcactcctgtaatcccagcgctctgggaggctgaggcgggcagatcgcttgagcccaggagttcgagaccagcctggccaacatggcgaaccccgtctctactaaaaatacaaaagttagccggatgcagtggtgcacgcctgtggtcccagctactcgggagtctgaggcaggaggatctcttgaacccaagaggtcgaggctgcagtgagcggagat

SEQ ID NO: 144318 - DNA, 532 bp, Homo sapiens
ggtgctagggaatcggggttgcactattacagatggacggtcagggcaggccttgctttgacttgagcagagacttgaaggaaatgaggaaataagccaagtgctaattatctggaaaccttgtcatctcttattttcttaccgttcttcaacttgttatgtgcagaccttgattaatttaagtccctaattataacacatttgtatacctttaagtgtctcagtgttccctacattaaatgatataatttttcatctcttggtacagtgaaattatgaggaatctcaggataagcattgccggggagagaggttgattatggctcagtagaatgtaattcctaaaacctgaggacactataagactgaccatgatttaatgttctgttttatcctgactaatggaaggcatatagggccatgtatgtttaaatatttcctgttacatagtaactctcagtacatgtcttggaaaggaaagaattaaaatcttaaataaaatagttgattcctttttccaagctacagattt

SEQ ID NO: 144319 - DNA, 266 bp, Homo sapiens
aggtctatcgatgccaactgaaataaaaggtgtaaaagctgaaaaatgtggcatgaataagagactctgcctagaacagtagaagagctaggtaaatcagaagctgaagtttaaaagctacatattttaaacagcggttagaggtgaggggatatgaattgagtccagctgcaccagtctccttgtggctttcctgatatgccacatgtgcatttcctcttaggatatttgcacatgtggcatcgataaacaccgggtaccgagct

SEQ ID NO: 144320 - DNA, 765 bp, Homo sapiens
agcggggtcattccagatgcctgcaggtgatcagatatctaagtaaccctcttgccaccaaataccacacacacttcagttactctttcaaaaaaaattatcaagcaactgctctgtgccagagactcttctagtcctgaagatacagtgataaataagatagagacagttcctgctgccattcagcttggttctagtgagaaagacagatatattaaaaaataacttgacattacattttcaagaatttaagtactttattggaaaatataactgtgtaagaagacagatattgacaaggacacttagttcttgtagcgaggaagtatagacttaactcttattattaaaagagtgtttaagaataaaaatatatcaatacccctaactttggagacaaactgaagtactgaatgtacttctatttttgatttttcccttagcatggtgagttgtttgggaaatgattcaatagttatttgtagtttctaaattctcagcagcagttgcctcctgatatgtgtcactatatattctgagttgacatctgttatctgaatcaccaaaatagtgccttgttttaaaatttatccactattggcttatgtttatcttactctaggccatgttatcactacatgtgacatctctgtatatgtgtttgtgaaactgggataaagttggcaaaacttgagatagaggaaactatctatgaaacatgttttgcattagtagaacaggaggcataagcacatttggaataga

SEQ ID NO: 144321 - DNA, 266 bp, Homo sapiens
gaggtaattaaagaaggcagatttaggcctgaggtggttaagtctcaaggaactatggctccgggcaagcccaacctgtgccctgaatgaggaaataggaagccgcaggcctgacactcctttcctacaccagcttttcttctctcaggtttctaaagccagggaaatgccagttgtcagcctgatcgcttctttttctcagtcatttaagacccatttatgggcacccgctatgtgccaggcttcatgctgagtgctgcagagag

SEQ ID NO: 144322 - DNA, 289 bp, Homo sapiens
tcccctaatgccattgcctcgaggctcttctttttctattcttttaaaagtgaccattagaaatattaattagaatctacaattgggccattagaatcttcccaacttatgtatctacataacaggggccttctactgacaactagaactcaaagagtagaaggcaagcagtcatgcactcaagcaggtagcagggagcaacactcaggggtagggagctctgagaacccctccaataaaacagtgcttgcagctcactatccctcccatgagcagtcacggctggaag

SEQ ID NO: 144323 - DNA, 517 bp, Homo sapiens
ggccttgcggtgagctgagctgcagatgttcccttcctccaaaccatcccacaggacagctgggggcaggagcctggggtggctggcgaccctgagcagcgcctgatgtcagcagtggcttcaagagaggcattttggaaaggcgcaaggaaatggaagtgcctgggtggtagctcctcttccctgtcctgctcctggaagagatgttaggaatgaagaggaaagaggggacaggtggggcaagatggaggagacagatgaggagaaggggacacaggacagaggaggagaaagccccagagagactgggaataagagaacatatttacatatttgagggagaaaccaggggggaaacaaatcgtacttatctttctcccaaagaagaaatggtattccaagaggaaagtccaaatgaggactgcagattccctgtaggaatctttccccacagagcaagtggatcagtaactggcctgggccgtgtgtgtgtgtgtgtgtgtgtgtgtgtgtgtgt

SEQ ID NO: 144324 - DNA, 169 bp, Homo sapiens
tagaaaatcttccaaatacgaagcagagagttaatgcctcctgaatgcatttaagtagaagcatattattgtgcttattttatttggtcttttttaatgtttatttctaaccgtctacattgtggggccatttaatttctacatgtttgtaagaatacaataaggtaca

SEQ ID NO: 144325 - DNA, 536 bp, Homo sapiens
ctggagtctgtcagggggtggcggactaggggagggatagcattaggagaaatacctaatgtagatgatgggttgatgggtcagcaaaccacaatggcacatgtatacctatgtaacaaacttgcacattctgcacatgtaactcagaacttaaagtataattaaaaaaaattaaaaataaggacgtttgtaggcttgttttacaggaggccttgtcctagagcaagttcaatgacatcatcaaagaatcctcttccagactttctaatcttcaccctcaaactgcaatagttgttatatgactgtcactagcaattgagactacatgctcccttatttatatttggagggaaaggctggctttgtgtgctattttatgaagcaggatttttctctgccagatgcttctagccccacttttgattcattgccccaaatttatttaaagctgtccatccttgtatccaatcacttgtacggggcacgggattactaagattggcttaagatgaaacacaccccaccctgagctggga

SEQ ID NO: 144326 - DNA, 530 bp, Homo sapiens
cacggtcatgtttggagctggtttccagcaggtgcatgtgaggaggagccagactgtcccgctccccactccacaccctcagtctggcttctctgagctccatcctttggcagactcagcacagcacgctcctcaggcaggcactgatctcccctgggactgcaaagatatttccacatcattctcctttgtgccttcaggtttgatcccattgcaatctagcaaggattgagagcctcattctgcaggcagagctaagttgcagagtggacacaaagctacgaagtgaaggatcttggcagaacccgctgagttcagcctgtgccgtctggaaggcccatgcggcccaagaggctgggcaaactgctcactggggcctgggtgccgggctcccagcagctgctcctcccgggctttctgattcatagagcttctccttctcctcacttaatctctaccctcccaggacgttttcctcccagtgaacccaggccctgtaaggtgcaaacctgagttagtaaatcattggt

SEQ ID NO: 144327 - DNA, 322 bp, Homo sapiens
atcacccttttgctttgcttaacctcaactactccaagctgtagttggagctatgtaagcagtatgtttggaacaaagggcaaattcccaggcactgccaatcatccccagttactcacatccctgctgctagctttaacatgctggagaaaaccaagaagcatgtggaaaaccctctatgctggcttcttcagctgtcagctttttctgaataatgggacatgcatcaatcaatgtttgtttgtttcttccatctcttgctcttcctagccccactcgtccttaggcccttcccccacttacctggattcctgcaatagct

SEQ ID NO: 144328 - DNA, 307 bp, Homo sapiens
attatgtggggccaggatatcatggctgttaaatgactgcccatgtgacactgggcagggagtgcctctgatactaggcaggctagagatgatgtttttggaaccaggagggaaaagctagaaaaagtggcataaatataggaaaagaataggaatttcaagaattgagtatagtcttaaatgttgaccaaaaaaaagtaaattgagccctgaaaaatgatagaattttccaattaggttactaatgattttaccagcctggccaacatggtgaaaccccatctctactaaaaatacaaaaacatta

SEQ ID NO: 144329 - DNA, 536 bp, Homo sapiens
aggaaggaccttttaaaagcaaaaacagtatattttttaaatgacctgttttgtaaaggtatatgaaaaagatgtcggggtcacagtggataaaaagaggatacctctaaagcaaactctgcaggtaagaaaacaagtcagagggcctgaaaactagaaatattcatgatgattttggctttccaaaggagacaagattgttgcaagtagggtaataaagcgaagagctatttgctcatttcaaaaaaacactgaggggccgggcatgctggctcatgcctgtaatcccagcactttgggaggctgaagtgggcggatcacgaggtcaagagatcgagatcatcctggccaacagggtgaaaccccgtctcgctaaaaacacaaaaaattatctgggcatggtggcgtctgcctgtaatcccagctactcgggaggctgaggcaggagagtcgcttgaatctaggagacggcggttgcagtaagccgagatcgcaccactgagctccagcatggcgacagagcaagactccatctc

SEQ ID NO: 144330 - DNA, 472 bp, Homo sapiens
accccaggggtggagcagatgctaagtgttcaccacacccaattctcttcctggacacacaggaagatgacatttccagtgacatgccccacctctaggccctagtcttttttttatttaaaggtctgagtcttgttctgtcacccaggctggagtgcagtgctgtgatcatgactcactgcagcctcaacctcctgtgctcaaacaatcctcccacctcagcctccctaatagctgatgtcatataggcatgagccagtgtgcctggctcaggccctacccttaaaagcatcccacctgattcaccagcccccttctctctctcagtaaacttggaaaccacgcattccagatggtataatttacagcatgatggaaaaagccagctctccatgggaagctggccagtcttcattggagtacatttttattgcatgaagccaatgagacttgatattgtttaactctgtgg

SEQ ID NO: 144331 - DNA, 459 bp, Homo sapiens
tcatgtctccatccagtgagctccgcaagagtaatactaccctgacttctaacaccacaattttgtctttttttgaatttatatttgtgtttggctctttcacccaacattatgattgtgagtcattcatgttgggtgaactgtaattcattcattcttattgctctataatatcccattgtgtaaatacatcacaattgatctaaactatactatactacacaaggtatgtgcattcttaaactttaatggatattattcaactgctctccatagagtttagaaacttaccattaatatacggaagtagctatcttcctacaccttagtcaatagctaatcaaacttcttaatcatgttaatcgggtatttttaaaatgctttcagtatagtttcaatttgcttaactcttacactgactgcaactgaggatcatttcatacatttaggagccacttg

SEQ ID NO: 144332 - DNA, 339 bp, Homo sapiens
gacttcactgctaaagtctatcaaacatttaaaaaataccaagtactcacaaaattttccaaagatagagaagaagggaacactttcaaactaattgtatgaggccagtattatcctgataccaaaaccaaacaaagacatctcaagaaaattacagaccaatatctcttatgaatacagatgcaaaaaatcctcaacaataccagcaaacgaaatcaagcaacacagaaaaagaattagaattatacaccacaatcaagtgggatttatcctaggaatgcgaggttgggtcaacatctgaaaatcaattaacgtaacacattatatcaatagaagaaa

SEQ ID NO: 144333 - DNA, 384 bp, Homo sapiens
ggggtgacacagcttacccttacgggagcaaacccttcttatcctgggaagatcagtaactcacatttatgaggacctcatgctgtaggttctatgtgagatgctttatctatattatcaccaacctctatgactctgcaaagtagtgatactacacgcaacatacagcagaggaagcaggcaaatcacctgaccaaagtgacatagctgattaagtagtagagctagaaaaacaaccatatcagttctactctaaatactcaatttctggtacaatttagctctttttccctatactttcccttacttctaataatcaaattttaaatcctagtcactcagtcacacaattaatatttattaagcacctactctgtacagaaa

SEQ ID NO: 144334 - DNA, 188 bp, Homo sapiens
tactagcatcctgaagttggctctaaactcccagccactaccacttcagctggcacttatctgcaagtgccatctgtgagcctggaaatgggcccgcctagcccattgctgctaccaccaacatcaacacacaccaactgagacccaaataatttttctgccattgctattgccatcctccatgccac

SEQ ID NO: 144335 - DNA, 310 bp, Homo sapiens
ctaattgctgagaatttagacacagttttacctctctacaaattcataaattatatttcaagtacagttaattctgttgtataaatgaagtgggttcaatatttttgctacaattttatctaacacagttgcatgataggtatgatttaattctcctttcctaagaagaaccattcaattgcatgctcactgtcacagaactgagactttttttgagatggagtctcattctgtctcccaggctggagtgcagtggcttgatctcagctcactgcaacctccgcctcccgggttcaagtgattctgctgc

SEQ ID NO: 144336 - DNA, 664 bp, Homo sapiens
gcggtaggcggtggggtggggggcagtggcaatgccctgggcctccaagtgatgagcttggaaacctgcttcaagttgaactgagcaaaggatgcaaaggtaggaaatacagaaatacacctcacaagagaagaggaaacataccaaatgttttaacgggtagaatttcagataaaaaacaaatcctgtattgaacatggaaaaggcacaagggggacaatgaggtctgggagaagcagcagctgcatgaagcaagtacacccctttggtgatgggatctgctggtggaatgatcagaactgagaagcctggaggaccttgcagagctccaggctgggctgtcatctctgatagtagcacaacgcagctggttccaagtatggaataaacaacaacaacaaaagccctacacactaaaatcaactattgttatgggacaaagtcctgctgccaggaaagtattgctacggtgacactgtcaggcacaggaggcaaatgggaaggggcaaggccctccgcccttcccacctgccagttttcctttgaacaaccaggtctggccattctgggcctgcagactttcagggccataatcagcagccacagactggccatttccccctttatactgggcctacacaaggaccatagtcaaaacatttct

SEQ ID NO: 144337 - DNA, 681 bp, Homo sapiens
gctcccgcccagaacagcccagatctgccggatgactggctttcttccctccctcctgctggcagtctccgtcgcctaccggctggattactggtagtgggtgctcaggaaatgtttgttgaactgagaggaagccacagcttgtgcggagtccgggtaattcagcagacgtgggcctcaggggaggggcggggatggaggcttagtaggaaagacaagtcctgatgtcatacttagctggaagttgtttctctgtctgtggagtagctgtctgattcttgccttggcctggccctggtgctagtgcaggacggtggggaaagaggaagtggaaagagcaggaaatgaccctgggctgcagggccaggcccttgcctacattcagggtgcacgtgatgtctgacctgggtgtgggggcctgggagtaagctctcccatcctgctgtgggaagaggaggttgtcgctccccatcccaacccatttcagagaggaggactttccagagatcctccttttcaccaagaagacgtgagctctactcttctttgcccaggccagaccctgccagctgtgtggcctctcctcctccaggcctcagccaccactcaggagaggcaggaggctggcgcatggttactgggattcccctggttgggcatcctgggaatctgggactgggg

SEQ ID NO: 144338 - DNA, 464 bp, Homo sapiens
ctattctctgcgtaatagccaaagtgatccttttataacctaagtcagattatgtcatttctttggtcagaacctactagtggcttctgttctcactaaatttaaaattcagaattcttatcaaagtcctaggtcatctactatcccttccctcactgtaatttaatcatattggccttttactattccacaccaagcacattgtcacctctggactttcacatgtgatgtttcctcaagcaagctcttaatgccagagagccacagaactcgatactccctcactccattcaagtctttgctcaaatgtgactctaacagtgaggccttccctgactacacaacataaggcggcatcttttcttcattctctatttcttttctttgtttatgtttattgtatttattacaacctgccataacatttaagagcaagagtttttgtgttttttttttcccccatg

SEQ ID NO: 144339 - DNA, 172 bp, Homo sapiens
tgctggtgctaagtgctttaagtgttgagtctagtctgctactttgtcattctaagcgccagaccctgtgcctttctcttggtgctgagtcaacattactgactgatgggcctgtcttgtgagttgtgacttgcacctgtagtgaattgagctcccaggctaccaggttcag

SEQ ID NO: 144340 - DNA, 557 bp, Homo sapiens
attgctgggtcacatgtaagtatatcttaactttattaaaaatcaaactgttttccaaagtggccgtatgattgtaaatttccactaaaaaggtatgtgagttacagttgctctacacccttggaaaaagttggtattttaagactttaattttagtcactctcgtagatgtatattggaatttaaacgtgattttaatttgcattaccctaatgattaatgatgttgaacatctttcatgtgcttatcggccacagatgtatcttcttttgtaaggtgtctgttccaatcttttgcccacttaaaaaagtagattgtccaattaaactaaagagcttctgcacggcaaaggaaactaccatcagagtgaacaggcaatctacagaatggaagaaaatttttgcaatctacccatctgacaaagggcgaatatccagaatctacaaagaactcaaacaaatttacaagaaaaaaacaaacaaccccatcaaaaagcagacaaaaaatatgaacagacacttctcaaaagaagacatctatgcagccaacagacacat

SEQ ID NO: 144341 - DNA, 348 bp, Homo sapiens
tcgtattgtttctgttcacagctgagctttaagctgggtagaatttcgtgatgagtcactcctatgactggtaaacagttaatgctcataaacaattaacaatcaccttcccagcctcctggatttgctgggagaggaaaaagtactactgagggctctgaagcgggctgcagcagtaagtctgtcttctgtggcagccccttccaactcactgatgctggtgtcagctttacaaaacagaccctggagggtcacgaggagctgcttttaatagaattccacacatctgatgggtacgtggaattctattaaaagcagcaccaagcagcacctcgaattagcggggtc

SEQ ID NO: 144342 - DNA, 735 bp, Homo sapiens
tctgattgcacaattttactccagcctgggcagcagaacaagaccctttctcaaaaaataaaactttacaaaaaagaggatgtgactttttatgatatgggagagaaggagctactgttaccaaataaaattagcaagtagaaaggaaaaaagaaaattacagtagattatacaagtttagctatcagagtatgaagtttctgaatccaggattgttatgctgtcccatggtataagagacccaggttctgtttgtctcatagctcttccagcctcagcacagggccatccgcctcatggtctagggtagctgcttgagctccggcaatcacatgtgcatttcagccagcaggttggaaggagagccaaggggcacactccctttaagaacccttccctatggttgcacacagtccttcttatatcccattgactaaaacttgttcacatgtttatatctatctgcaaaggagtctgggaaatgtatcctgatagctgggactacaggcacacaccaccacgcccggctaatttttgtattttttcgtagagacaggatttcgccatgttccccaggctggcctcgaactcctgagctcaagcgatctgcccaccttggcctcccaaagtgctgggattacgggcatgagccatcacgcctggccctggatctgagcttttaaccaccgaactacactgtctggaggtctgcagcttggggctgtggttctggcc

SEQ ID NO: 144343 - DNA, 619 bp, Homo sapiens
aaccacaaaagcagcattacctacacccagaatagacacagacatcaacagaagcacaaagtgagatggaaccctgtctcccaacctgagagggagagtttgggctaaaacacgcccatgtgaggacagcatttggaaagttaatgctaaggaaataagaaggatgggagtaaaaagaggacaagccccgatgtcctgtttatcagctccccctctctcctctcctgtctcatccgctcccgccttgaggatagcgtggtttccctggactcctttccagaccagctgcagccccattggcaataccaacttccctagctggggttggctggacggtgtggttcttggcagaagatgacacatgggtagcagagtgactttggctcctgcatcgagtgcttgtctcagccccatccatagccatatagaatcctagtggtgaacatgcaacacccctgagagccactgaccaggcaggcactggggtgagggaaagtgaggggactgtgtgggaccagctgtgctgacgacagcctgccacccaagggatgcctgtccctgcaccctggctttgttcctgcacctggtccccaggaagccaaatccagtgcatttttcc

SEQ ID NO: 144344 - DNA, 403 bp, Homo sapiens
tcagccccaggtgtgtgcagaggggctcggcgcaggggctcttctgtgtgtggccgttccccgtctcgttcactcatgcgtgtgccagcctttgtgcacagccctgctttgccctgcccagctgtgtgacatcaggcaggtgactatctctctctgagcctttagtttcctcatccatgaagcaccctcacagtgttgctgagaggcttaggagactcagcttattgtaaagggtcaagttagggctttcctcatcccccacccagggaggggtgtgggcattcgattctaagatgggtcatttcaggaggctgtgccatccctgctgtggaggactttgaagacaggcaaggttttctactgcctcgggtgaactcctgcaggattcaggaactcaagagtg

SEQ ID NO: 144345 - DNA, 168 bp, Homo sapiens
ctctaaaataaaactgtaaaattggaaaggtggttaagctatttattttaaagctaagactctctcatcattcatatctttccccaatttccatcattctatgactcaggatctttctccttatcactttaacatggcacccaggcttacgggccatgaaaaacctca

SEQ ID NO: 144346 - DNA, 190 bp, Homo sapiens
gtgctctctgaggcccacagtcctttgtacattgccaaacaaatatgcccatccatttgattacatctcagaaacagcacaattctaattttagtgacaaaatcaagaaaatgaattccctcctgagggtggcttgggggaaaaagtgctgagaaaaaggctggaattaacactataggtcaatagttgt

SEQ ID NO: 144347 - DNA, 871 bp, Homo sapiens
ctgggagcttgggttagtctgtggactgttttggacaccagtggccagctcttgggttaaccccaaaaaacaatgggaaatggctctgagttctgcagacagcctccatccttttctcctgctcatggctccacccagagacagacctggtgaactgcagagctgagggaaggtgtctagctgtgaatcaggtctggcagcttccagaaagtcagtcctggagggaagccatcatttaattttacaaagctgagtgttcccatactgataaaaggtactaactaggtaacctcagtgtgccatgggggtaaagctctgggctagagcttttgactgtagagcaagaggtccctcgctcagatccaggttctccattctttatgttcaatgttggtagataactttatccacatacaacttagactggcataggccacacagagggtagggtcaccttctcagtctcattctccacgttgcccccaaacaacagctcctccactatccctccacgcttctcctctctcaaaaccatctcctttcaccactctctcctctcaccattcatgtcttctctgacatatgggactccacaaacagtggacacttttagaaccaggctaacaatcttattttcctcaccgccctctccttctgtcctcaggaatgtcaaacaccatggcaatgtgcgtcatgtaaggctccggattcatctgtgcttagaatgttaaaatccctcatggggctcagggggggagcagagaccgttccatagttttaccggttgggggggaagtgaccgggagtgggagcgatttctgtcccggaaagaacgcccaaaaaaaaaatgggggcgaaaaggggcgaaaat

SEQ ID NO: 144348 - DNA, 781 bp, Homo sapiens
ctgggagcttgggttagtctgtggactgttttggacaccagtggccagctcttgggttaaccccaaaaaacaatgggaaatggctctgagttctgcagacagcctccatccttttctcctgctcatggctccacccagagacagacctggtgaactgcagagctgagggaaggtgtctagctgtgaatcaggtctggcagcttccagaaagtcagtcctggagggaagccatcatttaattttacaaagctgagtgttcccatactgataaaaggtactaactaggtaacctcagtgtgccatgggggtaaagctctgggctagagcttttgactgtagagcaagaggtccctcgctcagatccaggttctccattctttatgttcaatgttggtagataactttatccacatacaacttagactggcataggccacacagagggtagggtcaccttctcagtctcattctccacgttgcccccaaacaacagctcctccactatccctccacgcttctcctctctcaaaaccatctcctttcaccactctctcctctcaccattcatgtcttctctgacatatgggactccacaaacagtggacacttttagaaccaggctaacaatcttattttcctcaccgccctctccttctgtcctcaggaatgtcaaacaccatggcaatgtgccttccattgtgaagtggcaacacacaggtgactggtcatctgggtgtgaccgcacaagtcaaaggcattaattgacccccacagcagcagg

SEQ ID NO: 144349 - DNA, 718 bp, Homo sapiens
taaggatttcggagagttgggctgtgcctcctggcttctcatgctctcgggtgtgtgtgtcttaacacactgaccaccagcttgtcctacctggtcagcatccagttctaggtctctgggcactcatgcctggacaggagagctggcacagcctggaggcaaagtggcaaatgtgagctgttgtctgctccacgtggacgcggagtttgctgtgtttttttctgattgagatagaggtgcactcatctggtccagggctcagcacttgtacctgaggctgcaggggctgtgccctgtcttgcccaggagtgttgccagcgagcccaggactgaccagcccaggctgcagaggtctgagctcagtgactctggccctgtcctggcagggaaggctcgcttcgtagatggcgctggtcagtcttatccgcatggccacactccctccctgtgcgaggtgctggcacagagccccacaggtgcactccctcaacgggccaggctgtggtctaggttcctccagcccccaaaccctatcttttttttgagacagggtctctcattctcacccaggctggagtgcagtggtgtgatcagagctcactacagcctcaacctcccaggctcaagccatcctcccacctcagcctcccgagtagctaggactgcaggcgcacattaccataagcttttgtacagacggagtctcactgtgttgccc

SEQ ID NO: 144350 - DNA, 461 bp, Homo sapiens
ctgtactttctgttcctatagatgtgcctattctgggcatataaatggaatcatacaaacgtggtccttttttgggactagctttttccctcttagccatgttttcaagatttatctgtgtaacatgtatgagtacttcatttctttcttttgtcaaataatactcattatgtggggaatattaccttttatttattcattcatcagttgatagatacttggatgtttctgagttttggcttttatgaataatgctgctgtagacatttatgtacaaattattctgtgaaagtatgtttcaattctcttggatacatacctaggagtagaattgttgggtcatatggagctctgtgtttatccttttgagaaactgtgagactattctccaaagtgtctacaccattttacattcccaccagcaatgtgtaaggattctgattttgtcatatccatgccag

SEQ ID NO: 144351 - DNA, 670 bp, Homo sapiens
agatagtgcagaatcctatatatactatgttttttctgtacatacatacctatgataaaatttattaattaggcacaataagacataaacagcaataactaataataaagtagaacaattataacactattctaacaatttaggtgaaagaagcattactcaaacacaagctctacaataccacaacagttgatcttataaccgagatggctactaggcaggtgggtagcatatacatggttacactggatagagggatgattcccctccttggcaggaaggagcaggaccactccagattttaccaccctatttagaacagcatgcaatttaaaacttatgacttgtttgtttctggaacttgccatttaatattttcagaccactgttgaccgtaggaaactgaaacttcagaaagcaaaactggggaaagtggaggactactgtattttatttcatttctctcacagaattttattctaatgtaacacttttctgcccaaaagtcttttagtaatctcattatacttctgctacaaatatataaattaattaaaaattagctttatttctgatatacataatattctaaatattaaacgttttttctaatttgtgttattacaattattagtataactgatcaaaacaaatctattagagaaactac

SEQ ID NO: 144352 - DNA, 253 bp, Homo sapiens
gaggtctggctgaagtgtgggggtggtcttctcctctcatccctgaggtctcttctgtagcttcatatcagtttttaaatggtcatgttatcttgctaggatatgtagaaactttgtcttatgtttagctttgaagaatttcttgaagcacatcacttataaatgtattcaatagaaagatgagcaggtgaagccactcatctcaaacaacagttactgcatcaaactttctctagacctgagcaagccaggc

SEQ ID NO: 144353 - DNA, 315 bp, Homo sapiens
aagagtttcgatgcgatgtggtggtctgtggagagacccaaaaggtttttgagcaagtgagtgacagaacaaagagctataatcacaatggatgaagaagggagagactggagtccaaggagaagctagccaggaggttgccaggaggttgctgtcccaggacaggctggctggcgtgaggcagtagctctggggacagagagaacgggtcagccaggcgagcttccaaggaaaacccagcagcacttggtgtgtgctcagtggctgcttggctggatctgggtttctacagagcaagacagagatgatacatgt

SEQ ID NO: 144354 - DNA, 364 bp, Homo sapiens
atggaagagctgtctaacgcagtttgcctttgattggctcccgtctccatgaaggtggcacgtctccgactgcttacaaggagacagggtctcaccctgagaggactcacccagagaaacaagcggagctgctctactggcttagaaatgcctggcacctgacttgtggaggcttctagttggcgtgaaattgttagccttggaaacaactgctgctcacattggaactgcaggatctttcttgaaaaagccatggaactaactcaagggccacaagcccaaatgccttcagagggcagattaataagagagtctagcagagttagtgctgatggagttccttctccatccaggccctgttccg

SEQ ID NO: 144355 - DNA, 297 bp, Homo sapiens
ctctgtgcgctctgacctccccagcctgggttcgagcccagtgccagccctcaccagctgagcagtcctgggcaggctgctgacacccatccctgccccaggcagcagtgtgagctgtggatggaccgctgctgtgaccaggtgaggggtggagaccctggctccagcctcacagtccctgcccccacccgatagagggactgggctatgccacagccaggggagctgtcacctggaggcactgtcacttggaagcagtgcctccagcactcagtccttccaaagcatgacctcctg

SEQ ID NO: 144356 - DNA, 479 bp, Homo sapiens
acagtaggggatgttagttaatgatacaaagtaatggggtagagagtgcagaggagagaacagtaactattttaagtgctcagctaaggcttctctctgtatttccttagctttgtcagctccattttcatctcctgttatctcaccctcatgctttttgagttcttttctttaggtttttctgtagggtgaaatagtcccaggaatgcttttattttggtgggttttttttcttttcgagtagattcttcacctatcttctgtatactatgcttcttttttcttttttcgctatagttttgcataaatgcacttccctttttccttatccattttgcttatccttacagtgacagtcctgtccagcccttctctttctgctggtttagtgcgggtgaatcccccttgaccaccttctcctgatgtctgaggcacgtggctgctgctctgagctggagttgcagtgctgggtttggtag

SEQ ID NO: 144357 - DNA, 234 bp, Homo sapiens
tccgccacgtgaccaagcccagctgagcactgggtctcattggatttgccatcagacactcacagtttttgtcactgttaaccctactgcacaatacatgaacatggtctaagcaattctttttttttttttttttttttttttttgtggggaaaacccgggtttaccaattgtggccagggaaatcccccccccctggagtaaaagaaaccacctgttggggcctccataaag

SEQ ID NO: 144358 - DNA, 263 bp, Homo sapiens
ctgacagccctgacagaatatgttagctattctccagattttattttaaagtcctaaaaaaatttgatttttgcggggttaacttttacatattgtttttcaaaattaatataatttttaattgacaaattgtaattgtatacgtgtatgggatacatgatttcaatacaggtaagagacagcgtaatgtagaatactgccgtaagataggaaggcagcagatggagccaagtgtgttggcatgtacctgtaattgaagctac

SEQ ID NO: 144359 - DNA, 201 bp, Homo sapiens
agtccattcattccccaggatccacaggggattggttccaggaatcccaggataccaaaatccgcggtccctgatataacagggtatagcggtctcagttcaagtccctaatataacagggcatagtgtttgcatataacctacacacaccctttcaaatactttcaatcatctctatattacttataatacctaatacaa

SEQ ID NO: 144360 - DNA, 491 bp, Homo sapiens
ccacaatcctacagtccactgaactctgcttctaaaatagtggacttggagaatggttgaagtaagaaaggaatggatccagatgctgtaggaatttggtaggatttggtgatgtaccagggatactatggggcaagtgtagaccagggatgggatggaatgatcacagtaaggccagagtgggtaggagatattagaatcaacatttagaaatgtcagaagttcaagaccagcctgggcaacatggcgaaaccccatgtttacaaaaaaaaaaaatacacacacactagccgggtgtggtggtgtgtgcctgctgcagtcccagctactggggtaggaggtgtgtggtgggggtgcttctgaggttggaggaaagtagagacagcgaaaccctgtctctactaaaccttgagctcaggagatcaaggctgcagtgaccgtgattgcgtcactgcactccagccagggtgacagagcaagaccctgtctca

SEQ ID NO: 144361 - DNA, 236 bp, Homo sapiens
tcaaactgatgataaagggaagtcccaagagcacagctgtgtagcaaagaggaagaaaaaccaatcctggttggagaagtcagttagtaagggtattccaggtagacagacaatcaatcaatcaatcaatcaatgttttaagctgcaattgatgggattatgtgaccagtttgaccacatttgagggtgtaaattgctgagtttaagtaagcaagtagtaacacaacatacaagca

SEQ ID NO: 144362 - DNA, 311 bp, Homo sapiens
acgagatgcacaagtttagaaatctaatgtatgatatgagggctgaagttaagaaaatcgtactcgggattttcggatttttgttacataagtagatttagctgctcttggcacacaggaaagtagctgtgagatgactgacaggttaatctgcttcactttagcaaccaccttactatctgtacgtatcctatgacaacatgttgtaaacctcgaatatacacaataaggtttagtggttcttttgtttttgttttgttttttttgaaatggagtctcgctctgtcacccagactggagtgcaatggtgt

SEQ ID NO: 144363 - DNA, 588 bp, Homo sapiens
ggctgaaggtggagtgctgacctctcctcctcttcttccaacacaggctcatgggcctctcctccctgcttccctgggttagttttcctctggaaaatcaggtaagtgatcatcaaaatagcaagcatgagtttacaaaggttctagaaccaagctgagccctcatacgcgctccctggttggtggtccctgactgcctctgagaaggacattggaagcccaggtggaatgtgaactctacatttatttctaagagtttagagtttactaagacccccacttttacccccacccaattctttccttcccctagcccctttgtttggtctcttttggtggccagaggtagtgaaggcaggagggctcacactttcttgggtgggctatttgcttctctgtgttttccattccatcccaccccagcctccccctgttcccaaggaagccaaagatggggcattagatttgcgtgttttagtcttctatcttcgcatgagcaatggccagaccctaattaaccctagagatgaaagctgtctcagaatccacctgggagaccataccttaaaaacattgaagagtggggcc

SEQ ID NO: 144364 - DNA, 156 bp, Homo sapiens
acagcaaaaggctcatcagacacattccagaacggagggaaaacacaaagagactttactccagtaagagaccaaaagtctctacaaagaagacatctccctaaagactaaagaacagggcaaggtattctccaatattgccttttaaaaaataat

SEQ ID NO: 144365 - DNA, 272 bp, Homo sapiens
tgtctttccctgctgctccttcacctcctcagtgaatctggggcatgttgttctacccaggatctggagcttctagcagggaccatggcagttctggaagggccattcccaagtttcgcccctgtacacctctgaaatccacactcccaattctttctgcgacagaataatcctgtttgtttgcgatcacagatcatggccccagaggcttgggccttatctcctccccagcttcattctcctgctgctcagaaaacctttcacctctgagc

SEQ ID NO: 144366 - DNA, 316 bp, Homo sapiens
cacagtgccgagctctttgtacacggaatttcctctcatgcttacaacaacctcagtaggtagatattattgttattcccactctacagatgaagaaccaagtttcagaaaggtcccaaggccacccagccagtaagtgaccaagatgggtctcaaatccaaagctgcctaacacctaagtacatgtttgtcaccaacatactctgatgcctccatgaactctggctggcacctgcccaggctaagggctggctggggaagtatgagaggaacaggctgggcaaatatttgaccagccatcatcattactgcctaa

SEQ ID NO: 144367 - DNA, 1165 bp, Homo sapiens
cacagtccacatacagggttcttaacctgcgtttttacctacattttagactgaccctgcttgtgcctgtgaaccaaccaacaatctctggctgcagctcagaaaggacaaaagagaatggatgagggaaacttcccagggcttgtctgggtatgcccacagtggactggagcccaaaatgcacactggaggaagtggatggagccacgtggatgtcatgccttatgcaggggaggagcctgctctcttcagctcctgtggtaatgtgggaatcgatctgtgaggaaacactttctgaaaatgtcagaactcttgaaaacatggatgaggaaaagcataagtactgctttatgcttttcttatgaattttaaaagatgtaatttaaaggtactttaaagtgatatttgtgcccttgtaactgattcaaagtagactgctaaggacaataagtaataagagtctacaaatatcagtaaattatgagaaaaaacggtctaatggtacttaaaattgcattgtgatttattaaataacattgaacagctccacctgtaacattaagattccatttgagcatatagaaaatatatttatcgcaacctgaagtgatttggaaagtatgctgggaagaaaatatatttacaaattagtctcagagggtaggtatcctgtagccagatggaataagaagagagggaagggagattttgttcaaagggggagcataagctaaggaataaagccacaaacaatgattaaattaggtaaagtgcaattagctgaatattgcataagcatacatatgggaagaagtggaaaaaggagtgacaatatgaagctaaagggtttgaagtgttcaagataatactaggcttcctagcctattccgagacatcttgttttagagtgcaatagataagaactctaaggatgaaagtaggagacatgcattctagtctacgttttggttaatggactgaaagtgaaagatggactgaaattgggggatggaataaaaatgtgatagaatagaaaatagaaaaagcaattagcctaatgtcattgatacttagagaaaatatggaaaatagtaaattagtgatatatatcttttctaattcaccagggtgagtgaacaaaggaaatcggatttaaaagtattca

SEQ ID NO: 144368 - DNA, 400 bp, Homo sapiens
aatactagcacagtatgccacacacagtggtgggggggctgccatccttagcccattaaataagcccatctgacgagacagatgtgagcatttcttccatataaaccaggaaatagaggattagagactttaacttgctcaagttcaaagagctagtggcatgcagaactgggatttgaacccacatccatatgattttacaactccatccacattaatggatatttaggtatggcctacatctgtccatgtctgcagatactggacacaaaatagtaaacgagagacaaggtccttgtcctcaggagctgacatcaggagaggagacagtaaacaagacttccagtagcaggtgccatggagtgggtaactgggtggtgggtagatagcaacccaggtg

SEQ ID NO: 144369 - DNA, 175 bp, Homo sapiens
gctcctggaaagggagagtttcaaagcaaactcagcttcctcttttccctcctcaggctcaatcccttgtgaaggctctttccatgtgtgtgcctccctgggcaaagtccagcacacaggcttctccctgggagtccactgatgtcagctgtggtcactaggcatcagggcttct

SEQ ID NO: 144370 - DNA, 400 bp, Homo sapiens
tgtagctggttatctgtggaagctgaaaaccagttaggaagttattgtattcaactcaggtgagagaaactggtactgagactggagtgagagtggtgctgctgagaagtgcttagaacgtggatgtactggggaagtagagctgatcaaatgtgttgatgaattggacgcagaatatgagagcaaaagagtcatcggagtgactcaggtttttggcccgagtgccagtaagaatgtcgtcgtaaaaaattagccaggcgtggtggtgggcgcctgtagtcccagctactcatgaggctgaggcgggagaatggcatgaacctggaaggcagagcttgcagtgagccgagatcgcgccactgcactccagcctgggcgacagagcgagactccatctcag

SEQ ID NO: 144371 - DNA, 221 bp, Homo sapiens
gtagatacccaggtgaatttctcatcttttgcttggtggatgttactctttaatctggcactttatgtccacaacttacctgcaacatacctttctaaaggtctctctcactacctctttttcagctccctatccatgatccttttttcttttctctctctaggtcattccctctgacataaatgctcatttcttccaatttccacacattcaaattatat

SEQ ID NO: 144372 - DNA, 199 bp, Homo sapiens
aaggattcctgatacatgacatcaccacgacacagaaagctaatctaagaactaagcccagccccaggtaaactattctgtgattcaacttcttggtatttcgacagtacactttagagtcttgtttcaaggcccttcgcagtggctcacgcctgtaattccagcactttgggaggtcaaagcaggcagatcactttgg

SEQ ID NO: 144373 - DNA, 968 bp, Homo sapiens
accgcagagtctgcagtgcggagggggcgggaagtccaggccccgcactcgatccacgctggctccctacggaggcccacctactcgaggcccaccgactcctactgcaatcagtactatgcgatcgtcctagagagtccattcagctgcacttccgcctcagtatggcatcacagctgcaagtgttttcgcccccatcagtgtcgtcgagtgccttctgcagtgcgaagaaactgaaaatagagccctctggctgggatgtttcaggacagagtagcaacgacaaatattatacccacagcaaaaccctcccagccacacaagggcaagccaactcctctcaccaggtagcaaatttcaacatccctgcttacgaccagggcctcctcctcccagctcctgcagtggagcatattgttgtaacagccgctgatagctcgggcagtgctgctacatcaaccttccaaagcagccagaccctgactcacagaagcaacgtttctttgcttgagccatatcaaaaatgtggattgaaacgaaaaagtgaggaagttgacagcaacggtagtgtgcagatcatagaagaacatccccctctcatgctgcaaaacaggactgtggtgggtgctgctgccacaaccaccactgtgaccacaaagagtagcagttccagcggagaaggggattaccagctggtccagcatgagatcctttgctctatgaccaatagctatgaagtcttggagttcctaggccgggggacatttggacaggtggctaagtgctggaagaggagcaccaaggaaattgtggctattaaaatcttgaagaaccacccctcctatgccagacaaggacagattgaagtgagcatcctttcccgcctaagcagtgaaaatgctgatgagtataattttgtccgttcatacgagtgctttcagcataagaatcacacctgccttgttttt

SEQ ID NO: 144374 - DNA, 300 bp, Homo sapiens
tataacccaggccctgagccaggaggcctgggccagtgcagagctgtctccttcatccctctcttcaggttccttccttatgttttctccaagtctgtagcctgaattcagctggagaacttgccaagggacatttcctagtaggtcccaaactttctatagcatataatagggggatctgagtagtagcttctctttgtggaatctttctctttgaatagtctttagccaattatcctaagactcccccaacattatggtttagaaagccttatgttatgtttccttgcttttgttttt

SEQ ID NO: 144375 - DNA, 243 bp, Homo sapiens
tcagagggtgggggcttgggaggagggagagcatcaggaagaatagctaatggatgctgggcttaatacctaagtgatggcatgatctgtgccataaaccaacatggcacacatttacctatgtaaaaaaccagcacatcctgcacatgtgcccctgaacttaaaagttggaaatttttaaaaaagaaaaagtaaaatctaacattttcagtcaaaaaatctggatgtatcgaacaaccaata

SEQ ID NO: 144376 - DNA, 274 bp, Homo sapiens
tgcttattagatgcttatgttgcttagcaatttttctgtcagtgtctttgattttctcttaaagatttgtacattcttcacaaattaaagctatatactctgcctctcagatatgttacaaacttttttttcttttgccatctagatttatttgctgtgtttcactgtgctctataaatatagtaaaaaataataatagttactactttgagcattttgcatcaggcactgttttcattctttaagggtatgtacaattattattattttacat

SEQ ID NO: 144377 - DNA, 92 bp, Homo sapiens
aaacgtcatcagcctcatttaacagattaggaaataggttctgaggggttatgtcactattctcaagacaaatagctgataagtggtgaggg

SEQ ID NO: 144378 - DNA, 362 bp, Homo sapiens
gcttccaggcctcagagaaagccgctgtctctgccacaccattactgtcaccatcactgctgctgcgaaaatgcaattacagcaaacaacagccgccgcctcacttgagcctcgccatccacacctggaactaattaacttaattaggccttaatgagctacactggtcggaatgcctatttttacttaattatcccctaatgtgcttggcatggaggagcacaggacccggaggatggctttggcggtggcggtggcaaccacctcctctccctgaagaagagacactcaggaggtgatgcctgtctgcctggggcgggccccaaagagctgagaatcacaggaggatgggtgaggcaggg

SEQ ID NO: 144379 - DNA, 1116 bp, Homo sapiens
gacctatgaggcaggtagggaggggttcttcctaacatcctcatcttacaaatggaaacggaggcacagggagggctggagtgcaatggcaagatctcggctcactgcaacctccgcctcccgggttcaagcgattctcctgcctcagcctcccgtgtagctgggactacaggatgatgggattacactagctctgacctgcggtggcagtggcaccctcaatcagcagacaaccgagtacagcactagtgacgtgcgtccctcgttcatctatggagtattcttgctactgcactagtgcagctcgatgtacgcgagataactagagggatcttcaacacttgtgtagacttacgtcgtatcattcgtacgctggtccgccgacccagccaggagcctgcaccacctggactgtagaccaattgccatcgcgtaactgaccttcctacttgcatgccgtgtcatcatctgcccatgttcaacatgccttccagaagactaaaatctatacttatcagctgaacgttggcataaaatgctccagtgccttccacttgcacccaggattcaatccaaagcccctcccagggctgcccaggctgtttccccaagctccttagggccatctcctcctggctcctagccctccttggaccacttgatgcccccggatcaaaaccaggtcctcgcaggactcagccctggactgttccaggaccttccacttggtccttgccttctgtgagtatcccaaaggtccatctacgcagagagacttacctggacccttgggtaaagctgcgtctccctaagttgatccagacagcagccctgtgagtccctcaaatgctaacagcatctgcatgccatttgagagaagaaccaaaccgggcgcagcattaaaatcccccgacggccaggttacataacagctctggcaacggccacaaagccgcacaaccgacacggcgcgctaacacccggacggcaaccgccgactggagaaccaacgggcaaggaaccagagtaagccggcaaccgatgtgcaagcacgcgacccaaacccacgacaaaacacaacaagacgcatcaacgaccatgcaacacgcaccacac

SEQ ID NO: 144380 - DNA, 455 bp, Homo sapiens
gcttgctaccgagaaacctgtattaccttgagtctagggaaaaccctgcctgtcccatctaagagatggggtgggggtggcctgggaaatacttgtgaggttgagagtccaggagaacaggctcacaaagagacagacctaatcaggggcctacagaatgctcaccctttcctgacatctcatcaccacattagtaaagtactattaaaagtaattccttttactcagtacatcatgtctagctatgaatgtaaagggacaaggcaatactaaaaggcaaaaaaacatagggcaaccacgcgccgtggctcacgcctgtaatcccagcactctgggaggccgaggggggtagatcacctgaggtcaggaattcgagatcagcctggccagtatggtgaaaccccgtctctactaaaaatacaaaaatcagccgggcatggtggagtgcacctgta

SEQ ID NO: 144381 - DNA, 118 bp, Homo sapiens
gtagtattgtttgtttcataacaaaattactctcatactaaagaacataaatatacaaataggtggagattccaatccaaaagtaaaagagagagtcagaccatggagtaaatgagta

SEQ ID NO: 144382 - DNA, 335 bp, Homo sapiens
attggcccgagagaaattagaagtagaggtgatttcttctatgccttctctcaggttaggttaataaatcctttacttaataggattagctataaaatggtagattgtttttcttataaattatttttcttatatttacctttctccgtgttctgtttccttgacagttctattaaaacttgctaatttctctcggaccaatcattggtccgagagaaattagcacttttcttttaaccagtagattaaaaccatacagatttctatattgagagttgctgagaatgttgtacacatttggaatttacatctagatgtgtcatttgtggactcta

SEQ ID NO: 144383 - DNA, 330 bp, Homo sapiens
tctccgcgtagatggctcatagggcttcaaactcataacggccaggacttcagtcttcatcttccccttaaacctgaactccatcttccccatcttactaaatgtaccaccagccacctgtgcacccaagtcggaatcctggagcaccatcttcaacactccatttctcacagctgccataaccaattttcaaattctcttgcttctctctcctaaatatagcaaatctgacacccctccacctgcactgccaatacccaattcaactcaccatcctgtctcctaaccacatataggaaatatgtgagacagggtccccctccattctcc

SEQ ID NO: 144384 - DNA, 150 bp, Homo sapiens
taggaaacaacagagtaaagttaacaaatagtatagaaaatactaaaagcttgagttgttttcagtcttttatacgtaaatgaataattccataatctattctagcaatacaagtgaatatttagaaactggaagtttaaattttttaaa

SEQ ID NO: 144385 - DNA, 283 bp, Homo sapiens
cttagtgataccagagatgtacagagtaaacttatttgctgagttaacattccacattcatttcaaatattatcagaagacttataaaaattttgtttagtattaaaaaaaaccccaaacataaaacattgctataaatggtatttaacataacatgtattcagtttgttctccaggcttacagctagaatattccactgcagtgagttaggattattaagaattacatccaccaatacgggatgaagcctgtaccatctttctcatctatcgacagcccaag

SEQ ID NO: 144386 - DNA, 377 bp, Homo sapiens
gattgccagtaaagccagagaatctctcatcctcatctggaagcctgtaaattctatttcttcagtacttgtctctgtccccttgcatgtaccatttaacttcccagatgtatttccttttgttaccaaaaaaatatatactttctactttaatcattatgttgtattttatgctccagaccattttttttttgtacttttggaaactggttttgccattatttgattgacagttgaactttgttaatttaatggactaataggtttgcaaatactgttcaaatagaccggtttattgttgatagttaattaaaattgagtagaaaaatttcacccatgatttagacaaaaaaaaggctcataaaaattatccaccc

SEQ ID NO: 144387 - DNA, 222 bp, Homo sapiens
aaaagaagtcttataagtcacacatagcttaaatgctgcagcttttccccaaattctggaatcctttctaaatcagtcagcatctgtctatgtgtcttcacacacaaatactcatttcattgaggtagattgtctcttgttaacaaggagaagctttagagtttaaaaattattttgacattgggttgaataaaatctgttgcttgtgctctttcaagcttt

SEQ ID NO: 144388 - DNA, 214 bp, Homo sapiens
acagcccagctcacacacgcagcccgtcacacacacagctcagctcaatacacagcccagctcacacacacagccccagttacacacacagcccagcttacacacacagcccactcaatacacagcccagctgacacacgcagcccagctcacacatacactccagctcacacacgcagcccgtcacacagccccagccacacacacagcccag

SEQ ID NO: 144389 - DNA, 425 bp, Homo sapiens
tatgcggtaggtaccagatactggatcatggacttcatatacactattttgttgttttaatgtcataactgttagtttcatccttatgaatgaagctaaagttgtaataggtcaagtaaattgctcaaggttttagacttaccatatggtggagctgggattcaaacttctccctactttcaggctgtttttagcagcctgtttataccaaggttagctacgtgtttggaacactccctcctgggggatgccttgtcatcagagggcagctgacagatcagaagatgctatggtggatatgaggatccttccatcaggctggtaaaaactggaaaagttgtctctggtctgaagaggtgtctatttttatcagacgcgtagcctgtcccatgcacaatgtagaatgatactgtcaaaatcgcgtt

SEQ ID NO: 144390 - DNA, 760 bp, Homo sapiens
agcggctttgcgagtagaacaatttgcactcctggtcagttggacaacggctgtttgctaagaattctgactttctgtgctcttgcctgcaactttcccacctctgagacagcctccagcttgatactgtattggctgttaatgctcatttataattaagctgagaacacacatacacatagataaagcataggggaaagtccagtgtgttagcatacaaagccattccgaggacccagaacagtccttgtttaggaagggtggtcctgacatcagaaatgataggattttcctggctgacaaaaaggaacagacccataccaatctggggattagaggcccaagggagaaagaacccttccatctgactttcctgattattaatccatttctcatggattagcaagacaataaactgtaggaaagccagtgtaggcattaagacccaaagctgttgatagaacaagggcagagagtagaatggattgttacctatgctgacattcctgggagagactgggtgagcccactgctgctatgaagatgttcacaagccttccacgaaatagggctctgagccccagcctccccaaggggactgtagttcattattgtcatcattatgtcatgcatcatcatgcatttccctgtctacaacatgcactaagaaagctcacagatgcacaaggctattatctataagaatacaaaacattgctataaaccaataacaatacaggcagcattcagctttcctcac

SEQ ID NO: 144391 - DNA, 318 bp, Homo sapiens
tagcctcagtgttgcatatgtcaggatggacgaacgtgagtcttggcatggtgcaagtgcatctgaattgcatgtctctgtccttgctggagcaaaaccctgttgtttggatggagcggagctgacctgacggttccaggctgttccctgttgtttggttggacgctgttccctgtttggatggagtggagctgacttgacggttcccggctgttccctgttgtttggttggagcggggctgtcttgtgtccctatcctgttgtagttgaccccattgccggaaattctttctggggccctcttgttttaagtcttgg

SEQ ID NO: 144392 - DNA, 170 bp, Homo sapiens
aggagatgtttcttcagtaagtggcaaacaatatggcttctactctatggcggtgttggtatctgtgttggtctgtgggtttggggcagaagtgacttttcaggcagaactagatcttggcaagacccaatctgctgaatgatctaccaggttgtctaaagtacagcttt

SEQ ID NO: 144393 - DNA, 407 bp, Homo sapiens
atgacagagcttcaaaatacatgaagcaaacaaggttgaaagaataaatagacaaatccacaattatactgagaatttcatcaccccactctcaacaatttatagtacaagaaaaattcatcaaaaatataaaagaaagcaatattgaccaatgagatctattgaattttacagaagactccatccaatgacagcagaatgcagattctttgtatgcactcatcaaacttgtaacaaaatagaacatatcctgggccataaaagcaaaacttgggaaatgttaactaattgaaatcatgcagtatgttctctgaccacagtggaacaaacgaatagcagaattagaatcaatagcagaaagaacaggaaaacatccaagtgcttgaaattaacaacatacttctaaa

SEQ ID NO: 144394 - DNA, 711 bp, Homo sapiens
gccatgcagttctttacaggaggggctttatttccataagcagtggctcttcagccttctgttgaattccctgggcctgtttctagctgagtgacttagctttctgccaggtgtgacttgtccctgtggataccctgggaggagtggagatctggctcggtgaagcgtgtcctcacttgctccactgtcttgcctttcgtcattctttttccccttctgtgacaaggcttgtccatcccactgcaaaggatgcagtgggtttatctttggccttgatttttatccccggagttggatgaaacaattgtgaactttattttcctttatgtggaccaaacagcgacttaccttactaataactgaaataatacagattatttacaacattcttttcacgaggtaaacagcgtcaactcatcagcttctgagagttgaaccttattggggctagttctatacttcctcaagcaagaagaatgaccaaaaattgctctgtctttctcttaaagattcttggttccttaaaattcgttttaattaattttagtatgctgtgcctcaagcaagcttaatataagagaatctagatttacagaagaagatatattagggaatgtttttattttatggaaagatacttgattggatccactaaagttcggaaaatataacttcattgattaaaatgtgacactgtcatcaccaatttat

SEQ ID NO: 144395 - DNA, 513 bp, Homo sapiens
ccaattggctatactcagcttgcaccacagtcaaaccctcaagggaaataaagtaaaaacaaaaaagctccatccaaaggacaaaggacagcaacatcaaaagataaaggaacacctgccctcacagatgagaaggaaccagcacaagaactctgacaattctaaaacccagagtgtgttcttacctccaaatgatctcactagctccccagcaatggttgttaatcaaattaaagcagctgaaatgacagaattcagaatctggatggtaagaaagctcaatgaaatacaggagaaagttgaaactcaatccagggaaaacagtaaaatgatccaagagttgaaagatgacacagccattttaagaaagaaccaaactgaacttctagaattgaaaaatttactacgggaattccataatacaactagaagcattaataacaacagatcaatctgaggaaagagtctcagagctcaaagaccactccaattgaatcaatgcaggcagacaaa

SEQ ID NO: 144396 - DNA, 349 bp, Homo sapiens
ttaattatactgatttcctaaacttgaaaagattatgttaattcaagagcagtagagctccccgctttcccttcagttttcaccaaaatgcatgccagtatcttctatatttgtctctgtataccatctgcaagcagtaattctgatcatatacaattttttattttggatattcttagtttcatgaaaaataatctcttctaggcatttacttgtaacttgtatcaggcttcataacatgtaattaaacatttttattggaataaaaatttcaaagttaaacatatatatgttaaatgtacagttaaataagttttgctaaatgcattcaccacactaataaccacca

SEQ ID NO: 144397 - DNA, 437 bp, Homo sapiens
ctccttggcctcccaaagtgctgggataacaggcatgacccaccacgcctggccgggttgataggggttttcagccttacctacacatgcaaatctcctttccctctgtaatccccaaatttagactttaattctcctgtctttcaaggggagttgccttactctgtgtgggttcagggtgagggaaacttttcagccagtttatgtcattgaagtacattgaagtttatcagggaatttctaataatagtaaacttaaaatggaaggccttggagttgtagttgtttaccagaagagtttttggctttttctgcatacttctacacacctcttacctcccttcctaattgatagagacagatttttatcaggtcacacatggaatctgctactccctttgaattcaggtctgtttgcttcaacgacgtaactgaga

SEQ ID NO: 144398 - DNA, 107 bp, Homo sapiens
tgtcaggactgatctcaggaacagagctacatggtatcagcacagcctctaaagcctgtacagatagacattcacaaggcagagattgcccgtgcactgaattttcc

SEQ ID NO: 144399 - DNA, 428 bp, Homo sapiens
tttgcggcctcatattaagagtttagaataaacaggtggaatatacaaattgaatttatgaatgcttatggcattgaaattactttcaagccacaaatgtaaaattatatataaaaaagtgagagcagcataatactacacaataggaagaaaactggactggaggttttggggacttggactcttgtctggcctgcataaactggctgctaaataacatctctgaaatggagttttcttatctgtgaaaagaaggtattaatatagctagtatttaagattactcagcactgagattatgaaatggtgtctggaatattatattgcatttataaaacacatgtttttaaataacacttaaatattatgcaatgatacagctacataatacaaatgtcatagaaagcttcaaagaacctatgagtaga

SEQ ID NO: 144400 - DNA, 280 bp, Homo sapiens
tgtgcatgtgtctttgcacccatgaatgggcgtgcccaccagaggaccccccccagaggtgaactggctaggcaaaacgtttgtgtgtttaaactgggataggtgttgtcggttgctcctcaaagaggttacaccatcgtgtgtgccccccatgatgggtgggtacacctgcttcccatgcccttatttggccaactttggtgattacactcatacttgtaacccactgagggcagctctaacagcatgatcaaagaataatgattgccttgggaggccg

SEQ ID NO: 144401 - DNA, 712 bp, Homo sapiens
tgactttctgaaggtagaatttgtattagtccggcagttaataaagtggtaggcataatatatgtttcttatacatcttcaggaagaaattttctttatcatctctgttttcctttgaagataggctctgtcctagtcagtgatctttcttaagagagaagtgaaacttctgatttccagtttctggtagtagaggactaagtcattcaagggaaccaagttccccctgaaaactactaaaaaatgctagataaaacataaaaaccttgtctttaaaagcaccaataaactaacaaggtattttaccaagccaaaaggaaaatggggacctagagaagtggagcccagaagccagttgtgccctgacagcatttactaatctgagaaaatgtgaattttctatttaataaccccaaaggtaaagggacaaaaatcaccaactaagatatgcacaaagtggggagtctaaaagagacccttcagctgggactccatgttgacaggtctcagcccctgactagactgatatggttccagagtgatgctgcctccaggtgtctggcagaggcagcgcaggcccaccctgaaggaaaggaactttacttagccttcgaattactcttacaagtaatttctgtccctcaatgagacacacaaggaaaccaggaactatgagcaagagccagaataagcgtcagaaatcacctttgca

SEQ ID NO: 144402 - DNA, 303 bp, Homo sapiens
atccagcttgctgtattagggaaatacaaatagacatgttccaaaaatggtattgccattgatcattggtataatatggatactagaatttcagagtggtaagcgtattttaaaaaatggaatgtaactgcctaaaagtccatacacaaccatgagtttagccctttcaacatccttagggaatgaactttaattctggagcatttccactggacctctagcaggcaaaggcagtaacttttaattctggtcatctcccccattccctttattaaaaatgtgaaatacttctaggaggaggag

SEQ ID NO: 144403 - DNA, 328 bp, Homo sapiens
cagctccaaggtaaacactaggatcagcggctcctgcctgaatgtgaatggctgaggccatctgcattgcttgcaaaccactgagccatcgtgcaccatttccattagttttatttcactttccgatctttttttggtcaaaaacatctgacctcactgacagtaggaaacacagctataggtaagtgtgcatttcatttccacttcattttcctcagttacgtcctggattttttttttttcctgagactgggtcttgctctgttgcccaggctggagtgcactggtgtgatctcggctcactgcaacctccgcctcccgggttcaa

SEQ ID NO: 144404 - DNA, 292 bp, Homo sapiens
tgtaatctcagcagtatctggctgtcagcaaggaggtggcataatggactataatcattttgcacagagtaaggacaggtctagcagaaaatgtttaattctaggtgatggctcttgcagagtcagtaaagggcacgtactaataaggaactgcaaaaagtaccggtgacgacatgcttgccttgaagagcaagctcagcagattttccacagctaatagaaccattaccgctacatgtcaagctatgagaaataccaaaggacataggcatcggagtgaaagagataagaa

SEQ ID NO: 144405 - DNA, 732 bp, Homo sapiens
cttttcccaaataaggtcacattcacaagttctgggtgttaggacataaacatatatttttgaagttcacccttcaacccattataccaccatgtcccctatctcactttcctttctaccagattcactttacaacactccaaacaaggagtttcaggtttgtagtcatgacacattcgtcattttatgtcaatatatgctgtttatgaacaactctaaaggttaaaaattattcattctattgagctaaatctattctggtataatatttgagaacacattctagatctctcctgcacagttaataggggttaagaaagactagtcccatgattctcaggttgagggagaataacacatgcactgcctctccaccattctgacacggcattataggaggtgtaagatcctctctaacaccagccccgcaaaacctcagacttaatgaacagttcatgacattgtgagccagttgtgatggaaatgtaatgaatcccctccaggagggttgggagcaaacaaaaaagactgaggaacagcaatttcagtcttcctcatgatagccattcagatgaagacaactactatattttcctgagtctgttcttttccaagatcaacacctttaattttaattattccccatgacatggcttttattctattcattcagcaaatatttattgagggcctaatatgtgccaggcagtctagtaggtattagaatgatgc

SEQ ID NO: 144406 - DNA, 255 bp, Homo sapiens
aggcaggggctgtgggaagccttgctgacgcacaacatggtggctggctgcagactggaggaggtagacaatgcctatggccattatgaagctttctccaccctggctcccaaggcttggctgtccgtggagctagctgagccatgcgtgcctgagccagggctacctcctgtctttgccaatttcatccagctgctatcagcgcagtggtggtgaccgagggtggcacagcctggcttgagtggtggcatgtgc

SEQ ID NO: 144407 - DNA, 400 bp, Homo sapiens
caaaaaagctgttgaaccagtacaggaataaaagagcagatcaactgataaaactgcacccacaagcaaattaatgtacaaatgggaacctcatataggtaaggattgtgttttgaattgagggagagactcatcaataaatacatggtattgagacaaccacccagccattgaaaaattgaccttagatatctgccttgcactattcttggaaaacacattccaaggtgattaaaatctgagatgcaaattttaaactacatcaaaatttcaaacttctaagcgacaaaagaaatcatgaacaaataaagacaagtgagaagctacttgcaacatgcacagtcgcccacccccccaaccttgagggatccattccaagattccctagtggatgcctgaa

SEQ ID NO: 144408 - DNA, 450 bp, Homo sapiens
ctattacaatgatgtgatcattgtagcataatatataatatcactataaggcagtatagcccgatgtgtagtcagactgcctggattggaatggggctccatcactcactagcattgagaccttgggcaaattgcttaaccctctctgtctcaatttcttcattgaaaaatgagtataataatagtatccatcttgtgagattgcaatggggataaaaggagatgatatgcataaggtgctttgaacagttcctgatgcagtgagcacttagctaatatgcttactatggcaatctgattgctgggacaggaatagaattacatacatgtaaaaggattatggttggttgatatctttttcttgttttatatggggacgaagttaagaagtttagggatgaggggacaggagtttcaaatcagctcagttctgtctcattccccaaggaa

SEQ ID NO: 144409 - DNA, 372 bp, Homo sapiens
aggtggtgtatgtgggtcatgggttgggggggatccatgagaaagggaatttatgcaggaactgacaggtgggtttattgctttaatttacagagttaaaaggttgctttaagtgggatagaaaaaccttgaagaaagttcatagcaggtcatcagtggtgaagggaaccagtccaaagtggtgccagcacccatctaagttcagagacatttgatggactaagtcaggaccctaaactgaaggcacccctggggactccagtcagggcctagaatttttccagggggatgacccaggtaaaatttgagtcacttgataaaccctccacttttcaaagtcctcttcccttttccaggccactatggacaact

SEQ ID NO: 144410 - DNA, 102 bp, Homo sapiens
atatatgaccatatgtggcctgtaaatggagcaaaaattatatttatttttagtaaggttttcaagttgctgttgtgacataaaatatgaaataagaaacat

SEQ ID NO: 144411 - DNA, 768 bp, Homo sapiens
gctatatcactcaggctggtcttgaactcctagacttcagtgatcctcccgccttagccccgcaagtagatgggattacaggtgcaagccactgtgcccggtttctgcatattttaatatgccagtccctatgcaaggtctgggattccaaaacgtcatgttgtccttgaggccgctgatattatcatctgctggccacctgacacttggcagcttgtagcagtggctagagaatcttttatgaaggatgagacctggattcaacaaaatttctgcacaaactcaccatgtgactttaggaaaaccatcttttctctctgggtctcattttccccatctgtacaatgaaagggttggattctaaaggccttgcatggccaggtgcggtggctcatgctgtaatcccaacactttgggaggccaagctgaggcaggtggatcgcctgaggtcaggagtttgagaccagcattgaccaacatggtgaaacaccatctctactaaaaatacaaaaaattagccaggtgttgtggtgggtgcctgtaatcccagctactcaggaggctgaagcaggagaatcgcttgaacctgtgaggcagaggttgcagtgagccgagatcgcgccattgcactccagcctgggcgataaaagcaagactccgtctcaaaataaaataaaataaaattaaattaaaattaaaaaataaagcccttgcacatcctctggttgctgtgttgctctgtagtctgggaaaacagcagaaagaaag

SEQ ID NO: 144412 - DNA, 268 bp, Homo sapiens
tttttatatgccaaactaagaaagtatgtagggatagaaaagcccagctaagatatatagtctgggacattttgtggagaaatgcatcgaccttcaacttgtccctcaccctccctatactgactcattggtgattcccaaagttaggtgtcaggctttgaacacatgaggcaggtccttctttcctttttttaattttgtttttgtggctggttaaatttttctaattatttcggctagtattaaaaaagtgtttttcagctgggtg

SEQ ID NO: 144413 - DNA, 261 bp, Homo sapiens
ctggctctcccttttccagctctatggactgcacaaaagtataatactatctaacttctcggcatttctgttttttcaccaataaaaaaaatgaaggtaacaataccccctcagaagataacatgcgagcaagatggaagcacagacctggcacaggcccattctttactctgagtcaagtctagtctccttagggacagggcatcaataagggacccctcagcaccttgcacgattcatttagttctcaggaattcattt

SEQ ID NO: 144414 - DNA, 839 bp, Homo sapiens
ttcaagaccaacttgaaccagagtcttgaatctgcaactttactagctgtggcttctttttaattgattaactttctttttctgtaaaatgggaataatgattcctacctcttacaagcgttgtggtaggaggtattccaaatgagataaatatgtgaaatcactaaaacttccagaatacatggaaataatatatgtctgtattggcaaattatgagtgtagtaatgagggatttacatggacacatttacattctttagttcagactccctttgacgacacataacaaacacacacaagaatatttgccctgtgtccagcactcttttgagaatttctctcttctcctccttctgatatcccaaccaaccaaccagtaggaatgtgccctagaaactatgttttacagctcagtccacatcttttcaccttacaaattacttattgttagtttcttgggaaagtaaaattgagatattaagattctatgaaattggttggtggtattgaagactgtgctgctgctgctgctactgctccagaactctagtggagatattacaaatgggagcagaaaaagtgagaaggtggtctgtagagacagagcacagcacagaggtagaaaggttgagataaagaaacaatgcagtgagagaaggagagaacacagacatagaaacagagacataaaggcaccagacacgagagcagagataatttaataaggccgtagtttctcttggatttccagttccttcttttagtcagttctgatatttagcacactgcactgcaccagatatcttgtcgccttcaaataaagtatttttccccctta

SEQ ID NO: 144415 - DNA, 1170 bp, Homo sapiens
agaagaagcttttgagttgaataacgagttccacgttccaggccaagtcatgctttcagtctcctgtttaaaagtctatcaagttttggggcataagggtgggaggaaaataaaaccaaggcccctttgtcagcatacagcttcagtagataccccaaattcttgaaatctgtatagcagactgctggttttttctccttgtcagagcccagcccactgacactttacagttgacagcccagcccagatatgggccgctgtggcttctatcgaatcatgcttgggattgccacagttttcttctttggattggggcttgaggtggttgggaagaatgcatgccaaccagccctgcatctgggacttggagcctgtcagctccctgctctttgataatggaatagtctgtggacttcttcccatttgtgagagaaaactcccccttagaactcaactggtagagcttctcatagcttacagttccaagcaatagcttggttgtaggtccaggcaggactctgacatggccctctggaatagcattgatgtgttgggttctttgctaagatgatttccagtctgtgttccagggagattcaggaaagctgaagttcattcttagaacctaggtctgtgtttgttgttttgttttgtttaaaaaaaaaaaaaaaaaccttgcctgatcttaagtgccagctgggaacttgttcagcatccacatgccagggcctcttgtcaccctcatttagttagaatttccaggggagggaccaggaaatctgtatgctccaacaggtgctccaaacaggcaggcttgggaaatgctacactaggtagccacccattttccttgttcagaaaaaccttaatctcttcctgtccatgtgtggtatatggctgccatgtagccagcaaccacatcaggctgtagaagacacttgctattcctttgttttacctcggttgcatccagtgctccgggcctttgcttcccagtacagctgaccaaccacacggcttccaaggacttgcccccttgtttccatgataacagccaatcgcataaatccatgtggggtgcaaaacatggttatgggtttcagtgatatatctctcaagaatgcttatcttttaacccaggaatgcaaataaaaatttgtatgaatttta

SEQ ID NO: 144416 - DNA, 838 bp, Homo sapiens
agaagaagcttttgagttgaataacgagttccacgttccaggccaagtcatgctttcagtctcctgtttaaaagtctatcaagttttggggcataagggtgggaggaaaataaaaccaaggcccctttgtcagcatacagcttcagtagataccccaaattcttgaaatctgtatagcagactgctggttttttctccttgtcagagcccagcccactgacactttacagttgacagcccagcccagatatgggccgctgtggcttctatcgaatcatgcttgggattgccacagttttcttctttggattggggcttgaggtggttgggaagaatgcatgccaaccagccctgcatctgggacttggagcctgtcagctccctgctctttgataatggaatagtctgtggacttcttcccatttgtgagagaaaactcccccttagaactcaactggtagagcttctcatagcttacagttccaagcaatagcttggttgtaggtccaggcaggactctgacatggccctctggaatagcattgatgtgttgggttctttgctaagatgatttccagtctgtgttccagggagattcaggaaagctgaagttcattcttagaacctaggtctgtgtttgttgttttgttttgtttaaaaaaaaaaaaaaaaaccttgcctgatcttaagtgccagctggaattttttaaagattccatttccgaggcctttttgcccccttttttaattaaaattttccggggggggtacatgaaatttttattctgcaaccgggggctcaaaaaaggcggcttgggaaactctaacactgggaacc

SEQ ID NO: 144417 - DNA, 444 bp, Homo sapiens
gaactccttacccttactgtggtgctttagtattttgttgacagaaagcatttaaagcaaatatcacaaaactatatataaaaaaaaaatcacaaaactatacatcaaaaaatttaaaaaggcttttatattttgttctctggacttttctgtattttttcttttttctttttttttgagacagagttttgctcttgttgcccaggcgggagtgcaatgatgtgctctcggctcactgcaacctccgcctcccgggttcaagtgattctcctgccacagcctcccaaatagctgggattacaggcatgcgccaccacgcccagctaatattgtatttttagtagagatggggtttagctgtgttggtcaggctggtctcaaactcctgacctcaggtgatccacctgccttggcctcccaaagtgctgggattacaggtgtgag

SEQ ID NO: 144418 - DNA, 387 bp, Homo sapiens
gcgctacctacagaagggtccatacagctttgttgtgaattcccgtcgtaacttaaagggaaactttcacaatgtctggagcccttgatgtcctgcaaatgaaggaggatgtccttaaattccttgcagcaggaacccacttacgtggcgccaatcttgacttccaaatggaacagtacatctataaaaggaaaagtgatgtgatctacatcataaatctgaagaggacctgggagaagcttctgctggcagctcgtgccattgttgccattgaaaaccctgctgatgtcagtgttatatcctccaggaatactggctagagggccaagctgacgtttgctgctgccactggagccactccaattgctggccgcttcactcctgaaa

SEQ ID NO: 144419 - DNA, 2604 bp, Homo sapiens
  misc_feature (2)..(2): n is a, c, g, or t
  misc_feature (4)..(5): n is a, c, g, or t
  misc_feature (7)..(7): n is a, c, g, or t
  misc_feature (11)..(11): n is a, c, g, or t
tnanncntganccacagaagctgctcagggactatccatggcctccccgtggccaacttgagtctgctctgcagctttaggcccgacttggaaggcccatgggctgcagatgaggaaactgaggtccagacagccgaagagtggtagtgtccaggacacacaactgggccggcggcggcggctgccccgagggacgcggccctaggcggtggcgatggggaccgcccggatcgcacccggcctggcgctcctgctctgctgccccgtgctcagctccgcgtacgcgctggtggatgcagatgacgtcatgactaaagaggaacagatcttcctgctgcaccgtgctcaggcccagtgcgaaaaacggctcaaggaggtcctgcagaggccagccagcataatggaatcagacaagggatggacatctgcgtccacatcagggaagcccaggaaagataaggcatctgggaagctctaccctgagtctgaggaggacaaggaggcacccactggcagcaggtaccgagggcgcccctgtctgccggaatgggaccacatcctgtgctggccgctgggggcaccaggtgaggtggtggctgtgccctgtccggactacatttatgacttcaatcacaaaggccatgcctaccgacgctgtgaccgcaatggcagctgggagctggtgcctgggcacaacaggacgtgggccaactacagcgagtgtgtcaaatttctcaccaatgagactcgtgaacgggaggtgtttgaccgcctgggcatgatttacaccgtgggctactccgtgtccctggcgtccctcaccgtagctgtgctcatcctggcctactttaggcggctgcactgcacgcgcaactacatccacatgcacctgttcctgtccttcatgctgcgcgccgtgagcatcttcgtcaaggacgctgtgctctactctggcgccacgcttgatgaggctgagcgcctcaccgaggaggagctgcgcgccatcgcccaggcgcccccgccgcctgccaccgccgctgccggctacgcgggctgcagggtggctgtgaccttcttcctttacttcctggccaccaactactactggattctggtggaggggctgtacctgcacagcctcatcttcatggccttcttctcagagaagaagtacctgtggggcttcacagtcttcggctggggtctgcccgctgtcttcgtggctgtgtgggtcagtgtcagagctaccctggccaacaccgggtgctgggacttgagctccgggaacaaaaagtggatcatccaggtgcccatcctggcctccattgtgctcaacttcatcctcttcatcaatatcgtccgggtgctcgccaccaagctgcgggagaccaacgccggccggtgtgacacacggcagcagtaccggaagctgctcaaatccacgctggtgctcatgcccctctttggcgtccactacattgtcttcatggccacaccatacaccgaggtctcagggacgctctggcaagtccagatgcactatgagatgctcttcaactccttccagggattttttgtcgcaatcatatactgtttctgcaacggcgaggtacaagctgagatcaagaaatcttggagccgctggacactggcactggacttcaagcgaaaggcacgcagcgggagcagcagctatagctacggccccatggtgtcccacacaagtgtgaccaatgtcggcccccgtgtgggactcggcctgcccctcagcccccgcctactgcccactgccaccaccaacggccaccctcagctgcctggccatgccaagccagggaccccagccctggagaccctcgagaccacaccacctgccatggctgctcccaaggacgatgggttcctcaacggctcctgctcaggcctggacgaggaggcctctgggcctgagcggccacctgccctgctacaggaagagtgggagacagtcatgtgaccaggcgctgggggctggacctgctgacatagtggatggacagatggaccaaaagatgggtggttgaatgatttcccactcagggctggggccaagaggaaaaacagggaaaaaaagaaaaaaaaacaacaagaaacacaggaaaacaaaaaaaaaaaataaaaaaaaaacaataaaaacaaaaaaaacaacaaaacaaaaacaaaacacaacaaaacaaaaacaaaaaaacaaaacaataaaacagaaacaaaagagaaccgggggcggcggcgctctacattatctatctctcctcctccgagcgggggccagaacacctagttaccgccgcgcactccgcgtttttcttttggttaatgaaaagggcgcccgcctccccaaattagagagaacggttcgttcattatttaatgcacgagcgagagaggcggggcgtggccgagcttttaataaccaaccgtagaggactagcgcgttgtgagaacccaaaacatccaggctcgcgcggctgcggcctcattttctgcagaggacaagaagcagcccccttcagttgagggcgtgggcgtcgaacatactatgatgggagacacaccaaccagagg

SEQ ID NO: 144420 - DNA, 2593 bp, Homo sapiens
cgctgctcgctcgctcgctcgctcgctcgccctcagcgcatgggccccgcgccgggccccggggcctcgggccgccgggacgccggggtcccataggccggggcgtgggcggggcggccagcctgacgcagctctgcaccccctaccaccaccagggccggcggcggcggctgccccgagggacgcggccctaggcggtggcgatggggaccgcccggatcgcacccggcctggcgctcctgctctgctgccccgtgctcagctccgcgtacgcgctggtggatgcagatgacgtcatgactaaagaggaacagatcttcctgctgcaccgtgctcaggcccagtgcgaaaaacggctcaaggaggtcctgcagaggccagccagcataatggaatcagacaagggatggacatctgcgtccacatcagggaagcccaggaaagataaggcatctgggaagctctaccctgagtctgaggaggacaaggaggcacccactggcagcaggtaccgagggcgcccctgtctgccggaatgggaccacatcctgtgctggccgctgggggcaccaggtgaggtggtggctgtgccctgtccggactacatttatgacttcaatcacaaaggccatgcctaccgacgctgtgaccgcaatggcagctgggagctggtgcctgggcacaacaggacgtgggccaactacagcgagtgtgtcaaatttctcaccaatgagactcgtgaacgggaggtgtttgaccgcctgggcatgatttacaccgtgggctactccgtgtccctggcgtccctcaccgtagctgtgctcatcctggcctactttaggcggctgcactgcacgcgcaactacatccacatgcacctgttcctgtccttcatgctgcgcgccgtgagcatcttcgtcaaggacgctgtgctctactctggcgccacgcttgatgaggctgagcgcctcaccgaggaggagctgcgcgccatcgcccaggcgcccccgccgcctgccaccgccgctgccggctacgcgggctgcagggtggctgtgaccttcttcctttacttcctggccaccaactactactggattctggtggaggggctgtacctgcacagcctcatcttcatggccttcttctcagagaagaagtacctgtggggcttcacagtcttcggctggggtctgcccgctgtcttcgtggctgtgtgggtcagtgtcagagctaccctggccaacaccgggtgctgggacttgagctccgggaacaaaaagtggatcatccaggtgcccatcctggcctccattgtgctcaacttcatcctcttcatcaatatcgtccgggtgctcgccaccaagctgcgggagaccaacgccggccggtgtgacacacggcagcagtaccggaagctgctcaaatccacgctggtgctcatgcccctctttggcgtccactacattgtcttcatggccacaccatacaccgaggtctcagggacgctctggcaagtccagatgcactatgagatgctcttcaactccttccagggattttttgtcgcaatcatatactgtttctgcaacggcgaggtacaagctgagatcaagaaatcttggagccgctggacactggcactggacttcaagcgaaaggcacgcagcgggagcagcagctatagctacggccccatggtgtcccacacaagtgtgaccaatgtcggcccccgtgtgggactcggcctgcccctcagcccccgcctactgcccactgccaccaccaacggccaccctcagctgcctggccatgccaagccagggaccccagccctggagaccctcgagaccacaccacctgccatggctgctcccaaggacgatgggttcctcaacggctcctgctcaggcctggacgaggaggcctctgggcctgagcggccacctgccctgctacaggaagagtgggagacagtcatgtgaccaggcgctgggggctggacctgctgacatagtggatggacagatggaccaaaagatgggtggttgaatgatttcccactcagggctggggccaagaggaaaaacagggaaaaaaagaaaaaaaaacaacaagaaacacaggaaaacaaaaaaaaaaaataaaaaaaaaacaataaaaacaaaaaaaacaacaaaacaaaaacaaaacacaacaaaacaaaaacaaaaaaacaaaacaataaaacagaaacaaaagagaaccgggggcggcggcgctctacattatctatctctcctcctccgagcgggggccagaacacctagttaccgccgcgcactccgcgtttttcttttggttaatgaaaagggcgcccgcctccccaaattagagagaacggttcgttcattatttaatgcacgagcgagagaggcggggcgtggccgagcttttaataaccaaccgtagaggactagcgcgttgtgagaacccaaaacatccaggctcgcgcggctgcggcctcattttctgcagaggacaagaagcagcccccttcagttgagggcgtgggcgtcgaacatactatgatgggagacacaccaaccagagg

SEQ ID NO: 144421 - DNA, 2543 bp, Homo sapiens
  misc_feature (2)..(2): n is a, c, g, or t
  misc_feature (4)..(5): n is a, c, g, or t
  misc_feature (7)..(7): n is a, c, g, or t
  misc_feature (11)..(11): n is a, c, g, or t
tnanncntganccacagaagctgctcagggactatccatggcctccccgtggccaacttgagtctgctctgcagctttaggcccgacttggaaggcccatgggctgcagatgaggaaactgaggtccagacagccgaagagtggtagtgtccaggacacacaactgggccggcggcggcggctgccccgagggacgcggccctaggcggtggcgatggggaccgcccggatcgcacccggcctggcgctcctgctctgctgccccgtgctcagctccgcgtacgcgctggtggatgcagatgacgtcatgactaaagaggaacagatcttcctgctgcaccgtgctcaggcccagtgcgaaaaacggctcaaggaggtcctgcagaggccagccagcataatggaatcagacaagggatggacatctgcgtccacatcagggaagcccaggaaagataaggcatctgggaagctctaccctgagtctgaggaggacaaggaggcacccactggcagcaggtaccgagggcgcccctgtctgccggaatgggaccacatcctgtgctggccgctgggggcaccaggtgaggtggtggctgtgccctgtccggactacatttatgacttcaatcacaaaggccatgcctaccgacgctgtgaccgcaatggcagctgggagctggtgcctgggcacaacaggacgtgggccaactacagcgagtgtgtcaaatttctcaccaatgagactcgtgaacgggaggtgtttgaccgcctgggcatgatttacaccgtgggctactccgtgtccctggcgtccctcaccgtagctgtgctcatcctggcctactttaggcggctgcactgcacgcgcaactacatccacatgcacctgttcctgtccttcatgctgcgcgccgtgagcatcttcgtcaaggacgctgtgctctactctggcgccacgcttgatgaggctgagcgcctcaccgaggaggagctgcgcgccatcgcccaggcgcccccgccgcctgccaccgccgctgccggctacgcgggctgcagggtggctgtgaccttcttcctttacttcctggccaccaactactactggattctggtggaggggctgtacctgcacagcctcatcttcatggccttcttctcagagaagaagtacctgtggggcttcacagtcttcggctggggtgctgggacttgagctccgggaacaaaaagtggatcatccaggtgcccatcctggcctccattgtgctcaacttcatcctcttcatcaatatcgtccgggtgctcgccaccaagctgcgggagaccaacgccggccggtgtgacacacggcagcagtaccggaagctgctcaaatccacgctggtgctcatgcccctctttggcgtccactacattgtcttcatggccacaccatacaccgaggtctcagggacgctctggcaagtccagatgcactatgagatgctcttcaactccttccagggattttttgtcgcaatcatatactgtttctgcaacggcgaggtacaagctgagatcaagaaatcttggagccgctggacactggcactggacttcaagcgaaaggcacgcagcgggagcagcagctatagctacggccccatggtgtcccacacaagtgtgaccaatgtcggcccccgtgtgggactcggcctgcccctcagcccccgcctactgcccactgccaccaccaacggccaccctcagctgcctggccatgccaagccagggaccccagccctggagaccctcgagaccacaccacctgccatggctgctcccaaggacgatgggttcctcaacggctcctgctcaggcctggacgaggaggcctctgggcctgagcggccacctgccctgctacaggaagagtgggagacagtcatgtgaccaggcgctgggggctggacctgctgacatagtggatggacagatggaccaaaagatgggtggttgaatgatttcccactcagggctggggccaagaggaaaaacagggaaaaaaagaaaaaaaaacaacaagaaacacaggaaaacaaaaaaaaaaaataaaaaaaaaacaataaaaacaaaaaaaacaacaaaacaaaaacaaaacacaacaaaacaaaaacaaaaaaacaaaacaataaaacagaaacaaaagagaaccgggggcggcggcgctctacattatctatctctcctcctccgagcgggggccagaacacctagttaccgccgcgcactccgcgtttttcttttggttaatgaaaagggcgcccgcctccccaaattagagagaacggttcgttcattatttaatgcacgagcgagagaggcggggcgtggccgagcttttaataaccaaccgtagaggactagcgcgttgtgagaacccaaaacatccaggctcgcgcggctgcggcctcattttctgcagaggacaagaagcagcccccttcagttgagggcgtgggcgtcgaacatactatgatgggagacacaccaaccagagg

SEQ ID NO: 144422 - DNA, 2482 bp, Homo sapiens
  misc_feature (2)..(2): n is a, c, g, or t
  misc_feature (4)..(5): n is a, c, g, or t
  misc_feature (7)..(7): n is a, c, g, or t
  misc_feature (11)..(11): n is a, c, g, or t
tnanncntganccacagaagctgctcagggactatccatggcctccccgtggccaacttgagtctgctctgcagctttaggcccgacttggaaggcccatgggctgcagatgaggaaactgaggtccagacagccgaagagtggtagtgtccaggacacacaactgggccggcggcggcggctgccccgagggacgcggccctaggcggtggcgatggggaccgcccggatcgcacccggcctggcgctcctgctctgctgccccgtgctcagctccgcgtacgcgctggtggatgcagatgacgtcatgactaaagaggaacagatcttcctgctgcaccgtgctcaggcccagtgcgaaaaacggctcaaggaggtcctgcagaggccagccagcataatggaatcagacaagggatggacatctgcgtccacatcagggaagcccaggaaagataaggcatctgggaagctctaccctgagtctgaggaggacaaggaggcacccactggcagcaggtaccgagggcgcccctgtctgccggaatgggaccacatcctgtgctggccgctgggggcaccaggtgaggtggtggctgtgccctgtccggactacatttatgacttcaatcacaaaggccatgcctaccgacgctgtgaccgcaatggcagctgggagctggtgcctgggcacaacaggacgtgggccaactacagcgagtgtgtcaaatttctcaccaatgagactcgtgaacgggaggtgtttgaccgcctgggcatgatttacaccgtgggctactccgtgtccctggcgtccctcaccgtagctgtgctcatcctggcctactttaggcggctgcactgcacgcgcaactacatccacatgcacctgttcctgtccttcatgctgcgcgccgtgagcatcttcgtcaaggacgctgtgctctactctggcgccacgcttgatgaggctgagcgcctcaccgaggaggagctgcgcgccatcgcccaggcgcccccgccgcctgccaccgccgctgccggctacgcgggctgcagggtggctgtgaccttcttcctttacttcctggccaccaactactactggattctggtggaggggctgtacctgcacagcctcatcttcatggccttcttctcagagaagaagtacctgtggggcttcacagtcttcggctggggtgctgggacttgagctccgggaacaaaaagtggatcatccaggtgcccatcctggcctccattgtgctcaacttcatcctcttcatcaatatcgtccgggtgctcgccaccaagctgcgggagaccaacgccggccggtgtgacacacggcagcagtaccggaagctgctcaaatccacgctggtgctcatgcccctctttggcgtccactacattgtcttcatggccacaccatacaccgaggtctcagggacgctctggcaagtccagatgcactatgagatgctcttcaactccttccagggattttttgtcgcaatcatatactgtttctgcaacggcgaggtacaagctgagatcaagaaatcttggagccgctggacactggcactggacttcaagcgaaaggcacgcagcgggagcagcagctatagctacggccccatggtgtcccacacaagtgtgaccaatgtcggcccccgtgtgggactcggcctgcccctcagcccccgcctactgcccactgccaccaccaacggccaccctcagctgcctggccatgccaagacgatgggttcctcaacggctcctgctcaggcctggacgaggaggcctctgggcctgagcggccacctgccctgctacaggaagagtgggagacagtcatgtgaccaggcgctgggggctggacctgctgacatagtggatggacagatggaccaaaagatgggtggttgaatgatttcccactcagggctggggccaagaggaaaaacagggaaaaaaagaaaaaaaaacaacaagaaacacaggaaaacaaaaaaaaaaaataaaaaaaaaacaataaaaacaaaaaaaacaacaaaacaaaaacaaaacacaacaaaacaaaaacaaaaaaacaaaacaataaaacagaaacaaaagagaaccgggggcggcggcgctctacattatctatctctcctcctccgagcgggggccagaacacctagttaccgccgcgcactccgcgtttttcttttggttaatgaaaagggcgcccgcctccccaaattagagagaacggttcgttcattatttaatgcacgagcgagagaggcggggcgtggccgagcttttaataaccaaccgtagaggactagcgcgttgtgagaacccaaaacatccaggctcgcgcggctgcggcctcattttctgcagaggacaagaagcagcccccttcagttgagggcgtgggcgtcgaacatactatgatgggagacacaccaaccagagg

SEQ ID NO: 144423 - DNA, 814 bp, Homo sapiens
ccctggaaccagcccctgacagggacctaggaggcttccctggaccccagtgtcagagctacagaggccggaggaccagctgatccacactccagcccagaaaggaaaaccaagggctcaaggagccacccagagatgcagtgacagagcagagcctatggccgtggctgccaggccttgccccgccccactagggtgcagcctccagacgcagccccctcactcccacagctcaacttcatcctcttcatcaatatcgtccgggtgctcgccaccaagctgcgggagaccaacgccggccggtgtgacacacggcagcagtaccggtgagcccaccatgcctgccatgccctggctcctcaggggtccctgagtcctggtaccatgtaccccaggaaagacagtggccccatgaatgatcctggggcaagggaaaggacccagcgtctgactccctggctgtcctcacccacctggcctgcccagcagtgatgggaggccctagggcaccccaaagccagcctgcccacttgtaccaggccctgcactagagctggagtctgtgagtgtgcaacgaacttgaacctctcctcaaagagttggttgcagggggtctgaggaacaggtaggcggtgagtggccccgggaaggctgcagctcagctgaaacctgaggagcggactgtgggatagtgaggttcgaccgtggaggggagtgcttgccagctgagggctccacaggtgcgaagggcccagggacagggggactgtcatttgaagtccgctccgggacaccgctgagaaccaacgggccc

SEQ ID NO: 144424 - DNA, 2484 bp, Homo sapiens
gggcggtacggtccggagtttttgggatggagcggcagacgccgagggccggcggcggcggctgccccgagggacgcggccctaggcggtggcgatggggaccgcccggatcgcacccggcctggcgctcctgctctgctgccccgtgctcagctccgcgtacgcgctggtggatgcagatgacgtcatgactaaagaggaacagatcttcctgctgcaccgtgctcaggcccagtgcgaaaaacggctcaaggaggtcctgcagaggccagccagcataatggaatcagacaagggatggacatctgcgtccacatcagggaagcccaggaaagataaggcatctgggaagctctaccctgagtctgaggaggacaaggaggcacccactggcagcaggtaccgagggcgcccctgtctgccggaatgggaccacatcctgtgctggccgctgggggcaccaggtgaggtggtggctgtgccctgtccggactacatttatgacttcaatcacaaaggccatgcctaccgacgctgtgaccgcaatggcagctgggagctggtgcctgggcacaacaggacgtgggccaactacagcgagtgtgtcaaatttctcaccaatgagactcgtgaacgggaggtgtttgaccgcctgggcatgatttacaccgtgggctactccgtgtccctggcgtccctcaccgtagctgtgctcatcctggcctactttaggcggctgcactgcacgcgcaactacatccacatgcacctgttcctgtccttcatgctgcgcgccgtgagcatcttcgtcaaggacgctgtgctctactctggcgccacgcttgatgaggctgagcgcctcaccgaggaggagctgcgcgccatcgcccaggcgcccccgccgcctgccaccgccgctgccggctacgcgggctgcagggtggctgtgaccttcttcctttacttcctggccaccaactactactggattctggtggaggggctgtacctgcacagcctcatcttcatggccttcttctcagagaagaagtacctgtggggcttcacagtcttcggctggggtctgcccgctgtcttcgtggctgtgtgggtcagtgtcagagctaccctggccaacaccgggtgctgggacttgagctccgggaacaaaaagtggatcatccaggtgcccatcctggcctccattgtgctcaacttcatcctcttcatcaatatcgtccgggtgctcgccaccaagctgcgggagaccaacgccggccggtgtgacacacggcagcagtaccggaagctgctcaaatccacgctggtgctcatgcccctctttggcgtccactacattgtcttcatggccacaccatacaccgaggtctcagggacgctctggcaagtccagatgcactatgagatgctcttcaactccttccagggattttttgtcgcaatcatatactgtttctgcaacggcgaggtacaagctgagatcaagaaatcttggagccgctggacactggcactggacttcaagcgaaaggcacgcagcgggagcagcagctatagctacggccccatggtgtcccacacaagtgtgaccaatgtcggcccccgtgtgggactcggcctgcccctcagcccccgcctactgcccactgccaccaccaacggccaccctcagctgcctggccatgccaagccagggaccccagccctggagaccctcgagaccacaccacctgccatggctgctcccaaggacgatgggttcctcaacggctcctgctcaggcctggacgaggaggcctctgggcctgagcggccacctgccctgctacaggaagagtgggagacagtcatgtgaccaggcgctgggggctggacctgctgacatagtggatggacagatggaccaaaagatgggtggttgaatgatttcccactcagggctggggccaagaggaaaaacagggaaaaaaagaaaaaaaaacaacaagaaacacaggaaaacaaaaaaaaaaaataaaaaaaaaacaataaaaacaaaaaaaacaacaaaacaaaaacaaaacacaacaaaacaaaaacaaaaaaacaaaacaataaaacagaaacaaaagagaaccgggggcggcggcgctctacattatctatctctcctcctccgagcgggggccagaacacctagttaccgccgcgcactccgcgtttttcttttggttaatgaaaagggcgcccgcctccccaaattagagagaacggttcgttcattatttaatgcacgagcgagagaggcggggcgtggccgagcttttaataaccaaccgtagaggactagcgcgttgtgagaacccaaaacatccaggctcgcgcggctgcggcctcattttctgcagaggacaagaagcagcccccttcagttgagggcgtgggcgtcgaacatactatgatgggagacacaccaaccagagg

SEQ ID NO: 144425 - DNA, 2349 bp, Homo sapiens
cacagccatgctcggactgcagggccccggccccgccttggcgcgtctgaaggatgcagctctgccgcggagctgaggagacgtagccttctggggtggatgcagatgacgtcatgactaaagaggaacagatcttcctgctgcaccgtgctcaggcccagtgcgaaaaacggctcaaggaggtcctgcagaggccagccagcataatggaatcagacaagggatggacatctgcgtccacatcagggaagcccaggaaagataaggcatctgggaagctctaccctgagtctgaggaggacaaggaggcacccactggcagcaggtaccgagggcgcccctgtctgccggaatgggaccacatcctgtgctggccgctgggggcaccaggtgaggtggtggctgtgccctgtccggactacatttatgacttcaatcacaaaggccatgcctaccgacgctgtgaccgcaatggcagctgggagctggtgcctgggcacaacaggacgtgggccaactacagcgagtgtgtcaaatttctcaccaatgagactcgtgaacgggaggtgtttgaccgcctgggcatgatttacaccgtgggctactccgtgtccctggcgtccctcaccgtagctgtgctcatcctggcctactttaggcggctgcactgcacgcgcaactacatccacatgcacctgttcctgtccttcatgctgcgcgccgtgagcatcttcgtcaaggacgctgtgctctactctggcgccacgcttgatgaggctgagcgcctcaccgaggaggagctgcgcgccatcgcccaggcgcccccgccgcctgccaccgccgctgccggctacgcgggctgcagggtggctgtgaccttcttcctttacttcctggccaccaactactactggattctggtggaggggctgtacctgcacagcctcatcttcatggccttcttctcagagaagaagtacctgtggggcttcacagtcttcggctggggtgctgggacttgagctccgggaacaaaaagtggatcatccaggtgcccatcctggcctccattgtgctcaacttcatcctcttcatcaatatcgtccgggtgctcgccaccaagctgcgggagaccaacgccggccggtgtgacacacggcagcagtaccggaagctgctcaaatccacgctggtgctcatgcccctctttggcgtccactacattgtcttcatggccacaccatacaccgaggtctcagggacgctctggcaagtccagatgcactatgagatgctcttcaactccttccagggattttttgtcgcaatcatatactgtttctgcaacggcgaggtacaagctgagatcaagaaatcttggagccgctggacactggcactggacttcaagcgaaaggcacgcagcgggagcagcagctatagctacggccccatggtgtcccacacaagtgtgaccaatgtcggcccccgtgtgggactcggcctgcccctcagcccccgcctactgcccactgccaccaccaacggccaccctcagctgcctggccatgccaagccagggaccccagccctggagaccctcgagaccacaccacctgccatggctgctcccaaggacgatgggttcctcaacggctcctgctcaggcctggacgaggaggcctctgggcctgagcggccacctgccctgctacaggaagagtgggagacagtcatgtgaccaggcgctgggggctggacctgctgacatagtggatggacagatggaccaaaagatgggtggttgaatgatttcccactcagggctggggccaagaggaaaaacagggaaaaaaagaaaaaaaaacaacaagaaacacaggaaaacaaaaaaaaaaaataaaaaaaaaacaataaaaacaaaaaaaacaacaaaacaaaaacaaaacacaacaaaacaaaaacaaaaaaacaaaacaataaaacagaaacaaaagagaaccgggggcggcggcgctctacattatctatctctcctcctccgagcgggggccagaacacctagttaccgccgcgcactccgcgtttttcttttggttaatgaaaagggcgcccgcctccccaaattagagagaacggttcgttcattatttaatgcacgagcgagagaggcggggcgtggccgagcttttaataaccaaccgtagaggactagcgcgttgtgagaacccaaaacatccaggctcgcgcggctgcggcctcattttctgcagaggacaagaagcagcccccttcagttgagggcgtgggcgtcgaacatactatgatgggagacacaccaaccagagg

SEQ ID NO: 144426 - DNA, 2355 bp, Homo sapiens
  misc_feature (2)..(2): n is a, c, g, or t
  misc_feature (4)..(5): n is a, c, g, or t
  misc_feature (7)..(7): n is a, c, g, or t
  misc_feature (11)..(11): n is a, c, g, or t
tnanncntganccacagaagctgctcagggactatccatggcctccccgtggccaacttgagtctgctctgcagctttaggcccgacttggaaggcccatgggctgcagatgaggaaactgaggtccagacagccgaagagtggtagtgtccaggacacacaactgggccggcggcggcggctgccccgagggacgcggccctaggcggtggcgatggggaccgcccggatcgcacccggcctggcgctcctgctctgctgccccgtgctcagctccgcgtacgcgctggtggatgcagatgacgtcatgactaaagaggaacagatcttcctgctgcaccgtgctcaggcccagtgcgaaaaacggctcaaggaggtcctgcagaggccagccagcataatggaatcagacaagggatggacatctgcgtccacatcagggaagcccaggaaagataaggcatctgggaagctctaccctgagtctgaggaggacaaggaggcacccactggcagcaggtaccgagggcgcccctgtctgccggaatgggaccacatcctgtgctggccgctgggggcaccaggtgaggtggtggctgtgccctgtccggactacatttatgacttcaatcacaaaggccatgcctaccgacgctgtgaccgcaatggcagctgggagctggtgcctgggcacaacaggacgtgggccaactacagcgagtgtgtcaaatttctcaccaatgagactcgtgaacgggaggtgtttgaccgcctgggcatgatttacaccgtgggctactccgtgtccctggcgtccctcaccgtagctgtgctcatcctggcctactttaggcggctgcactgcacgcgcaactacatccacatgcacctgttcctgtccttcatgctgcgcgccgtgagcatcttcgtcaaggacgctgtgctctactctggcgccacgcttgatgaggctgagcgcctcaccgaggaggagctgcgcgccatcgcccaggcgcccccgccgcctgccaccgccgctgccggctacgcgggctgcagggtggctgtgaccttcttcctttacttcctggccaccaactactactggattctggtggaggggctgtacctgcacagcctcatcttcatggccttcttctcagagaagaagtacctgtggggcttcacagtcttcggctggggtgctgggacttgagctccgggaacaaaaagtggatcatccaggtgcccatcctggcctccattgtgctcaacttcatcctcttcatcaatatcgtccgggtgctcgccaccaagctgcgggagaccaacgccggccggtgtgacacacggcagcagtaccggaagctgctcaaatccacgctggtgctcatgcccctctttggcgtccactacattgtcttcatggccacaccatacaccgaggtctcagggacgctctggcaagtccagatgcactatgagatgctcttcaactccttccagggattttttgtcgcaatcatatactgtttctgcaacggcgaggtacaagctgagatcaagaaatcttggagccgctggacactggcactggacttcaagcgaaaggcacgcagcgggagcagcagctatagctacggccccatggtgtcccacacaagtgtgaccaatgtcggcccccgtgtgggactcggcctgcccctcagcccccgcctactgcccactgccaccaccaacggccaccctcagcgctgggggctggacctgctgacatagtggatggacagatggaccaaaagatgggtggttgaatgatttcccactcagggctggggccaagaggaaaaacagggaaaaaaagaaaaaaaaacaacaagaaacacaggaaaacaaaaaaaaaaaataaaaaaaaaacaataaaaacaaaaaaaacaacaaaacaaaaacaaaacacaacaaaacaaaaacaaaaaaacaaaacaataaaacagaaacaaaagagaaccgggggcggcggcgctctacattatctatctctcctcctccgagcgggggccagaacacctagttaccgccgcgcactccgcgtttttcttttggttaatgaaaagggcgcccgcctccccaaattagagagaacggttcgttcattatttaatgcacgagcgagagaggcggggcgtggccgagcttttaataaccaaccgtagaggactagcgcgttgtgagaacccaaaacatccaggctcgcgcggctgcggcctcattttctgcagaggacaagaagcagcccccttcagttgagggcgtgggcgtcgaacatactatgatgggagacacaccaaccagagg

SEQ ID NO: 144427 - DNA, 493 bp, Homo sapiens
taatgatcaatatcaatcctagacatgtacagctctggggagttaaagtagctacgacattcgggcagatgactgcaaagaagctatctaggcttcctgaaatggaaccacctgggcaagggaaggaagcaaaatgtggaagcccaatgagcagggaataggaaatttacacagtagctcaaatcctgcacaatcccaatcctgcaggacaacgatcacagcatcttagcactggaagggttcccattcatcatccaacgcagccccctccccagtgcagaaccctcatgacagtcaccctagagtcatccacactgccctacatacttccaatgacaaaatgctctctgcctttcggggtagcctattccatcaatggataactatttttagcaagtttttaatttagtcaaaaagtgatacctttctaatgtgtggctgtcatgctaattctaattctgaaccaagtagccactcaataaacgttgaatga

SEQ ID NO: 144428 - DNA, 750 bp, Homo sapiens
tcaaaatagaaaatggtaatggaagatttacaagtaaataatgtttggatttgtggataatggagcttattaaaaaattagaaaaatgcccttctctgaagcataattttaggctagttggagaaatgactgattgtagtcttgaggcaggaagagtccagggtgagtctagggtgtcttgtcataccagaaagcaggaaaggtatcaaattaagctagagtcatgtcagaagaacacaggagccaacctgaaggaatgtccattgcccagaaaatgggaaaatttgagcataagaaagaataatgactgcaatagattaaaacatattaaatatgtttaaatctctgagtttatgcttctttgtaaaaagttactctgaaaaaagaaacacctaattctgaaaactgtaaagaaaatacaaactatattttagagtaatcagatttctgatgagttaattaagaaaacgtgatagaattagaagtcaccattttgtacatttaatgaaataaggcatctgggcaatgatcatcaatgctacgaaaactgttaagtaaaaggcttgtgggaccactaaaatgggtggaccaggctgataacctgaccagttttaacatcacaaaaagtcagaacttatgtgcctttttactaaatgcaataggaactacttagtactactgatgaaagattcttgtcaaaaaagtcaacataaatctgatgaaacctctagatatagccaccaatttaca

SEQ ID NO: 144429 - DNA, 154 bp, Homo sapiens
acaaacatgtagaaaacatagagaagacaaatattttggacaaatacaagccaagagcaagtccggtttggagcactaagaattgagggaacattcccataactgatagagtcagattagaaaaaattcaacaagaaattgtgaagcacaggag

SEQ ID NO: 144430 - DNA, 576 bp, Homo sapiens
tgtagacataagcatcgggattggacagtcctctggatgaatgcggtgaatgaagattctaggcctctcagcttccttaccttcagtattggaataataatgatagtgaatacaggagggaaagagacaaagaagaaaactgagcccctgtttatgccatgttcatagaatttgattctgggggcacggaatccagatggctagaggccctcatggacacatcagagagtgagctttgggttatccagtatttatgcattttgataatatatgcagaaatgagcagcactgtgcatagattctgtatcaatagccaaaagattgaaggttcaggggcaatctagggaagacctacttctcttggtaagaggtgattcaacacttgtcaacaaaggagaaaaccctcagtgtccaatgacagagaagcaagctgggcttggcccatggatcttagaagctcagcttagaaggaaagcctctgcttctcagaggtttgaggcttgttcaaagatgtcacataaatacacaataagtgccctgctcgttgtgtatttatgtaacatctttaaacaagtc

SEQ ID NO: 144431 - DNA, 424 bp, Homo sapiens
attattttcctagattgtaccatatattgaatattatgagagtccttgtgtacttagtatgaggatactagtttgcaattgttttttcattctaatttaaaagtgcctgatttgatagcctctgacgttttcataagcagatcaaatagtttgtttcagcattttttgaaattgcattttctctttcatgcaactatccttagcctgtggctaccattttctggctttgagaacttgatatggtattaacctaaggtcggatacggctcttgagctcacctgcatcagaagcacctgggtctaatttaacatgctgatccctgaaccccattccaaacttacaaactaagaatctcagcaatctgtgttttaagtcggctgcctatgtgatttgtataacctctagagattcataaccactaac

SEQ ID NO: 144432 - DNA, 547 bp, Homo sapiens
tggggtccgagaggcccttggaatccaccatggcatgggccggagtccctggcgacgcagaagatgtgctcactgattcgtggggtggaggacactgcacacccagccatctggctaggaagggggcgtctggggcagagggagtcacaagtacggttttcttaccggatatattgtgtagtggcaaagtctggccttttagtgtactcattgccctaatagtgaacattgtacccaaaaggtaactttttcacctttttcgccctcccgtgttttggaatcttcagtgtctgtttttccattctgtatgtgcatgtgtacccattgtttagctcccacttgtaagtgagaacatcggtatttgactgtttctgagttgttttgcttaggataacggcctccagttctgtccaggttgctgcacaagatatgctttcattcttttttataactcagtagtatttcttggtgtatatatacactgcattttctttatccagtcatccattgttggacacttaggttgaggccgtatctttgctattgt

SEQ ID NO: 144433 - DNA, 159 bp, Homo sapiens
cctaattacttctgtgttttatatattgaaaatgataatttgatatggatgcaacattttttcagattacaagtatttgccccattgaaccaaatatctgtgtatgatatgctctggaaatgataaagtactccaattataaggatcccgaagattgga

SEQ ID NO: 144434 - DNA, 572 bp, Homo sapiens
caggccaccaggctgagtgaaggtgctatacagaggcttcttggccacctggggcccctttgagcctatgagggatcctgggagggtagtggagtgaggacagcagaggagcaccaaagacaaactcagcccatttcacaattttatcgtgagccagccctatcttagccctctcgttttgaagaaaagccaaatttgtatttaaaaaaatacttatgcctgatgcattccctattgtgaaataagcacatttattacacagaaggaaacctgatgtctctcagaccttgagcagactatttacaacatttgggctacaaggcaaggtgaccttcagaccacgaagtggcgatggcttgcatagggcaaggcagggtctctgagagaacgtgagacacacaggccaccaccatgttttaggggacctgggattttgcaacaggaagaaataacaggttagaaaaatgcatgctttaaaacatttaaaatttaaaaatagaatgctttcacacacacacactgcaacacaatataattgtgccatttactagtaatgatataaacatatctga

SEQ ID NO: 144435 - DNA, 355 bp, Homo sapiens
acctcggctcccagtcttttagtacctctctcaaatatgaatgaacaaataaaggaatggaaaaaagactacaggtcaggcacggtggctcatgtctgtaatcccgcactttgggaggccgaggtgggtggatcacctgaggttgggagttccagaccagactgaccaacatggagaaatcccatctctactaaaaatacacaaattagctgggtgtggcagcacatgcctgtaatcccagctacttgggaggctgaggcaggagaactgcttgaaccttggaggcagaggttgtggtgagccaagatcacatcattgtactccagcctaggcaacaagagcgaaactgggtctc

SEQ ID NO: 144436 - DNA, 98 bp, Homo sapiens
aaatgtgatcatagatttatacctcagtttgaagtaatggtctagatgtgcacatggcagcctaaggatcttagagacatagtgctgagtaacaacag

SEQ ID NO: 144437 - DNA, 261 bp, Homo sapiens
ggcccctgtgttgctcagggtctctccctccactcactgtctattgcttttacaggatttgccaccaccctccaccctcatccaaacagaggcctccagaccagaagccaggtcttacactgatagttcaggcttcctgtagtactagggataacataaacccagccatgccacagtcaggtcctggttgcactgctctctctattccttggcaccccagaaacacaactttaaatgagccacagacctgagcaatccagg

SEQ ID NO: 144438 - DNA, 331 bp, Homo sapiens
ggtaggggcaggatccaaacccagcccttgcctgatggcagagcttcactgctccaaacggtctggaacaccactgttttaattaagtgtgcaattcagtgtgcaagtgtcttgtaattaagtgtgcctctgtttcctcatctataaaacagggagaacttcgtattctccttcttgggaatctgaggactctgaaaatcccagtgcagggatgctcgcggaagcatcagcagggatgtccgccccagccgctgactcagaagcccaacacgcagagaatgtaaagctagaggtgccatgctggggcctggggcacttctagccacagcca

SEQ ID NO: 144439 - DNA, 226 bp, Homo sapiens
catgcacacatgaagtatatacgcaaagcaatatcacaggtacaaattcccttgaaaattcacaaataaggccaagcgcggtggctcacacctgtaatcccagcactctgggaggccgaggctggcaggagttcaagatcagcctgaccaatatggtgaacccctgtctctactaaaaatacaaaaattagccaggcgtggtggcgggtgcctgtagtcccagcta

SEQ ID NO: 144440 - DNA, 382 bp, Homo sapiens
tcctttaccctcccactctgctgtctctgagcctcctcctcccaagtagcttccctgcaccactcaagacaggctcaatcaatccaggaatatctgcagagctccccactctggccctcccataattctggtcataattctcttccttttcactagcagggccctcagaggtccatagcttttggtgaaaactgaccatccaatcacaaccacataagctataaccacaccgtaactttcaggaattttaaccaatttcttcacacacatgcacaaaaggctacattgttttgcctgttctgatctggcctaagcagagatgggttaaggcttaaagcacctatttccccataggtgagctacatggtaacctgcaggtgaa

SEQ ID NO: 144441 - DNA, 124 bp, Homo sapiens
agagccttcccagtagacctgactagaataatgcctctgtctttccaggtagacaagctaagtaaattaagcacttcagtgaccaagaaaatattgaattcctcctgaatctgcatgaattttg

SEQ ID NO: 144442 - DNA, 366 bp, Homo sapiens
acactggggcagggctctgaaatatagtttcataggataacaagaagcaggatttgtcgcagaatggcgacagtgagaactcagaagggtctggaagctctagtttcagaacacatcagcctggatgagagaagatgaaatccagaattcagaggctaggttgcagcaatgtcataataggctatgttgtgggagtggtgactagcagatttatagagaatgcaaaaaggggagagttcagtcaaggttacaagcaatggaggccattggaagagggaaatggaacactgtggtatgtgaagatgttccatttgaggataagaaatgcctctgaatctgggatggcattttgtgaaagcagagaga

SEQ ID NO: 144443 - DNA, 829 bp, Homo sapiens
attaatacaagagttaaattgagattgctcctggcaaaccaagttatattgttacacttcttagattacacaatgactcagtgacatctggaacactggtctacagctcttaacccagaaaactttacctcctggttcatactaagctaggtaatcaaatctgtttcctactgatggaagtagctaatttttgttgtctccatgggaaaatattaaagtagtttcttaaataaagtggtactattattcatgcatttgtaagattgccctatatttcagaaatttagaattattttctcctgcctgcctgcctgcctgcctccctcccccgaccccctctctttttctctcctcctttctttcttagagtcacggtcttgctctaacacccaggatggagtgtaatgacacaatcatagctcactgcaccctcaagctcctgggctcaagtgatcctcccatctcagtcttctgagtaggtaggactacaggcatgcaccaccatgcccagctaatttttaaaaatcgtgggggctgggcacagtggctcatccctgtaattccagcactctggtaggccaaggtgggcagatcagttgagcccaggagttcgagaccagcctgggcaacatggtgaaaccacatctctacaaaaaatttaaaaagtagccaggcatggtggtatgcatctgtagtcccagctactcaggaggctgaggcaggagaatctcttgaacctgggaggcgaaggttgtagtgagccgagatcaggtcactgcattccagtttgggtgacagggcaagaccctgtctcaaaaaaaaaaaaaaa

SEQ ID NO: 144444 - DNA, 317 bp, Homo sapiens
tgcccactttcatggacagtgttcagaatatatatatgatgttctatcttacaagagtgaatttcataaaaagttcattcagagatgtgaaatcctcggtgctgcgagtgatctttaacaacagtcataagcaatgttttgttaaaaatagaagctgaagagcattattgaatattaacatgacctgggctttattctgtggcataaatgacgtggaaatcaaacatatgctactcattctcacttgaaaaaagcttcatttatagggcacagataagaatctatgaggagattaaaaacactgaatgatccctttt

SEQ ID NO: 144445 - DNA, 468 bp, Homo sapiens
agttgcacccctctccctactgtgagaaccccaaatgtctttggacattgtcaaatgtcctctgcagggcaacataaccctggaatgagaaccactagacaaggctgaggagactggactggaaaccagtaacaggcaaacccaagaaggtaatgaaaaggccaatgtgatcatccaagccaaacgatgactgaacctgaaaggtgatttttccaatcctccctcataccgcgaccctctaatctagccctccatgatcatctagagagtattccacgtccatcctgagcgtaacccactccacttccaaagcccgtatcacccaggggtatcagcatctacccctcctcatcacagaccctgacaaacctccttggtatagccttcacatgtcaaggactttaccacatggtcctctctctgcttctcaaggttgactcttctacattctatgggacattaagtccc

SEQ ID NO: 144446 - DNA, 367 bp, Homo sapiens
gtgggttcagcttctatcttgctcaactaaatttttaaaatctatataggtgagcatctgttcagattactatctagctttaataattgctatcattcatatttgcctggtacatcactgtccatccttttattttcacctctttaattaaaaatcatgtagctatcacttaaactactgaaaaattcattgagagtttaactggtgagtgtaaaccatttatattaattttaaataatacttgtttctggcatttcatttcatgtttttcatttatttcactctttcatttttttccttcttgattttcactttataaggtctcttatgctaccttaaaagataaaaattgttattactgtggttg

SEQ ID NO: 144447 - DNA, 423 bp, Homo sapiens
catttggtcccagagaatcagaaaactgaattattttgctttcccttcacatatggagctctctattaatattccttttctcctttgctttctatttccaaagacccctttcacctttttaagcaagagtagattatttggggagacttttaccgatatacgggccactttcaattttctagataataagcacttgactgggccatgactctgcctttactttctcagattgtttcttcagagcaattttttagtaactcatgctatgtagcttttcattttgagttacaaaagctccagtcttgtcatccaactgctaaaaatcctgggcccagtcatctcggtcttctccctctttacaaaggctagccccttcctgaatactctgtatcccataccctcctaatttctctcgaggattgc

SEQ ID NO: 144448 - DNA, 575 bp, Homo sapiens
tgctctgtgatgcaagtgtctaacagtctgcaggaatacttttatctatagtgcaacatgtaaccctcacaaccaccctgtggagtagatttcatctgcttattccaaaatagaaaactatgacccagaaaactgaagtgacttgcccaagaacacccattcaagaagtggtaatgtggaggttcaaacccaagtaagagtattcccaaagctcgtattcttttcaggaaactccactcgcttgtagctccaaactaggtgcattaacagatggcacctcaaaagcactgagggagtgatgtcatgcagttgaaagacaggctcttagaccactcatgaggtcacaggagctaggcttgtggaagacatagagatttcacctatccctgaaacacacggtgaactaggatgatgcaaataccagtctcactctatcccccttggttaggaaggttatgcctcctgcttgtgccacgggaagcagaatattccagtatttcagagataaaagagagctaatcctctttttgttcagatgaggacacttgcatccagagaaggaaaccgatgtttcc

SEQ ID NO: 144449 - DNA, 117 bp, Homo sapiens
cccaacacttagaagagaactatcttaatatagtaagtaatatccttgtatcaagcattaaccacatgagaaaattaagcccattcctgttacaaccatttaaatttgatactatat

SEQ ID NO: 144450 - DNA, 415 bp, Homo sapiens
catatctgcagctgagctgtcacctgctcccctctcccagctatgttcagtttggggcaactagagccattgacacattaagggagaggcctgggaagtcttccctgtttggggactaatgccttaagcatttgcaatagggctgggcctgcttagcttggccctctatggggagtccctgtgtgttttagatgctacagatttcacccctctgtagccatccatttcacccctcctttccccaaggtagtggaccaagctgagtctctccaaactcagtcttctaaagctaaggtggccagtgctattcttatccctgagcccaggtgtgcaagcaacacttcagctctttcatttctggataggaccttaattttaattctaagcccccatccccctgggctggtagaagatt

SEQ ID NO: 144451 - DNA, 359 bp, Homo sapiens
tcctggcgcttactaagatgaggcaattaggaaagaaaagtggtttgtgaagggtggagaggaaggagattttctatttcagatgctgaaactgagatgataaaaatctataatagaaatgtgcaatacacatgttggaaacacagattacaaatgagtggctggacacagcctctttcacagtgatagtaattcctgtgtgtaatgtaataggaggaaactataagaagtgagaactgaaaccacaaggtaatagctgaaagacttaagacccttagatgagaattccaagataaacagcacaaaataacaacaataaacagtcaaaggctgaaccctgcacccattgttggggatat

SEQ ID NO: 144452 - DNA, 393 bp, Homo sapiens
tatctgcttgaaatttcaaactgtattaacaaatactaacactttgggaatgagtaaaagtgaggaacatatataatcttacattaaatgatcaaaacacaaaattccatttttgttatcttttagaattgaaaataagttacatactttccaaatcctaaaaggaaagtaaatgaataagtctgtatataaaaatggaagctgaaggaaacagaaaagagcataaaaaaccaaaagcaagatggcaacattgtttgacttccctgactacagtagaaatcccaaagccaaagagtttctgtctgatcggctggaatttaccagcttcgggaagcatgcctgacacataatagaggctcaatagttatttgttgcctgaataaaagccaaaca

SEQ ID NO: 144453 - DNA, 467 bp, Homo sapiens
tatctgcttgaaatttcaaactgtattaacaaatactaacactttgggaatgagtaaaagtgaggaacatatataatcttacattaaatgatcaaaacacaaaattccatttttgttatcttttagaattgaaaataagttacatactttccaaatcctaaaaggaaagtaaatgaataagtctgtatataaaaatggaagctgaaggaaacagaaaagagcataaaaaaccaaaagcaagatggcaacattgtttgacttccctgactacagtagaaatcccaaagccaaagagtttctgtctgatcggctggaatttaccagcttcgggaagcatgcctgacacataatagaggctcatcacttgagctcaggagttagaggttacagtgagctatgatcgtgccactgtgctccagcctaggtgacaaagtaactcattacgtagtgtgttgaaagtagtttac

SEQ ID NO: 144454 - DNA, 794 bp, Homo sapiens
ggacatttcagttgggaacagattgctccatggtaatacgatcactatgtacccaacaatggctctttcttcctagcctcaatgcagatgttattttcaccttaactattatcattgctgtttctaaccacataaaagtgtatcctttatatatctgaagtaaattcatactagtggtgtaacatctccagccatttaagtgtaaaaacagaaaacatatgatgtgtttacttactgttttatactcctaatgcatgaagagaagatccttttattcattgcctatacttttatttctaaactttctgtaacactttatcttatatccagcatagaattgagatttgctttttgatttaatctgacaatattttttcctctaataagagtcaagcccacttacttttaatgataaattgtgtttggttatattttgattacagtatattatgctatgatttatatgcacatatctgtcttttgctgtcttgttttattgcttttgttttgatgttgtgatatttggaagagttaaacttttattctgatggctaccttatgtaatttcataaaatcatctctttctttagacagtagctaatgtctctaaactaagaacaatggtattagctgtattctctttcttgtcctccctatgtgatttttcatcccacaatttgatttaatcatattaactttgtttcccctggtgccattaagtatgcttacatttctataaacaatatcctttgactcccaggcattacagatgagcagtcagtaaaatcattctg

SEQ ID NO: 144455 - DNA, 589 bp, Homo sapiens
tgtcagaaaacaagccttaacaaatttttaaaaattggaattataccatgtatcttttctgaccacaatggcatgaaactagaaataatagcaggaagaaaactggaaacattatacatacagggaaattaaacagcacacttttgaacaaccagtgggtcaaagaagaaaccaaaagggaaattggaaaatatcttgtgacaaacagaaacaaaaatacaacataccaaaacatatgggatgcaataaaagcagtactaagagtaaggttttagggtgaacacctatgtttaaaaagatttcaaataaacaacctgactctacacttcatggaactagaaaaagaaggataaactaagcccaaagttagtaaaagaaatgaaataaggatttcagcagaaaaaaagcaaaatagagtatagaaaaacaataggaaaatagtcaacacaaccgagttggttttttgaaaagataaacaaaatggacaaatcattagctaaattaaggagaaaaagaaaacacaagtatatacaaaatgagagagaagacattacaaccgatgccacagaactggaaggattataagaac

SEQ ID NO: 144456 - DNA, 335 bp, Homo sapiens
ttatgtcatggattctgtgggtcaagaattcggaaagggtatagtggggatgacttgtctctgcttcagaatcactgagacttcagctgagaagacttggaagcctgagatgacttaaaagcttggggctggaatcatttggagttgctcattcacatatgtaaaaggtaaactaaggcacaaaaaaaaaattttaagagctcatttgaccagccgggtgctgtggctcatgcctgtaatcccagcactttgggaggccgagtcgggtggatcacgaggtcaggatttgagaccagtctggccaacataatgaaaccccgtctctactaaaaata

SEQ ID NO: 144457 - DNA, 544 bp, Homo sapiens
tcagaacagaaactaggaacagaggagggacaagggagggagggcagaaggtccggtgccctcagtttctatccatccttgggtcggaaacctgggatggaatgagtgaggagctgggtccacagggacaggaactgggggataccaggggctagggctgctcatcctttcccaaggaggagccagggaaaaattaagctcatagggaatgtcgggttcaccgggcctggcggactccagatcccagaggcagggcacccacacatctctcaccggcacgcaccagggccccgatagccgggcaccatcatggcgaattacattacattgcattacccggggaccactatcatgaccacgttgggagaggaaactgaggcactaagctgccaaagtcacgcagcccacaacactggaaggcaaagcagccgtctggaccccagaactggagctgtcccctcactgggcgaaacccagaacccagtgtttgcttctttctcagagtagcaagaagacatggcagagctgccctcaggctggaggc

SEQ ID NO: 144458 - DNA, 192 bp, Homo sapiens
ggaagtctagtggtgctatttattgacctagaaaaaaaaatggacaaagcacaaactctgggagagtgagggaaggaaaatcgtgcattcattttggaccatgttaagttggagatgcctttaagatacccaagatgagatgtaaagtaggcagttcattaaactaatttggaactcaaaagagtattatgg

SEQ ID NO: 144459 - DNA, 329 bp, Homo sapiens
cgagagctccaacaggagaagcaagcagccagaaggatgagaagggacagtcccctctctgaggggacagccaagaggcaatacaggcactgccacctgtattgcacacaacatgagccactaaactaacactgatcactttggaggtccatcatatccaggacttggtacaggccttggccacagtgtaagccatcattctgccttctggtgctgacctgtacctgggcagcccatctggctaccagcctgctcacacctctgctcctgcctttttacccagccaggaggggcccagaagctcagagccctattctcagggtgtccat

SEQ ID NO: 144460 - DNA, 247 bp, Homo sapiens
acacagttccacaaagtgcacaccaagcagatggtacagacaagaacatgggttatttacagccagtagagtagacgaaggcatatgcgctaagccctcttaaacccactccctgggagccattaacacatccatttagatgaaagagtcccgaggttttgccatgggcatttctgctacactcccctgaagcatcgccatctgccctgcctcctcccagaggccttgtcacccccactcctgccca

SEQ ID NO: 144461 - DNA, 226 bp, Homo sapiens
tgttcacctcttattctcttactaggttgttttcaaattaaaaacaaacaaacaaacaaacaaaaccctgtatttctccaatcttaaaaaaggaaaaaaaaaaatcacaccacttctgcctccagctatcaccccattctctgctccactctgtagcaaagccaccaaaagaatcatctgctcactgcttccaacttctcttctcccagtctctttgggtcttact

SEQ ID NO: 144462 - DNA, 432 bp, Homo sapiens
tctaaatgtgaaacttaagagccctgttataatacaggagagtgcctcaaatgaggtgattcactttaatcttcctaatactaatggcaaaattttcgttaattcttaatggtgaaattaaggagggataagcctgtattaaaaatgttccggccaggcgcagtggctcacgcctgcaatcccagcactttgggagaccgaggcgggcagatcatgaggtcaagagattgagaccctcctggccaacatggtgaaaccctgtctctactaaacctgcaaaaattagctggatgtggtggtgtacgcctgtagtcccagctactcgggaggctgaagcaggagaatcgcttgaacccaggaggcagaggttgcagtgagctcagattgcaccactgcactccagcctggcgacagagcaagactctgtctcaa

SEQ ID NO: 144463 - DNA, 397 bp, Homo sapiens
atctgggcacctggagtcatgggctttgaccagtgaggggtataaataggagactgaaaggtagaagagggtggtcaggggattcacagtcctggcttcttccctacttctggcagtggctgagctcttctgcaggtgtagttcctgtaggctggtccctctgccaagtctccagttcttcactgcactttgcaaccaccactgcctctcctccttttcaggatttgggatggtgaagcattcctgctgttgctagtccttggatacttcagcatccctgcatggttcttttcaccccacctgcacctttaatacagttctttcatttgaccttccatagtgaaatccttttgaaagtgttatgctgccttctgcctgaacactgataggcacatcc

SEQ ID NO: 144464 - DNA, 170 bp, Homo sapiens
gcctcctctgtgcctaacacagtgtgctgtccaccgtagggatcaatacaggttgctgtgggttgcctgaatgcctctccttctgattgcccaagaacactgcagtgtccatgcatatgggcacagacaaacacagcattgatggaagaaaaccatagatcagtgtttgc

SEQ ID NO: 144465 - DNA, 347 bp, Homo sapiens
tatcttacacttaatggtttaaatgttattagggttacaagaggcccagaaaaagacattcagagtagcaatcaatcactttaatacagcttcagcttataaaactggacagaattactttttttttcttatgctctggtgaagcaagtttttattctgtttaagcaaaacatcactctaacacattttcagagttacagctgctgataataaaatgctagagtggaagtcaaaatagatatctgggaatgcaaaacataggtttttctacagcaaggcaaatttcccattattcccacatgggaactcaggagcaaaattgccacatgcctcttgtatcatatgca

SEQ ID NO: 144466 - DNA, 334 bp, Homo sapiens
tgttgttgccagctcctctgttcaccctaaaagtgatacatgtcccctttctgcacattccattgacccaaactagtcacgtggccctgcctaacctgggaaatgggaggactgtcagatgagtatcactctctgccacagatgatgcagagcacaccttttggtaattagttcattgaatctgagtaaaagctcaggcatgagtagtgttgggcccatttactagagaaaatgaagacttgagctcttcaaagtcaagggctgtatctctagatctctcacaccgggctgtctgcctcacacttttctcagcactcagcaaaggttagttgag

SEQ ID NO: 144467 - DNA, 587 bp, Homo sapiens
ccaaaataggagtcacaaaagaactgacatccatttttatatgactcctgagctctataatctgcaaaacccatactgacttttacatgtatggcagggtatggaggaaatggccaaagatactttgtaaaatgttcgtcaaaataaaacctgaattttaagcaagagcagaaggggaggagtggaggaaggaaggaaaatccctcttttttaccataatcctagatgcactaaatccagcaatgtatatgaaatatttcaggagcaggaaagtggggagaaatgagggaaagaaagagggggagaaggaaaaatacagaaaggggaacagtgtaaagagaaagccccatgctaagtcatcccaacctgaagctgcctcatagccttggtcctgctctcctctccccctacttaccaaggcctttcaaaagggagttctgcaattccactctaaccatcaaacaccaaaaacacaacaaaacctgacaaaataattgtactaagtcagcacccaatctcctgcaaaatcagaaaagcaaactgacaaatattaagtggaccaccataaataccagacacagaatttg

SEQ ID NO: 144468 - DNA, 739 bp, Homo sapiens
atttgtcaatttctgtttttgttgcaattgtttttggagtcttcaacatgaaatctttgcgagaagctatgtacagaatgatatttcccaggttatcttcctgggtttttatagttttaggttttacatttaagtctttaatccatcttgagttgatttttgtatacagtgtaagaaaggggtccagtttcaatcttttgcatacgattagtcagttattccagcaccatttattcaatagggagtcctttccccattacttattcttttagttttgtgagtaaactcttcttttctttccctctgaagtcttgtcagattttctcctaagattcagtcttcagaatttaaacagagcatgtgtctaaggtgagttctttaggaattaatccagtcctggaaacaacgtgctctttcggtgtcaaaatttgagacttccggccaggtgcagtggctcgtgcctctaatcccagcactttgggaggtgggcagatcacttgaggtcaggagttcgagaccagcctgaccaacattgtgaaaccctatctctactaaaaatgtgaaaattagccaggtgcggtggcatattacaggtggtgcacctgtaaacccagctacttggaaatctgaggcagaagtgcttgaacctggaggcagaggttgcagtgaaccgagattgcaccactgcactccagcctgggtaacagagcaagaccctgtctcaaaaaaaaaaaaaaaa

SEQ ID NO: 144469 - DNA, 361 bp, Homo sapiens
gacttccgggtcaccctgatggacatggtggaggcaggcgggccgaaccagacggaatcccagaaggagtggagaagctgcttcttggtctgcacacagtctttacttctctgctcttcttggggattttagcaacattggtaaagaaaaaaatttaactgcacccatcctctaacaaactaaaccagcaaaaataaaataaaataaaataaagagaatgagttgaagaagctgcaacctttacctgttttcaccattaagtcgggtgtcacatagcaacggggatacattctgagaaatgtgtcgacaggcatttcattgtgcaagcatcatacagtgtactgtgatggttaatactgag

SEQ ID NO: 144470 - DNA, 881 bp, Homo sapiens
gaggcagggtctcgctctgtcacccagtggggagtgcagtggtgccatgaacgctcattgcagcctcaggctggtctccgactcctgggttcaaatgatcctcctgccccagcctcccaaaatgctggaattacaggatgtgcaccacacccggctaattttttgtatttttagtagagctagaacatccagtacaacattgaacagaaccaactagaacatccagtgcaacgttgaacagtattagccagaacatccagtacaatgttgaacagaaccaactagaacatccagttcaacgtggaacagaaccggctagaacatccagtacaacgtggaacagaaccgactagaacatccagtgcaacgtggatcagaaccggctagaacatccagtgcaacgtggatcagaaccggctagaacatccagtgcaacgtggaacagaaccggctagaacatccagtgcaactttgaacagaagtgttgaaagcagacacccttgcttgtttcctattataggggaaaaacactcagtctttcaccattctgtaggatgttagctagggttttttaaaaatgcccattatcaagttgaggaaattcccttttattcctagattgttgagagtttttgccatgaatagacgttggttttgctaaatgccttttgctgcatctattgaaatagtcacatagtttttgttttttattatactgattttcagtgttgaaccaatctttcattcttggtatatattccatttggtcattttacaaaatcctttttgtacgttgccagattcagcttactaacatttttcttaaacagctttattaagttataaagtgatatagaataaactgcatgtatttaaaaaaa

SEQ ID NO: 144471 - DNA, 104 bp, Homo sapiens
tgagtacatgtgtatacgtgtgtgtgagtgcgtgtatatgtggtgtaaacatgtgagtgcgagtgtgtgggaacacgagtgtgtatatacatgcgtgcaagtgt

SEQ ID NO: 144472 - DNA, 346 bp, Homo sapiens
aaagtactggccagtgggagtctgggaaccagcacagggaccagcccagctctaatcaccctccagagatcccatccggttcttccttccagggatactgggagggtggggcacagactcctgggctgctgcctgctcagaggcctctgcctcctcctttccctgctctggggtctgggtgttctgcactggaagagggctaagccactggtacacgtgggcacaagggaggaagctgctctggaaaggagaccaccagaggggaggcagaggagcaggccatgtcttcagggtccacgtcctgcctggctctccccatcggcgtcctagaggagggagcttgtgg

SEQ ID NO: 144473 - DNA, 240 bp, Homo sapiens
ctgtagtcccagctactcagggggcctgaggccagaaggttcgcttgagcccaggaggtccaggctgcattgagctgaaatcttcactctagcctgggagacactctgtctcaaaaaagaagaaaaaaatgatgctttagaagaatatttagaaccagccaaatttttataatagtgtaagtgaaaaaggagttaataaaacagcatattcagtgtgatctgaattttcttaaaaaatat

SEQ ID NO: 144474 - DNA, 820 bp, Homo sapiens
  misc_feature (628)..(628): n is a, c, g, or t
gtcttagtttttagtatgcctcactatttagatttatctggttcttttctcatgattgcattcaggtcaaacattttttggaagaatactgcatagacgataatttgtcatttttactcaatcacatcaggagtcacataaaatctattggtgatgttttattactttggttaagacatcagttattttagtctttgataattcattatctagataatggttactttgtattgtctgtttctttctagttgttgtcacttggttttgctttttttttccccccgacgtggtctcgctctgtcatctaggctggagtgcaatggtgtgatcaaggctcactgcggccttgacttcctggctcaaataaatggacctcccaccacagcctccaaagtagctggcattacaagcatgtaccaccacatctggctaatttctttttttctttcttttttgtgtagagacgaggtctcactttgttgcccaggttggtcttgagctcctagcttcaagtgatcctcccacctcagcctcccaaagtgctaggagaactgcttgaacccgggaggtagaggttgcagctgagccacgatcatgccactgcactccaggcctgggcaaaaagagncaagactcccatctccaaaaagaaaaaaaaacaattaaagggttggggtgggtgcacaggggctcatgcccggaatcccgcccttttgggaggcccaggtgggaggatccacttgagggccgggggttccaaatggctgggaggtaaaagttaaaaattgcccggttggactgtggggggcagctgtgggcc

SEQ ID NO: 144475 - DNA, 139 bp, Homo sapiens
tctcatgcatacaggtgtataggccacacagaggcagacacctacttttccccatccctacaggctcaatgctttgcaacatgtgcacacacacacacacacacaattgatgtgcatgtatgtcctctcttctatacac

SEQ ID NO: 144476 - DNA, 534 bp, Homo sapiens
ttattgtattgattaattgacaaaaatgtgatcagttgctcacaggaaactaccctgtatatcccctaggagcaggttatccaaacccatcacgaagtcctacagattctactgccagagcataactcaaatccattaacttctcttcgtgacctgtgctgtcatcctagctgattatctcttgcctctattgtttccctacttctaattcattctcaaagaggtcaaagtgactctcaacatgggttctatgttagtccctcacttaaaccatttaatgactttctttttcttttttttcttttgagacggagtcttgctctgtcacccaggctggagtgcagtggtgtgatctcagctcactacaacctctgcctcccaagttcaagcaattctcctgcctcagcctcccaagtagctagaatacaggcatgtgccaccacgcccagctaatttttgtatttttagtagagatggggttttaccatgttggccaggctggtcttgaactcctgacctcaagtgatccacctg

SEQ ID NO: 144477 - DNA, 560 bp, Homo sapiens
cttaacaggtaagaaaactgaggtcctgagcagttagattaggctgcatagttagttctgcaaggtctggaatccacgtcctggaatcctcccagtgccctttcagtgcatcagctgacctcgaaataatttaacagaagcagttaagaattaactttcctcaaaatgcttattaagcaaaagtaatctacattgaggtagatgagtaaagaataaggacaggttagggtagaagaaatgaggaaaaaaggaaacaccagaatggtccatattcatgcctaaaccctccctaatcctaatagggatttctccaccgatggtaacttgcaacttgaggggggccatgtggcataaagagttgtaaaccactatttccgcttaccctgtccattatatttagacaagaggaaagtgatgccagagaaaagatccaagaggacctgtctgtctctaaaccttggacaatcatttttctgaaatttgttgagttggagtagatctgagaaccgttccaggtaaaggtatgtactaacaagaaaatgaatgtcagattgtggcat

SEQ ID NO: 144478 - DNA, 378 bp, Homo sapiens
taagaagcagttagactccagatccctacttaactccacatggcaggtaagtgaccctcccccacccaagattggaagtttatcctttagataaaatagtgaaatgtaaaatgcaaaaaagagtaaaatggaaagtctgcagacacagggactccaggcataatttgaagatggaattatatactgcatatgagactccgaacacactttgccactcatctcccagaatgctagcagtctgtctcacccatacaagcagactgaagattcttttctggagactataactagtccaccaaaaaaaaaaaaaatccataaagatacagatattaccccacaaaatggcccacagtgtaccccaaagttgacacattccac

SEQ ID NO: 144479 - DNA, 550 bp, Homo sapiens
aaagaaatggggctgaagcaatcccaacattattagttttaaatgcttataggtgtaatataatctaacaagatctctttttcaaagcaaaaaatccatacaaatttagaaattatttcttataattgcaaatgctggatatgactatgcaaaagtccattaaagataactttaagaagctagagatcaaacatattcacctatagaacacatataaaaagtaactgtctccctattatacaaatggaatgtgtggtttgccatatagttaaccgtgacagaatcatggttttataaaaaaaaaaaaaatactgagtctcaaaaaatttaggcagaaatgatgtgtgctggacaactgggtgagatgactgaaaacaggggagttggtgatgacagacactgatgccaaatcacatgtgaagcactgaataaagtcaatgaactgtatgggtggaaaaaagtagtatttctaaattaatacttcatgtaatatgtgactttaaaaatgtatatgtggaaataaattaatacattaaaatgtgggtagata

SEQ ID NO: 144480 - DNA, 301 bp, Homo sapiens
tagtcaagtaagtcagaacattaatttctttgatctaattctgagaaagaggtgtcatgcatgagggtgctccagtactgcataatctcattaagtctggccaggtcataatttccatgaaacacccaggcttatcagtgccactggttgtgatgaacagagcagactgcaaatagcaaaatgccattatgggcctagtattacaggaacctaactgacttagaatctggaggagttctggcttaagagtcagcctctgggtaagatgcaagaggcagatgaccttgcgggcaggtagtgg

SEQ ID NO: 144481 - DNA, 387 bp, Homo sapiens
aacagcctaggagctcaagttaatgcattagtggtttccaaggtaggatttttttggtatgtaaaatattttagtgcattattgaactggtgttagaaataatgaaaaatatattttttaaaaaactaatcaggtatttgtgggacactctgacactgcattattttgattctgtgtgatctgcacattaagtaagtcatcttgtatcttttttttctgatgaccttaccattgttaccttataatggtgaagagcagaggagtgtccgctttttcatctgatctcgagcgtttcatcattataattttacagtaatatgcataatcttgtaacccccatggctctcctgtttctgattgggccacggtgtagctagagccatgttc

SEQ ID NO: 144482 - DNA, 365 bp, Homo sapiens
gctgctgctgttgattaaattactctacaaatgtcaaccagatcctgttgatgaatgatggtgttgaactgttgtcttttttttagatttgctgctgaaattttctctgttctattgtttagagaaaaatgtcaatatctccaacgataattgtgtatttgtcttattgtctgtttctcctctgtttgttccagtttttgtttcacatttttcatgtctgttgatttatgcctacacatttaggactgctgggtcttctgggtggattaagctttttatcattatgtaatttctctccatgtctcaatttttttctctgaaatctactttatccgatattattgtaactactcatgctttccttg

SEQ ID NO: 144483 - DNA, 485 bp, Homo sapiens
cggcatggcttccctctggctcctctcctgcttctcccttgtgggggccgcctttggctgcggggtccccgccatccaccctgtgctcagcggcctgtccaggatcgtgaatggggaggacgccgtccccggctcctggccctggcaggtgtccctgcaggacaaaaccggcttccacttctgcgggggctccctcatcagcgaggactgggtggtcaccgctgcccactgcggggtcaggacctccgacgtggtcgtggctggggagtttgaccagggctctgacgaggagaacatccaggtcctgaagatcgccaaggtcttcaagaaccccaagttcagcattctgaccgtgaacaatgacatcaccctgctgaagctggccacacctgcccgcttctcccagacagtgtccgccgtgtgcctgcccagcgccgacgacgacttccccgcggggacactgtgtgccaccacaggctggggca

SEQ ID NO: 144484 - DNA, 588 bp, Homo sapiens
gagcaagactccgtctcaaaaaaaaaaagagacaatagaaacaaagaccctcaaaacacatagaaagacagcaacaaccatccctagagacagggaaattcagagaacagagtacaggcccaagtgcagacaggtccgggatttgggggaagaggaaatggaaaagtagagaggaccaccagagaagcaaattgcagtgtgaggagggagcttgttgtctagtggtgtgggcagttaagacagactgaagaaagaggcagggaaccagggagccatagaaggtgggggagggctggtgacaacagcactattgttctgatagggggttggggagcaggcccctggggcaggaaactggccctcttcccctgctcagaggcgggatgctggcccagccaggggagctggcagccctcttaggagaaacaggtgcaatgctttgtaaggacgcccaggtggtcccctccccctgcaaatacccgccaggcagggaccaacccctcttaggaaatccaacagtcccagtcccctctaaatccctctctccagaattctagattcctccaaggttgtgccacacaaagagag

SEQ ID NO: 144485 - DNA, 598 bp, Homo sapiens
tctagcaggagcttagcgaattctcctcctcctgcctgggcagtagagcaagaccctgcctcaaaacacatagaaagacagcaacaaccatccctagagacagggaaattcagagaacagagtacaggcccaagtgcagacaggtccgggatttgggggaagaggaaatggaaaagtagagaggaccaccagagaagcaaattgcagtgtgaggagggagcttgttgtctagtggtgtgggcagttaagacagactgaagaaagaggcagggaaccagggagccatagaaggtgggggagggctggtgacaacagcactattgttctgatagggggttggggagcaggcccctggggcaggaaactggccctcttcccctgctcagaggcgggatgctggcccagccaggggagctggcagccctcttaggagaaacaggtgcaatgctttgtaaggacgcccaggtggtcccctccccctgcaaatacccgccaggcagggaccaacccctcttaggaaatccaacagtcccagtcccctctaaatccctctctccagaattctagattcctccaaggttgtgccacacaaagagag

SEQ ID NO: 144486 - DNA, 436 bp, Homo sapiens
ggaaataaatcctgatgaaattatttgtattaatcatttttttattgtgatgaaatatacttaacataagttaccacttcaaccattaaaaatgtgcagttcagtggcattaagtacatacacattgttctgcaactattgccaccatccatctctaaatctttttcatcatcccatacagaagctctatgcttattaaacagtaactcccattctctcttccctgcagctcaaggtagccacttatactacttgctgtctctatgaatttgttccaggtatttcatatatctgggagatcatggatatcccccttttacccccatttaatcactgcttctctccttagagatgtccactgccagtagtgtggcgtcgccttccagcttcctttcatgcatttacatccttgtatccctccttatacacatttctt

SEQ ID NO: 144487 - DNA, 615 bp, Homo sapiens
ggcctagtcactggttttaagagttcaaaaccaagctgccaataacctactctcttagcagtcttatctctttacagataaacaataagcccattttgattcttaggtattaagtaagttgccatgatttttgacttgtttaccttgttagctacacatgtaatacttttatttgaactctgtaagaatgtttagattgctttggggaggagatgggagagatggagatagtatatatcacatttacaatgtgaatttttaaagtgatatgttaccaaactagaagtcctaaatttgtcagtgattaaacttgggatcttgagtgaaacccttaaattctgagcttcttttatgtcaaatattacacaaattattcttgtattgcctattttcctcactgtgttccttgtgttattgggagaatcaaataagattttatgtatatctatatacatacacacttaatatgtatagactgcataaatgtgatgattgctgttaaaatttactgattgctgtaatgtcataaagccaaagaattttgaatttcaaaaaactaagcaaatatttagtaagctatacctcactatctgaaatctgcttggttcctgggtg

SEQ ID NO: 144488 - DNA, 233 bp, Homo sapiens
ctggaggaaaagacactgggtagacacagacagtaggcaaggatgagcggttcccattttcagttctagttgacaccactgtgggcagcagcagcagtctctgcaaagcctgggccagccacaacaccatgcagaaagttctgtggatatttaaaagccagctgtcagttcaagcttgttccactgagctttcagtcctgatggctagactggcagtgttcccacttgtaaac

SEQ ID NO: 144489 - DNA, 564 bp, Homo sapiens
gaacctgagaggcagagattgcagtgagctgagatcatgccactgtattccagcctgggtgacagagtgagaccctgtctcaaaaaggaaaacaagaagattacagtctaatgatttctgtgaactcagattaaacatactaaataatataatagtggaatccagtcggatatgaaaaacattgctcattgccaaatgtattcatccactctcatgctgctaataaaaacatacccaagacagggtaatttataaaggagagagggcagccgggcgaggtggctcacgcctgtaatcccagcactttgggaggctgaggtgggtggatcatggggtcaggtgattgagaccatcctggctaacacagtgaaactccgtctctactaaaaatacaaaaaattagccgggcatggtggcgggcgcctttagttccagctactcgggaggctgaggcaggagaatggggtgaacccgggaggcagagtttgcagtgatccgagatcatgccgctgcactccagtctgggcaacagagtgagactctctcaaaataaataaataaata

SEQ ID NO: 144490 - DNA, 358 bp, Homo sapiens
aaaagagaaatcctctaggctccatttgcttgttactactttccagtgcctttgtcttggtgatgagagttggtggttttgttagttcaggtaaaagtgtagtttttaatcagaatagacttgatttgggttaatccatgaaatttagaaaacaaataggacaaattgagatgagagaaaacacaatttaagaattttttaatgaaagaagatattccttctttgtatttttgttacagtattttattgcttagggtattcatatagttctattgggcttcaaagaactagaaagctaaatattgagaaacggctaccgggattacaaatataagtctccatcctttcttcctgttaa

SEQ ID NO: 144491 - DNA, 204 bp, Homo sapiens
acatttgagttctctcaattcgtacaaccatttagataccaacaagctggccagttgcctgtgctttccaaaacagttgaaagatggtaactgcatagaactttaaggtttgaaagagacctaagggaaaccgcacagctacctggcaatgatcctctggcagacacatcagttaccatgggaagaatgtctcatggttgacag

SEQ ID NO: 144492 - DNA, 534 bp, Homo sapiens
ccatagcttagcctagcctaccttaaatgtgctcagaatgcttacattagcctacagtctggcaaaagcatataacacaaagcctattttataataaagtgttgaatagctcatgtaatttattgaatatggttctaaaagtgaacagcaggatggttgcatgggtattcaaagtatggtttctactgaatgcaagtggctttctcaccaacataaaatcaaaaaataaaaaaaaaaaatctccttgtagctatcaggagacttcagtgacttaaatgcaagattgaatcccagtgctctttgcgctctttctatccctgtgtcccctatgtataactataataagtgacaccaggaaaatgttatgagagtataaaacagggattaaaaataatttgggggtaaaaggagtgggtcataaatacttcccagggaagatgacatttatactaggccatgaatgatgtaagattttaacaggcattcatgggggtggggcaggcattccaggcttagggaacaataggagcaaaa

SEQ ID NO: 144493 - DNA, 554 bp, Homo sapiens
acgttctttgacaaaagaccatgttattgtagatgtcgtgtgttccaccttgctatgttttttaaaagatagttatttctgttttcatttatgcagaattcagtgatgaggatttaatgaagcagtgcatttcagaatatacaagaaatactttagtcaaataccgggttacaatcatctagttatgtttaatgtcagtattctgtaccttaaatacattatatattcatgccttattttaaacagatctttgtataatatacataataggttatatattatactaatctgaggaataaaggtaagaatatttttgttagatggtagaaatttataaagcaagtagcaatgctgatgtttctgtacgatcaatatgcagcacaatctttgaagtgtgaagagttgtctctcttcattcatccttggttttgctgcctgcagccattattgtaatcaaatggtaactttattctctgtgctttctacttgagtcagactgtattttcttatacccccccatgcattccttctattcactgttgccatggtatcat

SEQ ID NO: 144494 - DNA, 428 bp, Homo sapiens
tagaaacagcatgtgatttttccctaacttctacctgtcaaggtttttggttgcaaactacagaagtggactctggctcacctacccaggaaaggaatttattggacagataggcagtgcctctcagagtcaacaggaaacctggagaatcaagctcagaaaaataagcacagacagctgagaatacaaccaaggtgctgccagaggaagcctgttaggagacagactctggtactgctggctttggggacttatccccaccactgccaccaccctcgattctgctgctacctctgaggcatctgtagtaatcctgtctctctgcttagctccctcaaaacacaagactgggcatggctggcgttccaactggccaagcttagtgctcttgcttaagctgccagggagagggaacaagggaggatgtg

SEQ ID NO: 144495 - DNA, 846 bp, Homo sapiens
gtgctggcatattgctttattttgttctgctttattgagaaagagagagagagggcaagaactgaaaccagcagaaaatgatctgtttgatgaaaggtaacaaaattataaaagtagtcagattccacagaatcccgccaaatatgaagaaactacaatcagaatatgcttctaatagaaccattggcccaagaagggactgcagcaggatgagtcagtgccccaagtcccagacacatttcagcagctttgagaaatgaggacaggagcacctaagtagagcacctggattgggtcaccacagtggtgatgataccttgtcattattgagctggattaaggaggtgaagaccccaccagaaatggagagcacacagcagaatgggtggtcacagtgttctcaacagcaaatagtgggtgtctaaagtccatttctgggctttgcatgggtcaaaggtaatccaatctcaccctcatcttgccccacccttcaggagtttccagagaccaagaataacttctatgaggaggcttctgttctctccccagtacgaattttgtccataaacaaacttgttgtttgcgtcaactttacttttttaaaaaaattttaggccaggtgcggtggctcacacctgtaatctcagcactttgggaggccgaggcaggcggatcatgtggtcaggagatagagaccatcctggctaacacggtgaaaccccgtctctactaaaaaatacaaaaaaacttatccgggcgtggtggcgggtgcctgtagtcccagctactcaggaggctgaggcaggagaatggcgtgaacccgggaggcggagcttgcagtgagcc

SEQ ID NO: 144496 - DNA, 369 bp, Homo sapiens
taatacatcaatttcttggcattcttaaattctaagtaatttttcatcatgtttatgtttgtcttaacaacctcacttcaactggaatctacaaggtatgactaaagttcaaaaagatgggccaactagataggactaagttttctggatgcagagaagaaaattaccacccccatatatatgttgttcatgtctgttcttcaggaagtcaaatgtagtcaataaacgtgaccaagatatgtctgcccttcccccgacacacacacaactttagaaggatgctgagacatcacgttatctaaagagcattagataatctatataagcagttgtaaaactttaggaaatgcagtactactgaagtatttg

SEQ ID NO: 144497 - DNA, 783 bp, Homo sapiens
ttaagacatgcaatggggggattatgtgcatcttcccgacaccaacatgatgctcaggaaggagacttcttgttttctcttaggattcttttactaaccaagattttgcctctactgcatatttccctttgctgattgtccctcccttttgacagaagatggcccagggcattcactactaagtctcaacctcttacccaaagccctcagtctagtgttgctctttccttcatgctatttttgtttctttcttttcttgtaatcatcttggcaataaaataatcagttttttctttctacctattaaagatgttaccttagttaattacagtggtttccttcagaatgataagtggtctttcaaaatgatgtaaagagatctaaatccgtgtgctccagaagttgaatgaagctctgtctagcacgggtgccagtgactctcccagagtgctccatgcagctggacccacagagtccctctgtgctgtcataccacccactgccttctgtgaatgagatattctgattagaatcctggtggatgctatttgagccagtgcccccacaactcctatgaaagccgaggaccacaggcccctgaagacaatcacaggtctctagactcacagctcatgaccgtcctctgcagacacagcttctcctcggatggctgagggttgtcattggctgtgtccttccttgtgcatgacaacaggagacatagaaggtctgtaagcagccctgcaagccaggttctgagcaagccctcctgtgtggggccct

SEQ ID NO: 144498 - DNA, 376 bp, Homo sapiens
tgcaggtccgacctacttggtctcatcacttctggagcatctcaggttcaagagcagccgcctctgcctgtgacggcttagatgttattcctttcttcctttcatgggcacattctgaaagattcaagtgacatggtactgtcctgtcagccacagaactccagttcaatcaaatgggagtttcttaactgaaacggacatccctccatctcctcccagctgcagttaggcagaataaagttatttgataatggaattagttcacaatccacagtgaattgtgcctgacagattagctggtatttgtttgtttttttatttgcttcagtgagatctggggacacatgtattttgccttcctcagatttactgcctg

SEQ ID NO: 144499 - DNA, 256 bp, Homo sapiens
ctgggggcggtggtgcacgcctgtagtcccagctactagggaggatgaggcaggaggatagcctgagcccaggagttcgaggctgcagtgagctatgatcatgtcgttgcaccccagcctgagtgacagagtgagaccctgtctctaaattaattattttcacaaaggaaatcaaagggcttttgttaaagtaaatgatatcctcaagctatagagtttaacactaaaacttttctgagggccgggcgtggtggct

SEQ ID NO: 144500 - DNA, 254 bp, Homo sapiens
taacgtatcaaggaaggcatgtaaccataaaaatatttttaaatgccaaaatgttttcataaagatgtaagcgtgcatcacttgattatttttaaaggatgttggggttgccctggctaataaccgtagccagcaaagtcgcccatggttatgacttcagtctgttctgcagaagtgattctgatgtcatgaaactgcctggacttggctgagaggatgatggcgctcgtaggagggttgtttaagccatatgt

SEQ ID NO: 144501 - DNA, 189 bp, Homo sapiens
  misc_feature (11)..(11): n is a, c, g, or t
tctcaggcagngacgactctcccctagactcagtctcctccatagacggattctattaatctttcaatggcttcccactgactttaggaaaaatcctaaacctttctaatggcccacaaggccctgcatgatcagtccctacccacctctccagcctcaccctcacctgtgtctctctcaccctccctc

SEQ ID NO: 144502 - DNA, 767 bp, Homo sapiens
acgttgtcttgtagtggtcgcgggtctgacacacgcattcaagttgtctgcgtcccgcgaagtctcacgccgaggtccaagcagcaggcgtcccgctccgcggactccctccgaggcccatcgcctgtgctcagggcggcgcgggcagagtggaagcttctctgcagctccggagctccccgcgcagcggtgcccgcgcccccgcagggaggcccgcgtgccgaggagattttggactttcgctctgagttctttactccttcgggtttcttcccacggttgcgtgtctgcttttccagtctcccccctcaggacactgtgcgacctccgcctctcgctccccctcggagcctccatcacgcaccgttcgctcttcccccggacctgatttttggctttgctgggtccccactgagcggcagaggcctttccagccctgctaggaacagagcagagggaggggcagccggccgacctgaggcctcggggcgcggcctggagagcccgggttgtttttttttttttggagacggagtttccctcttgttgctcaggctggagtgcaacggcgcgatcccggagagcccaagttcataaagattaagttcctttgtcaacccctgggctcattgtgtatcagaaatcttcattcctgtgttattattttattaaggagaagacgttttcatgatgttgctgaatgaagaaaaccttggctaagcaaaaaccccatcactgtgcacattctcataaagtaccaagaacac

SEQ ID NO: 144503 - DNA, 325 bp, Homo sapiens
actcactagccacacagccttgggcgagctactgattccctggtgcctccgtttcttcttatgaaaagggcgtaacgggagttcttagttcagcctgtcactgttaggatgatctctgtaaatacatgcaatcacctaaaacagtgcctggcatgtaatgtgcgtgtgtgtgcgtgtgtgcatgtgttacgtttcatgcatatctatttcccaactggactataagtttctctgagttccagtataaaaatgtatttcaggccaggcttagtggctcacacctgtaaccgcagcactttgggaggtcaaggcaggaagattgctt

SEQ ID NO: 144504 - DNA, 763 bp, Homo sapiens
ggcactgaggtggcagttcagctggctgttgagtctctgctcccagactggtgagttgggaagcaaacttgtttcttctgttctttcttcattctcccaaataataccaagtaggggaagctcaccccaagcccccatctggctttccttttttttcaacttgaggtataattaacatacaataaaatatgcagatgttaggtgttcagttggtaagttttgataattgtataaaccatgtaaccagcatgaataaagaatacacagaacatttcatctccccagaaatatcccccatgcctctttgagtcccccaaccccacacatatatacaaaaccattttctatcactatggataagttttgtttttggatttcatataaatggaatcacacaggatatactctttcatagctagcttcttttagcttagcatgtttttggaatttatccatgttgcatatatcagtagtttttttctgttttgcttttctgagtggtagtcaattgtgtggatatataaggagaaaaggtagaggttggtgaagggctttcatctggcacgtagcctgactaccctttgctcaagagcatttggaccaccagaggcccccctccttaagattaagatgttcacttacctgctttaaatgtaccacgtcacagcatatacactattatgtagctatgtcttgtaaaagtctctaatcggcatccattagatgagccgaattctcctggccaagccttagcctctcaggg

SEQ ID NO: 144505 - DNA, 396 bp, Homo sapiens
ctacaatagcgatgttatttacaggagtaattgaggaagttacgaaacttgtgacttctagaatgatgactgcttatcatttacgcctacatcttagctgaattctacccctttcataattctaaccttgtagcctttcattagttttacaaaggtggttaagctttgggaaggcttatatcatctttactgtaagattaaactagaaactaaatttctcctaaagttagcttggcccatgccctggaaagaccaagggcagtttggaggttaaaggcaagatagaattggttaggtcagatcttgttcactgctgtaattttctcactgttataatttttgccaaggcggtttcagtacttaaaataaaactgcatatagagctacaatttctct

SEQ ID NO: 144506 - DNA, 121 bp, Homo sapiens
actcaggagactgaggtgggaggattgcttgaactcgggaagcagtggttgaaatgagatgagattgcattactgcactccagtctgggtgacagagcgagactctgtctcaaaaacaaca

SEQ ID NO: 144507 - DNA, 1342 bp, Homo sapiens
agcggagttttgcccatgggcacaggcaattggtctcaactgcgcatggtttgccctgtaatgccctccaaatgaccagctgaaaagattgatagtctagagcagaggacctgcggcacctgatccacagaccagacagttaggaggcttctttgtcctcccagaagtgcaggcaaagttttggtgttcatcaaatgagtgatcaatgacaggttatcacacctactgcaaaaatatatggcacttccctctccacctccacagtgggctgtgaaaattaattgagttcaggctgtgaaaaacttaagctgctacatgaaatgcaaaatcattaagcttcagagattgtaacattctgcttgtggccttgggactgaaacaccagatgtcatgcccaataatgacttcacttttcatccaacttcaacaactcaagattgagcgcattttgggttttgaccttgcactgctatactgagattcagcagaagttaactacccgcaagactcgctccagagaactgaggcctcaggatcatcttcaacaccttcacccagagtacggagacaaaacccttgccacatagacctgccacaccacaataccaggtggagatgcaccgttgcttgagttggtccaccaagaaagttgccatagaagcctgaagttacgacagcttataaggaagtggttatcgattatgacggatggagaaaatggcaaacgtggctgaaagtggacatttttgccttgacaactccatctgctcctcctctatgaaagctccatccagggccaggcgcggtggctcgtgcctgtaatcaacactttgggaggccaagagatgcccaggtcccaaatgtaataattccatggtatgatgggttgctgctgcacctgtctgatttgagatgtttcccagtatggtcttgaattcctcagctcaagcgaccctcctgccacagcctcccaaagttctgggattacaggcatgacccaccatgcctggctaccttgaggaccttaaaagagggagcatatcctgaattatccaggtggacccaatgtaatctgaagggtccccatatgagggaggtagaggaggatttgactacagaacagaaggcaatgtgacaactgaagcaaaatgctacatgctggcttggaggatggaggaaggagccataagccaaggaatgccagcagtcactgggagctgaaaaaggtgaagaaatggactctccccgagcctgtagagcaagtatggccctattgacccttgatctcagccaagagaaattgatttcagacttctgacccccagaactgtacggcaataaa

SEQ ID NO: 144508 - DNA, 225 bp, Homo sapiens
acccctgtgctgccttttccatgaacacagggacaacctccgctcctgctgtggcttgaggtgctgagtggcggagacgcctatgtggctatgagagggcacaaatcattgtccctatgttcggagaaggaaatcaggtcaggaaaggttaaggggcttgcagttcccacaatttttttttctttgagacggagtctcgctctgtctcccaggctggagtgcagt

SEQ ID NO: 144509 - DNA, 247 bp, Homo sapiens
cgacccagcgggaggtcagggctcagtgttacttacccccggagtggcctgggctcctcaggctcagcatgtggggttgggggtaccccagtggttcaatttggcctccagttgttgcagactttagcaccttgaagtgcccaaactggagagatcccagggatcatcatcccaggcccatccgtgtttagatggggaagccaagtccctgagggagggaggggctggcccaaggatgcactgttag

SEQ ID NO: 144510 - DNA, 133 bp, Homo sapiens
ttttacatacatgaatgaacaaatggacaaatgaacatacatgacttcctaaaaggatgtcatagctcctgatagtcatgacagcactagtattaacctttgttttgtaatgagtttcaatttaatgttaagg

SEQ ID NO: 144511 - DNA, 355 bp, Homo sapiens
tccctccccttattgacaattttgctttccaaaagttaccagcttgagttaccagccatcaactgtggtccaaaaacataaaatggaaaattccagaaataattcatattttaaattgcacctcttagccacttagtagctgactcagttatcaaatccactgtggcagcattgcagtgcatgtgttcaaggaacccttattttacttagtaatggcccctgggtgcaagagtggcagtgctggcaattcagatatgccaaagagaagtcataaagtgcttccttcaagtgaaaaggtgaaagttctcaatgacggaaaaaaaaacatctgctgacgttgttaagttctacagta

SEQ ID NO: 144512 - DNA, 401 bp, Homo sapiens
atttgaagttacttcagccagtgctaatgataccgtagttgcagatttgaaccactgagatgcaattcacttatttaaaaactacttgataagagtttgttgggaggattgctagataaaatatgggacacttagttaaatttgaattttacataaagaatgaagattttttaatgtaagtatgtttcatataatatttgaatatgtaaaagtatccaaatatacttaaaaattattttttctccatttgaaattaaaatttaactatgtgttctttcaaaatctagcattcttacatctatgttagcttcagttagaagctaggctctgtggaagacaaaatggtgaatcagtcatagatccttcactcagtctagaggagcaaatgagagtcaaatatt

SEQ ID NO: 144513 - DNA, 456 bp, Homo sapiens
cctgccttggcctcccaaagtgctgggattacagacatgagccactgcgcccggccactattataaatatttgacctgcattagctcattagtcctcactaccacctaatgaggtaaatcttgttattatccccatcttatgggtgaataaatggaggctctgagaattaaatgacttgtccgaggacttcagattgtcatgattccctcttcagtgacattcacccaggaggctggtgcatgggccatgctcagcagctgcttatcctatccaaggccatccacatccctctgtcccgcgtggatgggccccctccccctggccagatctctaggagggaacgccagtggcctctccgctagatagggctggaaatcccagtgtggctttatcagctgctctcttcttaccaggaagctccaggttggcaagcccgtgtttgttgagatttggca

SEQ ID NO: 144514 - DNA, 353 bp, Homo sapiens
atttcagagtgaggtggcaatttgttgttgtttggttttgtgggtttttgtttgtttgtttgtttgtttgtttttgagacaaggtctcactgtcacccaggctggagtgcagtggcatgatcagggtttactcctgccttgacctcatgaattcaagcaaacctccttactaatcctcccgagtagctgggattacaggcacgtgaccccacaccctggggtgtgaactgggatttgatgttttcagttggctctctaatggaataggttcccttactcttgtagaatcagattgtcttcatgattatcattcttgtgtgcattatatttctactaccctgctattttttttt

SEQ ID NO: 144515 - DNA, 522 bp, Homo sapiens
agtctaaaagtaataggtctacttcccctgttgccgagtacactctctgaacacttcataaagtgtacctccatgtagccttttcagatagcagtgatttagacatagaaacaacattatcagtaacaaggaagaaaaaaaccttaattgtctaattgatggctattatgagattccgtataattcatggaattggtaagaatttcacccaaggcaagaatttagcatggtgtatgcgtgtacttttatttagtcttcaggaatcacatggattgattgctgatgagactattttttaactaccaagcatatatattcatatatgctcaatggatacaaattttccaagatgttatttttttcttaatgttgggtccattttttcttctgtaagtactcatttctgaaacaacagtgtaagtaatttggaaacatgatttagtatgcaagtattcactttacactcctgtcttttggaatgcatttgatgcacatatttgttcaaactaaataaggcaaaga

SEQ ID NO: 144516 - DNA, 369 bp, Homo sapiens
cagcattttctaagtagtgggtgtggacactgtctacgttggagtattatgtttcattagatctaaaatgggaggctggatgccatggctcatttgtaaaatggagataataatggtactaatatcttcataaagttattataaggattaaagaagttagtatttgtaaagcctttaacacatttgtgtgtgcttaaaattggtgtatagtaagtgctctgtaaatatttgttaagtaaacattattaaattttaaaaacactcaagatatgtgtcacataagaggtgaacctagtccggggctctcattttcctgttgaggaaaccctgcacaaccttgtacaatctagtaagctgccctgtccatac

SEQ ID NO: 144517 - DNA, 380 bp, Homo sapiens
atctgaagttttctgctgggatgcccctgtggcatttcaaacccattgcctaatcagtacatttgcctggcccaagaccacctccttcctgccactgaaaactgaaatcttgacttcatctggggcttcaccttccacatcattgtcttccacccacttccaattcatcactgagaatgcacactcagcttttcttgtaacctggctcacttcttttcctctcctgccgctgccctaattttaggccatatccccatttttctagactatcacaaaagctttctacaccatatcctgttcccaacatccagttattctataaaataattaatttccaaaatgctgctcctatcctgtcactcctgccctgccttccctga

SEQ ID NO: 144518 - DNA, 751 bp, Homo sapiens
agccatgtttccaaggaggtctgtacaaaaagccagacttctgctggcagttactgagagagataggctttccatccatggcagccatttacttttgctctgggagacgtttgtaatagaaaaggcacaactggggtatttattcattccccccgttcctctagtgtttggtggcgttgccgttgcaagtgcgcagggctaaaatgaactggttatcttaggatcatggaaaacctggaatcaaggctcaagaatgccccctattttcgttgtgagaagggaaccgattccatccctctatgccggaagtgtgagacgtgtgtcttagcctggaagatcttctctaccaaagagtggttctgcaggatcaatgacatatcacagaggaggtttctagttggcattctgaagcagttaaatagcttatatttgttacactatttccaaaatatccttcagaccacacagggaaaggatttcatctataacaggtcccggatcaacctcagcaagaaacgaggggaacagttgtgaagtcctccttgaaccaaatgttggataaaacagtagaacagaagatgaaagagatcttgtactggtttgcgaacagcacccagtggaccaaggcgaattatactctcttactgctgcagatgtgcaaccccaaattactgctcactgctgccaatgtgatcagagtcctgtttctgagagaggagaacaatatctcaggtaaacaaggccacaggca

SEQ ID NO: 144519 - DNA, 550 bp, Homo sapiens
taaaaattcaacaccctagctctcaccaggggatgtatccctccccttcctgaaaataccctttcctgcagtgatcttaagaagggcaaagttggggtggctagatttgggagctcaccctcaccgggtgattgatcttgtctttttggaagagtttgcattaagctggtgggaaagagacaagcaggaatcacctgacctgtggccatcttaagcgaaattttgggaacatggctgtgaaactgacacgtggggacgtaatacccagagaatgcatctcccctttggcctctgaaaggctgactggcgaccaggacccttcccccagtgaaaagcatcccctgctcccatgcgaaagcatctcctacctgtttgacaggaaaatgtcattgccagacagatgaggaagattaaggtaaggggaatcagattagtttcctctacgtagtgcccactcagacgtgctggctagctgacccacagacatctggcaacactggcaggagaccaggatcccaggggtttgactttgcccttagtagagccagac

SEQ ID NO: 144520 - DNA, 397 bp, Homo sapiens
atttttatggctgcaggtattagagggcagccagtctacagaggtaggggctgcccatcctccagctgtcttttgcaatacgggcatacacttcgagccaacagcagctccagccggccgtgccagctgtcaaatgctttctgggctggcacggctctttgaatccgtggtaatggcttcctctgttgaatgtcgtccaaaagcaattgcttgtcagcttaaaagcgtgtgccatgttgtcatgcccgccgtctgagagggcaggcatccccgcacacttgcagactgggatgctgtagcatcttctcatgagtcagggattgggtgtaacttttgccaaaatttcctgcattttccccaccctctccaacatgtctttgaataccccatatccttt

SEQ ID NO: 144521 - DNA, 724 bp, Homo sapiens
gtctgctttacttagagtgaggctttcagctctgaagttgcatggatcttctacttaaaacttgtgagctaggggaagattaggggcattttacatcaaaccagggtatacagtggtctggtcagtggcctaggaggacatgggttttttactatagaagatgtggaagaggaaaggaaggagtagctcaagaagaaagtaggtaggatggagaaggacgtttctaggagaagaagcagtaaaagaaaggatttggaagggcaagtgctgatgatgtatttgtagaggaaagggtaactgaaggactgtgcaggaccctgaaggccaggctaaggtacctaaattaggcacctgggagtcatcaacagttgtagagcagagcagagtaaatcagaaaatatacatatgtccacacatagaaatatgacttaacgggggttttcagacatgccacattaaagaaaaaagtgtaattgaacccctgtgtacccattacccagctttagtaattttcatgcatttatttcatctattccttcattgccacctccaccctctcttgaattattttggagcaaatcaaaagtatcacttaatctgccaatattgtagtgtgtatttctaaaagataagggcattttgaaaatgtaatcacaatttcatcatatacctagaaagtattagcagcgtttccaaatatcatctgatcagtgttcctatttcc

SEQ ID NO: 144522 - DNA, 156 bp, Homo sapiens
gcctcccagtccccatctgagtttgggggtccttcctggtacggtggggggctcttgctcaggatgccctcccatttctctctctttttttttgagacaaggtctccctctgtttcccaggctggagtgcagtggtgcgatcttggctccctgcta

SEQ ID NO: 144523 - DNA, 431 bp, Homo sapiens
tactgggattacaggcgtgagccaccgtgcccggcctcatatccctaactttcattgcatcccttactgtgcaaaaaatgggctaaatctcagcccactgaggtccttccagctaaagtctggaaacagaattaatgaattctggctgtagaattaatgatcatcactatgtatgtatatgtgtctggcacattctcaaatttgtgattcctcttattttccatcacacgccaggtattttgtcttcccaggttgacacgtagaaagaaaagtactatttattcttttattctttttttttttttcgagacaagatctcactcttgtctccctggctagagtgcagtggtgtgatcatagttcattgcagccttgaactcctggactcaagtgatcctcccacctcagcctccctagtagctgggactaca

SEQ ID NO: 144524 - DNA, 125 bp, Homo sapiens
tatctcgctggctttagcagagaaaaaactaattcctgataaacggatggcaagatccaatttcccttttaataaatagtaattggtagggggaaaggggaaatagggacggaattgttaaaaga

SEQ ID NO: 144525 - DNA, 446 bp, Homo sapiens
agacgtgcactgatccacacagagacgctcgtgcacacacagacgtgcactgacacacacagagacgctcgtgcacacgcacacaggcgtgcactgatccacatagaacgctcgtgcacacgcacacagacgtgcactgatccacagagacgctcgtgcacacgcacacagacgtgcactgatccacacagagacgcttgtgcacacgcacacagacgtgcactgacacacagagacgctcgtgcacacgcacacaggcgtgcactgatccacatagaacgctcgtgcacacgcacacagacgtgcactgatccacacagagacgctcgtgcacacgcacacagacgtgcactgatccacacagagacgctcgggcacacgcacacagacgtgcactgacacacagagacgctcgtgcacacgcacacaggcgtgcactgatccac

SEQ ID NO: 144526 - DNA, 104 bp, Homo sapiens
atcagcactgtgtgagttgtttgacccgtccattcatgttgtgggaagtagccataaagacaacgagagcagcttatctacggatggggctgtagggtgggagg

SEQ ID NO: 144527 - DNA, 252 bp, Homo sapiens
aactaattctataaggttgttataaggaactaatgagccaacttgttgaggtgcttggaaccattctggcacagtgttgggctatgtgtttgttgaatgaatacaatcatgatgagaagtttgaattgttcatctgaaaagtcagaggcaactattaagttcatctcccatggcttcgagaagaagatgctcctgaggtttcagtttgtaactgtgagttttctatgagagtagctgtgtatgtggggggtg

SEQ ID NO: 144528 - DNA, 179 bp, Homo sapiens
actctcagggtaggatgatccacaggaagctttcccattcaccacatgtaaatttcatgatggcctacatacctacccatccagagagaaaagtttccaatgcaaccagcttggtgccaagtacacaaacaaccccaatcgatatttacaagttttgcaagttcccctctcctccctcc

SEQ ID NO: 144529 - DNA, 227 bp, Homo sapiens
tgttaggattaccagcgtgagccaatgtgcctgtccccttctagattattttgaaacaaatcttctgagttattttgcagcaaaccccagaattctgtcattgtacagtgaataattcattgtggatctttaacatacaaggacatttttatgaaaccaaatcaattgtcttattatgtccaacaaaagaaacactaatttttgaatatgtaatgacacagtacatg

SEQ ID NO: 144530 - DNA, 149 bp, Homo sapiens
aaaaggataaggagaaggcaagtttggagggtggaaggggcagattgaagtggggtaccagggatcatggagttgggggagggggttgagacaaagagcacagaagaagtagggttcctcagtgaacaccctacactgacttatgcaca

SEQ ID NO: 144531 - DNA, 728 bp, Homo sapiens
atttagattagtttgtaaagacgtaggtgtgcttgctagtgcagtgttccctataatctgtggatagatatttatatttaaaattttcccaaaggaaaaaaaattccatgaatttttttttttctctgcagttctctctttctagttgggttacacaaaaatgtattacttagacatactagctttgtatttgccacctgtacctataagagattctctaccaaattgctttctgaggtccccggttaccattagtagggttaggctgagttaagcatgtatgtccaaacccagctacttgggaggtgggaggatcccttgagaacagaaatttgaggctagcctggacaacatagcaagacagcagctcttaaaaaaaaagtcgctgggtgcggtggctcatgcctgtaatcccagcactttgggaggctgaggcaggcggatcacctgaggtcaggaatttgagaccagcctgaccaacatggtcaaaccccatctctactaaaaaatacaaaattagccgggcgtggtgacacatgcctgtaatcccagctacttcggaggctgaggcaagagaattgcttgaaccctggaggcgaggcgaaggttgcagtaagccgagattgcaccattgcacactagtctgggcaacaagagcgaaactctgtctcaaaaaaaaaaaaaagtaaatatatccatatatctacattctataaccatgtgttgtt

SEQ ID NO: 144532 - DNA, 1463 bp, Homo sapiens
  misc_feature (1443)..(1444): n is a, c, g, or t
tagaatatatgggagtgaacctgttatagactacaagttgagtaataacgatctaagtaatgagtccccagaaaacacagaataccttataaatggtatgctatgaaagggaaattattctttcatagatccttgaaatgttagcatctgcagaagaaatgaatgagaagtttaggtctcattgaaaaaagtgaagtgggttgggacaagtatatatttaaaagatttggctgggcacagtggcttacgcctataatcccaacactttgggaggctgaggcaagtggatcgcttgaggccaagagttcaagaccatcctgggcaacatggtgaaaaactgtccctactaaaaatagagaaaaaaaagaaaaaaatgagctggacacagtagtatatgcctgtggtcccagctactcaaaaaaaaaaaaaaaaaaattccacaaatgaaaaatgagttagggaaaagttccagtatttgaggtttatcctagaaaatagaagaccagactaaaaaagtaacagctaccttagagcatataatttgtaagcagtgtaatgggcactcataatcccaccagagctcttgtgtggaaacaagtttgggagataatttgctgaatacttctatgtgccaggcattattttacctcctagaaatacaacacctagttctaggtgctaaaagataagaatgcaaaaatgcctgctttcatggagcttacctgctaggaggaaagcttggctaaatacctaggctgatttttacctgtatgttttaaggagtaataaaccacatctctaaataccattttcttgaagtaatagctggttctaggtctgaatcatgaaatgtacaagatatcctggaatatctagtgccagaaagcaaggaagttaatagattactagagtcctgtctaaaggatacacaaaccaacttcaagagactcatactggccaaaagtggaataattttcatcagaaagaacagttacagcagtagattgaaatatatcaaatatatttaatgaggtaatagtgttaaacatatattgatcacctttggagactactaggccatcaacccactattcagaaaattggtaaataaaggaaaagcatttatcctacctttccattacaaccaaatgtcatggtaatcagagagttgataatacaaagttctttgtagaagaattttagctaataaatacaaaagaaatgataaaattagaaaataactgtttttgcaagcctcaacagagaagcagtcaatctagacagcactcattactggctgctaaaagcagtaggtaaaaagtggatcgcttgaggccaagagttcaagaccatcctgggcaacatggtgaaaaactgtccctactaaaaatagagaaaaaaaagaaaaaaatgagctggacacagtagtatatgcctgtggtnncagctactcaaaaaaaaaa

SEQ ID NO: 144533 - DNA, 158 bp, Homo sapiens
tttgagaccagccaggacaacatagcgagaccccttttctagaaaaagtaaaaaattagccaggcattattgtacacacttgtagtcccagttgctggggaggctgaggtgggaggattacatgagcccagtaagtcaaggctgcagtcagctttgat

SEQ ID NO: 144534 - DNA, 299 bp, Homo sapiens
atggcaggggacgggtgggaaatcggtatcaggtcccggcccgctctctgggttcggcctctctgttctccgagcgtcacccctgccctccccgccgcgtcccagcccagggaagggggtgctgcagagcgtcccccggccccagcccatttaacacatggaaagaccgaggcctccagatgggtaggaaggggctcgccttaggtctgtctccagcgatggtgggcaaggtgcatggcgctaactggatgggtggggagggtccatccccccgcccaccccaaccccgccttaggata

SEQ ID NO: 144535 - DNA, 275 bp, Homo sapiens
tttgaagtactaagaaagttaaagaaaaatgaatatgacttatacatgaggggatatccaaaaagcctataaacatttgaaaaggtgttcaacctaattagtcactggggaaatccaaattaaaaccacaataagatactactgcacactcaccagaactgcaaaaaatgaaaaagtcagaaaatactaattgtcagtgaagctgttaagctgtgaaaaccttcatacactgttggcaaggatgtgaatttggaaactattctactaaagtgata

SEQ ID NO: 144536 - DNA, 310 bp, Homo sapiens
ggattatcatgaggagcaaccagaaaactgtgctacactctctaaggggacacaaattgtcataattttccagaaaggaacataataagaacagaagtgcaattccatcaaatcttgccacatatgtgttacatttagtattctgggtaacaaatgccaaacttttaaccacttttcaggggtgagaggagaggaaaggacagagccggcatagaaaacttgttaattagtctgtaaaagagcaagcaaaagacttcaccaaagttaccacttcaggacaagaaatatttttcttatataggagagactg

SEQ ID NO: 144537 - DNA, 212 bp, Homo sapiens
aaagcagttctcttacacaaggcagtccttgccccacccccggtcctccgcatttcttaccaagcagtgagcccagcttgcttgaattttctgggtgtcctgccttttgatgttcatggagcgtgtacttacttatttagggatggggtcttgctctgtcacccaggctggagtgctgtggtgcaatcgtagctcactgcagcctcgaactc

SEQ ID NO: 144538 - DNA, 292 bp, Homo sapiens
tgaccttgtgatccacccgcctcggcctcccaaagtgctgggattacaggtgtgagccaccgtgcccagctatttttattttagagatagggtctttctatgttgcccaagctggtcttgaactactggcctcaaatgatcctcccacatcagccacccgagtagctaggattacaggcataagccactgctcccagcattgtgcttctttctaagtggtggtggcaggctgagctatgataacttgtccttcatttttatttttatgtttttatttttagagacagggttt

SEQ ID NO: 144539 - DNA, 556 bp, Homo sapiens
gaactgtgagaaataaatttctgttgtccataagccacccagtttacagtattctgttatagtagcttaaacagactaagatatactctaataaccctcaagaaaaaaaggatgaaaaatatcaaattcatagaaaatgaaagtacagatatcctaactataaagaggaatttttatgtctttgtttttcactcttagaacagaaaaaaaaaatgcaaaggaaagatgaagtgataaaacactgatcaaaaccaataaatctaaagacagcaaattctctgtcttgtcctcctcagtgctctgttgtttatttgtacctagcacaggtatactatgtatggcaaccttgccttaaggaacagtcatgaatgaccacactctaatccaacaatcaaaatcttaagagtttattttaaacagttctgcatatataacaaacactaaacaaactctgcaagggattaatttaaaaaaaaaatctgtgcagcaaaacttaaatgtaacatgtccccaaactcaaaaatatttaaacaaatgacacactgttaaaatgcta

SEQ ID NO: 144540 - DNA, 455 bp, Homo sapiens
cattattgtttctgccccaatcctaaagtctgttcctcattccttcttgcctgctcaaggactttccagtgtgtccgaactttgaaaacaaccaaacaaaccttccttcaatgctgcatcctccagctataatcttctttctattgcaaaagtcctaagaagcagtgcctatcctcttacctccactttcttacatcttagtctctcctgagtagtctgcactcaggctttcatcccctccggttcactgaagcaattcttgttgaggccaccagcaaccttcatgctgccaaatcctatagtcacttctcagttgctcacttcccttccttttgaaacactatttgcttccaaaataccacacctttcccccctatctctgagcattcttttcctatgttggttttgcttcttctattccagggctcactctgaggacccattgtctttcattt

SEQ ID NO: 144541 - DNA, 455 bp, Homo sapiens
gttaggatacatgaataaacagattaagatgactgttgctctgtaggttatattttgcagagaggagacatacaataaatatgatacatacataaatagtatagaattctagaaggtagtaagtgctatggcaaaaagaaaagagcaatcagacaggatagtagggcactggagaggagaagttgccattttaaatagggtagtcagtataggactcattgagtgacatttttgtgcaaagacttgaagataagtatatggtaatacacacagtgtgtttgtgtacttctgaatgtttaaactgccttgctcttttaagtaaccacatagttttctattggatgtacataatttatttactctttagtgattaagttttatctagtcttatgatactgtaaacagccacagtgatgatcctttcttgtgttatgtgagcacatgcacatcttgta

SEQ ID NO: 144542 - DNA, 442 bp, Homo sapiens
ccccggttcagtagataactgtgagagagacaggcggagagagagagagacagagacagagtagagagaaagagaaagagacagacagagatagacagagagacagagacagagagagacacagacggacagggagggagggacggagacaggcactggagaggagaagttgccattttaaatagggtagtcagtataggactcattgagtgacatttttgtgcaaagacttgaagataagtatatggtaatacacacagtgtgtttgtgtacttctgaatgtttaaactgccttgctcttttaagtaaccacatagttttctattggatgtacataatttatttactctttagtgattaagttttatctagtcttatgatactgtaaacagccacagtgatgatcctttcttgtgttatgtgagcacatgcacatcttgta

SEQ ID NO: 144543 - DNA, 160 bp, Homo sapiens
cttccacccctgcaaactgattcatcatgatctccagtcccttgatcactactttctctctagttttgggctccctcaacctcacttcctacctgatggggcctaaacaatcatattagatcaacctacactcttgcacatacccttttcttgatgacaa

SEQ ID NO: 144544 - DNA, 350 bp, Homo sapiens
tgacctggggggtaatgctggaggataatcagaacacctattaataaattaaaagtgtattattacatcaggattggctacttttgaccacgctgaagcatatttttaaccatccaattcctcttgaaacagtctctctacttactttttttttgttttgagatggagtctcactatgtcacctaggctggaatgcagtggcatgatgtcggctcactgcaaactccgcctcccgagttcaagtggattctcctgcctcagcctcccgagtagctgggattacaggtgcgcaccaccacacctgtattttttttttttttgaatttttagtagagacgggatttcaccat

SEQ ID NO: 144545 - DNA, 485 bp, Homo sapiens
ttctactctggcattctttgacaattaccatgattggattataggtaaggattctttaaaaccttttcttctttattatatctttagagcaaatggccattaatttgcaaatacatttttttcatgaaatcctctaatcaaatgccacacatttaaggagttagctatttgtttaaaaaggccattttgaaagagagaactgttctctttatgcaaacctcctaatgaaattcaacagtgaatctgattttatttgcattgacccacctctgagtttaagttttttatgtttaacatatgggctgtttagccaccttaacttctaattcaaagtcaaccagtaattaaactgcagtttagctagaactgctatttctataattctggatagactgaagagtaatacagatatgtgagaagcttgcagatttgtcaaataagttgaatttgatgtatggatgttaggtcattaccacacttaaaag

SEQ ID NO: 144546 - DNA, 197 bp, Homo sapiens
gtgacagggagaacccagagtcacaatgacagggtttcaacccagggtgtggcacttcctaactctgtgaccttggacaagcagctttacttctctgtgtctcagctgcatcatctgcaaaatggggtttatagtcaggcttatatgaatttactcactgttctaaagcattcagaacagtgcctggcacatagtgg

SEQ ID NO: 144547 - DNA, 723 bp, Homo sapiens
tccttgtatagttccttttacaaataaccacagatagagatctcaattagtcatatttcttatgcctaactactcttcatttttatttacgagactctctcatatctcctgtacctactaacttagtggctatatgcttgcacccagcaaaaacagcagtcatggttaggaaggcagtgcccttaatatgacctctattgcttgtctgggttccactgtccagcagagaacactttgctgatggcctttgagaagtgccttgggtcacagttttatcttacactgtcagaagtgtaatagcttttggctttatcagaactagaaggcttgaaatcaccactcagtcaatttgtattgcagactacaggcagagaactccatcttagtatgactttatttccttccagctctgttaacaaaatgactagtttttacctgagttcatctttctcaaagtactttgctaaagagacaggaagaaggcagtactgtctcactgacccagagattcactcccaaccattttccctgctactacagattcaaagagcaggtagtctgcctgctaaggtactgagttgacaattttatcaaatgtcttgtggcgggggaaaaaaaaaaggaggggcttggtcaccagcttttcacctgtaatacctgtgctgcctgtcagttaattaataccacataatttaggttaatgtcatggtctctacagaaaat

SEQ ID NO: 144548 - DNA, 228 bp, Homo sapiens
ggaaggatggtttggcacaaagtcattgtggctgatgctggaaagtaagggcaagtggaggggccagatgaagctgctgagataaatggggaccagcttgtaggtgacactgagaagtctggtctttattctaaaatggggagccatttgtgttttaagtggagatggggcaacaaaaccagatcagaaaagatcattctccatattgtgtgaagcatggattgggtg

SEQ ID NO: 144549 - DNA, 623 bp, Homo sapiens
agacaatctggtacaaatctgcatagttgctggaaaaattagtgtccacattcttcttacagtgcatccaaaataaggacccaatgtcaaagtgtaggcttaactggatgagagaaaggtagagaaactacagctcctccctcaggtcagatttaaattgagtggttactgatgtcttttttaaaatgtgaaatttagtggagctgcctttggaagtgtggtatttatccccgctttagtctgtctatccatagtggctgggagcttcaggttaggctggcattctatgaggtgttcttggtaaggattagctggcctggagtctcactatgtcaccaggctggagtgcagtggcgcgatctcatctcactgcaacctccacctctcgggtttaagactctcttgcctcagcctcccgagtagctggaattacaggcacacaccaccacacccagctaatctttctgtagaggttattattattcaagggtgtttttcaggaagctggtggacagtggtgggcatttctgctctgggattcaggttgtccttagaggagaaattctaatgatctggtagaacattaaaaaaagttctcgaatatttaattattagctatcaat

SEQ ID NO: 144550 - DNA, 438 bp, Homo sapiens
tcggtacccggcacatcatacgtacccaggcaaaagtgagaggtcagaagggtctccatggttctcactcctctctctgtgaccttcactagctcacttccttcctgcccagttctcattctctcgtccagtcttttctttgtcttcctgtggatgaatacatgcataaacataagaataaaggcaaaagtctcaatggaatctatcaaactgttcattgttaaccactttcctgtaggttgggtgggggaggttttactttcactttattcatttccttccttccttccttccttccttccttccttccttccttccttcctttcttttctgtcggagtcttactctcgctcagactggagtgcaatggtgcaatctcagctcactgcaacctccgtctcccaggtacaagtgattctcctgcctcagcctcctgag

SEQ ID NO: 144551 - DNA, 438 bp, Homo sapiens
gggagagtaaaggaaccataggattgcctaagatctgacttaattggggcaccctgattcagcagttccttcaacttgaggtgtgcgaggctccccataaacttcgaagcgccacgtccccgtacgactcacccgcggggcgcccggccatggaggagcctcctcaggtgaaagatgaggccgggcgcatgccccagggctcggtcactgtgccagatcagatgaatgaaggccgaatttccccagccggacctagtaaggcacatacccagagtggagatatcaattggtatttggacagtgggaggaatctgaaagagcgttcagcacagtcccttcttttgatctatgagatccaatctttgaaataatccatctcgtcatgcacaaggtcacacacttcctagttaccagtgtcgtcctggaacctgggccttg

SEQ ID NO: 144552 - DNA, 351 bp, Homo sapiens
aatttccaagtactttaagctatagaacaacttaataagaatatgaacttaataaaacaagaatgcaaagatgagatgtgaaaacagcagaattaggtaaaaaggaagattgcaaactaaagaacccattaggacaaaacaacattatagaataaattataaatagagtgaaatagaaacatgtggctaaaaattgaattatggacagaggaagggcttcagataattacattgacgggaaatgaaaaagaagaaattaaatgaaataactatatgtacatatatatgtatatacatacacacacacatatatatattcttaagaaagaataaaatgtttagatctaaata

SEQ ID NO: 144553 - DNA, 151 bp, Homo sapiens
gctttagagaaagaatacctcatagtaaaattcaaaggtccgtgaacctatagtgatagtttctgggtgaaggggtagccattggaaacttccagaatccccacagttacactattttgtcagtttttaagtctaattccgatgactcatc

SEQ ID NO: 144554 - DNA, 514 bp, Homo sapiens
cagaagttgaaataaatgaaagcttcattgaagactgacacttcattaccttatcttagaggcaaggaatactatttttctttcatattatagttactcattttaataatcttctcatctacaaagagagcttctttatttcaccatgaagaaaactacttttcattctaagtctcttgtttacttgataatgaacacatcttttgattgtgataaggaagattttcttcttttggctagtatggaaataattataaaataagaattgtatggtaacccaagtataatagcatttcttcctttttaaaaaagatctcagtggaattgtttgtattaatgcagcatatatatgataaaaaccaacactctgctgttgatatacagtagtaatctatagtgtctgactctcttgaaatactctttccaatatgaatccagaatgtgaaagtggtatggatgaacaaaacagaatatgtagggcacaagcaaaatatggtaggaagaaggaaagagc

SEQ ID NO: 144555 - DNA, 161 bp, Homo sapiens
tggggcggtgcagtgggagagagagtatagatactgttcatcacacccagtgcagtcggctctggtgggaacatagggtgacctcagtgtgtggtgaggacagtgatcatggccccttttacaagttgaagcttagttctggagtggtggaccatcagaag

SEQ ID NO: 144556 - DNA, 132 bp, Homo sapiens
tgagggtgcgggcggggcaggctcctgaccctgcccagccgtccctgcggtttgtgtgtctgctggtctggggtctgacccaggcacagaggcagaccggccacaaacacagacacaggcagtcaagcctca

SEQ ID NO: 144557 - DNA, 551 bp, Homo sapiens
gcgcccagcccacaaaagtttcttttaatgaacattcacaaagataaaacatatgcggagggccataaaacaagtctgaaaaaattccaaaggattgaaatgatatagagaatgttatctgaccaaaacataattaaattagaaattgataacaataaagtatctagtagatcttcaaatatttggaaattaagcaacacacttctaaatccctgggtcaaaaaaagagcacatgtatagcatctagcataatgcaaccaagaaatacttgaaaagacccctatgtttgggttgaatattttgactggagaagatatgagagatcaaataggaagttcacctttattcttcactactggagctacttagaaaagccctagccctagagaacatactttcctctactgttaatttaagtaaaaagtatgtttagaaagatgttatggaaataattgtctatgggtgctgcccaacaagtaaagtagcaaggcagatccttcaaaaaatcaaatggcaagcttcagtcagcattaaaaatttttcaaacatag

SEQ ID NO: 144558 - DNA, 330 bp, Homo sapiens
aaagccaggccaaccggggaagccctggataggaccggccaacttctcagatggcccaggcagccattccaggctattccataaggctagagcaaattagttattttcttggggtaggaactgtgatgaaaggtctccaagatgaaatctgaaaaataggccttttcagatagtcttggcttctttcaattgtttgacagtgtatatacccttggagaataagaatttgcatcttgcttaccattacttttcgtaggtcatgaaacaaagtcctatgcttttttttttttttcaggtctgattgtaccctcattttcaaaaccaggaatg

SEQ ID NO: 144559 - DNA, 133 bp, Homo sapiens
atgtacaagtgtccctctgcctccatgtgccccgtgcttcacattcctggatctctcccctccagctccatccctttcctctgcttcatctctccatgctctcctctcctctccaccagcgcccacactcctg

SEQ ID NO: 144560 - DNA, 526 bp, Homo sapiens
taggatatttagcagaaaaaaatctctaagcaaagtgttcaggatactgcatggcttctcttggctgcttatagtaaaatccaaggagagacaatgaggtgaagatgaaatttataatcaaaaaagacatagaatgtaaagatttggaaaattctcaaccaggccaggtaaagaataaaaaagcatgcttaggagaaaaaaaatccaagggcgtggcaaaggtgtgactgtttcgtcaagacagtggaagaatgaccccaaaagctgttgagatctttgagacagccatacccaccacaggtccagaatgctagggccttgagggtagaactgtttcaagggaggggcccagggtacctgtggagcctcagggcttgctgcacagcaccacctcaagtctctgctccctgcattccagtgcagtgctccttgcaccccacctgtagttcaagtgggcccagatgctgctaaggctgccactcccaaaggaacaagcagtaagcagccttcccagtgtccacatgtt

SEQ ID NO: 144561 - DNA, 254 bp, Homo sapiens
ttatactttaaatccattggtcgaccattgtactttggatcttttaccaatgcatgattttgtattgtaattgcattcttattagaaaaggttggttcactgagttatgcaaatctttcaagtgttgacacatttcattatacagtatcaaaaatcatgttcatttaatatcactgctcttataagaacagtcttttgagtattgggaagctgtcaggctcatggtggtgtaatcaaggtttccaaattctaat

SEQ ID NO: 144562 - DNA, 236 bp, Homo sapiens
tgagacagggtctttctctgtcacccaggctgcctatcacagctctctgcagcctcgacttcccaggcttaactgatcctcctgcctcagcctctcgagtaactgggattataggcacacaccaccatgcccagctaatttttttttttagagaaggggtcttgctatgctgcccaggctggtctcgaactcctggattcaagcgatcctcccgtctcagcctcccaaagtgctgg

SEQ ID NO: 144563 - DNA, 383 bp, Homo sapiens
ctgctactagaattcctctttgaaaaggaattgtatttgtttatgatagtaccttaataaatgctagaaggcaggtggagaccccccaggaatctgggtgtgggttggatggttctgtatgagaatggaggaagatgatacttgtgcagaaatgggaagagaaagagagagtctgaacctgctaggtggtgaaagctgcctggttcacaatggaatttgctccctgggacccttcaatcttcagcagagaacttaaacccacaaaattattggtgtaagtttttaaaaaaaagtttttttggtttgtttgtggaaactgattgtattagtccgctctcatcctgccaataaagacatacctgagactgggtgatttataaagg

SEQ ID NO: 144564 - DNA, 385 bp, Homo sapiens
agatggggtcttgctgtgttgcccaggctgttcttgaactcctgggctcaagcagttctctacaaaaaaaatacacccccaccaaaaaaaatagccaggcaattgcttgaacccaggctggtctcaaactcctgggctcaagcattccacctccctaggcttcccggtgtgctgggtttacaggtgtgagccacaccctgccctcatattctttatctccttttgttgttgttgttgttgttggcacatatagtcattcattgcttaatgacaagaatacgttctgaaaaatgcatcgttagacaagtttgttttgtgaacatcacagagtgtactcaaacaaacctaaatggtatagcttattgctgctaggctataagcctgt

SEQ ID NO: 144565 - DNA, 452 bp, Homo sapiens
tctcaagtataacgtgtctactgtgggtctctttgagttcatcttactggagttcaccaggttccctgggtgtttatactcatgggtttcatcagatattctctccacccttttcttactctcttcttcctggactcccacaatccctgtttggtcctcctgatgatgcccacaggtccccaggctctgctcacttcccttcagtcttgttgtttgcttctcaaacttgattattttcactgtcctatcttcaagtttgctatctctttcttccgtctgttcagatctgcctttgatttcctctagtgaatttttcatttcacttattatactttttagctccagaatttcttttggttcctttttacgttttctagctctttattggtatttccattttgatcatacatcattttcttgactctctccataccttcctttaggatctgacc

SEQ ID NO: 144566 - DNA, 293 bp, Homo sapiens
ccacctctctcagcctcccaaagtgctgggattataggcgtgagccatgcgctcggccagcaacacctttctaccaattagggaacaaggtctccctttttgagcagttaaagtagcaagaagtcttctattgtacagtactactgaggccaattcattcatcccagattgtactgcttaagataattcgaagtgtcaattaaactttttcagaagttggtaaaatattaattgatttttttcaattcactcaactgagagaaacgggctcttacagaagtatgaaatccaga

SEQ ID NO: 144567 - DNA, 169 bp, Homo sapiens
agccagaaggttcccaacacctagaaatggtcaatgagatgacggatgtgccgatcacgagtcacatgcttctcaacatcactgtgcaccccatacacttgcacaattattctgtgtcaattagagaacagtagtgagaggcctggagtgaaaagaaactgggaggccg

SEQ ID NO: 144568 - DNA, 263 bp, Homo sapiens
tgtggctcatgtctgtaatcacaacactttgggaggccaaggcaaaaggatcacttgaagccaagggtttgagactggcttgggcaactagtaagcgctcgtttctaaaaaaatttttttaaataattagctaggcatgctggtgcttgcctacagttctagctacttgggaggcttacacagggggatctcttgaggccaggagtataaggctgcagtgagctgtgattgcctgagtgacagaggcagaccttgtctcttat

SEQ ID NO: 144569 - DNA, 422 bp, Homo sapiens
cacctcccaggttcaagcgattctcctgcctcagcctccctagtagctgggattacaggcatgtgccaccatgcccggctaattttgtatttttagtagagatggggtttctccatgttggtcaggctggtctcgaactcctgacctcaggtgatccgcccgcctcggcctcccaaagtgctgggattacaggcatgaaccaccacacccggcagtcttggggaagttgcttaaactttctgtgcttcagtttcctcatctagaaaatggggataatgatgtctgcctcataggcttgctctgaggttcaaatatgtaaattcatgtaaagtacttacaacaacctccaaattgtataaacagtataattgatagaacacaaattatgaattcagtacatagatttagcactgtataaatgc

SEQ ID NO: 144570 - DNA, 479 bp, Homo sapiens
gcctcagccagcaaccactttgacctggagaccttcgatgggtctccttgcttccttcaactgttgtccccttccactgcatcccccacagagcagaagtgtgctcttcttaaatctgaagaaggatcatgctgcagccctgctaaaacctttcacttttattgaatcatactgcccatcaaataaaaccgccagtccatgcctcagctcaatttcgtcctcgcatacgtctttctccaatctgagacagggtgccctcccctcacttgctgcaatcctgccctgctggtctgacttcagtctctcaaacattccagacatccccctcctacttgcagtctttgcacctgctctttcctccacctagaacgctctgctccctttctgcacatgcggtagcagcctaaatgtcaccacctcttcagaggggcatctcacaaccacacattctaaagtcggtctcagcccttgcttttttc

SEQ ID NO: 144571 - DNA, 227 bp, Homo sapiens
  misc_feature (7)..(8): n is a, c, g, or t
  misc_feature (39)..(39): n is a, c, g, or t
  misc_feature (45)..(45): n is a, c, g, or t
atgaccnnatgactacgagattcgagcgtgcggtacccntcacgnccatgtcacaacagacactattcacaacagtcaaagggtagaaagaacccagctgtccatctacaaatcgataaacaaaatggggtccatccagccagtggaatattattcagccctgaaaaggaaggacaatccgatacattccacaacaacgtggatgtaccttgaggacatgaagctga

SEQ ID NO: 144572 - DNA, 167 bp, Homo sapiens
tccaagattctctgagcttgacaagctaccagtaaggccatttggctgtgaacacgtagtactatgctcctatctgtgattctcattttgacacttaatcacattacatgtggacatgggcagccagtcactgcatctgagtatatattggtcagcctctattaaat

SEQ ID NO: 144573 - DNA, 438 bp, Homo sapiens
  misc_feature (236)..(237): n is a, c, g, or t
  misc_feature (239)..(241): n is a, c, g, or t
atcccagcactttgggaggctgaggcatgtggattgcttgagcccagtagttcaagaccagtcttcgtggacaacatggcaaaaccccatctctacaaaaaatacaaaaattagcagggcttggtggtgggcacctgtgtagtcccagctactcaggatgctgaggtagaaggatcactcgagcctgggaggtctaggctgcagtgagctgtgatcacgccactgtactccagccnntnnnaggtgacagagtgagatcctgtctcagaaaaacccgaaaaacaaaaacaaatttaccaatttaaattcctatgaacagtgtacaaaaatgcctgttatattacattattataatattatatattattatattacgttatcacttgtagctgtcagtatagcctagattgtgctgtagtaacaaacagtcctaaaaat

SEQ ID NO: 144574 - DNA, 240 bp, Homo sapiens
tgaaatgcacctggtaactgcatggagcactcgccctgagtaggccacggtgcactggtacctggtggttccctgaaacaccccagatcatatctagaaaactgctgggccagcctcaagtagagtcccctccagctccgtcaccacggccacctccaccatcagccctctcataccctcgcccacctccagcctcaacccactgccagccacatcgcctctgccatctgtgctgcccgg

SEQ ID NO: 144575 - DNA, 651 bp, Homo sapiens
ttgcacgctccgttgcacgcctgctcacctctctcccctcccgtccccgggctgcaattttgcacaaatttgccctctcgctgtcttgcacattctgcctttgcttctggctggcgaggcccgctcaaatacactctgctctcctcgcacacgctgcatttcctttctcacgctccatgcctccttctctgcttcttgctgcttacacacttttcccctaccagggccctcctttacacactccatttcacatctcctcctccccgctcgctctggacccttgttgcagacacacttgggacacattttccctccccctcacagactccatgcacatcattcattctctggagtgccctgctctttgctcagcccttgcacacttgctatcttatgcacccctcctgacacactcttacctccattttcttacgttgaagcactttcccttcttattcttaaaaaccccagattcttccactccccaactctcccctctcaccatgacactcctagccccccaccccccgccttccctcttgccccttttgcaccgtcacttttggtcacgccttttgcacacttgcctcccagaaactgtttctctcacacatgctcattctcttcttctttgccaggctcccactccct

SEQ ID NO: 144576 - DNA, 748 bp, Homo sapiens
taataattaaagtgagacaacaggcataaatacagacttcccaagtaaatagaggcatatggggtcactctgttataaccatttattttctgactattcccaccaggcaacaggtctgaaattcacaccaagacatctccatcttggaccatcctagattgattgacctaaccgtgttatcggtacataccacattcattttgtctcatgtgtaatgataattgtgttttgataaaatattttttcttcatctccaaggaatggaattgttcatattcattagtgtagtgcttttgtactaaaaagtagactacgtatagggtaggtagacaatcttcttaaactgctttgaaaatactgactctaattgataggttattttccagagaaattggtggaaatagtctcctttggtattgactccccaaacattcacagtttggatggaaacgctgttgtactggctgtgagatgctgacccttggcagacacatttgtttcttaattttctactcaaaaggctactaactttgcgaaattaatatgatgactcagacttggaaatcaattgttccccctttgacacaaaaaatattgtaggatctattttatgtttctgtttttctggaaacttttacagtgcacctacatgtactgactcaaaaattggttcttaaacactgtttcaacacatttttatcatttgtacaataaataaaaataaataaaaaataatataaaaaataaa

SEQ ID NO: 144577 - DNA, 1009 bp, Homo sapiens
cagtctagcatccttaactagtgtggctaagtgttgatggtggcaaaaagagtaacatgagtgaaggaagttggcagggagtggggggcccatggtggcactggcctcagggccatgcagatacaggcataaggcccagctgagcacagggtctgcatttagatggtccaatagatggttaggccctagcatgggacaggtggcctttcaggtcaggtgagagcacacaggtcctttaacccatttaaaagacctagggtgtgggaatgaatgagtgaagccatctgggaacatgtcaggactgaaaatgtggggcaagaacttcagagaaggggccttgggttctgcagactcttgcctcattctaagctgctaagttcttctctattgaaaaaccaaaaatcagatgggtcccacagccacgtggtgggcctgagcctcctggtttggattgcaggcaggggctgaatgcacagggtgttaagtggctcaaggccaagattgaaagaatggacgcaggggtgacagatatgtaacaatgcgtaacatccaggcactatccagtctgataccacagcagggtctggaagcacttgctgttgctagattatgggagggtctggcaggccccagtggggacaaggctgcctacacaggatgggaaacactggcaggggtattgggggatcagctatttatcaaccactgctaaaataaactgctgtgagtcagccctgggagcaggggcagacaggttattcccgccttccagttggcactctgtccacatctgtgtgaaagggatattgcttaagaaaggaaaataaggctgagggtggagccaggaggagcttgtttttgtcaaatttctcgaacatttgctttgctggttagcacaaacaaaagcttgtgcttttgcgattaggaatcgtgtctctttgttgttgtggcatggttgagggaaaagaaagtcctagacttctccgccctgtcaagcacgtttggattt

SEQ ID NO: 144578 - DNA, 201 bp, Homo sapiens
aagaatgtgggcctgatgggtaatgcctaggttgccattccagggcatgagaggaaactatatgctgaagatggcaaagcgagaaggtagtaggaatctaggttcctgctgactctgcagtcaccatgccagcctagaactactttcctttgtgcttaattttcttttcttttatttttctttctttcttttttttttttt

SEQ ID NO: 144579 - DNA, 646 bp, Homo sapiens
cggacgcgtgggtcgacccacgcgtccggacacagcctagggaggaaacaaatttcaagggtgtctgtgttggtcatgggtaggaatgggagagggaatagtggactaatcagtaactgtaaaactttgtgatacatgtaaatggtagaatctttcatgttctatgaaaataaatgattgaacaattaccataatctggaggtgatgtatgttaattaaaacttctaaaaggaagtggcagctcagggtaaattttgatcagtcatttttcagtagattagaggaggggaattttagactgctggaaggtagaaagaggatactaggcatctttctagtaaaaagagaggttttgtttttgtttttgtttgttttgagaggaggtctcactctcacacaagctgcagtgcagtggcatgatcatggctcactgcagtcttgatctcccaggatcaagcgatcctcccactttagcctcctgagtggctgagactacaggcacataccaccctaggtctggctaattttttatagagatgggatctcaccatattgcccagactggtctccactcctgagctccagtgatcttcctgcgtaggcctcccaaagtgctgggattacaggaatgagcaaaagagctagt

SEQ ID NO: 144580 - DNA, 569 bp, Homo sapiens
tctatcttccatgaattcctcacaacagttgatttatgtcatgcttttgtttcagagcattgcttttaatttggtttttaagaaatcttttctgaaattaagaaatttgagatagcaagagagatgggcacatgaattcagtttactatcttgatccaatttccaaagaaatctaagatgttagtttagacatcacatatccaactacatcaatcttctacttaaaatagtccctcagctccagcacaaagtccaagctctctggcctaacatactggatccttaacccaacttttgttcatgctgtccatcagacaggaaagcactgcctttttctctgcctggtatcattacctgatgcttacttaacactatattataaatccttgtttacatgttctgattcatcacaaaaattgtgagaccaagagcagagatcttactagtccttgacttctcagcacccaaagaacttatcatgtggtaactattcattttataaatgagaatcaggcattaaaatgccatggaatcttagagtcagatctcagaccagtgaaccacagata

SEQ ID NO: 144581 - DNA, 400 bp, Homo sapiens
gcctcagtctcctgagtagctaggactacaggcacgtgtcaccacgcctggctaatttttgtatttttagtagagacggtttcaccatattggtcaggctggtctcgaactcctgatctcgtgatccacccgccttggcctcccaaagtgctgggattacaggcgtgagccaccatacccggcctggagttcctttcttgagtgtgtagaggattgagggttgattggtttttggagtttccatcattaatgtaggagcgatacggggaatcacttggcgaagctttcattgtctctgatgttggaggtaactggagggccagtgcctggggcttccatttttttctagtgttgaagggtcaagagcatttatcagatagaggccttactgtgtattgtt

SEQ ID NO: 144582 - DNA, 442 bp, Homo sapiens
ccagaggaatgtcactaagcagctcttctgaagcactggtttgggtggacagatctaagcttgccatggagtgtgggacaggattccacatccagctgctggagtgagactgcaaaggagagcagatggaaggatccgcgggaggccactgactgtctgtctagtctctgagtcagccagaagagctgaattctgctagcctgtcagtgtctgtcttaccatctctaactacagtgaccttctgcgtaattgcagctactgcactttcaccttccaaatcttgggcagatttctttttggctaactctaacccagaaccatacagggaagggcatttggggaaacctacttctagcttaaccaagttgataaagtacaaaactgttagattctaccctttgtcaacttggcatctatacacacctgtttttatcatgttagc

SEQ ID NO: 144583 - DNA, 473 bp, Homo sapiens
gcggcagggacggagcctgtgaagggaccagtcctgcggatgacttggttttaccccctaagattcactgtggacttctgacctccagggctgaaaagaatgaatttctattgttttcagcctctaagtgtgtgttcatttgttacagcagccccaggaaaccaacatagcagctccgagctacagtctgggctcaaggagtccggtttatgggctgagaagggagaacccgatacctttgcccagtcctcatccccggcagccacatcagcagccctggctggctctcggctccagatgccaatttcccacagccggtgacttccaaagcaataagcctgggctgcagcccccaaggcgtcttcggtcatctcaggccaagtgtttttggagactgagcaactttcgcttccctgagagggccagggcctcccacaagcaggacttggtttttgcttttgtttccctctgcc

SEQ ID NO: 144584 - DNA, 270 bp, Homo sapiens
tcttagaggtcacatctcagaacctctgggactatctatagcaagacatggcatcaagtagccagacagtttctgaaaagggctcagcccccactgttagatgttctgtggttcccctggaggacgtttcgggttccctgtgggtggtatcaggacgtcccccagagctcaggtcactcatctctctccataactggcagcagagtcggaaagcctgggaaaaaaagacttctacttggaaaggagcaactttttaagttagaaaacaca

SEQ ID NO: 144585 - DNA, 468 bp, Homo sapiens
ctgccacacagcctcccttacagcctcctgtcttcacttccatattgtaggagagcagaatgggacacagtagatgcctctgacttcaatccccttacaatcatgcccttcctcctaggctaaagcaacacagacttctttaaaagaccttctccaaggagagtgatgaaacaccagatctggaatggttatgtgtcattaagtgtactggttatctaatctcccaaggaatcacctctctgttcctttcttcaggcagaaaaagggaggagtctactcaaggcagaacagagtctaaaagaagagtggcctggcatgggggaaaggacagcgaaaaaagcaaaagcccattacctgggcttctcacttgcactaatgctgcaacattttcctggtatatttccctggtggatctctcccagtatagccacctctcatttagtcagtcaacaaacacttattgagcac

SEQ ID NO: 144586 - DNA, 336 bp, Homo sapiens
tgtaatctctaaagaaggttgtattgtctctacaacaaggaaaaagttgaaggacaaagggcataaaattctttttttccaacataaatctttgtctgttttatagtgttgtctgtaatttcaaggtgaaagtgggccctccctcagccccgtcacactctagatgcatccccagattcccccccgtcaccgtcacactctacatgcatccccaggtttcccagtcaccgtcacactctagatgcatccccaggtttcccagtcaccgtcacactctagatgcatccccaggtttcccagtcaccgtcacactctgcgtgcatccccaggttcccc

SEQ ID NO: 144587 - DNA, 597 bp, Homo sapiens
aatcatataactgtgacagatgttaactggttactcaaaaggccattcccaaatccctactccctccttgcctctcattacagaggccaaaagacgaaaacagctggaggtgaccatatgacccaattttggcccttggaacatcagaagtgacttgctggaatcactaataagaaagcttttccttggcatagtctttttccttcttccttgaatgtaggtggaaggctggacctgcagtagccatcttaagaccatgaaaggccaagcaaatcacaaattcataggccccaacaatgttgaaccattaaagcaacatgagcagctgccaacttcagatttatgtaagctttatagtcaggttttcaactgcttacagcctgattcacccattatatatcaccatatcagaaactccaccacaattttaactgtaagtaacttcctggctaataattaaaaacaaagtcacatactagtcctaaattagtctgacaaaattacaatctcctgatgaggactattctgagtatttgctcaggaagctgtgagaagcctgagctgaggaaagaatgagagacaagaatacagaatcgg

SEQ ID NO: 144588 - DNA, 425 bp, Homo sapiens
ccctctccctaagcctgtgtcaaatagcagcctataattaaatgaagattaaatttaatctattatttcaaaaagcatacgttacttaaatattagtaactcagttttaaaaaggcacactactgagaaaatccagccttaaaggccttttccctaaggtggaaaaaaaaaagaaaaagaaaaaaaaaaaaaggcggcatgctgatacacatgctgtaaaatctaagtgccccaatcatctgtcatttgcttgcttctgcttgcccctaaccagctggctctggcttaaagatatccccttaatgcaattcattgaaaaaatacaaagcaagaaaagtcagttagtcaagaaagcataaaaacaggcagggtgtggtggctcaagcctgtaatcccagcactttcggaagccaaagtgggcaggc

SEQ ID NO: 144589 - DNA, 230 bp, Homo sapiens
ggtattgcctaggttttcttgtaggggttttatggttttaggtcttatgtttaaatctttataatcattatgggtaatttttcaactatttttgctatgttttctaagttctttttaaatatacttgttggttgtgcgtggtggctcatgcctgtaatccaagtactttgggaggccaaggcaggtggatcacctgaggttgggagttcaagaccagcctgaacaacatg

SEQ ID NO: 144590 - DNA, 438 bp, Homo sapiens
ggacctgtgcaattacactggggccaccaggtgaccccatggaaatcttcccatcttgcatccttagatctaaccatattgaaggatgtcgaaggatgtggttaaacatccttagccacatctgcaaggtcccttttgccatgtaacataacacatacaaaagtttgggagattagaacgtggacaactttggtggggagcattgttctgactaccacatcttctttcaattttttttttttttgagacaggatctcgctctgtcacccagattggagtgcagtggtgcaaacatggctcactgcagcctcaacttcctgtggtcaagtgatcctcccacctcagcctcctgagtagctgggactataggcatgcaccaccacgctcagctaatttttgtattttttgcagacatggggtttcaccatgttgcctagg

SEQ ID NO: 144591 - DNA, 921 bp, Homo sapiens
  misc_feature (628)..(628): n is a, c, g, or t
  misc_feature (630)..(630): n is a, c, g, or t
  misc_feature (812)..(812): n is a, c, g, or t
  misc_feature (909)..(909): n is a, c, g, or t
gggggttgggaggtagcgtccggtaggtctgcgcagacagcgctgccagacctctgactcccccagtcctgccgccgccgatagccccacaaggcgacatgggaagtccgccggagcagaggggagaaaattcaaaacgagtctactcaacctcgtcttggctccgaggccccgccatggagaccagcataatgcgcaggcgcgccccaccgggagcgcgcagagcagtcccacgacagtaggaccactatcggccaccgtcgaccgtttcctctctcatccgttcttttctttgtatttccgcctctcgcctctctctaaaagccgcagttagaggcgagatttaggaaaaacctctgccgagtgagcctctggttgggaatatgtatgagaaaaaaaaactggcaaggcgttagtcaagcaaagctgaaggcagaggaaatttgatatctggctggagtctagaggatttaatgcaaataagatactctgagggcagcgtggcaaaaaaagactacaattcccggtggtcacagcgtttgagaagcgatgctttctgagacttgtagtaactaggagctgtgtttgaactatccaggctcaggacagcctcttgaaaaaaaatttntnattaataaagcggatttgagtgggatctttttcctaatcgattacgggcccacacgtatgggaagaattctaacaatgattaaagggacatgctacctttacgactatccttttctaatcgatgactcctaaatctaggagtaggtagtcgatgtttgtggtctgggcgtctgtagaagggnaacctcgtgctttctgcagaggagaccggagggcagaaggcagagtccaggcttagactgcagttcctcgcttacctgtgcagtctaattttgagcngctctttgtagt

SEQ ID NO: 144592 - DNA, 217 bp, Homo sapiens
tcatcgagctcggcacctatccgtgttcggggttgtatccctgttcggggtgttcgtgttcggggttgtgagcattaaatgagatatagcagaagagcatctagcatggagtattcttacctggtaggtgtgtaataaattgtctctccccagggaaccatgggggtgtgggcagcaactggggatgtggggatgcccacaccccatcctttttagt

SEQ ID NO: 144593 - DNA, 141 bp, Homo sapiens
gatgtacctgcaagctacttacaaagcaatcttttgataaatgcaaaggattgattgaccaataacccttcttcaaacaaattctagagataatccaaattctcggctgggtgaggcatagtggctcatacctgtaatccc

SEQ ID NO: 144594 - DNA, 518 bp, Homo sapiens
gcaggtggatcacctgacgtcaggagttcgaaaccagcctggccaacatggcaaaaccctgtctctactaaaaaatacaaaaattggctgagtgtggtggcaaacacctgaaatccccgctacctgggaggctaagtcaggagaatcgcttgaatccaggaggcggaggttgcagtgagccgaggttgcaccactgcgctccagcctgggcaacaagaatgaaactccatctcataaaataataaaataaaataattagccaggcatggtggcacacgcctatagtcccagctactcaggaggctgaggtgggaggattgcctgagtctgaagaagttgaggctacagtgagccaagatcacaccactgcactctagcctgggtaacagagtgagaccttgtctcaaaaaataataataattgaactcactcactgaatatttgcacagcacctgattctttctgaagtcctctttgtatatttcatatcctttgggctcataaatgtcatcattgta

SEQ ID NO: 144595 - DNA, 159 bp, Homo sapiens
gctgacacttccacagctgccctaggtatgggcacctgatgccaacgaagaagcccaaagcgcctctccacttcacagatggaagcctgcccccagcactgggctgacagcatctggagctgtctcctggtctcaaatctcttttggagactcagaata

SEQ ID NO: 144596 - DNA, 430 bp, Homo sapiens
tatttcaacctcctcactaatcaaagcatgtgaaagtgcttcttgagtgtctttgatatgttcttcactagcctccgtgcgtgggtgtgtgtacacaagtatcacacacacatacagaaaaataagcttggttcctactctaaaagaatttacaacccggatagagcaaactggcacatgggaaacaatggcaggaatgcataggtagcaaatgctagttgccacggcaggatggaaaaattacaaagttcctgagctatttggaaagctcactatatcacaaaacaaacatagctttttaaagttaaaaataaaatccctgtcagtgaaactgatttatttcaaatagtaagtagaaatgatcattttcctaaatgaaatgctaaacgatgttgggatgttacggaggcaacagttcaataaagatttc

SEQ ID NO: 144597 - DNA, 297 bp, Homo sapiens
gtgggacaactcgaagcaagggccctgcctttcaggtcataggtagataagagacaaacagttgcattccttcaagtctctgatgagcctttcactgaacacacagtttacatgtgacaggagggtagaggagtagtcacttatgccttggtctggcttagtgaaatagggcaaagggagcaatcaggtatgcatttatctcatgagttctgtgtgtcctctgtccaaaaagaattttcttttgggcatattgtgagggaggtacgtggttagtaataaaatgggaaacaggtttgc

SEQ ID NO: 144598 - DNA, 164 bp, Homo sapiens
cacaaatacatggaaattaaacaacatactcctgaacaaccaattggccaataaaattaaaagagaaattaaggacatttcttgagacaaatgaaaatggaaatacaacatactaagacctatgggatacagcaaaagcagctataagaggaagatttatagca

SEQ ID NO: 144599 - DNA, 213 bp, Homo sapiens
cacagtcccagcccataatcccaacttatctgagcattggccaagtccaaatttccctttcaaagatagattcaaatccggtctcgattagggatggtagccagaccctgccgcctgaagatggaatcagctagccagtagacgtgttacataaatgccaccaaaacctgaaggctcagtggggcgtggtggctcatgcctgtaatcccagca

SEQ ID NO: 144600 - DNA, 307 bp, Homo sapiens
tataaacagaatgattaaatagaatagtcaatctagaaaaataaattagagaaaagatgatatacagcaggtgaaaggaaattaaaaatactaataagacaggtttcagatatcagtaatgacactatatataaatatcttttttttagtaattaggtcagatttttaaattatatttatatttttctctttattattaacttttaggttcaggggtacatatgcaggtttgtaatatagataaattgtgtgtcacgagggtctgatgtacagattattttatcacgcaggtaataagcatacccaa

SEQ ID NO: 144601 - DNA, 779 bp, Homo sapiens
acggagctgcagctggagtccagaagttcaggcagtgaaagggaggtgcgagcttgtaggaactagtttattagtccttttgatcaagctattgctcttttgttttttttgttgggggattactttagagggcaaatgtaagtcagatacaccttaaatatctgtcttgtcatttgagtaatgtatttaatggaacctaaggagttatgttggtctgttcctatttgacttttctacttgttaatagcatcaactaataaagagctaattgtcttgtaaagtttgtctttacaaattagctgcaattgaaatgagaacagcagtccagtgatgcttaatatttttctgctttattgctgataagcagtttggaaaatgtttttctatggagagcgtgtgaagcctcttctcagtgtggtaaatgtgatcacaatagatggtttttgtttttagttcttttttcactttggccttggaattaacatgaaaggtaaagatgttgagatttcctacctcaagcaatgctgtctaggtttatgagaagcagagaagcattttgtaaattatatcctgttgctcacaaactgtataattaacctacttaaagttcaaaatcatagatatctgcctgttgcatggggagtctggtaagattgcagtactcttatagatatcaatggcctatgtattgatttttaacaaataaattttattttctagctaaattaatcaaagatttaatgacctatgaatttgagttacatcggtgtgtatctgga

SEQ ID NO: 144602 - DNA, 714 bp, Homo sapiens
gccccatctacggcagcctcacagactgcatgcaaagagcagtcgagtgtgctggtctataaattacatcatgcggtaactgctctttttcacttataaatgtaccgattttatagttactaaatttagcccatttttaactcttcatttgaaatactgaagaaaagtagttccatttgccttggaggattccaggctatggtaccaaaaagcaggccatcagagtcagtactgacaaagactcatggatcagctgtggcatgacaccatggtgccacttgccgaatccatctgagccttagtttatttattcaccaatagagatcaaaatcagtatgaataattgctaacatttattgttcactgcctgtactaggcacagaattttatatgcaattattaacctgtttaatgctcacaacaagcccacgtctgttagtatcctcattttacagatgaaaggagattagatagcagtagagacccaaaccatcccccacaccacactatagactgcttcattgtctgtcatttgttgtattgccttctcatccaaatttgagctcttaataatataaatcagactcatcagaggaaatgtatcccagactttttgtgttcacattaaatatgtttatatgaatatagattattagccatttttattttcaaaccaaaactttttcagatcttacagccatgtgtctggtaagg

SEQ ID NO: 144603 - DNA, 685 bp, Homo sapiens
aaaggctgaacatttgagggtttcacgtcctaaatacataacgggggaattctagaaagacattttctatgaggctttactttgcatttataccccttcctccctcccctgtcgttggaatttaaacttacctaagcatagagaaatgtttcctttctggtttaagattttatttaggtatgggaacttgtgaaagtgttggaaatatagagtggaaagctttttgttttttttcgtggttttttttttggcctttaagactgtttaaaagaagtatttgtggctgacatagaatgattagcagtactgagaggggacaagaatctaggagacaaaaacaggtgcataagtagcttatgtgacaggtaacaggaacactgtcttatcttcctgtttaatgcagaattaagcaaaatgcggccggacactgtggctcacacttataatcccagcatttgggaaggctgaggcaggcagatcacttgagctcaggaattcgggactagcctggccaacatggcaaaactttgtctctactataatacaaaaagtagccaggcgtggtggcacatgcatgtaatcccagctactcaggaagctgaggcacaagaatggcttgagcctgggaggcggaggttgcagtgagccaagatcatgtcactgcactccagtaagactctgtctt

SEQ ID NO: 144604 - DNA, 329 bp, Homo sapiens
  misc_feature (38)..(38): n is a, c, g, or t
  misc_feature (42)..(42): n is a, c, g, or t
agcttgaccgcacgagcatggtggggacttgaggtggnattncccaggtgctcggaggcaaggatggcattcccctgtctccctggctcctaccagcctaaagtggcaggccagctggtggtgccctcaggcgaaggacatcccaatgtccatggcctcgtgtcagccccagttcagtcccaggttcaacttctagctccgtccccaccaaatcataccaggtcaagaatccagtcccgggttcaacttctagctctgtccccaccaaatcataccaggccaagaatccagtcccgggttcaacttctagctctgtccccaccaaatca

SEQ ID NO: 144605 - DNA, 166 bp, Homo sapiens
tagttattaatagaggctggattgtcaaatgccatacttggaacgtgatttgtctttctcttcccaattccgactctgggagttttctctgcccctaaatcctaaagacatactaaacatcaattgttatctccaaattacaataaaattgttatagtcagtataa

SEQ ID NO: 144606 - DNA, 1176 bp, Homo sapiens
tgaatgaagtggtatcaaaaagtgccctggcagtgaaaggcaagatagagttctgtagagtaggggtcgtggtgaccctgttggagcagatactgaagtagtggtgagtgcggagaggcaagtcacattttggccctagtcaactgtagctgaggagtaaacagagggaactgtttactgtttacaggattctgatgctcatctttgaaggctgggctctgctggaggactgattttgaatgatgtcaaatgattttgacaagattaaatggggagatttagttggtggtggcatgcaggactgatttgatgaaagagcagcacagttatgaatggtgaaaccgaaaggaagatttgtggggcttttaacagtctcctcaaggtgttgtggctgtgggagaagaattaacatgaatggagagtgtaaagaagcctatcagattgtctttgatctgcacagtactggggagtcccatgtgggacacgggtaggcagcagtctacaaagctcagagctggaaagacaacttgaaagaacaacacaatgaaaagttaccgtgcctctagttgagattttctaaacatcggaaccaatgtgaggtgtctgatttcataaacaagtggaatttaatctatactctctaagtggaaacaactctgtttgcaactctgacttgctagttccctggttttgcttttgttttacgtttggcattttttatttcttgcctgtttatggtagagactagaattctgcacagcagatgacaacagtttatcccctgctgcagacctggtccagttctgactgagtccaggggtgatagttaaggccagggcttgggtggtttgatgtccatcctaggagtttcacctctgcttcggtaattctcgggctgagggatactgatgagaccctctagaatgtttcttggtccatgttgaagttagagatttcttgctctgtcaagaagactgtcagcctgggcaaggtaacgcgacattatctctactggaaaaaaaaaagccaggtgtagtggcacacgcctgtagtcccagctacttgggaggctgaggcaggaggatctcttgagtcctggagatcaaggctgcagtgagctatgattgcaccactgcactccagcctgggtaacagagagagaaaccctgtctcaga

SEQ ID NO: 144607 - DNA, 201 bp, Homo sapiens
agagaccttttccccatgagtggagctaaaattcctgaatggaaaacattactttgaactattcccagttacgagagaattgttgaaagtatttccagccctcctcaccttcttcctgcatataagattttaattatttttttattcaaaggatgttaagtcacactcctttgtcttaagtacggctgtttttatttggta

SEQ ID NO: 144608 - DNA, 155 bp, Homo sapiens
cataaacaaagttagaagacagctgacaaactaggagaaaatattcacaacatataccacagtgagaaggcctaatatccctgctagtaaagaactcttaaaaatggagggacatgggaccaaaaatttgatagcaaaatgggagaagcatacga

SEQ ID NO: 144609 - DNA, 427 bp, Homo sapiens
gtaggagagagtttggatgggaagcaaagatgggtggcagaggaccaattggggggccactgttagtcgacaagaaaagctgaagacctggattggccagtggcactgggacccaaatgagtgggatagagaaaactatttacaggttaagaaaaacagggaagagcaacaaaaacatgtctaacaggaagtcagtgtggtcaacagtagaaccattgcttaaggcccagtgctctcctctggcagaagaatggatttacagtttgtcaacagtcacatagtttttgaatggactgtctcctgtcctagtgggtctttaatttgtggggaacaaaaaaccgtccttttaaaaactgaagagatttgactgaaggtttgaccaaacaggatcttaccgttgcatccataaggttaaacactattagca

SEQ ID NO: 144610 - DNA, 375 bp, Homo sapiens
ctgacctagaggatccccaggaccagtcttaaactctgacctcatagttttaaaaaaagtaaataaattttcaggaatattgttctttaaaaaaaaatagtctgttttatctcatgaggggaaggaaaattaattggaaaaggaaatatgtgttcagaaattggggtcaaccattcattaccgacagcagggtgttctggtcaaactcatatgcagaactggtagaaatatgctcagcttttctccgatgtttctgtgtgcttgagtgaagggaggggaaatactcacttttattacggcacacatgatttctaaagattatgtgggtagggaaacactagcctgcaagaatcaaagagattccttaagactggt

SEQ ID NO: 144611 - DNA, 343 bp, Homo sapiens
aacaaaggaatggcaactgacttctctgcagcaagcccagaagctaggtgccaatagagcagtggcttcagcatttccaggggaaatcacttccatgctagaaccctacacccagcctggctatcaatcatgttttaggtaaaataaatacgctttcagatgggcaagatccccctagaaatatttcctttgcaatatttttttcagaaacaattggaagatttgctctgcccaaagagtaaagcaaagaggaataaagatgcaggagcaggaaacggggcacccaatcgacaggggtgaaagaaccccttgggtcgacagtgaagaaagacgccaagatggg

SEQ ID NO: 144612 - DNA, 193 bp, Homo sapiens
ccgagatcgcgccaccgcattccagcctgggcgacagagcaagactccatctctaaaataaaataaaaaacaaaaagggggcaagatgtgctccctgtgggtcaagagtgtcccagacagcttttgggaagggtgacaggtgtgttgctctatttggccctggtcagactcatctggattgttgtattcagta

SEQ ID NO: 144613 - DNA, 190 bp, Homo sapiens
agacggggtttcactgttagccaggatgatctcgatctcctgacctcatgatccaactgcctctgcctccccaagtcctgggattacaggtgtgagccaccgcacctggccacaatttcttaaatcatgaaagtagaattttaggaaaagagtagatgtctggataataatctggatggattatatatac

SEQ ID NO: 144614 - DNA, 322 bp, Homo sapiens
ccttttgaatcattgaagagtagttttgactttttacctgcagatcttatttttcactattgtatccctagaatatccccacatcaagaactgtagtttctagttagtctagcaacatatatttagcagtcctcaattagacagtatttttgtaattaatatctagccttgcatctgtgatggaaggaaatcagctcactaagccagagcacagaagagtagaggagcctactctgttatagataatagaaccattgaaacgttatttgtcagttagggctggttaatagaaataaaagctcattttgttggtacatatgta

SEQ ID NO: 144615 - DNA, 382 bp, Homo sapiens
cggggagggatagcattaggagatatacctaatgtaaatgacgagttaatgggtgcagcacaccaacatggcgcatgtatacatatgtaacaaacctgcacattgtgcacatgtaccctagaacttaaagtataataaaaaatatacattatatatatatttttgctattaaaattaagtatttctcaataatttttattaaagtttaattaaaaaatgaaattattgatccacagaggactgattccatagatatggaactcaaggattcagagggctgactgtatgccattatggaatattttcctctgaagacaacaatatatttacacattttattttcagccataaataacaaatattaaataggaaatttaaaaaa

SEQ ID NO: 144616 - DNA, 373 bp, Homo sapiens
aagccaaatgtacacgagcccatctaaggggtatgaggcaactaaatcccatagagaatggaccctctgaagtcctgctccactactaaagctcaccacctggccaagctccagaaaaacatctggggaggagacgcaggaagctactgacaatgagttgggctctgacaccaaaccgaactagaagatggggtccatcagagggagtcttactgagtggggaggaggggtggtctggatttggagtccttaggagatgggagttgggagaaactgagggcctacatgctcctagaacagccactttatggggcaccacatgggggtctttcaaagcctgaaagggcagagtgccattgttgtttccccttga

SEQ ID NO: 144617 - DNA, 689 bp, Homo sapiens
gcacacagtaggtattcaggaaatgttaacaattcgagtaaccaatctttagaagttaggcaactccataatttaaaatattttgaatgggcattaaatgtaaattcagtgtttgaggcgtgtctagaagccttgattactatgataagtatttttcattacatatgaagaagtgtataaaagggtacattggtattccatccctttacctccaaaggagcaatgtctatgtttcgctctttactagatattctgtcatatctgcctgccagaccactccttctgcttctctgatgcaagttacacctgcatcttgcataccaagtgaggctgtccatcacctaactccacctcaccaggcacacaggttcggcatgtgatttggcctcatagtgcttgacccggcaccaatcagagagctttgtcagagatggatataggtgcagggactctttctaagattatggatgcttatagcctcacataactccagaactgtcagggccatcttggctttaattcgagaagagcttgactgagacaagagaaaggtgaaacaaatgattgcaaccaagggaaacaaaatgtcctggtgatatactttgaactgtgaatcaccccaatctgaaacattgctttggacatcatgagtaaataaatcctgacttaatgtatacaagtaagtttgt

SEQ ID NO: 144618 - DNA, 296 bp, Homo sapiens
ggaaaggcagcccggaaatcaagccgccatggggaaatccccagaactctgagaggctgaaggcaggcaaccccaacaaggctgctctgtccctgcaagaaataccaagtaccaaagacctagcacccaatgagaacgagaggaattttggtcttagttcctggcaggagtgtttagagcttgctttcttaaaatcccttggttaggcatggaatgaatcagcagtgtcaagaatgagctgtgttcgagtcaggaaagagcacatagggagtataccgtgtctaaagagaactaag

SEQ ID NO: 144619 - DNA, 243 bp, Homo sapiens
ctgggtctcttcttctcacttttggaataatttctgtcagacatcttctgtatggcttctcatttaggctcattccattctgtttctctgcccatttaactaatgagtataacaaaggcacaatattgagtcatatagatatccctttaaaagagctgaaagtggcagaaacaagtctgtgaatacttaccctggtctctttttgtcctatcaacttctgtttttttgttttgttttgttttg

SEQ ID NO: 144620 - DNA, 352 bp, Homo sapiens
taatactaattataatgtttcctgctatgttatcagtttgaatttatatgaatctttagacttgaggcttctttttcctagcatagtgatggtctgggctttttctcaatttttgccagagctcagctctcactaattagtttctttctgcatgagaaaaagattttgcttcatctttttccttataatagcagaacaaaaagaagaatcagctgcatccatgctaatttcccctgtgacatttccaaacaggatttgatttctctatgcatgcctctttccttctcttcatggtttttgaacatatacaaaagctcatttaaaccaattaaataaaattgtttttaatctc

SEQ ID NO: 144621 - DNA, 404 bp, Homo sapiens
actcaaatgggtggggtgagaatgctgggttggtttcatccccccatctctcaacctggtggctggacatcttacttggctcccagagccagtgtcccaagagaggccagtagaagctgtgtggcctttcctgacctagccaaagggatcacgcagcatcacttctatggtggtagccaccaaaggctgcccgggttcaaggggaaggtacggagataccccctccagatgggaagagtgtcaaagaatttgtggatgtttttcaggactgccacatacctgctaggggtgttggagttgacagttgattcgtgtgaagtgtgcttacagcatagggagaacttagtgaatgttagcacatctctgagctgggacctgagacatcgtctgcatcgaaagctaca

SEQ ID NO: 144622 - DNA, 147 bp, Homo sapiens
atggtagaatactgcttcctttttgcataaataattagtgaattacaagctgaagtaagtagcctttttctaatggttgcatcctcctgaaaaccttttttcccctgttacctaacagggctttttggcttttcatcacctttctaa

SEQ ID NO: 144623 - DNA, 256 bp, Homo sapiens
ggggcatgtgcagtgtggactgtgtgtgcgtgtgcatacgcacatacatttgtacgtttgtgggatactggtgggtgcacacgctttgtatgtgtggacgtacacgtgtctgtgtgtggggtgagtatgcacgtgtgtttacacatattccatacaaacacattccatacacacgcacacagacatattccataatcacacagacactccatacacatacacattccatacacacatcacacagacacattccgta

SEQ ID NO: 144624 - DNA, 811 bp, Homo sapiens
ggcacgcaccaccacgcccagctaatttttgtatttttagtagagatgggttttcaccatgttgatctcgatctctggacctcatgatccacccgccttggcctcccaaagtgctggaattgcaggtgtgagccactgcgcccggccccccatcatcctttttgactgttgactttggttttcccttccctcctctctaaatttctgtccttctgcttccttcctttttttgctttttgaattctatctttacctgtcttttgttcactttttaatgctgtatatgggcaggggtgagagacattagtgagcaacttggtgagcaagcctggctttaaagacttgagaagaacttctagcaccagagctctgtcttcctccagttctcaacacggtgttgctctttagtcataccaggatctgaatcaaaaaagtatttttaaatatccctgacttctccctgtattgaggctggccctgatcatgctttttagtgcccctcaccaggtctcccaagtgcacttatccagctcaactctcagatgtgttttaacgagaccctatattcagggaagttgtgtggacactgcagtggagagaattgataataggcctatcagtctcacaatatcacccctctacctttaacattccatctagctgtagagtccatctgtttgtccatctgctgaaatgagaaaagaaaacctcatgcactgatttaaaacaaaccaaaaaaagaaaaaaaacaaaaatccctcctttctaactgaacaaaaatgtgcagttaatagttggcccttgaaaatgc

SEQ ID NO: 144625 - DNA, 445 bp, Homo sapiens
actgcaaaggtgaacttttcctagtttttagcacacattcccatcccctgaagactgtctcactggcaaaaaacctaaatcttcagtagctttatggccaatttagtgtgactcagttataagttccaattctatcattgtacgagaccttgtggggaggggtgctgtgagtgctggctttccacagctggactgatacatgacttcaggtctgattattccataaagcagcatgtaagctttatcttttttatttaacggaaatctttattcagataatgacagatttgcataatagtaaaaatagcaaagcaatcccagtgtctttatttccacagtttcctccaatggcaacggtttgcgaaactacacaacagtgtctcagctggggtactgacatggcagcgcacccgtctttttcacatggcccagtttactcgtaact

SEQ ID NO: 144626 - DNA, 318 bp, Homo sapiens
gatggggtttcaccatgttggccaggctggtctcgaactcctgacctcaagtgatccacccacctcagcctcccaaagtgctgagattacaggagtgagccaccatgcccagccccactaagcattaaacttctttgagtttcttaaggcagtagaggaagagacagtatttaaagatgggggaggatggcaggtcggattgccgagccccttcctcctccctggtcctaagtgacagcggggagagctgtaagccgaggaagaagggccgtccatcctgcggcactcagcagagcgtgtactgaatttgatgggaaa

SEQ ID NO: 144627 - DNA, 333 bp, Homo sapiens
gatggggtttcaccatgttggccaggctggtctcgaactcctgacctcaagtgatccacccacctcagcctcccaaagtgctgagattacaggagtgagccaccatgcccagccccactaagcattaaacttctttgagtttcttaaggcagtagaggaagagacagtatttaaagatgggggaggatggcaggtcggattgccgagccccttcctcctccctggtcctaagtgacagcggggagagctgtaagccgaggaagaagggccgtccatcctgcggcactcagcagaggtaagcgggcactccccatcctttcccttagtcactgc

SEQ ID NO: 144628 - DNA, 390 bp, Homo sapiens
gtgatgattcctccccctcagggctacttagggaacaaatgtgacagcatatggaagtggctggcccctagcagttacttaaagatttatgtactccactctccagatccaccctctgtgtgtcatcattattccttgtaaatttgtttggacttgaatgttcatacaacaactttttataaaaatggatggatcataggtcatctacttgtgcagttatttggatatttgtctccttcactagattataaactcacaaggacaggagttctttctgttttgcctgctagcataaatagtgaggagcactagccataatatgtgctccattgatactggttacaggaaaaaaataaggcttttttttttttttcttgagatggagtctcg

SEQ ID NO: 144629 - DNA, 341 bp, Homo sapiens
tgagacaagagtcttgctcggtcgcccaggctggagtgcagtggcgcgatctcggctcactgcaacctctccctcccgggttcaagagattctcctgtctcggcctcccgaggagctgggactacaggcgcccgccaccaagcccggccaatttttgtatttttagtagagacggggtttcaccgtattggtcgggctggtctcgaactcctgacctcacgtgatccgcccacctcggcctcccaaagtgctggggtaacaggcgtgagccaccgcgcccggcctgaattctgatttataatgccaaactgccctctagaaaaacagattatccccagcac

SEQ ID NO: 144630 - DNA, 321 bp, Homo sapiens
ccagaggcaccaaggaggccagaggcaccaaggaggccagaggcaccccagaggcaccaaggaggccgaggcaggcggatctcctgagctcaggagttcgagaccaccctgggcaacatggtgaaaccccgtctctactgaaaaaaaaattagctgggtgggtggtccccactattgtcgagaccctggacacaagcaggatgaggtggtgggtgagggtgtagatgaggtcaccgtggaacactgttgtgcctgagctggacacggctcataaagggggagccagccatccctcccagagctcacctcccgggaagttag

SEQ ID NO: 144631 - DNA, 401 bp, Homo sapiens
aatcctttttccataggtaagctatctttctcaatgatacattgtaagatgtagggtgaatgatagaagtccatggtatttactcttttgttatattttgatgcctatttttcttaaaatattatttaagtgccaggattcattgttagctaatttgtctagctctcatttaatgataaagtcactagctactgaagtatatagggaactttataacctctaccccaaatgactttagacagttttggtttaaatggctttttaaaaaatggtttttctttcttctcttgtcttgtgagccatcacttagtatcacagtcctctctgcctccagcagcatttgtgatttgctgcctctgatctgctcaaaagctgggtaatcatacttgttacaagtgtgt

SEQ ID NO: 144632 - DNA, 424 bp, Homo sapiens
cttgtgaatactgtgtggacatgtgtgtacgtgttagggcaggggtgacagcagtgacgtgaaaggagccgtgttcttctaaaagttggctaaattaagagtctaggttggaaacaagttgagcatgaactgagttcaagcttcatggggtatttggggagggagatgtacccagacatccccctacgtgggttctgcagggtatcatgtacctggggttctgatcctgccttttcttttaaggtagcatcccagcccacagagagctgcacactgctgggctgtgcagtacaaaaacaccatggagaatgaggaattgaattatgcctggggccactgttccccgcttcttttctaagaatgcacctgggagagagctctttataatgccaggcagacttcactgcacagctgtccctggtca

SEQ ID NO: 144633 - DNA, 324 bp, Homo sapiens
atacagtgcccaactagaagaggctgagcacttccctcctgtcatttgtagactgatagtccagtcccatcattaccaggtctcacccactgccagaaggatggctcgtcctcagtcccatgaactcagctgtgctcatgagttaccaatgaggaagggatgaaaggagaaaataaaaattaatcttgtatccacaaaacataaaaactcacattaagtatcccatcatgattataaaatatcaccactcatcacctataggaggataaactaaggctagttaagggtaaatgatattgtgactgtcaggactagggcatttgt

SEQ ID NO: 144634 - DNA, 785 bp, Homo sapiens
ctttcctctcccttcctccctccctcccttttttctttctttctttcttgcttgcctgcctgccttccttccttccttccttccttttctttctctctctttctttccatccctccctcctctctctctctttctttctttccttttcttttcctttcttttcttttctttttccttccttccttcccttttctccttccttccttctcttctcttctcttttctttctctttctttttttgaaggagcaagagccaagaatatagagattcttttgtaaaacagtgatccttcctggtgcatttgctgtttaattatgataaacaacatgagatataagtttatagaaaaatatgagcaagtcactcaggtggtgccattctctattccctggctattaaataggactacaaaaaagctctatctccaatgcaagttttctcacaattggtagcagatgaggaggtcaaagaggagaaatcaacggctggttaggtcatgcacatttggtagcacagaccattgttaaaagcaaaaagcaacattatagtatctggtgcctgcttgggaaaatgaagagcaggacaaggtcatgtgtgttatcttgctgtcatcaagactactactccctcttttctctctttccctcccatcttaatgcttctctactttactcagctttcatggttaaactcaaattccacttcttccttgaaagctgccctcctgtctccatgtgaaagcatcctccctacaatatgactgtatgtttcttctggtactca

SEQ ID NO: 144635 - DNA, 417 bp, Homo sapiens
tggattaagccccacattttttttttactcatttgctgctttgtccaagtcaccaggttgctctagtctttatttcccttctttcataaaattagggagttgagctcgttcaagtcatttcacaaaccctttagtctgggctcagattttctatcctttgtcatcccctttctccgtttttttagcacctttagacatgtggtagtgaaagtcttcagaatcaaaatggagttactaatgttaaggaaacccagggaagctgtgtacagagccagggaaggctgtgaagagagtgttctcacacttgtatgcctgataatgaaagagactacaaagaccatatccttacacaaaggccatcaccaccttacacaaaatagtacttctgcaaggacatctgcccagcaactgcctgtt

SEQ ID NO: 144636 - DNA, 461 bp, Homo sapiens
gagcctggtatctgcagctcagtggcttgggttttaatcctgggtttgacacttaataaactgcatgatcttggaaaagacatgtaacctctctttcaatttccttatgtgtaagatgcttataatagtattcactttgtagatactattattgcaaggactaaaattatgaatatgtgctggcaaataccaaactttatattaatacaagtgtcatcagaatatgtacatatattaatagtaattgttaccaaaacaccaggggttcaatctgggtcctgctgctcactgcacagaaagccaatgcctgagacaacaagtgttgccaaggaagaaggctttaattgggtgctgcagccgaggagatgggagctcagtctcaaatccatctctctgactgaccaaaactggctatatagcagggaagaaatgtaatcatgtgtgggaaaacaggaactcag

SEQ ID NO: 144637 - DNA, 557 bp, Homo sapiens
actcactttggatggtgtgcaaaggaggcggcttcctgagccccaggtttggagactcagagccaggtagggttagtcggagacagcaccccctgttggctcaagggtaggacacagccaggccgatgcctcctcttctaatcttgaccacaggcagctctaggaagtctgatgggtctcctgccatgcccggaatgcatttaaggtggtttgtaccatgcatgaacttacaagcaatgctggcccactgccttgaggtctctgcaggactcttccagggcagtgaaagggaggggacctaggaaccgtgggagtcagatttgggattcgggcaagaagggaagtttcataatctgatggacccacagaagacctggctgttctgggagagatgcaggcccagatgatgacctttggaggtgccatgcctgaaaaactgatatgaagatgctctcccccaaataagtgactcagaatacaaataatacctaaactgtaaaacataaaacttgcatgtatgctgaaattaaaatagctcttaggttcttgttttgtgc

SEQ ID NO: 144638 - DNA, 614 bp, Homo sapiens
cttgtctgcatctttatggcttctcttccctccctggagctttatctctgaggcagccttgtctcttggtggggttcattttgcatgcatggaacttaacaggctccacaaaatctggagagaaactctggcttagttgagcccagagagtcacaaactacctgtagtctaatgggctgtgatggggaaaaaaggaacacagtacaaaattaggtaccaggactgttagtagaagccaggttctcttcgaaggggatgtaggtggggaggtcagtgacttgcatttttatacagatggtgattaatgaacatcagaaattgcataggaagagggccaggtgcagtggctcatgcctataatcccagcactttgggaggccaaggcaggtgggtgacttgaggtcaggagttcgagaccagcctggccaacgtgatgaaaccctgtttctgctaacagtacaaaaattagctgggtgtggtcccaggcgcctgtaatcccagctcctgggaaggctgaggcatgagaatcgcttgagcccaggagacagaggttgcagtgacccgagatcgcagtactgcactccagcctgggcgacagagcgagacgccatctc

SEQ ID NO: 144639 - DNA, 126 bp, Homo sapiens
ctttaagtttggcctaaaggtttctccttacacactgcactgtaacctaactagatgtgtaaacagactgtaacctactcttgtaccaatcatagagttttagcctgtcacaggctgtcaactgtt

SEQ ID NO: 144640 - DNA, 324 bp, Homo sapiens
ggtgggaggatcgcttgagcctgggagtttgaagctatagtgacccatgatagtgccactgcactcagcctgggtgacagagtgaaaccctgtctcaaaaaaacaaacaaaacaaaacaaaacaaaaacaacttccaaaacagaaagcagcaggcccaaatagattcacaggtgaattctaccaacatgtaaggaagaaattataccaattctctacaatcttttctagaatgtaaaagaagagagaataatttctaactcatcctacgaagccagtattactctaatataaaaaccaaaaacattacaagaaaggaaaactat

SEQ ID NO: 144641 - DNA, 1218 bp, Homo sapiens
gatctacatggaacatagttttgtaggataaattgaaacatcagcaaaagaaaatgtgaactttgatgaagcctccaggtgcctggatgccaaatagacaaatacagaatataagaaaacacaataagagtcattggccccgtgcctatttggcatcattgcaagaaacctggggtagtaatagtggacgtatttagagagtgaggcataagctcacctaaacagcctagaaaatgtttactatgagagtaagaaggaagaacacaagtggatatacgaggagtccttgcaatctggcccatcacgcaccctttgcatatctctacctacttgtgcataattcagcatccagcagaggaagacaaaatgttgcggacagttcctctaccagcagcatgcctcccccaggacaagcgcaaagtgaagactggtcgtcgcttcagtgaagaaagagatcctgaactttcaactgtttgccggaagtttggtacattaatattatatccaggggctaatataagaagctgctaatctggaagaatttatattagattctcctgtttatccttctacaatcatcgtcattgatggtacacggagccaggctaaggacattttctgtaagaattccttgttctgacacccccaaacaggtgcagttaaaaacgagcatttctagtcagtatgtaattcggatacagccaattaatagatgtctttctacactggagtgtgcacctgttgctctttccatcttggagaaaaataattacatacaagagactttgcttcgccctcttgaagctttatgctctttccagatttagcatggtgcccaaattggccccagcaagcaacgccttctgaaaaaatggattatatcctaaaccaatgccaaagaacaaacacaaactcaggaaaatggaactattaaagaatagtgttaaaatttagtacagttgttcttttggtgttagcttacctgtcttcatctaacaataccaacttaagttttcatatagtttaggtctgtaggtttttgacttgctaatgagaattgcatactaatcttgcccagaagaaggaagtaaaccaaatattcatagaaacaaacaaacgaatgaaaattcactggctcactgaaaaggaagatttcatactgtacttgtttttaaacatgtgcctctaataatacatgttttcaaacccaaatttaaa

SEQ ID NO: 144642 - DNA, 953 bp, Homo sapiens
gatctacatggaacatagttttgtaggataaattgaaacatcagcaaaagaaaatgtgaactttgatgaagcctccaggtgcctggatgccaaatagacaaatacagaatataagaaaacacaataagagtcattggccccgtgcctatttggcatcattgcaagaaacctggggtagtaatagtggacgtatttagagagtgaggcataagctcacctaaacagcctagaaaatgtttactatgagagtaagaaggaagaacacaagtggatatacgaggagtccttgcaatctggcccatcacgcaccctttgcatatctctacctacttgtgcataattcagcatccagcagaggaagacaaaatgttgcggacagttcctctaccagcagcatgcctcccccaggacaagcgcaaagtgaagactggtcgtcgcttcagtgaagaaagagatcctgaactttcaactgtttgccggaagtttggtacattaatattatatccaggggctaatataagaagctgctaatctggaagaatttatattagattctcctgtttatccttctacaatcatcgtcattgatggtacacggagccaggctaaggacattttctgtaagaattccttgttctgacacccccaaacaggtgcagttaaaaacgagcatttctagtcagtatgtaattcggatacagccaattaatagatgtctttctacactggagtgtgcacctgttgctctttccatcttggagaaaaataattacatacaagagactttgcttcgccctcttgaagctttatgctctttccagatttagcatggtgcccaaattggccccagcaagcaacgccttctgaaaaaatggattatatcctaaaccaatgccaaagaacaaacacaaactcaggaaaatggaactattaaagaatagtgttaaaattta

SEQ ID NO: 144643 - DNA, 200 bp, Homo sapiens
ccgcatgcactgcagatagggggcaggatgtccttgtcaccgtctcgaggtagctgggaaactgcccctgggagttgatggtgtcgtggctctagcagcagttggactatgatgtgcttcagtctcattttcttcttatttatccttcttcatgttcattgagcttccatggactatgaatttaccttttcagcaaattt

SEQ ID NO: 144644 - DNA, 1175 bp, Homo sapiens
  misc_feature (911)..(911): n is a, c, g, or t
agtggtggctcatgcctgtaatcctagcactttgggaggcctaggtgggaggatcacttgaggtcaggagttcaagaccagcctgatcaacatggtgaaaccccatctctactaaaaatacaaaaacgtagtggagtgtggtgatgggagcctgtaatcccagctacttgggacgctgaagcaggagaatcatttgaacccagaaggtgggggttgcagtgagctgagatagtgccactgcactccagcctgggcaacaaagcaagactctgcttccaaaaaaaaaaaaaaatccagttatgttcaatctatttttttatactattatagatagcaatgagaaaatttcttaaaataaagctaacatctacctctctcctccatttagatgtgcttctaggctaattccagctaattatctgaatacattaaaccagtaataatcagtattttcagtatttgtcagatttgatacaatcaacagagatctgcatttctttctcttatatgtcacctcctcatttacaaagagcacagagcgggccacagtttcaacggtatggtttttggcatctgagctatttaccttttatttatttatttttggtgcaaaagcaggctgagatagatcaccatgcagaaggacaagacacatagaaaagaggctcgtttccaagaccagtcaggtgctggctcccatttaaactccaagatgtaagaccagtcagaagctggttcccatttaaactccaagactcaaggagggtacaaaggctcaaaggaaaacagaaatgactttagcggcgtggagccagggaggacaatgggcacaaagaccaagcctggaaggtctgttttacaccatgggaactgggggcctttgccggtaaagggtttgcacccgtgaatcnaaatttctccggccggatttcccacttagaaagccgggttacacacttttagaggccctttcaacatccggtaaggtccctcggcgctttaaacacagtcgggaatctccgcgacacctcggtcacaaaacccactagggcttttcgtcacccgtgcgagagcctcctctcaagagctcgggtgggccacaatcaatttttatctagtgacccttttctccagcggtctgctaacaagggtttctacgctctgttctcccgtct

SEQ ID NO: 144645 - DNA, 1415 bp, Homo sapiens
agtggtggctcatgcctgtaatcctagcactttgggaggcctaggtgggaggatcacttgaggtcaggagttcaagaccagcctgatcaacatggtgaaaccccatctctactaaaaatacaaaaacgtagtggagtgtggtgatgggagcctgtaatcccagctacttgggacgctgaagcaggagaatcatttgaacccagaaggtgggggttgcagtgagctgagatagtgccactgcactccagcctgggcaacaaagcaagactctgcttccaaaaaaaaaaaaaaatccagttatgttcaatctatttttttatactattatagatagcaatgagaaaatttcttaaaataaagctaacatctacctctctcctccatttagatgtgcttctaggctaattccagctaattatctgaatacattaaaccagtaataatcagtattttcagtatttgtcagatttgatacaatcaacagagatctgcatttctttctcttatatgtcacctcctcatttacaaagagcacagagcgggccacagtttcaacggtatggtttttggcatctgagctatttaccttttatttatttatttttggtgcaaaagcaggctgagatagatcaccatgcagaaggacaagacacatagaaaagaggctcgtttccaagaccagtcaggtgctggctcccatttaaactccaagatgtaagaccagtcagaagctggttcccatttaaactccaagactcaaggagggtacaaaggctcaaaggaaaacagaaatgactttagggagctaaaaaaaaacctgtgtgcattgcaaggttagtgggtgatggagagtagggacaacaaaaaatgaagcaagggaggacaaatgggacagaagacacaggcctgggaggctttgttctcagagcaatgggaaatgagaggactatagcaggatagtggctctgccacctgggacatcacagctcttccagggcagtatttcctacttatagaagccaggctaccacactcttagcagtcacccattcacaaataccgagtaagggcccaccgtgccctctacacacacagtcagggaagatatccatgcagacgcctcgagatccacagaagccacagcaatggactctgccaggacggggtgggagaggacctggcctaggaaaggcatctaagatgtgctgggctccatagctaactcttttcactaagctgacaaccttttacttcacatccagcagaacttaaaaataatgtgttcttcagaaagagggagtcctggctggtccaaagggagtgaattatctcacctgactgttcacagccagttacagaccaaattccttgttctactctttctactttctcactatggcacccgactagtctta

SEQ ID NO: 144646 - DNA, 1170 bp, Homo sapiens
  misc_feature (1084)..(1084): n is a, c, g, or t
  misc_feature (1121)..(1121): n is a, c, g, or t
agtggtggctcatgcctgtaatcctagcactttgggaggcctaggtgggaggatcacttgaggtcaggagttcaagaccagcctgatcaacatggtgaaaccccatctctactaaaaatacaaaaacgtagtggagtgtggtgatgggagcctgtaatcccagctacttgggacgctgaagcaggagaatcatttgaacccagaaggtgggggttgcagtgagctgagatagtgccactgcactccagcctgggcaacaaagcaagactctgcttccaaaaaaaaaaaaaaatccagttatgttcaatctatttttttatactattatagatagcaatgagaaaatttcttaaaataaagctaacatctacctctctcctccatttagatgtgcttctaggctaattccagctaattatctgaatacattaaaccagtaataatcagtattttcagtatttgtcagatttgatacaatcaacagagatctgcatttctttctcttatatgtcacctcctcatttacaaagagcacagagcgggccacagtttcaacggtatggtttttggcatctgagctatttaccttttatttatttatttttggtgcaaaagcaggctgagatagatcaccatgcagaaggacaagacacatagaaaagaggctcgtttccaagaccagtcaggtgctggctcccatttaaactccaagatgtaagaccagtcagaagctggttcccatttaaactccaagactcaaggagggtacaaaggctcaaaggaaaacagaaatgactttagggagctaaaaaaaaacctgtgtgcattgcaaggttagtgggtgatggagagtagggacaacaaaaaatgaagcaagggaggacaaatgggacagaagacacaggcctgggaggctttgttctcagagcaatgggaaatgagaggactatagcaggatagtggctctgccacctgggacatcacagctcttccagggcagtatttcctacttatagaagccaggctaccacactcttagcagtcacccattcacaggaaggcatccaaacgctgatggggaggntggaagaagtagtgtcttactgaagaaggagaagtantaccccaaaatgtctccccctatctctcaaatcatttgtatcactgaca

SEQ ID NO: 144647 - DNA, 509 bp, Homo sapiens
tcggtcccgtgttcgggttgtatcgtgttgggggtgggggctctaaccaggaccaggtgcagcatgatagcttctggggaaaggagctgactctccttgtgtggcagaattaacacttacggaagagttaggaggcaggtgtcagcctaatagaaatgagaactgtgtactatgtagcattatctggttgccattgatagctggccttcattgagcacaacccagctttaggcattgtggaacgtgctctgtgcattctcatttatcctcacacccaccccataggcttcagtgctgtggtcctcactggacaaatgaagcagagattcaagtttggtaacttggtgcagcgtgtcatatgtggtgaatggcagagctaaaactagaactagaactggaactaacccagagcccctcttaacaactatctgctactctcagaagtgttgaacaagggcagactaccaccttccacagccactgcagaaagatgcctgctttaggggagt

SEQ ID NO: 144648 - DNA, 470 bp, Homo sapiens
caagtttccctgtctatataaaagcataaaacacaagcaaacattcctgaaatatggaaacatgcagacattatatgttctcacttgatgcagatatgagacctctctctggaaaaaggctcacaaaactttagcatatcttgcttaagaaaaatagtccgcagtcacaggctgcaaaggaaaagcctatatacagcaatgtcagaggaatctcagacctcaggtaggggagtttcttagtgtcagattcacctgaatcatccctcttacaaacaagtattactgtgcaatttcttgactgtttttccacttatgatccaagtggtaccaacaatgcactgtgttaggctaatgagagaaccttttaagccaagtgaagctaaaagatataacatgctcttcaaatgaagagagaaaaatgtaatgaaaggactgcaaaaagtagcatatgcatgccaaactcaaaagaa

SEQ ID NO: 144649 - DNA, 413 bp, Homo sapiens
ttgagagccgctactctaggctaggatgagaaactccaccaggggcctctctgcctacaccctccttgggaccagtccataggcacagcaagaatgacaggcatgtggcctggccctcctggggaatccagggtagaccctctgggtgacagcttctccatacaggatcctaacccataagcatgtgctagaattccgcgtgcctggaagggctgtcagtccccacggctgggttcttgcacatgcctccctcattctgcagaaaactggagccccacctgcgtgtccctgcccccaagggccctgccggtttcctgtgacccagcagtgacagtggccctaagggcgagtgcccaggtcccctgcataccaggaggtcactttgcagcatgaggaggtctgcagactccagt

SEQ ID NO: 144650 - DNA, 164 bp, Homo sapiens
aatatgagtcagattatctcactccccacagtcctccagcggcttcccgtttctctcagggtaaaggcaaagtgcaaagtgcaggcagtccctgtagggcccccatcatctctgctcttagctgcttaccacacatctctccaacaccctcctcactcactcca

SEQ ID NO: 144651 - DNA, 624 bp, Homo sapiens
attggttatgtgtgatttctatgtgtgctctaggtatttgccctatagctgctcctaaatgtggggtcttagaaaacatcttggcccttcaaagcatactctgctggttggctaaattgcagcaggaaaaaatatcagcagccctattgctatgtcacttgcctgcagagcaaaagttgtttcaggaacagtaatttgatttagtctatattaaaaatcataaatagtctacaaatacaaaaaataaagagtttgcagctatgttgagtgcattataggtgttttcaaatttctcctatgataaattaaaaatgtaacgttgggcattaatttcctaaacccaatgctcagcaatttcctcaaattgttgccagtttttccaagagacttcagaaccattccctggagtgaattatttccaatggtgaagagtaaggggtggatgggatgagattctaaaaaaaaaaaaaatcttgcttctatttcagaagtgtcactcttcagccccgtgaaggacacgaaaagctggctgagtagtgtggtctatggaggtgcaggggcttcagagttagggaagcatcaatcctgagtccaagccagctgcttggtagctgtgggatagtt

SEQ ID NO: 144652 - DNA, 525 bp, Homo sapiens
catactccagatgaaaacaacaagcctccgagagcttcctccattcagacatccagtagatattcacccagaatgtctattttttattcagggggcacagcttgaaaactgcttactgaatacaactaactatagccagggaaaatgtactaaaagcaacacaaagctaataaaaagtggcattgtttgccggtacatctgaacacaatcacaattcaaataatccccagaagaacatttcccattctaggaggcaggatgtttatggagatgtgatctcatagcagtacaaaagaaaggaggaaacacacaaacactatttttcagtattaaaaagaatatacaaagcactcactgggaaactaggttttctgacactctggtggctcctgggttttgtcaaagcaaattgaacagtttttctttgattgggtttgtctctgagtcccatctgccatcccttcctcctcccccccgtaaaaccacttagttttggctgcatttgactagatggggatggaagag

SEQ ID NO: 144653 - DNA, 443 bp, Homo sapiens
tgggctaggttgtacgtcaacaccttactggtagagaaactacaatgtttaggacactgctagataacctcacattattaaaatcctacatattctatctgaggtttaattatgttttattctaatgtccaaaataaaatgcatttaagcaaatattttaattaataggtaacatattgcctagaaaaactagtagcacataataaggtagtcataaaggttgaacaagtttgtaaaacagtgttttctaaactataagcagtgagtgggcttggtggctctataatctcagctcttcgggaggctgaggcagaagcatcacttcaggccaggagttcgagaactgcctgggcaacatagcgagaacccctctctacaaaaacaaattaaaaagctagccaagatggtggcatgaacctgtagtctcagttactcaggaggct

SEQ ID NO: 144654 - DNA, 362 bp, Homo sapiens
agctacctcaggctcaggatgggggacacttccccttaagcaatgagaaggagagaggctgacttggagagaacagggagtcagggagcttgggctggattgttattccccaagaagagttgcaactggactttcgcttcagtaatgtttaaaagaaaaatgctaatctagatagggactgccattcattcattcattcattcatttatattcctcttaacaacttgtgactttgggcatgtggcttaacttctcggttcctcagtttcctgtttacaaaataatgatggtaataatagtacctatctcacaagatgtggagaggattaatggagatgataggtgcaaagtgcttagaatac

SEQ ID NO: 144655 - DNA, 486 bp, Homo sapiens
  misc_feature (410)..(410): n is a, c, g, or t
gaagtcttccctgtgtgtatcaatggttggttcagaaattctcatcttgcatgcatctttgtgtgtttgttgatgagaaaatcttgttaaaataaaaatgtggccgggcggggtggctcatgtctgtcatcccagcactttgggattacaggcatgagtcaccatgcccagccttaagatagttttgatgattgtcaagattttcaagcaaggctaggcccaaaactacggagaaaccctcaatccatctggtctccatttgcatgtaggactgagagatctcagtaaccagcacctttcctctcctggatcaggcaaagaatcgcacgtgccagccacatcctccatatggctttctcaggctctgttctgcaattagaagataatcacatgcaaatacctcttgcagngtgtcacgagaaaggaaaccgttcctcctctggagaacgtgcccatcttgcgtcacacgcaaaaaagatgtctttg

SEQ ID NO: 144656 - DNA, 164 bp, Homo sapiens
tgaagaggcttggaagatgcaaaatcatcacctccaaacagctgagacacacatgacttggctttaaccgtgactgcccaatgccagagcactggactcaggtttaacatgggcagcccccatgtcaccctccacatcagctctcctcctacattgatggtcgg

SEQ ID NO: 144657 - DNA, 710 bp, Homo sapiens
ctggttactttgtgtgaacatccaagccacccttgttgggaagctagatgagtctaaaactgagacactggtgttctaggatccatctttcttttctgctctcggcctggaaattggtcttttataatgtagcaccttgtcaaatttactttcagttctgtatttcctttttacttctgtctaaatggaaacagatggcaacataatgtttaaatgcagtctttttccttatctctttttttttgtggtagtggtgataaaaatacatgtaaaatttaccattttaaccatttataaatgtacagttcaccttatctgtttttaataactctctcctaattgtccctgatatttttctctttttaatttttttctagtctaaaaaacttaagaggctgggtgcggtggctcacacctgtaatcccagccctttgggaggcctaggcgggtggatctgaggtccacctgtggatctgatgaaaccccatctctactaaaaatacaaaaaattagctgggcatggtggcgcatgcctgtaatcccagctacttgggaggctgaggcacaagaattgcttcaaccctggaggcggaggtggcagtgaaccaggattggatcatgccactgtactccagcctgggcgagtatcggcactgggggagtgaggggtcaactgcgggagtgtaaggtcagcacactacctctgcctc

SEQ ID NO: 144658 - DNA, 138 bp, Homo sapiens
taccgaggccgtaagtgccaaataggtcttcgctgtagggggtgtggttttaagttcctgaatccagttttggttccttgctagagtgattaatcggtgtttgagggagtgcaattgtctggtgtgtatgattcccag

SEQ ID NO: 144659 - DNA, 435 bp, Homo sapiens
gtaatacatattttcaacatttttatctaaaatatgaaggtatcttgaataatgtcttttgcagacttgtatgtttgcccactgcttgaataccagcatttcaagttagtgataacataattttaataataacttcatgtttttagtcaaattttaagatgtgtcatatctataatatagtgggtgatttaaaaatagatttatgtatttatgtttatcttaaagtttaaaatgttaccatctacctctgtatctttgatagagttagcagatagcttatgtggttttttgcagtttaaaaaatgttttttgtattaagttttaccttgatgaaggtatgctgttatgcatggtagcatgaactaagatgaatttgacttgggtctgtcctgatgaaatgtgcagtctaataggaaaggtaagcatttgcataag

SEQ ID NO: 144660 - DNA, 120 bp, Homo sapiens
taagctgcttaactctcctttggggaggagtgcagagatacagtgtcaacccgagacagaaatatcacaggaggtgtcactccatagttaggtacaagacagaatgggggacacgggaga

SEQ ID NO: 144661 - DNA, 202 bp, Homo sapiens
aacaccagagttaaaaataacagcagaaaacccgaatacccagaagtcgcttttcccaactctatcccatagcaccaacccaacctgcatgcccccatcatcataaagccacaatgtgactcggtttctcttgtctgtgaaatggggagatcttcccccatcaagtaaggcagtggtctgtgtgtttgtgtaggaagggagt

SEQ ID NO: 144662 - DNA, 331 bp, Homo sapiens
tggtgtggggaggttctattgcaaattcaatggtttttttcatagctggataataaagttcagttgttaaacacatgaggcagattaactttataggtcttgggttacaaggatcataatggaagacactcaaattacagctgatggagatgaatcatttattaatctgggggtgcgggttgtcatggctctgcttactataaggcctatttttaaggatacgagccttgagattacctacatttctaaaacaggttcctgctctgagtctactacctaaagaggaaagaatgtttacaaaacaattcaaaatacttctttaaaaacttca

SEQ ID NO: 144663 - DNA, 382 bp, Homo sapiens
tggtctcaaactcctgccctcaagtgatctgcccactttggcctcccagagtgctgggattataggcatgagccaccatgcccagccttaaagacatttctttgccttccaaatttgattggcctctcttcattggcttgaccggtgtccctcgctcccggcttcttccgttagccagccacctttggggatccccctgggtctgagagtggacagctgagctttctttgtcatgtggtcatcacgggagcttgaggaacctgcttctgcatcagagactgatggggccaagtgcttcccccacactgccttgaacgtggcatgcagttgggctgcatttgaccccctcctccatcttctttctccacttgggattctagag

SEQ ID NO: 144664 - DNA, 536 bp, Homo sapiens
tgaagatctgatctgaattagctgccaacattccttattaacagccaggtttctaggtctgcctgaggctgctctagcccacaggagacaccctacatggcatcaggcagtggcgcaacagggctggggcacatgctgacagccacactgtccctgctgccctggcacggtggcagagtgccagggacatgattatgctttcatttgtcctgcagcaaacccaagggggaaaccatgggcacattcacgtttctactaaaaacagacaccaaggatacaaatctttcaaggaaaatgggtgaaaacatttaggtaaagaacgctcctaagtatctgtcatcaggctgccctgtgaggactgtgatgaagtaagcacagtttccctcacatggccacacacttcaccctgaccagcccatcaggggctctcagctccacgtcagtttagcggagaccaagagctggggagaattgaagagcccagcaaggtcactgacctgctgataaagctgctcaactccaaccgtgggggtttg

SEQ ID NO: 144665 - DNA, 226 bp, Homo sapiens
ggatttgctggtgcagtacaactaggcttaatagggactcgaattcgaggctcgaattcgagtatcatgaagcctgttacaattccaacaccaacctctttcccaattcatactttgaggaataatgtgaattcaaaggggtccacaacaaaaacaaaaacttcccaactcttcaataaaacctactacatatacaaaaaaaatggaaggggccagagaagtcatc

SEQ ID NO: 144666 - DNA, 352 bp, Homo sapiens
ctgcaacgtccgcctcccaggttcgagcgattctcctgtctcagcctcctgagtagctggtattacaagcgcacgccaccacacccgactaatttttgtatttgtagtagggatggggtttcaccatgttggccaggttggtctcgaactcctgacctcagacctcaggtgatctgcccgcctcggcctcccaaagtgctggtattacaggtgtgagccactgtgcccggcgtgacattttttaataaaaggcagtgcttgcacagccctttgtatgagcttggtagtctgctaagggctttacctggatatattaccttgtgtgcccccaggaacctttcgtggtgggttc

SEQ ID NO: 144667 - DNA, 648 bp, Homo sapiens
tggcttccttgaaggcactattgagggaaccaggggaggccagagtgcctgggatgtcttcagcatggtgagcagctcacggtgggcactccaataagatggaagatcaccgttagcagccccagcaggggccatagtggcaatgagagttttttttttctttcttttttttttttgagatgaagtctgtctctgttgcccaggctggagtgcagtggcgcaatctcggctcattgcaacctccgcctcccaggttcaagcgattctcctgcctcagcttccctagtagctgggattacaggtgtgtgccaccacgcccagctaatttttttgtatttttagtagtgacagggtttcaccgtgttggccaggctggtcttgaactcctgacctctggtgatccacccgcctcggcctcccaaagtgctgggattgcaggcgtgagccaccacgcccggccaataatagtaattttaagattagtggtcagtgctgtatcccattcagagccccatcgtccagctggcatttcagtgcctctctcgagttgttgacctcagatgcaaatttgagccaggaggtgggccagggttctgtttgaggcaggcttctcccacagtggggactgctgctgggaaggactggaac

SEQ ID NO: 144668 - DNA, 220 bp, Homo sapiens
taaactatttactcatgcctcagatgctgaagtaccttcctagagatacactcctccagttgataatccctgctgcagccagccacattattcacagaggaaccacgccaatggtaatgttcctcaggtatggagagcaaaaaaagaggttaactacggttagaacccccaaattttaaacctgaccttactttttaaaaaacacaagtatagagatctg

SEQ ID NO: 144669 - DNA, 272 bp, Homo sapiens
cagctcccgtgtggcctgcacgttcccctgagttccctttgcggccttggcagtttaagagcagcctcagctcctgggctggcctcagccgcccgccccgtgttccctcagggccaggctgagctgtgctctggtggcggtgaggtcttggagaccatgcggtggggctctctgctgggccgcatagcatccacttgtccctctgtctcagccaccacctggtccacaaagtcaccaccacccctctgcagttgacaagcatcttacgggtg

SEQ ID NO: 144670 - DNA, 1070 bp, Homo sapiens
atgagggggagaggaagaagcaagggtgggcagcgggtgggacacacatcagtttggtgtgggtcttaccaggcccagtctgatttgccacaaccaccaccctcctcctaagtggccatgaactgtcgcctgagctctttctccactcctgctggcacttggggcaggttggggctcctcaccaggatcctggagggagaacgggaatatctgtggcagcaccattggcagtcacctgcagttcattgggacagttctccccactccccacctttcagaaacaggcttcatggctccagacgagagagcttgcagatacaaggatgccaccaactcacagtcagagcccatctggggacaccaggaccgacctctgaagcagccccatacagtggacagcgttctggagtctgccaggcctccttctgaatcccggcactgcgcctcctaactgtgatcatgagcaagttgcccaacctctctgagcttcagtttcctcatctatggaatgggtctaacactcacctaacaagacaactgtgatatttacatcaaaggagctgataggtgttaaacaccaagtgcttgccagacacagcggtgtgcatttcctcccatggccttcgccacgctcattaggccctcagacatggctaccatgttctagtgggcaaaggcacttcgctctgggccctcaatccccagactctcagggaaaagaccaggcctggtcctctatggtcccttcctctttcctctacaagctcagacatgcaaagcggagcatgtggctacttggagaggaacttctcagctcgacttctgaagaaaatgccaacatgccattcaatgactaatctcaacagcaccagcaacattgcctcccctttctcgacatttccctccctgaccaaagtggtcacaactgaaggagcaccaatcccacttctctctttgattacctcaaatcctgtctttgtacaaaaatgtaaaacaacatggttcttcccaaaagcagaagtctcccagtctctgaggaacagagaaaagcagtgcctaggcatagggtg

SEQ ID NO: 144671 - DNA, 213 bp, Homo sapiens
tcctgctcagccttcccttcatccctcttggtgcctgctctccctgttccctttcccttcctttcacccttctgacttctcccctcccatgccctcttgcaatcaggtctcccaaagcacccctgcccttcaaaaaagagcttcatggcagatggttcacagtaaggatggtaaggccattctagcctatggcaaagggcaatctttccagag

SEQ ID NO: 144672 - DNA, 1058 bp, Homo sapiens
cagaaagggggaggccccacatctgagtgaaaactgcccaaattcctggttgactattaaactctaaatgtatagtgaaatcccagggagcccagcaagacaaaaacaaaaataaaaaccagccaaccaatgaaacaaagcaagcaggcagaggctagagaggaatctacccttaaaagacagacctatactagatgagatctgtgaggttcatgctttttaaaacagtatatccctaaactgtgagcagcgaacagtggaaagctgaagccttactggcttggggttcagaggaaagaccctaatattgcccaagcagctgaaaacttaggaggaaatcacaagaacacaaaagtcacagagtgtgagcccctaaatctgagtatgatcagcctaaatccctggctgtctgccagattacacagaagcatgggagaccccagggagctaggctagacgttgtaagagctgagcagagatagcagctgcttcatacgacaggagagacagttcgcagtttgaatccaggcaagttaactgcctactagaatataaaaagagaaagttctcagaagaacacagtagaatccagagttgctataacatcttatctacaatgccaagttttcaatctacaattactagacatgtaaataaaatggaaagtctaactcatactcaggaagaaaagcagtcagtagagactgactctgagcatctaagtgggtacagtgttggattttgcaggcagactgcaaagccactgtgctatgatcaaagaattaaaggaaaaataagtgaacagatagagaaattgtaacaaagaaatggaaagtgaaaaaatggaagttgtagagctcaaataagtaatagctgaaataaaaactcactggaggccgggtgcagtggcttacacctataatcccacaactttgggaggtcaaggcagcaggatcacttgagctcaggagtttgagaccagcccgggcaacatagtgagaccccacctctacaaagcaattttaaaatgagccaggcatgatggtatgtgcctgtag

SEQ ID NO: 144673 - DNA, 670 bp, Homo sapiens
aagggtgagggggtgagaggaggggtagaaacgcaggagcgacagcacttgtcctgagtgggggagaggtggggacagacagggcttcacagagcactggcattaatcacgttgatgactgattatgtgatgtggacacatggaaattcacattctgacgaatctctaactgtacaagttgtagagacaggatgcacatttcacaaaataaaataaaagcactatcaattaaaagatcaatgtaaaagatctttggcgtagccactgctgtgcgggttccacctggacaattcttagcactgaaactagcctgaattaacagctgggaggcagtgcaagaggggcggactggaaagacatgagaccaaacgaaatggcaaagaaaggagatgaatggtagggtgaggaagaggagggactgaagtgacagcaaataaaatttaacctccagtcctcccacgctcgctctggcctgctccggccacccgcaggaccctgaagcccaatgagacagctcagatacttctgtgtgacaaccgcaccagccaggtcatctactaaacacaaagtaacagagagcatcttaaacatgacctgtcatatccaggggactgtatgacaaaggtaagatagttgatttctgctcttggaagcttaccatttattcaag

SEQ ID NO: 144674 - DNA, 376 bp, Homo sapiens
cagtggcgcactccagcctgggtgatagagcgagtctctgtctcgaaatgaaatgacatggcatgacatgacatgacatgacatgatgaaatgaaataatgaaatgaataatgaaatgctgggtgtggtggtgcactccagcttgcgcggtagagtgagtcttcatctctaaatgaaataaaatgaaatgatgaaatgaataatgaaatgccaggtgcggtggcgcactccagcttgggcaatagagcaagtctcttgtctcgaaatgaaatgaagtaaatgaataatgaaatgccgggaggcggagcttgcagtgagccgagatcgcgccactgcactccagtctgggcgacagagcgagactccgtctcaaaaa

SEQ ID NO: 144675 - DNA, 601 bp, Homo sapiens
atgcaaaggtctacttgacatctccatggggtgttaagatgtgccttcacacatagcaggtctaaaatcacgttctgccgttcctctacctaccttagggtattaacctacccaaatcccctgatcccaccacgttctgtactcaccgtcgtgaaatacaactctcttgcactagttgttcaggccccaaatcttttttttctcatcataccttacatccaatcgttgagcaaactcactggataggttctttaacataaatcctgagttgaaccatctcacaccaccacaactacaattatcctggcccaagctctcaccatctctcattttgtctattgctacagtttctaactcttcccagccctcagaccatgagcctcttcccttgcttcatggggcaatgcctagaaggatcctcctaaccccaaaacccttcatgtctctcctctactcagattctcactcagaatgaaaactcacatccttttcacagctaataaagccccaggtgatctggttcctcagtccagctacagcttctcctcacctctgccttgctgagctcacctcctgccattttccccttcctcattctact

SEQ ID NO: 144676 - DNA, 386 bp, Homo sapiens
aggcataagatcttaatcaacacgttctagtccctgctcacacaactagtaccagaactgcaacttccattccctgagtttgccatgtctctctggctaattttataaaggtttatcaaactcttaggatgcggagtctaaactatttgacaatatcactttttagaccagacacatttgttactctgtggccatctcatattacatactttctaaaataaaagatttttttttctttgaagcatgatataattgttacatgaatgaaatagctgacaagtgggcagatgtaatgcctactctgagagtccccagagaggagtgaagggagagtgttgcaataaatcaccagctcagtggtgggtgcctatctaagtgtgctgaga

SEQ ID NO: 144677 - DNA, 267 bp, Homo sapiens
cccaaatgtacacaaaagaaataattccactatcataaaacaacgtctggtaacatgttttaaaatatttcctgtttgcttttttctaggcatgtacacatacatacatattttatagaaattggggccaggcacggtggctcacgcctataatcccagcactttgggaggctgacgtggacagatcacttgaggtcaggagttcgagaccagcctggccaacatggtgaaaccctgtctcttctaaaaatacaaaaattaaccagg

SEQ ID NO: 144678 - DNA, 454 bp, Homo sapiens
gagcagacatgccgcgcgctccgaggaagcgccggaaccaccagaagcacagggacgcgggtgccgagagtccccagcactgaaaacggggatctcctcttctgtaagggattttcttcccttgtcttaacccacttctgtagactcgagggacgccaggatggatatgggtctgggcgaggaggaggtggttgtgtatttcgggaagccccgttgtcaggcacgcgcaccccagtcctaggccaggctggtgcccttacctccggtgcgctcctttggcagcaagaaccgcgtggaggccaaggttgtagaaccaggcacgctccctgctgtctgtctgtgactctgtgcttgccctcagctgccctgtgtggttatgggtgatccctagggacgctgggtggtgtcagtgagtttctttgggggcttaaaacaaacaaacaagaagtacttt

SEQ ID NO: 144679 - DNA, 354 bp, Homo sapiens
agacataggaaaaggacagtcttaaagggaaggtccatcttttttcctggacatgtaggattaatagttcctttgtacctacaagtaaacttacattttgccaagacagcttttctcactgctctcctaggctctagtatattaaatctatcctaaatttaacttagattgtgttaacttacttgagcaacctctgctacccttgtggtttctgccacatcaaagccatactccccggatttggggtttgaaaaccttgtgtacattcactccattctgtatgtctttgcttataactgtatattccttgggatgccctctgctattcaggcctcaatcttaagactggtcctg

SEQ ID NO: 144680 - DNA, 270 bp, Homo sapiens
catgggacttacaaagagatgtactcataaggggcaatgacaaagtaactacgtagccttaggttaatttagcctgtgtttcaaaccctaaagcagaatgatgaaaatctaagctgtagcatcatgcctgactagaaacctgtggggtctcttcctgttcctcggctttaacctaaatctgcctgtctactggctttcttggaaggtataagatcaaagaaaacaaaatgttgaaagttaagggagcaacaaggccaggcctcaacctgt

SEQ ID NO: 144681 - DNA, 525 bp, Homo sapiens
tgtcatgtatattacatgcatgtagtatgacatctacaaaaccaaatttgctaagagaaacttatgctccatttaccttgattccttactagagaattttcaaatgtcaagtcaagcatggctggacatcaaagattgtaaacctttgggggactcactttaacatggaagagtggaagccattcatattattttagcattccagaacactcaactgactgaaagatttttttttaattgttgttctttgaaaggaaagatgaatgagcatatatcatttggggcagaattctccagaaactataatctacaaccactgcatttatctgaaattctgtcttttattttaaaggtcgtggctgtataattctgattttagcaagcagaaatatttttcaaaaatgcagcctaattttattgttcacctttaaatattcatttcacatttgatgggctaaaaatttgaaattcaaattacttccttttcctttattcttagcaaaatcatctaaaagtaagagttgc

SEQ ID NO: 144682 - DNA, 261 bp, Homo sapiens
aataaccgagctctctcgcccctcaggcaggatatctctgaggcatgtattctacgagactcctagagttgcccagcaagattcagctccagttacgtgcagaggtaactggctcgacaacacaccctttactggcctgcttccctttcctgtcttccttccctactcacatactattgtttcctcccaaatacaacaactacaccagaatcctcgtttcaggttctgcttttgacaaaacccatactgaggtacaagcca

SEQ ID NO: 144683 - DNA, 359 bp, Homo sapiens
aaaaaaccactgacaaacaaaatcacctcacacccattaggaggaccactacaaatatttttaaaaacatcaaatctgttgacgatgcaataaaagtgaaacccatgttaattgttggtggaaaacaaagatgcagccattattttagaaagttacaaatgctcctcatttataagtctatatccaaaatatgtaacaaaggccaggtgcagtggctcaagcctgtaatcctagcaatttgggagtccaaggggggcagatcaactgagatcaggagtttgagaccaacctgatcccttctctactaaaaatacaaaaaattagctgggcatcatggtgggaacttgtaaccccagcta

SEQ ID NO: 144684 - DNA, 174 bp, Homo sapiens
cacacaagacaagttctcctattactttttctccctctctcctgctccacccctcaccgccttacacacacacacacacacacacacacacacacgcgtgtgcgtgcaacaaacatcttaatgctatttttaacaaattgtctaaaaggaaaaggggctccagctctgtgatcc

SEQ ID NO: 144685 - DNA, 140 bp, Homo sapiens
ttcccagtgccaaaaaggttggggactgctgctctaaaatatgtaatttttgcttgtaagtagagtaagccattgactaaccaaaacattaagtgaattttttgctttttcctttgaataccaacttgttttgtttcaac

SEQ ID NO: 144686 - DNA, 212 bp, Homo sapiens
gggaattagctaatattctttaagtattatttctattcaattgtcttctttccttatgggactacaattacgtgtatgttaggtcatgtcactgtttccattcttttttccccttctcgtaagcctagagattttctagcaacctatcttcatgttcacttgtattttcactgtccagtatccagttatttctaattattgagtttttaatt

SEQ ID NO: 144687 - DNA, 353 bp, Homo sapiens
taagaatgggtttgcctttcagtagagctttatgttaaatgttgatgttgctcagtccttcccttggctctcttctcttctcactccatttgttttcatctgtacttaggcttgaaattagcacagttctcttctctgtgtcccttagcgcagatcctcactgtttctcagactctaaaatagtttgttaacatctgttcatttttttccccttccaaactgtctaccatttcatcagcagaatggatatccgagcctatcactgtctctgcagtgacccccagtgcctccaggactggaggaatgtgtcttgtggcatgtagcgtcctccagcttcattaagtccttgctgc

SEQ ID NO: 144688 - DNA, 215 bp, Homo sapiens
ttgaaattaatatgctgaaaagatatccacacccccatatttactgcagcattattctcaatagctcaatattgttcatcattagatgaatatttttaaaatgtgatgtatatatgcaataaaatattattcagctttaaaaacacaggaaattctgtcatttgcaacaacatggctgaacctagaggatattatgttaagttaaattcaccagg

SEQ ID NO: 144689 - DNA, 289 bp, Homo sapiens
aagccacatccagtgagatttgcgagaacaagaggaaatggccaagtttccgggaagcagggctgcggtgtgcagctgtgcattctgtggccctaaacaggcactttgtttttcatttgaaggtcatcatctccctttggcacatgtgcttcctctctttgtaaatgtgtaatattttaggctcaaattcctatcgaattttagtcttaatctaagtcggattatagaggtacatattgtcttactgttacattttactgatattcagtgtttgatatccccaaagtct

SEQ ID NO: 144690 - DNA, 364 bp, Homo sapiens
gcctggagtggaccctaactccctcccattcttctgcattccctctctgtattaggacctttttcgaggctcttctgtagtttccttcccagcctttcctgctccctaagacctgatggtttaatttgcccatactcttgtactacttaactgtgtccattagtcatacaagtacttctccttctacctttgcaagctcttaaagagccaagactgcatctcagtctagctcttggccttgcatctagcaggttgtttggaatggaggatacagaaaactagagatgcagtaacccagctcttctgattgtcctttgtagattgttacttcagtcatctttttcttctgagttttatgaattag

SEQ ID NO: 144691 - DNA, 143 bp, Homo sapiens
catatcatgtttacggtctatatcccaaagcagaatgtaaaccccgagagcaagaatactatttattttctttactgttgaatctccattgtctagaacagacctgacatgtagtaggtgctccacaaatatttaatacattt

SEQ ID NO: 144692 - DNA, 374 bp, Homo sapiens
agtaagtgatagaatcattctatacgtaactgaataaaaccaaatcaggggaagatagaatgggtgaaattatgtaaacttttcatttcattatgtaaattacgtaaagtttttgaactatgtataatcacatgcatgaggagacagaaaacaaccttgaaaaacatgtttcaagggtgactagactgacaccaggctatgttttaacattagcactaattgatttgatggattcaacaggctttttcttgttggatgtttctttatattctaattggtttatactttaatacataaaaaaatcttgtgaaaaggtgcaaagagagaatgacctttaagtagtaaatatctggattggaaataaaacaaatgaa

SEQ ID NO: 144693 - DNA, 174 bp, Homo sapiens
tatgtcagctacctgatttgctagctgtgtgtcttaggacatcagtctctgtgtgtctcagttttctcatctgtaaaataggaacaatagtacctagctcatgaaggattttttttttttaagtgggagaatagttagtgtttgtgaggggggcactgaagtgactgctgtaat

SEQ ID NO: 144694 - DNA, 391 bp, Homo sapiens
aaaggagtgaatggtgttcctgggccatttacaccaggggttaactctttattttcaggactgactttgtatacaggtaggctttgttttatagaaaaacttgtgtgcaggggtaatttctggataccaaactttatagaaaaacttgtgtgtaagggtaatttctggataccagcacctacagcactagaaaaaaatgtgctcacaggtaccctgccctttgcattgctttacaaagccaagaacatttgtatttggagatgcccctgacccctccttctgcaacttcagatttatgaatatcggatcttgtccaaggaaaaccacagcagtgtcagaggaggaggagaaggaacccttgctcagtttgtggcagttcttctgaggaaat

SEQ ID NO: 144695 - DNA, 1579 bp, Homo sapiens
  misc_feature (75)..(75): n is a, c, g, or t
  misc_feature (115)..(115): n is a, c, g, or t
  misc_feature (267)..(267): n is a, c, g, or t
  misc_feature (347)..(347): n is a, c, g, or t
  misc_feature (1398)..(1398): n is a, c, g, or t
gtctgcataagtatgtgtctatctgggagtgcatatatgtgtgcatgtgtgtgtgtgagattgtgcatgagctanagacaacgacaggcacttcctgggcaggaaggctgtatcncagggtcctgcacatagtaggtgctcagtgaacatttgctgaactcagctgaactgaactgaatgaacttgcttcactgccactgggcccaagagatgggtgctctcctaggcgccccttcccctggcaggggccgaggacgctgctgctgntacaaaagtccccaggacggctttggcttcactctgcgccacttcatcgtgtacccacccgagtcggccgtgcactgcangcctgaaggaggaagagaatggaggccgtggaggaggaccctccccccggtaccgcctggagcccatggacaccatctttgtcaagaatgtgaaggaagacggccctgcccatagggcggggcttcgcacaggagaccggctggtaaaggtgaatggggaaagcgtcattgggaagacctactctcaggtcatagctctgatccagaatagtgatgacactctggagctgtctatcatgcccaaggacgaggacatcctccagctggcctactcccaggatgcctacctgaaagggaacgagccgtattctggagaggcccgcagcatcccagagccaccgccgatctgctacccccgcaagacctacgcccctcctgcccgggcctccaccaggccactatggtgcctgagcccacctcagcactgcccagtgacccccggagtcctgctgcctggagtgacccggggctccgtgtgccacctgctgcccgtgcccacctggacaactcttccttggggatgagccagccccggcgcaggacccatgggcgacggtagcacagaccacacacatccgcgcagacaccacaaaaaggcccaaaaaagacccgccacaaaaccgcctgccacacacgaggaccacaccaaagaaaggaaaggaagcagacaaaagacgacaaaggaaagaaaagaaagacaaaaacaagaaccaccaccgaaaccgggcacaagaacacaggacaaaaacacgggaccaacaggagcccgacaaaaaccaagaaagaacggaaacaaccacaagggacagcaaacacccgacacgaagccagcgcaccaaccgacaacgactcacaagaagacgaaccaagcaacacaacgacaggaaccgaacaagaccacaagacaaaccaaaccgaaacaagacaccacaccagacacaaaccaaagcaacacggaaccaggacaaggaaccgggcagagcgacacaaggcgacgagggagacgcagacacgcgggcgcgccacagccggcgacagcgagccgcgagcngagaccagccagagaccaaggacgaggacggacgcagaccggcagagacgagagcacacgagaggaccagcgcagcacgagccacgccgacaggagacgacagaagaccgagaaggagagggaaaaagacgaggcagacgcgaagaccaaggggcgccaccgcaagagaccaggcggagct

SEQ ID NO: 144696 - DNA, 229 bp, Homo sapiens
aacttttatctcttgctattcttacgtaccttctgaaattgctgcataggtttgacaccaaagaaaaatggtggaaaaatattcacttttaagggtaagagaatacaaggggggagaaatggttaagaaagcccctaagtaaagcttatctggcttcctaaaacactttggagacaaagaccctgtaaactaataatatgtttacctataatatgtaagagagaaaagg

SEQ ID NO: 144697 - DNA, 114 bp, Homo sapiens
aaatgcattttaaaggggccagaaagagatttaaaacaataagtaaataagttgcattttgattacatccccaaagtcctgctctttcagtttccctttgagcagttaactact

SEQ ID NO: 144698 - DNA, 198 bp, Homo sapiens
ggctctgtcgcccaggctggagtacagtggtacaatctccactcgctgcagcttcaatttcctgagctcaggcagtccacccaactcagcgtcccgagtagctgggactaaaggtgtgcaccaccacacccggctattttttttttttttggtttttttttccctttggttgggtgggtggggttttgtggtttggtc

SEQ ID NO: 144699 - DNA, 357 bp, Homo sapiens
tagagtgcttaggagcctggtgacctgctgctgtgacttcctctccagagctggagctccaggggctgaggttccccttccctgggcagccccttcctcctaatccggctttccctgtgaggaagagcctcctggccttaagccacatccttagcagcttctgccgtggcccttcctccagccggggaccctggcagaatgcatgggcaggaggaggtgccttggccccaggacagccaggtgggcagtgaatggacgaaatcagtctgtgcaggagggaaacactaacactaaccctaaccctaaccctaaccctaacacattctcaaaacatttgattctaacttaaaacacaca

SEQ ID NO: 144700 - DNA, 352 bp, Homo sapiens
tgttcagaaagggttatcatgttcccagcagtcctcagcactgatttaccctgggccatactagggatcaactgttaacacccttaaatcattcttcgtcctgctgtttctcggccgaaccacgtccatgctgcagagagtaaagcgcctccaaagaatccccatcctacttgatcttccctgataaactcatgacaagccaccaccccatgaagaggccctctctcaccagtgccagccttcaatacactcactgcaaacaccatcccacgaggaggccctctctcaccagtgccagctttcaatacattcattgcaaccaccaccccatgaggaggtcctctctcaccag

SEQ ID NO: 144701 - DNA, 156 bp, Homo sapiens
tctcaaacctagtgtggtcaaaagtgagctaattaaaaaaaaaaaagtgagctaattattttctccaaaatctgattctctgtcagcttattctaatttagtatctaagaccaccttctctgctgggtgtggcagcttgctcctgtaattccagca

SEQ ID NO: 144702 - DNA, 292 bp, Homo sapiens
ccaccaggcccctcttccaacacttggggattacaatttgacatgagatttggtcatgattcaaattatatcagcattgtttgacagttttgttgttgtgaaacatcatagagtatacttacacaaacctagatggtatggcctactacacctactacagtgtgcctttacagtgtaaatggtttttttactacatttacagtgtaaatggttttttaaaatactacacctgtatagagcagctccattataatcttcttatgtgcagcccattgttgaccacaatgcctgt

SEQ ID NO: 144703 - DNA, 164 bp, Homo sapiens
tgctgggattacaggcatgagccactgcgcccagctgtagctttttatctgtgaaatgaaacatttccgttagcttctgggaaatagagaaactcagattcagcaggagccttaaaagcctaagctttcacattagtggatcatagttcacgtgttccttagtt

SEQ ID NO: 144704 - DNA, 285 bp, Homo sapiens
atgggagatggcaataggaattgaggggtgtcaacaaaattttgggagatgaaaatcagctggctgagtggtaaacgacttagcagcttagagaaagctgaatctaatcctgcagtagaagaagccaaaaatcaagcaagatgattcaagctaaacaacgctgtgaagacttaggaaccagaggcacctctgaatgccagggtagatgggagtgcaaaaaggaaaactggctgcaatcctgtataattaagaatcggaccagataccctccctcagacaagaaga

SEQ ID NO: 144705 - DNA, 697 bp, Homo sapiens
actggatatgagtcaccaatcatgttgttatccattatttggtgctgtagcattgaccgaacacgtttatatttttgtgtcatcaggaagggggagagtgttggtatcagaattatttaggtgtggtaacagtaatctgggtaattatttctaacttaatcacgagttctttctcttttcatatccctacttactgtgtgtatgattgggggtggggtgaaggtggggaaggtctggtgtaaggatctgaggatagatagaaattattgagccaggacaataatttagagagcataccctaggtagtttaggttaccactccttgttcagatattactgggatatgaatgttagtgatttatcttctattgttcttaaaattttttcctcatcttaaaatttaaaggactggaacttctccagagtttgaagtctagttcagtatgccgcatttactcagctcttacctttctaaactcttacattaatgtcatctcaagtactgattgctcatggtagccgacagttatggatcacttcagtgccaaactcttggattgttgatgaaaacccacacggcactttttacaagggaagaaactgatccttacagggattttaaggacttaccctagatcacttaaatccctatggtactctgaaagttttctcctatcatactcatcttaagacttaa

SEQ ID NO: 144706 - DNA, 242 bp, Homo sapiens
cccgggactcatttcagactttgacttctcagggagcatcctcggagcccccagccaattaatgcctccttctgtactactgctaccagccattgaacagctacactgttccagacattacctcttgttttattctcatggcaacccacataccaaagcctgtgtggccttcacagttggtgtggaaggtggccccacactcagaggctcaccttctctgagcttaaggtctgagctacact

SEQ ID NO: 144707 - DNA, 275 bp, Homo sapiens
atgtaacctaattccagatgattaaaagattcagctgggcatggtgcctcattcctgtaatcccagcactttgggaggctgaagtgggtggattgcttgaacccaggagtttgagactagcctgggcaacatggcaaaacctcatctctattaaaaatacaaaaaaattagccaggtatggtggtgcacacctgtagtcccagctacttgagatattgaggcaagaagatgtcttgagcaggggagtgagcatggcaccactgcactccagcctg

SEQ ID NO: 144708 - DNA, 342 bp, Homo sapiens
cctcagattttcgtctcttattattagacacgcgtcaaagtaactggaagaacagcaatgcttcaaggagaaaagcataggcgggtttcaaattatgaacgggaagtacatctgaaagcatatgccaagtagaaacaaatttcttcccttccttacccttcagatatatatgtcataagctttacaattccatgtcttttcttatagtttcatttttgataccattctttagaactctgctctagaagcatctgttccaaaacagataaatgctgagctttacaccgaatttcagaatttgtagctgaaatttacaaggtatattcttggttactttatttt

SEQ ID NO: 144709 - DNA, 439 bp, Homo sapiens
ggcctggcagcctgctccgggttggggggcgggggggcaggatgcgcggcgtcttttatgctctgagatcctttgttttctttctgctacactttcgaaatccatccagcagagcctgcctctggtgccactgagaccctcacctgccaggcaacctaagccagggtagggaactgcctccttcccactgccagcatcctttgcttggtccagcctcctggtcacagcatgttccagggcccagccatgaccccttacccaggtgctcgcttctcaaggccaaatccctgctctgccctcgctctggattctgacctcgactgcattctcagaaatgcccagcttgcatctcttggaaacttctttctcattaagtaaaacatttccattgtgaaaaaatcagaaaacaggtaagaaaaaaagcttataacccccaaac

SEQ ID NO: 144710 - DNA, 236 bp, Homo sapiens
tagatatgaatgtgtaggctccatgaggaccacaccaggcaggatacaaaaacactggagtgtatcaggagaagtgatttgccctcctcctacctgccaaaggtggtgatttagaagtgatttaggagtaagactggggagacttcttgaagacatcttgggatattagagtcattctattcacaccctcgctccttgagaaaggggatcatttgccatggtccctcatagagagg

SEQ ID NO: 144711 - DNA, 139 bp, Homo sapiens
tgctgggattgcaggcatgagccaccgcgcctggccatcgaatgtatttctaacctgtgattcctgccaaaagctgtaagttcaaggagggcacctctcagggactgtgacccctctggctgcttctgacaggttggac

SEQ ID NO: 144712 - DNA, 183 bp, Homo sapiens
ttgcatattagaaaaaaagcactctttcactcttttcctcattctcaacacaattctgtgctgttatagaacgttattttcaatgttaaactatttctgtcatcccagtagcatattctatgtatagtgagcatgggatagttttgggggcagccattttgactgaattttattactctgtgt

SEQ ID NO: 144713 - DNA, 444 bp, Homo sapiens
gctctcgtaggtcaccattataactccacagttaatgcagcaactgcccagctgagtcttcccatcatcggacgtccccaatccattccagccatggtgagctttcaataatgcaaatcaagtcttcaaggtcattcctgtgtagaaagcccattgccttcttcatatacttacggctttcaagttccttcatatctagtctctgttcccctttctagcctacctcccagtactctcactccaatatagctcatgtcaaacagatactacttttggtttcctgaaatgcctttccttgacagtgaaccttgcttctgcctgaaacactctctctttccctatttctatcaagctccctgattttcaaggttcatttcgggcagcatgccctctaggaagcatttcttggcagcctgatcctctgcccagcctctcatctgattt

SEQ ID NO: 144714 - DNA, 760 bp, Homo sapiens
gtcaaaagttgatattttttgaagtgaagcagttatatcttctttctctacctatagtacctaactcaacttttatgtaagaatctttttactttcatttaaacctttagttcattgctatctagtgtttagaaacattattagcagcaggatgcaaattaggaatttttttttttagagtactccaggttttcatctgagtgaaatttaattaattgccagtaatagcttatctaactgtattttgtttggtctctgattgctttagcagtaaacattttccttatgcaccatctgagtgtttgagacaaggtacacttacgatgtttactgagttgaacccagaaggaattagaagcaatgaattatttgtaaacactttttccttttctttttttttcatgctccctttctccctccttccttctttccttctttcttccttccttcctcttctctcaccttatctccttcccttcctcctcttttctcttcttccttcctttcaatgaaagaatactcattggccaggtgcggtggctcatgcctataatcccagcactttgtgaggccgaggcttgcggatcacctgaggtcaggagttcgagaccaacctgaccaatatggtgaaaccccgtttctactaataatatgcacctgtaatcccagctgctcaggaggctgagataggagaattgcttgaacccgggaggcagaggttgcagtgagccaagatcttgccgttgcaccccagcctggg

SEQ ID NO: 144715 - DNA, 305 bp, Homo sapiens
ggggaaagtctgtgaagtgactgtgaattagagagtaaagaccataactcttatgtgaatacaatggaatttcttggcaagtcaccaaaggttagggtttggctatgtgggagttttctttatgaaaatctggcctagatgtagagatgatatgaccaagcaaggaagtgtagcaagaaaagccaaagaagcaacattcaaaacctaactgcagtaaggaatcaggaaggaccagagaaggttatgacgaagaacattctgagagtggaacagacagccagtgcagagaggagacagccaggagc

SEQ ID NO: 144716 - DNA, 239 bp, Homo sapiens
gcacatccccagccaaggccggtgaatgaaggtgtcatggtctgtgagaggttcagccatagcacctggtgctagagtaactcaacatccatatgcaagtgcagggcaaaattgtgaactaaaatggcctaaatttagcaaatgttttaaaaattggaaaatatctttatagacactcatttataatggaggtctgagttggtgttttggactgaatttgtgttcctcactgattcatg

SEQ ID NO: 144717 - DNA, 145 bp, Homo sapiens
tccacgcccaggcagtctgttagagggccagcactcctgagccactcaacgatgacagaaggaggacggtgcaggaagaggggcatacggcacagcatacctgctccactttattgctccacatcttaacaggcgttgccttccc

SEQ ID NO: 144718 - DNA, 386 bp, Homo sapiens
gaacatagaacaaagagaatgataaaataacaggaggctttccatgactgaatctttaatatcagaagaacatgcaagaagcattttaggtttaaaaccagtgactttttatgctcatctaaagtcacagggaaggaatagaagttgtatatatgttggctctgatattatctgtcttccttcataagactgtgtgaaggatcctatgctcgcttttgttcatctcgttctttgcacagggtctggcatattctcaatagaagtttattaaacaagtgaatgaatgtatatatgaattaatatccatcttaaatttaatggccttatattgacttgtgaaattttatgttgtagctttacttttttttaactacgggaaaaattag

SEQ ID NO: 144719 - DNA, 383 bp, Homo sapiens
tcaagtaacatgttagatcattcagtcaggatgatttagagaaatagattagaactccttttatccagtctaatataattcattgtaaaagtacagttggtcctctgcatctgtgggttccatattcatggattcagccaaccttggatcaaaaatatttgttaaaaaggccaggcacagtgacccacctctgcctcccaaagtgctgggattacaggcatgagccactgcgcccggcccatatgacctgtttttcttttatagatgggggagaaatatgggaagtgacttggtgtcagtcatctgtgttggttaaatcaagaatataatccgtgttttgcttctgaatagctctttataacagtgattggttactttgggag

SEQ ID NO: 144720 - DNA, 305 bp, Homo sapiens
acgtttctctgcaaaaacgcaagagattattctcaagatgttctggcttggaacaagccgttcccagctatctaggaggctgaggtgggatcgccccagtactggaggtcaaggctgcagtcagccatgatcatgccattacactccagcctgggtgacagagtgagaccctgtctcaaaaaacctcaacaaaacaaacaaacaataaattggtgcacaagatgaaaatattttttctctgtacaaaagagccactgtattaaaacttgaaatataagttgcctctgatgacacgtggtgtataa

SEQ ID NO: 144721 - DNA, 203 bp, Homo sapiens
agtagtacccagctttgcagttaattactatctagctggcctttttttaaacccttgtatacacttgtaaagaagaactatttcctgaacctggtacagcactttactaatgataaaactttactcctgaattacattaactcaattgctaagctgttacccctcttaatcaggtagtagtttggtagtctcacagtgaaatg

SEQ ID NO: 144722 - DNA, 399 bp, Homo sapiens
aaatagctttccccgcatcatctgggttgtgactgttgccagacacgagacagtcaatatcattacggtcgatgacatgacctggattagaactggaggtcaactgagacaaccgtatctaagagctagtttttttaaaacaaaaaagataattagacaaggactgtggttttatagataggctagttggaggattactggatagaatgaggagttaacatttgtatacagttttatttagcaaaaatattggattacatatttatttgttctgtcctttcaggacttctggttgatcttgccttttttcccagtattttacacttataaggactctggtttggaagtcttaaactaccaaggtagtatatctaggtaatgattatcaaatcataccta

SEQ ID NO: 144723 - DNA, 478 bp, Homo sapiens
ctcgaactccgaaatccgggcatgggatctcgctctgttgcccaggatggtcttgaactcctgagctcaagcgatcctcctgcttcggcctcccaaagtgctgggattacaggtgtgagccactgcgcacagccaattagacattcttatccccattgaacagataagaaaactgaggccatctcaagctggccctaatctagcacactggcctcctctcccctctcccaccgtgcagcaccccctgtggacaccacctctgtgtcccctgccttgctcagtgttttctccacttggaatgtcactccactgccgaggctgtgttactttgcagagagccaccctccctctctcttcagtggctgccctgccctgggttcccccagcaggcagtaagctttaggggcacggggccccactggattcctccgtggacacttcccagtgtcagagcacatggggtgaattgtgaccaaac

SEQ ID NO: 144724 - DNA, 247 bp, Homo sapiens
cttgtggtattgcttggtgaatcttctcctggtagttagggttgcttgggatagttcttaggatgttgtagaaatctagatgtcccagtgaaaatgaagagagtagctagtgaaagacgtagaagtaaaatggttaggatttgatggctggatttcaggggatagtagagaggcaggaagagaggagggtctgtggtctgagttacttggggcaatggcgataccattacctgaggcggggagtcag

SEQ ID NO: 144725 - DNA, 470 bp, Homo sapiens
cctaacactcaggagtcaccgctttccttagtaaaaaaaagtcaagaatacactagggtttatgtaaaacaagaaatctccagtccaaaatcagtgaaataagaatacagcatcaaattatattattgaagttgaagaacagtgcacagggagaaaacaaagtgataacttaattcaatgctatagaaaagtgatttgtgagtcactttaacatttcagatttgtttaaaccataaaagtgataaattagccaaagagctaacaattgatattatcttaagttcacataaattttgatttaactgaagcaaatgaaatcaatgtagttactcccttccgattgcttcatctttgtacagtttataaagctaagaataagtagctctaatgaacagttttttttttaagcttttttgttgaggtttctctaatatgtgtcttttagtaatctcttcatttttttcctccca

SEQ ID NO: 144726 - DNA, 442 bp, Homo sapiens
gtcgacggaccctcttccctgaacactcgggtaaatgggaggtaattttttgtattttagtagagatggggtttcaccatgttggccaggctggtcttgaactcctgacctcaagtaatccgcctgcctcggcctcccaaagtgctgggattacaggtgtgagccaccgcacccggccctgacaggttgttttgagaacaaactatgagagttgaagtgtgttggattgattggtgtggcattttgtagatgagggaaaggagaacttggtcttccattttcttggtgagtgagaccatgggatgtccaggcagctgtggggaagtggaagggtagggcggggtgttgctggctgggaacagcacctaatgaggcatgcttaggaagttctcaaggccaagaccaaagccacttagacaggtgtgcatggcagctttggagg

SEQ ID NO: 144727 - DNA, 382 bp, Homo sapiens
gtaaactgggaagtgctcctcacctcacactctccctaaatctaaattggtatattataaagtatcctcagtctgtttttcttgtttaagtaccgaggcatcttcccccgctttcaaatacaattttaggtgaactcttaaattgatgaagggtcggggggccagacctctggctgcccagctttcaccttgtccctcaggcatcatcttccctctgtttgtatacatatcttaaactcttagaggagttcagcctgaaaacaactggttctactggtgtactggaaattctggtggtcactgctagaattcttgcctgaaatctgaatacggaaagtatcaggataagcagcaacacagtagcagttttccagttgtgggc

SEQ ID NO: 144728 - DNA, 489 bp, Homo sapiens
ttttcaccattccattccccctcacccttcaaagtgtctgcgtgccaaacttctcctggttgtgtgacaagaacctggtttttttctacaacatcaccaattatgaaatgattttaaaacttttataagcatacagaactttgtcacacaaaaccagttgactacaaaagctgcgaaccagatcttgaacaaacacatcagaatgctagagtccagtttaactcacctctattattagcaaatttgggaaatttggagaaaagtgaatcagaaaaaagaaaagggcttattcggaaatgatacattgtgtctcacaagaacatttaagtacctggaattaaaacatcccctaaattaacaatatacactgttgaaagttagcaggttcaactttgagataccgaggctgtcaatcacttgaggtcaggagttcgagaccagcctggtcaacatggtgaaacccccgtctccactaaaaatacaaaaatt

SEQ ID NO: 144729 - DNA, 210 bp, Homo sapiens
aaagttgcttaactctgtaaatatattcaaaactattgaattgtacacattaaatgtgttaactttatggcatataaaatatatctccataaagctgtttttaaaaagttagcgtgtgtaacagtcacaggggagggtggggagacgccttttaaaagtgcagattcggccaggcacggtggctcacacctgtaatcccagcactctggg

SEQ ID NO: 144730 - DNA, 365 bp, Homo sapiens
aaagtgttttgcagctatgcagaggactttttttttttaaaaaaacaaatcagagatttcacataaaaccccattattttgggcttttcttaaacaagggagcaactgtatatcctggaacacagcccccatcttaggcatggtcacctccttcccttcctttactggatttatcttcatgtagactgctgtggccatacaataaattggactaatattgaacccagccaagaaaataatattaattgcccatatttttacctgcccataacacttaccattaccgtaagtatatttctgatgactctcagttatctacttgatacatgtatatctaaatccaagatcattcctataaatgtgta

SEQ ID NO: 144731 - DNA, 395 bp, Homo sapiens
ccgtcagatctcatgacatgtattaactatcacaagaacagcatgggaaagacctgcccccatgattcagttacctcctgcaacatgggaattcaagatgagatttgggtgaggacacagccaaaccatatcaaattctaaaatgcatatgaaagtataaaaaaaccaaatagccaaagtaatcatgagcaaaaggaaaaaaactggaggtatcacaccacctgatatcaaactatactacaaagctatagtaattaaaacagcatggtactggcataaaaatagacacattgaccaatgaaatagaatagagttcataaatgaatccatgcatgtatatacctaatgctagatgacgagttagtgggtgcagcgcaccagcatggtgcatgtat

SEQ ID NO: 144732 - DNA, 212 bp, Homo sapiens
cctgccctcaccacgacataaacacaatctcttgttctgctgaagagagggatggaatagagagctgaagatgagcaaaaggagggaggagtcaggaaaaggcagctcctatatgttgaatttatttttcattagtactgagtatttaaagaagagggcacccaggctggagccctgggaagtcccatatgtggtggtctggtggagtgggt

SEQ ID NO: 144733 - DNA, 435 bp, Homo sapiens
aaagaaaaaaaaccttgggaaaaaactttaaaaaaaaaagaccaatagagtacacaagtttttagtttttccgaatcaccatgttaactttctttatcggcttacatacttggttattgagggcaccaaagcttttactttgggattaatttggtttttaatcctatgcaacagtataaaatagttatttatgatttataatcagtgcatacttagaagatgcttagagtggaaactgcttggtagatacttttaatcaagctttagtgaactgttttccctgcaaagcaggcaacactttatgtgtaaaacctttattgcaactattatatctgcacagtcacaaagtacctcatgttgtatgattccatttatataaaatatccagaataggcaagtctatagacacaaaaagtagattagtcatgcggaagg

SEQ ID NO: 144734 - DNA, 439 bp, Homo sapiens
catcctacatttcatctcccaaagctggcttcatcagtgatctgtgaagtgtgatgcagaaccattgaggcatggaaaacaaatggggacctttgatcaacatggggattaggggaacaacaattattaaaaaaatatcaggacttaacatatctgtattttattatctcacattgtaaaatttcctattccttgtatatgtttaataatgtttgtattagtggaattgagcatttaaatgatcattaaataaaagtcctatacagctgcatgctcagaaagattttcctaacagggctatgttatcaagaaagtttggaggcactggacctgctttctggtcactttttctgcatcttttcttgggcagtcttttgatccattctccagtttagtcaagtgatcgtttagtaattcacatctctcttccttctacctc

SEQ ID NO: 144735 - DNA, 194 bp, Homo sapiens
caatgcacagcctcattcctccactgaaactgctcggtccaaggtcatcaacaaggtcctatttgtcaagtcctgtgccctttccccagcctccgtgcctttgcatcattagatatggttgacctttccctagaaattcgcccccacacccatggaatcctgagacactccatgctcctgtagccccgcgcctt

SEQ ID NO: 144736 - DNA, 279 bp, Homo sapiens
cctttctatagtttaaaatatttgaggcacgttagggaaggtctcatcttgtttttcagaaagcaaaactgtttttattcattattcctataacatttggtgaatatgtatcactacacacctcagaatggctaaattccaaaatataacaccaaatgcttccaaagatgcaaacaaaggaacattcatttctgtggtaattcaaatggcagaggttgcagtgagccgagattgcgccactgcactccagcctgggtaacagagcaagacgctgtctca

SEQ ID NO: 144737 - DNA, 168 bp, Homo sapiens
gtcagatctggctcaatgagaatggggacgacatatgcaaaattaaaaaggggggactaccaggtgtaccttcacatggcatcagtgtaaacattctaacagaaccgaccaccaattaaccaatcaccaaccaacacattccatgcagacagcaagtgcttaatttaa

SEQ ID NO: 144738 - DNA, 313 bp, Homo sapiens
tgatctcagaggctcttccacaatactatggaaggacaatactatctttgtaggttaagaataaagaagcaaaagacagggtatcttcatggctccaatgaaatggcctctctagacagtatgaaccatttataactcaggctttagaagggattgtgaaattctgatctgcttgcaagaaagctcttggtggacactgacatgaagcaatccctacatttccctcttagaaaaaggtggcactaaattgtcaggcctctccatttagaataaaatagtacaacttttacatgtcttggtctaaggtccaaga

SEQ ID NO: 144739 - DNA, 633 bp, Homo sapiens
aggctcagtttctgagcaaagacaggcgatgtgatcagtcctgtgccttaggcaggtggtgataaaaggacactttagaagggtcagaaatgggagagctggaagccaataccatggcaatcatttgtgcaagagatgatgaagacctgtgtagatggaagggaaggaagggacagctgggagctgaccaggatgagccaataattagatgcagaagtgaaggagtcagaatgacattggaacagggtgggtaggaggagggaggggaccatcactaagacagagaacacagaaagggatctgattttgcgtggaaatctgcgttgtgttttggacatgctgatttgggagatacttgaggtggtgatgcctcctgggagctggaaatataaggctggtgcttaggagagaaggcagcatgagacgtgttgacccgggcatcatctacagagaaacagcctgaagcccttgcctggtgggagtttataaaagacttacgggataactgacagctatcagggggagagaaaatggtgattaattaggctgagacacagaatcttatcattggcaaggcttttggacatgaggtggcttaaatattagagatatttaataaatgtttgtcaaatc

SEQ ID NO: 144740 - DNA, 346 bp, Homo sapiens
ttagtgactgtgaagatgtgaaaggtgacggagaggaatgttataaagagggtttcaagcctgggacagaagttctccaaactgttgtttcctgcctctgtccttcctgcattcctaccctcctaactcaacaggtgagtaggtgagcgtctctgtccacgactcctttcagttgctactctcagccaagtctggcctgcagctcccctcaaacatcctcctgccctagaatgttctcagcgattccctcctgtttttactttctgttaagtgtgtatttccaatttagtattgtgatttcctcctttttccctttcccttttttcctttttcttccactcccaac

SEQ ID NO: 144741 - DNA, 229 bp, Homo sapiens
tgtagagacagggtttcactaacagttactctttataactacttgttaagttaacctacaaataaaaaatggcatgaagcttttactgttggggggaagttttcagatgttactacaacattaagcccaataccttgggagagaaaccaacataaattgcacacagatcttatttgcaaagtgcatatggtctagaggcgataggatatgcaaaataaccataatgtag

SEQ ID NO: 144742 - DNA, 113 bp, Homo sapiens
tgctgggattacaggcgtgagccaccgcacccggcatgttactatctgatttgtgtattttatttttttaaaaactgccaactgctttgtggagaagttactggaaagggtca

SEQ ID NO: 144743 - DNA, 130 bp, Homo sapiens
agttctctgtgcttggaaaacccttgcggataaacaggaaatacacagaagtgacaaaaattcaaatgatgacctgcagtatctccactgggaaacactagctcaatgattaagaactcaggctggctag

SEQ ID NO: 144744 - DNA, 344 bp, Homo sapiens
caagtagtatatcactatactttcagttaaaacaaatgtaaaaattttggaaaaagcagtgcactgcaagaaccaacgggatggttcagtaagggagcttatttctaggtggcatctccttttgctgttacaaatgggctcttgtccctccatctcccctggcatcctatctgttctaactgatttatgctggagcacaggctgattttggtacatttaatttaaaggcagtcacctaagaggcaagcaggcagtgcgtgaagacagctgcagagctccaggctgagtggcggaagcaaatcagtcagaattctcagaaacagactcagtaatggaagaactta

SEQ ID NO: 144745 - DNA, 183 bp, Homo sapiens
gatggatttgctggtgcagtacaactaggcttaatagggacatgactacgtatgttaggactgagaaaagaacaggctaaaatggtgccaacttgagtcattattatccagctttaattggtacccaacttgagactttccagatagaagatcactgagtgtttccaggtggggaggaaaaaa

SEQ ID NO: 144746 - DNA, 545 bp, Homo sapiens
ggtggcgtgcacgtgcagtcccagctactcgggaggctgaggcaggggaattgcttgaacctgagaggcagaggttgcagtgagccaagattacgccactgcactccatcctgggcaacagagcgagactccgtctcaaaaaaaaaattagcctggtgtcatggcatgtgcatatggtcacagctacttgggaggctgaggctggaggatcacttgagcctgggaagtcgaggctacagtcagctatgagctatgatggcactactgcactccagtctgggctacagagtgaaactttgtctctaaagtgtgtgtgtgtgtgtgtgtgtgtgtgtgtgtgtgtgtgtgtcacatactttttcataaattcagtattgagtactatgtgtatggtgctgtaccaggccaaaagacataggtcctgttattaaggtatgtatgatgtaaagagtgaaatgaacagaggcaagcataaagtgctaggtgagcacagaagagaagtacaaaccagggaggggcaaaggaagggacaaagaaggactaga

SEQ ID NO: 144747 - DNA, 329 bp, Homo sapiens
agtttattccagtctctctctgctcatctccagaactgccctcacacagatgtttgtatgggtgtttttatttgacttcaaagataaagaaagaaacagcaagcaataatacccaggctgacgtgaaaaaactcctccacgccaagaagcccttaatgtgctcaattaggccctcgggcacctccacttgccaccttcaagagctcctccagttgtgctgcaaataatatatttgatcatggactagaaacaggaagtgctcatacacaaagacactacttgctcataccagtttctggctgaaggtcttcttatttgaaaacataggg

SEQ ID NO: 144748 - DNA, 327 bp, Homo sapiens
aagaggcccagctcatccagaagctggcctgagaggacaggggcttgggggagaggggttagtcagaatgtgtgatgattatggccaggtgcggtgactcactcctgtaattccagcactttgagaggctgaggtaggcagatacccgaggtcaggagtttgagaccagcctggccaacatagcaaaactctgtctctactaaaaatacaaaaaattagccgggcttggtggctcatgcctgtagtcccagctactcaggagggtgatgcaggagagtcacttgcacccggaaggtggaggttgcagtgaggcgagatcatgccact

SEQ ID NO: 144749 - DNA, 769 bp, Homo sapiens
aaattatgtttattattttcctgaaagtctgttagaagctaagtaagaattttacttcagaatcttgcaatgtcttgtatcagtatagcccaacctgttatatttttttgttcacctggtaacttccaggactctgatagctttccccaatgcctttatacctagttgattattcttgtacttgatttttgtagaacttgtttttcttctttgtagtctattgatctccatgttgtatgcttttttctgttaccatttcacttaaaatttgttgaggttgttttgaattctgatcttatcatccaagacaatagccttctcagccagtttggtaatggtctgtttagtcacccagatgaaatccctgaatctcacacacagacttgcagagttcatcagtttttgaacacctgtcaaggtgctcaacatcttgcagggtactctgcaataagaaaatgtgcctatcctcaaagaacttaaaaacatgattgagaacactatagctaactcttaagtatgtgccgaactgaactgaactgaaacagtgccagacaatgacttgcccaattgtgtgagtaccgtatgggtttgtcagagtgggagatgagggagggctgacggtaaggcttcttgagggcactggcaaatacagcctcttgaaggatgggctaaaattggataggagggaattaaaagtaaaggcacagagtggtgaacaacagtgtgctgtgttctgaagggaagagtctgacaggaatgggtatggtag

SEQ ID NO: 144750 - DNA, 289 bp, Homo sapiens
ggactaatggcagccaatcttgatataaagggaaacagtttcattaaaagctttagtactaaacctgaagaggggtataagtactaaacctgaagaggtatactagattgaacaacttagttttgaaataagccaaactaagatatgtgaaaggggaaaaaataatccttttggacgtaaaggatgaagtgatagtttacatatctgcagtctggagttgtggttctgatcacaggcactgtctctaaaatacttgcttatgacttctcagtcctgaatttctaaaagc

SEQ ID NO: 144751 - DNA, 325 bp, Homo sapiens
tggtattttagtttatccattcacatgggttgttgttttaatttccttcatctgattttgacatgattctgagaaagatctataaagtaaccagcaccatagaatcatggtatgaaaactaatgagaagaatattatgttaattatgttctcttagtctctactccacagaaaggttttaacaatgaaaaggaattgctaaactataagtgacattttaatttaaaaaaatgaaaatgtgtagttagaatctttcagtgcttctcttattttcttctgtgtgctagatacttttggctgtggtgggggtatcatttcttttgaaa

SEQ ID NO: 144752 - DNA, 501 bp, Homo sapiens
gactaatgatgttgagaatttttccatgaccatttgatatacaaatggtcaatatatacaatatatgtgatataaaaatggtcatgatgatgaccatttttatatcgtattcaaattctttttaaattgggcaatttgttttttaattgttgacttgtaagagttcttcagatagtctggattttagatccttatcagatatatgatttgcaaatattttaacctattctatgggtcttttcactttttgacagtatccttgatgcaaaaggttttaaattttgatgaggtccaaatttatccatttttttcttgttgttgcttgtgcttttggtataatatctaagaatctaagaaagaactgcttaatccaaagtcaagaagatttatgcctttgtttccttctaagagttttatggttttagctcttacagttaggtctttgatccactttgaactgatttttgtatatgaacaattcaaattatattagttttccaa

SEQ ID NO: 144753 - DNA, 324 bp, Homo sapiens
aatatattttttatagagatgggggtctcaccatattgcccaggctggtcttgaactcctgggttcaagtgattctcctgcctcagcctccgagtagctgggattacaggcgcacgccaccacgccagctagtttttgtatttttagtagacatggggttttaccatgttggtcaggctggtctcgaactcctgacctcaggtcatctgcccacctcggcctcccaaagtgctgggattagaggcatgagccactgtgcctggcctatattttatttttcatagtgtccccagccaaggcagaaaactagccaaaaaggccact

SEQ ID NO: 144754 - DNA, 621 bp, Homo sapiens
cagagaaaggtatttcaacaacatatgacatgtcaagccaacgtagcccagagtggaactactcacaatgtagattttaaaaaacatggctaaaggaccattcctcaggagaacactcctaatgatggagagcctattcaagcctgttctatcttttcttaactgtcccaagaggcatcatctctggcctgttccttcttagcccatggtcattagggtctctggctaaataagtttggaaaaaacagcatactttatccaattcttagaaatttacaatgcacagggctgtattaatggctctgaaaactcatgcagtaaagaaactgatttatctttaacactctgccaaatttatttgagaatagaacactcctgccccagaacatctagcatttctgatttcacttgaggagagcataccttaggaattttagatccagcttgttgccctctatcctgctaataaggtgccacaaactgtgaataaaccctcttggccttatggtgaactgacctcaacctgtcaatggaggcagcagatacttgggcttcagaaggaatggcactttccgcaccacggagaaaacagaatgcaggacccctttgttcctcttgcct

SEQ ID NO: 144755 - DNA, 163 bp, Homo sapiens
caggagcctgtgcataccagagccagggcactggctttccaagaatgggaactgagcctggagctgctcaggattgaagctctctgtgcagagggcaagtcctcagcaaccttagtgccctggttattatgtccaaaagacaaagaggtcagccagcctgggc

SEQ ID NO: 144756 - DNA, 446 bp, Homo sapiens
gacctaatccccaccatggagttgtcattagttatgtgctgtagaactgtgggcccaagtataggacattctccaaatccgtgggtgccagccactagggaacttaaggtttggttgctgcataagcttggagtgctatatctcctcttgtagcagctctcaagttcagggattgtgtcttgtgaatccccccagtgtatagtaaggtgctgaggttctgcgcactttagaaccctaatttgttggcacatgttgggggatgggtaggagggttaattttgtgagtcgcatggaggtggggtccaggtctgccttcggacatgcaggccacaggcatgcgcttgaaacacaggctgcctgatttcagaatcgagccatgatggggagcactgtggtttgtgaggggggttgatctgaaccggtcactctgtgcctaagcaggtgac

SEQ ID NO: 144757 - DNA, 318 bp, Homo sapiens
gacctaatccccaccatggagttgtcattagttatgtgctgtagaactgtgggcccaagtataggacattctccaaatccgtgggtgccagccactagggaacttaaggtttggttgctgcataagcttggagtgctatatctcctcttgtagcagctctcaagttcagggattgtgtcttgtgaatccccccagtgtatagtaaggcactgtttgtttttatgtggttgatggataaattccatatggggatataagcacctgtatatcacccattttaggccaggcatgtggaagcacagtggggttcaggtctgg

SEQ ID NO: 144758 - DNA, 450 bp, Homo sapiens
tatcttaccttttatattcctatatgacttagtagataggtattttaaaaataacactattagagaaattcgaggggaaaatggagaatttgaagagagaattagaatctgtaaaaagaatcatgaatattttagaactgaaaagtatacttgaaattatttgataggtttaataacgactgcatacagcagaagacaggttagtgaactcagagacaaattagtagatatattgaaactaaagtaccaagagaaaaaattggattgaggtagggaggggccaggacaaagagaggagagtggaacagatatgtgagatagagttcaggctggacacggtggctcacacctgtaatttcagcactttgggaggccaaggcaggaggatcactggagccccagagtttgagaccagcctggacaacatagcaagactgtgtctctattatt

SEQ ID NO: 144759 - DNA, 288 bp, Homo sapiens
taccaatttcagtggagaagcagagtacagaagctgagtggaggagagattaagactaaataagaaaaataacgtttggaagtataactttaggtttatttgatgggaaacagctcaggtttaagaacaaccccatgaagattgtatataatggtctatcttcatcgagcctttccattttttccttctgactttgaatagaaacagacaaagagacaatactcaagcgaagagtcattttccagagaaggatcctagttagcttggatatttgagtacattctttat

SEQ ID NO: 144760 - DNA, 414 bp, Homo sapiens
  misc_feature (19)..(19): n is a, c, g, or t
ccacagaggacagtaccanagtaggagaggagcgagctgggggaaagtggctcccttcaccctttccactctctgcatccgcatcacccatgcggaccgaagggagggcagcctggcctctgagccacccccatctgatcttctccacttccttgacccaaaaaccaaaggcgcccccacataaggaatgtggagggagtcaaggaacatgaacgaagtttcttcctggtcatctcccgggtttgccctgatggtaggaagctaaccagaagggatagctggtattgactggagagtgggcagagggtgcatggattggccatgggctctcacaagcctgggcagccccaagtctcttgctctgagcagatacctaatctgggaggagagaggtgacctactatgggtacagtg

SEQ ID NO: 144761 - DNA, 714 bp, Homo sapiens
gacgggttggggggagagtaaaaggggagaggaaagaaatgtatttttcatcagccagtgtataatttataaacagcattaaacagtttttgttttccttttcctctctcccgtgtacgggcttggacggtagtcaagcctgcattaatttctgctttgggtacagtgtgttcttggaggcgcatctgcaagcgatcataaactctctggaatgctggcagaacatccagacctgccggcaggccagtgacgacaccactctgggaaaaagttcgggaagcaagccaaattcagagtagggagagagagagaaagagaagtgtgttcaagagcgagctgggggaaagtggctcccttcaccctttccactctctgcatccgcatcacccatgcggaccgaagggagggcagcctggcctctgagccacccccatctgatcttctccacttccttgacccaaaaaccaaaggcgcccccacataaggaatgtggagggagtcaaggaacatgaacgaagtttcttcctggtcatctcccgggtttgccctgatggtaggaagctaaccagaagggatagctggtattgactggagagtgggcagagggtgcatggattggccatgggctctcacaagcctgggcagccccaagtctcttgctctgagcagatacctaatctgggaggagagaggtgacctactatgggtacagtg

SEQ ID NO: 144762 - DNA, 350 bp, Homo sapiens
ttgaaacatagagaaaggaagttagccaaatgcagtaagcaacaaccaatcaatttgctgggtaagggagcacttaaaggagatcaatctggtagaattttgcagaggggaatagacagaggctgccgtgctcaacccaactggtgaacgactgcctgcgcaggctgaggtgatgaagggtatgctggcagtgaggatggagaaggaacacacctgagcaaccctgtgcgggggagaaactcagttttgcattggatgtgcaggtgaaagagagaggggtcaaagatgttttctatcttcaaaaggaggaatctagttgaggtagtgatattagaggtaagatttgggag

SEQ ID NO: 144763 - DNA, 432 bp, Homo sapiens
cccatattatttcaaattatttttggaatctttatgctattccttctccaaaaacttacagttttaattactatagcttcatattttaatctgtgaagggttacacagacagtaataaatcattactagtattttccagagttatcctgaacattttcacatgcttttgctccatataaacatcagagtcattttataaaaacaaacaaaaacaaaacaccaccaccagcacctgttgtcattttatgagtgcactgatttagtatattgcagaaactaaaacattcactaaaatctcattcaatttttttttttgagagtggtgatacttgtttttgtggggttttttgagatgggggtctcactctgttgctcaggctggagtgcagctgtgcagtcaccacccactgcagcctcaaacacccaggctta

SEQ ID NO: 144764 - DNA, 120 bp, Homo sapiens
caagactccgtttcaaaaaaaaaaaataaataaagaagaatgtgagggaaactgtttaagaatcagttagatccctggatcctttccttgaatccaccctgctaggcagcagcctttatc

SEQ ID NO: 144765 - DNA, 139 bp, Homo sapiens
tatacaaaaattagctgggtgtggtggctcatgcctgtagtccccagctactctggaggttgaggtgggagcatcgcgtgaacctgggaggtggaggctgcaggtagcccagattgcaccactgcacattccagcctgg

SEQ ID NO: 144766 - DNA, 241 bp, Homo sapiens
aaggtttccttacagtttagtagcagcattgtttaatgcagggattttcaacattctattgccaaaaattccattaaatcatgtttttgaagctcttgcatacaaaataggtgatatttattcaacaaattattgtttcacttcttattaatctaaggtataaaaaattttcccatagaggttttgaatgaacaccattcattcatcagtaaatgtctatgcagtactactgaggtgtaag

SEQ ID NO: 144767 - DNA, 671 bp, Homo sapiens
tgtctcagcctcctgagtatctggaattacaggcatgcaccaccacacctggctgatttttgtatttttagtaaagacggggtttcaccatgttgggcaggctggtctcaaacttctgacctcagatgatccacccacctcagcctcccaaaatgctaggattacaggcatgagccaccatgcctggctgtgaggaagtattgttgatggtggttctcttgactttgaagaggttgaacagtggagagttcatcctgtcggtgaaaggcctctgcctgtgttttgtgcgcgtctgagctctgcaagaggaacgtcctgttcagacgtgtcgggggcaggaaacttcagtcaaggctcagatttcttctaactagggcagtggttcccaaaccttgctgcataatagaattaacctgggagcccaggatgtaccccatactgctgacagcagtgtctgtgtgggagctgggcgacaggatattttcaagttttacaggtgattccagagtgtaatggagaaccccttctctttatggacttttcttgtgtccacaaaaaaactagagcatttggcatggatccctggttggagatgcagtgtctgataaggcacctaattcacccccaaagcaagcttgaagccctggcctgcccactgggggatatttcag

SEQ ID NO: 144768 - DNA, 208 bp, Homo sapiens
tagaaggaagattatatacttcatccaagaactcttccatctcacagattagtgacatcaggccaattgcaattaagtgatccttttagttttggtcagctccatttcccatttttatctattattctcaaacacactacttgtccccaccctccatcagcctaccaatgacttcacctttatcaagcatgcatcctctcttgacacc

SEQ ID NO: 144769 - DNA, 410 bp, Homo sapiens
tcctgtagtagccactcccttcaggaatttgctcctctacataacaatgggcagctggtacccagagcacctgccgcatggcctggcctgccagatgcagataaggagagatgatgactccttgtcttgagtcaccttctgtgaagagaaagcatgagaggaaaagattgataagatctcatccaggatcagctagggtccgaaaggaagccagcctgggagaccgaggggagcggatccatagtccatctccacccactgccatgcagcaggggctgaggaccctgctcatgcagagatgcagtagatctgcagacagctgctgtgagcaaaggtagctggaagtccaggtgccccatttgttcttttcaaatgtggtacgcagctgagaaggggaaagaaggaataat

SEQ ID NO: 144770 - DNA, 316 bp, Homo sapiens
gcctcagcaaaaagcttggctggattgtatttgtgccctagagatctatggaagtttgaacttcagagtgatgatttagggtacctggcagaagaaatttctaagtagcaaagcattcaagacatggaccagctgcttctaacaacctatgcccagatgtggaagcaagaaaatgactgaaaatttgaatttatatttaaacaggaagcagagcataaaagtttgaaaaatgtgcagcctggccaggtgagagagaaagaaaaagcttcttcagaagaggactttaagcaggctgtacagcaaccacttgctaaag

SEQ ID NO: 144771 - DNA, 319 bp, Homo sapiens
ctgggtgtggtcggctgggtgatgtggctcaggggccctcatgagggcacaagtcaagatgtctgctggggctgcagtcatctgaaggtacagctagggctggggacccactttctagctcactcatgtggctgttagaagaagccttccattcctcatcacgtgggcttctggctttccccagagtgaataacaggagagactatgagagcgagagcgagagagagccaggagagacctcggtgtcttttatagttgctgagggttgaatgtgtcccccagagctcaggtgttgaaaacatgatccccaaggtggccg

SEQ ID NO: 144772 - DNA, 180 bp, Homo sapiens
atttaatcctcaggaaaacctgcgcaatggttctgtgctatcacccccgtgtcacagatggggaaactgaggctcagaggctttgtaactgccctgcccgtctcctgccttatctgcttccacccccggccccctccttccggccaggctgtgtcctgtccccgctggtccctccagcct

SEQ ID NO: 144773 - DNA, 378 bp, Homo sapiens
ctccagactatgtgcagcagtgagatgtattattattacaggaaaagtgtgggcacaggaaattttatcaaacgtggcatagtgcacattttactaaagcaagaaaagatatgaattttttaaatatttcctttttgcaggctgtgtttgtatttgatttgattctcaagattttccaagagcttggcatgttgatggacttgtctaccaagaatacattttataaaactctaaagtatttttccggaacttcatcagaaacggaggttaaactactcacttttgttttactgtttatgcacccattaggcagcaagtacacacttgaggctcctcgctagcagtattgcttactactgagaatctgcatgttcagct

SEQ ID NO: 144774 - DNA, 393 bp, Homo sapiens
gctcaaactgcaggttggggccggggggggcggggcgtgaaattcagtcttggagcaggctaaggggttgattgaagggatcaggctccgttctctgactccgtctgtgtggcttttttggggagaagggtggggacgatgtgagttcgaaaaaggatacgagatctggatatctggatggagctggatatattgtgatcagtcagagatctgcctgggaggagagtagtgtgtagtcacttttcagtgccttggctatcaaacaaagaatactcttacagccaaacttaggtccctgtatccatggtgaagaaagatagttggagtcttcccgggctagatggaatagatagtggaatctaaccacgtggattatacaacctaattcctatt

SEQ ID NO: 144775 - DNA, 283 bp, Homo sapiens
ctggccacagggtttgcccacagtgcctttgctcttgggcagctgtcaagtggtccccaggttggatctagatggggtcggtgtgcctggctggcagaggtgggagtgctatagggtacgtcggggttgaggaagagattctagactgcaagctgctgggagctgtgttctatgagaggtgcagggcgacagctctgaacacagcccttggcctagggagtggcacccttgggctgtgttagaaggcaaggaacagctctgtgctggtggccacaggggagct

SEQ ID NO: 144776 - DNA, 128 bp, Homo sapiens
ggatttgctggtgcagtacaactaggcttaatagggacatgcacgtgcacacacacacacacacaatttaaccataagggaaggtggtagagattgtaaatgagaaatagaaatgatagttaaaaaaa

SEQ ID NO: 144777 - DNA, 836 bp, Homo sapiens
ctggtcaacatggcaaaaccctgtttctactaaaaaatacaaaaattagctgggcatcgtggcgcgtacctgtagtcccagctactcaggaggctgaggtaggaggatctcttaggcccgggaagttgagactgcagtgagctttgattgcgccattgcactctagcatgggcgacagagaccgtgtcttaaaaaaaaaatgtaaggggaaacagcaggaagggacagaggaacaggtaattcaggtaattatgcacgatgtctctcagcaaatctgcattttccatagggtagagaacacacacattttccatagggtagggtgtgtacacacggtggaggaaggagacacatgcctagatgtgtgggtggatggctcatttcttgtctctttgtccggcacctgtgaagatgagctgtgagtttacattgtcagggtgagggaggccgcctggggagatacgtggcctgtatctcacaactctctgctgaagaacagaaagcaggccggttttgtgcgtgtgtgtgactcacttcccaagcttaactttttccttctgcatagtgagtttggggtcctgagattttattttcccttcacacggctgaggtggcgtgaccaggatttggggaggaacaatgacacacatcccaaaggtgtggggacctgacaccagctggcctggatccatcccgcatccaccaccagtaactgtgattgcaggcaggtgcccccacctctctgggcagtctcctcatctagaaaatgcaggtgaggctgatgcctggctcttctcagttgtctgaggattaaatgagttaaaactcacgaagcc

SEQ ID NO: 144778 - DNA, 381 bp, Homo sapiens
atttccaacactagaagactaatgaaaataaattatattatacagcaatccaaaattataattgacataattaaagacattggaaaatgttgaaaatatattaagtggccaggtgtggtgactcacgcctgtaatcccagcactttgggaggccaaggcagggagatcacctgaggttgggagttcaagaccagcctgactaacatggagaaaccctgtctctaccaaaaatacaaaattagccggatgttgtggcacatgcctgtaatcccagctattcgggaggctgaggcaggagaattgcttcaatccaggaggtggaggttgtggtgggccaagatggcgctattgcactcttagcctgggtaacaagagcaaaac

SEQ ID NO: 144779 - DNA, 748 bp, Homo sapiens
caccggagtggcagcctcttgtcttctaggccactgcggcagccaggatgggaccagagaaagttaaaatgccatggaactcgcggttcttgctgagattcacctggtttttcttgattaagcattcttctgattgctgcaagtttttaattagttttccaaagttttaaaatagtagattctaacggtttttgcctttttcttttttttttttttttttggagacggattcactggcactccagcctgggtgtagacagagcagagactccgttctcaaaaaaaaacaaaacaaaaacagaaaattgggagcaccctttcctaaaccctgtgtgttcacaaatattccaccacaactaatgggttccaaacgcctgtgccacgtgtgttacaccctacaatctcttatctaaaacacccctgtgcacagaaacacacccataggagaaactaccactatctctctgtcggaccccacgcggtacctgtgcacaagggcgttctacccagtagcacaacacaaccaccaaacgccactgtgcgcacaccaaaagcacaaaatcatttgcgcccacaccgtgggcaacccccatgattagacaacctcttaacaagaagccctctcaatattaagcagcaacaagacgaagcaaaatcttcatatgcaaaaacgagaacgtaaaaccaacatgtacagtatttcttaaaaacacgcagctagtggggggacaacagacacacttattct

SEQ ID NO: 144780 - DNA, 491 bp, Homo sapiens
gcctgttgttctctggtaatttgaatttttaaaacttattcctgaaataaaaactccaattttacattaaaacaatttaataaagctacctgaccaaatacaaagtcatacagccatacaatagtaaacataatttttgcttagaaatagtatgattttaaaagtgtattaaactttcaaagcatctgaatatataaataatatgaggtttttaattaatgccattaaaccttgaatgtcatttgacctggagatgaaatagtaccataagtatttcaaagagttgatggggagttaaactataaaatcagtaagaaaggttatgtgccatgtggcacaaaaaacgtatattaaagactaaatgggtaggaaaaaaaaacctctcttaagaacctctctgaaaagtgtcctgttttattttaacatgcgtttgagcaataggaacagcaagtgcaaaggttctgatattccagaaacatacttagagcagt

SEQ ID NO: 144781 - DNA, 677 bp, Homo sapiens
ctaggcagcagctcctgaggacaggaactaaacctctttaaaatgccttcaaaaaccctgccatgcaccctgatacagccctagttagtgtacatattattatcaggtttctgaagataatccaggaacacctattgtatcagtcagctactgctgcataacaaattataccaaactcagtggcctaaaacaacacatgtctttgtgatatgactggtgaaataaattaagcaaaaacaaattattattttttttaataaaaaagaagaggctgggagccatggctcatgcctgtaatcccagcactttgggaggctgaggcaggcagatcacctgaggtcaggggtttgagaccagcttggccaatatggtgaaacccaatctctactaaaaatacacaaaaattagctgggtgtggtggcgggcgcctgtagtcctggctacttgggcggctgaggcagggaaatctcttgaacctgggaagcagaggttgcagtgaaccgagatcgcaccactacactccagcctgggcaaagagcaagactccatctcaaataaataaataaataaataaataaataaaacaaaaataaaattaataaataaaacaacagacatcttatcaagtttctggggctcagaagactggaaatgactcaactggggggccaggcatg

SEQ ID NO: 144782 - DNA, 632 bp, Homo sapiens
tttcctcccagaagtggcagaaacaattccttcccaccttcatcacaaataacactgcaggatggcctcaactcatatgcacactctcacacatacatgcacattcacacatacactcacgctcacacctgctcactcatgcacactcacacccactcacactcacaccctcacatatcctcacatgctcacactcatgcacactcacacatgccctcacatacccatatgtgctcacacttatgcacactcactcccactcacacacctcaatcacacgcactcacgtgctccatctcctgagggatgggtgccagaggtcataggtatcagagccagggaaagaaaagaggcacacgagtaaagaaacctcgcagaccgagcaggcatctgcctaactccctgcagagctgggctggaagagctatggaattcactttccactgctccatagaaggcgagtggtgtgacactgggtgggagcttggtcaccctcatccgtacaagctgtccccactgtcttctccctgtggcagcttgtcttctgggttggttctgtccctgtaagaaattccttagtagcacagtggtggctgcagacgccatccctatagtcaagtagattctccaga

SEQ ID NO: 144783 - DNA, 422 bp, Homo sapiens
acaggcatgagccaccgtgcctggcctgtttttttgtttttgtctttttaaataatttttaccagttatattgttgcacttgagtgggcgttagcagggttcctcacacactgcaaacctcctttccactgtgaggcattttggaaagatcggctttgccattacaaaagtgaatctctcctacttatctctgattaccaaataaatgtatactggaattaacattcctgcagggtaacttgcttaagcagtgttttgatgcagtattatttctgtccataggatggcatatttctggtcatgaggacaaaatcacttacaattacttctcaagactattctttcttaccacagtttaccttagtcttttatgctcttctctccaagaagctcattcattttttttatgtcctcttctggat

SEQ ID NO: 144784 - DNA, 491 bp, Homo sapiens
ctgtgcttgtcttccacaactagcttgcgggcaaatcaacaggttctccctctcgaccatccctcactcccacccctcctctgcacaccgtggctgatgctgatgaactgggaatagctgccccacgctctgtgctggcctccctgattccacagccaagctcacatgaggccacagcaagttgttcagaacacttgacacaggctctatctcagtgaaaagctcaaatggtcccacctccagccactgatgggccacagctcacagctgccgtggctgagcggctctttaggacgcatttccaggctgctctccttcttcagctgtgccctgagattcaggctaagcctcccccacaactgtgaagagcaccccctaccgctttcccatgcatgccacaaaaagccacctctgccagcctctatcttccccttccctcatcccattgtcctggaatcagctgtgcaacccactagaccaggtatgtttag

SEQ ID NO: 144785 - DNA, 316 bp, Homo sapiens
ccggcctaatctggctaaaatttaatgtcacagaattagggttagggttagagagaactctaatctttcaaaggatggatacactgaaaaccatggtttttgttttgatatgttgaggaactatatgcttctgtcagatttattcagttttattacattttggaaagatttagattaatgattaggataaatgatagttatcgaagaatcacagattattagcacaggaagggtgttatccctgtcaactgtcagctgggttcatgaatcattgtaataaatccctggtgcatatttgttcacatttgctttatca

SEQ ID NO: 144786 - DNA, 716 bp, Homo sapiens
cagggtaaatgcaaatgctaagaaatgtgttccacacttaaatattattgaagtgtctgctatctaccagttcgtatgcttgaatttggagtactaaagaaatgaacaagactagtttcaccttaagggagtttactgtcttctttaggagtataatctgagaagtcaggatgaggaaatattggagggctcctggagtgacttcggtacatggcacttgatacagaaagctcagggaggggtgaatcttaacagctctgcaaaaagaaagggaagcagctgaattagtaggccaaagggctaggacaagggctggtaaatttttctgtaaaggtcaagatagtaaatactttaggttttgtacaccacacagtcaacaatttctcagttctaccatggtagcatgaaagcagccattgattggccgggtgtggtggctcacacctgtaatcccagcactatgggatgccaaggcgggcagatcacgaggtcaggagattgagaccatcctggctaacatggtgaaaccccgtctctacaaaaaatacaaaaaaattagctgggcatggtggtgggcacctgtagtcccagctacttgggaggctgaggcaggagaatggcgggaacccgggaggcggagcttgcagtgagccgagatcatgccactgtattccagcctgggtgacaaagcgagactctgtctcaaaaaaaaaaaa

SEQ ID NO: 144787 - DNA, 429 bp, Homo sapiens
gtaaatgggaaatagcagcacctgtgggagatgcctggcaagaggggcaggagaggccggagggtgagaggctgcctgtgcaggccaaggacacaacctatgcaaaggccctgtggtgaatgagcttggtgcattcccaaaactagaagatactcaaagcaacagcagctgaatagctgcagagtccaggaggttacagcattaaccaaaacttagacataataaagctagtgtgacaagccgaccaggcgctgtggctcacgcctgtaacccctgctactggggaggctgaggcaggagaatcacttgaacctgggaaatggaggttgcagtgagccaagattgagccactgcactccagcctgggcaacaagagtgaaactctgtctcagaataaataaataaataataaaggtattgtgacaaatg

SEQ ID NO: 144788 - DNA, 805 bp, Homo sapiens
tgagttttcagaactctttcagccacggcttgtcttcaatctgtccttccaccaagactccctttcttggctctctatccatctcagcccagaaaacccaggcctgttttttagctcccttatagagagctaaaaaacaggcctgttttttagctctctataagggaggcagttggtttcaaaaaatgtacattctgcatctctcatgtaccatctaatgtttgtcttcctttggggttgttccagcagctgcttggtgttccgcaactttagttaactataatttttctaatatttttatttcattttttgtattttggcctgttatccatatggaactcattatcatgaatagtatacattgggaatcttttttcccccagaaaatatccacttgttccaatacgatttaataactagaagactcttttctcactgatttgaaatgccacttctatctcgatatttaaattctcacatctatatgagtgtcctcgtgttacatctctaatcccttgcctatgagaggacagcaggagggggtatgcttagggggaggtcaaccctggagatgtagacaggagcaatcctgagataaacagaaaggccctttgtagttggcctgcctagtaccgaaatcactgactaggaaacctccagaagccccactttacttctcttcatttctctaccacctcccccacaaacaagaaaaccaggtgtgtagctgattacccaagcccattgcatcacatctctcccaggagttgttcctttagcagctctactctggttgtctgatgaa

SEQ ID NO: 144789 - DNA, 809 bp, Homo sapiens
cacactgtgcttaaacgtaagataaatgaaacactcgaactgtatggctgcatttacccctctttgcacctaatgtccatgaatatctaagttcaagagagatgagctcagttcctaggtcatgccccagtctgtagtgacatgctcctgtatgtaacggaaatggccatgtctacaggaggtaaaatcacaccaacctgggaagaggaaaagccagtgaggggcagtacagcaggggcagccctctccactgaaggcaggttgtttgcctgactccatggcatttgtgtccattagagtctagaagaggtgttggcaaactttctacaaagggccagatagtaaatatttttggctttggaagctagatggtctctgtcataaccactcaactccgccattgtagtgcaaaagcaaccatagacaatatgtatacaaatggatatggccctgttccaataaaactttatttacaaaagcaggcagtgggccagatttggatgctggctagggggttgccaacctctattgcagaggacacacactccatcaacagactctttattaatggatgcaaaataccagcgttcttcttttttgctttttaacagaagacatgtgttcctggaaaaaaaaattgtttaagtcaaaatttgtaatttgaattctactttatatgtgttaggagggttggctacttaagtgagccctatagaaacaatctcttttctgcccaactgttaagggctaaattatatttctccaaacttcctatgttgaagccccaacttccagtacctgagaatatg

SEQ ID NO: 144790 - DNA, 393 bp, Homo sapiens
actcgggaggctgaggcagaagaatctcttgaaccccggtggcggagattgcagtgagtcaagattgtgccactgcattccagcctgggcaacagagtgagacgctgtcacaaatttaaaaaagtctcagttttctctctctaactccatccactccccagtccaggaaaaccagtttcgtcgacttgagttcttgaccgttccagttttctcttttttgtcctcccagcttctcttcctgccagaacttccttctccccgacttgcccactcagccagcccagcttgtgaatggctgccagactgctcttctctgagtacataccagctcaaccactttcagcagctcccctctgcatttaggatgaagcccaggctcagccttggattcca

SEQ ID NO: 144791 - DNA, 443 bp, Homo sapiens
agctccagctcctggatgcacacgacacagatgcatctcacagacatcatgctgagtgaaagaaggcagacacgaaatacatgcaaatgttcaaaaaaaaaggcagaactactctgtgatgatataagtcagagcagtggttccccaggagagggagaaggacaccctggagagagtcatgagggaaattttctggggtgggaggtaggaagggctgggggacctgtaaaagttctatgttgatctgcatggtggttaaatgaatgtctaaaattgtaaaaattcgtcttatggacacttaagatttatatacttacgcattttatttaggttactatcaatttaaaaagttcactaaccttaacatgtctctgtccccacagtggccaccccatgtccctctactcctgccctctttccccagccattcttgatcctgcagc

SEQ ID NO: 144792 - DNA, 396 bp, Homo sapiens
gagccaaggggaagaggctgctgtttctaaagaggatgtgatcgacagttattgaaggtgcttagctgggggctccactctagtcttaatctgagccgccctcaaggaaatcataaccagctcttaaaaacatgttgagaccaaagctggtgtgtgtgtttgagcggagcttcagacagctacttaacactgggggcctctgggcttttgattcctccacttctagcctgccatctccccccagctggctggtgcttatcagccaagacgttgtttaaatcacactcatttcctataaccatttcatttgaaatgccatcctctgctccagaaattcatctatcaccagcctaggggtatagttgaggagccttggggtgatcactccccatctct

SEQ ID NO: 144793 - DNA, 165 bp, Homo sapiens
ccccttgctcactctcttgctcctgctcttgccttctcaccatgtgatacactgactccccctgtgccttccaccatgactgtaagcttctgaggcctcaccagaagccaataggatgcacagcaccatgcttcctgagccaattaaacttttctttataaatta

SEQ ID NO: 144794 - DNA, 137 bp, Homo sapiens
accctggtctccttcttcctacataagattgattaaggctctcactcagaattaacctgcccacaccttcctgatggaatctcatccagagcagagggctaagtctatgaactcccccggccccaatcccctaacac

SEQ ID NO: 144795 - DNA, 594 bp, Homo sapiens
atagctgaacacatggaagttcctgaaggactctgctcagcccctcttctcccacaccttgctctgtgtatctttttatttggttgttcatctgtatcttttgtaatatcctttataataaataagtaaacgtatgtaaagtgtttccctgagttccgtgagccactcttgcaaattagtctaaccaaggaggggtttgtggaaatcccagtttattgccaatcaatcagaaatggcatctgaagtctgggacagtcatgtgggcctgagccctggacttgtggaatctgacactatctctaggtaggtggaattagaattgagttaaattgtaagacacccaggctgggcccggtggctcacgcctgtaatcccagcactttgggaggccgaggtgggcagatcacctgaggtcaggagttcgagaccagcctcaacatggagaaaccccgtctctactaaaaatacaaaattagcccgtcatggtggtgcatgcctgtaattccagctactcaggaggctgaggcaaagatattttgtttcccccctggaaggggtgtggtttgccatgagaccaaaaaccaccccctttgc

SEQ ID NO: 144796 - DNA, 240 bp, Homo sapiens
tggaagaaaactgtcatataagtagaccagcacagttcacacccgtgttgttaaacgatcaactgtattttattaagctgtctttgaatagcaccaagtatcttagtgtatgagaaggcctctgagaagttccacagttaggagaatcgcttgaacccaggaggcggaggttgcagtgagccgagatcatgccattgcactccagcctgggcgacagagcgagacgcaagactccgtctc

SEQ ID NO: 144797 - DNA, 255 bp, Homo sapiens
caataaaacctagttattgaaattatatcattatggaagtaactagtatgtttcatacaatcagaaaccattaaaggtcgacaaagttataataaaccatatgttagacagttatagctacaagtaataatatacacaacttgtcactagcagacaccaaaatttgaaagtgacctccatcagtggacactgagaaagtgaagaatctggcagttcaaatagggccacattcttatttgtgggtctttattttcc

SEQ ID NO: 144798 - DNA, 356 bp, Homo sapiens
aggagacgagtgtgcctgggagtttgtctggcatcccgggggctttgataggagttgtccgggaccccagggagatgagggttcagagggtggtgagggcacataggaggggagtggaagcctggctctcaggcctaggcccctatcctgccccagggcaggtccaggccctggaccccgcctagcgtaggctagtgtgtatccctggaaccagaagagagtaggtgggctctggaggcctcaaaggacccccgctagactctgtgatccccacgccccagaacatgcgtgggcgctatgaggcaagccaggacctgctgggcaccctgcggaagcagcttagcgacagcgagagt

SEQ ID NO: 144799 - DNA, 322 bp, Homo sapiens
aagcaattcttatgcctcagtcagccgagtagttgggattacaggcatgtgccgccatgccaggctaatttttgtattttagtagagatgggattttgccatgttgtccaggctggtctcaaactcctggcctcaggggatccacccgcctcagcctcccgaagtgttgagattacaggtgtgagccactgtgcctggctgccttgcgggcttttaggcacctcaatgtctagttttgtcagaatagcatcctagaggtcttagaaatcttacctgttggagaaagttttaaagtgccccaaacatcccagcagttgtacat

SEQ ID NO: 144800 - DNA, 216 bp, Homo sapiens
gcaactccaacaaggggctaatactccacatacggcttgcagggccagcaacaaatctatagagactagcagctccaacaatgggctgataccccacatacggcagagcacagggccagcatcacactgggtggtcttgctggtcctttctgcccatttcacattccctgttgcttgaagaggctgtcatagtgactgaagccaaggccagattgt

SEQ ID NO: 144801 - DNA, 579 bp, Homo sapiens
tcttaatgtagtttttagaaaatattcagtgagtgtgtgtggtaagagggatatatatacattgatcctagtcacctctaaggcttctttcaactcaaagattctgcagctccattgtgaaaggaattgaaaagagagcttactgaaaatactgttctcataagcctggtgtgaaagttagcagctaagcatgtggttaggagcggcagttttggggtgaagcaaaaagtgaagaactccagtgcaagaatataatgcatttttggatcattgtgttggtggtagattatctaatgaaaatgataagactgaagggtttgctgtcaaagttacttagatttcataatggaatgtcttctcaggaggatggaaactagagtccatgttggccttacaagtcttctctgaatattccagaaactaatagttaagattctttcaaaaaggtaagttgatagatgcccacacagtttctcctctagactgtgtcacagatgacaacctcataacctctacctgttgtcctggttctaccatttatttcaacacagaatacacacacacaccacacacacacac

SEQ ID NO: 144802 - DNA, 421 bp, Homo sapiens
gatgctgagcatgaagacaaaagcctatcgaatggggtgtcagaaaagaaacatcaaaatatcgaggatggaaactagagtccatgttggccttacaagtcttctctgaatattccagaaactaatagttaagattctttcaaaaaggagtaaagcagagacattcaaagatgaacagcaattctgaatggaaagaggccagctgtaaaacgtcatagaagacctgcagtagagatacaatcctgagaagaatatttagcaagaatggggtttcagatttctggtatttccatatgggtggagattgaagaaaaaaaagaaaagagcaaaagttttctcataatgttttgcaacttctgcttccgggcccagtcagagcccaaaagcagcaagagaagtaaaatgaaaacactgaacattt

SEQ ID NO: 144803 - DNA, 508 bp, Homo sapiens
gtaggatggctgaaatgtatatgtgctccacatctctcccctggaaaggtgaaaaacctgtactgttgcacagagcttgggcacagtttagtttaacacacattcatcgagtattgaatcataattatactatttttgtctgtggaagagatgccacaaatgcattttttatgggctataaagaaagccaatgtcaacaagaaacctaaaaaaaatgtgtttgtgttcattcaggagtaaagcagagacattcaaagatgaacagcaattctgaatggaaagaggccagctgtaaaacgtcatagaagacctgcagtagagatacaatcctgagaagaatatttagcaagaatggggtttcagatttctggtatttccatatgggtggagattgaagaaaaaaaagaaaagagcaaaagttttctcataatgttttgcaacttctgcttccgggcccagtcagagcccaaaagcagcaagagaagtaaaatgaaaacactgaacattt

SEQ ID NO: 144804 - DNA, 206 bp, Homo sapiens
attaaatgttttatgtaatttattatgttttgatttgcatgtatctggtatgttcatggtgagagagtggggagacagagtctcgctctgtcatccagctgggagtgcactgacaccatcttggcatcttggcacactgcaaccccttccccccgactataacagataattagctctatatcgtctacaaaaacattttttttcta

SEQ ID NO: 144805 - DNA, 545 bp, Homo sapiens
ctgactttgtagaactcaccttcatcagcgtggctccacacaagctgagctcgcacagcacgtaacctacggttagctcccgatcgatttctgagctctctgtgctgtggagaaccccttgtggaagtttttgccacatccctctgccctttgatatccaaaccacatcccttttctttgctcttataagtataggtgttggcggagattgcttttgactggggacatatgtcctttcattttcaagttgcatcccttgtacctgcatgttgttcacttgctgaggtcttgcttttctgtgttctttgtgggtgcccagcaaggcatcccagaccatactaggctgttgtctaccacatcagcctaggcgccccgagtcccagaccctactctatagagggcttccaggggaccatttttctcttgatgctgtttctaacatttctcaaatgagcatgtgttacttttatataaatttgggggtagggagagaacacgttaatcttttaaaaagaaaaaagtgtttttaagatacattttgccta

SEQ ID NO: 144806 - DNA, 579 bp, Homo sapiens
atcaaggcttccagccccagttcagcataaaatccaggattggctacacaaccaacacaactcaaagttgattggagcagaaccttccttctccccaacaggtcctagggttagctcccgaagagttctgagccgtggctggctggagtgcacatgagaggtttttgccacatccctctgccctttgatatccaaaccacatcccttttctttgctcttataagtataggtgttggcggagattgcttttgactggggacatatgtcctttcattttcaagttgcatcccttgtacctgcatgttgttcacttgctgaggtcttgcttttctgtgttctttgtgggtgcccagcaaggcatcccagaccatactaggctgttgtctaccacatcagcctaggcgccccgagtcccagaccctactctatagagggcttccaggggaccatttttctcttgatgctgtttctaacatttctcaaatgagcatgtgttacttttatataaatttgggggtagggagagaacacgttaatcttttaaaaagaaaaaagtgtttttaagatacattttgccta

SEQ ID NO: 144807 - DNA, 719 bp, Homo sapiens
ctctgccctgctccttgctgccaccgtaagaaggatgtgatatcttcaccttctgccatgattgtaatttcctgaggcttccccagacctgctgacctgaccctctctgcagtgcctggcatacagcagaaactcgctaaatgaagtctgcgtgtttcatatacgaataactgattgtcatgaccggaggtaaactgaacatctgaaaaggacctaattaacattgtgcgcaagtgaaagaataaatgaataaatgaataaaagaatgaatgagtacggatgctgagaactgagatgtggcatttccatactggcagaagctccgaaagaaacagtcatcacttcctgtcctactgcacgcaatgtgttaggcagtgctttgctgaaatccagaatataaagttaaactttatgagttaaaagtttgaacttttgagcgagatgtaattaagcacaaattagtttgtagaatcctaaatgtcagtgcatctaaacaaagtacatctatgtttatttgaaagcaaaaaacgatgacacatttttagagaattaaaataaactgatcattgaaattgaattaatttttaatggtaaaattaatttgagtgaagtagaaagaatgcggctcataatgttttattgatgatgcataaaaatgatcacaagtcattactcattcacttgaaagccagcgttcttccaggagaataaatttctgt

SEQ ID NO: 144808 - DNA, 241 bp, Homo sapiens
gaaatgattcctccaaggcctcctcttacccgtcggacaggaggagctcagaaggcaagtgccaaagccaagttgaaatgataagtaataagatattgagtgcatgcacttgttaattgcatggactctttaatatgtcttccagaaggggtgaaaacttgtttgaagctttacgtattttcattgctggttccatttgtgatcaatggcatatagcatacagtgtttaatctttggctgg

SEQ ID NO: 144809 - DNA, 251 bp, Homo sapiens
tctccttgcctgtctctgggtggtgtgtaccatgcctccagtatggccttgggtgcatccgcttcctgccgtctctgcccaaaggggcctgtgaggaccacctgctctgtgcccagaagggcacggtgacctctgcttgggctgctattccagctactctttcagaagcaaacctaagctgtggtagagttgggcctgaggggatcactctagaagtcagaccatgcaggcgatgcagagcttgcgcactg

SEQ ID NO: 144810 - DNA, 189 bp, Homo sapiens
tgattagcacagtcggccagggacaatataaagtgtatgcatctatgtgtttaccatccctgatgaaggcattaaggagttatcaaaggttttggaggaagggaatggcatgatccaacatgtattttacttgtatcattctggcagtagtgtaaagggtcgagtagtagatagagtaaaggatagagt

SEQ ID NO: 144811 - DNA, 102 bp, Homo sapiens
gaactgcctgttgatagaaacattgtctgtcggctccatggtccttgaccacatgacagccttcaaggacagatgtgggataaggaaataaataacagctgt

SEQ ID NO: 144812 - DNA, 199 bp, Homo sapiens
cctacggcttctaaaaccatcccgtgcagactggctccctagactccacgatccccgggatgtccacccctgccctacacagcaattaggggaaggggtctcaagcacatccaagtccttcgaaggctccgcacagtgacgaagagcctgtcaagcccctcctcagccacgcttccgcacgagacacagtctctagccc

SEQ ID NO: 144813 - DNA, 340 bp, Homo sapiens
ttgtattcctgacagctcagcctcctctaacttctgagaagttctcgctacctctggataacagagcgaccgtgtctggacagattactagctgcgaatctgcccaacactgaaactgacttcatgctgcaagatcactggtgtctttttgctctcattcttgcgctgggtcctgggccgtgacttccaagctccacaggaccaattctgctttgttgaggaaagcaccttctactgcctaagagatgtggattccactgtttacttaagcccttttctactggaaacagaaaggagatctgcttagaaagatcagtaatactgaaactaggaggccatg

SEQ ID NO: 144814 - DNA, 898 bp, Homo sapiens
aatgattctcctgccccagcctcctgagtagctgggattacaggcatgtgccaccacgcccagctaattttgtatttttagtggagatggggtttctccatgttggtcaggctggtctcaaactccctacctcaggtaatccgcctgcctcggcctcccaaagtgctgggattacaggcgtgagacaccacgcccagccctctcttacttttaatgtccccattattgtggctgaagggctcagaagccctctgcctctgagtaggacaccctcctctccttccctcccctgcagctgggtctgggctgtcctgttctggcgtgagtggtttcttctggccctgcctctttatctagtagatttctgccactgagttttccctgggacagccacatgggcacagctgtctcccaggcagcactaggggaggagatcaggctcccagctcccccagcatgacacagagctggcgggaatttcaacaggactttctgaaaggtgagggacaacaggggccccatgtcactgtggaggctggcactcttatatattcatgggtcaaacccactgtagtctctgaagtctggcacatgctgttgtacctgagtgtcacagtcacaggctaaataagcccttttcttttacaaccttcccttcagtgagggctgagggaaattcacatcttcttgctttcccctccttcccttgatttccccaggacagccagctcttcttggcttttactgccccggagaagatgcttagacatacaggcctgcatgtgtgcaccgccccccacacagtcacacattcacacacgcatgcatgtgctcacacgctcatgctcattagcgcacacatgcacactcacattcacacatgcacctcccacacatt

SEQ ID NO: 144815 - DNA, 251 bp, Homo sapiens
aagtgtttaacccagtgcctagctcagaaagtatcagtgttgagtaataaaactaaatcgagcactgacagagactctttttgactaaatgttagccaggctcctctgagctctcttctcaactaggcattgactttggctctatcctgctaagagagtttggagtgaatccacacccttgacatgagatcaaattactcatcctccacctttgctgtctaagtcattggcctgttttcaggaagaatcct

SEQ ID NO: 144816 - DNA, 709 bp, Homo sapiens
aacagaggttgcctggggcaaccctgggaaggtgaggccctggatttcctggtctggcctctgagaacctcctagcaccccagaactcccagacagaatgttaggtaatgccaatgagcacagatcaatcatctgcacaagtaagtccttctggggttcctattccagacactctggcactctgagctcccccatccaaagcttctttccgttcctcaaactcaccatgtggtctcttggctcttagctttcctacccaagcccccaactccttgaaattctcttccctcttcttactcacaaaatacctattcattcttcagacctcggcttaaaggtcaggactccggcataaatgtccctgatccctgaaagtgtcagaaacctcagaaaagagggccagacatggtggctcatgcctgtaatcccaccacttcgggaggctgaggtgggtggataacttgaggtcaggagttcaagaccagcctggccaacatggtgaaaccctgtctctactaaaaatacaaaaattagctgggcgtggtggcaggcgcctgtaatcccagccactcgggaggctgaggcaggagaattgcttgaacccaggaggcggaggttacagtgagccgagatctcaccaccgcacttcagcctgggtgggagagtgagaccccagaaaagatgagatcttatttctccctcacatagt

SEQ ID NO: 144817 - DNA, 797 bp, Homo sapiens
cattcgccccgagacgccatgacctccccagacatagccccagggcgcactcgacctcgaggtggcttgggtgatgggagcaatcgagagccaggagacgacctcgagacctccgcccgcccattcagcccggcccagccacagtccaccgagagacgccctagatgatggtcctatccttcccaaagggtggcaaggcgcaggatcgcggagggtctccctccttgtcctgaaaggttaagaaattgggcagatgaaggtatttaaaagaggcctagagggccctggggccgaaagccctatcaacctcacactccacccaaagtcccgcgtttgcacgtgcacacctccttctccccatgcagacccagggggtcgcgcacgtttgagctcagactcaagctgagtcacctgactatgcctggaacgtacaggcaatcgtaccgaatacacatgggagaattaaaggaacactacgggagaattaaaggaacactaacaggaatttgaggaataaagaagtgcccacaggcataattatttgaatacacgggtgcacaccctgttgtccagatgcagacaaaagccacagtgcctgcgaggagtgaccccaaccacaagggcagatgtacaggaagccgtgaacgggagagttcgccgaatgaggacgcaggccgcaaggccaagggggcttcctgctagagggacgttggctcggagggagaaactttgttgagccgactgggtgaaaggtttcaggtcaagtcctggccactagaaagaaccaaggcctcatc

SEQ ID NO: 144818 - DNA, 816 bp, Homo sapiens
cttccctagatttttaattgtgatattatgatgccgattttagaccttttctgctttctcttgtgggcatttagtgccataaatttccctttgcacactactttagctgtgtcatattttaatttttaagccctcaatctttctttttcatcatgacagtcttgactgttttatgtttatgaaaactgtaaaattgtctacacagtttttacaaagactttaccaaaatattttattgagaatgtacaaacctgtcagtcaattaggggagaagttgcattgtagtaataaatagccacaaaacaaaaccctgaaggacatccaaaccagaataaaacaaaacattttaacaaagagaaaaagaacaatctcgcaacaaatatgtgcagtttatatcacaaagatgttcacatctccactttaaagagagcttttagaagttgatttaaaatatgggaaaagacattatcccacaccacagaaaaaataaatttaagcagctcttaacacatgaacgtattatcaagctcagatggaatcaaaattaaatatttgacaacagattctacagtttgagagaaatagaaaagtgtttttttcttttctccaggtccacaagtctagtttcttggactctctcactataatggaggttgtcatcagctccccaaaataagggaagcacagagcagatggtggctgaaggtggggaatcctgtgaaatcatatttaagatcatagcccgtggtccattgtattgtaatcagctggctcaggaaagaagatctggatctcctgagctctacacctactgca

SEQ ID NO: 144819 - DNA, 874 bp, Homo sapiens
  misc_feature (5)..(5): n is a, c, g, or t
  misc_feature (13)..(14): n is a, c, g, or t
gaccnagaggatnnccaggacagtcttaacacattgaatatttattataaatggcctcaatattttagggagccaacaagtgaaaatatgcaaatagattaagcagatatggctatttttagtcacccttttaaaaatttctacattatctgggttatttttctagtctcatggttaaatccgagatagttaaatcagatggttaaatcctattaaccagaatgataacattctgtcaactttgaaaagaagataaaacagtattcccattcacagttctttttgagcaaaagacaagggatatcttgactagtataaaaaaattcctttctactggaatatcttattcaacattgatgatttgggctggggttttcccccttggattgtgcagtataatgcatatttggcaaatcatgattatctgacaagtcatataatattgtagatgacttttctttttttaagaagctcaattttttgagaaaagtcttctacaaatttatttcacaatccaaacctttttttttttttaactgtttttgatagtaaaatttagctttggcaatcatcaggaaaatttgaatactacagaaaccaggatgttatatcgttcattttgttattacagaaagaagagttaatgattcccagagttattcctttattttgttataaggatacttgatggtataacaacagcaacaacgaaaaaggcaagcacttttgtattataactttgacaccatggaaagctatgagcctttgaaagttctaggagtgttcagccaggactactgaattcttgtgactactactattgtgtatgttaatttaaacatattttaagactgtcctgtattttctcatttct

SEQ ID NO: 144820 - DNA, 468 bp, Homo sapiens
caccccacccccaccagctagcagctccaccacacctgtggccagctcgccttgggaaaccacccatgccatcatcgtgcatatgatctaatggctttagagaactaggaacagagttattccccaacaaactgactgggaacctgttctgatgagtattttaatttgtgtgataaacaatcattttgagaggctggggtttgccatttccccttccaagaggaagtgcctttacgcatttgaaacttgacatgccatgaaggtatttttggagggcaggggacatttgggaagtcatgcagattacctaaggcaagtgatacttgcgtttatggtgcgtggggaatctgtaggcacagaaatgagactcagcagcagaggacagacagcacctgcctgccttctggtggaaactcagtggtgacgggagctttgctcattgcctttttcttgtgggggtaggagctg

SEQ ID NO: 144821 - DNA, 233 bp, Homo sapiens
gtgcccaaacgtatggctctgttagaggtgagtcctgaatgcaggccagggctggccattcctacctggtctggttggctctgtcaaagagtctggactcaacccaatggttgtagagagctactaaggatttaaggaggaaagtaagacaactctgtttgtttttgagcctcactttgacggctgtggagaaagctctggatgaatgggggcaagagggacaatgaaacctg

SEQ ID NO: 144822 - DNA, 828 bp, Homo sapiens
gcctcccgggttcaagcgattctcttgcctcagcctcccgagcagctgggactacaggtgtgtgccaccacaccggcctaattttcttttcttttcttttcttttctttttattttttgagacggagtttcactctttcgcccaggctggagtgcagtggcgtgatctcagctcactgcaaactccgcctctcgggttcaggccattctcctgcctcagcctcctgagtagctgggaccacaggcgcctgccaccacgcccagctaatttttttttttgtattttttagtagagacggggtttcaccctgttagccaggatggtctcgatctcctgacctcatgatccgcccgcctcagcctcccaaagtgctgggataacaggcgtgaaccaccatgcccagccacgcccagctaattttctgtattttagtagagatgggatttcaccatgttgcccaggctggtcttgaactcctgggtccaggcagtctgcccaccttggcctcccaaagtactgagattacaggcatgagccaccgggcctggccccacggtgtgactttgacctcctcatgggaggaaaaagcaggatgaagcggggatgatgtctgtcggtcctcagcaggagcatctgccaacgtctccacattgtggacctgagattgttctccggaagctgcagtcggagcatcgccaggcccagccctgggtcctccacccgggccactgcctctcaggcggcctctccctgcccgcctcgggccacaggggcagtgcacctggtttgcaggccttaggttgtcctgaacataatgtttattcgccc

SEQ ID NO: 144823 - DNA, 814 bp, Homo sapiens
tagtatgaaaggaagacttttttagtgctttttttttctttaaaataaacatgatggcatattgtacatgtacatttgtaactttatcttctgtttagtatcaatagctgtataaaccatcccatagtttaaaacatagactttaaaaccaaactagctgacttagattctgatatcttctaacatttctaggccctgtttggtttttgttttgttttgttttgttctgttttttgagatgggatctcactctgttgcccaggctggagtacagtggcctgagctcggctcactgcaacctctacctcctgggttcaagcgattctcctgcctcaggctcccgagtagctgagatcacaggcacatgccaccacgccaggctaatttttgtatttttagtacaggcggggtttcatcatgttggccgggctgatcttgaactcctgacctcaggtggtccacccacctcggcctcccaaagtgcagggattacagatgtgagcaacatagcaagacccagtctcaaaaaataaatacataataataataaaaaaaagagaaaaaacaagaacaaacagagacaagaaaagagacgagaagaaaaaagaagaacgaaagaaaaacaaaaaaaaacaaaacaaacaaaggaggagaggacaaaacaggaaagaaagacaaaaacacgacagaaagagaaagagaccaaaagaaaagacaaagagaaagaaggaaaaaaaaaggaggaaaaaaaagaaagaaagaagaaaaactacgggggcgaaaaagaaaaacaaaaaaagagaggaaaaagaga

SEQ ID NO: 144824 - DNA, 238 bp, Homo sapiens
acagctaagaatggaatgcctacagattaatgagcagccataacagattggttctaggtctcatagtggaagaggcagaggttgtcagggccctaattacacctccagttatggtacaaattctaagctgtctaacccctctgaaatagaatctgagggtaaagacaagctgagtgattggtcattgaagaagatgatcgagacagccgacatcagcgtgacagcaggagatgcccag

SEQ ID NO: 144825 - DNA, 149 bp, Homo sapiens
ggctaaatcaatgtatggcttgagtttggagaaagaatatggtcaatgacatcccgctttcagatgcaattaataaacagtggttaaaagcacagcaccactggctgggtttggtggctcacgcccagtacttggggaggccaaggcag

SEQ ID NO: 144826 - DNA, 350 bp, Homo sapiens
gtgatctgccggccttggcctcccaaagtgctgggattacaggcgtgagccaccgcgcccggctgaaatctagagtttctaaccctgaagttgagaactcctgaggaagtcagttggaagtcattctctattaattagagaagttacataatcagattttattttttttttatttttatgtctattttttgagaaaagatctcactgtcattcaggctggaatgcagtggcacaatcacagctcactgcagcctcgacttcctgggctcaagtgatcccacctcagcctctcatgtagttgggactgcaggtgtgcatcatcatgcctggctaatttgttttgtgtttgt

SEQ ID NO: 144827 - DNA, 294 bp, Homo sapiens
gcggccgcctactactactactgctcgaattcaagcttctaacgatgtacggggacatgaaacatcacctctaggctggtctgaatggcagtgggatgtcagaactaattaaccttagtgtcactatagttggcattcgacccccacactgctaaatttgactgccttttttaaaagtgaaaaaaatacatatatcttgagacagcctggcactccaggcggaggttgcagtgagccgagatcgggccactgcactccagcttgggcaacaagagcgaaactccaccccaaaaa

SEQ ID NO: 144828 - DNA, 341 bp, Homo sapiens
tcccagtccatcgcctttttggtatctttatggaagtaaaatgtggcaagctttttttcagcctcaaagactgtctcagagtaaaagtttaagaagtactgctctaaataattttattaaatatgccttattagatgaggaaaactgaaatatttttatacaagccttttgctgtagaacaatgggacagaataaaggtagctcacaaaataagggaacatttcttgcttgttcttttttttccctccaaattcttctgtacaggtccagatagatgagctatgtttcctttctattaactgaggagagagagatgaaaggactggagcatgtcatcactg

SEQ ID NO: 144829 - DNA, 346 bp, Homo sapiens
ctaaataaatactgctgaacagttttgcaaagcagttgtaccaattcacactcccaccagcagcgcatgagggtcctaaggcctctttgaactccgtctattaactccacagttttgttgtacatatgtggcaggcttggaatgttagcctgggaagcctactgaacaagacccagctggttccctgacccccaaaagcagacagtccggtagaggggttgcaggttggttagatcaacacacaacgctgtaatcacaaagccttaaggaatgctgtggagcttggagagcacatgccaaggggagccccagaggaatttccagaagtgatgcttcacccaagacc

SEQ ID NO: 144830 - DNA, 263 bp, Homo sapiens
cacaggagttgccagcctgtggtcccagctaggagatgagctgtggtctcaggaggctgaggtgggaggattgcttgagttcaggaggtagaggctgcactgagccattttcatgccactgcactccagcctcagtgacagactgagtccttgtctcaaaaaaaaaaaaaaaaaaaaaaaagatctaccatttgatccagcaatcccactacagggtatctacccaaaggaaaagaagtcattatttcaaaaaaagacacctg

SEQ ID NO: 144831 - DNA, 266 bp, Homo sapiens
tcctgcctcagcctcctgagtagctgggattacaggcgcccgccaccatgcctggctaatttttgtatttttggttgagacagagtttcaccgtgttggccacgctggtctcgaactcctgatctcaggtgatccacccgtcttggcttcccaaagttctgggattacaggtgtgaccatgcctggcccagtgtggccaaagttttcaacagaaatagttttctctttttcttgaatgtgtggaagacctgagagcccatgaaccc

SEQ ID NO: 144832 - DNA, 355 bp, Homo sapiens
atctagaggatacctctcagtaggtcgtagctgtatacatataaataatacaatgcaaagagatgctcaatcagattatgcaccttttccacgttattaccaggaagatgcaacaaggtttgaaagcgagcccaaaggcagctaagaactttgtatcacagtgacacctagtgttaatttcactgggttgttaatgtttttagggtccttattgcagtttcatttcaatacccaaaaccttctgaattctgttttcttatcttgaataaatttaaagaattattttaaagcatttgtcctcctataaaatggtgtctgatgtgaagtattgtgatctctttgaggaggttacatg

SEQ ID NO: 144833 - DNA, 352 bp, Homo sapiens
ttttaattaggggaaaaatgcataatttggatctgtgtctccgcctggatctgtgtctccacccaggtctcatgttgaattgtcatccccaatgctggcggtggggcttggtgggaggtgactggatcatgggggcagagctccctcttggtgttggtctcatgagatctggtcacttaaaagtgtgcggcaagtccccccatatcgcccccaccaccaccgccagccatgtgaagtgccggctccccctctgccttctgccatgatggtaagtttcccgaggcacccccccggaagccaagcagacgccagcatcacatttcctgtacagcttgtggaacagtgagacaac

SEQ ID NO: 144834 - DNA, 228 bp, Homo sapiens
  misc_feature (28)..(28): n is a, c, g, or t
  misc_feature (31)..(31): n is a, c, g, or t
gtggggtgtgatgtgccatgatgtggtntgnaggtggtgtgtagtgtgcctttccttcctgaactgttaaaatggggatcaaatgttattagttcctgcctctgaagcccttggggcagtgccaggcaggtagccagtgcttaggaaggcttaggtctccacttgtgtgactctctaccctgccactgggatcttctctttaaaacatcaacctcagctgaaaaccct

SEQ ID NO: 144835 - DNA, 564 bp, Homo sapiens
ttcaaagtatgtaagtcagaaattgaagaaactggtgaatccactaccatattgtgaagttttagctcacttatttatagatcaagcaaatgaaaatttaggaaagacaagacaactaataaaataactaataaacttgatctaagggcaattatatacatacataattggccatgtacatatatatacagatatatatatacataagatatatatacagatatatatacacagatatatatatatatataaaaccttcagttattatacatgtttccctccagaactcatgaaatagacctccccagtacattttataaggctagtatgatcttgatgccaaaaccaaagacaacttggggaagaaaaattataggtcaactttatttataatttagatgcaccagtctcagtcaaaatatttacaatcaaattcaacaatgtttgtaaaatacaacacattataaccaagttgggattgaagatcaatttaaaattggaaaaatatgctgatgtatcaaaaacctaagatcacaccaatagatgcagaaaaaggattggaaa

SEQ ID NO: 144836 - DNA, 348 bp, Homo sapiens
ggtgaattttcaaggagaatgtagctcaggagtcatctatggatagcagtgagacactcacctctttttcacctctggaaactttccaccatcacctcctccacccccagctctctcagagtaacaacaacttctttaaagagcccagcaaagttatttcttcagaggttgtttgggttcatcccatcatgtcctaatatttacattttggatacaattggtgaatattaatattttttccaaagagctcaaataaaatgtttatttcatgtttaaagtgaaataaaaagaaaatccctcaatgagaagagtccctagaggaacatttgaggtttgagaatattgcta

SEQ ID NO: 144837 - DNA, 253 bp, Homo sapiens
ccggccacctggagcaggcggggagcgtctctagggctggattcgagccttgtgcgggccagatggaccaactctagaccaaaggccacttgctggggctgaggagacgctgtggcagtgccaccaaatacagctgcttcttgcctctcctggctgctcccatccagatgggtccagaagggttgtccctgcagaaggcgctcactaaggactctttaccccttccctccttgttcagaactgagagagagag

SEQ ID NO: 144838 - DNA, 334 bp, Homo sapiens
acggagcatttaaaggggaatcagtggccaggtcttagaatagagagtttcttaatttgggtatcccaggaggagaccttcagacaagggttccagaaaaagtagcttatatgaaaggcgcaaggaagactgagagggggtagggaactgatataggaaaataaaggttgatcaagctaaccgcccctggaggtgactggcctgtgaccctgctgggggcctctaggcggcagtgtcaagcacatgcctcagactcatctccccaggcttccaagggtgagggagctcgggtgtatatatttataatacaccaattcccaacagtcagtggttg

SEQ ID NO: 144839 - DNA, 302 bp, Homo sapiens
ctcattgccaaggtcatccagaacctggccaacttttccaagtttacctcaaaggaggactttctgggcttcatgaatgagtttctggagctggaatggggttcaatgcagcagtttttgtatgagatctccaatctggacacgctaaccaacagcagtagctttgagggttacatcgacttgggccgagagctctccacactgcatgccctactctgggaggtgctgccccagctcagcaaggaagccctcctgaagctgggtccactgccccggctcctcaacgacatcagcacagctct

SEQ ID NO: 144840 - DNA, 508 bp, Homo sapiens
ctcattgccaaggtcatccagaacctggccaacttttccaagtttacctcaaaggaggactttctgggcttcatgaatgagtttctggagctggaatggggttcaatgcagcagtttttgtatgagatctccaatctggacacgctaaccaacagcagtagctttgagggttacatcgacttgggccgagagctctccacactgcatgccctactctgggaggtgctgccccagctcagcaaggtcagcagatcccctctttgccctatccccagatggctccagaggttcctggagcctgagaaactaccctttgaagattttttttctccccttgtttctcgaggtgtcaccactactatcccaactcaggccccctccacctgcaccctcagaggccctcttagagctgggcactgagcccccaggtaacagcctcacccttccaggaagccctcctgaagctgggtccactgccccggctcctcaacgacatcagcacagctct

SEQ ID NO: 144841 - DNA, 309 bp, Homo sapiens
tctccctcagcctcccgagtagctgggactacaggcacccaccaccacgtccggctaatttttgtatttttagtagagacggggtttcaccatgttggccaggctggtctcgaactcctaacctgaggggacccgcctgcctcagcctcccaaagtgctgggattacaggcatgagccaccatgcctgggctgggggtaggacatttctagaaaaaaactgggttgactctttagaaggtcagggatatttgaaaaaatgggattgttctcatttagaaaagaaaggaaacaaaacaaccaaatgcagt

SEQ ID NO: 144842 - DNA, 767 bp, Homo sapiens
cacctaccaggtctcacccacaggatcattacaaatgcatgagaagccagggactggtctgtaaagcagagatagatttcatagtctcacaaggattagattccaagtccacctggagggagaggcctgtccaaatccttaagcgtttaaaaccaatcttgagctgaaactacttaaaactgctctagccccaacccagctcaactcctaatgatatcacaggtcagctactcagcttcgctacctagtagagaatacagtatgttcatcctagtgtgaaattttctactttgatttccactgttcttatacgcactatgtctaagaagcaagaaatgatgacacataatctaaagaagaaacaatcgatagaaaaagaccttatggatcacccaagtgttggaatttagacaaagactttaaaattccatgaaaaattttctttatgttaaagaaaaacgagaggcagaatgattgagagaatagaaaatttgagcagagaaaaaaagtaacaaaatagaaaatctagaactgaaaatatatccgaaatgaataaattgttttatttgttatttatttttgtagaaacaggatctcatggtgttgcccaggttggtcttgaactcctgagctcaagagatcctcctgcctctgcctcccaagctgctgggattacaggcatgaaccactgtgcccagctgaaatgaataaattggataggcttaacaaaatggatacaacaaaatggatacaacagaaaaaaaaaa

SEQ ID NO: 144843 - DNA, 844 bp, Homo sapiens
aaaaactctaggtagaacaactaaacatgagcctaaagatagtttcaagtacaccagatgctagaaatatatttatatagaaagtgaaatagattctgaaatataataaaggtgctcaaagaaatgcaggaaataaacagggtctttcttaagactgcatgctgaatgaaaattatatcccaaattaacttgatttgtcatataggttgacaagtaaattttattctaaactccattcattttgagaagttagttcttattgaagcctaacaatctgatttgaaaaaagaatcattctttttttaagtttaaaacataagaaaaattgattgaaaatttttccaaatgccaaatatcattacttatataatttgatatttatttataatccacttacttataatccatcatgcgtatatattttagaagggttataaagttacattgtttaagttaaataatttgttaactttgaacaccctttttcctcaaaactataaaccttttaagtcagtaataacagagatttccacagtgatgtttctgctaatgaaaccaagtgaatcgagttgaccatgctctctcaaccttttgaatatgcagatatttacagcaaataatgctctgtgtttaatagcgagcccttggagcctttgccttcatctttcatttaaattggctgcacacattccctagaaatgataaactgtcaaatgcatcacgagatgtggggcttggggttaatttatagaccggtggcttctacactgagtaaagcccctttttttaaaacgctcactaacctttgggaacccccgcgaatgtgccctcttgggctcccata

SEQ ID NO: 144844 - DNA, 241 bp, Homo sapiens
tgtggcctgccacctagcacctccatccagcacacggccaattgccaagggctcaaacaggctgactggtcgccatggggtttagttttccctcaagtaagcaccttctcccagtgagcctgtctgatgtcagcccaaagaagtacaggggacaagctctgctgcgtgtgactgggcagcccaaatgaaggaggtgggagcacaggcctgtagctgaccaccagggtcccatctcaactcc

SEQ ID NO: 144845 - DNA, 585 bp, Homo sapiens
gggtgatctagaggatttcggtattgagtggctgtgagctggggaagatgtgtgtcctccaccttaccctgcagcattcactgagggccacacgtgctgaccctaacaattgctgcagaccctaacaattgctgggccattcaatacctgagcatgagccagcaagagatgatgtgaactggctcttcttctgtgtgtgggtagacaagttccttacctttgctggcctcagttttctcatacgtgaaatgtggatgccactcttcctccctgcaggggttgtggtggtgctctagaaaacacaacttgccttcctctccgtgcctgccctttctccagcatgctcagagagtgcaaaggatttgccaaagaacagtcatttcctgttttttgtttgtttgtttttgagacagcatctcactctgttgcccaggctggagtgcagtggctatgatcatggctcactgcagcctcaacatccctgagctcaggtgatcctcccacctcagcctcccaggtagctgggactacaggcatgcaccaccacaccaggcttccatgtaggcactcacatggccactaata

SEQ ID NO: 144846 - DNA, 305 bp, Homo sapiens
ttcaaaagtggggcagccacttcctagcactggaaattaacaagtcagcgtgatgatgtgcccatttctggtttgttcacagaggagggcgttcatttctttagcccaggtctttccagagtggcaggtggaggagattcattgtttctcatgtaataatacaagaaaatcatggcttccactatacttaaggtgactgcatagtcccagttcgcactgttgaacaggtttaatgatcaacagcagggcctttcactttcagaagtgtctcgatttggatgataagctatctggccactgtaaca

SEQ ID NO: 144847 - DNA, 170 bp, Homo sapiens
ttacccttccagaccttcctgcctctatattagccaatgacaagcagatgctttccacaaaacattcgtgtgtgaactgttgacatttatgactgttttctgagcccacaccaggtcatttttctataaaatcagaactgtgagagctcagggcatgtggccatcctgga

SEQ ID NO: 144848 - DNA, 286 bp, Homo sapiens
tagcccggtgagtagattcctctcaaatagggacgattctgttactttaaaaagcactaatcaaacaccagaattgagtccaaatactttaccgggacacccacgggaaaaatgcccaaccatttttccatcatggcacacatggacggtgataacactgtatttgtaggcacgctgaagataaaagagaagaatggctgctgcttgaggccacctggccaggactgctggcaaccccaggccacacttgatgtccaagagagaggaatctacttcaccgggtcct

SEQ ID NO: 144849 - DNA, 273 bp, Homo sapiens
  misc_feature (273)..(273): n is a, c, g, or t
tagcccggtgagtagattcctctcaaatagggacgattctgttactttaaaaagcactaatcaaacaccagaattgagtccaaatactttaccgggacacccacgggaaaaatgcccaaccatttttccatcatggcacacatggacggtgataacactgtatttgtaggcacgctgaagattcaccccaaaaatggctgttgatttagaactcttgataactgctagtatgactctgagacctggtttgttgttcacgtcagaggaatctan

SEQ ID NO: 144850 - DNA, 383 bp, Homo sapiens
ctcgtggtgtaaataatttcttaattatgcaaaaaattgctttcttgggtttgatatatgcatttataggccgagttttttactcaaaggattaaggtatttatccatctcaatctgggaatatccaaaatactcattaaacagttctttgtaaatgcctgatgccacaggccccattctgataatatcatatttctctatacctcacacttaggctagacaagaactgtaatgagggataataattgaccagatgacattttacaaaagattcaagtttcttcttcttcattccttttttttaattgagtccagtaaaccgtatgcgaagcactgtgttaaataccttgatctaccctatctcagtggtcctcgactgaatc

SEQ ID NO: 144851 - DNA, 188 bp, Homo sapiens
agaaaccacacacacgaatagtgtgcaagctgactaggtgtcaatttgttattattaagaatcacagcaataatttttttaaaaaaagcataattctaaatgaatgctaaccatgcctagggactgtgctaggtgttttacatgtattaacctatttaatctcatcacaacgacactttgagatgagt

SEQ ID NO: 144852 - DNA, 551 bp, Homo sapiens
cttcctatatgctaagcctcttcctccatataccttagcacatcccaagtctcttcctctcctcctcccacccttgtcaaataggtcaacgttaagatacacacacacacacacacacacacacacacaaaacaggcacactaatactaacaccgtgtctcctgcatcatctagtgaatgtcttggtcattttagcatcattatcaaagtatgactttaatggctacttgccatgcctgtgggttggtgtgtagcgtatttaactgttctcttagttttagacaactgatttattaggagggcaaatgttaactttctcaaaaactcggtagatggttgtgatgtgttgaattgctgttacatctttacctgtttttttctcttttcgctttgaaactagtgctgcagtgaacagcttcatgcatggaatgcttttcatttgaactatttccttaggataaattcttagctgtgggaagccttaccaacgggtttgaataatttcatgctcttgaaacacattgcccagttgccttccaagacagcgctac

SEQ ID NO: 144853 - DNA, 713 bp, Homo sapiens
ggatttgaggtcggtgaagcagagttcagacctgtaggggacttcagggatgacagaggaatctgtgagagccgggggagacgggctgtgctcacagccagtgatctgtcccattcacctgggaaagagcacacatgattgaacaggaatttgagcataagatgagaaaatgtgttggctccttagcgctggtgggctgggatggtggccacagcacacaggggcacctcattccgcaggagccactgcagaggagaggagggacctgagggcttgcgccagggagggaggacagtggtccagaaagcatctggcaaaccccatggtgggagggtgaccagcgagacccaggtggggtgagctgaggtgctgtgagtctcagcccagtgggaaatgtgcggctttggggacacatccttaagaagcaagcaggtgactgtggccagggactccatgtgggaacatggcccaggaggggtgcagagctgagggagaagtttggctcagcaaacctatgggaaaatagcctgagagggttccatgtgactgccggcggtatgggcggacagtgggccctccagacccttcggaaggaccaggtgaggtgggtcaagtgcaccagcaggggaaagcagttttccagttcacatgtggaggtcttcccctccccttagctgcaggaaggatgttacggctcaggatcccaggccagg

SEQ ID NO: 144854 - DNA, 236 bp, Homo sapiens
tgaggttaaaaaaaaaaaaaagtatgaaattcactgagggggtccctttcagcatcttaaaagccacagccaattacagcccagatgtcttttttcttttttaaattaatattacttttaattgacaaatcataattgtatacatttatggagtacaatgagatgttctgatacatgtttacagtgtggaatgactaattcaagccaattacacatccatcaccttatctttgtga

SEQ ID NO: 144855 - DNA, 300 bp, Homo sapiens
tgactgatttcactgcgtggctaactccactgttgcctgactccagctgcgtgacttcagctgtgtgactccatgtatgtgaccctagctgtgtgactccaactttcagttgccacgaagacaaccagctgagtcaggagtgggcctccctttcaatgtttttagctaagcatctctgcgcaaagaaagaggcttccccacaggctcttaatttgggacaagttttcccttagtttgggaaaaatttcaatctacctaaattagccttttacattagaaatcgagaaatatgcacaaaaa

SEQ ID NO: 144856 - DNA, 747 bp, Homo sapiens
gaaacctcttttccctttctaagaacgtgggcaccgcaaatcaaactatttactgttgattgggatggaaagacactgctgtcttagtcattcatctttgacttgtgaatgaaatgattttactgttagtttttgtgttactaaagcagaaacctagagtgctgcttataggcaaggaaacttacatgtttacatatgacataatttttcatgggtttgaatttctgaatagcatattatttagttagcatattatttaaacattatttttagccacttcctccataaatcagtgttctaaaactcaatcctgataatccttattaaagtaataatttataactaaaattttaaaatcacttatttgttcatttgaaccaatcacactttgctaagttgcaaacaaatgtggatggcagggattccatgagcaaaggtcatttttttttagtagtaaaatttattactttatcttaaagccatttattaaaattaagcaaaaataaagaggaatctttaaaaagatgtttcaggccaggcgcggtggctcatgcctataatcccagcactttgggaggccaaggagggcggatcacctgaggtcaggagttcaagaccagcctggccaacatggtgaaagcctgtctctactaaaaatataaaaattagccgagcatggtggcgggcacctgtaatcccagctactcaggaggctgaggcaggagaatcgcttgaaccccggaggca

SEQ ID NO: 144857 - DNA, 384 bp, Homo sapiens
gttgttttttaatatttacttatgccaaacattgtgcttagcattgtgattatagttacaagcaagaggaacaaggatcctgccctaagggagcttatactttaaggcagatacaatcaccagcttttaagtatgtgcagactatttaacagagacttatatgcaaacgtgtttcaattgcagtatctgggtcagaggaaatgtatcttatgaccacaattataaagtataaatatttgtgttccacatgaacaaataatctggaacctaaacatcatttgcatgttgacccaccaatcatttaatgagatttgttatcagtgctagctttattttaacctgcatgtttttgttgggtggtggtggtggttgtttccatagaca

SEQ ID NO: 144858 - DNA, 264 bp, Homo sapiens
cccatgtgcctctaagacagccctttgctcctactgtggctccccttgctcctaaattacttgtcttgctgactattctattctgtccttgaaccccagagaactatacttggttttgtgtctttgtgtgtgtgtgtgtgtgttcccagcatcttgcaaaatgcctggctcacagtgaatgtttttcaaaataactgaatgggacccatgaccaggtcctcttgactcaatatcccagtggtcctgttcatgcccagggccacc

SEQ ID NO: 144859 - DNA, 300 bp, Homo sapiens
aatgattcgttttaggcccaattacaagcaaatggtagcagctagtgggaaggatggaagtatgcttctggtttttaagaaagtttttactttactagaaagagaaatattaaaatgattaaataacagaaaaataattgtcacaggatattatataagttattggcacatgactggcttagacagtaaatgctatgaaccaagcaattaaagcagaatggagaagtaaatggtattagagttcttcctctaaaggatggatagaatttgtaaaatactaatagctgacatttattgaat

SEQ ID NO: 144860 - DNA, 319 bp, Homo sapiens
gctatgcatagctatgcctttagtgagctgcatttcagtatctgggttttggcttctaccaacaattagagggagaaatggccatctggcttcagctgaaattgccattccttgtttcttagagtatttcatggaggggactatgccataaattcctcttcgagctcagcagtagaaaatggatggtccctcctgacgaatccatctgcttccacatttcaatttcatttatgaaattgagaattcataacctatcctgtttcctttttagctttggtttcctaaagcttgaagccaaaattagtgcttcattacaata

SEQ ID NO: 144861 - DNA, 274 bp, Homo sapiens
ccctccccgtgtgtgtgtgtgtgtgtggtgtgtgtgtgtgtcttgagcattgagagtaatttttaaatttattttggccccatggctgcagaatccctgctcgtgtgtgtgtgtgtgtgtgtgtgtgtgtgtgtgtgcgcgcttagccacattatgtgcttagctctgcagccaccttggcagcgctgtttctcttcgactcagttccatctcttgacttctcaggtccctcgggctctccccactccctcctatcacagggtctttcttctac

SEQ ID NO: 144862 - DNA, 475 bp, Homo sapiens
taagaaaacctataaaaaaatcaatcttaattacataaaactttaccaacaaggctttccatagcttttgtgtcattaagttcaggacccgggagaaggtaggagaggggaagaaaatgggctccagacaatgaaaagttgcatggggcatatgagttcaatggcatgttaagtgagagaaactagattgccttggtgcattgatagtttggttctagagggagagaatcactcagaaacaagttcccttgagaaggggaagagagccacagccataagaagaaggattggccttcaaaggagaaggagcgttttctccattctgccaggagggaatgagtgtgcaagagtgtctgggggcgtcagtgcagggaatccaagcaccagctccttgctctccttctgtgagacctctcaggccttgaattctccatttgcttacttattttatcttgagtttcaactaaaaaataaa

SEQ ID NO: 144863 - DNA, 863 bp, Homo sapiens
gcaattctcctgcctcagcctcctgagtagctgggattacaggcgcccgccaccactcccagctaatttttgtatttttagtagggacgaggtttcaccatgttggtcaggctggtctcaaactcctgacctcgtgatctgccctccttggccttccaaagtgctgggattacaggcgtgatggagatgatactccctaaatcacaagggtgtggtgtgaagatgaaatggctgcacgtgacagaggagttggagaacaggaagcaagtggattacttggatgaactgtgatgggcccaagaagaactaagccaatcactccagggggcgttttcccaggatccaggcagagagctgattccagcatccacgttgtatccccctcccgctgtggccggggtctccaagagccgggcacccactgcagagcttccaagcccaggcccatttgaacacaggaggacttttgaggttcatttaaccccaaaatcagtgattctacatctcaagctcatattttgaagtgtttacgggtaagtcatatgatactggtcatttattttttaaatattctagccaaaagtacatggtagacaaagtgagaatgtcagaatgttgataattagtgaaactagacgaagatacatgaaagtttaattttgattctcacctactttcatgtgcattaggaaactttcataataagttaaagtaacaaaataggccagactcggctgctcatgcctgcaatcccagcactttgggcggctaaggcaggcggattacttgaggtcacgagtttgaaaccagcctggccaacgtggtgaaaccccatctcccctagaaaataaaacaaaaaaaaa

SEQ ID NO: 144864 - DNA, 207 bp, Homo sapiens
tgggcccagaaacagggtggtcttatggaagggagcataggatgtgggtcctgaagagaaggtgttcactcctggccccatcgctagttgcatcacttcatcttgcctggatttcatctgtaaaatgggataatgcctactccacaaagttgatgtgctttgaaatctttaatacaaacatttgttattggaaactaaatacaaacg

SEQ ID NO: 144865 - DNA, 306 bp, Homo sapiens
atagatagactggggggtcgtttttaagtatagaaagactttaaaaaatccgtttagtacaattttgttgtgagaatgtgctccttatttagattgctggatatccaatctttcactatacctgttttttctgagagtggtgctagaaagcagatagcaaaacgagacttcttgaccagcaaggcatgagaacagaacttttttctgtattacaaactgatctactggtgggaactgagcccatcagcacattagcttcagttgtaaccaagaagcatatttaaaagtaacatctgatgacatttt

SEQ ID NO: 144866 - DNA, 201 bp, Homo sapiens
ccagctcctccttgggactggcactgacccaggcggggcagatacagctgctggtccttcagaccaaccgtgctgtgctcaggcctcagaccctggcccgtgccttctgtgctgaaggcccctgtgaacagtgtttgctcttcaaggttcattctcagcctgaaaacttcttccttctggcatgtttacagtttatgaagt

SEQ ID NO: 144867 - DNA, 273 bp, Homo sapiens
ctgcaaagatggagtttccacatgtaatgtcaggacagcacccgccacacactgcgcagtctgcagggctgtggtgatggtgactgtgggggtgacgggaggcagagagctcagggacagctcaggataggcgggaacacaagcacatgtgaaaagcaaggcgatcgccaactctgaggaaaacaaatgggcaccacccggggaggccgggcagctctgccccaaacatcattcgtgccgggatgatatggacagggcagcgtgtggaagaca

SEQ ID NO: 144868 - DNA, 685 bp, Homo sapiens
aatcaggcagggcaaagtggctcatgtctgtaatctcagcactttgggaggctgaggcaggaggatcacttgagcccagaagttgaagaccaggctgggcaacatagtgaaaccccatctcaaaaagaaaaaaaatttaaaaatttaaaatataatagtaaccaaaaaggtgaaatacatagatgtaagaaataatatctatgtgaagaaaattttaatgctttaaggtttgcaaaaagttataagtaaataggaagataccaagttcttgtaaagttaagattcaattttgaaaagatgatcagtatttaaaattaagatagacttgtcatgtcctgtctgtcattccctctggacagctagttaatgacctcctgctgtacggggccttgataccttctatgattgcacttatctccctatagtctaattaatttgcacgtcttatctcccctgacataggtaccggacatacatatgctctttaattttcactctttccatctaaataccactaaaaattcaaagttaataccgttctgaaccttaaatatttatttattgagacagagcttcgcacttgtcacccaggctggagtgcagtggtgcaatctcggctcactgcaacctccgcctcctgggttcaagtgattctcctgcctcagccttcagagtaggtgggaca

SEQ ID NO: 144869 - DNA, 447 bp, Homo sapiens
aacacacccaccccctccaaatttccacctgctcactttttgaaaccacaagacaccacagagagtgaaataaaaatcactcatcatttatatggagaccagcatgtcaagtacaattcccactggaataaactctccagttatattaggaagacaatatcctaggatgtgacaaaatggaaaagatgagaaggggaaaggcagaaatgctacatctaacaacatggctggcttagctggatcccagccaactggccccatcgatcagatattcacagagcagcaaggaaaaagatgggaagaggcaagcgtgccagccttacacttggatgctacttgggattcaggcaacagctgcacaccaggtaatgctcccgcgagcagtcagctggggaagcgtcgtgcctcatcctcactaagagctccggctgcagaccagtccatgct

SEQ ID NO: 144870 - DNA, 274 bp, Homo sapiens
caggtttttccactttggggcctttgtagatgtggatgctccgcatgcttctcctccgctgcagaaggctgtggtcttctgttcatttcgtcaggaaatactctgggaactctccagggccacggcagctgggggcccttccagcctccaaacttaggggttccctgggaccccagaatccctatgagccccaggatctcccaacctgacagccacccccaggcaccgcgctctttctcctcccaagatgcctctcctctgcgtctcaccccca

SEQ ID NO: 144871 - DNA, 403 bp, Homo sapiens
ggaaggatatgggagcccagatcacacagggcctgaaagggcaaacacgagaaggagcttcacttttactttagagtgaaagagccactgcagagttttgtgtaaaggggtgattagatctaacttacattacaaaagcatcactcagccaggcgcagtggctcgcctataatcccagcactatgggaggctgaggcaggaggatcatgtgagcccaggagatctaggctgtagtgagccatgattgcaccactgctctctggcctgggcaacagaatgagaccctgtctcgtaaaaaaaaaaaaataaatgagtgaatgaatgcatcactctggctgctgaattgagaacagatcgcaggaagccgagggccgaggcagacaactatatgggaagatcaaac

SEQ ID NO: 144872 - DNA, 575 bp, Homo sapiens
catctttaaaatttagtgtttagatttacataatacaacattcaatttttacattcaaaaacaatatcaatttcaataagcttagttttaaaagtaaaaggtttttttgcctcatattaaaagaatgttttgagatttatattaaattttgtaatacatggaaaactacaaattaaagttttgatattcaatctgcatattcaaaatgcaaagtatcaaaaccagccttttaactcaaaaagcccttaaaattgtaaatagtgtaggagcttatatctgtgttccataaaaatagcatgcttattttctaggcatttaaggacttcatttgcgtatctgttatggttaaagaaattggtattctgtcacagaattacatacacttgataaaacctttaattttgcccataacaatttaaatactaacaattaccatgactgaattttcagtaagtttcccatgattactgaaaataatcacataaagagtatttacctatgaggggtttgtttagccttaatttaatttgaatatgccaaccaacatataaagaaaaaatattttaatttacaga

SEQ ID NO: 144873 - DNA, 612 bp, Homo sapiens
gaaggaaggaggagagagaagagaaagagcaagacaaaaacagagactccaagaaggagagagaaatgcaggccacgagaggggaaaaagggaggcagggagatggaatctgacgtaaaaggagacaggtctggctccacacttccaggctgggggtgggaacctgcaccacatagttccttcaggcatgatgggggatgagctgaggggatggtgctgttgcgtgaaggacagaatgtgccgcccttgacagaagcacagggacagctgggccctgtggccaacgctcgggaccaggccccactgctctcccactggcgaggaacagaatgacccagtcctgagagggctacggagcaggcctccatcttcagtgtcctccgggagcccagactcgagttaccgcccccatgatgggatgtctgagactaaatgggcagcgtacctgagcctctggcccagctcccttccgaacctcttgggaccagaagggggcacttgaagtggcttctctggaaccccactggccacagctgtggccactggccccctgtcagagaggaggggctaggggtacccattcctggatgtttctggctaggtgtgttcact

SEQ ID NO: 144874 - DNA, 253 bp, Homo sapiens
ccactgacaacagctagaattgtaagaaaatggccaccaatggaaagagcagtagaatagtaagggattttttgttttttggtaaaattccaaggaaaatacaagcaaagcactgcgagcgtaataatttgccgttgcatggactaaggggtaaggaaggatgaactggtgtattaaaggaaatccagtttcgttcccacctatgaagattactcaggtttatggagagttgttttgctttgggctgttgcgg

SEQ ID NO: 144875 - DNA, 874 bp, Homo sapiens
acactaagccttgaagcccaggacatcaaagaaagcctgcaggtaaccagattactgaccaacgcctgtgaccgttttgaaatttataagacgggaaatggattcaggaaatgggatttttcaatacatggtcttcatcatccttaagtatttttaagccttaataagcttttaagtaaagagagacattctgtaaatggcatttagaagaaaatataggaaagttcaaactggaactgtcttcaatagttgtttacagtgatcatattctgtgacaaatgaaaagtggaccagggacaaaagataaatacatttctatgggcagcagaattgacatccatattatctataaaaggaaagtttgccttgtctacaaaagattacagatcattttagttggtgcccagtaagcatttctatgcatttgggttaaagtgaggaagttagtgcttgtctttccaacctatatccttgcaaggttaattaagcactttaaaaaaaaaaaagctttttataacaggaaatatcaaacctatacaaaagtaaagagaattgtgtaatgaatcaccatgtacccatcaccagttttgatgatcaactcaaggccaatcatgtcttcctctgtggtctacctcctctctccttcaccatcccagattattttacagcaaatctcagatatataatttcccttgtaaatagtatcaacaggctgggcgcggtggctcatgcctgtaatcccagcactttgggaggctgaggtgggcggatcatgaggtcaggagatcgagaccatcctggctaacatggtgaaaccctgtctttactaaaactacaaaaaattagccaggcatggtggcgggcacctgtagtc

SEQ ID NO: 144876 - DNA, 268 bp, Homo sapiens
tcacatctatccagcatcaatagagtatctgccagggttttgagagttaagctggtcggtccttagtggatgtttaaagtgttcagtgtcaccttctttgttcccagacaacttccccatttctgtgtcttgctgtaaaagaccataatgccttttcttccctccatggactggagctgcctttatctcctggagctgggaagttcagatcatttgtagaggggcccctggtttccccataagacagaatgttattctttaatctgaa

SEQ ID NO: 144877 - DNA, 190 bp, Homo sapiens
ttagaaagtagcctttattctctgtccctctagagtgatgtttttaaaggagaagagtataatgtttgaagccttgcctccagtgaaaactgcccagtagtttgatgtaataaagatgttcaggcaaagttagcctacctgttgaaaataacatataattggaaaaaatactcagtggtgagagggttct

SEQ ID NO: 144878 - DNA, 199 bp, Homo sapiens
aagcctgggcaacaagagtgaaactccatctcaaaaaaagaaaaaaaaaggaaagaaatattgctgtgaggggactagcacaatgatgccttgggccaaggctttggttgggtgagctgggacccgggtggtggaggttgcagcgagccgagattacaccactgcactccagccttgccaaagaacaagactccatctc

SEQ ID NO: 144879 - DNA, 691 bp, Homo sapiens
tgactagcctagggaataaatgccaaattttacaaacatttcttccacttttgtgcttttctaaaaacaaacaaaaaatccacaactaaataaacaaaattaaaactccacctgcttgattattttatgtacttcacacacctctctccaaagcaaaagggaaagctaactgaaatccgaatcattaaatctgggtttttcattaacatttcccccaactattctagaagcaaaggatacgtaatagataaacaagaagaaaaatgcatttaaaaccttaagggggcccagcactccatccaagcttatctatgcagcctgctcacaggctcctgtatacaggcgcactgtcatgaaattagcacttctacccagctgaagcctagcacccaagccccaagaactttctaccagaaagctttgtgagcaagccctgaggatcacaaagggttacccaacattttttctaaatgtatcttgtagctatagtgttctgacttgagagctgacagtatatgctgcccactagatttttagaagaatttatcaagaaaagctcagctgggcgcggtggctcacgcctgtaatcccagcactttgggaggctgaggcgggcggatcacgaggtcaggagatcaagaccatcctggctaacatgatgaaaccccgtctctactaaaaaatacaaaaa

SEQ ID NO: 144880 - DNA, 549 bp, Homo sapiens
caacagagagagactccgtctcaaaaaaaaaaaaagggagaggtatatggaattgtttatactgaccaaaggtttacacaatttaaagcttttgcgcttctggcttgaatgtgttttcccttcaggtggtattggctttgtagacccagcactccatccaagcttatctatgcagcctgctcacaggctcctgtatacaggcgcactgtcatgaaattagcacttctacccagctgaagcctagcacccaagccccaagaactttctaccagaaagctttgtgagcaagccctgaggatcacaaagggttacccaacattttttctaaatgtatcttgtagctatagtgttctgacttgagagctgacagtatatgctgcccactagatttttagaagaatttatcaagaaaagctcagctgggcgcggtggctcacgcctgtaatcccagcactttgggaggctgaggcgggcggatcacgaggtcaggagatcaagaccatcctggctaacatgatgaaaccccgtctctactaaaaaatacaaaaa

SEQ ID NO: 144881 - DNA, 320 bp, Homo sapiens
tgactagcctagggaataaatgccaaattttacaaacatttcttccacttttgtgcttttctaaaaacaaacaaaaaatccacaactaaataaacaaaattaaaactccacctgcttgattattttatgtacttcacacacctctctccaaagcaaaagggaaagctaactgaaatccgaatcattaaatctgggtttttcattaacatttcccccaactattctagaagcaaaggatacgtaatagataaacaagaagaaaaatgcatttaaaaccttaagggggccgagtgcagtggctcacgcctgttaccccagta

SEQ ID NO: 144882 - DNA, 439 bp, Homo sapiens
agggactgatattctttcttcattttggctacaagtggcccagagagggctctggtggcccagtgagggcacatgcagcctcctggacccaaagaacacagcgacacccgtgatgacctgggaagggaagggcctgggcagggaaggtcacctgaggtccctgggacccctgtccagcatccccttttctatctcctgctttatgatgtctgtgcctgggggagggttatttgtggatgagtgtggattcctggaagctcttggccacactctaacctgggaggtgggactcaagcctgtccctcatggccctgaggaaggggtagagcttttagcagacacaggcaaggcaatgaaaacataactgaatgaatagtcgcacactcatttacaactttcttgaagattttggataaaatttctattatttcttgcttaa

SEQ ID NO: 144883 - DNA, 177 bp, Homo sapiens
tgactaatgagagtggggagaggatataggtaagggggcccaggaaaaaaaaataatgatggctttatattaaaagttcatgaaaagcagaaaatgatgagaaattttttttaaacttgtttttcagagttgttattttgaaagttctgtcctttctaaggacatgagctctgatcc

SEQ ID NO: 144884 - DNA, 537 bp, Homo sapiens
ggaataaggataggatttaatattgtagctattagctttatctgtatagctgcatagcctgtgctgtaggaggttccagaacttactggactggtctctaatggtgaccatttggattattttgagccttatgctgtaacgatgccacagcaaatatctgtacccatttcatgcaagtttaagtttacctgataaactctatttaggtattgccaaatgacctgccatatggggatgcagcactttaaagccctaccagcaaagtcagagagccctgcccatagaaggtgttaccaaactaatttttaaaattgattttataagtgaaaaatggcttttagcattatttttaaattcttgtttttctttgttttttaatctctgcttcccacaggtgataagcattgttttaatatctggatttaattcctttgaatgagggtaggatcttcctatatgttgaagagtgaactatttttattctttgtttttttgattttgtgagacgggtctcgctctgtcgcccaggctggagtg

SEQ ID NO: 144885 - DNA, 301 bp, Homo sapiens
gctgagcctctgggctaagaaggcattgtgaaaagtcatttttcattgtttctactaatgagaacacagacatccatataaagaaagcaaatctctctctgatatgccttgagttcaaagttttagagacagaatgttctctacattcttggatgtctcataatctaataaaagctgttgaacatcatgcctctgagcagacccaaattcacttcccaagctagaaagaaaaaaattgattgatagatgtaaaacaagactgtaaaaacatatgcgccagggcatgaaacaccaggtagca

SEQ ID NO: 144886 - DNA, 613 bp, Homo sapiens
gcatagatcccccagtttacaccaatcccaggccatagttgggctaacagatgcttgtttgatgaatgactatatgaaggcaactacggccagtctgctgcttctactgtacagatggggaaactgagaccaggcctgggactgtttccctgaatgcttgccacagcttgtggggatatgcgcctgaagacccagtgcctccttccctcggctggggcagtgggcctggctgaggttccaggactgcggcccctcttccctctgcccaaacccccgggcccagggcctccaggaagcctcctctgcctgttgttcaccccaagctgtgtggttgcaacttgagctgtttccaggccttcctcccatgactctgttgaagtcattctcggtccttggcctttgagatcatcaaccctggactgggatcccggccagccccagctggtccccagggccatcactgcctgtagtcatgagacagtggttgcccgtgtcccacggaccgacacacccagccctcagtgtttcttgcatggttcaggaaggtagacagaattccttctcacccatgacctagttgggagtgccattgtccccagatgccggccccctc

SEQ ID NO: 144887 - DNA, 388 bp, Homo sapiens
ctttccatcgacaactgacccctggtgtggccggggcgctctcctcacccagtgggggccacgacagaagggcgaggctgtggtcctagaacacaagttggatgtcctttgacattacctacacctgtgtttccctgcagagtctctgtaggagacagagagagagagagatagagaacaagggtgaaatgaccccaggaggaaaactttactcccctttcctgctctggaaaggacagggcttgcatttacttcagcaacagacacacagtgaaggagctcagcgcagggtctgatcccatgggctgcaggagacagaaaacgtgaatagaagcaagcaaggagaaagaaaaggatgagggaagccttcgggaattcccaccaactg

SEQ ID NO: 144888 - DNA, 130 bp, Homo sapiens
agagtaaatcttaaaaatagtaagaggaaaaaaacacattaaatataaaggaagaaaaataccaatgacactgaatttctcatcaaaaacaataaacgtgagaagaaccacatttctaaaatactcaaat

SEQ ID NO: 144889 - DNA, 360 bp, Homo sapiens
tttttttacctttctcatctataaagtgaggatgctaggctttgtctctaagactcttccagttataacattctatgactttagatgcgttgaatgctttatatcaaataaaatttttgtagaatccacagtcatatacatcatccccctaactccttctctcctttgactttgtttcaaatgacctgagagtggattgcagagtagtatacatgcattttattttcttcttttttatgtgtgaactcacctcagtggatcgcttacatactttgggctttgcttgtttctgtgtctgattctggtcctgagaggcacccattcttgcctacagtgatgactgagagcagctatctgggg

SEQ ID NO: 144890 - DNA, 264 bp, Homo sapiens
actaaagggtaacattcattcattcatagttcgataaatactggctgtccatcctgtccatgccaggtgactttctcagcatctcacacataggaacatgtgtggccccttataaccaccctatggggtggcaatcaccacccccaccctacagatgaggaaattgaggcacagaagtgcagtaccttgtgcagagtcccacagccagcaatgacagtgcagggggttaggacccaggccacctggctggggtccctgctctca

SEQ ID NO: 144891 - DNA, 424 bp, Homo sapiens
gctagggttacaggcgtgagccactgtgcccgagccacttttccttttaacataaaaacattgatatcctagagagggcactgtattttgggtacatacaggttcagatcacggaagagttgtattctatactttttttcatcattcttagttcagtatgatgtattttataatttcatatgagaaactgtaacaatgggcatgtgtcatccagcaatacctactcataaatcatattaaattttgatccaaacatgggagaaactgaagttttctctgtgtacttggatgctttcagaggcataaaattatattaccatgtgaaagcaagcctacaaaattcctcaggtggtccactctgccactcaaatgagagccagacttacagtgcacactctacaaacggacttccagctcgtcaggg

SEQ ID NO: 144892 - DNA, 185 bp, Homo sapiens
gtcatccttgtcactcataatatgtacatactatcaggaggagtgctgttatcatggtaaaattagcactggaataggaggtcacaaaatgctggctaattagctatgtgactttgagaaatcgtttaactttttttttttttttttttttgagaccctgtctcaaacaaaacaaaacaaaaaca

SEQ ID NO: 144893 - DNA, 669 bp, Homo sapiens
agagaaagaggcaactacattgcctggaggaagcctaaggaacccaggcatccagctgcccacgcctgagtccaagattcttcccaggaacacaaacgtaggagacccacgctcctggaagcaccagcctttatctcttcaccttcaagtcccctttctcaagaatcctctgttctttgccctctaaagtcttggtacatctaggacccaggcatcttgctttccagccacaaagagacagatgaagatgcagaaaggaaatgttctccttatgtttggtctactattgcatttagaagctggtgagtgattttatttaaaatcgggtggtctgagaacctttgaggagttgggagagaaatgtgaccactactggggccagctctgcttctcttccatagagtgaggatcatcattttactcgaatcacttcagcctaacaagcaacaaattccaatgagactagcacctctgccaacactggatccagtgtgatctccagtggagccagcacagccaccaactctgggtccagtgtgacctccagtggggtcagcacagccaccatctcagggtccagcgtgacctccaatggggtcagcatagtcaccaactctgagttccatacaacctccagtgggatcagcacagccaccaactctgagttca

SEQ ID NO: 144894 - DNA, 527 bp, Homo sapiens
agagaaagaggcaactacattgcctggaggaagcctaaggaacccaggcatccagctgcccacgcctgagtccaagattcttcccaggaacacaaacgtaggagacccacgctcctggaagcaccagcctttatctcttcaccttcaagtcccctttctcaagaatcctctgttctttgccctctaaagtcttggtacatctaggacccaggcatcttgctttccagccacaaagagacagatgaagatgcagaaaggaaatgttctccttatgtttggtctactattgcatttagaagctgcaacaaattccaatgagactagcacctctgccaacactggatccagtgtgatctccagtggagccagcacagccaccaactctgggtccagtgtgacctccagtggggtcagcacagccaccatctcagggtccagcgtgacctccaatggggtcagcatagtcaccaactctgagttccatacaacctccagtgggatcagcacagccaccaactctgagttca

SEQ ID NO: 144895 - DNA, 755 bp, Homo sapiens
ggaagtccaagattagggcactgaccgatttggcgtctggtgagggctgtcttcatggtttctagctggctggtcttctcactgtaccctcacaggatagaatgagagcgagctggccctctggcttcttattataagggcactaatcccatttatgagggctccaccctcataacctaatcacctcccaaagtccctaccttcaaatgccatcacgctggaattaggattccaacatatgaattttggagagacacaaacattcaattaattgcatcatccacagtcctaatccagtgttttgttaaccccctcatgcttaaccttctgctggccagcagcctccacagccagctgggtggcttattaagtatgtctattttagaaatattgctacttcaaagcttcgtctccatccctactgacattatttctgctcaagctctcactatctctccttagactagtgctgctagcagtcttgttacaagtcttcctgaatcttaattcttccatgaccatagtttagctttcccaattcatctctctccctcctttccctcactccccctcactttctgtctctcccttcctctctctccccttctctcttttgctctttctctctccctccctctcccaccttttcttcctctttttccacctcctcctgccctccacttgaaaatctctgttgcttctccataatagaataaagtctaaacacttcatacagggtacaggtacgtaagggc

SEQ ID NO: 144896 - DNA, 603 bp, Homo sapiens
cttattttcctgtgtgtttgggatgaacttgacaattttttgcaaaacaattcgctaggattttgagtctttaggttgtattgggaaatatggacatcttagcatattaagtttttagatccatgaacatgagatgtctttccattttttttaggtgttctctaatttcttttaacaatgtttgtaatctctattgtacaagttttgtatgtctgttgttaaatttattttttttgatgctattatgaatggttttcttaattccattttttggattgttcattgctaatgtgtggaaatacaaatgatttttatatattgatcttgtatcctgcaaccttgctgaacttaatagttttaatagttttgttttttaagtggattccttaggattttctatatgtaagatcatgttacctgcaaatagagactgttttgcatttagcttcctgatcttgaatgccttttctttctttttcttgcctaattattctagctagatcctctagtacaatgtcgaatgcaagtggtgagagtaaatatccttgtctttttcctgatcttaggaggaaatatccagtggttcaccattatcatgttaat

SEQ ID NO: 144897 - DNA, 427 bp, Homo sapiens
actagttcctcatagaaactaaacaggagagaacatctagagatcatcaggtcaagttacctctcatgaattgagtgttactgaactcacctactcatgatgtcagggaccaactgcattccatcttcaagtggctggatagatctcaaagatatgggaaagtagcatattgcttgcattctcagaatgcctgcttctgccatattataattctttccttaaaacacacctacgtcttcaagcagagttccctctcaccaaatgactcatgaagaaacaattacagcctggcttacaatagctggccccagctattgtaagtgagctactataggattataactccattcagaggtggccctagcaggcagaacttcaatcactgtctatgttatcagtagaaagatggtctcaggtaagaagttat

SEQ ID NO: 144898 - DNA, 449 bp, Homo sapiens
gggttattgtttctccgaacagccactcagaagagattctttgagttgatgcaaaaatctcaaaacttactgtgtgactttgtggtagaaaagaaaaaatgcaatttggatccagattacaaacttgattgtgaaaaacaaaaacaaaaacagatagtccttatgattttggaatgatacagttaagggtggtgtaggagatcaaataaattatcctttaacatccagactataagattttgacttctacctacccaaagcacttgggtcagtatacgttttagtgcactgatgcatccacttgcccgtgtgaatgcattaaggacaggatatcgtattcttctaagcaaaaagattgcagcatactctacgcacagcactgggtagaaatcccactattccacttcgtagcaatgcgactttaaacatgttttcaaacctgtgtgagc

SEQ ID NO: 144899 - DNA, 351 bp, Homo sapiens
atgagtgcccattctcaggttacccacattctgcatgttgatttagtcatccaaccaatgttggttgaacactgatgagaacaagcaggcctgtgctagaaggtgcctgcagccaggagctggtgagctggtgtccttagggacaccaatggcgagggacccagtgtgtggaaatctgggggacaagcatgccagggagaagagctcacatggggaaggcccggctccacaaatcagtcaggcttgttggggcgggcaggagagcagggtagtggagtcagagggagtgatcccccgaaaggcaggaagaggacatgagagagccttggagatgaccatgaggatgtggtt

SEQ ID NO: 144900 - DNA, 483 bp, Homo sapiens
catgacattgagctaggtcttaaagaaaacgagagtattaagcagtcactgatgtatatcttaagcaccaagaatatcctggcagttagtgctaaataaatgcttacttggttgcttagaagcagctgtggacagcagctcccaccaagcagaatgaaaacggcgaatgaatcctgcaccttcaactgaggtatccagattctctcactgggactgactaggtagttggtgtaccatggagagtgaggaaaagcagggtggagccatggcacacccaggagctgcacagggcaaggggaactcccaaccccagccaggggaggcattaagtgattgtgctaccctgcccaggaaaccatgctctttccatagatctgtgcaaccgtggatctggagataccctcgtgagcccatatcaccaaggccttgagtcccaaacacagagctgtgcagactttcagtggcctcttggtttgtggccag

SEQ ID NO: 144901 - DNA, 342 bp, Homo sapiens
aggacaggagctttgagatagacttttaacagtcatgggcctaattgccttgactttagaaaaggggtcggtgacaatcgctaaactgcaggcttccaagctcacttcttgctctgcaatggtaggttaaaaagaaataggcccatttaaacccacatctcattaaatggcgccggttttcaactggccttggtttacacctggccccctggcatgagatacatgcatttaaaagcttctgactggtggttatcccaagttgggcgagtcagtagtcaggtgaaaaaggaaaaaacctgtctgtaaattgaaaaagagtgtttgtggttggtcctggaagct

SEQ ID NO: 144902 - DNA, 221 bp, Homo sapiens
acaaccgtttggtttgtattcatggaaacaagaagtcttttaaactttaaagggcatatttaaccttttgagcatttattgagtgcttgctatgtatggaacacttgtgttagatgttgaagataaaaattgttctacattgccgtctgtgccctgaaggagtttaatggattttccctattcaccacctgtctattacaacaccaaggttggaattgacc

SEQ ID NO: 144903 - DNA, 378 bp, Homo sapiens
cccaggatctcattcctggggatttactcaagagcaatgaaaaccccactcaaagatctctacaatccacaaaaagaaaaaagacatctacacaagtatttatcacaactctattcataatagtcccacactgtgagcaacccaaatgtctatggaaaaacaaacagatacctttatatcatagaatgctatttggcaatagaaaggaacaaattgtaatatatgcaacaacatgagtagatctcgaaagcattctgtgaagtgaaagaagccaaacacagaagaccacatattatatgattccatttatgtgacattttgaaaaagacaaagctatagggacagaagtcaaagtaatggttgtagaggtaggggaag

SEQ ID NO: 144904 - DNA, 299 bp, Homo sapiens
tttttttccttgagtaaggcagagtagaatttaatgagtgacaagaaagctctcaacagcgagaggggacccgaaggtgggttgccagccacgaggctgagtctagaggtttttatgggcttgaaatgggggaggtacatgctgattggtctgtgggtatgcttgaaaaagcaccatttagaaataggcacgatagtgtagaggaccaactggggaagggcaggtatatgtaaggtaggtgaaggataaggaccaatcaggagagagcatgccaaacaggaatgagagctctctagtcc

SEQ ID NO: 144905 - DNA, 618 bp, Homo sapiens
gtggtcggatcacttgaggtcaggagacctcaagtcagagaccagcctggccaacgtggtgaaattccatctctacgaaaaatacaaaaattagccgagcatggtggtgtgcctataatcccagctactcgggaggctgaggcaggagaattgattgaacctgggagacagagactgcagtgagccgagatccgcggcactgcactgggtgacagcgagacacaaaacaacacgaactccccccccaccccccagcacaactgtgaagaaatgtaggagtcatgtccatttttcagatcagaaatgaaggcattgtaatacctaactgccttgtatgatgacaaggacctgtttcccactgaggtcctccctggtttgcatttttaaagcattttaaattctcttggtgcattggcccagtggagcctcagcagtaggacatgcttttgttgaaggtgtaaggtttattgtgctgttgaaaactattgtcttcatacttaaaggttttgcctgtggctgactctcctgttctttttcaggagatagatggttcaataaatgtgggcctgagtgcagtggctcatgcctgtaatcccagcactttgggaggcagaggca

SEQ ID NO: 144906 - DNA, 860 bp, Homo sapiens
aagtacagtgtggaatcagtaactttctcacgctggtatggtatcatgttcttgctaaccttgtttgagtattcaccattgtttgctatcccatggtggcagtataactaatgatattttgcaaaaataggagagaactttcagatcatgaaatatacaggaagttgtttacatattacaaggaaggcaatattttcaccaaaacaatagcttgggcattttagagtattttagtatgcctcaggcactgacattttagccaccttctaatgaatgggcttgaagcagaactgcttctactatcaggtaatggttgaggggggatgtctattacacatgtactttgttttgtgtaaagtatgttctggaaagttacattcttttggtgagtacatgtaagtatttgagggatattcatgatttaaggaggcctgaaatgaatctttttgattagggaaagaaatattttgcagtgtaaatgattaaccatttcttccagtttacctgtttggtgagttcataccataaatgttacgatgtttggttttataaaagagtacctgtaagtttttagtttctgtgtggaagattttttcagagagaatacagatagccttcttgtattagaatttgtcatatgtggtttgaaactgttcattggagctgaggaattttgttacgtttgttttaactagatatgattaacaaaatgaccatagcaagagcatgcattgaaatgagagaagttacgtgtgtttgtgtctagtttgggtaatatgattcattcttaagaattcttcaaactttattataatttttggaaataacaagtttgtcagttgattaaaccagtgtcttgt

SEQ ID NO: 144907 - DNA, 165 bp, Homo sapiens
acagtcccgttggaggggagtgggaaccggtcacaactaggaacaatgccaccatcccttccagaagtggctccaaacctcctcctctttgcccaagccttcagcacacctccaccctcactgaaccccaacagcccctgctgggataaaactcatcaatgacag

SEQ ID NO: 144908 - DNA, 471 bp, Homo sapiens
gtcaaggttacaacatggactcgagttcacatcccagctctgttatttacaggccgtgtgggtttgggtctagaacttaactgctctgggccccagtttcctcacctgtaaagttggggataaggtatccatgtaggagcattttcaatgcattttcattagtcaatgaatcaaaggactcctcgaatccaacagaggagttaatgagttaaaataggtaaagtgcctagaagagtatttggcacatggtaaatagaaatgtgagctgtgattattatttcttagtgggagaactctggaatatattctagaagtgcaagtaatttttttaaaaaagtaaccctttctgtgtcaaccaacagtagacagtgacattgtgttgaaaacttggggaaaaatctggcattgtctcttaccgtgccgacaggccccttattcagcaaatgtgagctctccctaccccatgaccac

SEQ ID NO: 144909 - DNA, 428 bp, Homo sapiens
tagaagtaatatactgagagtaagggatgttatagccagacatttgagaaagtatagaacattatgacagctggtatggagacaagaagaaagggctgagtaaggaaatgtaacaggattactaggttgtattgacctgtgtatctgggttgttttcagcagcagaacagtccaggcgtaggcatgaccatttggtaatggtagtctgcctatgtatggttccttgcaagtcttcactgtggatgacattgagtaagacttgctcttgcaaccgaacatagactctggttaacactacaatgtcagcattgcattaagaagatagattgaacttccttccactttctctgtcactgctagacttggcagaagattttgactacagcatctttaccttgtagagaactgcacttagaagcaaagttgaa

SEQ ID NO: 144910 - DNA, 451 bp, Homo sapiens
agcactccaactacagtggcatcccccacaactccaattcacctaggtcctgtcatctatcatctctaattcttcacccccaaaatgatcgtcccattacttgccacagtctcccacctcttcctaacccttaagcctttcctctggttctctaaaggaagagctttatctcaattttattcccaaactgacttcactaaacgtgagctctcctgaggatactacttcccatctctttcaagtgaaagtattttcctgtcataccctagaccctaagagcaggacatgagtccccttcttcctcttccaacactacttcaaacaagttctcaatcctcatcccaaaactgtaactataggagcttaagacaccaccgtcctcgtcgctatattctagtgatttctgttcactccctctcattcagaggtcactctctctcatcccccatgc

SEQ ID NO: 144911 - DNA, 341 bp, Homo sapiens
ttttgcagccaattcctcctcagaggcacatcaggaaagcatcaatgttgcttagattctgatacttcatgggcaccttcctaaagttctcctatagtcataatggctccccacacaatacctgttccaaaatactccaggcatgcttctcatgctggcttcaaggtaaatggaaattaaaatagtccagcaaaagccatccctgccttcatcaacagcagcagctctaggatcacaaccaagacctttctgggccttaagagaatggcttgtcttctgtcaacatcaggcctagcaagtcactgaaggagctattcaacgagtggcacattggctgccaa

SEQ ID NO: 144912 - DNA, 349 bp, Homo sapiens
aaataggccaggaaatcataagcaaaagtacagactgtagggggtgactgtggggcagcaagaccagccaggcatctgtcaccaggtccaggtcagagctcgcggtggcttggaccagggctgtggcggtcatgtggttatgagaagggcatgtttcgggagtagagtcgatggattatatgtgctgtgctaggatgaggtggggacattgaacaggtgagtgaatgatggcagacctttcagcaatgtgacaaaggccataggaaaatgggtcagagagggcagaacctgagtgtggtttggtcatgctgaatttgagatgtgtattagacatctgagtaggactctg

SEQ ID NO: 144913 - DNA, 272 bp, Homo sapiens
acgaaatgtctgaaatgtgaatagacttttatatgcttctatcccaaaggattaaaataaaacaaaatgaagtgtactggttgaatagaatattatgtacatttttctttatcagaagattttttcatactccttttgaatcagcaattttgaatgctaaatataaattcttgactaagaaatcattccctacagtaataataaacagtttggttagtcgtccaacatgtatttattgagtgattattgagtgcttgatactattctaggaa

SEQ ID NO: 144914 - DNA, 422 bp, Homo sapiens
ctctagtgttatgtgtgtgtctcaatctttgattccaatatctgaagaatcgaaaatgtaaattaaatgaaggatgccttaggatcttcaaaatactccactgcaattcctcccacttaaattcccaggtaatgtaattctgtgctggaaggcctacctgatacctcctctgtgaatgaggacagaggctctgaagagaccaagcccagcccatcaggtccaaagcttctggtgctcctaatggaccaaaaggagtggggtgagttctcctgaagaagtcaaatgtcctctctggaaaccaggagaggactcttggtatagcaccaggatgccaggcaagactctgctctccagaactaagaaggggttggctgcagtggctcacacctgaaatcccaacactttgggaggccaaggcacac

SEQ ID NO: 144915 - DNA, 822 bp, Homo sapiens
cgtggggcacatggggcctggggagttggctggattaggaactggtgactttggccagagagttaagggtggacagggtcatggaggcagagtgaggagagagacagcggctttcctgcagttggtcaggaaggccagagagccaaggacaacgctggggccctggaagcctcctgagagagttgtccttttcaaagatcaggtcgagttgaggcctttcagtgccgatggggacccactgaagtctctggggaggtaggagagggtgcaattgggggattgggaaccaacttcaagcctccagggcacgggccggcgacaatccgacaatccagcagagaaggatcggtccagaggatgggtgtggctgtggtgggagccgagcaactgagagtacctccctttttctctctggggcctggagagggctccctggctcagagcagggcatgttctggggaggaggcctttcatggagggggctccagagccaggctcaatatggacccgagctctgccactcgctgtccagagctttcccactgtccttgaccactgcatgtgtcagcagaggagatcacggggtgggagtggggtctttctggaaaggctctggcccttgggtgctccagagcccacttcctgtctaccctctgactttcagcccttgctgacctcaaagccaaccccaaatgcattcttgatccttggtcacagtggtggcagtgtaggatacacaggttaggagcctttttgaaagcaccccctgtgcttgggctgggcatggtggctcacgcctgtaatcccaacactttgggaggc

SEQ ID NO: 144916 - DNA, 336 bp, Homo sapiens
tgctactgtttaaactttcatgtaaaaatgcagtttccttgctgcctcggtggtcttggaaagtggcccaaagttgccatcttcagaagatatggttatgattcttcctttgctgtgacagagcggagtggtggagagagtccatgcagggtggttgctccaggttaagggtctggaataatgtgggtcctgttcagctattgctaaggttccccttcacatttcccctgtgtgatgtttctggtcatagctttaatgttagtttaactagactttcgatttaattataactgttaggataaagtcagatgtcagctcacttggctgcatgctgag

SEQ ID NO: 144917 - DNA, 192 bp, Homo sapiens
taattaaactagaaatgttccaaattaactataattcaccttaatataatcaagttaccataattaagattttgctgtcctactcaggtaattgaagactttgatcttggttaaaagaacgtaagatagcctgagcacggtagctcatgcctgtaatcccaacactttgggaggactgcctgagtttaggag

SEQ ID NO: 144918 - DNA, 326 bp, Homo sapiens
gtgcaactgtcgcttcccaaaaggaacctcattgttgaacttacgaaaaatcagttggcaatatacagtgtgggaactgtactgtgatcattggctaaccaagatgggtgacagtttatgatttcaaagactcaaaggcggcttgagtcctacaatgtcctactcataaaaatggaaagcatggcagcctcaggttgttacagagtactctactccaaagtaaaagttattctctgagaaagtgcttactgccttttctgttctctagtttgcttgtttaaacatttactccacaaaattgctcaaacttacccatctttgaatat

SEQ ID NO: 144919 - DNA, 606 bp, Homo sapiens
caggcttgcagccctcctcaggtgtgcacgatctggcccaggtatcacctcaggctagctggatgaatcccaagactgggcctttgtcttctgttacaccaaagacctttagggaagtcctctaaggtacacctggaaggaagtgtagaaccttgggtgttccttctgtttacgtctggctccagggagtcccgaggcatcggagcagctgcctctcccaacccatggatactactgctgctggcatagccatttgtgctgggtcatgcctgaggctgcccagaggccctgccctggggcagctcctgatagccctcgaggcggtgtggttgagtgggaagaacacaggccttctagtcagatctgtgctttcagtctccacgcagaaactgcagggtcccggcaaggaacccaagctgcctgcactcagcttcctcatctctaaaataggagtcataattggctcccagaggtgtcagtgagagaatgtctgccaggcttctggtccccagcagggtttcactaaacaaatggtagctcctggccagccccgctccaggcaggatggagtaaaaagcccctaaaatgatatgacctccttgcatc

SEQ ID NO: 144920 - DNA, 385 bp, Homo sapiens
ttggatactgatctaagaacctaacatgattatcacaaagtaggtgtttaattaaatctgctgaattaaatgtagagaagaatttaacccagtgaatgttaatgaggcatcttgtgctatagagaaataaatgtaattacataaagtagggagtaattctaaggaaatacataagcaagtgcctgatagttttgagccattttgtatctttggctaacttgtcccttcatctcctgctttctggtctggcccttgtgtatggttctgcttttgaagtatgatgtaactcttagaaatcttttgctgacttccatagcatactggggaggggaagaaaataagaattaatattggaactttgtttacggtcgttggtttttttggg

SEQ ID NO: 144921 - DNA, 370 bp, Homo sapiens
gctctgaaagtcctcctatcccaggaccccatgcttccccaaaccctgaaaagatcagcctcttgcttgatttggggagactacccttgcgaagtataccaatgaattcagcttcttgctttcgatattgaatgatgccttcttctttgacacatgtgacaaaggccaggataaggttagccaaggggagcagaagcaaggcagagggtctttccagagaagcatcctgaaaaagtgacttggaggctccatgatgtaggaagcaaaggaggtgactaggcaaggagcagggaatatgacatccaaggctgctgtgagcactggccaaagagcacctactgtataccagcccttatcccagagctgtgac

SEQ ID NO: 144922 - DNA, 330 bp, Homo sapiens
tcttgcgctgtaagagttctctatatattaagggcatcctgttgttgctatatgcggtgtaaataagttctttcaacttattattgctgtacgtgtctaacttcaatccctgggagaagagacagatttgaatcctccacggcacatagctcagtctctcttctgcggcagctgcccaacatatatgccaagatgagcgaattatttttgtccgagctactttatgaaactcattctgccccactccagaaatggaagggatctgtcaaacgttcagactccccttgctcacagcagcatcaacattgtctccttgtttccttcattcat

SEQ ID NO: 144923 - DNA, 191 bp, Homo sapiens
tgcacagaataataaatgaatccatgtagaaatgacctggaacaaaacatcttggtccattttgcctattgatttagtgataactatacatataattttatcttgctccatggcatttttataacataacatcattcaacataaatgtcctgttactattgacgtcacacaataaacacattaacagttct

SEQ ID NO: 144924 - DNA, 289 bp, Homo sapiens
aagagtagtacaaagaaagaaagaaagaaattgaataagaggggaccagtggaagtggacatctaaagggaccctcagaaggaaagaggtgtttacctaagtggcataaaggtgacatagagtaatgggctagccacagtgctgattcagggctgtctccccaccactactcacctgggctctctgtgcctgaatttccatggccggtcagcctcctctgggttgacctccagtgatctctcttgacacccccgcccacacaccaacccttccttctttctctttcttt

SEQ ID NO: 144925 - DNA, 307 bp, Homo sapiens
ttgaggagcgtggatatagttaagcccttcatcttgaggaatataatctatgtttaaaaaaccaaagctagtggctgagcacggtgctgggctacggaatatttcactgctacatggagtactcccgactgcgtggtgaggccggctctgatgtctctttggtggacctcggctttcagacgggagtactccatgtagcagtctaaaatatttcctgtctggccccttacagaaagtttgctaactcctggcatacattatatattagtgaatattcttatttgaaagcatctcattgcttctgcat

SEQ ID NO: 144926 - DNA, 144 bp, Homo sapiens
aattcagtgatcatatgacttaacagagcacctgatggcagtgggagccaagggcagtatccaaccctgtgtgcttctgttgctgttaggagaggagctggaagtcaggagaggagctggaagtcaggagggaagcacccagtg

SEQ ID NO: 144927 - DNA, 866 bp, Homo sapiens
tctccttctttcctcattttcttggctgcggccaagccttcctcagacaagggccctggccacctcccaggagggtgacacaggcctcagcaatccgcccgctgccagggtgggggacgcaggctgccacccgccccagcaaggggtggccggcttcccgggcctccctggccccgaggcccgcacccccttccgctttcccagcggcatgtagagtcctgccctttccctacatcgcgggggcagggcgggggccgggagctgggtggtctgccatgggggtggccacagcagcagcagcagtggcgtgggggcagagccggggtcccgagccagggcgggggctgcaggtgatttcctggggcgagtgtgagcagagctccccgccgctggggggctgcggttggcagggggcccagggcgtgttggcttcacaccctcctccctgggcgcctgcgtcaggaaggagctgggttggggggggctggagggggtgctgggcggagacactgggctccccagggttgcttccctgcctggcaccgagtcatgcccgcccattagccttccccagggaggaagttgcagggcgggtggtggtggggactccagctgctctcgggaagccaccccgggcccttcctgcaaaggctgtcttggggcaggggggtagggggccgggcaggctgggccgcagggtgggggcttcaccctgccctcctccctgcctccctccccatgggccccaagcagagaaggttacgccagctactgccagtggagaggagagccgggagggagagctgggaggcggtcggttctgagtcatcccagcctatgtcacttctcagaaacctccgccaccc

SEQ ID NO: 144928 - DNA, 196 bp, Homo sapiens
cccccttaaaattgggagagtccacagtgaatgagaggatgagttatggatgttagggcttaagcatggttgtttaggagacaatagagagccagtcctgttaatattacaggtttaggctaagaccagataagtttgggtaaataaaatagagccaaatagccataaagcttaaatgtgagactataaggtttgg

SEQ ID NO: 144929 - DNA, 245 bp, Homo sapiens
aatgaggcccagatggaagcgggaattagactgatctgagttgatcagatgatcaattgatcatctcccaaaccaggctccatcatttaagataggattgctttggtttattcacctgcaaaaatgaggatctttcaaggactttaaaggatgttgggaggagtaagttaaggtgtgtaattatggtgggtactcccagagcggtagctgtgttgagttgtgttgattgagttgcttgagtctca

SEQ ID NO: 144930 - DNA, 403 bp, Homo sapiens
tttgatgcagtatagtttcctggccatttccaatagaaaattccttgcccctttcaggctactgtagttgagatacaagacttgagatatttttctaagagaaaacaaaacaaacaaagcagccaagagaaacaatatcagccatgtaataaaatacccaatgtactttatttcattatcctaggcaaataaaaaaaaaaccactatgaattatacagtatacaaatatgttttcttcggaaaacactgaaaaacagattcatgtggaaagaaattactttattcctaccactgtctttttcagacacactcaaaattcataaaattcacaaaatctgaagctcataaatcaaaagaaactgttcatacatcatgaacactatactaactttttaaaaagtat

SEQ ID NO: 144931 - DNA, 419 bp, Homo sapiens
ttctcttttttggaagcatatatactgcctttgtattctgtattactaggatgattaggttaatgtgtgtttaaatgcctgttccatggtggacatcctgtagatgttcattatgtctgaaatattcttttgagtaaaaatggatgagagttgtgtcatcagatgttttcagattataggttggacaaggtcattggcaatgtcctttttatcacagaaacaccatgtttctacctccagcctgtgtgtgcctccttggttctttttcacttacaagctttgtaacctttctgtgcttcaggtttctcatttgtaaaatagggaataataatagtccctatctcatcagaattttgtgaagatcaaatgagttaataaatgtacagcgtttagaatagtgctcagtaaactttaggctt

SEQ ID NO: 144932 - DNA, 557 bp, Homo sapiens
accctctcccccactgtagtattttgaagcaaatctgaaatgtaccattccatctgttaccttgttcatgtttataaaacacaataacacctttttaaaacataaagccattatcagtgtacttagcacttcattttaccctctactatccagtcagcatttacattttcctagttgtctctttcctcttacccagtttgtccaaatcagtatccaaacaatctacacacgttatatttggttgatgtctcttagatctctcttaatctttttctcttgctctttattttgttccctgtattttacttgaacaagtcatttgtacggttcacgttttctacaaccaggattttgctttttccatctctggtatcctttaataagcaggtatttagacctgcagacttgttcaggtcaggttcgattttttggcaagagaacttaatgggggattactgtgtttttcacattgtatcataccaggagttagatagcatcttgcctctctttgtggaccttttatgtacaagtagcaccgtagggtaacaattgaccag

SEQ ID NO: 144933 - DNA, 295 bp, Homo sapiens
aaatccctcctttcatttgtaagatgggagaagcattgttcctgggtatgtaggggatcagaggattttaaaggcctgcctttaagccagagtgagaaagccaagggcttggcttcaggtactttcaggacttggacctggagttttcactcctcctggggacacacctgggatattcttccctttaaggagaggctaaggtggtgccgaccaaagtggttcctctctctgatctgagcagtttggaagagggtaacagacagaccaaagtgggtcaaccatagagcccaggcag

SEQ ID NO: 144934 - DNA, 842 bp, Homo sapiens
cctggctaatatggtgaaacgccagctctactaaaaatacaaaaaattagccaggcgtggtggcaggcgcctgtagtcccagctactcgggaggctaaggcaggagaatggcgtgaaaccgggaggcagaggttgcagtgagccaagatcgcaccactgcactccagtctgggcgacagagcgagactctgtctcaaaacaaaacaaaacaaaaagctaataatttatcaaatagtaagttctgtgtcaggtagtgtgctgagtgtttaaatagaagttaggaaataaaaatagtttctattctcaggaagtttatagactagtcagtaaaaaaaaatcagtaattaaaactcagtaaagtaaaatttttgtttatggttataaaagaatatcagaccaaatctctgacgagactactgtaaaaactgtttaaaatacaaaaataaatatctttgaaggcattggggactaaccaaggcagccaagtcaaatttggcaggagccaaaattatagagaaaaattcaattgagttgagcccatatttacccctgcttttttcccttagggcggtggctaactcttcacatggggtagaggccagacaaagcagtggtccagagtttgtttcagaatcactgagtagcaggactaaaatttgaattgagggattctaaggcagccaagatgttgagggtccaagatcctaggaagaagacaacctcaagagtaatgaggccgggcgcggtggctcccgcctgtaatcccagcactttgagaggccgaggcaggcggatcatgaggtcaggagatcgagaccatcctggctaacatggtgaaaccc

SEQ ID NO: 144935 - DNA, 286 bp, Homo sapiens
aaaagaaggtttgaggcacagtagggtgggcactgtagataaatgttaccatttaggctttggcttaattttatttccagatggctgagaaaagggagacactggatcagggcatgaggaacaggttccaaatgtcttcccccaaaacactgggagatgcagagttgacaataataggctggtacttacagacatgagcactgttcttagcattttacattggtcaactcatttaatccacatgcagccacacacagtaatattattatctttattttacagacga

SEQ ID NO: 144936 - DNA, 161 bp, Homo sapiens
cccaccagctaagagagaagaggacaggacagatgaggcccgagccgtctgagtccaggacgcaggcacaccgtcgtcagggctgcagaagcagcgatgtctggatctagggtccagtgatgatagaccagccagccttgtgtcaggaggcccccactcac

SEQ ID NO: 144937 - DNA, 473 bp, Homo sapiens
tagaaagctcgtctcagagtttcatatgatcaaaaccttatgaaatctcattattacagatggaaatctttttaaatcagagaaagagatgataaaatcaaattttcagagactactagaatatttcttctaagccctgacttcattatttcttcctgctacgcttttaccattaaagttattctttttattttattaaatttttgtttttgtttttgtagagacagggtttcactctgttgcccaggctggtcttgaactcctgggctcaagcaatcttctcgccttggcctcccaaagtgctgggattacagaagtataaatatctaaggatttaagcttatttatatctggtacataaaaatagcatactcattactgaaatgctctgtcaagataccagtatatgtccggttaacataatagtatctctctaaagagtccttttctttttcctcctcccaaacaccccc

SEQ ID NO: 144938 - DNA, 237 bp, Homo sapiens
cctgactctgaactcggagaataatttgtcgttgagaatttaaaggagagacactgaacaacataatgaggtcctgtgttttcaaaaagcaagttttcaaatggatgtgtttcacattttgcctgatgaaagccagggacatagcattacactcttgctctgtaaagttaattattcaaaaggccagagtgacatagtccaaagaagtaacctaaggacagtctcaaaggtggaaaa

SEQ ID NO: 144939 - DNA, 353 bp, Homo sapiens
tgccgctggcctctctccatccactgcagtcacactggccttcctgctggtctggcctcagcaccttggttcttgctgttcctcctgcccaggatgctttctctcttctttcagtgctctgcccagacttggcttccccagagccgccttctctgtccaccctcactagaacagccttcttgccatcttggactccttaccctgcttgatttaccttctgaacatttccctatgtgaataaggctataattttctttgtttacttggtgtctgcctctctactagcaaggaagctctcctcttgttctctgctctgcttagaacagcactgggcagagagccagagtccattg

SEQ ID NO: 144940 - DNA, 293 bp, Homo sapiens
cttcagctagaatatattcagacgctagtagagatatgagacaaaagtagattttctgatcagatttgaggttaatttagcaaagaaagaagtgagagcagaggagcatcaagacaaaagaagagtctgtcaggtacatatagcccaaatagccctcagattcatccatataggaacctgtaagtgaaagtcttaatcataactgcagccatgtcactcatgcagaaagatgttatagagagtattatggccaggccaggcatggtggctcacacctgtactcccagcacttt

SEQ ID NO: 144941 - DNA, 625 bp, Homo sapiens
gcctgccttggcctcccaaagtgctgggattacaggcatgagccaccttgcccagccaggggcactttttaatgtcattgataattaaaagttggagataccatgcaaactgtacacctgacaaagggttactacccagaacatatagcgaacttaaacaactcgacagcaaaaaaaacaagtaacccaattttaaaatgggcaaaataccttaatagacatttcgcaaaagaagacattcaaatggccgagttatatgaaaaaatgctcaacatcactaatcttcagggaaatgcaaatcaccacatgaggtatcacctccagttaggatgtctataatcaggctgggtgcagtggctcatgcctataatcccagcactttggcaggccgaggtgggcagatcacatgaggccgggagttcaagactagcctggccaacatggtaaaaccgtctctactaaaaatacaaaaattagctgggtgtggtagcgggttcctgtaatcccagctacttgggaggctcaggcaggagaattgcttgaacctgggaggcagaggttgcagtaagccaagatcgcaccactgcactccagcctgggtgacaaaagcaagactcttgtctta

SEQ ID NO: 144942 - DNA, 846 bp, Homo sapiens
tacggcagcggcatgagaccaccacccaactccctcggcccgccatgcccgggattaacatgggcccgggagctggcagaccctggcccaatcctaacagtgctaactcaattccatacccccaccccaatcaacctctatgctttcttcttaaaaaaaaaaacaacagggaaaacagaaaagaaaaaaaacaaaaaaaaaaaaacactgttgttgtgggcgcccccttgggcccccccgagagaagagccttctcaagaaccttgcgccggtcggggccgcgcgcgcgaggcaccccaagtaagcggtaaaaacgcaaaacccgcgtgggcccaacagcaccgtgcttcacccagaggcaacacccccgcgggtcacaccagggcacaactacgccgcgcgtgtgaggaactctcacccaccgtagaatcaaaaaaaaaacaccccccgcgcgggcgcagcacaactcacgatccggtctcctcgtggcacacacccaattctccccactatgcgagcaacttcctcgagaagcggctcctattacccggggacctctctatatcctcaaccaggggtgactccccacaggacgacgcctgctaatctaatccaacaaccaacctcgccccaagcccccgggggacccccaccgcggacacgccacgccacacaacaccgctcaatacccacccacacggtgcgccaccacaaggggagacacgcaccaacccacaagcgccccacccgcaaacaccacaacaccaccacgaccgcgccaacacgccacacacacaccgaccgaggaaccaaacaccaggctcgccgtggcccaccacacgcagc

SEQ ID NO: 144943 - DNA, 298 bp, Homo sapiens
aggcctgggatgttgctaaagaccctacaatgcacaggacagccttcataatggagaactaactggtccaaaatatcaatagtgcgaaggtgagaaatcttgctctagaggagctggttccaagatgtgaggactctggggacaacaggggttaaaagaacaatcaattcatccacctctccacttataatttttttttttttccaagacggagtttcgttcttattgcccaggctggagtgcaatggtgtgatctcggctcattgcaacctctgcctcctgggttcaagcaattctc

SEQ ID NO: 144944 - DNA, 488 bp, Homo sapiens
aggaggtggcggctgaggacgggtgatggcactggctggcctggtggcagctggcacaggaatgcatgggcttacgggagttcactgggtgggcagagggatcggccacaccagcacagtaacagctgcacaagcaagggtctgagacacgccgcgaggaaggggtgacggtgtagctgtgctcaccacaccatgaagcccctgaaagcaagtcttatttgtgaggtccacggcgattcttctgcctgctgtatttgtgcatttctatgaaagccgcgtggctcacagtgtgtctcctttccctgcatttctacgaaagcccgcgtggctcacagtgtgtctcctttccctgcatttctacaaaagcccgcatggctcagtgtgtctcctttccctgcatttctatgaaagccgtgtggctcacagtgtgtctcctttccctgcatttctacgaaagcccgcgtggctcacagtgtgtctcctttccc

SEQ ID NO: 144945 - DNA, 581 bp, Homo sapiens
tgggcccttccctgcccatgtggggtgcttcctgcccgcggctttttttgagtcccacgaggtgcatttttcagcaccatgtaaatgttgcattttgaaatggtcacggaggccactgggtagtagtaaaggtccttgttggccccgagctctgaacacctttggttcccgcctctcaatagaggggttggggtgttggagaatcaggcccacccttttcatgggcagctggcccctttctggccccagaccgcacgtcagaggccacggtcccggctctccaatgtccatgtgcaagggcgggaccctgtggctgtgttgtcgaccccacagtgtgacctgaagtcctgggctgggggctcccagcacgccgagggacaggtgtgggggcactggctgtgactgatgtccggcacagggtgtggtgcaggtcctgggactgttggctctgctgggctcaccgttgtgggcaaggttatagagctgggcgtcccgcctgggccgcgggcgacatgcgccctagatgccgtggggctcttgggtcatggccatgtagcaggagggacctgggcgggagtctt

SEQ ID NO: 144946 - DNA, 189 bp, Homo sapiens
cagactcgcacagtcatttcacagataagaaactgagaccagaaaggggaaatgatctgaggctgggactagcctctagtaaagtcaacccgataagtgacctttagtgagccctgacccaggccatgcagcgcctggtgctaagtgacacacggaccacgggatggggggtcattgtggctatgtccc

SEQ ID NO: 144947 - DNA, 152 bp, Homo sapiens
ctacaccatataaacaagaagcagcctgctccattcccttctaaagtggtagctcctgtggcactgaccacttcatacaaacaagaagtacaggtgtggcattagctacaccacacaaaggagaagcagcctgcccccttctctttcaacaa

SEQ ID NO: 144948 - DNA, 332 bp, Homo sapiens
ctgatcctaacaccactcatgctggccctattggaaattggatgtgcttgctgctgctatccagaatggattagccacagtccccactttctctcattagttcacacttaaatgtggggttgatgtgtttgttgatggagcctgaattatgtgtctgtacactagctgcaaatgaagctggtaaatatataatgggaagcaggttctgctttataaattgtggggatttctcaaaaataggaagagaaattcagatgctgggcttgaataccaaccagagagaacatataagtacagttgagagtcattggtataaggattccattcgtttg

SEQ ID NO: 144949 - DNA, 683 bp, Homo sapiens
atgcaaggccttaaggctggggatttcctaagcctgtcccacatgctcacccttggggctgcggcttccctgagagctgggctctgggaggaggccagataggcaggaaactagagcccagattctttccactgccattcctgggctggggctgcactcaggtgcaggtgttgccaggaacacaggtgagtgcattggactttcacagcctgaggccctatcctcagtggccagacagggccaggatctagttgatgctctgacctctggcagaacgggagctccacaaatgttggctgcatgagagcaattgagtgcatgtttgggggccggggaaggcagagtttctcctgggtccctctagaaagtcagtgagaagcttgtactctcagtgatcattgctgtagttacgagataagcttctctgaacatgcagagcagtggtaactatgaggaggcacagtctctcctgagcatgactctggctgttggtgtggctttgctgcagctgccgtgtgccattgatgatcctgctcctcttccttcgggaaagtaagagggagagaacagtctgagtgggggtgaaagtcagtgagctgcagtgtggggtgggaggaaggaggtgcagaggattacaggccatcttccctgattgctcctcatccagcaggaagaaggaatga

SEQ ID NO: 144950 - DNA, 467 bp, Homo sapiens
tagtgccactgcactccagcctgggtggcagagtgagactgtctttaaaaaaaaaaaaaaaaaaaaaaaagactacaattaacaaaaagttagttcaggtcagagattgctgccaaacaattcaccaaaacaacttgatttccagggctttttggattttggaactggggactcaaagtcaagtgcttcttacggcatttaatatggactgcacactgttttatcccattaactcagctcgtgttcatgcaagccctacaaagctggaggaatcatcattgttcccatttcacagatgaggaaaacagaggcgtaaaccgttgagtcatctgtccaaagttactggttttgtaacagctggaacctcagtatttaacagttgaggaaaatagtggcagaaaacctgagtcacaagcccgaggcaattcatctacatagtagtggactcaggattccaagccagataa

SEQ ID NO: 144951 - DNA, 453 bp, Homo sapiens
ggcacaatcatggctcactgcagccttgaactcctgggctcaagcaatcatcctgattgagcccaggagcctcccaagtagccgggactacgggcacctgccaccacacccagctaattaaaaaaatttttttgtaaagacaaggtatcactatattgcccaggctggtctgaaactcctgggctcaactgatcttcccgcctcggtctcccaaagagctgagattacaggcatgagcgaccatgcctggtggtttctaaacagcaggatgttctcatcccaatatgggtggttagcagagaactggagagagctgagtttcaagtccttactcctctacctgttagctgtgtaagcttggcccaagtgacttctcactttttctcctctgcaaaatgggactttctgcacacctcaggctgtagtgaggattaaatgcatcatatgtggaaa

SEQ ID NO: 144952 - DNA, 718 bp, Homo sapiens
ggacgcgtgggtcgacccacgcgtccgagtccccagagtagctgggataacaggcgcgcgccaccccgccctgctaatttttatatttttagtagagacgggatttcaccatgttggccatgatggtcttgatctcttgacctcatgatccgcccgcctcggcctgtaatcctgctgggatgacgagcgtaagccaccatgcccagctgggttttatttattttggtttttttcctgaccccttaactagaaataagctccacgagagcgggatcttttgtcttctgtgcactacttgtcctcggttcttagaacagaacctgagagaacctgatcgcaaatatttttggaatgaatgaatgaatgggttcaccagggcaccatgggaaactgagtccgcaacctagaagccatgaaagacagtccacttccaagcttccctgggtgacctcgcagggcatgctgggaaatgaaatttgcggtgaaaaggtcaggaccacgatcctagggcacgctgggaaatgtagcccacagggccacacccctaaaagcacagtggggtgcaaggcagggccccaaggcatttagggctcggggcaagagaaatccacactccactccctaatggtaatccctgagccacaccgagtaaaggaacccaagacacagtgtccacagggacagggctctcagagctttcactggcccgcgcttctcc

SEQ ID NO: 144953 - DNA, 273 bp, Homo sapiens
  misc_feature (20)..(20): n is a, c, g, or t
gagacagagtcttgctcttncacccaggctggagtgcagtggcacgatcttggctgcaggttcaagggttcaagtgattctcctgcctcaccctcctgagtagatgggattataggtatatgccacctcgtccggctaatttttgtattatgtatggggtaatgaaagtcttcaaagaaagggatcacgagttactgccattctctgtaattttaagtcttcagcatgtccaagaattttgtttgcacaggaattgcttatttctatgtgagt

SEQ ID NO: 144954 - DNA, 503 bp, Homo sapiens
gtctttctctggcctttactctttgaggtgacaagctggtggagaaaccatgagttctggggccgggagaacggtcacagcacggccttgacgggcaacctgggggagtcacaacagtcatgtatggtggtgtcgccagagggcatttaagaattccaggtgatcatgtaatgacctgcttagcgcagtgtctgacacggtgaacccgccactagtcaccatcgtcttcactgacagagtcttgctctgactagcacaggacttacactttctataaacgcacaaatgggggcatgcatgagccaggaaagaaaccgcgtaacatcagaataaggcattcctcgacaatgaatcaatctgtgagcagaaatttatttttcccaggttgtgacactgaattggaaatacaaagaaaacaacagatcacagaatataccacaaggatctcctaactaaatgccattaagcttttaaagtccattaacatttctaggaacaaaata

SEQ ID NO: 144955 - DNA, 421 bp, Homo sapiens
tataaatcaatccttcattataaacttcaaaacagctcttatttatcaccatcattctcagcaatatttattacagtgcttagttgactgaacaacctcctccttgctttacttgcaagtaaacatgattgtgtagtgttcatttcttccgttcacattcttaccctgttgcttttgccatccagtgcatacatgtaaaggacatgaactacctgaaggcctctctgaatggtctcctttttaaccaacttgttctccttatgaattaatcttagagggaaggagtcaggaagccgtagaatagagtagtaattgggttacccagtaagcctttccctctattagcaataacactcccaaccccagcagcgttggcttctttaggtttcaagctgactttgggaagacagagatcaatctg

SEQ ID NO: 144956 - DNA, 955 bp, Homo sapiens
ctcagtcaagaggcggggaggagaggaggaaaaagcgctgagtgagggcgggcgggcgggcgggagggagggagtggaggagccggggaggggctccttaaagaaacgcttctgtcgctcgcctgctcgcttttcgctcggcattgcggccagccagccgggcactcggggggcacgcgcggccaccgctagagctctgcccccaccccacccgccagcaggtctggggtggggacccaggtgggggctcctgcagccactgcccggtgcggaccgcacggagcgacccactcctcccagcaccgaggaagaagcaacggagccctcagcaggcgaccggcctccccgcccctgaccacccgcttcccggctgcctttgtggccgcagcttctcgccgccgagccgagggccggcgggggcgcggcgcgcacggccgagcgatgcccagctcgctgttcgcagacctggagcgcaacggcagcggcggcggcggcggcggcagcagcggagggggagagaccctggatgaccaaagagccctgcagctcgcgctcgaccagctctccctgctggggctggacagtgacgagggcgcctctctgtacgacagcgagccgcgcaagaagagcgtgaacatgaccgagtgcgtgccagtacccagttctgagcatgtcgccgagatcgtggggcggcaaggttgtaaaatcaaagcgctgcgggcgaagaccaatacttacatcaagaccccagttcgcggggaggagcctgtctttgttgtgacgggcaggaaggaggatgtggccatggctcggagggagatcatctctgctgccgagccacttctccatgatccgcggcctccgcgaataagaacccggcactcacggcgcgtgcctgggccgcccactgcccgggcagaccacatccaagtgcgggtacctaccgcgtggtggg

SEQ ID NO: 144957 - DNA, 180 bp, Homo sapiens
tttaatgattgcattattataaataagacaaaactgagaggcatcccagaatgctgtctgaagaagtgacatttcaaatgattcatgaaaggacaagtatagtaactaatattccctcatgttttcctgtgtgccaaacacttcacaagaagggaaagtacttgcaaattcctggtagcg

SEQ ID NO: 144958 - DNA, 245 bp, Homo sapiens
cttggctcggcactcccaagctgcatgctgaattcctgggacaacaggactggcttgtggttccattctccagatccttgggttggcttctgggtacactaggagatctgaaatgctctcaggccaccaggaaagtactcagatgcaagaaagcacccagacactctgagcttttggtgttataactgcaatttataccatttgactgacaccaccctcttttttatatgtccatgcccctagta

SEQ ID NO: 144959 - DNA, 664 bp, Homo sapiens
gccttgttgaaaaatccagctttaaaccttccctgtaggcctcaatagtgcatactgcattgggattataaatagtcagtctgtttctggagtgtaggttagtatgtattcccaggaggcatgaactatttacatttctaacaaatgtttcacatatgttgctgattcatatttctatgtacaaatttaggctttaatttttttaatttccttttttattagaagttttgttataaaaagtttcttaagtgtttcattctttctagcatgggtggcttaaggagattgggggggagcgtttcatttatttatatagagattttgatgttttgaaagacaatagaattaatagagaaaattgtccagatatccagcgcttggatttttgtttgagaagtttgaggaagcagatgccatttgagttggtttctatggaaaaatttatcttagagatgatgtagggctatatttatgttcacaaatgagaaattgaagctgagagaaagagaaaatgtttaatacataattactcaatatgtcttggaagaacctaggtttttattcatacctggtgtttctttataaactgcctctcttttatcttgagatggtattttcgaaattatttctctttctcattttcttctaccatttcctgacattt

SEQ ID NO: 144960 - DNA, 145 bp, Homo sapiens
gccccctctacggcgggagcttgcaggggtgcgggggtgtgactggcgctccgcggactcgtgtccacagtacagaggacatgtagggttcggccggggcgcggctgcaccggggcctgcctcgcggacctggactcgggactcc

SEQ ID NO: 144961 - DNA, 425 bp, Homo sapiens
agggagtggttggagatatcaggaatccgtctagctacaggtgagatcaggttttgttttttttgagacggagtctcgccctgtcgcccaggcaggagtgagtgcaatggcgcgatctcggcccactgcaacctcccactcccgggttcaagcgattctcctgcctcagcctcccgagtagggggttacaggcgcgccaccacgcccggctaattttttgtatttttagtagagacggggtttcaccgtgttagccaggattgtctccatctcctgacctcgtgatccgcccccgtcggcctcccaaagtgctgggattacaggcgtgagccaccgcgcccggcagagatcaggttcttaagggaagtccggagaaatggggtttttaaaaaacccgagtccaggctatctgtttggaggggttg

SEQ ID NO: 144962 - DNA, 182 bp, Homo sapiens
ctttacaccatggttgcactgatcaagtcagaatgttcttcccagtagcagtaatttactgtaatactgtattttaaatggcaggaaaagagtatagaattttcaagtggctggaaaaattcctaactgtatgttaaaaatgactcaggagagttaaaaaagaaaaatactgacaagatgag

SEQ ID NO: 144963 - DNA, 278 bp, Homo sapiens
gctgatatggaggaagagggatgaggaattattgtttaatgagtatagagtttcagatttgcaagataaaaaagttctgagccaggcgcagtggtgcatgtctgtagtcccagctaccctggaggctgaggcaggaggactgcttgagcccaggagtttaaggctgcagcgagctatcactgactgcaccactgcactccagcctgagcaacagagcaagaccccatcacacagtcaagatagagaatatccccttctgccttgggcatagcatgcta

SEQ ID NO: 144964 - DNA, 208 bp, Homo sapiens
tagaaacagggtttcaccatgttggccaggctggtcttgaactcctgacctcaagtgatccacttgcctcggcctcccgaagtgctgggattacaggcatgagccaccacacttggcctcaatgagtttgaccaatgaagtcacccatgtaaccatcaccacagtcaagatagagaatatccccttctgccttgggcatagcatgcta

SEQ ID NO: 144965 - DNA, 323 bp, Homo sapiens
ccctaaactctaaatgcaactggttttaaatctctatccaaccatacttggcaaagaactgtaaaaaattctaagagaacagaaagcaatacttttgtggctcatgtgtaactggtcttagcagacttattacctgatcagtggggatctttgtttccatagacactgcttcccgaagtctggcgacagtcccagacagaggtacggccacaccaatcctcatgcagtgagaacatttgccttgatacactacagtgacatagagaggcctgtacagatcaaagtcagatcttctcattagtcacttatttcaactaaaatat

SEQ ID NO: 144966 - DNA, 256 bp, Homo sapiens
ctgcaaatgatagaaactctgacagaacagtgactgaaattgatttctctttcacatgaaagtctggaggttgtcatcccagaactactgggctggtctcacaaagtcttctgggccccaagcactctatgttttgcttttctgccctccttagcagaaaggagcttaatatggctgcttgagttttgccgtcatttttattccaggcaacagtggataggatcacctccctttcccctctcacttccttaacaca

SEQ ID NO: 144967 - DNA, 286 bp, Homo sapiens
ctcaggtggtaacgcttgcttgccactcaccacctgctgtacgacccagctcctaacaggccacagagcagtactggtctgcagcctgagggttgagaacccctgacgtaaagcaccccctttgtgagaaaacaagctctgggcctttaattcctgcagccagctgctctgtgcacatggggtgaggggcaggagggagtcaggcaggagacctctggtccctggcacagctattctcgcaacagccattggtcaatctccccggtccctacccacaaccaccctg

SEQ ID NO: 144968 - DNA, 281 bp, Homo sapiens
cgtgcctagtacagaaagcagatctgtggggcttccttaggggtttcaggaaaaacatgttagacgcagaggtggcttaggatttaacatctgaccttgaatctgtcagatcacttgttattttgtaaacgtgagccctcaaaggaagccgtaggcctgcagtcgtgttctgcctgagatgtgtgtggaaaatggtggtgagaagagccgtgaagcgtagcccaggaaagcaccgccggtattgagtgatgcattcagcatgtgaggtcacagaccaggtc

SEQ ID NO: 144969 - DNA, 442 bp, Homo sapiens
tattggtattacaggcgtgagctacggctccacctcaacaagtatttctaattgatgataatagtttagttctaagccacttaacttatgtgttcatgtcattgactttgtaggtaaataaagctattaattttaaatatgagaaacatgtaaatagtgctagcaaaagatataaaactgatggggcaatctaattaatctctgagttagttccaatgacagaatcctattgaattgtacaaagaataaatttgagtgaaaataatttgtcgaataatacaccctatagcagaaagtagccttggtttaaaaaaatttagagatttataccaaacagggacagcataaattgataaaacccatagcatagcaaccatggtctagcaacacagttttgcataacttccaagaagactgtcaacacttgaaattatctccagag

SEQ ID NO: 144970 - DNA, 400 bp, Homo sapiens
gtgcgactccaggctgggctctggcattctcctaactctgagcattcattcaatgagagatataaagacagatgctgctccggctgccacagacagtggggcaggttgttcactgcacaagaggacccagctgcagaggtgagagggccccaggaaggggcccttctttgtaattcatccaacagctcccatacaagttagtgctggttctgaccttgccatctttctttctctctctctcctctcccttcatctgtctctgtgtctcagtctcttattttatttttgttgagacagggtcttgttctgttgtccaggctggagtgcggtggcacaatcacagatcactgcagcctcaacctccccagctcaagcgatcctcccgcctcaggctcttgag

SEQ ID NO: 144971 - DNA, 294 bp, Homo sapiens
cagaatcaactactgtactttcagagagaaaaaccctcttctggcttctcaggcaggaagtgactcagacctcccctgtttgaggcatgataattgctgtcctgctttagctctgcattgtttattcggcggatatttactgagcgcccactgtgtgctaggcgctattctttagtctgagaattatagccatgcataaatgctgcaatagccatacaagtctgactaaaattaggcacataatagacatttaaatatttcttattgcccaattgtccatattctcagcgttca

SEQ ID NO: 144972 - DNA, 611 bp, Homo sapiens
gcgggagactcggcagaacggaggtctgcaggaacccctgctgatggctcttcattagccaacagattttcctcttcaaacataaatgcagcgcaggaaaacgaagttgagaaataattgtgtattgaatggtatggtgggttcctagactctggcaggacccgaaccccagtgatgtcatgttgttccttggttgagtaagctgcgtgtcacctcctctttgaagccttccctgaccaccctccccagccactgctttgtgctcccactggaccccgtgcagccttcgcttacagaacccgtgaactgtccgcactcattggcttctatatttgaatccctggctatagagcaaacaccttgagagtggcagtgagcgtctctgtcactccccatccactgccactcctggtcgtccttgtagagaatgttgaatgaacagaagcttgggttctccagaatccttgttttgctctctaaatcccatttagcacatttagcctcgagctacttgccatttccaacaaggatgaatcaagcctttggattttctaacaaagacgtgtatggtgggaaatacaggccattgatacccaacatcagggaggaag

SEQ ID NO: 144973 - DNA, 473 bp, Homo sapiens
tcagctcgggggaagcaggaagaatccccagttggttggctattcttgggaccgaagagataatccccattgaacagagcctacactcacatccttgagtccgtgatgttcttcgcttccctgggaacagccagagtccagctttccgtgtggattgctttcacagggatatctggcccttcaagccagtggtgtgaatgtcaccccaagaaccttgacgtgtagatactgcctacttcaagtcatactgcagctctgcctcttcccaagataggatttgaagcagcttccaacagaaaatggatgtgaaaatgtattgtgaacacatgcataggaccatacatacatcatacacacacacatacacacacacttaaacatacacatgcacatgtacacacacacacacagctatgggcacaacttcatttcaacttgtagattgtgaagtaaaggcattggaactttgtggc

SEQ ID NO: 144974 - DNA, 602 bp, Homo sapiens
gactgcatcacaggagacaggtccctccacacctcattcaattcactcactcaccaggagccaggtccctccatacctgatctcaattcactcactcaccaggagccaggtccctccacacctcatctcaattaattcactcaccaggagccaagtccctccatacctgatctcaattcactgactcaccaggagccagatccctccatacctcatctcaattcactgactcaccaggagccagatcccttcaacctgcatttcctaccaaccccagcagccaaactgtatctctaaccaaccctctccccttcctcaccctcatccctcccagtaccatgcccagccaagtttttgtatttagtagagatggggtttcaccatgttagtcaagctggtctcgaactcctgaccaaaggtgacccacctgtcttagcctcccaaagtgctgagattacaggcatgcgccaccactcctggcccagaaatattatcttattcgctcttcacaaaaattctgaaaaagaagagaagccagagaaagagcgaaaggctaagtgaaaaactggaatagtgaagccttagaagtcagaggagaaagc

SEQ ID NO: 144975 - DNA, 353 bp, Homo sapiens
tctcagttcattctttccctccccaggcccctcaaagacattctagtgtcagtcagccaaaaacacaaacatcaaatgtggtttgtgatacttggcagtgacccagacacaacatgcaagtgaaattgaggctcatgtgcttgttttcttgcttcttttcttttttggggggaggaggtggggattttctttattttaaatgataatttattattattattatatatttttgtatcctctgtgattttttttcatagtagttggttatgtctatctatggatggggaagaatatttatggcttaaaggaccatattaattagagatataattctaaggggaattcaattttat

SEQ ID NO: 144976 - DNA, 331 bp, Homo sapiens
taggggcaaatggcatggtattgctgatgctattacaaagattaaatgatggctggtgtgaacacaacgtcattaatcccttactattttaagggtgccaaaactgactattaaagcagctatttggctatttggctttcaaaggctgaggctgaagctgaagctaagtagcagatttttaccaaacacataggctgaagtcaaactttagagctttcgtgttataattgaaagccagtgatttctgtgtattaattttgtattcagttgtctcattaaattctcctattttttcagtcattttctaggttttacaattatgtggtctgca

SEQ ID NO: 144977 - DNA, 335 bp, Homo sapiens
gttaatccctatgccatgttactactgtgaaatgtttgagaagcatgggttagggcatccacagcagctattatgttgaacactctatgaaaagccacaatccagggtgaaagagtagcatcagcagaggaagaaaactgggagagtgaaatgtgtggcacccacggagtttcttttattgtccatgcaggatgtgaatggacaagcagtgtaatatatgactgacagagtagatgatactcttagttttgaattccagggtaacgtttctggatttaattcatttggcaactggtgtccattgaaggttttagagcaaggatctgttaggagct

SEQ ID NO: 144978 - DNA, 438 bp, Homo sapiens
acaactgaggctggatggctcttgagaagttacacaatactagcgggcttcatgctgcatttcccccagtgtatttgttgtatagtgaatctgattaggtattatttctagaacattttggatatgtcatttgtaccacactcgttcttgtcccctgtcccaccactatggtgtctgtaatgatgcatctttttattaggttgataagatgactaaccctggaattgaaaaatcattttttaattgattgctttaccaagactaaaagcagatgtcacaaagtatatatcagcttttaactggaaaggctaataattagactgtgttgttgacttatttaatataatacagatttttaaaaataaaataaatttataatatgtcttttctaaagaaataaacaatgtactttctcgagaataaaaattaaaaatagat

SEQ ID NO: 144979 - DNA, 455 bp, Homo sapiens
aactcactatcagagagttgtttttcatgtacaactggcaaactagagaatgctcaaaatatctaagaataaattccccaggcatgttttatttggctcatacagtcttttagggtcttttcccccagatattttgaattaattgccaatatttcaaaattgagacactatacacaagcaactggacctagttctcactgaaaaatcaaaagactcagcaaacaccggccagcattcccatatggcagtaataagcagataggtagcagttggtgaattagggtaagagctctcttgttccccactgtcctttctctatccaagtcattaatttacatgcctggggtctacaggcatttaatgttgcaactactcatacagggaaacagctaagtagtaaacacagcttttaatctggagcatcaaactacattaagtcaacagcaaatatcaaa

SEQ ID NO: 144980 - DNA, 727 bp, Homo sapiens
tacagtaaactgtgatggcaccactacactccagcctggttgacaatgcagacaaaaaaagaaagaaaatatagcctgggacctaagaaagcagcagaacataacataatagttctctctctttttttgggatggagtcttgctctgtcacccaggctggagtacagtggcacaatcttggctcactgcaacctctgcctcccaggttcaagcgattcttgtgcctcaacctcctgagtagctgggattacagatgtgtgccaccgcacctggctaatttttgtattgttggtagagatgggtttcgccatgttgcctaggctggtctcgaactcctggcctcaagtgatccaccctcctcggcctccgaaagtgctgggattacaggcgtgagccactgcgcccagcccagcctgttacactttcaataaagagaactaatcacagataacagtgcttccttcaaacacacacacatacccacacacccttcatttggtaccacttctggtcttgattacatccaagtcaggaagaactttaaggatagtatatttaatgcaggaggcactatctacagatagcaccatctacctaataatcctactctgttgaatctattccccaatttgcagatctactagcctgagagagatccatagatagaatcaagaaagcatggtctggaggcagaaataagaagagctacagtcagaattgtctgagt

SEQ ID NO: 144981 - DNA, 355 bp, Homo sapiens
gggctgtttcagcgcaaagaccaattaaaagttactaatgtcctggagaacctagagaacaccctctcagctctactttcactctgtgaactctaaagaatatgctcatcattttatatgccaaagttattacagacactggataacctgccaatttgtcagcagattgtttcctaatgagcagttaatttttcttttggaaagggaacaaaatgagttaaaagtttccctcagaagatgcctttcatttttgatcacctagcccataaaactgtcatttggaaggggccacttctcagtcactgcaattcctttaaacacacaaacaaaacaaagattgggaaagatttgggct

SEQ ID NO: 144982 - DNA, 246 bp, Homo sapiens
ctccatgcaatcaatgttcctctatccaaccaacatccttctatccaaccaatattcctccatccaattaatgcctctccatccaaccagtactcctccgtcctatcaatgctcctgtatcctatcaatattcctccatccaaccaatacttccccatccaatcaatactccttcattcattcactgctcctccatccagtcaatacctttccatcctaccagtgcccctccatccaaccaatact

SEQ ID NO: 144983 - DNA, 195 bp, Homo sapiens
gtgtatttggagatgataattattatcaagaactatactaaagagagctgaaagcagtgtgggctttggaaagtatatgagatttgaacttggaaagcctgtttttttggtttttgtttttttgtttgtttgtttgtttttgagacagggtcttgctctgtcatccaggctggagtgcagtggcatgatcatagc

SEQ ID NO: 144984 - DNA, 486 bp, Homo sapiens
ctggataactgagtcttgacttatggaatggcataaactcttgatgcaggcatgaagaataaaattagtttttgtaaacaagagaatttgaaactgcttagagaatagaggtaaaaaggaatttccttctttgggtaagagtggatccaaaccatatattctctggctattagagtctccagaggtgtgtggtcattttttgttatggtgattcccaaagatttgcagtgttggcaagtacccaaaatttatctcagctggtcataaaccttagtgccttttgatggttttgttttatagagttacttattaaagttctatgtaaatcattactgttatccttttaagtttctgtatttaactattaccattttttattttatagtcattacatattggatattatgtagaatgtagttatgtatagagtgttttatctacttatttgttgctgcccttttctgagagttatttaatacagtttga

SEQ ID NO: 144985 - DNA, 315 bp, Homo sapiens
atatctttcaagtgccagaagttcctcaagaagccgcagaaaaagaaattcccgtggctccacccaaaaaaccagaagctccgattgtcccagtgcctgaagctcaagaagttgtcccagaaaagaaagttcctaaggctcctcccacaaaaccagaagccccacctgccacagtgcctgaagtcccacaagaaattgtgccagaaaagaaaacactggtgcttcctaaaaagccagaagttccacctgttacagtgccagaggctcccaaagaagttgtccttgaaaagaaagtgcccttggctcctcctaaaa

SEQ ID NO: 144986 - DNA, 499 bp, Homo sapiens
gttcagaggatccgccaaggtggctgctgggaagcctgtaagagacagtgtatgcacagcacaaagcatcactgattgaggaacacagcaggtgctccatgtcctttgtttgctcttcctgtgtttctaccttgcctcacctcaggaagaagtagaaaacagggccaaatctgatcccaggccctctaggaggggctcccattgcctatctcagcattccctttcctctcctccctaggactgcattgtcacttgcagggacaggctcgtgactggtggggacactgaatgacagtacagtcctttcttccccattctagtcctaccccattttcatgctttctatgtctggcctactgaaactacttgactactgcttgggtaggaagtaccacagccaggctggcagatctgttcaagcttggggacttcacttggagaatctagccttgactgaattccccccagacccaggagacagccaactgtggattctgcc

SEQ ID NO: 144987 - DNA, 528 bp, Homo sapiens
tgtccatgtatcgccgttgggaagggaaatcactccgaagacggtgatgctgggtacaggctctggagtcatcttgatttggtaaaaggcatgaagtctgagttcattccgaagattctggcttttgagaacttatataaagagaacttataaaaaatggaaaatgagaaacgatgatgtcagtgaacatttattggcctttttttctgtgccaataactctcagtgcttaacctgaagaagcccacttaatccttccagcatcctgtcctagaactttccctgctgtctggataaggaaactgaggcacagagggtcgaggaacttgctgtggtacacccagacagcctgaccccagagtgggcacttcaggtcccgctccatggccgtgtgcaccttcatggtacgtgctggggttgtgccttatgaaaacaacggacttggctacatttcgacaaggggaagttagacactttagattcacagttaactgttgatgcttaaatgacatttgaggaacctattggt

SEQ ID NO: 144988 - DNA, 291 bp, Homo sapiens
agaattaaaaatgatttcctaacacaatctcacatgctgtccatattaaaatttcaccaactgtccctcaaatgtctttttatgactgttttaatttttctggtcaggatccaatgtaggatcagaaattgcatttggtttttgtctctttactctttttttctagaaaagatttctacccttttgtaagtgacactgatttttattttttaattttattaagacagggtctcactatgttgcccaggctggtcttgaagtccttggctcaagcaatcctcccacctcggc

SEQ ID NO: 144989 - DNA, 354 bp, Homo sapiens
cccatgggccccaatcacatcttaactcctttgcccctccctacctccaacacactcgccctatttatggttacatttaccttggccttacttcagatgtgcacccaagcagccaaatgaaaatagccacagtaacttttctcaatttaaatccacagccacaaactttaagcagacggatatggtttggctctgtgtccccactcagatctcaccttgaatagtaataatccccatgtgtcaagggtaggaccaggtgggcagtttccccgattctgttctcgtgacagtgagttctcataagatattgtagttttataaggggcttcccccttcgctcagcactcattctct

SEQ ID NO: 144990 - DNA, 348 bp, Homo sapiens
gacggtgggggaggctgtgggctgggggactcggcctcaccatcccaggcgtggggagagacagccacacgcactcatggttggcagaagctgcaaactgctacggcttcaaaggaaggcaatttggcaactgcttccaaaatttaaaaaatgcacatcctctgtgatgcggtatttctacttctaagaatttatccttagaaactcagcatgcatgtgtgcagagatggagtcactgcggcagctagtcagagtggaagacgcgtagtcagatcgagccgcgtagtcagatcgagccgcgtagtcagatcgagccgcgtagtcagatcgagccgcgtagtgagatcg

SEQ ID NO: 144991 - DNA, 434 bp, Homo sapiens
gccgagaggtcatgccaccgctccagcctgggcgacagagagagaccctgtcttaaaaaaaagaaaaaagaaaaaaagggatccattgtggctggagtatagagaatctgggagcaggcagagatgagaaagtagggctgggctgcatggtctcatggccatagtaagcaattggggttttgagcaacacaggaagcagttggagggcactgagcaaggaagtgacagggatttacagtgaaaaagtttttgtgatcactgtggagtgatttggctctaggtggcgagagtaggcatacacgggtcttgtggcagccgtcccagcaatgagatgacgttggtggttagtgacatggcggtcaggagcccaggcttgggttgtatcaggaagaaaatggtctgaacacagacttcctctcagacctcaccggcta

SEQ ID NO: 144992 - DNA, 282 bp, Homo sapiens
tggggactctgtttttgagactatttattcattaattatttaggcaaactttattgcccatctgccattggttgccaagcagtaggaactcaaagacaaatgagacaaggtttctctttaaggacctaactgccagtaggtctgtaagcagaaagcccagtaatgcattaagaagtatctgcagagctggggggttggagtggggagtggcacagatgggaagaaaggtgatgccaggcagagggagccgcatgaacaatgatactgagaagcagcagggtg

SEQ ID NO: 144993 - DNA, 346 bp, Homo sapiens
acttgttccccactccaagataactaggagaaagccaccttcccacccaccctgagtctatggctgatggaatccttatcgtagctacttcctggcctctcaggacatgggcagagagaacccgggggtttacctctgtgggaccccaggggtgactggaggggactttggtggatctgtccacacagcctaaacaaagagcaccaagctgacacacggcagtggagccttgattcaccaaggatctcgggcaagctagcttattgtattaaagggagactgtgaatgtcccctacccctactcatcacacactagagctggagagatcttaacaagcagtgtcta

SEQ ID NO: 144994 - DNA, 405 bp, Homo sapiens
ctcgttcatatactcactgtatttcttgtgaaagccgtaacatctctaagcatagtttcttcaattgtacaatgtagaaaattactttgtagaattattacaaaaattcgatgagttaggctgggtgtggtggctcacatctgtaattccagcactttgggaggctgaggcgggcagatcagtttaggtcaggagttcgagaccagcctggccgatatggtgaaaccccatctctacgaaaaatacaaaaaattagccaggcatggtggcacctgtaatctcagctccttgggaggctgaggcacgagaatcgcttgaacctgggaggcggaggttgcggtgagctgagatcacaccactgcactccagcctctagtctgggtgacagagcaaggccctgtctca

SEQ ID NO: 144995 - DNA, 825 bp, Homo sapiens
accataactgctttaacaaaaatatttaaattgtcttataagcctatgttttaaggagataaaaataatctgggatgatgtaaaataagaatacagtggaactaactaatggttattaactgtgttctgggtctgacttgccttggctgtaggtttcatttcagttactgaaagatcttccttttttcattaggatctgcttcatcctttcccatagcaaacctgaattccaccagacaggcaggaagcctgaaggcaaatggattcgtaaatgtggtgccaataaataatggaaaatgtttacttttcaactttatgacaaatagattttggaaaagttctgggatttagatcagctgtcttacttttatacagcgatttttgtaatgtcctaaataaggcgagtcaggacatagagtacctccaaactgggttactctggggttcttctgatccctagagattgggggaggactaccttctagcaatgaggctttgaaacatctgcaagcaaatgtccctctggatgccagatgtgacatgtggtccagaatgtagtgcttaacaaaagaaagctcattgcagcatatttctaatagcaaaaacctggaagtgacattaatgctaatgtaggggaatggttaaattttgatacactccagaagaaatagtgtttgcagccattaacaatattaaggtagaaataaaaaagatgggtgggcgcagtgactcagacctctaatcccagcactttgggaggctgaggcgggtggatcgcttgagctcaggagttcaaaaccagcctggaaaacatggtgaaaccct

SEQ ID NO: 144996 - DNA, 375 bp, Homo sapiens
gtacaatcgagctcggtaccgacgggatatgatcaggatgtgacatactgggacaatgacacctgctagtgaccctcactcctcccaggagccgctttccacccacagtctcccttctgggagcatggggcaggtggcgaggtgctgggttcctttctcacccatgctggtcccagcaggctgaactgagcagctctgttctccagcaggcgctgcaagggctggcctgcctgctgcctctgtgcatgaagctgctgcgtccaggaaaactgagatgacctggactgctggttgtttctacctgtgaatcaccccagagcaaagctcctgctacaagccacaggacacgtggtgcatgaagccccaaatgtccca

SEQ ID NO: 144997 - DNA, 112 bp, Homo sapiens
gaaaggggaagaaaaacatgtcctaaggagaggacaacgtgagcacgtaaagagtggaaaacaaactcagattagctggtgagtggtgggagtggtgaaatctaagtaagag

SEQ ID NO: 144998 - DNA, 295 bp, Homo sapiens
ctgaaagcagcttctcccgctgtcggacccctggaatctataaagcgcaaagcctcgccctcttggagggctttttgatgtaacagttaagctttgcaatgcaacttacaaccatctcagcagggagcagacagaatgttggaaatgtctactttgtgtttgtgtcctcttttatcacttagggatgaagataattttatataaatgtaaaggtgactctaccatttcttttattttggagaaaaaatacaatgaaattataaatacagatgttggacacgaacattcctcttgc

SEQ ID NO: 144999 - DNA, 232 bp, Homo sapiens
tgtgtatgaagcaaattatatgtgctacaagctgttgtcattcattattaatatttactccttttgagtgtctataatatgaagcagatgggcaagctaatctggattatttgtatgttatacgtagggccataaagaactattagttctttggttaatcttaatttgttctaatattattctacaaagcacatgaggattgttgatattttgtaacattattttatgtgaa

SEQ ID NO: 145000 - DNA, 517 bp, Homo sapiens
ttacaccattgattaaaaatgctaatcaggagaggatcaaggctatggacctccttctaggttgttgcagaactcccactctggcaatggtattcagctggttttgaatttttctgctttaagaactatccctgggaagactagtggtctgaagtttgcttggagagtctcaagccggaaactgatttgtggtccaaatgcttaatggcatcagacacttattcctacaagagaggcatgtggtccaaggggtggcacaggtcaaatgtgatggccaagtcccgcctcagcagggcttgaatccgcacttggcaacttttatttctctctgtccattcctgtggatactttatctgtgttaatgtcctcatttaggctaaggtcaaactctgttcttctctcttctggccagaaagacttcctgttttacaggtatatgatcttatctgtgttgataccttaactgtgagtgattccctaaagcaggtccttggacaagtgcccatcctccaggaaa

SEQ ID NO: 145001 - DNA, 311 bp, Homo sapiens
ccagctagggaaacgtcaatattttgaggatctcccaccgcccatgtggggataaaaaccttatcctgttcgtctctaatgccccagcatccagcagggcagagagacgtacagagttacctgacaccttcctatccatcatcttactctcaatctgatacaaagaccaggctgaagacaaatcaacaaaatcaggccgaagctcctccgccgggtctttatttgactttggcactagcgggctcttctagcttaatctcccgccgcagcccaaatccaccgccgagccatcaagctcagagggggagcct

SEQ ID NO: 145002 - DNA, 812 bp, Homo sapiens
atcaattgtaaacatctattggtttctcccaagtcactcagaatgttttaattaggtacacctgtttttctttatatatctctttctggagtatagggttacatactgatgaacccagtgtaactcaagaacgcatctaatatcccaataaacccatcgtaatgttgaaaaatcataaataaaaccatcataagtcagggtttgtccgtggttatgggtttcatcatttctgttgtaatcattaatgccgtacacctttaaaaatggcatagtggtagggaagggataaacctagcattttaaaattcagttgttgcagggatcccacataatattttgtcatttatatgagggtggatgagggctgaaatttcatcttgggtcttggaacagattcatggaacagattcttggaacagattcattttaaagcgattggtcctcagttctgcaaattaagaaactccaatttattgattccccagggtaatgagaaaatgtattgagtgatatataacagccaccacattcacaggaaatgctgtcctggatcaaaaactgacctggtcattgaattatgatagagaactcataaaaattccatggagaaagtgatattcaagttgggtcatgaattctgagtaaaagtttaaaaacaaaggagaggatagccttacagagataacaatagcaacaaagtcacagacttgtggaaatggaagaccgcgctggaaattaggacagttcatattcaagcaaaaagggttgggttttgaacaaataccttgaagctttggatgccttggagccct

SEQ ID NO: 145003 - DNA, 364 bp, Homo sapiens
cccccccattcagccagcacatgtttggtgttggtcctagaggacaaatgccgcccatccctgtttttaaggaactgccaagttggggaggtggatgaggggttctgtaactgtgagctggcgttcttctagaaatactgctcagcctttgtagcattctctcttcctgaatcgtctcctaaatttggagcttctgtgtctttgttctacaaatagcacagacttgtggcagccctcttctatgcctgagggatataggcgtgaacaagacagataagtccttgttcttacgggacttaattttagagggggtggtagacaatgcacgtgtaagaaaatagcaaagtgagtgttaggaagactg

SEQ ID NO: 145004 - DNA, 369 bp, Homo sapiens
agctgcaccgcagccctttaacacacgaacgtgcggggcccaaccgctgctcctttccgaggggcccaccttcctccagtgcaggggcccttccggcgcgtgtgggtgtggcaggcccgcctcggctcttgccatcttacaggcatggacctgctgctcttctctgtggttcaggcccttgcgacgtgactaggaagggcttcccattccagcaagaaggtggaatccacacctggtcttctctgatacgttgatggtttttcacttctatgtttgcgatctgtctggaattattttcagataagaggtgaaacaggagcttgctctgaaggacctacgccacacctggcccccacagcctgcacccca

SEQ ID NO: 145005 - DNA, 447 bp, Homo sapiens
aaaatctcgctatgtttgccagggtggtctcaaacttctcacctaaagtaatcctcctgcctcccaaagtgctgagattacaggcatgagacaacacatttggcctgcaacttgctttttttcctgaatataatgtcttagagattgtttcatgacagtgaataaagtgttgtgggggttgttttggttggtttgtttgtttgcttgtttttgacagggtcttgctctgctgccgaggccaaaatgcagtggcgcaatctcagctcgctgcaaccttcgtctcctgggctcaaatgattctcccacctcagccccgcaagtagctgggactacaggtgcatgtcaccatgcctgactaatttttgtatttttagtggagatggggtttcacgatggtgcccaggctgaggctcttttttaatgaaaaataatacatgtctgttgtta

SEQ ID NO: 145006 - DNA, 253 bp, Homo sapiens
ccattaaaagtaggggtggtggtcacttttcctccttaccttctcattgcttcagcgttctcacctctctgaccactttcctgttacacttaacactttctgtgtttttttctgaagtccgtcatctgacagagttattgtttagtctgggaggataaattgtaactctttggaaattatatctggtaacttactttgtgctcccaccacagtgattttctttttaagcaagctcccggggtgaaaaaaccat

SEQ ID NO: 145007 - DNA, 157 bp, Homo sapiens
tccggaggccacgcatgtggtggtttgggctgtgacacctgagggatattccagcaggagagacgagctctgcctcccaccatagagaaacagcttccagatggcttgtggtgcccaagcaggacagcgtggagaggaagacccgggatggtgtccg

SEQ ID NO: 145008 - DNA, 276 bp, Homo sapiens
gtgcacacctgtgatcccagctactcgggaggctgaagcaggagaatcgcttgaacccaggaggtggaggttgcagtgagccaagattgtgccactgcattccagcctgggcaacaaagcaagactctgtctcagaaaaaaaaggaaaaaaggaaaaaaaagaacttctaatttaaatgactgtgacttgaaaatttaaatacatgtttattaaattaattgaataatagtttctttttacatgtgaaaagaaattaaattcttcttttaaaaatt

SEQ ID NO: 145009 - DNA, 125 bp, Homo sapiens
caaatattggcccctttaatctcagaagaaaatcaataaccatggatttatgagtattagattagtatctggtaacatttagagtataatttatggcatttcaaagaattgtccccaaattaata

SEQ ID NO: 145010 - DNA, 303 bp, Homo sapiens
caacaaattacccaaaatctaaccctctcagaaataagcagtgttaacatttgattaacattccagataactctctgtgtgtatatttagtggaagactgaatggatagctagaaaaatgaatggatttttttaaggaaagaattttttaaggaaagagattacatctgtaatcccagcactttgtgatgctgaggcaagtggatcacttgagcccaggaatttgaagccagcctggacaatatagtgagaccaagcctctacaaaaaaatacaaaaattaactgggcatggtggtgtgtgcc

SEQ ID NO: 145011 - DNA, 351 bp, Homo sapiens
gaagcctctgtccaactggagcagtcagggaagacttcctggaggaagtggtatctggtctgcttagaatgtggcgatttgtctgtatgcagacattagattagagggcaaaggccattatcataacttagcagacagctacaagcagctaaggaattgctatgacatggactgctcgtgattggagctaagaaggagtcagagacagaggtccctgtgctctggagtgagtccttgggggaggctgagctcccagaatgtggggccgcctgtgcagaggccggaggtgggagacacacctgtgagtgccggtgagtgtggggtgagccactggggctggatcagaagatg

SEQ ID NO: 145012 - DNA, 427 bp, Homo sapiens
actcactacagtaaccgtgatcactttgttcagggatagaaactaaaagttttttagctgtcatgtctgtgtccttcaaagctgggaccggcttcatgggccctcgacttggccctgttctcatagggctgcacttggttaaatactctgctgtcattgtcttgaagttcttaatacttttttaaaaagggcccccacattttcattttgcactgggccctgcaaattacatagccagttctgctgacagcatttcatttaatcaccccaaattctctctttcttcctatcttgagtgtttgtaaaaggtggagcctggccctgaagtctttgcaagtttggtgtttttaactactttttggctttcattttttagacaaaaaaaaaaattgtttaaatgtagatgctttcaagtttcctaattttg

SEQ ID NO: 145013 - DNA, 412 bp, Homo sapiens
cctgtgggaagctcagtcagcattctgaggagttatttgcatggtgataggctcttacataggaattgacaagcgcctgagagaagagcgaatctgcctagttgagattccaatcccctccatgtaggccagggtcttgcaaatagaaggtactcaaaatgtcattgctgagttcagggtttggtgagtagtaatgtagaaaggtctgtatagcctgggcaacatagtgagacttcatctcttaaaaaaaaatttaaaaaagttagccaggcgtggtggcgtgtacctgtggtcccagctgctggggaggctgaggcaggaggatggcttggggccagaagttcgagggtgcaatgaactgtgatccacgccactgcactccagcctgggtgacagagtgagaccctgtctc

SEQ ID NO: 145014 - DNA, 291 bp, Homo sapiens
gaaatcacacctttgcttagcttcttcctcttcctttcctacttccccttctctcttctggttgtttttcgcttgggcagttttttaaacagccacctgcacacaaaacattgtctcagctctgcttctgggaagccactttcaagagtaaatgaaaacagtctattgaaagcaagagactgaaggtctgagggaaaagtcagttttatttcagcccaccaagtgccctccctgtgctgttctgggctttgatggggacagtggaggggaaggccctgcgcagccccccaa

SEQ ID NO: 145015 - DNA, 263 bp, Homo sapiens
ctgagcttcggttcccatcattataggaatcattatatctgccctgactaccccacaggtatatggtaaaaatcccgagaagacagatgtgaaagcactttctaaaccataagtgcaacactcatggtcgagctataatgatgcttattggcggctccctcacccttcccacctggaatcttctccagggaggagaaatacaggagcgaatctttcctgtagttcaacatctctgctttgcagagccctcccctctacccctt

SEQ ID NO: 145016 - DNA, 591 bp, Homo sapiens
taacattctgggctggggattcctctgtatggtgggggctgtcctatgcattaaagaatgttagcctgggcacggtggctcacacctgtaatcccggcatattgggaggccaagaagttcgagaccaacctagccaacatggcaaaaccccgtctctactaaaaatgcaaaaattagctgagtgtagtggtgcacacctgtaatcccagctactacttgggaggctgaggcataagaattgcttgaacctaggaggcagaggttgcagtgagctgagatcacaccactgcactccagcctgggtgacaaagtgagactctgtctcaaaaacaaaacaaacaaacaaaaaaacttgtttaccaccatccctgacctctactcactagatgccccagtgtgacaaccaaaaggttctccaaacattgccagatgtctcccaggtgagatgaggacaggattgtctcagttaagagctactggtttagaccttaacattccgaaaatctattaacttgattcacaactcagctcgtaggccatatttcagatactaacattgagtctacggacatgcaaccccgaacacggata

SEQ ID NO: 145017 - DNA, 318 bp, Homo sapiens
tgttcctctcaatggaagtgttccctctcctcagcttcagggtctcttcatcactcagaggcaccatcagatgtttgttgagccattctcctcatagaacgcagaggagaggccaggtgtgaaaccagaccagtctatctatagctaagaaatattcctaacggacctcgaggagcgcgagagggaggttttaaatgtaatcctgagcttttctgattttggggttccaggtctgctatacatactcttgcacgttatattgggcacagccctagtaactctgtgatttgaaatgatgatctgaagttatcgattagg

SEQ ID NO: 145018 - DNA, 271 bp, Homo sapiens
aagagggaggggaagcagagaaaggcaaaggcgagaaatccagggcgtccgagtgaaaagtcggaaaatgtttccagagcgcgccacaaacaggcgcgcgcgcgcgcttgcgggcgcatagtctctctgtctctctctcgcacacacacaaacacactcttacatgctcacactcattccacacatggagcccacgcacgcggttcctagtcgtgcagggtcgcatgcctgggcacccaaagtgaacgcagagtagagccgccctcccacc

SEQ ID NO: 145019 - DNA, 230 bp, Homo sapiens
gcgactgtcctgattctctgaaggtctcaaagcattttcatattaagttattcaagtgacccagagaacaagaaaggagttgctactgcatgatgtcagagaacactcagaggttggaagggaattgggagaactaagtaattattaataaattctaaaagtttaatactcagtattcaaaggagaaagagtggagctaacactttgtaccaagggtgctggtcttggga

SEQ ID NO: 145020 - DNA, 304 bp, Homo sapiens
gtcttacttcccgatagcttgtcaactagggattcaacagaacggagctgaagcagtgcctttaacacccacgagtgccctgaatgtaaacagttactcaatagtttacagaactggcaaggactatcctgggccatcaacgtctttcacacctagtccaagaatcccctcttcagcacccctaaagggccatgacaggaagctctatttgtaaaacatgcacttgtaaaaatcctctgtatctagaaatacctttccttccatttcacacctggcttcacacacctgtaggagaaacaaggca

SEQ ID NO: 145021 - DNA, 485 bp, Homo sapiens
tgcagtcagccgagatcccaccactgcactccagccttggtgacagagtaagactccatctcaaaacaaaaaaacaaaaaaacaaacaaacaaaaaaacctgcttgtggctggtgattatggtattgaagagtgcaggactaggttctagaaggtgtcactagttaaagtaagacttgtcttgttacttgaagaaagggaggattcgaaaaacagaataaagaaaagtgtcccagaagaaggcaaagtatgaatgggctgtactcaagtcacactaagggtgggaaagtgcttcatgcctggataggggtttgtgctgtgttgctacacagggcagaccatgtccttgagagaggatctgaagctgtaggtaatgaggagtcattgattatttgtgatcagtggattatcatggctcttaccttgtgccaggcattttgttgagtgccttaaatggaatatttcatactataacaaccctttgaa

SEQ ID NO: 145022 - DNA, 242 bp, Homo sapiens
cgtagctcacttctgtcgctatgaaggctagagcacctgtaacacacggcgagtcttgtgtcttattcccataaccaaaccaagagactgtgtttagcatttcttctgcacacccccacccctacctcgcgccctaaaactagcagcgtcgttaatgaaaagcaagaaactgtgaaggccacgaggggaggcgtggtactgtcgactgcactggccaccacaacacatgggctgaagctcct

SEQ ID NO: 145023 - DNA, 210 bp, Homo sapiens
tacctgggctaagaaccaagggttggaagttgctaaaaataaggatgaagtagatctaaattgtgtttcaatggcagaatctgatccagatcttcactgggcctacgtatcaccctagaagacagatgtacacagaataaagatcaagtgtctaaacagattaaataaagcaattttgctttatatttgcatggagaaaggaggttcctt

SEQ ID NO: 145024 - DNA, 226 bp, Homo sapiens
agtaaccgagcctgagggaaagtgaggtgtgaggcgatggcaaacagctccagcaaatgcacaagtaccaggccctagcactgcagagcacacagggagaggtggactgtggcccttggaagccttggactgagagagaaaattcctagtctcagagcaaatcccaggccaccagccacagctaccagcaagaggcaaaggagctcccacctctgcaggggacaat

SEQ ID NO: 145025 - DNA, 545 bp, Homo sapiens
aagcttctttggcctgggtctcactaaggaagtggaacggcagccaagaattattatgctgaaaatgttgtggtgatagaaaaaagatgattagaagtgaggctaaaattataatttaatatgttaccaagtgtaattagtcacttaacagtataagaaaataccattaataactgatgtggaaccttgtaaaatatttcttggcgaattttaatgtcttttttgtgtacttaggatcagttgagccccgtgggtaacttgggtgccctgtttgtgaccctggcttgctgtgcaggttccccttggacatctgtggagaggaagagtaagaaggagatggctgtgcccagccccggcctctcacacagccttctggattgttttacctctgctccttcactccttaatagctctctgtggttaacctttctgtcctcctcagtcgcactggacgctccttgaggaacgggagctgtgaccagggccagagcccaggaaggtgctgggtacagagcagcagattggtaactgtttatatcacatgc

SEQ ID NO: 145026 - DNA, 176 bp, Homo sapiens
gatttcgagagaagcaatgggtaatctaaaaagatgaaaagagcaaccacgtctatcccacagctactgctagatttcataggaaaggtagctggcccagtttggagctaggagaaatgtcaaacacatgaagaaatgagaagcaaagaaatgccatcacacatgaatgcttcatg

SEQ ID NO: 145027 - DNA, 443 bp, Homo sapiens
tctgatccttgtgtttttctctccacattctaatgatgagcatttgggttgtttccagtctctagcaactagggcaaggaggggaagatgccagtgggacataccttcccaccagtattccaggttcctgcctggaacttgagttgtatttcccatagaggcagaggccagtgaggctagaagaagttatgttgagggtttggcaccattcgggttgtggtgggcttctgcaagatgatccaagcattgtttacaacttgaaaaatgtctgctaggctgggtgcagtggttcatacctgtaatcccagcactttgggaggccaaggtgggcagatcacctgagatcaggagttcaagaccagcctggccaacatggtgaaaccccatctctattaaaaatacaaaaaaaaaaaaaaaaaattagccaggcatggtggcacgtg

SEQ ID NO: 145028 - DNA, 510 bp, Homo sapiens
tgaaaaatatgaacacttctgtaatcccagcactctgggaggctgaagtgggtggatcccttgaggccaggagtctgagaccagcttgtgcaacatgcagaaaccttttcctaccgaaaaacaaagaaaatacaaaaattattcaggcatggtggtgcatgcttgtggtcctagctattggagaggctgaggtgggaggattgcctgagcccagggaggtcgatgctgcagtaagtaaaccatgattgcgccactgcactgtagccttggagacagagtgagaccttatctcaaaacaaacaaacaaaaaaccaaaaaaccctaatttttaactttattcatttttttttaaactttgccaagtcctgatggaaaaaaatattaccagttttatcttgtgacaagtgttttcattaaggctaatcagttttatagttgaagtatcttatagagataaactgtatgttaatttaaataaaggaaggtcatatttctcagatgtggctagta

SEQ ID NO: 145029 - DNA, 145 bp, Homo sapiens
tccacactcaggcatgatattgcacgtccacaaaacatttctgcgtggcctaaagctgtgcctactgcatccacaatcaatctccaaccttcaggcagttaagaccttcctgcatgctctgggtgtagatgcatgacagctaaca

SEQ ID NO: 145030 - DNA, 373 bp, Homo sapiens
accatcaatttgggaaattataacacctgggaaattatacaggggaaattatatagggcatcacctggcccacacctggcccatacctgtgacagtccacctggggctgaggaggcggtgcatccatggtggctgtgtgagaggtacacacatcctactatctcagcatgcctcccatgtaatggtgtcagagtactgatgggttgaaattcagagtagtttactgtggattactgttcttacctttctcttgtatcctaaagatagggatttaaatacatatatatttttaaaagttatatgtataggtgagttgtattatctttgaattccacttcaagacagtaaatgaggcatgcctaaatgttacaaa

SEQ ID NO: 145031 - DNA, 777 bp, Homo sapiens
ttttaatttatcttctcatgtaaaggtccttggcagtgatacctaatttcctaagatagccttgctttatattgtttgattaagatgtcatgcatatcagagaatctgaaaattcttcccaatgccgtcgacatacgtgattaatcacattaccaaaataacataccaaaacaaacaacagaaaattatttgttacttagttccttcaaatttgtttatctaattggtggttccttcatgcacaaaacgtttcatgtgtgtctggcactcttctggtcacaaatttcatcttaagtaacctaagtattgaaatgcttgtgctctttgattgatttttcctacataaatactttgataaaaagctacattgaggctgggcttagtggctcacacctccaatcccagctctttgggagcctgaggccagtggatcaggagatcaggagatcaaaaccatcctggccaacatggtgaaacctcatctcttcaaaaatacaaagaattagccaggagaggccaggtgctggatcatgcctgtaaccccacactttgggaggctgaggttggcagatcacctaaggtcaggaatttgagaccagtctgcccaacatggcaaaaccctgtttctactaaaaatacaaaaaattagccaggtgtggtggcaggcgcctgtaatcccagctacccaggaagctgaggcaggagaatcgcttgaacccaggatgcagaggttgcagtgagctgagatcatgccactgcactccagcctgggtgaca

SEQ ID NO: 145032 - DNA, 277 bp, Homo sapiens
actgatactaaattgcctgacagatcctagctttgactcgtggataattcaaatacaatttgcagctttcttgctaatgtagcttatgaaccatctcatgtgaagaaaattctggctaagctgggcaaagagttggtaagagtgcctgagaaatttcaaggaactctggagtgagcccaggggcaagacacattcaagagaactgcagtatcagtaagtgccacaccagtactcttgattaccactgctctggaatcacactgtatggtgctagctg

SEQ ID NO: 145033 - DNA, 414 bp, Homo sapiens
tgaggcaggagaatcagttgaacccgggaggcagaggttgcagtgagccgagatcatgccactgcactccagcctgggcgacaaagcaagactccgtccaaaaacaaaacaaaacaaaaccaagcagttatttcactagactcaagacatggctgcctcccctttgggaagtcaaaccccagtctctagcaaaataggatctagcagtaccactgtccaggggtatttctgatacctgctctgttctggtctgtagaacatttggcggggagcgtctatttgaatcctcacaacagacatgctagagagatgtctatcccgttattaacaaggaaaccagaatgtgaagtattcctagagctaaaaagggaaagaattggaacgtaggtcaggctgattctaaaccctgtgatc

SEQ ID NO: 145034 - DNA, 400 bp, Homo sapiens
gggatcccgtgtatacataacttggttccgtttattgtctccctttctcattagacctgagctggggaaacagtgatgctggccactgaggaagcatttaggccagtgctaaaaacaaaaactaaacacactgggggtggaggagggaggacagaggagacctgaaaagagggggagaatctggagcagctgagattgaggttgagcagaggggacgggcttctttgctgtttcagcatatagacccgagcaggtcctgaacctcactttcccctttgagatggggaaggttaaggggagagtagattgactcctagagggcacatggaatgaggagtgaggtggagctaagaggccccaagaggaagggcacccagagaaaggaaccagcactggccga

SEQ ID NO: 145035 - DNA, 309 bp, Homo sapiens
ggtttttaaaaatctttttattgatatctcgttttcttcatgcatcacttctaatattcttttgttgtctatgttctgtttttgttcattaagcacttttttctaattacattttaatgtaattagaatgtccacctttacaatacacaaatacagtaacggtaactcgaactaaaacaaagcatacttctgatagccattatttttctctttgggacaaatttaaagtttttcttttgtcacaaaaacaggaatgtacttatacaaaggctcaaaataggccatctttttaaacaaaaaggcaatgat

SEQ ID NO: 145036 - DNA, 616 bp, Homo sapiens
ccaggactgtttctttcccctgtttatcctgcttggggtttgttgaactttttgtgtctgtaagttaacattttccaccaaattctggaagtttttggccattgtatggacctggccaatgcacgcccttccctctccactcctgtgacggccattgtccacacgcagggtcactggctcttggccctcaggtctctgaggcttggctcatttttcttcaacctctgcattttgctttttttttttttttgagacagggtctcactctgtcacccaggctggagtgcagtgttgtgatcacggctcactgcagcttcgacctctcaggctgaagcaatccttctacctcagcttcccaagtagctggtactacaagtgtgcaccttcacgcccagccatttttttttgtactttttgtagaggtggggtctcactatgttgccctggctggtctccagctcctgggctcaagcgatctgcctgccttggtctcccaaagtgctaggatgacaggcgcgagccactgtgtccagctttctcttcattttgaatccagcaaattctattgctgtgttctcaagtttattttccttggccacctccagtgagtgatgtc

SEQ ID NO: 145037 - DNA, 246 bp, Homo sapiens
aactgttctcatataacacatcctgtaacctttgtcaaacccctgtaaacacttgtataagaattagaggagaaaagccaaaatggtagaattgtgaaaatggttttgagcttgtgcatcctgtaaaagagtctccgggatcccacaggattcaggaccacactttgagaaccactgcaatgagatcttgcctagctttccaagtagcttccaactagcttctcctggtgttcatactcaggacgt

SEQ ID NO: 145038 - DNA, 377 bp, Homo sapiens
cccccacactgccaccagctggctttctaaaataaaagtgctgaccacgtcactcacctcctgaaagatgtctactagatttgcactgcctatgaaataaactccaaagtcttcgcttgcatgcaggcatgcattaactcagtcatttgtccatccacccacctcgtgtttcaggatcgcccactgtgtgccaggctctgttttaggccctagagtgctgaatgcaatagataagaccaggtcccatcttcatggatttatattcttgtggggtaagacaaacactaaataagaagacaaacaaacatatcatataaagtcagagagtgatgagtgctaatgagagaaaccaaagcgaggtaggacagaatggttga

SEQ ID NO: 145039 - DNA, 824 bp, Homo sapiens
accccagtaattcatcagccttaattatatcagttggttcatcacctccagccaacttcttagagccagctttcctggagaaagagaggaggatcccttgatcattgaagcaagttagctgcttatacccagaaatctcagtgtaccacccccaccaaactcttttgccttttccatattccaccaactagccaacaacattagaggtaagaacacctccaggttttctggttaggaaattgggtgggccaggtgcagtgattcatgcctgtaatcccagcactttggggaggctaaggtgagaggattgcttgagcccaggagtgccagaccagcctgggcaacaaaggcagattgtgtctctgtttaaaaaaaaaaaaaaaaggaaattgggtattgggtgctgtcctgctcaatcacctgatgtgatgactcccaacaggaaattgaacagcgattacagcagcaggcagccctctcccccactacggctccagctgtgtccagtgtcagtaaacaagagaccatcatgagacatcatacgcttcggcaggctccacagccccagagcagcctccagcgtggcatacccacatctgcccgctccatgctttcaaactttgcacaggcaccccagttgtctgtgccaggtggcctccttggtatgccaggtaagaaggattaatctgaaaatgtttctcatgggtcagctgttagttagtatacagttctgtagcagcccctttaagggaattgttcctttactttctgttctttctttagggcatacactctcactcttctgttactcagcaaatgtttgc

SEQ ID NO: 145040 - DNA, 5252 bp, Homo sapiens
aatgttggcattgctcaaaaggaaggatttggcaaatcttgaggtgccacatgagttacccaccaaacaggatggcagtggtgtcaagggctatgaagaaaaacttaacgggaatctcaggcctcatggagacaacaggactgctggaaggccaggcaaagaaaacatcaatgatgagcctgtggatatgagtgctagacggagtgagccagagcgaggaaggctaactccctcaccagacatcattgttttgtctgacaatgaggcttccagtccccgttccagttccagaatggaagaaagactcaaagcagccaacttagagatgtttaaggggaaaggcattgaggagcggcagcagcttatcaagcagctgagggatgagctacgattggaagaagcccgactggtcctgttaaagaaactgagacagagtcagctacagaaagagaatgtggtccagaagactccagttgtacagaatgcagcatctattgttcagccatctcctgcccatgtgggacagcagggcctatctaagcttccctctcggcctggggcccaaggggttgaacctcaaaatttgagaacattacagggtcacagtgtcatccgttcagctaccaataccacccttccacacatgttgatgtctcaacgtgttattgcaccaaacccagcccagctacagggtcagcggggcccgcctaagcctggccttgtacgcaccacaacacccaacatgaatcccgccatcaattatcaaccgcagtcaagttcttctgttccatgtcagcgtacaacatcctctgccatctatatgaaccttgcttctcatatccagccagggacggtgaacagagtgtcctcgccacttcctagccccagcgccatgactgatgctgccaactcacaggctgcagccaaattggctcttcgcaaacagctggaaaagacactcctggagatcccaccccctaaacctcctgctcccttacttcatttcttgcctagtgcagccaatagcgagttcatctacatggtaggcttggaagaagtcgtacagagtgtcattgacagccaaggcaaaagctgtgcctcacttctgcgggttgaaccctttgtatgtgcccagtgccgcacagatttcacccctcactggaagcaagaaaagaatggtaagattctatgtgagcagtgtatgacctccaaccagaaaaaggctctaaaagctgaacacaccaaccggctgaaaaatgcatttgtgaaagccctacagcaggaacaggaaattgaacagcgattacagcagcaggcagccctctcccccactacggctccagctgtgtccagtgtcagtaaacaagagaccatcatgagacatcatacgcttcggcaggctccacagccccagagcagcctccagcgtggcatacccacatctgcccgctccatgctttcaaactttgcacaggcaccccagttgtctgtgccaggtggcctccttggtatgccaggtgtcaacattgcatacttgaatactggcatcggaggacacaaaggccccagtttggcagaccgacagcgtgaataccttttagacatgatccctccccggtctatatcgcagtccatcagtggacagaaataacgcctgttccacttgtactgccccatccttgaatcctttatccctttcctctttcattcccccaacttctgtcgcatgcagtgcctgtactggtgcctaccatacacggaaagcaaaacagaaaaacagaagacaaaaaatagagatcagcaagaaaacacacgccctgccctgccacctcccctttatttcacactgctgcgatctgttcttctgccgctctgtcttctctcttcagttttctttaacagtgaggtggatctttacctctgatagaggtcagaatgaggtcctggggagaatctaagccctccgatgtgtgtttctaaagttgttttatgctataattattaccatttttaatgatgttgtgtgtcctccctttgttcagtggacggttaaaccttcccccactcaaccaatctttttctttttccttttcttccttttttttttttttttttgtaaacacaaatgacattcagttcaatgatacgagcattgcagattgcagtaggggtcccagctgccaagtaggacatgactaggagtgttaggggcagaagttttgaatgcacttaaccggaggagggcgcagggtggggggtatcaaagaaggacgaatagcaccctacctgtgggtgtttgggggctggacaatttgggtggcagtgtttggtactgaagttgggctctaagaatgaggggaaagagcctggggaggagcttaaaactcaaccactctggaatttacccatagaagacgggaagaaagaggtatgaagatgggctcaattatgagccagggaggattgaaactaggtcctgcctttctgtatcttggggaaataagaccgatctcctgaccccattgggaacacggaagtctattccaggccaaccagcccaaaattatttcatcttgtattctttgtaaaattctccctcaccccaccctgcttttaaaaattctaatctatcccctctaaccatagccccatctataatacagaggaacggctgttccaaggctgtttgctgggtgtcccacaagttgggtggacataaatgagtcaagtgacaacaggaggaaatagacttagacgaaagaaaggatttctcttccaacagttgagattcgcatatttgcctattctttcaccctctgagtgccaggagatgagaggctgggggtacacaatcaggttggagtcctgtccttactctgctgcaccagctgcagaaccaactgctcaaagccaaacagctcatggcaaaaccagcttaggacctctgctgtacaaatagttgcttcccactgccccccgcccgcccccagaatgatattaattttgccttttttttttttttttttttaagcgctactaatgtagagaatgaattgaattgtgcaatgttgctgttctggggactggggagattagcatcccatttgcccacactgtgggaagacggagtggaccaggctgtttttgaagtaagggaagccccttaaaggtacgggtttctgctcttctcatagtgtacacccacctgcctctctggctccagaagctgccagagtgcactggggggaatgttctcagcagagaagaatgaggagaagtttaatattttgcccttgaaagtcacctgaggaagtttccccacttttattttttaaaattaagtaattttttaaagaaggcacttttaaaattaacacacacatgaactgcacaccttccccataaaatttggaggtggggtgggagaaagagctaaaatcaggctcagttcccctactctggcctctactccccacaccccagtgccactgtgggtgactatactggccctacgggccttcctggcttttttctttcctcccttaccccaaattcattgagcacttaaaggagcagagatgcagccagtgtctgggctcccccagtggtgaaatgatctggaagctagatgctagtaacaggtagtgattgggttttttgagtatttttccggggaatgtggtacccctgactgtaagtggtgggagagggaggggggttaatggaactgggtctgggattattttaaaattatatatatatatataaagatatattcttacatcttttctttgccctctgtgctttgaaagcactggataaattgtttggttttgcttttctctcttccacaaaattggaagctttttttaaaaatgttttccccacaagtcatcttgccttgtggcatgtctgtctagcctcttcctccctccctcatgatgaagtgccatttctgttacgtctccctctccccaagctcagaggtgctcagaggtacgagatgcccaagtttgtcagttgagattaaaagtaaggaacagagaatgtgcaataccgtctggctgggggctgtccctgccctgccctgagctgagtcctttccctgggagccaggccaccttagaatggggtttggaagtaagatgtatagagttggggaatcatggagaaggaaagcctatagtcgagtgcctgcttaggtgctgaggtcacaggggagatggtggaatcttccctgtttttatcccctcagggtcagttacatagaagctgcttcttgactagtatagctcggtgaccctttgttcaaccgctgaggtttgatttcttaccctttcttctccccattttcatactcttcccagggattagtgatggaggtgaggtctccctaatcatggtaaagtgttaaccttccacctcctcccttccctcctccttcctcatccttctgtcttcctcaattctccgtctcttttttttcatcactgattgccttgtgtccctccaagtctacttgttactatccatctccaggctctgggccgtgtagacactaaacctcatgccctaaggacaggaggaaagaccctctgtttggagcattattagtagagtgaggatcccaccagttctgcctggcttcctccatccccagaggcactaaaagcagtattttaaggttggtgtcttactccctggaagcctgaaatgggtggaatagcggtaaggcttgagtaaaactaggggacagaggttcttatttgtcgattttattttataatttgaccacagcatctgaactccctctctccctggaataagtatttttcccacatttttggatatatgtatggtagacaatttttttttaagacacagagataaatgttttcctgctttggttacctttcctttcccctttaaaaggaattagctatagaactgctttgtaaagatgcttcttgatattttacttttgttccttttccctaatcattcccttttctccccactcctccagaaggcataacccttctctccacaccccctacccccacccccgtcctaggctcccatcctttccatcaagaccttcattagcttatgatatttgctgccgagatgttataacaaggactcgttcatgtatataagctatttcttgatccatttaaaaggaattgtacattgtgtagaaaaaaaaaaaacctgaaaaagagaaaaaaaagccctagccatggatattg

SEQ ID NO: 145041 - DNA, 4968 bp, Homo sapiens
tggggacctgtctgtacgacagccgctgtcgcggccagggagtgcaacctgggaaaggcattgaggagcggcagcagcttatcaagcagctgagggatgagctacgattggaagaagcccgactggtcctgttaaagaaactgagacagagtcagctacagaaagagaatgtggtccagaagactccagttgtacagaatgcagcatctattgttcagccatctcctgcccatgtgggacagcagggcctatctaagcttccctctcggcctggggcccaaggggttgaacctcaaaatttgagaacattacagggtcacagtgtcatccgttcagctaccaataccacccttccacacatgttgatgtctcaacgtgttattgcaccaaacccagcccagctacagggtcagcggggcccgcctaagcctggccttgtacgcaccacaacacccaacatgaatcccgccatcaattatcaaccgcagtcaagttcttctgttccatgtcagcgtacaacatcctctgccatctatatgaaccttgcttctcatatccagccagggacggtgaacagagtgtcctcgccacttcctagccccagcgccatgactgatgctgccaactcacaggctgcagccaaattggctcttcgcaaacagctggaaaagacactcctggagatcccaccccctaaacctcctgctcccttacttcatttcttgcctagtgcagccaatagcgagttcatctacatggtaggcttggaagaagtcgtacagagtgtcattgacagccaaggcaaaagctgtgcctcacttctgcgggttgaaccctttgtatgtgcccagtgccgcacagatttcacccctcactggaagcaagaaaagaatggtaagattctatgtgagcagtgtatgacctccaaccagaaaaaggctctaaaagctgaacacaccaaccggctgaaaaatgcatttgtgaaagccctacagcaggaacaggaaattgaacagcgattacagcagcaggcagccctctcccccactacggctccagctgtgtccagtgtcagtaaacaagagaccatcatgagacatcatacgcttcggcaggctccacagccccagagcagcctccagcgtggcatacccacatctgcccgctccatgctttcaaactttgcacaggcaccccagttgtctgtgccaggtggcctccttggtatgccaggtgtcaacattgcatacttgaatactggcatcggaggacacaaaggccccagtttggcagaccgacagcgtgaataccttttagacatgatccctccccggtctatatcgcagtccatcagtggacagaaataacgcctgttccacttgtactgccccatccttgaatcctttatccctttcctctttcattcccccaacttctgtcgcatgcagtgcctgtactggtgcctaccatacacggaaagcaaaacagaaaaacagaagacaaaaaatagagatcagcaagaaaacacacgccctgccctgccacctcccctttatttcacactgctgcgatctgttcttctgccgctctgtcttctctcttcagttttctttaacagtgaggtggatctttacctctgatagaggtcagaatgaggtcctggggagaatctaagccctccgatgtgtgtttctaaagttgttttatgctataattattaccatttttaatgatgttgtgtgtcctccctttgttcagtggacggttaaaccttcccccactcaaccaatctttttctttttccttttcttccttttttttttttttttttgtaaacacaaatgacattcagttcaatgatacgagcattgcagattgcagtaggggtcccagctgccaagtaggacatgactaggagtgttaggggcagaagttttgaatgcacttaaccggaggagggcgcagggtggggggtatcaaagaaggacgaatagcaccctacctgtgggtgtttgggggctggacaatttgggtggcagtgtttggtactgaagttgggctctaagaatgaggggaaagagcctggggaggagcttaaaactcaaccactctggaatttacccatagaagacgggaagaaagaggtatgaagatgggctcaattatgagccagggaggattgaaactaggtcctgcctttctgtatcttggggaaataagaccgatctcctgaccccattgggaacacggaagtctattccaggccaaccagcccaaaattatttcatcttgtattctttgtaaaattctccctcaccccaccctgcttttaaaaattctaatctatcccctctaaccatagccccatctataatacagaggaacggctgttccaaggctgtttgctgggtgtcccacaagttgggtggacataaatgagtcaagtgacaacaggaggaaatagacttagacgaaagaaaggatttctcttccaacagttgagattcgcatatttgcctattctttcaccctctgagtgccaggagatgagaggctgggggtacacaatcaggttggagtcctgtccttactctgctgcaccagctgcagaaccaactgctcaaagccaaacagctcatggcaaaaccagcttaggacctctgctgtacaaatagttgcttcccactgccccccgcccgcccccagaatgatattaattttgccttttttttttttttttttttaagcgctactaatgtagagaatgaattgaattgtgcaatgttgctgttctggggactggggagattagcatcccatttgcccacactgtgggaagacggagtggaccaggctgtttttgaagtaagggaagccccttaaaggtacgggtttctgctcttctcatagtgtacacccacctgcctctctggctccagaagctgccagagtgcactggggggaatgttctcagcagagaagaatgaggagaagtttaatattttgcccttgaaagtcacctgaggaagtttccccacttttattttttaaaattaagtaattttttaaagaaggcacttttaaaattaacacacacatgaactgcacaccttccccataaaatttggaggtggggtgggagaaagagctaaaatcaggctcagttcccctactctggcctctactccccacaccccagtgccactgtgggtgactatactggccctacgggccttcctggcttttttctttcctcccttaccccaaattcattgagcacttaaaggagcagagatgcagccagtgtctgggctcccccagtggtgaaatgatctggaagctagatgctagtaacaggtagtgattgggttttttgagtatttttccggggaatgtggtacccctgactgtaagtggtgggagagggaggggggttaatggaactgggtctgggattattttaaaattatatatatatatataaagatatattcttacatcttttctttgccctctgtgctttgaaagcactggataaattgtttggttttgcttttctctcttccacaaaattggaagctttttttaaaaatgttttccccacaagtcatcttgccttgtggcatgtctgtctagcctcttcctccctccctcatgatgaagtgccatttctgttacgtctccctctccccaagctcagaggtgctcagaggtacgagatgcccaagtttgtcagttgagattaaaagtaaggaacagagaatgtgcaataccgtctggctgggggctgtccctgccctgccctgagctgagtcctttccctgggagccaggccaccttagaatggggtttggaagtaagatgtatagagttggggaatcatggagaaggaaagcctatagtcgagtgcctgcttaggtgctgaggtcacaggggagatggtggaatcttccctgtttttatcccctcagggtcagttacatagaagctgcttcttgactagtatagctcggtgaccctttgttcaaccgctgaggtttgatttcttaccctttcttctccccattttcatactcttcccagggattagtgatggaggtgaggtctccctaatcatggtaaagtgttaaccttccacctcctcccttccctcctccttcctcatccttctgtcttcctcaattctccgtctcttttttttcatcactgattgccttgtgtccctccaagtctacttgttactatccatctccaggctctgggccgtgtagacactaaacctcatgccctaaggacaggaggaaagaccctctgtttggagcattattagtagagtgaggatcccaccagttctgcctggcttcctccatccccagaggcactaaaagcagtattttaaggttggtgtcttactccctggaagcctgaaatgggtggaatagcggtaaggcttgagtaaaactaggggacagaggttcttatttgtcgattttattttataatttgaccacagcatctgaactccctctctccctggaataagtatttttcccacatttttggatatatgtatggtagacaatttttttttaagacacagagataaatgttttcctgctttggttacctttcctttcccctttaaaaggaattagctatagaactgctttgtaaagatgcttcttgatattttacttttgttccttttccctaatcattcccttttctccccactcctccagaaggcataacccttctctccacaccccctacccccacccccgtcctaggctcccatcctttccatcaagaccttcattagcttatgatatttgctgccgagatgttataacaaggactcgttcatgtatataagctatttcttgatccatttaaaaggaattgtacattgtgtagaaaaaaaaaaaacctgaaaaagagaaaaaaaagccctagccatggatattg

SEQ ID NO: 145042 - DNA, 4873 bp, Homo sapiens
gcatatcttattactgggaatgctctcgtttgaaagtatcttgacaggattttttccctttctgtctcctatctctggaactagatcccatatgtacgttgatatggatcatctattgttcagccatctcctgcccatgtgggacagcagggcctatctaagcttccctctcggcctggggcccaaggggttgaacctcaaaatttgagaacattacagggtcacagtgtcatccgttcagctaccaataccacccttccacacatgttgatgtctcaacgtgttattgcaccaaacccagcccagctacagggtcagcggggcccgcctaagcctggccttgtacgcaccacaacacccaacatgaatcccgccatcaattatcaaccgcagtcaagttcttctgttccatgtcagcgtacaacatcctctgccatctatatgaaccttgcttctcatatccagccagggacggtgaacagagtgtcctcgccacttcctagccccagcgccatgactgatgctgccaactcacaggctgcagccaaattggctcttcgcaaacagctggaaaagacactcctggagatcccaccccctaaacctcctgctcccttacttcatttcttgcctagtgcagccaatagcgagttcatctacatggtaggcttggaagaagtcgtacagagtgtcattgacagccaaggcaaaagctgtgcctcacttctgcgggttgaaccctttgtatgtgcccagtgccgcacagatttcacccctcactggaagcaagaaaagaatggtaagattctatgtgagcagtgtatgacctccaaccagaaaaaggctctaaaagctgaacacaccaaccggctgaaaaatgcatttgtgaaagccctacagcaggaacaggaaattgaacagcgattacagcagcaggcagccctctcccccactacggctccagctgtgtccagtgtcagtaaacaagagaccatcatgagacatcatacgcttcggcaggctccacagccccagagcagcctccagcgtggcatacccacatctgcccgctccatgctttcaaactttgcacaggcaccccagttgtctgtgccaggtggcctccttggtatgccaggtgtcaacattgcatacttgaatactggcatcggaggacacaaaggccccagtttggcagaccgacagcgtgaataccttttagacatgatccctccccggtctatatcgcagtccatcagtggacagaaataacgcctgttccacttgtactgccccatccttgaatcctttatccctttcctctttcattcccccaacttctgtcgcatgcagtgcctgtactggtgcctaccatacacggaaagcaaaacagaaaaacagaagacaaaaaatagagatcagcaagaaaacacacgccctgccctgccacctcccctttatttcacactgctgcgatctgttcttctgccgctctgtcttctctcttcagttttctttaacagtgaggtggatctttacctctgatagaggtcagaatgaggtcctggggagaatctaagccctccgatgtgtgtttctaaagttgttttatgctataattattaccatttttaatgatgttgtgtgtcctccctttgttcagtggacggttaaaccttcccccactcaaccaatctttttctttttccttttcttccttttttttttttttttttgtaaacacaaatgacattcagttcaatgatacgagcattgcagattgcagtaggggtcccagctgccaagtaggacatgactaggagtgttaggggcagaagttttgaatgcacttaaccggaggagggcgcagggtggggggtatcaaagaaggacgaatagcaccctacctgtgggtgtttgggggctggacaatttgggtggcagtgtttggtactgaagttgggctctaagaatgaggggaaagagcctggggaggagcttaaaactcaaccactctggaatttacccatagaagacgggaagaaagaggtatgaagatgggctcaattatgagccagggaggattgaaactaggtcctgcctttctgtatcttggggaaataagaccgatctcctgaccccattgggaacacggaagtctattccaggccaaccagcccaaaattatttcatcttgtattctttgtaaaattctccctcaccccaccctgcttttaaaaattctaatctatcccctctaaccatagccccatctataatacagaggaacggctgttccaaggctgtttgctgggtgtcccacaagttgggtggacataaatgagtcaagtgacaacaggaggaaatagacttagacgaaagaaaggatttctcttccaacagttgagattcgcatatttgcctattctttcaccctctgagtgccaggagatgagaggctgggggtacacaatcaggttggagtcctgtccttactctgctgcaccagctgcagaaccaactgctcaaagccaaacagctcatggcaaaaccagcttaggacctctgctgtacaaatagttgcttcccactgccccccgcccgcccccagaatgatattaattttgccttttttttttttttttttttaagcgctactaatgtagagaatgaattgaattgtgcaatgttgctgttctggggactggggagattagcatcccatttgcccacactgtgggaagacggagtggaccaggctgtttttgaagtaagggaagccccttaaaggtacgggtttctgctcttctcatagtgtacacccacctgcctctctggctccagaagctgccagagtgcactggggggaatgttctcagcagagaagaatgaggagaagtttaatattttgcccttgaaagtcacctgaggaagtttccccacttttattttttaaaattaagtaattttttaaagaaggcacttttaaaattaacacacacatgaactgcacaccttccccataaaatttggaggtggggtgggagaaagagctaaaatcaggctcagttcccctactctggcctctactccccacaccccagtgccactgtgggtgactatactggccctacgggccttcctggcttttttctttcctcccttaccccaaattcattgagcacttaaaggagcagagatgcagccagtgtctgggctcccccagtggtgaaatgatctggaagctagatgctagtaacaggtagtgattgggttttttgagtatttttccggggaatgtggtacccctgactgtaagtggtgggagagggaggggggttaatggaactgggtctgggattattttaaaattatatatatatatataaagatatattcttacatcttttctttgccctctgtgctttgaaagcactggataaattgtttggttttgcttttctctcttccacaaaattggaagctttttttaaaaatgttttccccacaagtcatcttgccttgtggcatgtctgtctagcctcttcctccctccctcatgatgaagtgccatttctgttacgtctccctctccccaagctcagaggtgctcagaggtacgagatgcccaagtttgtcagttgagattaaaagtaaggaacagagaatgtgcaataccgtctggctgggggctgtccctgccctgccctgagctgagtcctttccctgggagccaggccaccttagaatggggtttggaagtaagatgtatagagttggggaatcatggagaaggaaagcctatagtcgagtgcctgcttaggtgctgaggtcacaggggagatggtggaatcttccctgtttttatcccctcagggtcagttacatagaagctgcttcttgactagtatagctcggtgaccctttgttcaaccgctgaggtttgatttcttaccctttcttctccccattttcatactcttcccagggattagtgatggaggtgaggtctccctaatcatggtaaagtgttaaccttccacctcctcccttccctcctccttcctcatccttctgtcttcctcaattctccgtctcttttttttcatcactgattgccttgtgtccctccaagtctacttgttactatccatctccaggctctgggccgtgtagacactaaacctcatgccctaaggacaggaggaaagaccctctgtttggagcattattagtagagtgaggatcccaccagttctgcctggcttcctccatccccagaggcactaaaagcagtattttaaggttggtgtcttactccctggaagcctgaaatgggtggaatagcggtaaggcttgagtaaaactaggggacagaggttcttatttgtcgattttattttataatttgaccacagcatctgaactccctctctccctggaataagtatttttcccacatttttggatatatgtatggtagacaatttttttttaagacacagagataaatgttttcctgctttggttacctttcctttcccctttaaaaggaattagctatagaactgctttgtaaagatgcttcttgatattttacttttgttccttttccctaatcattcccttttctccccactcctccagaaggcataacccttctctccacaccccctacccccacccccgtcctaggctcccatcctttccatcaagaccttcattagcttatgatatttgctgccgagatgttataacaaggactcgttcatgtatataagctatttcttgatccatttaaaaggaattgtacattgtgtagaaaaaaaaaaaacctgaaaaagagaaaaaaaagccctagccatggatattg

SEQ ID NO: 145043 - DNA, 4320 bp, Homo sapiens
tcgagcgtcggtaccccgtataccaccctataccaccctataccactaggctataccaccaacagaataaactcctggaaaagatctatttgattaagagaaacagaggagataggaaatgtaaagccactgactatttttgttggtatctaggcaaaagctgtgcctcacttctgcgggttgaaccctttgtatgtgcccagtgccgcacagatttcacccctcactggaagcaagaaaagaatggtaagattctatgtgagcagtgtatgacctccaaccagaaaaaggctctaaaagctgaacacaccaaccggctgaaaaatgcatttgtgaaagccctacagcaggaacaggaaattgaacagcgattacagcagcaggcagccctctcccccactacggctccagctgtgtccagtgtcagtaaacaagagaccatcatgagacatcatacgcttcggcaggctccacagccccagagcagcctccagcgtggcatacccacatctgcccgctccatgctttcaaactttgcacaggcaccccagttgtctgtgccaggtggcctccttggtatgccaggtgtcaacattgcatacttgaatactggcatcggaggacacaaaggccccagtttggcagaccgacagcgtgaataccttttagacatgatccctccccggtctatatcgcagtccatcagtggacagaaataacgcctgttccacttgtactgccccatccttgaatcctttatccctttcctctttcattcccccaacttctgtcgcatgcagtgcctgtactggtgcctaccatacacggaaagcaaaacagaaaaacagaagacaaaaaatagagatcagcaagaaaacacacgccctgccctgccacctcccctttatttcacactgctgcgatctgttcttctgccgctctgtcttctctcttcagttttctttaacagtgaggtggatctttacctctgatagaggtcagaatgaggtcctggggagaatctaagccctccgatgtgtgtttctaaagttgttttatgctataattattaccatttttaatgatgttgtgtgtcctccctttgttcagtggacggttaaaccttcccccactcaaccaatctttttctttttccttttcttccttttttttttttttttttgtaaacacaaatgacattcagttcaatgatacgagcattgcagattgcagtaggggtcccagctgccaagtaggacatgactaggagtgttaggggcagaagttttgaatgcacttaaccggaggagggcgcagggtggggggtatcaaagaaggacgaatagcaccctacctgtgggtgtttgggggctggacaatttgggtggcagtgtttggtactgaagttgggctctaagaatgaggggaaagagcctggggaggagcttaaaactcaaccactctggaatttacccatagaagacgggaagaaagaggtatgaagatgggctcaattatgagccagggaggattgaaactaggtcctgcctttctgtatcttggggaaataagaccgatctcctgaccccattgggaacacggaagtctattccaggccaaccagcccaaaattatttcatcttgtattctttgtaaaattctccctcaccccaccctgcttttaaaaattctaatctatcccctctaaccatagccccatctataatacagaggaacggctgttccaaggctgtttgctgggtgtcccacaagttgggtggacataaatgagtcaagtgacaacaggaggaaatagacttagacgaaagaaaggatttctcttccaacagttgagattcgcatatttgcctattctttcaccctctgagtgccaggagatgagaggctgggggtacacaatcaggttggagtcctgtccttactctgctgcaccagctgcagaaccaactgctcaaagccaaacagctcatggcaaaaccagcttaggacctctgctgtacaaatagttgcttcccactgccccccgcccgcccccagaatgatattaattttgccttttttttttttttttttttaagcgctactaatgtagagaatgaattgaattgtgcaatgttgctgttctggggactggggagattagcatcccatttgcccacactgtgggaagacggagtggaccaggctgtttttgaagtaagggaagccccttaaaggtacgggtttctgctcttctcatagtgtacacccacctgcctctctggctccagaagctgccagagtgcactggggggaatgttctcagcagagaagaatgaggagaagtttaatattttgcccttgaaagtcacctgaggaagtttccccacttttattttttaaaattaagtaattttttaaagaaggcacttttaaaattaacacacacatgaactgcacaccttccccataaaatttggaggtggggtgggagaaagagctaaaatcaggctcagttcccctactctggcctctactccccacaccccagtgccactgtgggtgactatactggccctacgggccttcctggcttttttctttcctcccttaccccaaattcattgagcacttaaaggagcagagatgcagccagtgtctgggctcccccagtggtgaaatgatctggaagctagatgctagtaacaggtagtgattgggttttttgagtatttttccggggaatgtggtacccctgactgtaagtggtgggagagggaggggggttaatggaactgggtctgggattattttaaaattatatatatatatataaagatatattcttacatcttttctttgccctctgtgctttgaaagcactggataaattgtttggttttgcttttctctcttccacaaaattggaagctttttttaaaaatgttttccccacaagtcatcttgccttgtggcatgtctgtctagcctcttcctccctccctcatgatgaagtgccatttctgttacgtctccctctccccaagctcagaggtgctcagaggtacgagatgcccaagtttgtcagttgagattaaaagtaaggaacagagaatgtgcaataccgtctggctgggggctgtccctgccctgccctgagctgagtcctttccctgggagccaggccaccttagaatggggtttggaagtaagatgtatagagttggggaatcatggagaaggaaagcctatagtcgagtgcctgcttaggtgctgaggtcacaggggagatggtggaatcttccctgtttttatcccctcagggtcagttacatagaagctgcttcttgactagtatagctcggtgaccctttgttcaaccgctgaggtttgatttcttaccctttcttctccccattttcatactcttcccagggattagtgatggaggtgaggtctccctaatcatggtaaagtgttaaccttccacctcctcccttccctcctccttcctcatccttctgtcttcctcaattctccgtctcttttttttcatcactgattgccttgtgtccctccaagtctacttgttactatccatctccaggctctgggccgtgtagacactaaacctcatgccctaaggacaggaggaaagaccctctgtttggagcattattagtagagtgaggatcccaccagttctgcctggcttcctccatccccagaggcactaaaagcagtattttaaggttggtgtcttactccctggaagcctgaaatgggtggaatagcggtaaggcttgagtaaaactaggggacagaggttcttatttgtcgattttattttataatttgaccacagcatctgaactccctctctccctggaataagtatttttcccacatttttggatatatgtatggtagacaatttttttttaagacacagagataaatgttttcctgctttggttacctttcctttcccctttaaaaggaattagctatagaactgctttgtaaagatgcttcttgatattttacttttgttccttttccctaatcattcccttttctccccactcctccagaaggcataacccttctctccacaccccctacccccacccccgtcctaggctcccatcctttccatcaagaccttcattagcttatgatatttgctgccgagatgttataacaaggactcgttcatgtatataagctatttcttgatccatttaaaaggaattgtacattgtgtagaaaaaaaaaaaacctgaaaaagagaaaaaaaagccctagccatggatattg

SEQ ID NO: 145044 - DNA, 4053 bp, Homo sapiens
taatctgtaccatgcggtagtggcacgcgcctataattccagctactctggaggctgaggcaggagaattgcttgagtctgggaggcagaggtgagcggagatcacaccactgcactccagcctgggtgacagaatgagactgcatctcaaaaaaagaaaaagaaagttgctgttgaaataaagctaaccaagtgtgaccagatactggtaaattctgcttcctttccatctccaactctgcagcccgagggtagagtggaagggaatgttatttcctcttttaatacctgccctccacttttgtctcctgggtccaggtgtcaacattgcatacttgaatactggcatcggaggacacaaaggccccagtttggcagaccgacagcgtgaataccttttagacatgatccctccccggtctatatcgcagtccatcagtggacagaaataacgcctgttccacttgtactgccccatccttgaatcctttatccctttcctctttcattcccccaacttctgtcgcatgcagtgcctgtactggtgcctaccatacacggaaagcaaaacagaaaaacagaagacaaaaaatagagatcagcaagaaaacacacgccctgccctgccacctcccctttatttcacactgctgcgatctgttcttctgccgctctgtcttctctcttcagttttctttaacagtgaggtggatctttacctctgatagaggtcagaatgaggtcctggggagaatctaagccctccgatgtgtgtttctaaagttgttttatgctataattattaccatttttaatgatgttgtgtgtcctccctttgttcagtggacggttaaaccttcccccactcaaccaatctttttctttttccttttcttccttttttttttttttttttgtaaacacaaatgacattcagttcaatgatacgagcattgcagattgcagtaggggtcccagctgccaagtaggacatgactaggagtgttaggggcagaagttttgaatgcacttaaccggaggagggcgcagggtggggggtatcaaagaaggacgaatagcaccctacctgtgggtgtttgggggctggacaatttgggtggcagtgtttggtactgaagttgggctctaagaatgaggggaaagagcctggggaggagcttaaaactcaaccactctggaatttacccatagaagacgggaagaaagaggtatgaagatgggctcaattatgagccagggaggattgaaactaggtcctgcctttctgtatcttggggaaataagaccgatctcctgaccccattgggaacacggaagtctattccaggccaaccagcccaaaattatttcatcttgtattctttgtaaaattctccctcaccccaccctgcttttaaaaattctaatctatcccctctaaccatagccccatctataatacagaggaacggctgttccaaggctgtttgctgggtgtcccacaagttgggtggacataaatgagtcaagtgacaacaggaggaaatagacttagacgaaagaaaggatttctcttccaacagttgagattcgcatatttgcctattctttcaccctctgagtgccaggagatgagaggctgggggtacacaatcaggttggagtcctgtccttactctgctgcaccagctgcagaaccaactgctcaaagccaaacagctcatggcaaaaccagcttaggacctctgctgtacaaatagttgcttcccactgccccccgcccgcccccagaatgatattaattttgccttttttttttttttttttttaagcgctactaatgtagagaatgaattgaattgtgcaatgttgctgttctggggactggggagattagcatcccatttgcccacactgtgggaagacggagtggaccaggctgtttttgaagtaagggaagccccttaaaggtacgggtttctgctcttctcatagtgtacacccacctgcctctctggctccagaagctgccagagtgcactggggggaatgttctcagcagagaagaatgaggagaagtttaatattttgcccttgaaagtcacctgaggaagtttccccacttttattttttaaaattaagtaattttttaaagaaggcacttttaaaattaacacacacatgaactgcacaccttccccataaaatttggaggtggggtgggagaaagagctaaaatcaggctcagttcccctactctggcctctactccccacaccccagtgccactgtgggtgactatactggccctacgggccttcctggcttttttctttcctcccttaccccaaattcattgagcacttaaaggagcagagatgcagccagtgtctgggctcccccagtggtgaaatgatctggaagctagatgctagtaacaggtagtgattgggttttttgagtatttttccggggaatgtggtacccctgactgtaagtggtgggagagggaggggggttaatggaactgggtctgggattattttaaaattatatatatatatataaagatatattcttacatcttttctttgccctctgtgctttgaaagcactggataaattgtttggttttgcttttctctcttccacaaaattggaagctttttttaaaaatgttttccccacaagtcatcttgccttgtggcatgtctgtctagcctcttcctccctccctcatgatgaagtgccatttctgttacgtctccctctccccaagctcagaggtgctcagaggtacgagatgcccaagtttgtcagttgagattaaaagtaaggaacagagaatgtgcaataccgtctggctgggggctgtccctgccctgccctgagctgagtcctttccctgggagccaggccaccttagaatggggtttggaagtaagatgtatagagttggggaatcatggagaaggaaagcctatagtcgagtgcctgcttaggtgctgaggtcacaggggagatggtggaatcttccctgtttttatcccctcagggtcagttacatagaagctgcttcttgactagtatagctcggtgaccctttgttcaaccgctgaggtttgatttcttaccctttcttctccccattttcatactcttcccagggattagtgatggaggtgaggtctccctaatcatggtaaagtgttaaccttccacctcctcccttccctcctccttcctcatccttctgtcttcctcaattctccgtctcttttttttcatcactgattgccttgtgtccctccaagtctacttgttactatccatctccaggctctgggccgtgtagacactaaacctcatgccctaaggacaggaggaaagaccctctgtttggagcattattagtagagtgaggatcccaccagttctgcctggcttcctccatccccagaggcactaaaagcagtattttaaggttggtgtcttactccctggaagcctgaaatgggtggaatagcggtaaggcttgagtaaaactaggggacagaggttcttatttgtcgattttattttataatttgaccacagcatctgaactccctctctccctggaataagtatttttcccacatttttggatatatgtatggtagacaatttttttttaagacacagagataaatgttttcctgctttggttacctttcctttcccctttaaaaggaattagctatagaactgctttgtaaagatgcttcttgatattttacttttgttccttttccctaatcattcccttttctccccactcctccagaaggcataacccttctctccacaccccctacccccacccccgtcctaggctcccatcctttccatcaagaccttcattagcttatgatatttgctgccgagatgttataacaaggactcgttcatgtatataagctatttcttgatccatttaaaaggaattgtacattgtgtagaaaaaaaaaaaacctgaaaaagagaaaaaaaagccctagccatggatattg

SEQ ID NO: 145045 - DNA, 4406 bp, Homo sapiens
accccagtaattcatcagccttaattatatcagttggttcatcacctccagccaacttcttagagccagctttcctggagaaagagaggaggatcccttgatcattgaagcaagttagctgcttatacccagaaatctcagtgtaccacccccaccaaactcttttgccttttccatattccaccaactagccaacaacattagaggtaagaacacctccaggttttctggttaggaaattgggtgggccaggtgcagtgattcatgcctgtaatcccagcactttggggaggctaaggtgagaggattgcttgagcccaggagtgccagaccagcctgggcaacaaaggcagattgtgtctctgtttaaaaaaaaaaaaaaaaggaaattgggtattgggtgctgtcctgctcaatcacctgatgtgatgactcccaacaggaaattgaacagcgattacagcagcaggcagccctctcccccactacggctccagctgtgtccagtgtcagtaaacaagagaccatcatgagacatcatacgcttcggcaggctccacagccccagagcagcctccagcgtggcatacccacatctgcccgctccatgctttcaaactttgcacaggcaccccagttgtctgtgccaggtggcctccttggtatgccaggtgtcaacattgcatacttgaatactggcatcggaggacacaaaggccccagtttggcagaccgacagcgtgaataccttttagacatgatccctccccggtctatatcgcagtccatcagtggacagaaataacgcctgttccacttgtactgccccatccttgaatcctttatccctttcctctttcattcccccaacttctgtcgcatgcagtgcctgtactggtgcctaccatacacggaaagcaaaacagaaaaacagaagacaaaaaatagagatcagcaagaaaacacacgccctgccctgccacctcccctttatttcacactgctgcgatctgttcttctgccgctctgtcttctctcttcagttttctttaacagtgaggtggatctttacctctgatagaggtcagaatgaggtcctggggagaatctaagccctccgatgtgtgtttctaaagttgttttatgctataattattaccatttttaatgatgttgtgtgtcctccctttgttcagtggacggttaaaccttcccccactcaaccaatctttttctttttccttttcttccttttttttttttttttttgtaaacacaaatgacattcagttcaatgatacgagcattgcagattgcagtaggggtcccagctgccaagtaggacatgactaggagtgttaggggcagaagttttgaatgcacttaaccggaggagggcgcagggtggggggtatcaaagaaggacgaatagcaccctacctgtgggtgtttgggggctggacaatttgggtggcagtgtttggtactgaagttgggctctaagaatgaggggaaagagcctggggaggagcttaaaactcaaccactctggaatttacccatagaagacgggaagaaagaggtatgaagatgggctcaattatgagccagggaggattgaaactaggtcctgcctttctgtatcttggggaaataagaccgatctcctgaccccattgggaacacggaagtctattccaggccaaccagcccaaaattatttcatcttgtattctttgtaaaattctccctcaccccaccctgcttttaaaaattctaatctatcccctctaaccatagccccatctataatacagaggaacggctgttccaaggctgtttgctgggtgtcccacaagttgggtggacataaatgagtcaagtgacaacaggaggaaatagacttagacgaaagaaaggatttctcttccaacagttgagattcgcatatttgcctattctttcaccctctgagtgccaggagatgagaggctgggggtacacaatcaggttggagtcctgtccttactctgctgcaccagctgcagaaccaactgctcaaagccaaacagctcatggcaaaaccagcttaggacctctgctgtacaaatagttgcttcccactgccccccgcccgcccccagaatgatattaattttgccttttttttttttttttttttaagcgctactaatgtagagaatgaattgaattgtgcaatgttgctgttctggggactggggagattagcatcccatttgcccacactgtgggaagacggagtggaccaggctgtttttgaagtaagggaagccccttaaaggtacgggtttctgctcttctcatagtgtacacccacctgcctctctggctccagaagctgccagagtgcactggggggaatgttctcagcagagaagaatgaggagaagtttaatattttgcccttgaaagtcacctgaggaagtttccccacttttattttttaaaattaagtaattttttaaagaaggcacttttaaaattaacacacacatgaactgcacaccttccccataaaatttggaggtggggtgggagaaagagctaaaatcaggctcagttcccctactctggcctctactccccacaccccagtgccactgtgggtgactatactggccctacgggccttcctggcttttttctttcctcccttaccccaaattcattgagcacttaaaggagcagagatgcagccagtgtctgggctcccccagtggtgaaatgatctggaagctagatgctagtaacaggtagtgattgggttttttgagtatttttccggggaatgtggtacccctgactgtaagtggtgggagagggaggggggttaatggaactgggtctgggattattttaaaattatatatatatatataaagatatattcttacatcttttctttgccctctgtgctttgaaagcactggataaattgtttggttttgcttttctctcttccacaaaattggaagctttttttaaaaatgttttccccacaagtcatcttgccttgtggcatgtctgtctagcctcttcctccctccctcatgatgaagtgccatttctgttacgtctccctctccccaagctcagaggtgctcagaggtacgagatgcccaagtttgtcagttgagattaaaagtaaggaacagagaatgtgcaataccgtctggctgggggctgtccctgccctgccctgagctgagtcctttccctgggagccaggccaccttagaatggggtttggaagtaagatgtatagagttggggaatcatggagaaggaaagcctatagtcgagtgcctgcttaggtgctgaggtcacaggggagatggtggaatcttccctgtttttatcccctcagggtcagttacatagaagctgcttcttgactagtatagctcggtgaccctttgttcaaccgctgaggtttgatttcttaccctttcttctccccattttcatactcttcccagggattagtgatggaggtgaggtctccctaatcatggtaaagtgttaaccttccacctcctcccttccctcctccttcctcatccttctgtcttcctcaattctccgtctcttttttttcatcactgattgccttgtgtccctccaagtctacttgttactatccatctccaggctctgggccgtgtagacactaaacctcatgccctaaggacaggaggaaagaccctctgtttggagcattattagtagagtgaggatcccaccagttctgcctggcttcctccatccccagaggcactaaaagcagtattttaaggttggtgtcttactccctggaagcctgaaatgggtggaatagcggtaaggcttgagtaaaactaggggacagaggttcttatttgtcgattttattttataatttgaccacagcatctgaactccctctctccctggaataagtatttttcccacatttttggatatatgtatggtagacaatttttttttaagacacagagataaatgttttcctgctttggttacctttcctttcccctttaaaaggaattagctatagaactgctttgtaaagatgcttcttgatattttacttttgttccttttccctaatcattcccttttctccccactcctccagaaggcataacccttctctccacaccccctacccccacccccgtcctaggctcccatcctttccatcaagaccttcattagcttatgatatttgctgccgagatgttataacaaggactcgttcatgtatataagctatttcttgatccatttaaaaggaattgtacattgtgtagaaaaaaaaaaaacctgaaaaagagaaaaaaaagccctagccatggatattg

SEQ ID NO: 145046 - DNA, 3714 bp, Homo sapiens
tcaggctgcatgtcgtgtggacaggatgtcatgcgagtctggcccgccgtgaataccttttagacatgatccctccccggtctatatcgcagtccatcagtggacagaaataacgcctgttccacttgtactgccccatccttgaatcctttatccctttcctctttcattcccccaacttctgtcgcatgcagtgcctgtactggtgcctaccatacacggaaagcaaaacagaaaaacagaagacaaaaaatagagatcagcaagaaaacacacgccctgccctgccacctcccctttatttcacactgctgcgatctgttcttctgccgctctgtcttctctcttcagttttctttaacagtgaggtggatctttacctctgatagaggtcagaatgaggtcctggggagaatctaagccctccgatgtgtgtttctaaagttgttttatgctataattattaccatttttaatgatgttgtgtgtcctccctttgttcagtggacggttaaaccttcccccactcaaccaatctttttctttttccttttcttccttttttttttttttttttgtaaacacaaatgacattcagttcaatgatacgagcattgcagattgcagtaggggtcccagctgccaagtaggacatgactaggagtgttaggggcagaagttttgaatgcacttaaccggaggagggcgcagggtggggggtatcaaagaaggacgaatagcaccctacctgtgggtgtttgggggctggacaatttgggtggcagtgtttggtactgaagttgggctctaagaatgaggggaaagagcctggggaggagcttaaaactcaaccactctggaatttacccatagaagacgggaagaaagaggtatgaagatgggctcaattatgagccagggaggattgaaactaggtcctgcctttctgtatcttggggaaataagaccgatctcctgaccccattgggaacacggaagtctattccaggccaaccagcccaaaattatttcatcttgtattctttgtaaaattctccctcaccccaccctgcttttaaaaattctaatctatcccctctaaccatagccccatctataatacagaggaacggctgttccaaggctgtttgctgggtgtcccacaagttgggtggacataaatgagtcaagtgacaacaggaggaaatagacttagacgaaagaaaggatttctcttccaacagttgagattcgcatatttgcctattctttcaccctctgagtgccaggagatgagaggctgggggtacacaatcaggttggagtcctgtccttactctgctgcaccagctgcagaaccaactgctcaaagccaaacagctcatggcaaaaccagcttaggacctctgctgtacaaatagttgcttcccactgccccccgcccgcccccagaatgatattaattttgccttttttttttttttttttttaagcgctactaatgtagagaatgaattgaattgtgcaatgttgctgttctggggactggggagattagcatcccatttgcccacactgtgggaagacggagtggaccaggctgtttttgaagtaagggaagccccttaaaggtacgggtttctgctcttctcatagtgtacacccacctgcctctctggctccagaagctgccagagtgcactggggggaatgttctcagcagagaagaatgaggagaagtttaatattttgcccttgaaagtcacctgaggaagtttccccacttttattttttaaaattaagtaattttttaaagaaggcacttttaaaattaacacacacatgaactgcacaccttccccataaaatttggaggtggggtgggagaaagagctaaaatcaggctcagttcccctactctggcctctactccccacaccccagtgccactgtgggtgactatactggccctacgggccttcctggcttttttctttcctcccttaccccaaattcattgagcacttaaaggagcagagatgcagccagtgtctgggctcccccagtggtgaaatgatctggaagctagatgctagtaacaggtagtgattgggttttttgagtatttttccggggaatgtggtacccctgactgtaagtggtgggagagggaggggggttaatggaactgggtctgggattattttaaaattatatatatatatataaagatatattcttacatcttttctttgccctctgtgctttgaaagcactggataaattgtttggttttgcttttctctcttccacaaaattggaagctttttttaaaaatgttttccccacaagtcatcttgccttgtggcatgtctgtctagcctcttcctccctccctcatgatgaagtgccatttctgttacgtctccctctccccaagctcagaggtgctcagaggtacgagatgcccaagtttgtcagttgagattaaaagtaaggaacagagaatgtgcaataccgtctggctgggggctgtccctgccctgccctgagctgagtcctttccctgggagccaggccaccttagaatggggtttggaagtaagatgtatagagttggggaatcatggagaaggaaagcctatagtcgagtgcctgcttaggtgctgaggtcacaggggagatggtggaatcttccctgtttttatcccctcagggtcagttacatagaagctgcttcttgactagtatagctcggtgaccctttgttcaaccgctgaggtttgatttcttaccctttcttctccccattttcatactcttcccagggattagtgatggaggtgaggtctccctaatcatggtaaagtgttaaccttccacctcctcccttccctcctccttcctcatccttctgtcttcctcaattctccgtctcttttttttcatcactgattgccttgtgtccctccaagtctacttgttactatccatctccaggctctgggccgtgtagacactaaacctcatgccctaaggacaggaggaaagaccctctgtttggagcattattagtagagtgaggatcccaccagttctgcctggcttcctccatccccagaggcactaaaagcagtattttaaggttggtgtcttactccctggaagcctgaaatgggtggaatagcggtaaggcttgagtaaaactaggggacagaggttcttatttgtcgattttattttataatttgaccacagcatctgaactccctctctccctggaataagtatttttcccacatttttggatatatgtatggtagacaatttttttttaagacacagagataaatgttttcctgctttggttacctttcctttcccctttaaaaggaattagctatagaactgctttgtaaagatgcttcttgatattttacttttgttccttttccctaatcattcccttttctccccactcctccagaaggcataacccttctctccacaccccctacccccacccccgtcctaggctcccatcctttccatcaagaccttcattagcttatgatatttgctgccgagatgttataacaaggactcgttcatgtatataagctatttcttgatccatttaaaaggaattgtacattgtgtagaaaaaaaaaaaacctgaaaaagagaaaaaaaagccctagccatggatattg

SEQ ID NO: 145047 - DNA, 1246 bp, Homo sapiens
tgagatggcttttttctgagcaaacaaccatagcccctcccctcaactccaaactcatcggaaacatgattttctgcctttttatgcagcaacaaaaagacatggggttcagagacagcacccttgattgtctattcccttctctctccactcccgggagtggagagagaaagcctatagtcgagtgcctgcttaggtgctgaggtcacaggggagatggtggaatcttccctgtttttatcccctcagggtcagttacatagaagctgcttcttgactagtatagctcggtgaccctttgttcaaccgctgaggtttgatttcttaccctttcttctccccattttcatactcttcccagggattagtgatggaggtgaggtctccctaatcatggtaaagtgttaaccttccacctcctcccttccctcctccttcctcatccttctgtcttcctcaattctccgtctcttttttttcatcactgattgccttgtgtccctccaagtctacttgttactatccatctccaggctctgggccgtgtagacactaaacctcatgccctaaggacaggaggaaagaccctctgtttggagcattattagtagagtgaggatcccaccagttctgcctggcttcctccatccccagaggcactaaaagcagtattttaaggttggtgtcttactccctggaagcctgaaatgggtggaatagcggtaaggcttgagtaaaactaggggacagaggttcttatttgtcgattttattttataatttgaccacagcatctgaactccctctctccctggaataagtatttttcccacatttttggatatatgtatggtagacaatttttttttaagacacagagataaatgttttcctgctttggttacctttcctttcccctttaaaaggaattagctatagaactgctttgtaaagatgcttcttgatattttacttttgttccttttccctaatcattcccttttctccccactcctccagaaggcataacccttctctccacaccccctacccccacccccgtcctaggctcccatcctttccatcaagaccttcattagcttatgatatttgctgccgagatgttataacaaggactcgttcatgtatataagctatttcttgatccatttaaaaggaattgtacattgtgtagaaaaaaaaaaaacctgaaaaagagaaaaaaaagccctagccatggatattg

SEQ ID NO: 145048 - DNA, 2475 bp, Homo sapiens
aatgttggcattgctcaaaaggaaggatttggcaaatcttgaggtgccacatgagttacccaccaaacaggatggcagtggtgtcaagggctatgaagaaaaacttaacgggaatctcaggcctcatggagacaacaggactgctggaaggccaggcaaagaaaacatcaatgatgagcctgtggatatgagtgctagacggagtgagccagagcgaggaaggctaactccctcaccagacatcattgttttgtctgacaatgaggcttccagtccccgttccagttccagaatggaagaaagactcaaagcagccaacttagagatgtttaaggggaaaggcattgaggagcggcagcagcttatcaagcagctgagggatgagctacgattggaagaagcccgactggtcctgttaaagaaactgagacagagtcagctacagaaagagaatgtggtccagaagactccagttgtacagaatgcagcatctattgttcagccatctcctgcccatgtgggacagcagggcctatctaagcttccctctcggcctggggcccaaggggttgaacctcaaaatttgagaacattacagggtcacagtgtcatccgttcagctaccaataccacccttccacacatgttgatgtctcaacgtgttattgcaccaaacccagcccagctacagggtcagcggggcccgcctaagcctggccttgtacgcaccacaacacccaacatgaatcccgccatcaattatcaaccgcagtcaagttcttctgttccatgtcagcgtacaacatcctctgccatctatatgaaccttgcttctcatatccagccagggacggtgaacagagtgtcctcgccacttcctagccccagcgccatgactgatgctgccaactcacaggctgcagccaaattggctcttcgcaaacagctggaaaagacactcctggagatcccaccccctaaacctcctgctcccttacttcatttcttgcctagtgcagccaatagcgagttcatctacatggtaggcttggaagaagtcgtacagagtgtcattgacagccaaggcaaaagctgtgcctcacttctgcgggttgaaccctttgtatgtgcccagtgccgcacagatttcacccctcactggaagcaagaaaagaatggtaagattctatgtgagcagtgtatgacctccaaccagaaaaaggctctaaaagctgaacacaccaaccggctgaaaaatgcatttgtgaaagccctacagcaggaacaggaaattgaacagcgattacagcagcaggcagccctctcccccactacggctccagctgtgtccagtgtcagtaaacaagagaccatcatgagacatcatacgcttcggcaggctccacagccccagagcagcctccagcgtggcatacccacatctgcccgctccatgctttcaaactttgcacaggcaccccagttgtctgtgccaggtggcctccttggtatgccaggtgtcaacattgcatacttgaatactggcatcggaggacacaaaggccccagtttggcagaccgacagcgtgaataccttttagacatgatccctccccggtctatatcgcagtccatcagtggacagaaataacgcctgttccacttgtactgccccatccttgaatcctttatccctttcctctttcattcccccaacttctgtcgcatgcagtgcctgtactggtgcctaccatacacggaaagcaaaacagaaaaacagaagacaaaaaatagagatcagcaagaaaacacacgccctgccctgccacctcccctttatttcacactgctgcgatctgttcttctgccgctctgtcttctctcttcagttttctttaacagtgaggtggatctttacctctgatagaggtcagaatgaggtcctggggagaatctaagccctccgatgtgtgtttctaaagttgttttatgctataattattaccatttttaatgatgttgtgtgtcctccctttgttcagtggacggttaaaccttcccccactcaaccaatctttttctttttccttttcttccttttttttttttttttttgtaaacacaaatgacattcagttcaatgatacgagcattgcagattgcagtaggggtcccagctgccaagtaggacatgactaggagtgttaggggcagaagttttgaatgcacttaaccggaggagggcgcagggtggggggtatcaaagaaggacgaatagcaccccacccccgtcctaggctcccatcctttccatcaagaccttcattagcttatgatatttgctgccgagatgttataacaaggactcgttcatgtatataagctatttcttgatccatttaaaaggaattgtacattgtgtagaaaaaaaaaaaacctgaaaaagagaaaaaaaagccctagccatggatattg

SEQ ID NO: 145049 - DNA, 1922 bp, Homo sapiens
aatgttggcattgctcaaaaggaaggatttggcaaatcttgaggtgccacatgagttacccaccaaacaggatggcagtggtgtcaagggctatgaagaaaaacttaacgggaatctcaggcctcatggagacaacaggactgctggaaggccaggcaaagaaaacatcaatgatgagcctgtggatatgagtgctagacggagtgagccagagcgaggaaggctaactccctcaccagacatcattgttttgtctgacaatgaggcttccagtccccgttccagttccagaatggaagaaagactcaaagcagccaacttagagatgtttaaggggaaaggcattgaggagcggcagcagcttatcaagcagctgagggatgagctacgattggaagaagcccgactggtcctgttaaagaaactgagacagagtcagctacagaaagagaatgtggtccagaagactccagttgtacagaatgcagcatctattgttcagccatctcctgcccatgtgggacagcagggcctatctaagcttccctctcggcctggggcccaaggggttgaacctcaaaatttgagaacattacagggtcacagtgtcatccgttcagctaccaataccacccttccacacatgttgatgtctcaacgtgttattgcaccaaacccagcccagctacagggtcagcggggcccgcctaagcctggccttgtacgcaccacaacacccaacatgaatcccgccatcaattatcaaccgcagtcaagttcttctgttccatgtcagcgtacaacatcctctgccatctatatgaaccttgcttctcatatccagccagggacggtgaacagagtgtcctcgccacttcctagccccagcgccatgactgatgctgccaactcacaggctgcagccaaattggctcttcgcaaacagctggaaaagacactcctggagatcccaccccctaaacctcctgctcccttacttcatttcttgcctagtgcagccaatagcgagttcatctacatggtaggcttggaagaagtcgtacagagtgtcattgacagccaaggcaaaagctgtgcctcacttctgcgggttgaaccctttgtatgtgcccagtgccgcacagatttcacccctcactggaagcaagaaaagaatggtaagattctatgtgagcagtgtatgacctccaaccagaaaaaggctctaaaagctgaacacaccaaccggctgaaaaatgcatttgtgaaagccctacagcaggaacaggtaagaattctgactgctcactggccacctgtcccagtttgttttttccaaagggtcgcgccttctagtttgcaggagtggttcatgtgatccctacaggtccacaggttccctttttgtctccttatcattgtgtcctatttccatttgagcgagtattctgattaagaacatggtaaaatataatggctgaggttaacagaaagggacagaaagcttggggactcttggcttttccatagcactctattctcatcttcattttttcctaaaacaaataatagattttggtgggaggaatttatatttgtgctataaatctctttgaaacagttatttgcagtgcgtgtttgataagaaatgacgaaagaaagagtgaattatgaagtagcccagtgaagagtagtggttctagagtatgtgaacatctcatgtagcagttataggatgagaatatcttagagaaggaaaaatgtgttgggaaactcagatccttttcttcctatttcccactccacccatcagagtcccttgtttgagtagcatcatggactttttggaagatcgggtaggcaggagtcaaaaataaaaccccatttatgctctaggactggtggtaaaaaataaataaata

SEQ ID NO: 145050 - DNA, 1790 bp, Homo sapiens
aatgttggcattgctcaaaaggaaggatttggcaaatcttgaggtgccacatgagttacccaccaaacaggatggcagtggtgtcaagggctatgaagaaaaacttaacgggaatctcaggcctcatggagacaacaggactgctggaaggccaggcaaagaaaacatcaatgatgagcctgtggatatgagtgctagacggagtgagccagagcgaggaaggctaactccctcaccagacatcattgttttgtctgacaatgaggcttccagtccccgttccagttccagaatggaagaaagactcaaagcagccaacttagagatgtttaaggggaaaggcattgaggagcggcagcagcttatcaagcagctgagggatgagctacgattggaagaagcccgactggtcctgttaaagaaactgagacagagtcagctacagaaagagaatgtggtccagaagactccagttgtacagaatgcagcatctattgttcagccatctcctgcccatgtgggacagcagggcctatctaagcttccctctcggcctggggcccaaggggttgaacctcaaaatttgagaacattacagggtcacagtgtcatccgttcagctaccaataccacccttccacacatgttgatgtctcaacgtgttattgcaccaaacccagcccagctacagggtcagcggggcccgcctaagcctggccttgtacgcaccacaacacccaacatgaatcccgccatcaattatcaaccgcagtcaagttcttctgttccatgtcagcgtacaacatcctctgccatctatatgaaccttgcttctcatatccagccagggacggtgaacagagtgtcctcgccacttcctagccccagcgccatgactgatgctgccaactcacaggctgcagccaaattggctcttcgcaaacagctggaaaagacactcctggagatcccaccccctaaacctcctgctcccttacttcatttcttgcctagtgcagccaatagcgagttcatctacatggtaggcttggaagaagtcgtacagagtgtcattgacagccaaggcaaaagctgtgcctcacttctgcgggttgaaccctttgtatgtgcccagtgccgcacagatttcacccctcactggaagcaagaaaagaatggtaagattctatgtgagcagtgtatgacctccaaccagaaaaaggctctaaaagctgaacacaccaaccggctgaaaaatgcatttgtgaaagccctacagcaggaacaggtaagaattctgactgctcactggccacctgtcccagtttgttttttccaaagggtcgcgccttctagtttgcaggagtggttcatgtgatccctacaggtccacaggttccctttttgtctccttatcattgtgtcctatttccatttgagcgagtattctgattaagaacatggtaaaatataatggctgaggttaacagaaagggacagaaagcttggggactcttggcttttccatagcactctattctcatcttcattttttcctaaaacaaataatagattttggtgggaggaatttatatttgtgctataaatctctttgaaacagttatttgcagtgcgtgtttgataagaaatgacgaaagaaagagtgaattatgaagtagcccagtgaagagtagtggttctagagtatgtgaacatctcatgtagcagttataggatgagaatatcttagagaaggatctgagtttcccaacacatttttccgtcgacgc

SEQ ID NO: 145051 - DNA, 1141 bp, Homo sapiens
tcagaggattcgtgatgttatcccaacacaaaaggggttgagggggctacaatctggagacctggggtctcctactaacttgctatatgatctttggtagagttaattttctgagtatcaattttcttatctgtgaagtgaagagggggatcatctggccaccaagtttaaaattctatacttctcacctgccaaaaccaaaaaacaacttgaggtgaggaaagtgttgggcccagaaaccagggaggaactgaaagtgactcgcgttgaagtggttatgtgtatgacaatgctcttggagaactgccagtcctctatggttacccttgatttgggagaggcagcagagtcatgtccagggcatcagaccagtgacatctttgcctttatgcctctagtcatctgagggcggggactaggcctcaagccccatctcacagccaaccacagagcccttaagggtggttgacaattgaatgccccaggttggtgctttagttatttactccctttgtgagctacaggatgtgtaacttttcccccatcttggtgataaaataggagagcgcagacacagcccacattttgtctcctttcctcagatttcatctgaaccccgctaaaggcagctgtttcacagtctgtctccttcaggggcccaatttccccacagcctgggctgagtactcctactctcttctttaggttctgggctgataaagcctggagagggtacagggtgatgggtgaagccctggtgaaggtgaaaggatagattggggttggggggtggggagcagggaggtgggatggggaatggccttccctgaatagggtgggtgggaggggaacaagacccttttgcacaactctctttaagtttcctttatttcttttttaactcattctgattttctgcattgtgtttgggaaataaaatgaaaaaactaagaccaatagaaactggttttcaaaaaggcaaatacactcccatctgtttcagatgctgctgagcatttcagcagtgacagattcaaataataagctaatttttggagaaaggattaaaagaaaaaaaaactttgtaatatttatcacttgcaagctatgtttaataaagaaaggaatggtttctaaaaaa

SEQ ID NO: 145052 - DNA, 1302 bp, Homo sapiens
gcctttgagggtggattgtcaggggatgatagaaaggattttaataagtcatcctgaggaaatttcacctagtgagagccacatccatctgcacagccttaggctgcgtgaaccgaggtgaggctgagctcctgtgaaagccaagacctcctggtccaggactttgtagagtaaaaagaaccaccaacacaaaaggggttgagggggctacaatctggagacctggggtctcctactaacttgctatatgatctttggtagagttaattttctgagtatcaattttcttatctgtgaagtgaagagggggatcatctggccaccaagtttaaaattctatacttctcacctgccaaaaccaaaaaacaacttgaggtgaggaaagtgttgggcccagaaaccagggaggaactgaaagtgactcgcgttgaagtggttatgtgtatgacaatgctcttggagaactgccagtcctctatggttacccttgatttgggagaggcagcagagtcatgtccagggcatcagaccagtgacatctttgcctttatgcctctagtcatctgagggcggggactaggcctcaagccccatctcacagccaaccacagagcccttaagggtggttgacaattgaatgccccaggttggtgctttagttatttactccctttgtgagctacaggatgtgtaacttttcccccatcttggtgataaaataggagagcgcagacacagcccacattttgtctcctttcctcagatttcatctgaaccccgctaaaggcagctgtttcacagtctgtctccttcaggggcccaatttccccacagcctgggctgagtactcctactctcttctttaggttctgggctgataaagcctggagagggtacagggtgatgggtgaagccctggtgaaggtgaaaggatagattggggttggggggtggggagcagggaggtgggatggggaatggccttccctgaatagggtgggtgggaggggaacaagacccttttgcacaactctctttaagtttcctttatttcttttttaactcattctgattttctgcattgtgtttgggaaataaaatgaaaaaactaagaccaatagaaactggttttcaaaaaggcaaatacactcccatctgtttcagatgctgctgagcatttcagcagtgacagattcaaataataagctaatttttggagaaaggattaaaagaaaaaaaaactttgtaatatttatcacttgcaagctatgtttaataaagaaaggaatggtttctaaaaaa

SEQ ID NO: 145053 - DNA, 775 bp, Homo sapiens
tcagaggattcgtgatgttatcccaacacaaaaggggttgagggggctacaatctggagacctggggtctcctactaacttgctatatgatctttggtagagttaattttctgagtatcaattttcttatctgtgaagtgaagagggggatcatctggccaccaagtttaaaattctatacttctcacctgccaaaaccaaaaaacaacttgaggtgaggaaagtgttgggcccagaaaccagggaggaactgaaagtgactcgcgttgaagtggttatgtgtatgacaatgctcttggagaactgccagtcctctatggttacccttgatttgggagaggcagcagagtcatgtccagggcatcagaccagtgacatctttgcctttatgcctctagtcatctgagggcggggactaggcctcaagccccatctcacagccaaccacagagcccttaagggtggttgacaattgaatgccccaggttggtgctttagttatttactccctttgtgagctacaggatgtgtaacttttcccccatcttggtgataaaataggagagcgcagacacagcccacccacccccgtcctaggctcccatcctttccatcaagaccttcattagcttatgatatttgctgccgagatgttataacaaggactcgttcatgtatataagctatttcttgatccatttaaaaggaattgtacattgtgtagaaaaaaaaaaaacctgaaaaagagaaaaaaaagccctagccatggatattg

SEQ ID NO: 145054 - DNA, 644 bp, Homo sapiens
aatgttggcattgctcaaaaggaaggatttggcaaatcttgaggtgccacatgagttacccaccaaacaggatggcagtggtgtcaagggctatgaagaaaaacttaacgggaatctcaggcctcatggagacaacaggactgctggaaggccaggcaaagaaaacatcaatgatgagcctgtggatatgagtgctagacggagtgagccagagcgaggaaggctaactccctcaccagacatcattgttttgtctgacaatgaggcttccagtccccgttccagttccagaatggaagaaagactcaaagcagccaacttagagatgtttaaggggaaaggcattgaggagcggcagcagcttatcaagcagctgagggatgagctacgattggaagaagcccgactggtcctgttaaagaaactgagacagagtcagctacagaaagagaatgtggtccagaagactccagttgtacagaatgcagcatctattgttcagccatctcctgcccatgtgggacagcagggcctatctaagcttccctctcggcctggggcccaaggggttgaacctcaaaatttgagaacattacaggccatcaatacgggtacgagctcgaatcgtcacatggcaaactgtc

SEQ ID NO: 145055 - DNA, 542 bp, Homo sapiens
gcctttgagggtggattgtcaggggatgatagaaaggattttaataagtcatcctgaggaaatttcacctagtgagagccacatccatctgcacagccttaggctgcgtgaaccgaggtgaggctgagctcctgtgaaagccaagacctcctggtccaggactttgtagagtaaaaagaaccaccaacacaaaaggggttgagggggctacaatctggagacctggggtctcctactaacttgctatatgatctttggtagagttaattttctgagtatcaattttcttatctgtgaagtgaagagggggatcatctggccaccaagtttaaaattctatacttctcacccacccccgtcctaggctcccatcctttccatcaagaccttcattagcttatgatatttgctgccgagatgttataacaaggactcgttcatgtatataagctatttcttgatccatttaaaaggaattgtacattgtgtagaaaaaaaaaaaacctgaaaaagagaaaaaaaagccctagccatggatattg

SEQ ID NO: 145056 - DNA, 362 bp, Homo sapiens
tgctgggactgtaggggtgagccaccgcacccagccagaagctacatttcttcgacttctgtcctcatttgtaaatgaggatggtactgtctgaattccctaaagtgatactgttataatcagatgaaataaaagtattttgtaaattatagaatatcctttttgtaaagtctctttctttaattcaacagaataaactcctggaaaagatctatttgattaagagaaacagaggagataggaaatgtaaagccactgactatttttgttggtatctaggcaaaagctgtgcctcacttctgcgggttgaaccctttgtatgtgcccagtgccgcacagatttcacccctcactggaagcaa

SEQ ID NO: 145057 - DNA, 5240 bp, Homo sapiens
gaatcgtgctggtgctcagggaagtttgctggtgccacatgagttacccaccaaacaggatggcagtggtgtcaagggctatgaagaaaaacttaacgggaatctcaggcctcatggagacaacaggactgctggaaggccaggcaaagaaaacatcaatgatgagcctgtggatatgagtgctagacggagtgagccagagcgaggaaggctaactccctcaccagacatcattgttttgtctgacaatgaggcttccagtccccgttccagttccagaatggaagaaagactcaaagcagccaacttagagatgtttaaggggaaaggcattgaggagcggcagcagcttatcaagcagctgagggatgagctacgattggaagaagcccgactggtcctgttaaagaaactgagacagagtcagctacagaaagagaatgtggtccagaagactccagttgtacagaatgcagcatctattgttcagccatctcctgcccatgtgggacagcagggcctatctaagcttccctctcggcctggggcccaaggggttgaacctcaaaatttgagaacattacagggtcacagtgtcatccgttcagctaccaataccacccttccacacatgttgatgtctcaacgtgttattgcaccaaacccagcccagctacagggtcagcggggcccgcctaagcctggccttgtacgcaccacaacacccaacatgaatcccgccatcaattatcaaccgcagtcaagttcttctgttccatgtcagcgtacaacatcctctgccatctatatgaaccttgcttctcatatccagccagggacggtgaacagagtgtcctcgccacttcctagccccagcgccatgactgatgctgccaactcacaggctgcagccaaattggctcttcgcaaacagctggaaaagacactcctggagatcccaccccctaaacctcctgctcccttacttcatttcttgcctagtgcagccaatagcgagttcatctacatggtaggcttggaagaagtcgtacagagtgtcattgacagccaaggcaaaagctgtgcctcacttctgcgggttgaaccctttgtatgtgcccagtgccgcacagatttcacccctcactggaagcaagaaaagaatggtaagattctatgtgagcagtgtatgacctccaaccagaaaaaggctctaaaagctgaacacaccaaccggctgaaaaatgcatttgtgaaagccctacagcaggaacaggaaattgaacagcgattacagcagcaggcagccctctcccccactacggctccagctgtgtccagtgtcagtaaacaagagaccatcatgagacatcatacgcttcggcaggctccacagccccagagcagcctccagcgtggcatacccacatctgcccgctccatgctttcaaactttgcacaggcaccccagttgtctgtgccaggtggcctccttggtatgccaggtgtcaacattgcatacttgaatactggcatcggaggacacaaaggccccagtttggcagaccgacagcgtgaataccttttagacatgatccctccccggtctatatcgcagtccatcagtggacagaaataacgcctgttccacttgtactgccccatccttgaatcctttatccctttcctctttcattcccccaacttctgtcgcatgcagtgcctgtactggtgcctaccatacacggaaagcaaaacagaaaaacagaagacaaaaaatagagatcagcaagaaaacacacgccctgccctgccacctcccctttatttcacactgctgcgatctgttcttctgccgctctgtcttctctcttcagttttctttaacagtgaggtggatctttacctctgatagaggtcagaatgaggtcctggggagaatctaagccctccgatgtgtgtttctaaagttgttttatgctataattattaccatttttaatgatgttgtgtgtcctccctttgttcagtggacggttaaaccttcccccactcaaccaatctttttctttttccttttcttccttttttttttttttttttgtaaacacaaatgacattcagttcaatgatacgagcattgcagattgcagtaggggtcccagctgccaagtaggacatgactaggagtgttaggggcagaagttttgaatgcacttaaccggaggagggcgcagggtggggggtatcaaagaaggacgaatagcaccctacctgtgggtgtttgggggctggacaatttgggtggcagtgtttggtactgaagttgggctctaagaatgaggggaaagagcctggggaggagcttaaaactcaaccactctggaatttacccatagaagacgggaagaaagaggtatgaagatgggctcaattatgagccagggaggattgaaactaggtcctgcctttctgtatcttggggaaataagaccgatctcctgaccccattgggaacacggaagtctattccaggccaaccagcccaaaattatttcatcttgtattctttgtaaaattctccctcaccccaccctgcttttaaaaattctaatctatcccctctaaccatagccccatctataatacagaggaacggctgttccaaggctgtttgctgggtgtcccacaagttgggtggacataaatgagtcaagtgacaacaggaggaaatagacttagacgaaagaaaggatttctcttccaacagttgagattcgcatatttgcctattctttcaccctctgagtgccaggagatgagaggctgggggtacacaatcaggttggagtcctgtccttactctgctgcaccagctgcagaaccaactgctcaaagccaaacagctcatggcaaaaccagcttaggacctctgctgtacaaatagttgcttcccactgccccccgcccgcccccagaatgatattaattttgccttttttttttttttttttttaagcgctactaatgtagagaatgaattgaattgtgcaatgttgctgttctggggactggggagattagcatcccatttgcccacactgtgggaagacggagtggaccaggctgtttttgaagtaagggaagccccttaaaggtacgggtttctgctcttctcatagtgtacacccacctgcctctctggctccagaagctgccagagtgcactggggggaatgttctcagcagagaagaatgaggagaagtttaatattttgcccttgaaagtcacctgaggaagtttccccacttttattttttaaaattaagtaattttttaaagaaggcacttttaaaattaacacacacatgaactgcacaccttccccataaaatttggaggtggggtgggagaaagagctaaaatcaggctcagttcccctactctggcctctactccccacaccccagtgccactgtgggtgactatactggccctacgggccttcctggcttttttctttcctcccttaccccaaattcattgagcacttaaaggagcagagatgcagccagtgtctgggctcccccagtggtgaaatgatctggaagctagatgctagtaacaggtagtgattgggttttttgagtatttttccggggaatgtggtacccctgactgtaagtggtgggagagggaggggggttaatggaactgggtctgggattattttaaaattatatatatatatataaagatatattcttacatcttttctttgccctctgtgctttgaaagcactggataaattgtttggttttgcttttctctcttccacaaaattggaagctttttttaaaaatgttttccccacaagtcatcttgccttgtggcatgtctgtctagcctcttcctccctccctcatgatgaagtgccatttctgttacgtctccctctccccaagctcagaggtgctcagaggtacgagatgcccaagtttgtcagttgagattaaaagtaaggaacagagaatgtgcaataccgtctggctgggggctgtccctgccctgccctgagctgagtcctttccctgggagccaggccaccttagaatggggtttggaagtaagatgtatagagttggggaatcatggagaaggaaagcctatagtcgagtgcctgcttaggtgctgaggtcacaggggagatggtggaatcttccctgtttttatcccctcagggtcagttacatagaagctgcttcttgactagtatagctcggtgaccctttgttcaaccgctgaggtttgatttcttaccctttcttctccccattttcatactcttcccagggattagtgatggaggtgaggtctccctaatcatggtaaagtgttaaccttccacctcctcccttccctcctccttcctcatccttctgtcttcctcaattctccgtctcttttttttcatcactgattgccttgtgtccctccaagtctacttgttactatccatctccaggctctgggccgtgtagacactaaacctcatgccctaaggacaggaggaaagaccctctgtttggagcattattagtagagtgaggatcccaccagttctgcctggcttcctccatccccagaggcactaaaagcagtattttaaggttggtgtcttactccctggaagcctgaaatgggtggaatagcggtaaggcttgagtaaaactaggggacagaggttcttatttgtcgattttattttataatttgaccacagcatctgaactccctctctccctggaataagtatttttcccacatttttggatatatgtatggtagacaatttttttttaagacacagagataaatgttttcctgctttggttacctttcctttcccctttaaaaggaattagctatagaactgctttgtaaagatgcttcttgatattttacttttgttccttttccctaatcattcccttttctccccactcctccagaaggcataacccttctctccacaccccctacccccacccccgtcctaggctcccatcctttccatcaagaccttcattagcttatgatatttgctgccgagatgttataacaaggactcgttcatgtatataagctatttcttgatccatttaaaaggaattgtacattgtgtagaaaaaaaaaaaacctgaaaaagagaaaaaaaagccctagccatggatattg

SEQ ID NO: 145058 - DNA, 4945 bp, Homo sapiens
ggagcccaaataaaaaattttaagggggtaaggtttttaagaaccggcaacagcttttcaagcctttttaggaataagtacttatggaaaaagcccgattggtcctgttaaaggagttgaaacaaagtcagctacagaaaaaaaaatgtggtcaataaaactccagttgtacagaatgcagcatctattgttcagccatctcctgcccatgtgggacagcagggcctatctaagcttccctctcggcctggggcccaaggggttgaacctcaaaatttgagaacattacagggtcacagtgtcatccgttcagctaccaataccacccttccacacatgttgatgtctcaacgtgttattgcaccaaacccagcccagctacagggtcagcggggcccgcctaagcctggccttgtacgcaccacaacacccaacatgaatcccgccatcaattatcaaccgcagtcaagttcttctgttccatgtcagcgtacaacatcctctgccatctatatgaaccttgcttctcatatccagccagggacggtgaacagagtgtcctcgccacttcctagccccagcgccatgactgatgctgccaactcacaggctgcagccaaattggctcttcgcaaacagctggaaaagacactcctggagatcccaccccctaaacctcctgctcccttacttcatttcttgcctagtgcagccaatagcgagttcatctacatggtaggcttggaagaagtcgtacagagtgtcattgacagccaaggcaaaagctgtgcctcacttctgcgggttgaaccctttgtatgtgcccagtgccgcacagatttcacccctcactggaagcaagaaaagaatggtaagattctatgtgagcagtgtatgacctccaaccagaaaaaggctctaaaagctgaacacaccaaccggctgaaaaatgcatttgtgaaagccctacagcaggaacaggaaattgaacagcgattacagcagcaggcagccctctcccccactacggctccagctgtgtccagtgtcagtaaacaagagaccatcatgagacatcatacgcttcggcaggctccacagccccagagcagcctccagcgtggcatacccacatctgcccgctccatgctttcaaactttgcacaggcaccccagttgtctgtgccaggtggcctccttggtatgccaggtgtcaacattgcatacttgaatactggcatcggaggacacaaaggccccagtttggcagaccgacagcgtgaataccttttagacatgatccctccccggtctatatcgcagtccatcagtggacagaaataacgcctgttccacttgtactgccccatccttgaatcctttatccctttcctctttcattcccccaacttctgtcgcatgcagtgcctgtactggtgcctaccatacacggaaagcaaaacagaaaaacagaagacaaaaaatagagatcagcaagaaaacacacgccctgccctgccacctcccctttatttcacactgctgcgatctgttcttctgccgctctgtcttctctcttcagttttctttaacagtgaggtggatctttacctctgatagaggtcagaatgaggtcctggggagaatctaagccctccgatgtgtgtttctaaagttgttttatgctataattattaccatttttaatgatgttgtgtgtcctccctttgttcagtggacggttaaaccttcccccactcaaccaatctttttctttttccttttcttccttttttttttttttttttgtaaacacaaatgacattcagttcaatgatacgagcattgcagattgcagtaggggtcccagctgccaagtaggacatgactaggagtgttaggggcagaagttttgaatgcacttaaccggaggagggcgcagggtggggggtatcaaagaaggacgaatagcaccctacctgtgggtgtttgggggctggacaatttgggtggcagtgtttggtactgaagttgggctctaagaatgaggggaaagagcctggggaggagcttaaaactcaaccactctggaatttacccatagaagacgggaagaaagaggtatgaagatgggctcaattatgagccagggaggattgaaactaggtcctgcctttctgtatcttggggaaataagaccgatctcctgaccccattgggaacacggaagtctattccaggccaaccagcccaaaattatttcatcttgtattctttgtaaaattctccctcaccccaccctgcttttaaaaattctaatctatcccctctaaccatagccccatctataatacagaggaacggctgttccaaggctgtttgctgggtgtcccacaagttgggtggacataaatgagtcaagtgacaacaggaggaaatagacttagacgaaagaaaggatttctcttccaacagttgagattcgcatatttgcctattctttcaccctctgagtgccaggagatgagaggctgggggtacacaatcaggttggagtcctgtccttactctgctgcaccagctgcagaaccaactgctcaaagccaaacagctcatggcaaaaccagcttaggacctctgctgtacaaatagttgcttcccactgccccccgcccgcccccagaatgatattaattttgccttttttttttttttttttttaagcgctactaatgtagagaatgaattgaattgtgcaatgttgctgttctggggactggggagattagcatcccatttgcccacactgtgggaagacggagtggaccaggctgtttttgaagtaagggaagccccttaaaggtacgggtttctgctcttctcatagtgtacacccacctgcctctctggctccagaagctgccagagtgcactggggggaatgttctcagcagagaagaatgaggagaagtttaatattttgcccttgaaagtcacctgaggaagtttccccacttttattttttaaaattaagtaattttttaaagaaggcacttttaaaattaacacacacatgaactgcacaccttccccataaaatttggaggtggggtgggagaaagagctaaaatcaggctcagttcccctactctggcctctactccccacaccccagtgccactgtgggtgactatactggccctacgggccttcctggcttttttctttcctcccttaccccaaattcattgagcacttaaaggagcagagatgcagccagtgtctgggctcccccagtggtgaaatgatctggaagctagatgctagtaacaggtagtgattgggttttttgagtatttttccggggaatgtggtacccctgactgtaagtggtgggagagggaggggggttaatggaactgggtctgggattattttaaaattatatatatatatataaagatatattcttacatcttttctttgccctctgtgctttgaaagcactggataaattgtttggttttgcttttctctcttccacaaaattggaagctttttttaaaaatgttttccccacaagtcatcttgccttgtggcatgtctgtctagcctcttcctccctccctcatgatgaagtgccatttctgttacgtctccctctccccaagctcagaggtgctcagaggtacgagatgcccaagtttgtcagttgagattaaaagtaaggaacagagaatgtgcaataccgtctggctgggggctgtccctgccctgccctgagctgagtcctttccctgggagccaggccaccttagaatggggtttggaagtaagatgtatagagttggggaatcatggagaaggaaagcctatagtcgagtgcctgcttaggtgctgaggtcacaggggagatggtggaatcttccctgtttttatcccctcagggtcagttacatagaagctgcttcttgactagtatagctcggtgaccctttgttcaaccgctgaggtttgatttcttaccctttcttctccccattttcatactcttcccagggattagtgatggaggtgaggtctccctaatcatggtaaagtgttaaccttccacctcctcccttccctcctccttcctcatccttctgtcttcctcaattctccgtctcttttttttcatcactgattgccttgtgtccctccaagtctacttgttactatccatctccaggctctgggccgtgtagacactaaacctcatgccctaaggacaggaggaaagaccctctgtttggagcattattagtagagtgaggatcccaccagttctgcctggcttcctccatccccagaggcactaaaagcagtattttaaggttggtgtcttactccctggaagcctgaaatgggtggaatagcggtaaggcttgagtaaaactaggggacagaggttcttatttgtcgattttattttataatttgaccacagcatctgaactccctctctccctggaataagtatttttcccacatttttggatatatgtatggtagacaatttttttttaagacacagagataaatgttttcctgctttggttacctttcctttcccctttaaaaggaattagctatagaactgctttgtaaagatgcttcttgatattttacttttgttccttttccctaatcattcccttttctccccactcctccagaaggcataacccttctctccacaccccctacccccacccccgtcctaggctcccatcctttccatcaagaccttcattagcttatgatatttgctgccgagatgttataacaaggactcgttcatgtatataagctatttcttgatccatttaaaaggaattgtacattgtgtagaaaaaaaaaaaacctgaaaaagagaaaaaaaagccctagccatggatattg

SEQ ID NO: 145059 - DNA, 4469 bp, Homo sapiens
aatgttggcattgctcaaaaggaaggatttggcaaatcttgaggtgccacatgagttacccaccaaacaggatggcagtggtgtcaagggctatgaagaaaaacttaacgggaatctcaggcctcatggagacaacaggactgctggaaggccaggcaaagaaaacatcaatgatgagcctgtggatatgagtgctagacggagtgagccagagcgaggaaggctaactccctcaccagacatcattgttttgtctgacaatgaggcttccagtccccgttccagttccagaatggaagaaagactcaaagcagccaacttagagatgtttaaggggaaaggcattgaggagcggcagcagcttatcaagcagctgagggatgagctacgattggaagaagcccgactggtcctgttaaagaaactgagacagagtcagctacagaaagagaatgtggtccagaagactccagttgtacagaatgcagcatctattgttcagccatctcctgcccatgtgggacagcagggcctatctaagcttccctctcggcctggggcccaaggggttgaacctcaaaatttgagaacattacagggtcacagtgtcatccgttcagctaccaataccacccttccacacatgttgatgtctcaacgtgttattgcaccaaacccagcccagctacagggtcagcggggcccgcctaagcctggccttgtacgcaccacaacacccaacatgaatcccgccatcaattatcaaccgcagtcaagttcttctgttccatgtcagcgtacaacatcctctgccatctatatgaaccttgcttctcatatccagccagggacggtgaacagagtgtcctcgccacttcctagccccagcgccatgactgatgctgccaactcacaggctgcagccaaattggctcttcgcaaacagctggaaaagacactcctggagatcccaccccctaaacctcctgctcccttacttcatttcttgcctagtgcagccaatagcgagttcatctacatggtaggcttggaagaagtcgtacagagtgtcattgacagccaaggcaaaagctgtgcctcacttctgcgggttgaaccctttgtatgtgcccagtgccgcacagatttcacccctcactggaagcaagaaaagaatggtaagattctatgtgagcagtgtatgacctccaaccagaaaaaggctctaaaagctgaacacaccaaccggctgaaaaatgcatttgtgaaagccctacagcaggaacaggaaattgaacagcgattacagcagcaggcagccctctcccccactacggctccagctgtgtccagtgtcagtaaacaagagaccatcatgagacatcatacgcttcggcaggctccacagccccagagcagcctccagcgtggcatacccacatctgcccgctccatgctttcaaactttgcacaggcaccccagttgtctgtgccaggtggcctccttggtatgccaggtgtcaacattgcatacttgaatactggcatcggaggacacaaaggccccagtttggcagaccgacagcgtgaataccttttagacatgatccctccccggtctatatcgcagtccatcagtggacagaaataacgcctgttccacttgtactgccccatccttgaatcctttatccctttcctctttcattcccccaacttctgtcgcatgcagtgcctgtactggtgcctaccatacacggaaagcaaaacagaaaaacagaagacaaaaaatagagatcagcaagaaaacacacgccctgccctgccacctcccctttatttcacactgctgcgatctgttcttctgccgctctgtcttctctcttcagttttctttaacagtgaggtggatctttacctctgatagaggtcagaatgaggtcctggggagaatctaagccctccgatgtgtgtttctaaagttgttttatgctataattattaccatttttaatgatgttgtgtgtcctccctttgttcagtggacggttaaaccttcccccactcaaccaatctttttctttttccttttcttccttttttttttttttttttgtaaacacaaatgacattcagttcaatgatacgagcattgcagattgcagtaggggtcccagctgccaagtaggacatgactaggagtgttaggggcagaagttttgaatgcacttaaccggaggagggcgcagggtggggggtatcaaagaaggacgaatagcaccctacctgtgggtgtttgggggctggacaatttgggtggcagtgtttggtactgaagttgggctctaagaatgaggggaaagagcctggggaggagcttaaaactcaaccactctggaatttacccatagaagacgggaagaaagaggtatgaagatgggctcaattatgagccagggaggattgaaactaggtcctgcctttctgtatcttggggaaataagaccgatctcctgaccccattgggaacacggaagtctattccaggccaaccagcccaaaattatttcatcttgtattctttgtaaaattctccctcaccccaccctgcttttaaaaattctaatctatcccctctaaccatagccccatctataatacagaggaacggctgttccaaggctgtttgctgggtgtcccacaagttgggtggacataaatgagtcaagtgacaacaggaggaaatagacttagacgaaagaaaggatttctcttccaacagttgagattcgcatatttgcctattctttcaccctctgagtgccaggagatgagaggctgggggtacacaatcaggttggagtcctgtccttactctgctgcaccagctgcagaaccaactgctcaaagccaaacagctcatggcaaaaccagcttaggacctctgctgtacaaatagttgcttcccactgccccccgcccgcccccagaatgatattaattttgccttttttttttttttttttttaagcgctactaatgtagagaatgaattgaattgtgcaatgttgctgttctggggactggggagattagcatcccatttgcccacactgtgggaagacggagtggaccaggctgtttttgaagtaagggaagccccttaaaggtacgggtttctgctcttctcatagtgtacacccacctgcctctctggctccagaagctgccagagtgcactggggggaatgttctcagcagagaagaatgaggagaagtttaatattttgcccttgaaagtcacctgaggaagtttccccacttttattttttaaaattaagtaattttttaaagaaggcacttttaaaattaacacacacatgaactgcacaccttccccataaaatttggaggtggggtgggagaaagagctaaaatcaggctcagttcccctactctggcctctactccccacaccccagtgccactgtgggtgactatactggccctacgggccttcctggcttttttctttcctcccttaccccaaattcattgagcacttaaaggagcagagatgcagccagtgtctgggctcccccagtggtgaaatgatctggaagctagatgctagtaacaggtagtgattgggttttttgagtatttttccggggaatgtggtacccctgactgtaagtggtgggagagggaggggggttaatggaactgggtctgggattattttaaaattatatatatatatataaagatatattcttacatcttttctttgccctctgtgctttgaaagcactggataaattgtttggttttgcttttctctcttccacaaaattggaagctttttttaaaaatgttttccccacaagtcatcttgccttgtggcatgtctgtctagcctcttcctccctccctcatgatgaagtgccatttctgttacgtctccctctccccaagctcagaggtgctcagaggtacgagatgcccaagtttgtcagttgagattaaaagtaaggaacagagaatgtgcaataccgtctggctgggggctgtccctgccctgccctgagctgagtcctttccctgggagccaggccaccttagaatggggtttggaagtaagatgtatagagttggggaatcatggagaaggaaagcctatagtcgagtgcctgcttaggtgctgaggtcacaggggagatggtggaatcttccctgtttttatcccctcagggtcagttacatagaagctgcttcttgactagtatagctcggtgaccctttgttcaaccgctgaggtttgatttcttaccctttcttctccccattttcatactcttcccagggattagtgatggaggtgaggtctccctaatcatggtaaagtgttaaccttccacctcctcccttccaggctttctgtcatcatctccacagggcacccatc

SEQ ID NO: 145060 - DNA, 1860 bp, Homo sapiens
aatgttggcattgctcaaaaggaaggatttggcaaatcttgaggtgccacatgagttacccaccaaacaggatggcagtggtgtcaagggctatgaagaaaaacttaacgggaatctcaggcctcatggagacaacaggactgctggaaggccaggcaaagaaaacatcaatgatgagcctgtggatatgagtgctagacggagtgagccagagcgaggaaggctaactccctcaccagacatcattgttttgtctgacaatgaggcttccagtccccgttccagttccagaatggaagaaagactcaaagcagccaacttagagatgtttaaggggaaaggcattgaggagcggcagcagcttatcaagcagctgagggatgagctacgattggaagaagcccgactggtcctgttaaagaaactgagacagagtcagctacagaaagagaatgtggtccagaagactccagttgtacagaatgcagcatctattgttcagccatctcctgcccatgtgggacagcagggcctatctaagcttccctctcggcctggggcccaaggggttgaacctcaaaatttgagaacattacagggtcacagtgtcatccgttcagctaccaataccacccttccacacatgttgatgtctcaacgtgttattgcaccaaacccagcccagctacagggtcagcggggcccgcctaagcctggccttgtacgcaccacaacacccaacatgaatcccgccatcaattatcaaccgcagtcaagttcttctgttccatgtcagcgtacaacatcctctgccatctatatgaaccttgcttctcatatccagccagggacggtgaacagagtgtcctcgccacttcctagccccagcgccatgactgatgctgccaactcacaggctgcagccaaattggctcttcgcaaacagctggaaaagacactcctggagatcccaccccctaaacctcctgctcccttacttcatttcttgcctagtgcagccaatagcgagttcatctacatggtaggcttggaagaagtcgtacagagtgtcattgacagccaaggcaaaagctgtgcctcacttctgcgggttgaaccctttgtatgtgcccagtgccgcacagatttcacccctcactggaagcaagaaaagaatggtaagattctatgtgagcagtgtatgacctccaaccagaaaaaggctctaaaagctgaacacaccaaccggctgaaaaatgcatttgtgaaagccctacagcaggaacaggaaattgaacagcgattacagcagcaggcagccctctcccccactacggctccagctgtgtccagtgtcagtaaacaagagaccatcatgagacatcatacgcttcggcaggctccacagccccagagcagcctccagcgtggcatacccacatctgcccgctccatgctttcaaactttgcacaggcaccccagttgtctgtgccaggtggcctccttggtatgccaggtgtcaacattgcatacttgaatactggcatcggaggacacaaaggccccagtttggcagaccgacagcgtgaataccttttagacatgatccctccccggtctatatcgcagtccatcagtggacagaaataacgcctgttccacttgtactgccccatccttgaatcctttatccctttcctctttcattcccccaacttctgtcgcatgcagtgcctgtactggtgcctaccatacacggaaagcaaaacagaaaaacagaagacaaaaaatagagatcagcaagaaaacacacgccctgccctgcctaccaaactggggccttagtgtcctccggccta

SEQ ID NO: 145061 - DNA, 824 bp, Homo sapiens
  misc_feature (822)..(822): n is a, c, g, or t
aatgttggcattgctcaaaaggaaggatttggcaaatcttgaggtgccacatgagttacccaccaaacaggatggcagtggtgtcaagggctatgaagaaaaacttaacgggaatctcaggcctcatggagacaacaggactgctggaaggccaggcaaagaaaacatcaatgatgagcctgtggatatgagtgctagacggagtgagccagagcgaggaaggctaactccctcaccagacatcattgttttgtctgacaatgaggcttccagtccccgttccagttccagaatggaagaaagactcaaagcagccaacttagagatgtttaaggggaaaggcattgaggagcggcagcagcttatcaagcagctgagggatgagctacgattggaagaagcccgactggtcctgttaaagaaactgagacagagtcagctacagaaagagaatgtggtccagaagactccagttgtacagaatgcagcatctattgttcagccatctcctgcccatgtgggacagcagggcctatctaagcttccctctcggcctggggcccaaggggttgaacctcaaaatttgagaacattacagggtcacagtgtcatccgttcagctaccaataccacccttccacacatgttgatgtctcaacgtgttattgcaccaaacccagcccagctacagggtcagcggggcccgcctaagcctggccttgtacgcaccacaacacccaacatgaatcccgccatcaattatcaaccgcagtcaagttcttctgttacatggtcagcggtacaacagtccgaagcaggtgnac

SEQ ID NO: 145062 - DNA, 643 bp, Homo sapiens
gaatttttaatatacttgatattaaccatcctttgaaaactattaaccatcctttgaaaacaaatatcttggccaggtgcagtggctcacgcctgtaatcctaacactttggtagtccaaagcaagaggatcgcttgagctcaggagttcagaaccagcctaggcaacatagtgagaccttgtctctaccaaaaatacaaaaattagctgggcatggtgatgtgtgcctgtagtccagctactctggtgtctgaggtgggaggatcacttgagcctaggaggttgatgctgcggtgagctaagattgcatcactgctctctagcctgggcggcaagcaagaccttgtcttaaaacaaaaaaccaaaaatcttgccatatggaaagcatctgatttgcaaaatcagtgcctgcatttcagtttggggcctgtgagtaaaatagttgcttctgctgggcgtggtggctcatgcctgtaatcccagcacttttcggggctgaggcaggtggatcacttcaggtcaggagttcgagaccagcctggctaacatggtaaaaccccatctcccaggttcaatcaattttcctgcctcagcctcctgagtagttgggattacagatgcccgccaccacgcccaactaatt

SEQ ID NO: 145063 - DNA, 411 bp, Homo sapiens
tagatattccaacattgcaggagagttatttcaacttcttttttttgtctcatctaaaaagtgtggatttaatatagcaaagttgcttctagaatggaatcttttagagtgtatatgcgcttttgaaaaaaatggtttatgattttgttatgtaatactgttatataagttattttagaaattgcatgatttattataatatcagcagtgaatttaaacattacacaaatgcctgaatataaagaaataggatcacctgtgtccaagttaattgccttcttttgctgtattcattagccatcaatacctacataatctaaggccaagatacatatggagcaatctatggacaggcaatagcatcccatgggagctttggaattcaggagctcgagcctcaccccagatgta

SEQ ID NO: 145064 - DNA, 200 bp, Homo sapiens
agggtcctggcgacaaggcctctaaaaggggaagcaagaccagcacataagccagcacagagaattgctaagacatgaagcagtccgctgggaacagtggcataagcgaagcatttggcaacgcacgctcgaaccgcagccatccaacactcgggccagtacctgggagtttaggttatagtcctgcaccagctttctac

SEQ ID NO: 145065 - DNA, 561 bp, Homo sapiens
agcctaagcaacatagggaaacccctgtgatatagtttggatctgtgtccccacccaaatctcatgttgaactgtaatccccagtgtggtaggtggggtctggagggaggtgactggattaggagggtggatttctcatgaatggtttagtactatctccttggtactcctcatgatagcaggtgagctctcgcaagatctggttgtttaaaagtgtgtggtatctcccccctcactctcttgttcctgctttcactatgtgacatgcctgctcccccttcacaatctgccaataaattgtggcaggttatgagtgtgtgtaatttatgagtgctgataggatgaaagatagaaaatgattttagatagaaagaaaataattctggaagctttgagtcttcctcttgtaatctatgttggttcttttttaatataccctgtttcagcacttactgacttggagtctctctcacaatgactaaatgtaatatgagattctaggatgtatactagaacagaaaatggaaactaaataaaaactgaggaattctgaaaaagtat

SEQ ID NO: 145066 - DNA, 580 bp, Homo sapiens
ggctatagtagcgggcatggtggctcaagcctgtaatcccagcactttgggaggccgagacgggcagatcacgaggtcaggagatcgagaccatcctggctaacatggttaaaccccgtctctactaaaaatacaaaaaattagccgggcgtggtggcgggcacctgtagtcttagctacttgttgactcctggctttccacctgctaaccacatccctgccatcagggcaggctgatgtttcctggtcagtacaacagggctgcagaaatctattttgcagagttgccgggaggatcaaatgaagttatgtgtgtgaaagcatcttgtaaactgtaaacactagacatggtatacattagtttttggtgttacccagtaggtcatttctctctctcaaacatttattctctatcatgtgtccgggtgtttatccaaaagtaaacactgatcatggcatcatgattttgttttgttttattttgagacggagtctcgctctgttgcccaggttggagtgcagtggcgcaatctctgctcactgcaacctccgcctcccgggttcaagcaattctcctgcc

SEQ ID NO: 145067 - DNA, 356 bp, Homo sapiens
tgaccacctgggcacatgtcatcagttcctcctgaggctgtgtcacgagtgcgtgtccccaacttggcaaaatcaactttctaatttaactgagacctgcctcaaattttcagggttcacagtgggaatgtaaatgagtacaaccactatggagaacagtttggaggttcctcaaaaaactaatagagctaccatacaatccagcaatcccactgctgggtatatacccaaataaaggaaatcagcccatcgcagcgatatctgcactcccgtgtttgttgcggctctgttcacaacaaccaagatttggaagcaacctaagtgtccataacagacgaatggataaagaaaatgcg

SEQ ID NO: 145068 - DNA, 691 bp, Homo sapiens
ctctttagaaaactgaggctcagaggattaagtgacttggccaattacatgtctaataaatagcagaatactgcccaaggtaatttatagattcagtgccatccctgtcaagctaccaatgactttcttcacagaattggaaaaaactactttaaagttcatatggaaccaaaaaagagtgcacattgccaagtcaatcctaagccaaaagaacaaagctggaggcatcacactacctgacttcaaactatactacaaggctacagtcaccaaaacagcatggtactgataccaaaacagagatatagaccaatggaacagaacagagccctcagaaataatgccgcatatctacaaccatctgatctttgacaaacctgacaaaaacaagaaatggggaaaggattccctatttaataaatggtgctgggaaaactggctagccatatgcagaaagctgaaactggatcccttccttacaccttatacaaaaattaattcaagatggattaaagacttaaatgttagacctaaaaccataaaaaccctagaagaaaacctaggcaacaccattcaggacataggcatgggcaaggacttcatgtctaaaacaccaaaagcaatggcaacaaaagccaaaattgataaatgggatctaatgaaactaaagagcttctgcacagcaaaagaa

SEQ ID NO: 145069 - DNA, 752 bp, Homo sapiens
tttatggaggagtgatcttttaaaagattcccacagacaagtgtcctcctagttctgtaagattgttcagttagaaatgattccctttccagggagtatttagcctgctgcaaaagaatagcaagctactaggtgtaaaacaaatcacacagaagcattttcttttttcatcttacaggtttatttagacgagtaagatcttgttatattttaaatggcacttaaccacctatcactctccagtgctttctctcatgcttagaataaaatccagacttttaccatgacctgtggcccacatctggctctgcctgctttctgattccctcatgagactctgttctctcataaattgtggttccacttggcttctttctattcttatacatcaagatccctcctacctcctttgtgcttattgatcctaaagctcttgcctcagatcttcagcacttggctcaaatatatcctctagtaagggtcctttccttaccaagcaacctagagtagtcaccctgacatagttttttgtgttttgtgatcaagggctagaaaaagacaaatagccggtattcctgccacacacatgtagattgtttttaaactccaaaagtaaaaagcacatactttttgtgtttttttggacctaacagttctattttgttgtccttttgtataaatgttgttacattaattagcagaaattgtcttgctttgtcattgttggtttgctccctggaccatagactctg
